United States Patent Application Publication US 2005/0196754 A1 - sequence listing, part 13

SEQ ID NO: 25202 - DNA, 1836 bp, Homo sapiens
  SIMILAR (852)..(82): 771254mologous to Escherichia coli OUTER MEMBRANE USHER PROTEIN PAPC PRECURSOR,accession number D90864,Smith-Waterman Score =1006.
ttaatgttcgagatacaaaaaatgctgcttattaaatgctgttacatccctgtatagatgtggtattatatatacgggtgctgtcacctgttgcgtctgctcctgaatgacaggctttatgtcatcaggaacaaccggcgcgacgttgcctttatgctggcatggcagtaacaagccgttaaacagatcggcaggcagcgggtccggcaggttgatatcgcagtgcgcaacacaaatccagaacacattcatatgttcgacaggtttcaccccagccagatagacactaccgtcatcatcgacaaggcccactgtctgctcgttatcattttttacttctgcgccaaacggtggatggctgccatcttgtaaacgcagcaccgccatcgctttttgaccactgatgacggcaaatttgcggtagccaatggctccttcagttagcgtggcttgcaccaccgactgggttgcttcggcgttttccggcaatttgttgaggtcgatatacgcctgattgcgataataattgttaacgtcagaaacgacggctttaccaaacatattggtataaacagcagccccgttaccttccaccggaacatcggcaacgccatcggcatcaatcagcaggcgtgtcccgcccatattctgggtacggtgaagtgcgccccctttcacaataccaacccgaatggcagtgctgggaacctgatgtcgaatgggtacgtcaacctccccaagatgcgataaccgaccctgactttttctgcttttaccagccaggcatgaccttcgaacaatttgtacgtgagtttgccgaatggttttcacaaaaacgtccggcggcgatgatgatcggcatccgtgcggatgagtcctacaaccgttttgtcgccatcgccagtttaaataaacaacgttttgccgacgataaaccctggacaggcggtcatagctggtacatttaccccatttacgactggaaagtggctgatatctggacctggtatgcaaatcatcaaagtctctgcaacccactgtataacctaatgtatcaggcaggcgttcctctgcgtcatatgcgaatttgcgaaccttttggcccggagcaacgacaaggattatgcgctctatcacgttatcgaaccggatcgctgggctgctatgtgcgcacgagctcagcgcgctacacaactggcggcctttaccccggacaagcacggggggcggcggtttaaacggaggctctgaaaccttcggggctccctcaggtttgcgctctgaatcagtgtctgctctctgtgcatcgatatgctggccatgtccgccaagaaagatgcgatggtgccgatgggcggcctgctgtgcatgaaagacgacagcttctttgatgtgtacaccgagtgcagaaccctttgcgtggtgcaggaaggcttcccgacatatggcggcctggaaggaagcgcgatggattttctggcggtaggtctgtatgacggcatgaatctcgactggctggcttatctctacgcgcaggtacagtatctggtcgatggtctggaagagattggcgttgtctgccagcaggcgggcggtcacgccgcattcgttgatgccggtaaactgttgccgcatatcccggcagaccagttcccggcacaggcgctggcctgcgagctgtataaagtcgccggtatccgtgcggtagaaattggctctttcctgctggggaatggcaaatatcacagcgactggatctctaacgccaacaaagtccgggtgatttactggcaaatgaccggcgataaagccgccgctgccaactggttgcgtcat

SEQ ID NO: 25203 - DNA, 1557 bp, Homo sapiens
  SIMILAR (1107)..(565): 911254mologous to Cloning vector pZC320 SopA,accession number U26464,Smith-Waterman Score=867.
tcagaccaggtaggagctttcctgtttcatatgtttcagggttgcacagttggtctctttaatgtcggtgtggagatccaaagtgggttgtggaaagagcgtccataggagaagtgagaatactttcacatggataatggttccattgctcttctcattgtctaggtaagtaggaggatacataacttcaattttgcagaagtaaatatccctgtcctgctgatacagcgccagcaaatcgctatattggctaacggtagttaacgttgttgcgacctgcgcacgaacacccggatcttcaatgcgtatttgccgacgttgcagaattttcaccgcattattgagctgcttttccagcgttggtgcatttttctggatctgctccagccccagattcatcaccatttgctgcacccgcagagcgctaaggcgcagttcattcatctggttaacatactcaagatcgatatcaatcagccgatcgagtgcactttcagcagcctgacgctgatcttgttcgatcaaatcgtaaatcccggcctgggtcgctccagcggaagttgtcgcattattcgcctgaccttgcgccaggcgtgcgatctcatcggcgggggatcctcctttaagatcaacgttcttgagcagatcacgaagcatatcgaaaaactgcagtgcggaggtgtagtcaaacaactcagcaggcgtgggaacaatcagcacatcagcagcacatacgacattaatcgtgccgatacccaggttaggcgcgctgtcaataactatgacatcatagtcatgagcaacagtttcaatggccagtcggagcatcaggtgtggatcggtgggcagtttaccttcatcaaatttgcccattaactcagtttcaatacggtgcagagccagacaggaaggaataatgtcaagccccggccagcaagtgggctttattgcataagtgacatcgtccttttccccaagatagaaaggcaggagagtgtcttctgcatgaatatgaagatctggtacccatccgtgatacattgaggctgttccctgggggtcgttaccttccacgagcaaaacacgtagccccttcagagccagatcccctactgggggttttttttgattaataagggatttgccgatttcggaaccacccccaaacaggatttcgccttccacgagcaaaacacgtagccccttcagagccagatcctgagcaagatgaacagaaactgaggttttgtaaacgccacctttatgggcagcaaccccgatcaccggtggaaatacgtcttcagcacgtcgcaatcgcgtaccaaacacatcacgcatatgattaatttgttcaattgtataaccaacacgttgctcaacccgtcctcgaatttccatatccgggtgcggtagtcgccctgctttctcggcatctctgatagcctgagaagaaaccccaactaaatccgctgcttcacctattctccagcgccgggttattttcctcgcttccgggctgtcatcattaaactgtgcaatggcgatagccttcgtcat

SEQ ID NO: 25204 - DNA, 3024 bp, Homo sapiens
  SIMILAR (1083)..(4): 1001254mologous to Escherichia coli CG Site No. 18295,accession number U00039,Smith-Waterman Score=1771.
ttaatcctctcgggcaaaaagtgcctctataaagtcgtccgccttaaacggacgcaaatcctcaatacgttcgccgacaccaatgtagcggatagggataccaaactggtcagccaccgagaaaattaccccgcctttcgccgtgccgtccagtttcgttagcgtgatgccggttaagccaacggcttcatggaacagtttggcctggcttaccgcgttctgcccggtgctggcatcaatagtcagcataacttcatgcggcgcttcaacgtcgagtttcttcatcacgcggacgattttcttcaactcttccatcaggtgcgatttgttctgcaggcgtccggctgtatcggcaatcaggacgtcgatattacgcgctttagctgcctgaatggcgtcgaagataacagaggcggaatccgccccggtatgctgggcaatcaccggaatattgttgcgctgaccccagacctgaagctgttcaaccgcagctgcacggaaagtatcacccgccgccagcatcaccgatttaccctgctgctcaaactgacgcgccagcttaccaatcgtcgtggttttacccacaccgttgacgcccaccatcaggatcacaaacggcgctttgccttcaacattcagcggctcatcgactttcgccagaatctcgcccatctcttctttcagcaggccatagagcgcctcggcgtcacgaagctgcttgcgggatgcgccttccgtcagattggtgataattttacgtgtggtttccacacccacatcggcgatcaaaagctgctcttccagctcctcaaacagatcatcgtcgatttttttaccgcggaacaggctgataaatccggaaccgagattttctttggtttttaacaggctgcgtttcaggcgcgcgaaaaaaccttctttggtcggtttttcctgctcctgagcgatttcttccaccggctgctcttcttctgccggaggaaccaccatcaccgcctcttctgccgcttcggcagccagcgccgtttccagctcttcgtcggtaatttcttctttagccgcttcttcttccgccgcttcgacatcttggagttgtggtccgcgtttttctacgtcttttcccactccgttccctgcgaaccacatccgcaagctccttcctcgagcagtttgggctccttgatagcgttgagtggaggccctgccgcgacttggcagtagcttattttgttcactcctctctggccagacagctccgactgtattctcgtgctgctccagccagctggccatttcactgttggcgcgacggttagagagcacccatacggaagcgccagtcgcactgcggttcggtgcggcatcagcgtgaatcgacacgaggaaattggcgttttgcttacgtgccacatcactgcgccccatcaccgagataaagtaatccccgtcacgggttaaaacgcctttaaacatcggatcgtcattgagcaaagtacgcaatttacgcgcgatggcgatggtgacatttttctcccgcgtaccaccggggccgatagcgccagggtcctgaccgacgtgtccggcatcaatagcgatgataattttatcgccagtgttagccgtcgcgcgcgctgccggacgcgttaccgtattactgctgataacacccgtagtgcggttactttccgtattaaacggattgcgcgccggttcgctgacgcgcggtgcgacaaccgcaggcgtttcaacgcgtttcgcaaccacgggcggcggaggaggcggtggcggcacatcggcgttaatcgtaaagacgacagtgtaattgctgccattctgccgcttcaccgcttcggttttaccgttttcggtaagatcgaccaccagccgtagcgtttgtgcatctttaggcgttccagagcgaatcgccttcaccagattattgccgctgaacaacaacggcagttcctgaatcacgcccgtttgtttgatatcgagcgccacggtgcgtttgctttgatggctaaacgcataatcaggatcgccaataaaactcaacgttatccgcgcctgttgattaccgttagaaacctgaatatcagagagcgtcgcggcacccaccggcgtgcacagcagcagcagcgtcgctaccaaccaatttctgatgcgatacatcatcccgccacggccttgtgcctgataatcaatgtgtatttcgacatccgggtcaggaagaacacctgtaccttgttgtggccactccaccaggcagatggcatcgttggcaaaataatcgcggatccccataaactccagctcctcgggatcggcaaggcggtacaaatcaaagtgatagaccattaagttgtcgagcgtatagggttcgaccagcgtataagtggggcttttgacattacactgatgacccagagcccgtccgctcattaattgcagggtactttccagcagcgggcgcggttcaaagggctcatcgctgaccgaaacattcttgccacctgcttcgatagcggaataatcgagaatatcgttgaggatggtcagcaacgattcaccagagtcagtaattgcccgcaaatcatcacgctgggcgttaagtgcggggttatctgccagcagttgagcagtgccgagaataccgtacagcggtgtgcggatctcatggctcatcgccgccagaaacgccgattttgcctggctggctttttctgcttccgcccgtgcctgtcggtgttctatcaccagttcctgcaattcagctgtacgcgctttgacctgcgccgccagctgttcgcggtggcgattcagtgcatgaacattgctgcgaaacgcatccatcagccgcccgatggtatccagctcccgtacgccagcggtttccgggaaaggggagtcaatatcaccgtccagcagccgttgcagcgcctgcgtttgttcggcaagtggacgcgtgactgagcgataaaccacgcgccagaggatcagaatcagtgcgcaaagtgaaaccat

SEQ ID NO: 25205 - DNA, 2415 bp, Homo sapiens; identical to SEQ ID NO: 14967
  misc_feature (1)...(2415): n = a,t,c or g

SEQ ID NO: 25206 - DNA, 2913 bp, Homo sapiens
  SIMILAR (2532)..(1789): 1001254mologous to Escherichia coli lipase like enzyme,accession number D90259,Smith-Waterman Score=1326.
ttagtacaggaacatatttcggtcagtttgcatcagccggaagaggtgcaaaagctggtcgagcgtagccatgcggaagaagttatccgctggaatgcgcaaaccgtcgccgctcgcctgcgcgtgctggctgatgacattctttaccatcgcctgccaacgcgttttacgatggaaaagcaaattggcgcactggaaaaaatcgcccgccagcatccggataatccggttgggcaattctgctactggcatttcagccgcatcgcccgcgtgtggccgataaacagcggcgaatgccattacttccggcgctgaaaagttatctgtcactaaagtctccggcgctgccgcgccttcgtgcggctgcatctccggcgcatccatgatattggcatcgccagaactacccggttcgtcatactccagtcgctgctgacaacgctgaatggcgatttcacaagactgtaaatactcttgtgccagttcaggtggcaatgcccggtgttcccgcgccagcgtggtcatggcattaatatgctcaacaataaactggctgtgcgttacccacagtttcatatctgccagataatggctgttaaacgccggttcctgcatcgccacccgcgaaatcgacatactccttgccttgctgatcccagattcggctgccctgaccagcaatttacgtttttcttccggcagtaaattcaccgcctgctgataagacgcatccaccagataatagatttgcgaatctggcagcgaaccgtcgagatacacggtgctccagtgcgctttattcagatggcggcttggacgcacatcgctgtgctgctgacgtagcagctccgccagctccgggctggttttcagcgaaacagctgggcgattttctacttctttcaccatcgcaaacagtacatcttccactttgatctgcgtcgctttccagtcattatgcacgctctgttctgcgccgtacagcggtgtgcggatctcatggctcatcgccgccagaaacgccgattttgcctggctggctttttctgcttccgcccgtgcctgtcggtgttctatcaccagttcctgcaattcagctgtacgcgctttgacctgcgccgccagctgttcgcggtggcgattcagtgcatgaacattgcgtttgctgccgcactggtggattttgatctgccggatatcgacggcattacgcttgcccgacaactggcacagcaatatccgtcgctggttttgattggctttagcgcccatgtcattgacgaaacgctgcagtaggatctgagacttgtgtttctttttcccaggcacatcctcgaccttggcaaaataaacctcctgctctacttcttcgctatctacccgatcctgctggtttatagcgtggcaatcaccattaccggaattgccagccagagggtcatccacagaccgtttccggttgcagatgcagtgtccagagacagcgtttccagtgcagcgccgttccacaacatcacgggtatcgtcttcttcgagatacatcaacacatcgcagacgttgttaatcccgcgtccatcaatcatccactcatcgcgatctttgagggtgttaatggtgctacccaccaccatcgccactttacgggtgtggcaggcatcgacaaaagagagaatcgtctgctctatttccgctacatccccggcagaaaattgcagcgccctgatttcatcttcggttattgccgggtcccggctggtgtcatccataacatttcctgtctttacgccttcgcgagtgagatcattattaaacagacagtaatacggcgactcgcggtccgcgtcgttgcttaaatatgcctcttcgtacatctgcaaatcctgttgcgttaagccatcccagacaccgcccaacagacgacgagtcacggaatcccgtaatccgtaaagcccataccacagcaaaacgcccgcaactttaccgcaatcgatctgtttatcacgcaaccacaacgcactggcgagcgccagcatggcacctgcggaatcaccggcaaagccaatgcgggacatattgatttgataatcctccgcctgctggtggaaataacaacaagcagccacaatttcctctatcgcttgcggaaaacgcgcttcaggtgaaagggtgtaatcaataccaatcaccgtacattggctgtagcttgccagcaggcgcatgatgcgatcgtgggtatcgagattgccgagaataaaaccgcctccatgcaaataaaatagcgtcgctgggctatctggctgcggacaaaagagacgtgtttccacctgcccatattttgttggaaccatgtaagctctggttgccatttctggagcgcccgcattccagaatcggcgctcaagcgtgtaatactgtcgttgctcagcaatcgttcccgttgcgggccagggcggtaaatccggctgaagagtattcacaacggtcttcatttcagcagaaataaggtccagaacaggtagtttgttttccggcggaatcggcgtcgcatcgccatccaacaattcaaggcgcggcgcggcatcaaaatggttagcttcccgctcattctccaggcgaggcaggcgaaaattgacctggttgatgagctgggtattaaaactgaccaccagcggtggggagatatacagccgttcttcactattggaaagatgaatcgtcttctcaacgcgaaacactaactgatgcggtccattatccagttcaatgctgtccgcaccgcgcagcagagagctggaaaccttcttgccgtcgagtaccagaagatcgacatcggttgaaagccgcagcgtggtggcaaaaacggataccggcaaacataatgcaatcaaggtggtcacgatgccggttttcat

SEQ ID NO: 25207 - DNA, 3294 bp, Homo sapiens; identical to SEQ ID NO: 9186
  SIMILAR (862)..(1644): 921254mologous to Escherichia coli o588,accession number L10328,Smith-Waterman Score=1246.

SEQ ID NO: 25208 - DNA, 1134 bp, Homo sapiens
  SIMILAR (600)..(52): 991254mologous to Escherichia coli K12 putative tRNA synthetase,accession number AE000169,Smith-Waterman Score=926.
tcaacgaagcgcagcaagacttgcagagtaactgatcgtatgacacgtcttgtattcgaggaagaaatccagcagttcggcaacaatggttgaaacagggttaccaatcgcgcggaaacgctcggtgtcttcaacgtggatttgtgctttatgagtaacatccagaccggccatcaccaccgggatccctgactggaagacaatttctgccgcttccgggtcaacgtaaatattaaattcagccgcaggcgtccagttacccagccccatagcgccacccataatcacgatacgggcaattttgctatgcagttccggatggctattgagcagcaaggcaacgttagtttgcggtccggtagacacaatggtgacaggttccgcactttcacgcagcgttttcgccatcagctctaccgccgtacagttttgcggtgcgaatgtcggttccggtaatgccgggccgtcgagaccgctttcgccgtgcacattgtccgcgataatcaactcacgcattaacggttttaccgcgccgcctgctaccggaatatcggtgcgattaagcaaggtcagcatacgcagaacattgcgtaaggtccggaagcgttgttgaaactttgtgagcagcagggatttttgcgcttcattcagcttcgtgatgccgtcatccagtaccttaatgagaatgtctttctgggcggatgctttcttctcattgtactcatcaaatagcaaaatatacgctgcgagcaattgcgtcgcaacaccacaccattcatacactgtttgggttgcttcaaaatacttatcctggctatccataagtaaggttttaatatcgccgactaaaacggaggctgcctgtgaatactcctgtttaaagcgacttaactcttttatggtttcatcaaaggtcgtactggcgttcaatttgttgggcgatggtttacgcgatgcgctggatccgaaaattaaaggatctagctggacccagcggtagaggtagaagcctgttctaagggacccttgggtcctttgttccatggcctgtggtatgatatcatcaatgctctgagacccacacagcttggcagaggacacatcagtagtccaagaaggtgtcactgtgctcat

SEQ ID NO: 25209 - DNA, 2268 bp, Homo sapiens
atgacagtgataggttatgccttttactcgacttttgcactgactgaaaaggacaaattaatgttaaaaaagatacttttactggctctgcttcctgcaatcgccttcgcagaggaacttcctgctccagtaaaagcgattgaaaaacagggcattacaatcatcaaaacattcgatgcccccggaggaatgaaaggttatctcggaaagtatcaggatatgggcgtcaccatctacctgactccagatggtaagcacgctatctctggttacatgtacaacgagaaaggtgaaaacctgagtaacacacttatcgaaaaagaaatttacgcaccagccggacgcgaaatgtggcaacggatggaacaatcccactggctcctcgacggtaaaaaagatgcgccggtcattgtctacgtcttcgccgatccgttctgcccatattgtaaacagttctggcagcaggcgcgcccgtgggtagattctggcaaagtgcaattaagaacattgttggttggggttatcaagccagaaagcccggcgacagcagcggcaattcttgcctccaaagatcccgcaaaaacctggcaacaatatgaagcctctggtggcaagcttaagctaaacgtgcctgcaaacgtaagtacagagcaaatgaaagtgttaagtgacaatgagaaactgatggacgatctgggggcaaatgtcacgccggctatctattacatgagaaaaggtatcgcgccgacgacaacagggttaaatctgcatcaccatcttgagaaaaatctcagaggccttgaacaaacaattaatatagtcaataagtccgaactaaagaaaaactttattatctacggccctcagctcatttcttgctctaataatagtatgctgatccgctgcctacggcaagattcctctgtcgagattgagtgccatgatatcctcatgtcagcagagaatgctgaagaactgttggttcaccgcaaagccgatctgacttatctcactgatcaccctgtaacgttcagagagcgtcttcagatgtctatttataaaattcctcttccgctcaatattctggaagctgcacgagagcgtattacctggacactcaacaccctaccccgcgtttgtgtctcattttctggcggcaaagactctggtttaatgctgcatctgacagccgaacttgcccgacaaatgggcaaaaaaatctgcgttttgtttatcgactgggaggcgcaattctcttgcaccattaactatgttcagtccctgcgcgagttgtacaccgatgtcatcgaagagttttactgggttgcgctcccgcttacgacgcaaaattccctttcacaataccaacccgaatggcagtgctgggaacctgatgtcgaatgggtacgtcaacctccccaagatgcgataaccgaccctgactttttctgcttttaccagccaggcatgaccttcgaacaatttgtacgtgagtttgccgaatggttttcacaaaaacgtccggcggcgatgatgatcggcatccgtgcggatgagtcctacaaccgttttgtcgccatcgccagtttaaataaacaacgttttgccgacgataaaccctggactacggccgcaccaggcggtcatagctggtacatttaccccatttacgattggaaagtggctgatatctggacctggtatgcaaatcatcaaagtctctgcaacccactgtataacctaatgtatcaggcaggcgttcctctgcgtcatatgcgaatttgcgaaccttttggcccggagcaacgacaaggattatggctctatcacgttatcgaaccggatcgctgggctgctatgtgcgcacgagtcagcggggtaaaaagtggcggcatttacgccggacatgacaatcatttctatgggcatcggaaaatcctcaagccagaacatttagactggcaagaatatgcattattgctgctcaatagcatgccggaaaaaacagctgagcattaccgcaataaaatcgccatttatttgcactggtatcagaaaaaaggcatcgaggttccacaaacccagcaaggggacattggcgcgaaagatatcccctcctggcggcggatatgcaaagttttactcaataacgattactggtgtcgggcattatcatttagccccacaaaatcgaagaactatcagcgttataacgaacggataaaaggaaaacgtcaggaatgggggatactatgcaacaacgattaa

SEQ ID NO: 25210 - DNA, 798 bp, Homo sapiens
  SIMILAR (276)..(317): 921254mologous to Escherichia coli Sensor protein torS (EC 2.7.3.-),accession number D90736,Smith-Waterman Score=64.
atggctatattcaatcaggcagacagcgatacctgcggcttccgcgctcatttccgcaccattgccattcatgccgttgagcaaatgccatttatcgtcaccgtcagcatcaggagccataaacgctccgccattgctgagcgtgtaaaaggaccagatacccccgcagtactcatcacagaagcggtccatccaggcgaaaatgcgcggttccagcgttatccactgcgggatggtgccaaagtgctgcggccagaagcggatatgctgttcatcggattaatgcgttgctgcaagcgttacgggaacaagggttttgataccaccgctattgaacaacaggagcaggagatctcccgttcgttacgtcagcaaggggaactggtggggcagcgtttgcaactgcgccagcaacaacagcaactcagtcagcagatagtcgctgccgccgatgagatcgcacgcctggcgcaaggtcaggcgaataatgcgacaacttccgctggagcgacccaggccgggatttacgatttgatcgaacaagatcagcgtcaggctgctgaaagtgcactcgatcggctgattgatatcgatcttgagtatgttaaccagatgaatgaactgcgccttagcgctctgcgggtgcagcaaatggtgatgaatctggggctggagcagatccagaaaaatgcaccaacgctggaaaagcagctcaataatgcggtgaaaattctgcaacgtcggcaaatacgcattgaagatccgggtgttcgtcgcaacaacgttaactaccgttag

SEQ ID NO: 25211 - DNA, 723 bp, Homo sapiens; identical to SEQ ID NO: 14979
  SIMILAR (509)..(691): 811254mologous to Escherichia coli K12 putative transport,accession number AE000412,Smith-Waterman Score=268.

SEQ ID NO: 25212 - DNA, 3111 bp, Homo sapiens
atggatagccaggataagtattttgaagcaacccaaacagtgtatgaatggtgtggtgttgcgacgcaattgctcgcagcgtatattttgctatttgatgagtacaatgagaagaaagcatccgcccagaaagacattctcattaaggtactggatgacggcatcacgaagctgaatgaagcgcaaaaatccctgctggtaagctcacaaagtttcaacaacgcttccgggaaactgctggcgttagatagccagttaaccaatgatttttcagaaaaaagcagctatttccagtcacaggtagataaaatcaggaaggaagcatatgccggtgccgcagccggtgtcgtcgccggtccatttggattaatcatttcctattctattgctgcgggcgtagttgaaggaaaactgattccagaattgaagaacaagttaaaatctgtgcagaatttctttaccaccctgtctaacacggttaaacaagcgaataaagatatcgatgccgccaaattgaaattaaccaccgaaatagccgccatcggtgagataaaaacggaaactgaaacaaccagattctacgttgattatgatgatttaatgctttctttgctaaaagaagcggccaaaaaaatgattaacacctgtaatgagtatcagaaaagacacggtaaaaagacactctttgagacttatctcactgatcaccctgtaacgttcagagagcgtcttcagatgtctatttataaaattcctcttccgctcaatattctggaagctgcacgagagcgtattacctggacactcaacaccctaccccgcgtttgtgtctcattttctggcggcaaagactctggtttaatgctgcatctgacagccgaacttgcccgacaaatgggcaaaaaaatctgcgttttgtttatcgactgggaggcgcaattctcttgcaccattaactatgttcagtccctgcgcgagttgtacaccgatgtcatcgaagagttttactgggttgcgctcccgcttacgacgcaaaattccctttcacaataccaacccgaatggcagtgctgggaacctgatgtcgaatgggtacgtcaacctccccaagatgcgataaccgaccctgactttttctgcttttaccagccaggcatgaccttcggaacaaatttgtacgtgagttttgcccgaatgggttttcacaaaaaacggtccggcggcgaatgatgatcggcatccgtgcggatgaagtcctacaaccggttttgtcgccatcgccagtttaaataaacaaacggttttgccgacgataaaccctggactacggccgcaccaggcggtcatagctggtacatttaccccatttacgactggaaagtggctgatatctggacctggtatgcaaatcatcaaagtctctgcaacccactgtataacctaatgtatcaggcaggcgttcctctgcgtcatatgcgaatttgcgaaccttttggcccggagcaacgacaaggattatggctctatcacgttatcgaaccggatcgctgggctgctatgtgcgcacgagtcagcggggtaaaaagtggcggcatttacgccggacatgacaatcatttctatgggcatcggaaaatcctcaagccagaacatttagactggcaagaatatgcattattgctgctcaatagcatgccggaaaaaacagctgagcattaccgcaataaaatcgccatttatttgcactggtatcagaaaaaaggcatcgaggttccacaaacccagcaaggggacattggcgcgaaagatatcccctcctggcggcggatatgcaaagttttactcaataacgattactggaatgtaccaatcgacatggtgatgccgctgaccaccccgagaatgaacatcgccgccgagaacagcgccaggctgtggctgaacatcaaaccggcaaccgccagcaccatcaggagaaagccaaaacgtaactgcgttttcaacgggacgatttccatcagccaggcgttgaggaagatagagattaaaatgccggcgttgaggaaggtgaagcaatggcagcgaagggggactgcacgtattgttgacaactcagctgcgctctgcagggtgcagcaaatggtgatgaatctggggctggagcagatccagaaaaatgcaccaacgctggaaaagcagctcaataatgcggtgaaaattctgcaacgtcggcaaatacgcattgaagatccgggtgttcgtgcgcaggtcgcaacaacgttaactaccgttagccaatatagcgatttgctggcgctgtatcagcaggacagtgaaatcagcaatcacctacaaactctcgcacaaaataacatcgcccagttcgcgcagtttagtagcgaagtcagtcagctggtcgacaccattgagctgcgtaatcagcacggactggcgcatctggaaaaagcgagtgcacgcgggcaatacagcctgttattgctggggatggtttcactttgcgcactgattctgatcctctggcgcgtggtttatcgctcagtcacgcgtccacttgccgaacaaacgcaggcgctgcaacggctgctggacggtgatattgactcccctttcccggaaaccgctggcctggcggcgcaggtcaaagcgcgtacagctgaattgcaggaactggtgatagaacaccgacaggcacgggcggaagcagaaaaagccagccaggcaaaatcggcgtttctggcggcgatgagccatgagatccgcacaccgctgtacggtattctcggcactgctcaactgctggcagataaccccgcacttaacgcccagcgtgatgatttgcgggcaattactgactctggtgaatcgttgctgaccatcctcaacgatattctcgattattccgctatcgaagcaggtggcaagaatgtttcggtcagcgatgagccctttgaaccgcgcccgctgctggaaagtaccctgcaattaatgagcggacgggtgaaaggtcgcccgattcgcctggcaacggcaattgccgatgatatgccgtgcgcgttaatgggcgatcacgacgtattcgtcaggttataa

SEQ ID NO: 25213 - DNA, 491 bp, Homo sapiens
  SIMILAR (292)..(227): 901254mologous to Homo sapiens nasopharyngeal carcinoma susceptibility protein LZ16,accession number AF121775,Smith- Waterman Score=105.
cgtcatctgcatgagaagggccacctgctggcgctcggagagggggtagccggctcggattccagacagccccatgccaaacagcagcccggccttccgggtgacaggctccttcttaatcctcttccgctcagggccctgcttctctgtgtccgagtccttctgctccccattggcgcccgcggtgaagggcagcttccgcttgctggctcgctccctcacctcccttcccgccatcgccacgctccagttttggggtcttggttagagaaactttatctttatccgattccatagctgaaagtcagtgctgacgaggactgtcttttaaatccaatggaggtgtgtcccagagcagggctgtatatattatgtctgcatcagctctgcgttgttcaccgacaaatcccgtgtctggaagagtcctggcaggctgcacgggcgtgctccgagggctgcgcggctccgcgacggctcagcggcggggcgcg

SEQ ID NO: 25214 - DNA, 274 bp, Homo sapiens
  SIMILAR (274)..(101): 1001254mologous to Escherichia coli f138,accession number M87049,Smith-Waterman Score=289.
ctgtcggtgatacgttggcactaccgcgcgctggggcatttttgcgctgatcattgtcgaaacgctggcgtggtttaccgtcgttgccagcctgtttgcccagcataaacaacgagccgaaaatcttattcagcgccttcatctgctttggtcctttaatccatagagcaatccgttgagcaagggtggcgtaaccgatcatcacaataatatcgaccacaatagtggtgacgccgagcacgatatactgcatcagttgcggctgttgcggcat

SEQ ID NO: 25215 - DNA, 990 bp, Homo sapiens
  SIMILAR (1)..(498): 891254mologous to Salmonella typhimurium LT2 91 1040187392dentity with E. coli threonine efflux protein (RHTC-also known as yikJ) (SP:P28746),accession number AF233324,Smith-Waterman Score=775.
atggtgcacattgtggcgcttatgagccccggtcccgatttcttttttgtctctcagaccgctgtcagtcgttcccgtaaagaagcgatgatgggcgtgctgggcattacctgcggcgtaatggtttgggctgggattgcgctgcttggcctgcatttgattatcgaaaaaatggcctggctgcatacgctgattatggtgggcggtggcctgtatctctgctggatgggttaccagatgctacgtggtgcactgaaaaaagaggcggtttctgcacctgcgccacaggtcgagctggcgaaaagtgggcgcagtttcctgaaaggtttactgaccaatctcgctaatccgaaagcgattatctactttggctcggtgttctcattgtttgtcggtgataacgttggcactaccgcgcgctggggcatttttgcgctgatcattgtcgaaacgctggcgtggtttaccgtcgttgccagcctgtttgcctgccgcaaatgcgccgtggtatcaacgtctggcgaagtgattgatgtttgccgggcgtattgcccgtgtgacacacacactgtcctacgttgtagtccacataaagaccttgttctcatccctaaccgtggacacacgcactgccgtaacttgatggtccacctactcggctctgatctcatcccattacgggcctcggtttcatcccccgtcaagccgggcacccagcccacggcagacaagttgacgcgcccaactacggcccgacgggtttctctaccccatacgggtgacaacacccacagtgcagcgaacttggaggacaccaatataggccgttgtgacttctaccccgtcccgggtgcacaacccacaggcagtatattcttggcttcacacttagagcccgtgggttttaccccggtactggtgcacaaccgcccggccctaccttttcgacgccactttcagcgcctggtgttcctctcctatcagcggtaa

SEQ ID NO: 25216 - DNA, 1884 bp, Homo sapiens
  SIMILAR (424)..(1176): 961254mologous to Escherichia coli Periplasmic oligopeptide- binding protein precursor,accession number D90771,Smith-Waterman Score=1245.
atgaataatccgggcatcatttcaacgtcgagtgcgcgaaaggctgttttgacgcggacgtttgggctatgctatgcggatctgaaaaaccacctcaacgctacatttgtagccgtattgaaaacaggaccactggctgccatgcaagagcaataccgcccggaagagatagaatccaaagtacagcttcattgggatgagaagcgcacatttgaagtaaccgaagacgagagcaaagagaagtattactgcctgtctatgcttccctatccttctggtcgactacacatgggccacgtacgtaactacaccatcggtgacgtgatcgcccgctaccagcgtatgctgggcaaaaacgtcctgcagccgatcggctgggacgcgtttggtctgcctgcggaaggcgcggcggtgaaaaacaacaccgctccggcaccgtggacgtacgacaacatcgcaaattttaacacgcaaaaaggtccgacgccagatcagcgcgttcgtctggcattaagtatgacgatagatcgccgcctgatgaccgaaaaagtattagggacgggcgaaaagccagcgtggcattttacaccagatgttaccgcgggatttacgccggaaccttcgccgtttgaacaaatgagtcaggaagaactgaatgcgcaggcaaaaactttgttgagcgcagctggttatggtccgcaaaaaccgctgaagctgacgcttttgtataacacttcagaaaaccatcaaaaaattgcgattgctgtagcatcgatgtggaaaaagaaccttggcgtagatgttaaattgcaaaatcaggaatggaaaacctatatcgatagccgtaacaccggcaattttgatgttatccgcgcctcgtgggtgggggattataatgaaccctccactttcctgacattattaacgtcaacgcattcaggaaatatttcacgctttaacaatccggcatatgacaaagttctggcccaggcatcgacggaaaataccgttaaagcgcgtaatgccgattacaacgcggcagaaaaaatcctcatggagcaagcaccgattgcaccaatttatcaatataccaatggacgattaatcaagccgtggctgaaaggttatcccattaataatcctgaagatgtggcgtacagtcggactatgtatattcgcgcagtttttgtgaatctcaccaatcccaaaagtattgtgtttctggcggcgctatttccgcaattcatcatgccgcaacagccgcaactgatgcagtatatcgtgctcggcgtcaccactattgtggtcgatattattgtgatgatcggttacgccacccttgctcaacggattgctctatggattaaaggaccaaagcagatgaaggcgctgaataagattttcggctcgttgtttatgctgcataacgcctttgcgtggttctatcttggcgcgtttctgttgacagtgattgcatggttcttgctgggaaatgcgcagaaaatgccgcaaaccacgctgcaatggggcattctggtgtttcttggcgtggtggcttccgggattggctactttatgtggaactacggcgcgacgcaggtggacgccggaacgctgggcattatgaataatatgcacgtttcggcagggctgctggtaaacctggctatctggcaccaacagccgcactggccaacgtttattacaggcgcgctggtgatcctggcctcactgtgggtgcatccgaataaacgcttccgtaactggctgacgctgctcgccatcgcgcacggcggcgtacagtcggctccacaagccttcgcccagggttttggtcaccaccagaccctggcgctcaaaactctctactacccgatgcggtag

SEQ ID NO: 25217 - DNA, 3726 bp, Homo sapiens
  SIMILAR (76)..(708): 971254mologous to Escherichia coli K12 putative protein transport,accession number AE000378,Smith-Waterman Score=1012.
atggaagctgcgccgtttgatacgccggacgtcgaagagctactgcgggagtggctggatgacgatcagcgcggcacatattgctggagaatgctcgaacagcttggcgcaccaacggtattgccggaattactcaagagcgagaatggcctgattctggtgacgggggcgacggggagtggcaaatctaccacgctggcggcgatggttggctatctcaatcaacatgccgatgcgcatattctgacgctggaagatcctgttgaatatctctatgccagccagcgatgtttgatccagcagcgggaaattggtttgcactgtatgacgttcgcatcgggattgcgggccgcattgcgggaagatcctgatgtgattttgctcggagagctgcgtgacagcgagacaatccgtctggcactgacggcggcagaaaccgggcatttggtgctggcaacattacatacgcgtggtgccgcgcaggcagttgagcgactggtggattcatttccggcgcaggaaaaagaccccgtgcgtaatcaactggcaggtagtttacgggcagtgctgtcacaaaagctggaagtggataaacaggaaggacgcgtggcgctatttgaattgctgattaacacacccgcggtggggaatttgattcgcgaagggaaaaccgaccagttaccgcatgttattcaaaccgggcagcaggattgcgatttacctaaggcaataactgggaatgcagggtttgtgaaggttgccacacgctgtggacctttaagagttagggattcgttggccattaccggaccaacggagttttccatgccacgtcgtcgcgtcattggtcagcgtaaaattctgccggatccgaagttcggatcagaactgctggctaaatttgtaaatatcctgatggtagatggtaaaaaatctactgctgaatctatcgtatacagcgcgctggagaccctggctcagcgctctggtaaatctgaactggaagcattcgaagtagctctcgaaaacgtgcgcccgactgtagaagttaagtctcgccgcgttggtggttctacttatcaggtaccagttgaagtccgtccggttcgtcgtaatgctctggcaatgcgttggatcgttgaagctgctcgtaaacgcggtgataaatccatggctctgcgcctggcgaacgaactttctgatgctgcagaaaacaaaggtactgcagttaagaaacgtgaagacgttcaccgtatggccgaagccaacaaggcgttcgcacactaccgttgtgcgcacatcgacgccggtaaaaccactactaccgaacgtattctgttctacaccggtgtaaaccataaaatcggtgaagttcatgacggcgctgcaaccatggactggatggagcaggagcaggaacggtggtattaccatcacttccgttgcgactactgcattcgggtctggtatggcttgattaataacgccatgagcggactgaacgcggcccaggcggcgttaaatacggcaagtaataatatctccagctataacgttgccggatatacccgccaaaccactattatggcgcaggccaatagcacgttgggcgctggcggctgggttggcaatggtgtctacgtttctggtgtgcagcgtgagtatgatgcgtttattaccaaccagttacgtgcggcgcagacgcaaagtagcggtctgactgcccgctatgagcagatgtcgaaaatcgacaatatgctctccaccagtacctcttcgctggcaacacagatgcaggatttcttcaccagcctgcaaacgctggtgagtaacgcggaagacccggcagcgcgccaggcgctgattgggaaatcagaaggattggtgaatcagtttaaaaccaccgatcaatatctgcgcgaccaggacaaacgagtgataaatgagccggtacctaatgatccctgcgttattaatctcctacgtcatctcgtcgctattctatatggtggattcggcgcactcgcccacttcaacctgtttgtcgcccgtatcgccaccgccagtttcatggcctacgcgctggggcaaatcctcgacgtgcacgtttttaaccgcctgcgtcagagtcgccgctggtggctggcaccgacagcgtccacactgttcggtaacgtcagcgacacgctggcctttttcttcattgccttctggcgtagcccggatgcctttatggctgaacactggatggaaatcgcgctggtcgattactgtttcaaagtgttaatcagtatcgttttcttcctgccaatgaagaagtcaatgcgcaatctggttaaatatgtcggaattggcctgctggttatggggcttgcggcctgtgatgataaagacactaacgctacggcgcagggttcggtcgcggaaagtaacgctaccgggaatcccgtcaacctgcttgatggcaagttaagtttctcgctgccagcggatatgaccgaccagagcggtaagctgggaacgcaggccaataacatgcatgtctggtccgacgccaccgggcagaaagcagtcatcgtcatcatgggcgaagatccgaaagaaaactggcgatgtatacgtagccgcaactaccaagagtatcggcttcgcaggacattcggcgtcactaaacttaccggtgatactggcccgcagaccgtgttctgcgaacgaatagatttgcctgccaccaacaatcagatggtcagggacacggatatcaacgagctgaagcgcctgcaccagacgctgcgttatagtcttatctgcctggctgggagtagtgtcgccggagggggtggttatgcgccagtatcactgagggctattttccagctgctcaagcagatcattcaccagcgtggcgctactcaaaccggcaacggaaagggggagggagatgcttatgcctttactggcaaccgcttttgcggcctgctggaaaaattcgtggaatacccggcggtcaagagcatggctaagcgccggatcgctgaagctacgacgaaatatcttcatctctgcgtggaagaaccggcgatcaccgccggttttctgcgttttttagcgggggaagcccgcaaggccgacgcgctgtatattcttggcgatctgtttgaagcatggattggcgacgacgatcccaacccactccatcgcaagatggcggcggcgatcaaagcggtgtccgattccggcgttccctgttatttcattcatggcaaccgtgattttctgctcggcaaacgctttgcccgtgaaagtggcatgacgttattgccggaagaaaaggtgctcgaactttatggtcgccgggtgttgattatgcatggcgacacgctgtgcaccgatgacgcgggttatcaggcttttcgcgccaaggtccacaaaccctggctgcagacgctattcctcgccctgccgttgtttgtgcgcaaacgcattgccgcgcgaatgcgcgcgaacagcaaagaagccaacagcagtaaatcgctggcgatcatggacgttaaccaaaacgcggtggtcagtgcgatggaaaaacatcaggtgcaatggctgatccacgggcatacccatcgcccggcggtgcatgaacttatcggcattcagcaacctgcttttcgcgtggtactgggtgcctggctacggcacgtcaatggtgaagtcacggggatgacgtga

SEQ ID NO: 25218 - DNA, 963 bp, Homo sapiens
  SIMILAR (256)..(5): 391254mologous to Homo sapiens nasopharyngeal carcinoma susceptibility protein LZ16,accession number AF121775,Smith- Waterman Score=129.
ccccgttgttggcagcgtcgtacaaaggcgtgtcgtcatctaggcccttggtgttcacctccgcacctgcagccagcagctgcttcgcgacgtcgtagtagccccggttacaggcctcgtgcagcgccgtccagcctgcgaagtccttgccgttgacgtctgccccctcgctgatgagctctttgatgcgccgggcgtccccgcggatggcggctcggtgcaggcgggtctctccacgctcgtttctcttgttcactttatctttggtttttgaggcagagttgggcgttcccttctgacacactgtagactgggaggggtgctttggtgttgtgtccactgggctgttggcagactcctcggccgtcatctgcatgagaagggccacctgctggcgctcggagagggggtagccggctcggattccagacagccccatgccaaacagcagcccggctttccgggtgacaggctccttcttaatcctcttccgctcagggcccttgcttctctgtgtccgagtccttctgctccccattggcgcccgcggtgaagcgtgcagcttccgcttgctggctcgctccctcacctccttcccgccagtgccacgctccagttctggggtcttggttagagaaactttatctttatcctttttcccaggctggttctccaccatggtcgctgctgaggggaaagctcttccttgttggggggctttaagggcaccctacccttgggcatcgtcctgctcctcacccgatcttcatttacacggccggcgcttcatcatcaaccgtctgcgattccatagctgaaagtcagtgctgacgaggactgtcttttaaatccaatggaggtgtgtcccagagcagggctgtatatattcgtgctccgagggctgcgcggctccgcgacggctcagcggcggggcgcgggcgctgcccatgcagcccgcggccg

SEQ ID NO: 25219 - DNA, 2216 bp, Homo sapiens
  SIMILAR (1020)..(1130): 1001254mologous to Escherichia coli o128,accession number M87049,Smith-Waterman Score=213.
atgcctcagatgcttcaggcccagtccctgttgtggtgctgcaaggctgagaagcagggccctgagcggaagaggattaagaaggagcctgtcacccggaaggccgggctgctgtttggcatggggctgtctggaatccgagccggctaccccctctccgagcgccagcaggtggcccttctcatgcagatgacggccgaggagtctgccaacagcccaggtgagcccggcctgtggatggtcctggggtgtatgacgttcgcatcgggattgcgggccgcattgcgggaagatcctgatgtgattttgctcggagagctgcgtgacagcgagacaatccgtctggcactgacggcggcagaaaccgggcatttggtgctggcaacattacatacgcgtggtgccgcgcaggcagttgagcgactggtggattcatttccggcgcaggaaaaagaccccgtgcgtaatcaactggcaggtagtttacgggcagtgctgtcacaaaagctggaagtggataaacaggaaggacgcgtggcgctatttgaattgctgattaacacacccgcggtggggaatttgattcgcgaagggaaaacccaccagttaccgcatgttattcaaaccgggcagcagcccagggaacttcatcacatgacgcgtaaacaggccaccatcgcagtgcgtagcgggttaaatgacgacgaacagtatggttgcgttgtcccaccgatccatctttccagcacctataactttaccggatttaatgaaccgcgcgcgcatgattactcgcgtcgcggcaacccaacgcgcgatgtggttcagcgtgcgctggcagaactggaaggtggtgctggtgcagtacttactaataccggcatgtccgcgattcacctggtaacgaccgtctttttgaaacctggcgatctgctggttgcgccgcacgactgctacggcagtctggcgaaacgcggttgctatcgcgtgttgtacgtgattatggtgggcggtggcctgtatctctgctggatgggttaccagatgctacgtggtgcactgaaaaaagaggcggtttctgcacctgcgccacaggtcgagctggcgaaaagtgggcgcagtttcctgaaaggtttactgaccaatctcgctaatccgaaagcgattatctactttggctcggtgttctcattgtttgtcggtgataacgttggcactaccgcgcgctggggcatttttgcgctgatcattgtcgaaacgctggcgtggtttaccgtcgttgccagcctgtttgccctgccgcaaatgcgccgtggttatcaacgtctggcgaagtggattgatggttttgccggggcgttatttgccggatttggcattcatttgattatttcgcggtgatgccagacgcgtcttcagagtaagtcggataaggcgtttacgccgcatccgacattatttttcacgcatgcctcgccgatgctaacagcgctcccaccagcataaacaacgagccgaaaatcttattcagcgccttcatctgctttggtcctttaatccatagagcaatccgttgagcaagggtggcgtaaccgatcatcacaataatatcgaccacaatagtggtgacgccgagccacgatatactgcatcagttgcggctgttgcggcatgatgaattgcggaaatagcgccgccagaaacacaatactttttggaatggtgagagattcaaaaaaatgtgcgcctgtagaacaaatgtcgacgcgattgagtagaggccagcgatttaaggtcaattgcaccagcggcgcgccactgctggattcccagccaaatcaagtaagccgcgcctgcccacttcaacacttcaaacgcaatcactgagcgggaaaatagcgtccccaaccccacgccaaccagcacaatatgaatcgccagtccggtctgaagcccagcaatagacgccaccgcgccgcgataaccgtggttgagcgaggggggcatagtggtgattgggccagaaactggggaacgggctaaaaaaagatcaatgtcgcgggtgggcaaccccctttctaaggcatgatgaactccggggtgtctatttttgtgcacaataccttcttgtgcacgttgggtaggccgctaaaaaaacgatttacgggttagaggcaataccgatgtcaccgcaaaaactggaaaaaagaaaccgt

SEQ ID NO: 25220 - DNA, 1431 bp, Homo sapiens; identical to SEQ ID NO: 24727
  SIMILAR (25)..(675): 941254mologous to Escherichia coli biotin sulfoxide reductase,accession number U00039,Smith-Waterman Score=1118.

SEQ ID NO: 25221 - DNA, 1359 bp, Homo sapiens
  SIMILAR (762)..(4): 1001254mologous to Escherichia coli rhaS (AA 1-278),accession number X06058,Smith-Waterman Score=1346.
ttattgcagaaagccatcccgtccctggcgaatatcacgcggtgaccagttaaactctcggcgaaaaagcgtcgaaaagtggttactgtcgctgaatccacagcgataggcgatgtcagtaacgctggcctcgctgtggcgtagcagatgtcgggctttcatcagtcgcaggcggttcaggtatcgctgaggcgtcagtcccgtttgctgcttaagctgccgatgtagcgtacgcagtgaaagagaaaattgatccgccacggcatcccaattcacctcatcggcaaaatggtcctccagccaggccagaagcaagttgagacgtgatgcgctgttttccaggttctcctgcaaactgcttttacgcagcaagagcagtaattgcataaacaagatctcgcgactggcggtcgagggtaaatcattttccccttcctgctgttccatctgtgcaaccagctgtcgcacctgctgcaatacgctgtggttaacgcgccagtgagacggatactgcccatccagctcttgtggcagcaactgattcagcccggcgagaaactgaaatcgatccggcgagcgatacagcacattggtcagacacagattatcggtatgttcatacagatgccgatcatgatcgcgtacgaaacagaccgtgccaccggtgatggtatagggctgcccattaaacacatgaatacccgtgccatgttcgacaatcacaatttcatgaaaatcatgatgatgttcaggaaaatccgccccacccatggaaaattcagacaccaggccattgagttttttaaatgcataaccggctttatacattttggctgccagcgcgtagtcggaagaaactttatattccaggtcataacgccattttttcaagccggatacagggaaaaatatcgcctgatgactggcgggcaggctgtgataaatataccagcccggtttggcgctacgtttaattttatgcccgtcgccaaaatccagcagcgcatcgccggtgatcatcacgttatctttttgcatttttaacttacggacaaaatttgcggcattctgatgaaaaatatcgcccgaattgagaaacaacgcgaacttgccttgtgccatcgcaatgcctttgttcatggcgtcgtagataccgttatctggctcgctgacaaagcgtaggttaaagataccattgagattttccagatactcacgggtgccgtcgttggaaccgccatcgacaacaatccattcgaagctgatatcttccacctgcgccagatgcgccagcgaggcatgtgttttgactatcccttcgaggttacgaaacgcgacagtgattatgctaagcaacat

SEQ ID NO: 25222 - DNA, 1323 bp, Homo sapiens
  SIMILAR (1)..(606): 971254mologous to Cloning vector pZC320 SopA,accession number U26464,Smith-Waterman Score=1038.
atgacgaaggctatcgccattgcacagtttaatgatgacagcccggaagcgaggaaaataacccggcgctggagaataggtgaagcagcggatttagttggggtttcttctcaggctatcagagatgccgagaaagcagggcgactaccgcacccggatatggaaattcgaggacgggttgagcaacgtgttggttatacaattgaacaaattaatcatatgcgtgatgtgtttggtacgcgattgcgacgtgctgaagacgtatttccaccggtgatcggggttgctgcccataaaggtggcgtttacaaaacctcagtttctgttcatcttgctcaggatctggctctgaaggggctacgtgttttgctcgtggaaggtaacgacccccagggaacagcctcaatgtatcacggatgggtaccagatcttcatattcatgcagaagacactctcctgcctttctatcttggggaaaaggacgatgtcacttatgcaataaagcccacttgctggccggggcttgacattattccttcctgtctggctctgcaccgtattgaaactgagttaatgggcaaatttgatgaagctgaaaacgacccggattcgcgccgcattattgtttcagcgtggaacgtagccgaactggataaaatggcgctggcaccgtgccatgcattcttccagttctatgtgacagacggcaaactctcttgccagctttatcagcgctcctgtgacgtcttcctcggcctgccgttcaacattgccagctacgcgttattggtgcatatgatggcgcagcagtgcgatctggaagtgggtgattttgtctggaccggtggcgacacgcatctgtacagcaaccatatggatcaaactcatctgcaattaagccgcgaaccgcgtccgctgccgaagttgattatcaaacgtaaacccgaatccatcttcgactaccgtttcgaagactttgagattgaaggctacgatccgcatccgggcattaaagcgccggtgaacaagttaagtctcagaaagatgactcacccaagaggactcaaggataaacctgatacccatggcagtagaaagcctacacttacccactcagatgctcatcaatggaggagagacttatgcctggaggaacttggaaatcaaactcagctgcgcaactgttgggaagggcgatcggtgcgggcctcttcgctattacgccagctggcgaaagggggatgtgctgcaaggcgattaagttgggtaacgccagggttttcccagtcacgacgttgtaaaacgacggccagtgaattgtaa

SEQ ID NO: 25223 - DNA, 1254 bp, Homo sapiens
  SIMILAR (913)..(1251): 991254mologous to Escherichia coli thymidylate synthase,accession number J01710,Smith-Waterman Score=609.
atgttgcttagcataatcactgtcgcgtttcgtaacctcgaagggatagtcaaaacacatgcctcgctggcgcatctggcgcaggtggaagatatcagcttcgaatggattgttgtcgatggcggttccaacgacggcacccgtgagtatctggaaaatctcaatggtatctttaacctacgctttgtcagcgagccagataacggtatctacgacgccatgaacaaaggcattgcgatggcacaaggcaagttcgcgttgtttctcaattcgggcgatatttttcatcagaatgccgcaaattttgtccgtaagttaaaaatgcaaaaagataacgtgatgatcaccggcgatgcgctgctggattttggcgacgggcataaaattaaacgtagcgccaaccgggctggtttgttcctgattggttacggcgcgtttcgcatcattgttgagtttttccgccagcccgacgcgcagtttaccggtgcctgggtgcagtacatcagcatggggcaaattctttccatcccgatgattgtcgcgggaaccatgaaacagtatttagaactgatgcaaaaagtgctcgacgaaggcacacagaaaaacgaccgtaccggaaccggaacgctttccatttttggtcatcagatgcgttttaacctgcaagatggattcccgctggtgacaactaaacgttgccacctgcgttccatcatccatgaactgctgtggtttctgcagggcgacactaacattgcttatctacacgaaaacaatgtcaccatctgggacgaatgggccgatgaaaacggcgacctcgggccagtgtatgatcactacggtactgaaccagctgaaaaacgacccggattcgcgccgcattattgtttcagcgtggaacgtaggcgaacggataaaatggcgctggcaccgtgccatgcattcttccagttctatgtgccagacggcaaactctcttgccagctttatcagcgctcctgtgacgtcttcctcggcctgccgttcaacattgccagctacgcgttattggtgcatatgatggcgcagcagtgcgatctggaagtgggtgattttgtctggaccggtggcgacacgcatctgtacagcaaccatatggatcaaactcatctgcaattaagccgcgaaccgcgtccgctgccgaagttgattatcaaacgtaaacccgaatccatcttcgactaccgtttcgaagactttgagattgaaggctaa

SEQ ID NO: 25224 - DNA, 1328 bp, Homo sapiens
  SIMILAR (654)..(1325): 1001254mologous to Escherichia coli thymidylate synthase,accession number J01710,Smith-Waterman Score=1236.
gccacacttcgcgtagatcatatgtcatcacacaacgtacagataattacaacacatgcattcaaagccccccgcgtaagtcttacagcaatagcacgttttaccaccaattcacactttcacacccaattatatcaatatatacgtacacattatatcaacacgatccaacaatacgcgtacatattgtggggcgccatcccaaacggatggttatgcgcgagtatcaccgccgccgcgttgaagtgcagagcacgtttgaccacctcccggggatgcacctcggtgcggttaatcgtgccggtgaagagcgtttcatgggcaatcaactgattctggttgtccagatacaacacccggaactcttcccgctcaagcgcggccatatgcagtcgcagccattcacgtacggcgtgggtagaggtgaaggctacgccgggctcatgcaggtggcggtccagagccctgagcgcccgctgaatgagacgccggtcctgtggcgtcatctcgccgggctcgggggacatcaatgcgccgacattgctgagggtgtagaacgaccagataccgacgctgtagccctcacaaagcggtccatccaggcgaaatatccggaccaggagttgccaccgggggaatacgccaaagtctatggattcccgctggtgacaactaaacgttgccacctgcgttccatcatccatgaactgctgtggtttctgcagggcgacactaacattgcttatctacacgaaaacaatgtcaccatctgggacgaatgggccgatgaaaacggcgacctcgggccagtgtatggtaaacagtggcgcgcctggccaacgccagatggtcgtcatattgaccagatcactacggtactgaaccagctgaaaaacgacccggattcgcgccgcattattgtttcagcgtggaacgtaggcgaactggataaaatggcgctggcaccgtgccatgcattcttccagttctatgtggcagacggcaaactctcttgccagctttatcagcgctcctgtgacgtcttcctcggcctgccgttcaacattgccagctacgcgttattggtgcatatgatggcgcagcagtgcgatctggaagtgggtgattttgtctggaccggtggcgacacgcatctgtacagcaaccatatggatcaaactcatctgcaattaagccgcgaaccgcgtccgctgccgaagttgattatcaaacgtaaacccgaatccatcttcgactaccgtttcgaagactttgagattgaaggctacgatccgcatccgggcattaaagcgccggtggctatctaa

SEQ ID NO: 25225 - DNA, 2631 bp, Homo sapiens
  SIMILAR (1)..(732): 991254mologous to Escherichia coli K12 putative transport protein,accession number AE000394,Smith-Waterman Score=1249.
atggggttgattggttttgtgctgacggcgctgtggatcaagttgattcataacccgacagatcacccacgtatgtctgcggaagagctgaagtttatctctgaaaatggcgcggtggtcgatatggaccacaaaaagccgggcagtgcggcagcaagcggacccaaactgcattacatcaagcaattgctctctaaccgcatgatgctgggcgtatttttcggacaatattttatcaacaccatcacctggttcttcctcacctggttcccgatttatctggtgcaggaaaaaggcatgtcgattctgaaagtgggtctggtcgcctcgattccagcactgtgtggttttgcgggcggcgtgctgggaggtgtcttctcggattatctgatcaaacgcggtttatccctgaccctggcacgtaagctaccgattgtgctgggaatgttgctggcttccaccatcatcttatgtaactacaccaacaacaccacgctggtggtcatgctgatggcgctggctttctttggcaaaggatttggtgcgctgggctggccggtgatttctgacaccgcgccgaaagagattgttggcctctgcggcggcgtctttaacgtctttggcaatgttgcctccattgtcactccactggtgattggctacctggtaagtgaactgcactccttcaatgcagcactggttttcgtgggatgttcagcgctgatgacgatgtctgctaggtccgctactggccacgaatgcgttttctggtgtaacggcaaaccccgccgattggctatgcgtctgatctactggtgcgctgcggcgccaacgggtgatgttgttcagaagttaaccgggaagtgggcgttgatcgcgaattcccatcgtgctggacagccgacgcgcaacgtgaacgaagaggtcggccaacggctgctggaggagatggagtggtacgataactatctcaatatgggaaaaaccgaccgcagcgccaacccttcgccgggcaacaagaaaggcggtctggcaaacgtggtagagaaggcactcggctccattgctaaatcgggtaaaagcgcaattgttgaagtgctgtcgcccggtcaacgcccgactaaacgcggattaatttacgccgcgacgccagccagcgattttgtctgtggcacgcaacaggtggcttcgggtatcacagtgcaagtgtttacgaccggtcgtggtacgccgtacggcctgatggcggtacccgtcattaaaatggcaacccgcaccgagctggcgaaccgctggtttgatttaatggatattaatgcgggcaccatcgctaccggcgaagaaactattgaagaggctgtgggtcagcccactcttggcatcgacaccaatgtgggccttcatgccaaagtgccactgattgcctttcttgctctgatgcatctccggatcgcgttgctgctctttgttcttggtcgagctgggtgcctcaatgatggtggcatcgaccaaggtgccttgagtcatcatgacgcctgcttcggccagccagcgattgatggtcttgaacgattggcgggcccgttgatgctgctccagcagaatctgctccatgcgggacaagaaaatctctttaccggcggcttcaacagtgaaacagtacaggacgtcatgctgggagcggtggaacgccgcttcggcaacgatcttccgtcgtctccagtggagtggctgacggataatggttcatgctaccgggctaatgaaacacgccagttcgcccggatgttgggacttgaaccgaagaacacggcggtgcggagtccggagagtaacggaatagcagagagcttcgtgaaaacgataaagcgtgactacatcagtatcatgcccaaaccagacgggttaacggcagcaaagaaccttgcagaggcgttcgagcattataacgaatggcatccgcatagggcaaatccagatgccaacgtagtcatcgaagatgtgctgcgtgagagcgtcggtaagtcggtcgttaaccttattcacggcgtgcgtgatatggcggcgatccgccagctgaaagcgacgcacactgattctgtgtcctccgagcaggtcgattgcgttcgccggatgttattggcgatggtcgatgatttcctctgcgtagtcatcaaacaggcggagcgtattgctcatctgcgcgaagtaaaagatgcgccggaagatgaacgtgtactggcggcaaaagagtgtaccaacatctacgcaccgctggctaaccgtctcggaatcggacaactgaaatgggaactggaagattactgcttccgttacctccatccaaccgaatacaaacgaattgccaaactgctgcatgaacggcgtctcgaccgcgaacactacatcgaagagttcgttggtcatctgcgcgctgagatgaaagctgaaggcgttaaagcggaagtgtatggtcgtccgaaacacatctacagcatctggcgtaaaatgcagaaaaagaacctcgcctttgatgagctgtttgatgtgcgtgcggtacgtattgtcgccgagcgttacaggatgctatgccgcactgggatagtgccatcctatggcaccggcggatga

SEQ ID NO: 25226 - DNA, 3110 bp, Homo sapiens
  SIMILAR (2586)..(2699): 971254mologous to Escherichia coli K12 putative synthases,accession number AE000371,Smith-Waterman Score=177.
acattctttctccccgccggggaaattctgcccccccgattggaaccgcaaataaccttgcccgtcggtagcagacgcataatcagcattgcggtgactgatttacctgagccggaatctccacacctgcgttctggcttgggctgggcgtcattgtgctgttttatggtcatctgcaaattcttcccggcggcggaaggcttgattcttgctgctgtttgtgactctagaggatcccgttactggtgtaacggaaaccggcggtatggctatgcgtctgatctactggtgcgctgcggcgcaacggtgatgttttcagaagtaacggaagtgcgtgacgcgatccatctgctgacaccacgcgcagtgaacgaagaggtcggcaaacggctgctggaggagatggagtggtacgataactatctcaatatgggaaaaaccgaccgcagcgccaacccttcgccgggcaacaagaaaggcggtctaggcaaacgtggtagcagcaaggcactctggctaccattgcttcaaatccaggcacgcaaacaggtaggcttacgggtatacacagttgcatgtgtattacgaaccggtacgtggtacgaccgtaacggccctgattggcgtgtacccggtcaattaaatatgggcaacccggcacctgagactgggcgataccggctggcacaccccgccactccacacgatccacgcaccacccccgatcaccccagccacatcaaaccccacgcacccacaaaccaacaacccgacacactgacacccacacaccaccaccacaccgacacccgcgatcccagccccccccccccacgcacgcgcaccccccgccaatccacccacaccacaccgccgcacccaaccaccacaacccgccacaccgacatccaccccccaacacacaccaacccaccaccccccacccgcgtactcaccaggcaactccaccacacaaaccggatcatcccacaccgcactcacacaaccacgtgccgcagaaaccaccacaaccagatgaacacaacaacaccaccgccaccccacaccccccaaatcacacaccgccaccacaacacgacgctccgagaacagacccaaaaacacagacaacatatccacggaacccaacaccacaccacacgaaaaccacccacccccaccacccgacaatacaatacgtctatcgtcggtacaattggtggcggaaatggttgagcggaaggtgattgaagagtcgcttcaggcattgcaggaacgtaagccgcgattattccatggacgtatggctcgtaacggtgcggatgctgtcgggtcagattgtggaggtgcaatgtcagtatttatcagcgtccatggtatgcgtccacgtctggtgttgattggcgcggggcatgtcaaccgggcgatagcccagagtgcggcgctattaggatttgatattgccgttgctgatatttatcgcgaaagcctcaatcctgaactattcccaccatcaaccacgcttctccatgctgagtcgtttggtgcggcagtggaagcactggatattcgccctgataattttgtcctgattgccacgaataatcaggatcgtgaagccctcgacaaactcattgaacagcccattgcatggttggggttgctggcaagtcgtcgcaaggttcagcttttcctgcgtcaattgcgtgagaaaggcgtggctgaagaacatattgcccgtttacatgcgcccgtaggttacaacataggtgcggaaacgccgcaggagatcgccatcagagtgctggcagaaatattacaggtgaaaaataacgcgccgggtgggctgatgatgaaaccttctcatccttccggacaccagatggtggtgattcgcggtgcgggagatatcgccagtggtgtggcgctacgtctgtatcatgcgggttttaatgtgatcatgctggaagtggaaaaaccgacagtgattcgttgtaccgtggcgtttgcccaggccgtgttcgatggcgaaatgacggtcgaaggcgtcactgctcgcctggcaaccagctctgcggaagcgatgaaacttaccgaacgcggattcattcctgtgatggtagatcccgcctgttcattgcttgatgaactgaaaccgctttgcgtggtggacgctattctggcgaaacagaatttgggaacgcgggcagatatggcaccagtaacaatcgcgcttgggccgggctttactgctgggaaggattgtcatgcggtaattgaaacaaatcgcgggcactggctcggtcaggtgatttactctggttgtgcgcaggagaataccggtgttcctggcaatattatggggcataccacccgacgggtgatccgtgctcctgctgcaggcattatgcgatccaacgtgaaattaggcgatctggtgaaagagggcgatgtgattgcctggattggtgagcatgaaattaaagcaccgttgacggggatggtgcgtggcttgttgaacgacggcctggcagtggttggtggttttaaaattggtgatatcgatcctcgtggtgaaaccgctggattttcccagcgtttctgataaagcccgggcgattggcggcggcgtacttgaggcgttaatgatgttgatgcatcagggcgtgaaagcgacaaaagaagtgctggaagtggcttaaatgaaaatggccggatggtattacccacccggcctgagactgatgacaaacgccaaattgcctgatgcgctacgcttatcaggcctacaagtgcattgcaatctattgaatttgcgatgttttgtaggacggataaggcgctcgcgccgcatccggcatcaacaaagcgcacttacttgacaatctttggccggatggtattacccacccggcctttaaattactgacaaatcaccgttcctgttttgccttcaatcccttctttcgctttgctcaatacggtaatcagtgcttcacgacctgcgcgagagcaaccacccgaggcggatgcttacactttaggtataataaaaccttttgcaaaaggaccttcttcgataaagcgttcagcattacttaatgacaggc

SEQ ID NO: 25227 - DNA, 1264 bp, Homo sapiens
  SIMILAR (275)..(400): 691254mologous to Vibrio cholerae acyl-CoA thioesterase II,accession number AE004187,Smith-Waterman Score=147.
atgggaaactggcacttgagcccctgccctgcccctgctccaggacattcctgcctgtttctggtggggacctcccccagaatcctggctgtccctggtcacaccggctccaaagccataaataaagctgctttgttactggagagttatatgagtcaggcgctaaaaaatttactgacattgttaaatctggaaaaaattgaggaaggactctttcgcggccagagtgaagatttaggtttacgccaggtgtttgccggccaggttgggggtccagcctttgtatgctgcaaaagagcccgtccctgaagagcggctggtacattcgtttcacagctactttcttcgccctggcgatagtaagaagccgattatttatgatgtcgaaacgctgcgtgacgttgccccagtgcttgatgtcgcgggcgcaactccccctacaataagacatcagcgtgttactgcactggtggccccaaagaatggctcgcgggatgtccgttcatgcgctgggaagatgcctactgatggatccattcgggccgtactgttgccctttcaggtctccaccatcggaggcgtgacctatgagcgcgtcggaacaaaggatcagggtccccagtgcccacacgttcagcgcagcagtgccgtcagacctgggccagaggcagcccctggagataactcctatcctccgtacgaggacagaagcacttgtgggatgcaggccccagatgccagctattcggccaaccctgacctgtccttcacctggagtccctgcctctcagaagacgccctccacaccagccccctgtactgtacgactcccacatcaggtggtgaggccttcaagggcctggcctcggaccttgtcccacatgaagataaaatggtgctgcagaatggaaagtgcttcacaagcccccggcacacagaatgggctgtgcttcgagctggtcatgcacttgctcgtggcaggaaccttctagacttagcagctggcggcatggcatgggtatccatgtcacaagaatgcccagggcctggaaccatctgctccagggacctacaaggcactgagtgcctcaggatgattcaaattctgcctccgaaggatccagttaccaggggcagcacacactgcaatgcggggactaagagggagctggaggagttttccagccaggtcaccttaacagccctcatccagcccttgatgcaggtctcagcccagttccgtgctgcagatggggctccatga

SEQ ID NO: 25228 - DNA, 595 bp, Homo sapiens
  SIMILAR (574)..(218): 1001254mologous to Escherichia coli similar to ~start codon is not identified yet,accession number D90869,Smith-Waterman Score= 592.
  misc_feature (1)...(595): n = a,t,c or g
gaaaagaagaactaactcgttgtggagaataacaaaaatggtcatctggagcttacaggtggccattcgtgggacagtatccctgacagcctacaaaacgcaattgaagaacgcgaggcatcgtcttaacgaggcaccgaggcgtcgcattcttcagatggttcaacccttaagttagcgcttatgggataattccccggtttttttacgcctgttaatcagctaatggctgcgggcgaccaatcaaatacccttgcagatattgcaccccgagcttatgcaatagcgcctgctgctgttgcgtctcgacaaactccgcgaccacactcaatgacttcgctttcgccagatcggtaattgatctcacaatcatcgcatccagcgtgttcgtgacaatatctttcacaaagacgccatcaattttgatgatatcagcctgcaaacgctttaaccgttcgtagttggcatatccggtgccaaagtcatcaatcgcaatccggaaaccaaacttatgcagctgctcgatgttgtacatgctgctttctgcgttagaaaacgcctgctcctcggtgatcnccgggtaccgagctgaggt

SEQ ID NO: 25229 - DNA, 1395 bp, Homo sapiens
  SIMILAR (334)..(1392): 1001254mologous to Escherichia coli similar to ~start codon is not identified yet,accession number D90869,Smith-Waterman Score= 1814.
atgagggaaagtttggaacttcctagagacttgttaaattgttgtgaccaaaatgccaatagtgatatggacatgaagtccaggctaagggggtatcagatggaaataatgaacttattgggagctggagtaaaggactttgaacttgagagtgatgatttagtgtatctggtggaagaaatttctaagcagcaaagcattcacgatgtggcctggttgcttctagtagcctttgtttatatttgtgagcaaagaaatgacctgaaatcggaacttatatttacaagggaagcagagcataaaagtttggaaaatttggagcctgaccatgtgcccgaagaactggatacttcggcacgtaatgccggggctctaacccgccgccgcgaaattcgtgatgctgcaactctgctacgtctggggctggcttacggccccggggggatgtcattacgtgaagtcactgcatgggctcagctccatgacgttgcaacattatctgacgtggctctcctgaagcggctgcggaatgccgccgactggtttggcatacttgccgcacaaacacttgctgtacgcgccgcagttacgggttgtacaagcggaaagagattgcgtcttgtcgatggaacagcaatcagtgcgcccgggggcggcagcgctgaatggcgactacatatgggatatgatcctcatacctgtcagttcactgattttgagctaaccgacagcagagacgctgaacggctggaccgatttgcgcaaacggcagacgagatacgcattgctgaccggggattcggttcgcgtcccgaatgtatccgctcacttgcttttggagaagctgattatatcgtccgggttcactggcgaggattgcgctggttaactgcagaaggaatgcgctttgacatgatgggttttctgcgcgggctggattgcggtaagaacggtgaaaccactgtaatgataggcaattcaggtaataaaaaagccggagctccctttccggcacgtctcattgccgtatcacttcctcccgaaaaagcattaatcagtaaaacccgactgctcagcgagaatcgtcgaaaaggacgagtagttcaggcggaaacgctggaagcagcgggccatgtgctattgctaacatcattaccggaagatgaatattcagcagagcaagtggctgattgttaccgtctgcgatggcaaattgaactggcttttaagcggctcaaaagtttgctgcacctggatgctttgcgtgcaaaggaacctgaactcgcgaaagcgtggatatttgctaatctactcgccgcatttttaattgacgacataatccagccatcgctggatttcccccccagaagtgccggatccgaaaagaagaactaa

SEQ ID NO: 25230 - DNA, 983 bp, Homo sapiens
  SIMILAR (516)..(385): 651254mologous to Escherichia coli EXTRAGENIC SUPPRESSOR PROTEIN SUHB,accession number D90883,Smith-Waterman Score=131.
tcgtcacgcatgttcgccagcatggctttaacaacgcgcgggttaccagcaacgatgttaccggtcagcatgtagttatgaccaccggtgaagtcgctgacgatgccgcccgcttcacgaaccagcagctcgcctgcggcgaagtcccacgggcgcagaccgatttcaaagaaaccgtcaacacgacccgcagcgacgtaagccagatccagcgccgcagaaccggtacgacggaagtctgcacattcgttgaacagtttgccgacgatgttgatgtaggtagtggcgtactgttttgctttgaacgggaagccggtcgccagaatagtaccgtcgagatcgcgagcggtgctgccgcgcagtcggtagccgttcagctgtgccgccctgaccgcgagtgccggtgaacagttcgttacgcataggatcgtataccacagccaacttcggtcccggcctttgatacgaaccagccgtatagatacccgcgaagtgcggcagacgtttgataaagttgcatatgggatatgatcctcataccgacagcagagacgctgaacggctggaccgatttgcgcaaacggcagacgagatacgcattgctgaccggggattcggttcgcgtcccgaatgtatccgctcacttgctctgctgaatattcatcttccggtaatgatgttagcaatagcacatggcccgctgcttccagcgtttccgcctgaactactcgtccttttcgacgattctctgaacgtacaacgctgatgccatccgcatatttaaattcggcagcgttaattaactccctgacctcggcgttatcttcaatagtcagcattttttcagcattaatggcaaccagcgttccctgcttaagctgcccgtcagcaaacagataatcgagggcgtgctgcatatcacgccaaccaatcaactgtaagccacgcagcgtataggttggtgccgtggtgttgttattcat

SEQ ID NO: 25231 - DNA, 1575 bp, Homo sapiens; identical to SEQ ID NO: 19187
  SIMILAR (793)..(1572): 991254mologous to Escherichia coli similar to ~start codon is not identified yet,accession number D90869,Smith-Waterman Score= 1348.

SEQ ID NO: 25232 - DNA, 1341 bp, Homo sapiens
  SIMILAR (256)..(1338): 981254mologous to Escherichia coli similar to ~start codon is not identified yet,accession number D90869,Smith-Waterman Score= 1815.
atggcaggtggccggaaatttcccgacggtggcgatagaactacgttatgcggacttagtcagcccggtgtacttgccccacgttcccccgagaagcgccgtgccattaatcagagatacccgtcaaagaccggtcaactacctgcgagcatcacggacatgatgcgcaccgcgcggcatcatctctcagggaatggcatatcagtaccgaagggggcagagttggcccacccaagcaccgttttagagctgtttgcgatatcggccaagccgattcaccccgaagaactggatacttcggcacgtaatgccggggctctaacccgccgccgcgaaattcgtgatgctgcaactctgctacgtctggggctggcttacggccccggggggatgtcattacgtgaagtcactgcatgggctcagctccatgacgttgcaacattatctgacgtggctctcctgaagcggctgcggaatgccgccgactggtttggcatacttgccgcacaaacacttgctgtacgcgccgcagttacgggttgtacaagcggaaagagattgcgtcttgtcgatggaacagcaatcagtgcgcccgggggcggcagcgctgaatggcgactacatatgggatatgatcctcatacctgtcagttcactgattttgagctaaccgacagcagagacgctgaacggctggaccgatttgcgcaaacggcagacgagatacgcattgctgaccggggattcggttcgcgtcccgaatgtatccgctcacttgcttttggagaagctgattatatcgtccgggttcactggcgaggattgcgctggttaactgcagaaggaatgcgctttgacatgatgggttttctgcgcgggctggattgcggtaagaacggtgaaaccactgtaatgataggcaattcaggtaataaaaaagccggagctccctttccggcacgtctcattgccgtatcacttcctcccgaaaaagcattaatcagtaaaacccgactgctcagcgagaatcgtcgaaaaggacgagtagttcaggcggaaacgctggaagcagcgggccatgtgctattgctaacatcattaccggaagatgaatattcagcagagcaagtggctgattgttaccgtctgcgatggcaaattgaactggcttttaagcggctcaaaagtttgctgcacctggatgctttgcgtgcaaaggaacctgaactcgcgaaagcgtggatatttgctaatctactcgccgcatttttaattgacgacataatccagccatcgctggatttcccccccagaagtgccggatccgaaaagaagaactaa

SEQ ID NO: 25233 - DNA, 1233 bp, Homo sapiens
  SIMILAR (631)..(1047): 991254mologous to unidentified bacterium transposase,accession number Z78058,Smith-Waterman Score=732.
  misc_feature (1)...(1233): n = a,t,c or g
atgtctggtcagcaatacaaataccgtgactctcgtgaagcggtcgatcgtgccaaccggattctggtgaataacatgccgcaaggcgttgagaagattagcgtgacgcaaaagcgcgagcatatggcgatggtgactaccgaaaccgacgtagccagcctgcgcaaacagctggcaggtacagcgcctggtcaatcagagccactgcaacaacaacgtgttgaagatgaagatctttctgcctttggtcggggctaccgtattcgtgaagatcgctttagctactctttcaacccaacactttcacagtcgctgggcggcccggaagatttctatatgttccagctggggctgatgtccagtgcccgctactggtttaccgaccacctgctgcttgatggcggtattttcaccaatatttacaacaactacgacaagtttaagtcttcgctgttgcccgcggactntaccctgccccgcgtgcgcacgcatatccgtgactacgttcgcaatgacgtgtatctcaagagactctcgagatcgtcggtaccgggtcattttcgtccattccccccaacggcacgaaacttttggacaggaagaaggggtgccagaagtattttgccgccaaatgccgccgactgttttggcatacttgccgcacaaacacttgctgtacgcgccgcagttacgggttgtacaagcggaaagagattgcgtcttgtcgatggaacagcaatcagtgcgcccgggggcggcagcgctgaatggcgactacatatgggatatgatcctcatacctgtcagttcactgattttgagctaaccgacagcagagacgctgaacggctggaccgatttgcgcaaacggcagacgagatacgcattgctgaccggggattcggttcgcgtcccgaatgtatccgctcacttgcttttggagaagctgattatatcgtccgggttcactggcgaggattgcgctggttaactgcagaaggaatgcgctttgacatgatgggttttctgcgcgggctggattgcgggtacaagtgggctgagtttgagaaaggagtcagtgaagatggtgggattatcattggtctgaatctggtggatacaagagactatttccgcctgaattcgccggggaatttcattacttactgctcctcaatactgaaaccgcagtccgcacggcagagagaggatggactcatcacaccagagtaa

SEQ ID NO: 25234 - DNA, 2439 bp, Homo sapiens; identical to SEQ ID NO: 18318
  SIMILAR (1042)..(1734): 811254mologous to Escherichia coli FimD protein,accession number D90732,Smith-Waterman Score=984.

SEQ ID NO: 25235 - DNA, 2757 bp, Homo sapiens
  SIMILAR (986)..(780): 1001254mologous to Escherichia coli narP,accession number U00008,Smith-Waterman Score=333.
atggccgggctggtcgcgaactgcggacctcgcgggatccacccggctgagcggggcaaaggactgcgattacggacaaaagccagcaaacgcaccatctattgctttgtgttgagcacaaggaatgtcaacgccctgggaagctcactcaaaaaaggcacttgtacccctcaggcaataggtacagtgagcccacatggcaccggtggacttgaacgtgggcaagatagggacactccgtctctttttcatggaaacttaaaaagagccagggaaaatcctgggggtgctggtataaaaggggcaaatgtgcaaatgggcactgtgaaacagcgagtggacctgctgcaccttttctaccctctcatcgacctcttttgtgcccacccctccgtgtaccaccttttctgtcccaaccctggcctcacaattttcttctttgccggcctgaacgaaaggcagaaacagctgctgcaagagctgcaagaaagcttcggtggcccaaccggcgagcacaacagcccgcgctcaaagagcttctttgatgcaattctggcccatattggtaagcccgaagaactggatacttcggcacgtaatgccggggctctaacccgccgccgcgaaattcgtgatgctgcaactctgctacgtctggggctggcttacggccccggggggatgtcattacgtgaagtcactgcatgggctcagctccatgacgttgcaacattatctgacgtggctctcctgaagcggctgcggaatgccgccgactggaacagaatggtggccgccacgcgtgagcggacattgagtttacgcagcagattgcgaatatgtacttttactgtctgctcggaaatattcaacaccgaggcaatctgtttatttgacagcccctgtgccagctcgtgcagaacatccagctcgcgctccgtcagcacgctgaagggatcttcttccgcgccaaacatttcacgttcactactgattgacgcgttcgctaaagactttgctgcctttcgctccggcacgaatcgcttccagcaatacttccgggtcgctgtctttcaacagataaccgtctgcgcctgcgtctatcagcgcaaagacatcgctggaggcatcggatacggtcaggataataatttgcgcggtaacgccatccctgcgcaaggcattgagagtatccaggccactcatacctttcatattgagatccagcaagatcacgtcgatatccagtctatgcgccagatcgatagcgctcgcgccgtcgcccgcttcggcgaccacttcagagccaggatcaagcacctttacccaatacgtctggaaaccgtaatcgtagaacgttacaacacccttggcggtgtttgcctgaacgtcggctgtatcccttctaaagcactgctgcacgtagcaaaagttatcgaagaagccaaagcgctggctgaacacggtatcgtcttcggcgaaccgaaaaccgatatcgacaagattcgtacctggaaagagaaagtgatcaatcagctgaccggtggtctggctggtatggcgaaaggccgcaaagtcaaagtggtcaacggtctgggtaaattcaccggggctaacaccctggaagttgaaggtgagaacggcaaaaccgtgatcaacttcgacaacgcgatcattgcagcggccccttgctgccccccgattgttgatgagcgccggaccccgcgcaatgctttcccagaggcaattttgccttccccgagcggtcacgcaaaacgctgcaacgtcctgagcatttgcaccttttatcggaacgcacatataaaaaatccccggctttttgggccagggatatgtgttaatgaaaccttcttgacgctgattttttttcaacctaaagtaaaggaacaacgtatcgcgcactggtgcggcgaggatcccccccgtgcggctggtttcgctcaacgccaacaatcgcgcgaggtcatcctgatgcaaacaaggacaaccggcgtcatgcaccaatcaccactgcgcgtcgccagcagctttcagacctgccagcacggaatctgcacgctcatcaccgccatctacaacggtgatttgcggatgatctccagacgcacgtgtgcaaaaccgctatcgccaggacttatggcaatgacgacaccttcacccggggatgcgcagcatcgcagcaccgagtgttcactatggttttatgacgatgagaaatatgcctacaaacggaacataaccgtacgaaggataaggcgtttacgccgcatccggcagccgttgcctgatgcgacactgtgcgtcttatcaggcctacagacggaacataaccgccggataaggcgctcgcaccgcatccggcgaccaacgtcatgcttcgtctggttgccagccttccgtataccagatatgcaacagcgcataagaacgccagggcttccagcgctcggcataacggcggatttgcgccggtgtcattcccggaaatcgctgtttaatcagataatcatccggcaggaaaacatctttcgcctgccagccacgcaaagcaaaataattcgccgtccagcgcccgatacccggaaaagtttgcagcgttttcatcgcctgctccacatcgcccggtattgtcattgtgggctcgtggtctcactggcttcaggagtgaagctacagaccttcgcggtgagtatcacagctcataaaagcagtgtggacccaaagaatgaccagtag

SEQ ID NO: 25236 - DNA, 652 bp, Homo sapiens
  SIMILAR (124)..(435): 991254mologous to unidentified bacterium transposase,accession number Z78058,Smith-Waterman Score=511.
atgggtattttttctcgctttgccgacatcgtgaatgccaacatcaacgctctgttagagaaagcggaagatccacagaaactggttcgtctgatgatccaggagatggaagatacactggttgaacccgaagaactggatacttcggcacgtaatgccggggctctaacccgccgccgcgaaattcgtgatgctgcaactctgctacgtctggggctggcttacggccccggggggatgtcattacgtgaagtcactgcatgggctcagctccatgacgttgcaacattatctgacgtggctctcctgaagcggctgcggaatgccgccgactggtttggcatacttgccgcacaaacacttgctgtacgcgccgcagttacgggttgtacaagcggaaagagattgcgtcttgtcgatggaacagcaatcagcatcgtatacgccgagtcgccttttagctcactgcagtccgcaaaagagaaaaccacggtattacaagatttacgtaaaatttgcacgccacaggcgtcattatcagatgaagcgtgggaaaagttaatgttgtcagatgaaaacaataaacaacatatacgcgaggccatcgtggcgatggaacgtaataatcagagcaattattgggaagcgttgg

SEQ ID NO: 25237 - DNA, 1800 bp, Homo sapiens
  SIMILAR (694)..(1308): 991254mologous to unidentified bacterium transposase,accession number Z78058,Smith-Waterman Score=1063.
atggcgaccggctttctccctgaacgatcggccactttaccggcaaataacatcgcagctgccatccccgccagatatacggagaacgcaatatgcaactgcgcttcgctggcattgagatcggcggcgatgcgcgcacaaaatcacggttataccaaagagaatgacaatcgccggaataagattgccgccccagaccgtgaacatctgattgggaaacttcttgcgagctttgattgcaagcactgcgggaataatgaccgcccagatggtggcgcacagcccggcaccgccgattccgtaaataaagccgttcgggaagatcagatacaacccgtctgggacagcaacggataccgaggcgcggggccgggggttggtttattaaaaaaaaccagcgcccgggtggttacgttactggggagcctgcgcaaaggctcatttaatggcatggttgcacggaccctgccgaaaattgctccggcgagcatggaagtcaatgcgttaccatccattgccgacattcccttgtatgacgctgacgtacagcaggaagaaggttttccagcaacggttgaagctctggcggaacagatccgtcaggctgacggtgtggtgatcgtcacgccggaatataactactcggtaccgggtgatgcgtgcatacatgacagcttttttgttgaggaagggcccgaagaactggatacttcggcacgtaatgccggggctctaacccgccgccgcgaaattcgtgatgctgcaactctgctacgtctggggctggcttacggccccggggggatgtcattacgtgaagtcactgcatgggctcagctccatgacgttgcaacattatctgacgtggctctcctgaagcggctgcggaatgccgccgactggtttggcatacttgccgcacaaacacttgctgtacgcgccgcagttacgggttgtacaagcggaaagagattgcgtcttgtcgatggaacagcaatcagtgcgcccgggggcggcagcgctgaatggcgactacatatgggatatgatcctcatacctgtcagttcactgattttgagctaaccgacagcagagacgctgaacggctggaccgatttgcgcaaacggcagacgagatacgcattgctgaccggggattcggttcgcgtcccgaatgtatccgctcacttgcttttggagaagctgattatatcgtccgggttcactggcgaggattgcgctggttaactgcagaaggaatgcgctttgacatgatgggttttctgcgcgggctggattgcgaaaaagtaaaccttggtctggataataatacctggggcggtggtttttccaaatattgtctggttcctggtgaaattctcaaaattcatcgtcatgcgttgtgggaaatccctgatggtgttgattatgaggacgcagccgtacttgaccctatctgtaatgcctacaaatccatcgcgcagcaatcgaaattccttcctggtcaggatgtggtcgtcatcggcactggcccactcgggctgttctccgtacaaatggcgcgaattatgggggcggtaaatatcgtcgtcgttggtctgcaagaagatgtggcggtccgcttcccggttgcaaaagaactgggtgcgacggcagtagtaaatggttctaccgaagatgtggtggcgcgctgccagcaaatttgtggcaaagacaatctgggactggtgattgaatgctccggtgccaatatcgcactgaaacaagccatcgaaatgctccgcccgaacggggaagtg

SEQ ID NO: 25238 - DNA, 2881 bp, Homo sapiens
  SIMILAR (1266)..(1529): 851254mologous to unidentified bacterium transposase,accession number Z78058,Smith-Waterman Score=380.
atggcaggcccccgatacccagtttcagtgcaaggggcagccctggtgcagatcaagaggctccaaacgtttgccttctctgtgcgctggtcagacggcagcgacaccttcgtgcgcaggagttgggacgaattcaggcagctcaagaagaccctcaaggagaccttcccggtggaggcgggcctgctgcggagatctgaccgcgttctcccaaagcttctcggtcaggccagcctggatgcaccactgttgggacgcgtggggcgcacgagccgcggcctggcgcgcctgcagctgttggaaacctattctcggaggctgctggcgactgcagagcgcgtggcacggagcccgacgatcactggcttcttcgcaccgcaacccctggacctggagcccgcgctgccacccggcagccgggtgatcctgcccaccccagaggagcagcctctttctcgcgctgcgggccgcctctccatccacagtctggaggctcagagcctgcgctgcctgcagcccttctgtacccaggacacgcgggataggccttttcaggcgcaggcccaggagagcctggacgtgctgctgcggcacccctcaggctggtggctggtggagaacgaagaccggcagaccgcctggtttccagcgccctacctggaggaggcggccccgggccaaggccgggagggaggcccgtccctagggagcagcggtccccagttctgtgcttcccgcgcctacgagagcagccgcgcagatgagctgtccgtgcccgcgggggcgcgcgtgcgcgtgttggaaacgtcagaccgcggctggtggctatgcaggtacgcgggagcgggccccgaagaactggatacttcggcacgtaatgccggggctctaacccgccgccgcgaaattcgtgatgctgcaactctgctacgtctggggctggcttacggccccggggggatgtcattacgtgaagtcactgcatgggctcagctccatgacgttgcaacattatctgacgtggctctcctgaagcggctgcggaatgccgccgactggtttggcatacttgccgcacaaacacttgctgtacgcgccgcagttacgggttgtacaagcggaaagagattgcgtcttgtcgatggaacagcaatcagtgcgcccgggggcggcagcgctgaatggcgactacatatgggatatgatcctcatacctgtcagttcactgattttgagctaaccgaccagcagagacggtgaaagggctggcccgatttgcgcaaccgccagacgagatacgcattgctgacggggaattcgtttggcgtccgaaatgtatccgctcacttgcttttggagaagctgattatatcgtcggggttcactggcgaggattgcgctggttaactgcagaaggaatgcgctttgacatgatgggttttctgcgcgggctggattgcggtaagaacggtgaaaccactgtaatgataggcaattcaggtaataaaaaaagcccggagcttcccttttcgggcacgtttcattgccgtatcacttcctcccgaaaaagcattaatcagtaaaacccgactggctcagcgagaatcgtcgaaaaggacgagtagttcaggcggaaacgctggaagcagcgggccatgtgctattgctaacatcattaccggaagatgaatattcagcagagcaagtggctgattgttaccgtctgcgatggcaaattgaactggcttttaagcggctcaaaagtttgctgcacctggatgctttgcgtgcaaaggaacctgaactcgcgaaagcgtggatatttgctaatctactcgccgcatttttaattgacgacataatccagccatcgctggatttcccccccagaagtgccggatccgaaaagaagaactaactcgttgtggagaataacaaaaatggtcatctggagcttacaggtggccattcgtgggacagtatccctgacagccccgagcttatgcaatagcgcctgctgctgttgcgtctcgacaaactccgcgaccacactcaatgacttcgctttcgccagatcggtaattgatctcacaatcatcgcatccagcgtgttcgtgacaatatctttcacaaagacgccatcaattttgatgatatcagcctgcaaacgctttaaccgttcgtagttggcatatccggtgccaaagtcatcaatcgcaatccggaaaccaaacttatgcagctgctcgatgttgtacatgctgctttctgcgttagaaaacgcctgctcctcggtgatctcaagaatgaccgcctgcggggagatgtgataacgcttaaacagacgaataatccgcccggcaatattcttttgcagcagcgtgagcggcattaaattgactgaaaagcgcggtccttttttgtcgcaagggtgtgttgccagccacttcaacaaggattccagcacttgcaaatcaaaacgcgcgctaaggttaaactgagcaataaggggcagaaacttatccggggtcataatgccgccgtcatatttcagtcgcgcgaggatctcatcataaccttcaccctctttgttgcgaattggctgggcgtagagcagcaaatcaccctgatctaacgccgtgcgaatggtattcagcaatagcacctgtttagtggtctgcccggaaaccatctcctctctgctatccagcgccagcacatgatgatgtgcgcaggattgctccgccagccagcttaactgccccaacaaggggtgcagggtttcctgattttcatcaaaacgcccccaggcagcaccataacccatatccagcccggtattgttccagtgaatttgccgactattcaggatgttaaccat

SEQ ID NO: 25239 - DNA, 333 bp, Homo sapiens
  SIMILAR (75)..(323): 711254mologous to Escherichia coli VisC,accession number D90281,Smith-Waterman Score=281.
ccgtcttggcgtctggcaggacattctctctcgtagggccagctgttatcacggtatggaagtgtgggacaaagacagctttggtcacatttcgtttgacgatcaaagcatgggctatagccatcttgggcatatcgttgaaaattcagtgattcactacgcgggcgcgtctggtgattggcgcggacggcgtagattcctggttgcgcaacaaagccgatattccgctgactttctgggattatcagcatcacgcgctggtagcgaccattcgcacggaagaaccgcatgatgccgtggcgcggcaggttttccatggcgaagcattctggc

SEQ ID NO: 25240 - DNA, 235 bp, Homo sapiens
  SIMILAR (3)..(110): 701254mologous to Escherichia coli VisC,accession number D90281,Smith-Waterman Score=115.
gcgttgccgtactggagcagcgcgtacatgaacctctggcggcgaatgcaccaccacaactgcgcgtttcggccgtcttggcgtctggcaggacattctctctcgtagggccagctgttatcacggtatggaagtgtgggacaaagacagctttggtcacatttcgtttgacgatcaaagcatgggctatagccatcttgggcatatcgttgaaaattcagtgattcactacgcg

SEQ ID NO: 25241 - DNA, 789 bp, Homo sapiens
  SIMILAR (789)..(268): 981254mologous to Escherichia coli galactoside binding protein,accession number M59444,Smith-Waterman Score=878.
ctgatcgataacccagaacggtttgtgatcgttcacttcgcgcgcggtacggataagccgcgcctgctgggggttctgtgccacgataaaccacggatcaacagcaatgcagtgaccgcccacgccagggccaggctgaagaatattaacgcgagggtgacgattcgccaggcgaatcagttcccagacgttaatcccctgatcggcacaaatcagcgacaattcattagcaaaagcgatattcacatcgcggaagctgttttcggtgaggtaagtggtacgtgcttctgcatccggatggcccggttcacctttcagcagtacgaactgaatctgaccgtctttgttcagatcccaaccctgattcgccgcccagtgtttagcaatcaaatcgccttgaataatgccggactctttggagtcagtgccaacgtagtaggctttgtcgtagctatccagcgccttacgagacgggtctttgttgaagaaaaccaccggcacgttttgcccacgcgctttctcaatcaccgtacccgcagctgccgggtcaaccaggttgattgccagtgccttcacccctttcgccagcaatacgtcgatctgatcggtctgcttggactggtcattctgagaatcattcatcagcagctgaacatctggcgcggctttcgcatcttgctcaatagccttgcgcactacagacataaagttatcgtcgtacttatagattgttacaccaatgcgagtatcagcagcgtgtgcagcggcaccgaataacatgctggccat

SEQ ID NO: 25242 - DNA, 1076 bp, Homo sapiens
  SIMILAR (791)..(868): 801254mologous to Escherichia coli peripheral membrane protein,accession number L08399,Smith-Waterman Score=88.
atgcagcggcgcacgatggcgacgttccgccgtatgactggggacaatcccgatgcaccacgctggttaagatatccgggattcattcctcagttgagaaataacgcagacagtgtaatctttattaatcagatacaaggattattggcagatgagcgttatctctcactactcaactgcgagctgtcgcgtttcaccgatgattacgatgcttcagttcccgcgggcgagattattattgtaccttggatggagcttcaagtgcataacggccacgaaagcgcgccgttccgcgccgtagaccgcatcagctacagcgtaaaacagggcgaagtggtcgggattgtgggtgagtccggctccggtaagtcggtcagttcactggcgattatggggctgattgattatccgggccgcgtaatggcagaaaaactggagtttaacggccaggatttgcagcgtatctcagaaaaagagcgccgcaacctggtgggtgccgaagtggcgatgatcttccaggacccgatgaccagccttaacccgtgctacaccgtgggtttccagattatggaagcgattaaggtgcatcagggcggcaacaaaagtacccgccgtcagcgagcgattgacctgctgaatcaggtcggtattcccgatccggcatcgcgtctggatgtttacccgcatcagctttccggcggcatgagccagcgcgtgatgatcgccatggcgattgcctgtcggccaaaactgctgattgccgatgaaccgaccaccgcgctggacggggaccattctagcgccaatcatcgaactactgctggagctacaacagaaagagaacatggcgctggggtcacgcacccaccacggttcgtcaccaaacagtggctctgctttttgccagatggcctgctgctcttcgctgaagcccgctttgtgatctggcagatgcagccagccgtgatggctgtggatgtcgccgctttcgcgcatcttttcaatcagcaacagtaccagcgcttcatcttccattggcaacgccatacgtcgcagacgttcgcgcccagggccag

SEQ ID NO: 25243 - DNA, 2349 bp, Homo sapiens; identical to SEQ ID NO: 13695
  SIMILAR (822)..(436): 761254mologous to Pseudomonas aeruginosa transposase,accession number AF133697,Smith-Waterman Score=531.

SEQ ID NO: 25244 - DNA, 735 bp, Homo sapiens
  SIMILAR (238)..(723): 991254mologous to Escherichia coli Tyrosine aminotransferase (EC 2.6.1.5) (L-tyrosine:2-oxoglutarate aminotransferase) (TAT),accession number D90783,Smith-Waterman Score=808.
atgaaaaagatcctgacaaccccgatcaaagctgaagatctgcaagatattcgcgtcggcgatgtgatctacctgaccggtacgctggggagcggcttacgcgttgccgtactggagcagcgcgtacaggaacctctggcggcgaatgcaccaccacaactgcgcgtttcggctatcaatgccgccagcgaaaaattactcacccgtcttggcgtctggcaggacattctctctcgtagggtaagcaaaaccgccacagcgatgagcgtgattgaaaacttaccgccaggaaacgcagaactgcgtcaggctattgctcgtcgctatgccttacagggcatcaccatttctcctgatgaaattgtcattactgccggggcgttagaggcattaaacctcagtttgcaagcggtaactgaaccgggcgattgggtgatagtagagaatccttgtttctacggtgcgttgcaggcgctggagcggctacggctgaaggcgttatcggtggcgacggatgttaaagaagggatagatcttcaggcgctggaactggcgttgcaggagtatccggtgaaagcgtgctggctgatgactaatagccagaatccactcggatttaccttaacgccgcaaaaaaaagcacaactggtggcgttgctcaatcagtacaacgtaacgctgattgaagatgacgtttacagcgaactttattttggacgggaggggatcctctag

SEQ ID NO: 25245 - DNA, 1941 bp, Homo sapiens
  SIMILAR (1318)..(1923): 1001254mologous to Escherichia coli proline permease,accession number L01150,Smith-Waterman Score=1027.
atgaaactgacaacacatcatctacggacaggggccgcattattgctggccggaattctgctggcaggttgcgaccagagtagcagcgatgcaaaacacattaaagttggcgttataaatggcgcagaacaagatgtcgcggaagtcgctaaaaaggtggcaaaagagaaatatggcctcgatgttgaactggtaggatttagcggttcgttgctaccgaacgatgcgacaaatcatggcgaacttgatgcgaatgttttccagcatcgaacctttcttgaacaagataatcaggcgcatggttataaactggtagcggtggggaatacgtttgtcttccctatggcggattatggaactcgagggggcgcagtcccgcgcgtactggatgatcccaaagttgatgtagcgattatcagcaccacttacattcagcagaccgggctttctccggtgcacgacagcgtatttattgaagataagaattcgccgtatgtgaatattttggtggcacgggaagataataagaatgcagaaaacgtacagactaaatgtcagggacgtaccaatgaccaccaaataaaaaaacgccagaatcaaactgccgttaacgacaaagtttgttccttgtctggcataaaaaggcaacagaatcagaccgccaatcagcatactccagccgacgactggacctgcaggcacattaagtgcctgcaggtcatcattatgcgcgtggtcgatatcatgctggcgctgcaagtctgctgctggcgctggtgctggtggcaattttcggcccgtcgattgataaattatcggtgcatttcggcgacgaaagcgcgccgtttccgcgtcgtagaccgcatcagctacagcgtaaaacagggcgaagtggtcgggattgtgggtgagtccggctccgtcaaccaaacgtcgtcgccagcattcccgccagcgcccgcgagacgccgagggactcatcctgaaacgcggcgtaaccgccagtgcgtgcccgaacttagcagcaacaagcccaccgtttctacaagcagagagacaatcgccactttcacgccgccaaaacggtccggcatccagccaaacatgacgcgcatcacgacaaatgcgccgccaaacgcgataagcccgacaacgctccacagcgatggacgttctcccgccaggccggttactttgcgcactgtgccgttacaggcccacgccagtacgggtaataccattgtggtgatcgccagtcacgtacagaatgatcgaggatcgccagtttcatacatcgcttggatgcctgcaggtccgctggttattttgctgttcttcaccatttattgcgcttcgggcattgtggcaggcgcgcgtctgtttgaaagtacctttggcatgagctacgaaacggctctgtgggcgggcgctgcggcgacgatcctttacacctttattggcggtttcctcgcggtgagctggactgacactgtacaggccagcctgatgatttttgccctgatcctgacgccggttatcgtcattatcagtgtcggtggctttggtgactcgctggaagtgatcaaacaaaagagcatcgaaaacgttgatatgctcaaaggtctgaactttgttgccattatctcactgatgggttgggggctgggttacttcgggcagccgcacattctggcgcgttttatggcggcggattctcaccacagcattgtccatgcgcgtcgtattagtatgacctggatgatcctctgcctggcaggggcggtggctgtcggcttctttgggattgcttactttaacgatcatccggcgttggctggtgcggtaaatcagaacgccgagcgtgtgtttatcgaactggcgcaaattctgtttaacccgtggattgccgggattctgctgtcgcaattctggcggcggtaa

SEQ ID NO: 25246 - DNA, 2977 bp, Homo sapiens
  SIMILAR (2437)..(1448): 981254mologous to Escherichia coli VisC,accession number D90281,Smith-Waterman Score=1690.
ctagagccctgttgcctcattaatccgttgtgccaccagctcacgggctgcaactgggaagagacgagacctgtttatccatcgccgacactgggatacgcagcaatcgtgggcttggggcagtagtggccataaggagagactcccctgcttgtggaaagaggagagaatagtatgaaggactttgtcttgtggtttgggtgccagctcaggcacagtagagtagagcaccaggtagattcctaagatttctgacttgaggccctggctcctggatggcatctctggactcacacaggaccagcggaaactcactgcctttaaacaggcaatcgccatggcgatcatcacgcgctggctcatgccgccggaaagctgatgcgggtaaacatccagacgcgatgccggatcgggaattccgacctgattcagcaggtcatccgctcgctgacggcgggtatttttgttccgcccttgatgcaccttaatcgctcccataatctgaaaaccccgggtgtagcacgggttaaggctggtcatcgggtcctggaagatcatcgccacttcggcacccaccaggttgcggcgctctttttctgagatacgctgcaaatcctggccgttaaactccagtttttctgccattacgcggcccggataatcaatcagccccataatcgccagtgaactgaccgacttaccggagccggactcacccacaatcccgaccacttcgccctgttttacgctgtagctgatgcggtctacggcgcggaacggcgcgctttcgtcgccgaaatgcaccgataatttatctacatttaataacgccatctcgaacctcttactgcttcagtttgggatcgagcgcgtcacgcagaccgtcacccatcaggttaaatgccagcaccgtcagcaggatcgccagacccgggaaggtcacgacccaccaggcgctttgcgcgaactgcaacacgtcggagagcatggtgccccactcaggcgttggcggctgtgcccccatgccgaggaaaccaagagcagccatatcgagaatggcgttagagaaaccgagcgacgcctgaacaatcagcggcgcaaggcagttcagcacggcggcgcgggttaagcgcacatagtgcggcaagccagcgaaggtcagtgccagcgcggcgttaccaatcgacgggccgaaaattgccaccagcaccagcgccagcagcagacttggcagcgccagcatgatatcgaccacgcgcataatgatgttatcgaccaggccgccaaagtaaccggcgatcaggccgagaataacgcccataatcagcgataacacaactaccagacagccaaccagcagcgacaggcgcgcaccgtacatcaggcgcgacagcacatcacggcctacgtcatcggtgcccagcaagtgcgccatgctgccgccttcctgccaggcagccagcatcaacgccgcactgtgcttgcggctacgctcatagcgacgcagataaatgtactgcccgatgtctttcccctgacgatgcaaccgtttcagttcggcaatcagctctgcagcatccataaagccgagatttaccccctgccccgccagcgggtgaatggtatgtgcggcgtcgcccaccagcgccagacggtgcgaggcaaactggcgcgcataacgccccgtcagtgggaacacctgacgcgcgctctcaaccttgcataagcccaggcgattatcaaaagcgatatttaacgcgcgattaaattcgtcttcacttgcctgctgcatccgctgcgcttcctctggcgacagtgaccagacaatcgagcaaagatgcggatcgctaagcggtaaaaaggccagaatgccttcgccatggaaaacctgccgcgccaccgcatcatgcggttcttccgtgcgaatggtcgctaccagcgcgtgatgctgataatcccagaaagtcagcggaatatcggctttgttgcgcaaccaggaattagcgccgtccgcgccaatcaccagacgcgccgttaacatgctgccatctttcagcgtcaggaaggtttcattttctccccaggcgacctgctgtaattctgcgggggctaacagagtgatatctgacgactgatgcgctttgttccacagcgcgtagtgaatcactgaattttcaacgatatgcccaagatggctatagcccatgctttgatcgtcaaacgaaatgtgaccaaagctgtctttgtcccacacttccataccgtgataacagctggccctacgagagagaatgtcctgccagacgccaagacgggtgagtaatttttcgctggcggcattgatagccgaaacgcgcagttgtggtggtgcattcgccgccagaggttcctgtacgcgctgctccagtacggcaacgcgtaagccgctccccagcagccacagcctgattcgcgcctttgccgccaaatgcaaccggtacgccgctgctggtgcagatcttcctgatttattacgggccgggccagtttccgactttgcaggagtatccggcactgtggcatttgttgtcagaaccgtggttatgtgcgctgattgcgttgtcgctgaatagtgcggcgtataccacgcagctgttttacggtgcaattcgtgcgatcccggaaggtcagtggcagtcctgtagcgccccgcagctgccgggtcaaccaggttgattgccagtgccttcacccctttcgccagcaatacgtcgatctgatcgttctgcttggactggtcattctgagaatcattcatcagcagctgaacatctggcgcggctttcgcatcttgctcaatagccttgcgcactacagacataaagttatcgtcgtacttatagattgttacaccaatgcgagtatcagcagcgtgtgcagcggcaccgaataacatgctggccatcacagcagacagggttaacaccttcttattcat

SEQ ID NO: 25247 - DNA, 1230 bp, Homo sapiens
  SIMILAR (118)..(921): 991254mologous to Escherichia coli SbmA protein,accession number U73857,Smith-Waterman Score=1377.
atgactggtttacaccccggcaatcatctccagttgaaggtgccacggctgcccaacgtatatgagaatgccgcccgattcgatggcattggcaagacctgcgaacgatcccccatcccgcatcgttggcaatactggtcaatactcggtactgcactgatcatcttcgtcacctggtttttggtggaagtcggggtcgccgtcaacgcctggtatgcgccgttctatgatctgattcaaaccgcgctaagttcgccgcataaagtcaccatcgaacaattttaccgcgaagtgggcgtctttctggggattgcgctgatcgctgtggtgatcagtgtgctgaacaacttctttgtcagtcactacgtgttccgctggcgtacagcgatgaacgaatattacatggcgaactggcaacaactgcgtcatatcgaaggggccgcacagcgtgtgcaggaagacaccatgcgttttgcttcaacgctggagaatatgggcgtcagttttatcaacgccatcatgacgttgatcgccttcctgccggtgctggtaacgctctccgcgcatgtgccggagctgccgattatcgggcacattccgtatggtctggtgattgccgcaatcgtctggtcgctgatggggaccggattgctggcagtggtagggatcaaactgccggggctggagtttaaaaaccagcgtgtagaggctgcctaccgtaaagagctggtttatggtgaagacgatgccacgcgcgcgacgccgcctacggtacgcgagctgtttagcgccgtacggaaaaactatttccgcctctattttcactatatgtatttcaacatcgcccgcattctctatttgcaggtcgataacgttttcggtttgttcttgctgtctccgtcaattgttgccggttcgattaagaaccaaagaatccgtatccgcctgaaagcgtttgatcatcgtctgatcgatcaagcaaccgcggaaatcgtcgagactgccaagcgcactggtgcgcaggtccgtggtccgatcccgctgccgacacgcaaagagcgcttcactgttctgatctccccgcacgtcaacaaagacgcgcgcgatcagtacgaaatccgtactcacttgcgtctggttgacatcgttgagccaaccgagaaaaccgttgatgctctgatgcgtctggatctggctgccggtgtagacgtgcagatcagcctgggttaa

SEQ ID NO: 25248 - DNA, 1536 bp, Homo sapiens
  SIMILAR (936)..(1460): 971254mologous to Escherichia coli SbmA protein,accession number U73857,Smith-Waterman Score=871.
tcaacctggcactgcaaagtgcgaaagcacttgcgctgaacctgccaaacactgcgacctgccaggagttatttaatacctgtgcggcaaacggtggcagccagttggatcactctgcgttagtgcaggcgctggaattaatggctaaccataaactggcctgatacccgcaataaaaatggccgatatcagaaaatgaatcggccagcaatattaaaaaagaaagcagccaaagatgttgcttcagtattaaaaataatatttttattttatttgttcctcatagctagattaaaacaacgttattcgatacgtgaaattaagagggatttatggaacatcagagaaaactattccagcaacgcggctatagcgaagatctattgccgaaaacgcaaagccagcggacctggaaaacatttaactattttaccttatggatgggttcggttcataacgttcccaattatgtgatggtcggcggcttttttattctcggcttgtctacctttagtattatgctggcaattatcctcagcgcctttttcattgccgcggtaatggtattaaacggtgctgcgggcagtaaatacggtgtgccttttgccatgatcctgcgtgcttcttacggtgtacgtggtgcactggttcccggattattaaggggcggaattgccgccctcatgtggtttggtttgcaaagaggatccccgttctatgatctgattcaaaccgcgctaagttcgccgcataaagtcaccatcgaacaattttaccgcgaagtgggcgtctttctggggattgcgctgatcgctgtggtgatcagtgtgctgaacaacttctttgtcagtcactacgtgttccgctggcgtacagcgatgaacgaatattacatggcgaactggcaacaactgcgtcatatcaagggccgcacagcttttatcaacgccatcatgacgttgatcgccttcctgccggtgctggtaacgctctccgcgcatgtgccggagctgccgattatcgggcacattccgtatggtctggtgattgccgcaatcgtctggtcgctgatggggaccggattgctggcagtggtagggatcaaactgccggggctggagtttaaaaaccagcgtgtagaggctgcctaccgtaaagagctggtttatggtgaagacgatgccacgcgcgcgacgccgcctacggtacgcgagctgtttagcgccgtacggaaaaactatttccgcctctattttcactatatgtatttcaacatcgcccgcattctctatttgcaggtcgataacgttttcggtttgttcttgctgtttccgtcaattgttgccggtacgattacgctcggcctgatgacgcagattaccaacgtttttggtcaggttcgcggtgctttccagtacctgattaactcatggaccacactggttgagttggatgtctatctacaaacgtctgcgcagctttgaacatgagctggatggtgacaaaattcaggaagtaacccataccttgagctaa

SEQ ID NO: 25249 - DNA, 2918 bp, Homo sapiens
  SIMILAR (716)..(132): 971254mologous to Escherichia coli No definition line found,accession number U00039,Smith-Waterman Score=940.
tttttccggaccaaaaaacctttgccgatgccgtgccgaacagcgatccgctgatgatccttgctgattatcggatgcagcaaaaccagagcggatttgatctgcgccatttcgttaacgtcaatttcacccagcaccgatacacgaaacgaaacccaaatcgtcaacgtaatgacgataaaagcgcagatcgccagagtcagcacgcgtgagttaattttcttggtatcaataattcggcttaacagattgagaataatgcctttaatggcctcgtggaaaccgagataaatgccaaagaatgcggtcagtacggcaaagatattaagcaccgtagaggtgatatgaatgatatgcccagggatcacctgcgcggccagcgccagtgctgagatattttgttcaaaggcagaaacggcttcttcgtggctaattgagaaggtaaacgaaaaggcaaaaaacaggatcaccgcgatgagcgtgatataactaattcggtgggtacgcagcgcgagccgggttgccagtactttatccgcttcccgtttacgataggcaatattcattgggttaagtacctgaataaatactgcagaaaagaagcaaaatggaatggtaagcaagacatcgcggaaaaagacggaggcttgcgggaaggcggttatatcgatgaaattcgagtgcgggatcatcgcaaaaccgaacacgacaataagccgctgcgcttgctcttccgctgcaaggcgttcagcctcttgcggatcgcgtttcacaaaggtgcgtttcttgcggacttcgatttgtaccgatttgctttttccaccggtaccaggaatgttaagggtgctgcgtgttttacgttgcagcgtcaatttgtccgggcctgaatttttctgattcaggtggtcaatcaaagtctgtttctcttgtgcagacacagagtcgtcagcagacttccggatacctgcatcagcaaattgctgtaccaggcgttccacggaggtctgtcgctgcttcgtcaccgaaccagcaaaaatcgatgccggaccataagcctcacgaatgcgtttatgttgttggtgaataagatccagcgcctcatcccaactcacgcgaacaaattcatcctgcccacgaatgccttgcggggttttccgggtgacgcaagaaagcttttcgcaccacttggaaatcgtaccggcgtattgctgtgaacaaatttccgagtattcccaggaataatcttcatgttcacgcggcataatctcaccgacggaacccgtggcaaagaataaaaagggattgaagccttgtcgtgggggattccttgtatcagtgccgattgtgtctccgggcctgctgacattattcaacctgatgtcaatggccatctgtatcaaccgggagatattgctggttttgtaactcttcacaatcaccgcgccacaggaagccgccgtcgtcacgaccgcaaacaggctactgaccagcacgccgaaacggctctctttaccttccatattgatgctgctgtccgtgcccagtgccagcagatgaggattaccctgaacttctgcccacatcaccacgccaaaggcaaagcacagcgccgttgggatcaagaagatcgccagcatctgcacgaagttggtcccggcgaagccatggacaaaaacctgtatgacctgccgccagaagaagcgaaagagatcccacaggttgcaggctctctggaagaagcactgaacgaactggatctggaccgcgagttcctgaaagccggtggcgtgttcactgacgaagcaattgatgcgtacatcgctcacatccgggctgtactctgttgtcctgcctgcggatgccgtctgtgccctgagcctgcccacggcgtcaaactgactctgcgtgacgctgccgtccgcgtgttcctttttcaccacccgcttcagcccggcttcgccgttgacgtgagcggaaaagatttggccgtccagttttacggtgtcgataccgacatgaatcaggatctccacaccatcatctgactcaatgccaatggcgtgtaatgtggcgaacaacgaagcaattcgacccgcaaccggagaacgcacttcaccaaccgagggcagaatggcaatacctttacccaaccaggccacgctcatgaagtcacggggctgattcgtgaaggcgcgacggtgtgcggtgttcgtgtacgtaaccatctcaccggcgaaactcaggcccttcatgcacctgtcgtggttaatgccgctgggatctgggggaatgtcagtggtctgccctccgatcgcacctctatgatccaccggaaaaatttgcagggcgatgatggccggttttgccgccagcactttacgcatttcagcaatcgagttcacccgatcgcggttgacgccaatgatcacatcgtctttttgcaagccagcctgagcagctgggcttcctttgacaacttcatcgattttaatacctttgccgccatcttttagctgaccatcgctcaacgttgcaccttccagcgctggcgtgatcatttcagcgctggccgacgaagaggtgctggtatcgagcgtcacttctacttccagtggtttgccgttacgcagcaggccaagcttcactttcgtgcccggctcggtggtcgcgatacgagagcgcaactcagcaaagctattcagcggtttgccgttgaggctggtaataatatcgcccgctttgacgcccgcttttgccgagccagaacctggcaacacttcgctgacaaacgcgccacgctgcacgtcaaggttgaaggctttggcgatatcggcactcatctcggtgcctttgatgcctaacaaaccgcgtttgatttcaccaaagtcgataagctcgtgcgccagtgttcgcgccat

SEQ ID NO: 25250 - DNA, 3192 bp, Homo sapiens; identical to SEQ ID NO: 16012
  SIMILAR (1110)..(559): 1001254mologous to Escherichia coli acriflavine resistance protein,accession number M96848,Smith-Waterman Score=930.

SEQ ID NO: 25251 - DNA, 1815 bp, Homo sapiens
  SIMILAR (1105)..(1800): 951254mologous to Escherichia coli K12 putative glucarate dehydratase,accession number AE000362,Smith-Waterman Score=1166.
atgattggtcaacggctggatgatctcaaattacgtgagcgttatggcgctaacgtcatcggtgttgaacgctggcggcgttttcgtcgcgttatcgtgaacgttaatggggtttctgaatttcgcgcgcgtgacgttttgcttattgatatgtctgcggctgatgtcgatctccggcaattttgtagtgagcaattgctggagccgatggtattgcgcggcgagtatttttctgaccaggcccttgatgtgggcatggcagagatttcattaattcctgagtcagaactgattggtaaatcggtgcgcgaaattggttttcgtacccgctacggactgaatgtggtggggctaaagcgcaatggcgtggcgctggaaggttcgctggcggatgagcctctgctgctgggcgatatcatcctggttgtgggtaactggaaactgatcggtatgctggccaaacagggccgcgacttcgtagcgctgaacttaccggaagagtatgcgctggcacgtaccgaacggaaatccggttccggttacaccggttttacttgctatgccgcaccggatgtcacgctggaagatgatcttaagcgtcgcgatctgaccattaatgcgctggcccaggacgataacggcgagattatcgacccgtacaacggtctgggcgatctgcaaaatcgtctgttgcgccatgtttcccccgcttttggcgaagatccgttacgcgtattgcgcgtggcgcgttttgctgcgcgttatgcccacctcggttttcgtattgccgatgaaactctggcgttgatgcgcgagatgacccatgcgggtgaactggaacacctgacgcctgaacgggtatggaaagagacggaaagcgccctcaccacccgcaatccacaggtgttcttccaggtactgcgcgattgcggcgcactgcgcgttttattcccggaaattgacgcactgtttggcgttccggcccctgccaagtggcatccggaaatcgatacgggtattcataccttaatgacgctctcaatggcggcgatgctgagtccgcaggtcgatgtccgtttcgcaactttatgccacgatctcgtcgtcgtaaatcgcaaagccacgccgctgccgtatcaaagccagccggatgactcatgcgactggtatcgcctgcgtcatgaagaagcgatgacgccggatgcggtggtgcgcctggcggaagcggcatatgaaaaatatggcttcaacgatttcaaactgaagggcggtgtactggccggggaagaagaggccgagtctattgtggcactggcgcaacgcttcccgcaggcgcgtattacgctcgatcctaacggtgcctggtcgctgaacgaagcgattaaaatcggtaaatacctgaaaggttcgctggcttatgcagaagatccgtgtggtgcggagcaaggtttctccgggcgtgaagtgatggcagagttccgtcgcgcgacaggtctaccgactgcaaccaatatgatcgccaccgactggcggcaaatgggccatacgctctccctgcaatccgttgatatcccgctggcggatccgcatttctggacaatgcaaggttcggtacgtgtggcgcaaatgtgccatgaatttggcctgacctggggttcacactctaacaaccacttcgatatttccctggcgatgtttacccatgttgccgccgctgcaccgggtaaaattactgctattgatacgcacggcatttggcaggaaggaccagcaggcatgaggaggattgcccaaaatccgccgttgtattactga

SEQ ID NO: 25252 - DNA, 1725 bp, Homo sapiens
  SIMILAR (1050)..(124): 941254mologous to Escherichia coli tRNA nucleotidyltransferase,accession number M12788,Smith-Waterman Score =1507.
ttagctgctccagagccctcctgtgccttgagctccagtcccacagtgacttgcaggaatgcaatgcacttcaaacgcgatatcccgatgtttgccgttgggtttatcaccgcctttgtggtggcgctgatagcgattaaaaccttccgccgcaatccgccgtcgggtcagctcctcgcgaatctccacacctttaaatcccgcttcaacgacggcttttgtcggcactgactgcgccacttcccaggcttcgcgcaaccagcggccttgcgggtagtccgctgattcaaaaccggttctgccgcgcacgtcagcctcgctggtcagcgccagttgctcgacacgctgcggtttacgccaggcatcgatggaatcaaataatttgacgatggtttttgggttcagcattgggaaggtgtggatgagatcgtgaaactcagccaccagtctggctaaatcgcgaatttcatttggcacgcgcagacgctggcatagttgttccactaacttaacacccgccgggccatgaccaatagatgacgcggcccagagttctggcggcgtcacccctttaccgagatcgtggcataaagttgcgaaacggacatcgacctgcggactcagcatcgccgccattgagagcgtcattaaggtatgaatacccgtatcgatttccggatgccacttggcaggggccggaacgccaaacagtgcgtcaatttccgggaataaaacgcgcagtgcgccgcaatcgcgcagtacctggaagaacacctgtggattgcgggtggtgagggcgctttccgtctctttccatacccgttcaggcgtcaggtgttccagttcacccgcatgggtcatctcgcgcatcaacgccagagtataatcggcaatttttaaaccgcgctccgcataacgcgcagcaaaacgcgccacgcgcaatacgcgtaacggatcttcgccaaaagcgggggaaacatggcgcaacagacgattttgcagatcgcccagaccgttgtacgggtcgataatctcgccgttatcgtcctgggtatggttaacaacttggaacccacgtccgtaaaagacaatgagccttacgaaagagcccaggttgcggaatccataccttgggcggaatatttgaccagacgacagccagtggggcactattttgaagacctttaaatattgtgtggtaaaacccgaagccgggtgcgcaatccaattcaaagcgttaaccccccggaaataacccggaaccgttaagtccgtgaagaaacttaaaccgaaattgttgtgaccggactgtaacgttcggtttgaatctgagtgtccgagaagatctcgcgtcgtttcctcaacgattccgcagacttcaacgaagcctttaccccgtgcctgtttcaaatgacgcacagggatgatgggcccgaaatctcggtacatcggaccgaaatgcccgaaagaagatctgatgtggcaagatccgtgccgcagccgatcttccgtggtggcgacaaacggcggtggtgcccaacggtgcgcgtctggcattaatgccgcagcgccgactgggatgtgaacgccgcagccgttcgtgctctgcctgttctggagaaaatccagaaagagtctggtaaagcctcgctggcggatatcatagtgctggctggtgtggttggtgttgagaaagccgcaagcgccgcaggtttgagcattcat

SEQ ID NO: 25253 - DNA, 2600 bp, Homo sapiens
  SIMILAR (872)..(1027): 901254mologous to Escherichia coli CG Site No. 550,accession number U00039,Smith-Waterman Score=240.
ttagcacatgatccaatcgtatcggtaccggtgtacgacgcgattgtttttgtggcgaagccgtaattcactattgctggcaaattgcgctttgttcatgcctggatgcggcgtgaacgccttatccggcctacaaagtaatgcacatattgcaaggaaatgtaggcctgataagcgtagcgcatcaggcaattttgcttttatcatcactgcgtgctgactctggcgatctgcgcttttatcgtcattacgttgacgatttgggtttcgtttcgtgtatcggtgctggtgttcgctatggctgacgatattaaagtcgccgttgtcggcgcgatgtccggcccgattgcccagtggggcgatatggaatttaacggcgcgcgtcaggcaattaaagacattaatgccaaagggggaattaagggcgataaactggttggcgtggaatatgacgacgcatgcgacccgaaacaagccgttgcggtcgccaacaaaatcgttaatgacggcattaaatacgttattggtcatctgtgttcttcttctacccagcctgcgtcagatatctatgaagacgaaggtattctgatgatctcgccgggagcgaccaacccggagctgacccaacgcggttatcaacacattatgcgtactgccgggctggactcttcccaggggccaacggcggcaaaatacattcttgagacggtgaagccccagcgcatcgccatcattcacgacaaacaacagtatggcgaagggctggcgcgttcggtgcaggacgggctgaaagcggctaacgccaacggcgtcttcttcgacggtattaccgccggggagaaagatttctccgcgctgatcgcccgcctgaaaaaagaaaacatcgacttgcgtttactacggcggttactacccggaaatggggcagatgctgcgccaggcccgttccgttggcctgaaaacccagtttatggggccggaaggtgtgggtaatgcgtcgttgtcgaacattgccggtgatgccgcgcgaaggcatgttggcccccgtcctgataacggttgatcagcccttcgttcaggcgggattccagcccctgcggcgtttgttgccagcgcacgaaacgggccggagaacacgcgcctatggtgttgggcgactcacccgtcagatacgacgacagatagcaacgaccttccgacataatgcacaggctgccgaaagcaaagacttccagtggtacaggtgtgacccgtgccagttgtttcacctgatgaatcgacaacacgcgcggcagcaccacgcgagcaacgtcaaaatggcgatgataaaagttaatcgcctcttcattggtcgccgaagcctgcaccgatacgtggcgctcaatatgcggataacgctcggcggcgtactccatcatggcgaggtcggcgaggatcagcgcgtcggcacccagctgcgccgccatatccacggcgcgctgccaacgggcgtaaccgtccggatgcgcaaaagtgttaatcgcgatgtgaagtttgcggcgatgttgatggacaaaactcaccgcttcctgcaattttttctcggtaaagttaaggccggcgaagtgacgggcattggtatcatcttttagcccgatataaacagcatctgcgccgttttcgatggccgccttaagcgccgggagatttccggcagggcagagcagctccataatttttcctgaaggttgcgcggtaaaactgacgccatttgcgctaaaacgccaggttcttgagcaggtcttaagctgcaaacatgtgtgacagtagcgataaggtgttaccgcatcggtcattgccaatattatcaggctttcgccacgtgtccttcccagctgaccgcgcatccgctgtcggtcagtcttcgcgatctcacactgtacaatccgcttcaacgacgcttttgtcgcactgatgcgccacttcccagggtcgcgcaaccagcggccttgcgggtagtccgctgattcaaaaccggttctgccgcgcacgtcagcctcgctggtcagcgccagttgctcgacacgctgcggtttacgccaggcatcgatggaatcaaataatttgacgatggtttttgggttcagcattgggaaggtgtggatgagatcgtgaaactcagccaccagtctggctaaatcgcgaatttcatttggcacgcgcagacgctggcatagttgttccactaacttaacacccgccgggccatgaccatgatgacgcggccagagttctggcggcgtcagccctttaccgagatcgtggcataaagttgcgaaacggacatcgactgcggactcagcatcgccgccattgagagcgtcattaaggtatgaatacccgtatcgatttccggatgccacgttgtacgggtcgataatctcgccgttatcgtcctgggccagcgcattaatggtcagaacgcgacgcttaagatcatcttccagcgtgacatccggtgcggcatagcaagtaaaaccggtgtaaccggaaccggatttccgttcggtacgtgccagcgcatactcttcatgcgtttgcggatgcagaaacacaggaaa

SEQ ID NO: 25254 - DNA, 505 bp, Homo sapiens
  SIMILAR (2)..(370): 1001254mologous to Escherichia coli HhoA,accession number U15661,Smith-Waterman Score=611.
taaaggctatgtgctgaccaacaaccatgtgattaatcaggcacagaaaatcagtattcagctcaatgatgggcgcgagtttgatgcaaaactgattggtagcgatgaccagagcgatatcgccctgttacaaattcaaaacccgagcaaattaacgcaaatcgctattgccgactccgataaattgcgcgtcggtgattttgccgtagcggtcggtaacccatttggccttgggcaaaccgccacctctggcattgtttccgcattaggccgcagcgggttgaatcttgaaggtctggaaaactttatccagacagatgcttccattaaccgcggtaactccggcggtgcactattaaaccttaacggcctgaccgagcaggctctcttctttcaagaattttatgggcaaggggaggagggccccactggtggtgccacatggcaaggaacaggccaaagcggtggcaatgaccagggcagcgaccactgtgtgtaccctgca

SEQ ID NO: 25255 - DNA, 2038 bp, Homo sapiens
  SIMILAR (412)..(1401): 961254mologous to Escherichia coli similar to E. coli o765,accession number U73857,Smith-Waterman Score=1661.
atgcgcatcatggacattatgctgtcgattccttcgttggtactgacaatggcactggctgccgctctcgggccgagtttgtttaacgccatgctggctattgctattgtgcgaattcccttttatgtgcgcctggcgcgggggcaagcattagttgtacgccagtatacctatgttcaggcggcgaaaacctttggcgcgtctcgttggcatctgatcaactggcatattttacgtaactccctaccgccgctgatcgtgcaggcatcgctggatatcggtagcgcgattttaatggccgccacgttgggatttattggcctgggtgctcaacaaccgagtgctgaatggggcgcgatggtagcaaatggtcgcaactatgtactcgatcagtggtgcgagggcacaggcatgaaatttgataaacccgcaggggaaaacccgatcgatcagctgaaggttgtcggtcgtccccatgaccgcatcgacggaccgctgaaaactaccggcacggcacgctacgcctacgaatggcatgaagaagcccccaacgccgcctatggctatatcgtcggttccgccattgccaaaggacgcctcaccgcccttgatacggacgccgcgcaaaaagcgccgggcgtactggctgtcattaccgccagtaacgccggggcactcggcaaaggcgacaaaaacaccgccaggctgttaggcggccccactattgagcactatcatcaggccattgcgctggtagtggccgagtccttcgaacaggcgccagcggcggcctcgctgttgcaggcacactatcgccgtaataaaggagcttactccctggcggacgaaaaacaggccgtcaatcagccgccggaagacacgcccgacaaaaacgtcggtgactttgacggggctttcacctccgctgcggtgaagattgatgctacctacacgaccccggaccagagccatatggcgatggagccgcatgcctcgatggccgtctgggatggaaataagcttaccctctggacctcaaatcagatgattgactggtgccgcaccgatctggcaaaaacgctgaaagttcccgtggagaatgtgcgtattatctccccgtatatcggcggagggtttggcggcaagctgttcctgagaagcgatgcgctgctggcggccctcgccgcccgagcggtgaaacgtccggttaaagtgatgctcccccgcccctctattcccaataacaccacgcaccgccccgccacccttcagcacttgcgtatcggtgccgaccagagcgggaaaatcaccgctatctcacatgaaagctggtctgtaaacctgcccgggggcacgccggaaacggcgctacagcaaaggacgctacgtcctgcaggcagtatagctagcgagccaaaccttaatggcccccgtgtggagctgtctgcggtatctcgcatccgcgagcaggtaggcgacgataaagtcatcctcggcctctctggtggtgtggattcctccgtaaccgcaatgctgctgcaccgcgctatcggtaaaaacctgacttgcgtattcgtcgacaacggcctgctgcgcctcaacgaagcagagcaggttctggatatgtttggcgatcactttggtcttaacattgttcacgtaccggcagaagatcgcttcctgtcagcgctggctggcgaaaacgatccggaagcaaaacgtaaaatcatcggtcgcgttttcgttgaagtattcgatgaagaagcgctgaaactggaagacgtgaagtggctggcgcagggcaccatctaccctgacgttatcgaatctgcggcgtctgcaaccggtaaagcacacgtcatcaaatctcaccacaacgtgggcggcctgccgaaagagatgaagatgggcctggttgaaccgctgaaagagctgttcaaagacgaagtgcgtaagattggtctggagctgggcctgccgtacgacatgctgtaccgtcacccgttcccgggaccaggccttggcgttcgtgttctgg

SEQ ID NO: 25256 - DNA, 1772 bp, Homo sapiens
  SIMILAR (249)..(863): 961254mologous to Escherichia coli K12 putative resistance protein (transport),accession number AE000463,Smith-Waterman Score= 1040.
atggagaagccgactctagaggatcccccgaaaaaacaaaacaaaacaaaaaatcagccagtgatccctgaaaagttccagcgtattttgagagtattcaaaaccaacattgatgagtggtgtaaaataacctttgccatcactgccattaagggtgtgggtcaaagatatgctcatgtggtgttgaggaaagcagacatcgacctcaccagcagggtgggagaactcactgaggatgagatacacccatgtcattctcactcattgcgacaggattactgggtgtttatttgacgacaatgccggggtattggggcatcctctttgtctgggcgctatttggcgttacttgcgacatgatgaactggccggtcttgctcaagtcggtaagtcgattgggcaatagcgaacaacaaggtcggttgtttggcttcttcgaaacagggcgtggcattgtcgataccgtggtggcattttctgcgttggcagtatttacctggtttggcagtggcttattaggttttaaagcaggcatctggttctattcccttattgtgattgccgtaggcattattattttctttgtcctgaatgacaaagaagaggcaccgtccgttgaggtgaaaaaagaagacggagcatcgaaaaacaccagtatgacctcggtgctgaaagacaaaactatctggcttatcgcttttaacgtcttcttcgtttacgcggtttactgtggcctgacattcttcattccattcctgaaaaacatctatctattgcccgttgcgctggtgggggcttacggcatcattaaccaatactgtctgaaaatgattggtggaccgattgtgctggaaaaagtgcttccgccagtggtgagcgtccgggtgaaaggaacggccagtcagggccagaaaatcccggaagaattcaaacagttttttggtgatgatttaccggatcaacctgcacaacccttcgaaggtttaggctccggtgtcatcatcaacgccagtaaaggctatgtgctgaccaacaaccatgtgattaatcaggcacagaaaatcagtattcagctcaatgatgggcgcgagtttgatgcaaaactgattggtagcgatgaccagagcgatatcgccctgttacaaattcaaaacccgagcaaattaacgcaaatcgctattgccgactccgataaattgcgcgtcggccgcagcgggttgaatcttgaaggtctggaaaactttatccagacagatgcttccattaaccgcggtaactccggcggtgcactattaaaccttaacggggaaaacccgatcgatcagctgaaggttgtcggtcgtccccatgaccgcatcgacggaccgctgaaaactaccggcacggcacgctacgcctacgaatggcatgaagaagcccccaacgccgcctatggctatatcgtcggttccgccattgccaaaggacgcctcaccgcccttgatacggacgccgcgcaaaaagcgccgggcgtactggctgtcattaccgccagtaacgccggggcactagacaaaggcgacaaaaacaccgccaggctgttaggcggccccactattgagcactatcatcaggccattgcgctggtagtggccgagaccttcgaacaggcgcgagcggcggcctcgctggtgcaggcacactatcgccgtaataaaggagcttactccctggcggacgaaaaacagaccgtcaatcagccgccggaagacacgcccgacatgatgaactag

SEQ ID NO: 25257 - DNA, 852 bp, Homo sapiens
  SIMILAR (459)..(575): 381254mologous to Homo sapiens Polyproline-rich domain from dynamin,accession number Y56033,Smith-Waterman Score=59.
atggtgaatattatgatgcctctctctgcagatgaggaccttgaggctcagagagactcgggaacggccacactcgtcacctcgcccccggcccggctcctggacccccctggacctctctgccagctctcctctctcctggaaatgcgcctgcaggactcggaacgtgcagagcctcagtttcctcctttgcaaaatggtggtaatgccaggaatacccacttcacaggcagcgaggagagagagcagacatggacagaaatggtgcctctgaagccaaagctcaagttaaacctgcatgagagtgaaaaactgagaacagaaactcagagcaggtatctgaacctggccatgaggcagtgcctgcagagtgagagaaattccacgaccagcctctcagatgccaccactctcccggcaggctccagaccacctgggtcggaggctgagccgggaccggaagccgcaccgccccccgcgcgccgggaagctcaccagatcccacggccccggagggggcacctgcccagctcgccgggcccccgcacgcatgtagccgcccacaacatccgcgtagtcacagaagcacacgcagatagtcatgcgttgctctctgatctgggggctgctcctttcgtggttatgtctcggattttaagagttgatggtgatgaagatccccctcatgtggacgagtccattcagcccaccaccgagaacgctgtggtgtttcggcccgtacaactcacttccgccatagagactggagggaaggaggagccctacgggctctcggccgcctccctaggccgagcggagtcatcggcggcgagcctggccgggagacgctga

SEQ ID NO: 25258 - DNA, 435 bp, Homo sapiens
  SIMILAR (155)..(298): 791254mologous to Homo sapiens Human secreted protein, SEQ ID NO: 5210,accession number G01129,Smith-Waterman Score=198.
  misc_feature (1)...(435): n = a,t,c or g
gcaggaattcggcacgaggnnnnnnnnnnnnnnnnnnnnnnnnnnnnnnnnnnnnnnnnnnnnnnnnnnnnnnnnnnnnnnnnnnnnnnnnnnnnnnnnnnnnnnnnnnnnnnnnnnnnnnnnnnnnnnnnnnnnnnnnnnnnnnnnnnnnntttggtgccgagactcaaattgggggacctcccttcggagatcaatcccctgtcctcctgctctttggtccgtgagaaagatccacctacgacctcatgtactcataccgaccaacccaagaaacatctcaccaatttcaaatccagactccactggaaatcggactgttcaactcacctggtagccactcccagagcccctggaactctggcccaaggctctctgactgactacttcttggcttagcggctgaggactgatgctgcctgatcgcctcggaag

SEQ ID NO: 25259 - DNA, 5130 bp, Homo sapiens; identical to SEQ ID NO: 2332
  SIMILAR (2614)..(4473): 941254mologous to Homo sapiens putative p150,accession number U93572,Smith-Waterman Score=3044.

SEQ ID NO: 25260 - DNA, 756 bp, Homo sapiens; identical to SEQ ID NO: 3067
  SIMILAR (73)..(144): 911254mologous to Homo sapiens calbindin D28K,accession number S46006,Smith-Waterman Score=122.

SEQ ID NO: 25261 - DNA, 2241 bp, Homo sapiens; identical to SEQ ID NO: 3056
  SIMILAR (628)..(2232): 911254mologous to Homo sapiens putative p150,accession number U93563,Smith-Waterman Score=2478.

SEQ ID NO: 25262 - DNA, 270 bp, Homo sapiens
  SIMILAR (79)..(186): 521254mologous to Gibbon ape leukemia virus pol polyprotein,accession number M26927,Smith-Waterman Score=108.
atgagaaagatccacttacaacctcaggtcctcagaccaaccagcccaagaaacatctcaccaatttcaaatctgcgtctcttcgctttcacttggactgaccctgacacccatcaggctcagcaaattacctgggctgtactgccgcaaggcttcacagacagcccccgttacttcagtcaagcccaaatttcttccttatctgttacctatctcagcataattctcataaaaacacacgtgctctccctgccgatcatgtccgactaa

SEQ ID NO: 25263 - DNA, 408 bp, Homo sapiens; identical to SEQ ID NO: 439
  SIMILAR (176)..(301): 881254mologous to Homo sapiens calbindin D28K,accession number S46006,Smith-Waterman Score=198.
  misc_feature (1)...(408): n = a,t,c or g

SEQ ID NO: 25264 - DNA, 441 bp, Homo sapiens; identical to SEQ ID NO: 19782
  SIMILAR (131)..(262): 721254mologous to Homo sapiens Human secreted protein, SEQ ID NO: 5210,accession number G01129,Smith-Waterman Score=174.
  misc_feature (1)...(441): n = a,t,c or g

SEQ ID NO: 25265 - DNA, 419 bp, Homo sapiens; identical to SEQ ID NO: 18570
  SIMILAR (91)..(222): 861254mologous to Homo sapiens calbindin D28K,accession number S46006,Smith-Waterman Score=207.
  misc_feature (1)...(419): n = a,t,c or g

SEQ ID NO: 25266 - DNA, 1059 bp, Homo sapiens; identical to SEQ ID NO: 806
  SIMILAR (328)..(459): 881254mologous to Homo sapiens calbindin D28K,accession number S46006,Smith-Waterman Score=211.

SEQ ID NO: 25267 - DNA, 1185 bp, Homo sapiens; identical to SEQ ID NO: 23976
  SIMILAR (688)..(1149): 481254mologous to Murine leukemia virus gag-pol polyprotein,accession number U13766,Smith-Waterman Score=364.

SEQ ID NO: 25268 - DNA, 618 bp, Homo sapiens
  SIMILAR (133)..(23): 441254mologous to Microtus fortis unknown,accession number AF277394,Smith-Waterman Score=63.
atggaggacacttcaggcctttcagagaacttagcatcccagagggtctgtcctccatatcagaatgaaaatgtaggcagagtaagggatacagaaataaaggaacactgttatgaggagagcagctacagagccgccacccaaattcaggtgagaaaggttggaatcatcacagagccctatcctttcatggcttccctcaggactcactgcataatctgtgagacctgctatgaaatgaaaataagcttttctaagtctctcaatcctcttgaaaaaaataagaaatcacaaccagcaaactgtgcagtaaaagaagttagtgaacagctgagaagaaggcaggccttcagtgtggcagcaggactcaagggcaaagggagcccagctcaaagcatcaggaaaaacctccagaagccatatcaacacttccaaacgctgcagcaactgctgccgctgcagtgggctccctgctatggtccctctaacttcgcaacacatggaactcaccaaggcttatggcttgtgctctccacagtggcagcccaagctgtacctggggcccttatagctgaagctacagcactgctagcgtggatccagggagcagtgtcctga

SEQ ID NO: 25269 - DNA, 996 bp, Homo sapiens; identical to SEQ ID NO: 16793
  SIMILAR (591)..(617): 881254mologous to Homo sapiens calbindin D28K,accession number S46006,Smith-Waterman Score=49.

SEQ ID NO: 25270 - DNA, 2171 bp, Homo sapiens; identical to SEQ ID NO: 347
  SIMILAR (704)..(477): 971254mologous to Homo sapiens IgG Fc receptor I,accession number M63835,Smith-Waterman Score=389.

SEQ ID NO: 25271 - DNA, 1332 bp, Homo sapiens; identical to SEQ ID NO: 21422
  SIMILAR (1054)..(1001): 771254mologous to Homo sapiens Human secreted protein, SEQ ID NO: 7340,accession number G03259,Smith-Waterman Score=81.

SEQ ID NO: 25272 - DNA, 1235 bp, Homo sapiens
  SIMILAR (699)..(1151): 491254mologous to porcine endogenous retrovirus viral polyprotein,accession number AJ133818,Smith-Waterman Score=371.
atgcccctccagccactagcgactccgtttacttcccctggaagcccatcagttgctcaagtgacaaccaacaccggagagccagggttcgcccaacaggagtacgcggagacaccccagacgacagcgcgtcccccccacccccaccccgccctccgggcgctccaggccagcgtccaccagaccccacgcctgggggactgcttgggctctagcgagagtgccacggctctgcacggcagcggggagccgaacaagttagccccgccggggcgccctacggaacgcggtgggcttttcaagtgctcagtccctctgcggacagtgcgaggctgccgggccgggctccgggggaccgagactgtaccttccagccttcagcgccagcccgcgggagacgtaggatggatcaacaacaaaagcaccacagccctagacagaacgccgactgacacccagcggaccaggcgaccccggccgccaaaacagaaacaaagaggcagagcgctcaaggagcggcccagagactccgacagcgcgcgcgaaggcccactgaaggcggtcgcgggcctgtttggtggtctcttcacacggacgtgcatgaaatttggtgccgtgactcggatcgggggacctcccttgggagatcaatcccctgtcctcctgttctttgctccacgagaaagatccacctacgacctcaggtcctcagactgatcagcccaagaaacatctcaccaatctcaaatccgcatgctttgaaaggattaaagcctgttatcactcgcctgctacagcatggccttttaaagcctataaactctccttacaattcccccattttacctgtcctaaaaccagacaagccttacaagttagttcaggatctatgccttatcaaccaaattgttttgcctatccaccctatgatgccaaacccatatactctcctatcctcaatacctccctccacaatccattattctgttctggatctcaaacgtgctttctttactactcctttgtacctgtcatcccagcctctcttcgctttcacttggactgaccctgacactcatcaggttcagcaaattacctgggctgtactgccgcaaggcttcacagacagcccccattacttcagtcaagcccaaatttcatcctcatctgttacctatctcggcataattctcgtaaaaacacacgagctctccctgctgatcgtgtctgattaa

SEQ ID NO: 25273 - DNA, 1142 bp, Homo sapiens
  SIMILAR (145)..(348): 651254mologous to Cavia porcellus pancreatic lipase,accession number A24057,Smith-Waterman Score=242.
atggagctagaagccacgaatatagttgttagggctgttctcctgtttccaaggaccacaggccagccccttagcacaaggaggagagctcctatagaaggcattcttccaagctcatctgttctccttcagttggataaggatgtaggcagagggttggacccagctgggccatttttccacaacactccaaaggaagtcaggctagacccctcggatgccaactttgttgacgttattcatacaaatgcagctcgcatcctctttgagcttggtgttggaaccattgatgcttgtggtcatcttgacttttacccaaatggagggaagcacatgccaggatgtgaagacttaattacacctttactgaaatttaacttcaatgcttacaaaaaagaccacagctcttgggctgtcccagccccactgcagcttcctgatgcgtggggtgggatggctacagtgtttcagcagctcctttggcacctgctgtttggtgggtctcaggttcttgtcccacgtccaggaagaaagaggttacacagacaactgaagagtgagcatggtggagaagagttttatcgagtgaccaaacagctcttggatgagaggggaacccaaaaaagatccacctacgacctcaggtcctcagacccaccagcccaagaaacatctcaccaatttcaaatccgagacaaaggagacacgttttatctgtggacccaaaactccggcgccgctcatggactgggaaggcagccttcccttgatgtttaatcattgcagggacacctctctgattattcacccatgtttccaaggtgtcagaccatgcagggacgcctgccttagtccttcacccttagcggcaagtcccgcttttctggggaaggggcaagtacccctcaaccccttcttcacccttagtggcaagtcccgcttttctgggggaggagcaagtaccccaaccccttctttccatgtctctacgccttctctgcttttctggggaaggggcaagtacccctcaaccccttcttcacccttagtggcaagtcccgcttttctggggaaggggcaagtacccctcaaccccttcttcacccttagtggcaagtcccgcttttctggggaaggggcaa

SEQ ID NO: 25274 - DNA, 810 bp, Homo sapiens
  SIMILAR (538)..(738): 471254mologous to Bovine leukemia virus gag,accession number K02120,Smith-Waterman Score=170.
atgggcctcgtgcatctgcagagacagtcatattggacagtgcagaggagctccataaatcacttcctaggctgcaacccacatactgggaaagataaaacgctttacatgagatggacaaaaagctttaggaaagtagaagatccacctacgacctcaggtcctcagaccgaccagcccaagaaacatctcaccaagtttaaatccgagacaaaggagacacgttttatccatggacccaaaactccggcgccggtcatggactgggaaggcagccttcccttggtgtttaatcattgcagggacgcctctctgattatacactcacatttcaagggtgtcagaccacgcagggatgcctgccttggtccttcacccttagcggcaagtcccgcttttctggggaaggggcaagtaccccaaccccttatatctctgtgccccgatcccttatttccgcaccccaacctcatatctctgcgccccaatcccttatgtccgcaccccgacctcgtatctctgtgccctgacccctttcccgcttttctggaggcacataagaacttccaaacgcctgaaccgcagcagcccggcattccaccagaacctcctcccccaggagcttgctacaagtgccagaaatctgaccaccaggccaaggaatgcctgcagcccaggattcctcctaagccatgtcccatctgtgcgggaccccactggaaatcagactgttcaactcacctggcagccactcccagagcccctggaactctggccgaaggctctctgactgactccttctcggcttag

SEQ ID NO: 25275 - DNA, 759 bp, Homo sapiens; identical to SEQ ID NO: 19790
  SIMILAR (511)..(654): 851254mologous to Homo sapiens calbindin D28K,accession number S46006,Smith-Waterman Score=217.

SEQ ID NO: 25276 - DNA, 2013 bp, Homo sapiens
  SIMILAR (1625)..(1663): 691254mologous to Homo sapiens calbindin D28K,accession number S46006,Smith-Waterman Score=41.
cagaaggtgccaggagaagagctcctttgcaatgcacctgggcacatgcaatcagacatccacaaagagtgcgatgtctatgcagaatgcaccaattccaacttccaggtccctggagatgcttcggacatgggaagggaagtgattggatctctgtctcccataccctgttggtgggtatacagtgtgcctatatttaattcagcacctactatgccctggcgctgtggcattcataggcaaggaggactggacctggaaggggcctttgggtctcagaggacaggatgtggaccgggcctctactattccaagcgacaaggccacccggatttcattcttcctgggagacgggagcgctcatttctgctcctggtggtcactcacctccacgtgacctttggcatccaggctttctgggtctctggctccttgatgatgccatgcagaggtcctgaggttgagatgtccctgcttgtggctgtggctcctgggcacacgtatggcatatttcagatagaaaaacttatgaatatggaagggacatggatggtgctggaaggcgttatcctcagcagactaacgcaggaacagaaaacccaaacatcgcctgttgtcactgataagtgggagctgaacgacgagaacacgtggacacatgatgggaaacaacacacaccgcggcctgtttcaggagtatggtttttcaaggtgtccagtgcgcacacagaaagcccagctgcggaggccggccgccagaccccaaagggacgaaccgtcatgggacgccggttctcttccaaagcttcgctgcgggaagccagccttctcgctggggccctcgaggctgacagattcctctccaagcctcactcaggccctcgagggaaggagcgcctgtctctgtgcacgctgttggtgctgagtgatgctcgggtcctgcaggagaggagcctctggacatcgcttagtgccagaagaggcttcgtggttcctgctggtctagaggaaaggtttaggaataaagacacaggctcggacagccctggacaccccagggttaggagccttaaggaaaaatgggaggagaaatggcttttcaaaatggaaagtgttatgcagacagagctggacacagagctgctatttgctaagatccggggtttggaggccgccattcagcaattaaacgccctagcccattcttcactggctcatccttcattggctgaattagtcagaaaatatgcatctcagggggctctgatacgcatcactgctcacgcatgtgtacacgagcacacctggccacgagtccacgccaaacacacgcttgccagggatgctggcagggttctgtggggacagccccaggaggcgatggaccagtggacagccaaggccagcaccaacatcccccagttaccaaagcctggaatcaatgtgcctgactgtgccttgccccagggctggtggatcatcaggtcccagccacagctgtccctgaacatctctcggccactgactgaagggagctgggactcagcccacctgctcccaggtgaaataaacagctttattgctcacacaaagcctgtttggtggtctcttcacacggacgcgcatgaaatttggtgccgtgactcggatcgggggacctcccttgggagatcaatccctcgtcctcctgctctttgctccgtgagaaagatccacctacgacatcgggtcctcagaccgaccagcccaagaaacatctcaccaatttcaaatccgcacacaagaacttccaaacgcctgaaccgcagcggccaggcgttcctccagaacctccttccccaggagcttgctacaagtgccagaaatctgaccaccaggccaaggaatgcctgcagcccaggattcctcctaagccgtgtcccatctgtgcgggaccccactggaaattggactgttcagctcacctggcagccactctcagagcccctggaactctggcccaaggctctctga

SEQ ID NO: 25277 - DNA, 1171 bp, Homo sapiens
  SIMILAR (704)..(868): 721254mologous to Homo sapiens calbindin D28K,accession number S46006,Smith-Waterman Score=189.
atgggcaaagaatacagcttagatgtgaaaaagagtataaaggtattcaaggacaataggagtcaagggaacaggctacaaaagcttggattggaggacacagacagggaagatgcaatgggctttggttcccatagggccaaactgacagtagttgctgccctgggagcttgccattgtcctgagaatgagggtcagacagttcttccatcttccacaagtggcagaagtgataagagggagagagtgtctgctggctacaccccacctttttttgttaaagaaggagtgcccagccctctttttaaactgcatgtggttagatgctgcagtattcagtcacatcactcaagacgatcccagaactgtgccgaagatgtgatacgcaaaacgaagacagatcaggcagtgtcttctatgtcatcagctcctgtaactgttcagcagctgaacatcattccagctttgctagtggccctaacttgtgggtgggcattttgcttaatggtttcccaagaacagtatgatgaggcttcaaagcaagcggcaagttttagcaacaatgctgttattccagtttatatgagtcacatgtccaaaaccttgtataaatctgaagtttttcccataaacacttatgcccagaaaatatgctttattgctcacacaaagcctgtttggtggtctcttcacatggacgcgcatgaaatttggtgccggggacgtcgatcgacggacctcccttgggagaatcaatcccctgtcctcctgctctttgctccgtgagaaagatccacctatgacctcaggtcctcagaccgaccagcccaaggaacatctcaccaattttaaatcaggagcttgctacacgtgccggaaatctggccactaggccaaggaatgcctgcagcctgggattcctattaagccgcatctcatctgtgtgggaccccacttgaaaattcggacttgttcaactcaccttgggcaagccactcccagagcccctggaactctggcccaaggctctctgactgactccttcccagatcttctcggcttagcggctgaagactcacactgcctgattgcctcggaagccccctagaccatcacgcacgccgagcttcgggtaactctcacagtggaagaaggcaggaatgtcaggcca

SEQ ID NO: 25278 - DNA, 2454 bp, Homo sapiens
  SIMILAR (148)..(306): 831254mologous to Homo sapiens Human secreted protein, SEQ ID NO: 5210,accession number G01129,Smith-Waterman Score=238.
atggcagaggcaatggcaaaattgggatctgagagaaaaaaagagcagggattaattcaggaactgaaacaaaatcagtctctggaactctggtatgagaacaggaaaggcaaaatcaagactggagaatcaggtgatggagagcctgacgcgagtgaaatttggtgccatgactcagatcgggggacctcccttgggagatcaatcccctgtcctcctgctctttgctccatgagaaagatccacctacaacctcaggtcctcagaccgaccagcccaagaaacatctcaccaatttcaaatccgggagagacaaaggagacacgttttatccgtggacccaaaactccggcgccggtcatggacttgggtaggcagccttcccttggtgtttaatcattgcagggacggcctctctgatcattcagccacatttcaagggtgtcagaccatgcagggatgcctgccttggtccttcacccttagcggcaagtcccgcttttctggggaaggggcaagctgctcctcgccaggccgagctaggtcccaattcttcctcagcctctgctcctccaccctacaatccttttatcacctcccctcctcacacctggtcaggcttacagtttcattccatgactagccctccccctcctgcccagcaatttcctcttaaaaaggtggctggagctaaaggcatagtcaagcggctgaagactgacactgcccgattgccttggaagcccccagaccatcatagacgccgagcttcgggtaactctcacagtggaagggtacagcctccctcccggctgccttcgtgggctcatgttgagtgtctcaggcttttccaggagcacggtgcaagctgtcagtggatctaccgttctgggatctggaggacagtggttttcatgtgcgtccgtgtgaagagaccaccaaacaggctttgtgtgagcaacatggctgtttatttcacctgggtgcagtcgggctgagtccgaaaagagagtcagcgaagggagatgggggtggggccgttttataggatttgggaaggtaatggaaaattacagtcaaagggggttgttctcttttagggtctagggctgtaaagcgtctcagggttgctgccaaacgagccgtgaactgggctggatttttatatttgatgaaaaacagcctaaacgcttcggatttgaaattggtgagatgtttcttgggctggtcagtctgaggacctgaggtggtaggtggagctttctcatggagcaaagagcaggaggacaggggattgatctcccaagggaggtcccctgatccaccaaatttcatgcgcgtctgtgtgaagagaccaccaaacaggctttgtgtgagcaacatggctggttgtttcacctgggtgcaggtgggctgtaaatggcggagccagagttgtgagtccaggcagtctggtcccagagactgtacatttaaccaaggtgcgctgtggcctctgttctgataaaggcaggcactgaggacctcgggagcatagaggagcaacaaccagcccagcctggaggcaccagcagggaagagcctttccagacaagagggctcccgagctgcgtgaagtggaggagaaacacttgaccctgtgatgcaacgctgtaagtaggtgggcaagctacatgaaaagggagatcttttcacctctgccagcccatagaccacactagtccgtgacttaacaggacatgtgttggataaagcaaaacgtgttgctggcgcatcatagagtccatgcttaccagcaggttgcttgaggaattcaacatgccagagtcctttgtactctgtccctccaggtgctgggccaccattcagagaaaatgggcagcaagtctctgcttgggttatgttagctgatgtcacatggaccaaaacaggacacatggctaggcccagagtcagtgtggaagaacatttaaccctgcaagctggtactatcatgatccccattttgcagatgaagaaagtggtaggacaggagatgcactgcccaaatgccctttctggagggaaggacttgcctccagctgtcagctccttcagagtgtgcttgccatagacagctgctttgcccaagggcatctctttcctttccgggtagcccaaatgcaacagcatccaactcataggtagttgtgtggctgcttgagcaggcccagaataatcaccaatgatattaagaccgtcaggttctgtgaagaacctggacactcttaggatatgctgggggccattgcagcattgggttctagtaacttctccccctctctgccgctccctccccgagcttactggaaaagttccctcttcatgtttacaattctccatttcccactgggccataatggcccatgctccataagcatggagactatgcttataatgctctgcattagtcat

SEQ ID NO: 25279 - DNA, 4576 bp, Homo sapiens
  SIMILAR (602)..(2305): 981254mologous to Homo sapiens extracellular matrix protein Reelin,accession number AC006316,Smith-Waterman Score=3067.
atgggatgtcttgggagctgtcattggtacagaatgtggaacgatagaatcaggcttatcaatggtcttcctcaaagatggagagaggaaattatgcactccatccatggacactaccggttatgggaacctgaggttttactttgtgatggcaaagtggatctatatacctgaaaatgttgttaagggacgaaaagagataatccttgtacttgattttacatggtgcatggttcatagaggaatttgtgaccctggaaattctcatgaaaatgacataatcctgtatgcaaaaattgaaggaagaaaagagcatataacactggataccctttcctattcctcatataagtttatattggcccgtcatgtctcaaattctgttctggcagaggacagtgcactagacatggttgcaacttgtgagatggcatcccagacattcccaatgtttatttctgaaagctttggcagttccaggctctcctcttaccataacttttactctatccgtggtgctgaagtcagctttggttgtggtgtcttggccagtggtaaggccctggttttcaacaaagatgggcggcgtcagctaattacatctttccttgacagctcacaatccagaataatctccgtagaactaccaggtgatgcaaagcagtttggaattcagttcagatggtggcaaccgtatcattcttcccagagagaagatgtatgggctattgatgagattatcatgacatctgtgcttttcaacagcattagtcttgactttaccaatcttgtggaggtcactcagtctctgggattctaccttggaaatgttcagccatactgtggccacgactggaccctttgttttacaggagattctaaacttgcctcaagtatgcgctatgtggaaacacaatcaatgcagataggagcatcctatatgattcagttcagtttggtgatgggatgtggccagaaatacaccccacacatggacaaccaggtgaagctggagtactcaaccaaccacggccttacctggcacctcgtccaagaagaatgccttccaagtatgccaagttgtcaggaatttacatcagcaagtatttaccatgccagtgagtttacacagtggaggagagtcatagtgcttcttccccagaaaacttggtccagtgctacccgtttccgctggagccagagctattacacagctcaagacgagtgggctttggacagcatttacattgggcagcagtgccccaacatgtgcagtgggcatggctcatgcgatcatggcatatgcaggtgtgaccaggggtaccaaggcactgaatgccacccagaagctgcccttccgtccacaattatgtcagattttgagaaccagaatggctgggagtctgactggcaagaagttattgggggagaaattgtaaaaccagaacaagggtgtggtgtcatctcttctggatcatctctgtacttcagcaaggctgggaaaagacagctggtgagttgggacctggatacttcttgggtggactttgtccagttctacatccagataggcggagagagtgcttcatgcaacaagcctgacagcagagaggagggcgtcctccttcagtacagcaacaatgggggcatccagtggcacctgctagcagagatgtacttttcagacttcagcaaacccagatttgtctatctggagcttccagctgctgccaagaccccttgcaccaggttccgctggtggcagcccgtgttctcaggggaggactatgaccagtgggcagtcgatgacatcatcattctgtccgagaagcagaagcagatcatcccagttatcaatccaactttacctcagaacttttatgagaagccagcttttgattaccctatgaatcagatgagtgtgtggttgatgttggctaatgaaggaatggttaaaaatgaaaccttctgtgctgccacaccatcagcaatgatatttggaaaatcagatggagatcgatttgcagtaactcgagatttgaccctgaaacctggatatgtgctacagttcaagctaaacataggttgtgccaatcaattcagcagtactgctccagttcttcttcagtactctcatgatgctggtatgtcctggtttctggtgaaagaaggctgttacccggcttctgcaggcaaaggatgcgaaggaaactccagagaactaagtgagcccaccatgtatcacacaggggactttgaagaatggacaagaatcaccattgttattccaaggtctcttgcatccagaaaccctgaggttgctaaatcaattgtgttcaatcccaagattttgccactgagaagagaacagagtagcagcagacatcaggaaccaggcataacttggagaaatggaaatgaagcaaaacgtgctgagattctttatccttgtgtactaagaagctggattaactcaaaagtctataaatattggcagcaaaataaattggaatgtggatacaccaatacatcttcatcctttgattatagcggaactgagaaggaagagatagttccctgcaagaccagattccgatggatccaggagagcagctcacagaaaaacgtgcctccatttggtttagatggagtgtacatatccgagccttgtcccagttactgcagtggccatggggactgcatttcaggagtgtgtttctgtgacctgggatatactgctgcacaaggaacctgtgtgtcaaatgtccccaatcacaatgagatgttcgataggtttgaggggaagctcagccctctgtggtacaagataacaggtgcccaggttggaactggctgtggaacacttaacgatggcaaatctctctacttcaatggccctgggaaaagggaagcccggacggtccctctggacaccaggaatatcagacttgttcaattttatatacaaattggaagcaaaacttcaggcattacctgcatcaaaccaagaactagaaatgaagggcttattgttcagtattcaaatgacaatgggatactctggcatttgcttcgagagttggacttcatgtccttcctggaaccacagatcatttccattgacctgccacaggacgcgaagacacctgcaacggcatttcgatggtggcaaccgcaacatgggaagcattcagcccagtgggctttggatgatgttcttataggaatgaatgacagctctcaaactggatttcaagacaaatttgatggctctatagatttgcaagccaactggtatcgaatccaaggaggtcaagttgatattgactgtctctctatggatactgctctgatattcactgaaaacataggaaaacctcgttatgctgagacctgggattttcatgtgtcagcatctacctttttgcagtttgaaatgagcatgggctgtagcaagcccttcagcaactcccacagtgtacagctccagtattctctgaacaatggcaaggactggcatcttgtcaccgaagagtgtgttcctccaaccattggctgtctgcattacacggaaagttcaatttacacctcggaaagattccagaattggaagcggatcactgtctaccttccactctccaccattgcatcttggccaacttctgtggctctagctcccctgggtggccctccaggtgaccctggtccctgggcaccagcaacaacacttcctccctgtgtccctacagtctcagactcacattctcccaggacccggttcagatggattcaggccaactacactgtgggggctgattcctgggcgattgataatgttgtactggcctcagggtgcccttggatgtgctcaggacgagggatttgtgatgctggacgctgtgtgtgtgaccggggctttggtggaccctattgtgttcctgttgttcctctgccctcgattcttaaagacgatttcaatgggaatttacatcctgacctttggcctgaagtgtatggtgcagagagggggaatctgaatggtaagaaagaagaaatctggattgttgatgacttcattatcgatggaaataatgtaaacaaccctgtgatgctcttggatacatttgattttgggcccagagaagacaattggtttttctatcctggtggtaacatcggtctttattgtccatattcttcaaagggggcacctgaagaagattcagctatggtgtttgtttcaaatgaagttggtgagcattccattaccacccgtgacctaaatgtgaatgagaacaccatcatacaatttgagctcatccgcggatccagtgagactggaattttcaagggacttcggggcgacctggcaccttctgctgcccctctgctaccacagcagcagccacgtcagctctttatgctccaccgagcaccaccccagcagcacctactacgcaggaaccatgcagggctggaggagggaggtcgtgcactttgggaagctgcacctttgtggtttattcctgaagtcatcgttcacttgccactttatcatggggaaatttccacctga

SEQ ID NO: 25280 - DNA, 363 bp, Homo sapiens
  SIMILAR (1)..(231): 1001254mologous to Homo sapiens extracellular matrix protein Reelin,accession number AC006316,Smith-Waterman Score=416.
ctaaacataggttgtgccaatcaattcagcagtactgctccagttcttcttcagtactctcatgatgctggtatgtcctggtttctggtgaaagaaggctgttacccggcttctgcaggcaaaggatgcgaaggaaactccagagaactaagtgagcccaccatgtatcacacaggggactttgaagaatggacaagaatcaccattgttattccaaggtctcttgcatccagaaaccctgaggttgctaaatcaattgtgttcaatcccaagattttgccactgagaagagaacagagtagcagcagacatcaggaaccaggcataacttggagaaatggaaatgaagcaaaacgtgctgag

SEQ ID NO: 25281 - DNA, 301 bp, Homo sapiens
  SIMILAR (145)..(300): 1001254mologous to Homo sapiens extracellular matrix protein Reelin,accession number AC006316,Smith-Waterman Score=301.
attctttatccttgtgtactaagaagctggattaactcaaaagtctataaatattggcagcaaaataaattggaatgtggatacaccaatacatcttcatcctttgattatagcggaactgagaaggaagagatagttccctgcaagaccagattccgatggatccaggagagcagctcacagaaaaacgtgcctccatttggtttagatggagtgtacatatccgagccttgtcccagttactgcagtggccatggggactgcatttcaggagtgtgtttctgtgacctgggatatactg

SEQ ID NO: 25282 - DNA, 309 bp, Homo sapiens
  SIMILAR (134)..(307): 1001254mologous to Homo sapiens extracellular matrix protein Reelin,accession number AC006316,Smith-Waterman Score=331.
gtgtgaccggggctttggtggaccctattgtgttcctgttgttcctctgccctcgattcttaaagacgatttcaatgggaatttacatcctgacctttggcctgaagtgtatggtgcagagagggggaatctgaatggtaagaaagaagaaatctggattgttgatgacttcattatcgatggaaataatgtaaacaaccctgtgatgctcttggatacatttgattttgggcccagagaagacaattggtttttctatcctggtggtaacatcggtctttattgtccatattcttcaaagggggcacc

SEQ ID NO: 25283 - DNA, 512 bp, Homo sapiens
  SIMILAR (250)..(510): 931254mologous to Homo sapiens extracellular matrix protein Reelin,accession number AC006316,Smith-Waterman Score=439.
tttatattggcccgtcatgtctcaaattctgttctggcagaggacagtgcactagacatggttgcaacttgtgagatggcatcccagacattcccaatgtttatttctgaaagctttggcagttccaggctctcctcttaccataacttttactctatccgtggtgctgaagtcagctttggttgtggtgtcttggccagtggtaaggccctggttttcaacaaagatgggcggcgtcagctaattacatctttccttgacagctcacaatccagaataatctccgtagaactaccaggtgatgcaaagcagtttggaattcagttcagatggtggcaaccgtatcattcttcccagagagaagatgtatgggctattgatgagattatcatgacatctgtgcttttcaacagcattagtcttgactttaccaatcttgtggaggtcactcagtctctgggattctaccttggaaatgttcagccatactgtggccacgactggaccctttg

SEQ ID NO: 25284 - DNA, 1171 bp, Homo sapiens
  SIMILAR (410)..(634): 1001254mologous to Homo sapiens Human Reelin,accession number U79716,Smith-Waterman Score=406.
acagctggacgggaggtgccctctgcggggctttgacgtccctcgcagaagagtcgcgggctcagcggtcctcgacagcgtccccgtcccgctccccggcggcgcccctccctgtcctcccgggtgcgaaccgggcgctggccggggactccggggacgcgtgcgcccctcgccgcgcgagccccggtcccgcgctcccgcggcccaaagtaactttgggagccgccgtctcccgcggaacttctcggcgggggcccgctcccaggcccgctcccgagcccgttccgctcccgtccgccttcttctcgccttctctccgcgtggctcctccgtcccggcgtctccaaaactgaatgagcgagcggcgcgtagggcgcgcggcggcggcggcggcggcggcggcggcggcatggagcgcagtggctgggcccggcagactttcctcctagcgctgttgctgggggcgacgctgagggcgcgcgcggcggctggctattacccccgcttttcgcccttctttttcctgtgcacccaccacggggagctggaaggggatggggagcagggcgaggtgctcatttccctgcatattgcgggcaaccccacctactacgttccgggacaagaataccatggtaggtaccgcagcacctccgcgctcgccgccgccgggtgcgcccgccagcgcacctttctcatccctttccttcttccaaggggccttggaaacaagaaccatgacaaccctggccccagcgatgcgcttggtccagggagcgagaataaagttagtggagaatggagtcacaagttgggattcattctccatgtccccactccccgaacgcatctcctggtaatgagctggtgcttgtgctaaacgcctgagaattcttggaggccggtgtctttccccctcactccccgtacttaccgcaggcactttaaattgaacctgcgcattttgtttctttactcctaggacttggatttcagacctttgtcctgctcccggtccccccagatgggtccccgggggggcgttgggggctgtcgctgggctttgcgggcaggctggtgacagattgaagcgcccaggtctgtggctgccccgcgccgctcgaccgcaaagttcccgctgctcaccagccaggagtccctggcatttcat

SEQ ID NO: 25285 - DNA, 753 bp, Homo sapiens
  SIMILAR (268)..(726): 971254mologous to Homo sapiens putative p150,accession number U93563,Smith-Waterman Score=749.
atggacagtatgtctggagggggacagtataggaagattaatgggaatccaacatcagtgaagtgccctttgctgctgctgccagccattctgactccagagccggtgaataggtggagacaaagctgcaaagcatttgcacggcattctccgcttgctttcagagtgacaatttcaacaagcaccttttttgacggcttgctggtgacaggactatacacatctacaagtgttcaggcatcacagagcattggaggttccagtgctttcggatttgtgttggaagttctggccagggcaattaggcaggagaaggaaataaagggtattcaattaggaaaagaggaaatcaaattgtccctgtttgcaggcgacatgattgtatatctagaaaaccccattgtctcagcccaaaatctccttaagctgataagcaacttcagcaaagtctcaggatacaaaatcaatgtacaaaaatcacaagcattcttatacaccaacaacagacaaacagagagccaaatcatgagtgaactcccattcacaattgcttcaaagagaataaaatacctaggaatccaacttacaagggatgtgaaggacctcttcaaggagaactacaaaccactgctcaaggaaataaaagaggatacaaacaaatggaagaacattccatgctcatgggtaggaagaatcaatatcgtgaaaatggccatactgcccaaggcaaacaaaaacacacattccacatga

SEQ ID NO: 25286 - DNA, 1404 bp, Homo sapiens
  SIMILAR (460)..(1404): 1001254mologous to Homo sapiens extracellular matrix protein Reelin,accession number AC006316,Smith-Waterman Score=1720.
atggggcattttagggggcaattagttcatgaaagtggagccctcatgattggcatcagtgcccttataaaagagaccccagtggactgccttgcctcttccaccatatggtaccagggattttaccctgccggctctcagccagtgacatgggccattgataatgtctacatcggtccccagtgtgaggagatgtgtaatggacaggggagctgtatcaatggaaccaaatgtatatgtgaccctggctactcaggtccaacctgtaaaataagcaccaaaaatcctgattttctcaaagatgatttcgaaggtcagctagaatctgatagattcttattaatgagtggtgggaaaccatctcgaaagtgtggaatcctttctagtggaaacaacctctttttcaatgaagatggcttgcgcatgttgatgacacgagacctggatttatcacatgctaggagtcaacccgtgctcctacagtattctctcaacggtggcctctcgtggagtcttcttcaggagttccttttcagcaattccagcaatgtgggcaggtacattgccctggagatacccttgaaagcccgttctggttctactcgccttcgctggtggcaaccgtctgagaatgggcacttctacagcccctgggttatcgatcagattcttattggaggaaatatttctggtaatacggtcttggaagatgatttcacaacccttgatagtaggaaatggctgcttcacccaggaggcaccaagatgcccgtgtgtggctctactggtgatgccctggtcttcattgaaaaggccagcacccgttacgtggtcagcacagacgttgccgtgaatgaggattccttcctacagatagacttcgctgcctcctgctcagtcacagactcttgttatgcgattgaattggaatactcagtagatcttggattgtcatggcacccattggtaagggactgtctgcctaccaatgtggaatgcagtcgctatcatctgcaacggatcctggtgtcagacactttcaacaagtggactagaatcactctgcctctccctccttataccaggtcccaagccactcgtttccgttggcatcaaccagctccttttgacaagcagcagacatgggcaatagataatgtctatatcggggatggctgcatagacatgtgcagtggccatgggagatgcatccagggaaactgcgtctgtgatgaacagtggggtggcctgtactgtgatgaccccgagacctctcttccaacccaactcaaagacaacttcaatcgagctccatccagtcagaactggctgactgtgaacggagggaaattgagtacagtgtgtggagccgtggcgtcgggaatggctctccatttcagtggg

SEQ ID NO: 25287 - DNA, 2507 bp, Homo sapiens
  SIMILAR (1)..(1176): 1001254mologous to Homo sapiens Human Reelin,accession number U79716,Smith-Waterman Score=2167.
ggttgtagtcgattattagtcactgtggatctaaacctcactaatgctgagttcatccaattttacttcatgtatgggtgcctgattacaccaaacaaccgtaaccaaggtgttctcttggaatattctgtcaatggaggcattacctggaacctgctcatggagattttctatgaccagtacagtaagcccggatttgtgaatatccttctccctcctgatgctaaagagattgccactcgcttccgctggtggcagccaagacatgacggcctggatcagaacgactgggccattgacaatgtcctcatctcaggctctgctgaccaaaggaccgttatgctggacaccttcagcagcgccccagtaccccagcatgagcgctcccctgcagatgccggccctgtcgggaggatcgcctttgacatgtttatggaagacaaaacttcagtgaatgagcactggctattccatgatgattgtacagtagaaagattctgtgactcccctgatggtgtgatgctctgtggcagtcatgatggacgggaggtgtatgcagtgacccatgacctgactcccactgaaggctggattatgcaattcaagatctcagttggatgtaaggtgtctgaaaaaattgcccagaatcaaattcatgtgcagtattctactgacttcggtgtgagttggaattatctggtccctcagtgcttgcctgctgacccaaaatgctctggaagtgtttctcagccatctgtattctttccaactaaagggtggaaaaggatcacctacccacttcctgaaagcttagtgggaaatccggtaaggtttaggttctatcagaagtactcagacatgcagtgggcaatcgataatttctacctgggccctggatgcttggacaactgcaggggccatggagattgcttaagggaacagtgcatctgtgatccgggatactcagggccaaactgctacttgacccacactctgaagactttcctgaaggaacgctttgacagtgaagaaatcaaacctgacttatggatgtccttagaaggtggaagtacttgcactgagtgtggaattcttgccgaggacactgcactctattttgggggatccactgtgagacaagcggttacacaagatttggatcttcgaggtgcaaaacacgactacatacttcttcctgaagatgccctcaccaacacaactcgacttcgctggtggcagccttttgtgatcagcaatggaattgtggtctctggggtggagcgtgctcagtgggcactggacaacattttgattggtggagcagaaatcaatcccagccaattggtggacacttttgatgatgaaggcacttcccatgaagaaaactggagtttttaccctaatgctgtaaggacagcaggattttgtggcaatccatcctttcacctctattggccaaataaaaagaaggacaagactcacaatgctctctcctcccgagaactcattatacagccaggatacatgatgcagtttaaaccttttggtttctgcagatcggattcctggcagctcgtacagacccagtgccttccttcctcttctaacagcattggctgctcccctttccagttccatgaagccaccatctacaactctgtcaacagctcaagctggaaaagaatcaccatccagctgcctgaccatgtctcctctagtgcaacacagttccgctggatccagaagggagaagaaactgagaagcaaagctggagcaattgaccacgtgtacattggagaggcttgccccaagctctgcagcgggcacggatactgcacgaccggtgccatctgcatctgcgacgagagcttccaaggtgatgactgctctgttttcagtcacgaccttcccagttatattaaagataattttgagtccgcaagagtcaccgaggcaaactgggagaccattcaaggtggagtcataggaagtggctgtgggcagctggcccgatacgcccatggagactcactgtactttaatggctgtcagatcaagcgagcagctaccaagcctctgggatctcactcgagcaagcaaaatcatgtttgttttgcaaattggggagcatgttcgcagacgggacagcttgcaacagtgacctggagttggcccccacggtgttggacaagggcagttgttgctgcaattacagcgttcaacaacgggattcacctggcatgttcattcgcccagcaccagccaaaggactttcacacaagctcagagagtgtcttacaatgtccccctggaggcacggatgaaaggagtcttactgcgctggtggcaaccacgccacaatggaacaggtcatgatcaatgggctttggaccatgtggaggtcgtcctcactcgcaaacaaaattacatgatgaatttttcacgacaacatgggctcagacatttctacaacagaagacgaaggtcacttaggcgatacccatga

SEQ ID NO: 25288 - DNA, 11632 bp, Homo sapiens
  SIMILAR (176)..(9502): 1001254mologous to Homo sapiens Human Reelin,accession number U79716,Smith-Waterman Score=17001.
cacgcgtgggctcggcgggggcccgctcccaggcccgctcccgagcccgttccgctcccgtccgccttcttctcgccttctctccgcgtggctcctccgtcccggcgtctccaaaactgaatgagcgagcggcgcgtagggcgscggcggcggcggcggcggcggcggcggcggcatggagcgcagtggctgggcccggcagactttcctcctagcgctgttgctgggggcgacgctgagggcgcgcgcggcggctggctattacccccgcttttcgcccttctttttcctgtgcacccaccacggggagctggaaggggatggggagcagggcgaggtgctcatttccctgcatattgcgggcaaccccacctactacgttccgggacaagaataccatgtgacaatttcaacaagcaccttttttgacggcttgctggtgacaggactatacacatctacaagtgttcaggcatcacagagcattggaggttccagtgctttcggatttgggatcatgtctgaccaccagtttggtaaccagtttatgtgcagtgtggtagcctctcacgtgagtcacctgcccacaaccaacctcagtttcatctggattgctccacctgcgggcacaggctgtgtgaatttcatggctacagcaacacaccggggccaggttattttcaaagatgctttagcccagcagttgtgtgaacaaggagctccaacagatgtcactgtgcacccacatctagctgaaatacatagtgacagcattatcctgagagatgactttgactcctaccaccaactgcaattaaatccaaatatatgggttgaatgtaacaactgtgagactggagaacagtgtggcgcgattatgcatggcaatgccgtcaccttctgtgaaccatatggcccacgagaactgattaccacaggccttaatacaacaacagcttctgtcctccaattttccattgggtcaggttcatgtcgctttagttattcagaccccagcatcatcgtgttatatgccaagaataactctgcggactggattcagctagagaaaattagagccccttccaatgtcagcacaatcatccatatcctctaccttcctgaggacgccaaaggggagaatgtccaatttcagtggaagcaggaaaatcttcgtgtaggtgaagtgtatgaagcctgctgggccttagataacatcttgatcatcaattcagctcacagacaagtcgttttagaagatagtctcgacccagtggacacaggcaactggcttttcttcccaggagctacagttaagcatagctgtcagtcagatgggaactccatttatttccatggaaatgaaggcagcgagttcaattttgccaccaccagggatgtagatctttccacagaagatattcaagagcaatggtcagaagaatttgagagccagcctacaggatgggatgtcttgggagctgtcattggtacagaatgtggaacgatagaatcaggcttatcaatggtcttcctcaaagatggagagaggaaattatgcactccatccatggacactaccggttatgggaacctgaggttttactttgtgatgggaggaatttgtgaccctggaaattctcatgaaaatgacataatcctgtatgcaaaaattgaaggaagaaaagagcatataacactggataccctttcctattcctcatataaggttccgtctttggtttctgtggtcatcaatcctgaacttcagactcctgctaccaaattttgtctcaggcaaaagaaccatcaaggacataataggaatgtctgggctgtagactttttccatgtcttgcctgttctcccttctacaatgtctcacatgatacagttttccatcaatctgggatgtggaacgcatcagcctggtaacagtgtcagcttggaattttctaccaaccatgggcgctcctggtccctccttcacactgaatgcttacctgagatctgtgctggaccccacctcccccacagcactgtctactcctctgaaaactacagtgggtggaaccgaataacaattccccttcctaacgcagcactaacccggaacaccaggattcgctggagacaaacaggaccaatccttggaaacatgtgggcaattgataatgtttatattggcccgtcatgtctcaaattctgttctggcagaggacagtgcactagacatggttgcaagtgtgaccctggattttctggcccagcttgtgagatggcatcccagacattcccaatgtttatttctgaaagctttggcagttccaggctctcctcttaccataacttttactctatccgtggtgctgaagtcagctttggttgtggtgtcttggccagtggtaaggccctggttttcaacaaagaagggcggcgtcagctaattacatctttccttgacagctcacaatccaggtttctccagttcacactgagactggggagcaaatctgttctgagcacgtgcagagcccctgatcagcctggtgaaggagttttgctgcattattcttatgataatgggataacttggaaactcctggagcattattcatatctcagctatcatgagcccagaataatctccgtagaactaccaggtgatgcaaagcagtttggaattcagttcagatggtggcaaccgtatcattcttcccagagagaagatgtatgggctattgatgagattatcatgacatctgtgcttttcaacagcattagtcttgactttaccaatcttgtggaggtcactcagtctctgggattctaccttggaaatgttcagccatactgtggccacgactggaccctttgttttacaggagattctaaacttgcctcaagtatgcgctatgtggaaacacaatcaatgcagataggagcatcctatatgattcagttcagtttggtgatgggatgtggccagaaatacaccccacacatggacaaccaggtgaagctggagtactcaaccaaccacggccttacctggcacctcgtccaagaagaatgccttccaagtatgccaagttgtcaggaatttacatcagcaagtatttaccatgccagtgagtttacacagtggaggagagtcatagtgcttcttccccagaaaacttggtccagtgctacccgtttccgctggagccagagctattacacagctcaagacgagtgggctttggacagcatttacattgggcagcagtgccccaacatgtgcagtgggcatggctcatgcgatcatggcatatgcaggtgtgaccaggggtaccaaggcactgaatgccacccagaagctgcccttccgtccacaattatgtcagattttgagaaccagaatggctgggagtctgactggcaagaagttattgggggagaaattgtaaaaccagaacaagggtgtggtgtcatctcttctggatcatctctgtacttcagcaaggctgggaaaagacagctggtgagttgggacctggatacttcttgggtggactttgtccagttctacatccagataggcggagagagtgcttcatgcaacaagcctgacagcagagaggagggcgtcctccttcagtacagcaacaatgggggcatccagtggcacctgctagcagagatgtacttttcagacttcagcaaacccagatttgtctatctggagcttccagctgctgccaagaccccttgcaccaggttccgctggtggcagcccgtgttctcaggggaggactatgaccagtgggcagtcgatgacatcatcattctgtccgagaagcagaagcagatcatcccagttatcaatccaactttacctcagaacttttatgagaagccagcttttgattaccctatgaatcagatgagtgtgtggttgatgttggctaatgaaggaatggttaaaaatgaaaccttctgtgctgccacaccatcagcaatgatatttggaaaatcagatggagatcgatttgcagtaactcgagatttgaccctgaaacctggatatgtgctacagttcaagctaaacataggttgtgccaatcaattcagcagtactgctccagttcttcttcagtactctcatgatgctggtatgtcctggtttctggtgaaagaaggctgttacccggcttctgcaggcaaaggatgcgaaggaaactccagagaactaagtgagcccaccatgtatcacacaggggactttgaagaatggacaagaatcaccattgttattccaaggtctcttgcatccagcaagaccagattccgatggatccaggagagcagctcacagaaaaacgtgcctccatttggtttagatggagtgtacatatccgagccttgtcccagttactgcagtggccatggggactgcatttcaggagtgtgtttctgtgacctgggatatactgctgcacaaggaacctgtgtgtcaaatgtccccaatcacaatgagatgttcgataggtttgaggggaagctcagccctctgtggtacaagataacaggtgcccaggttggaactggctgtggaacacttaacgatggcaaatctctctacttcaatggccctgggaaaagggaagcccggacggtccctctggacaccaggaatatcagacttgttcaattttatatacaaattggaagcaaaacttcaggcattacctgcatcaaaccaagaactagaaatgaagggcttattgttcagtattcaaatgacaatgggatactctggcatttgcttcgagagttggacttcatgtccttcctggaaccacagatcatttccattgacctgccacaggacgcgaagacacctgcaacggcatttcgatggtggcaaccgcaacatgggaagcattcagcccagtgggctttggatgatgttcttataggaatgaatgacagctctcaaactggatttcaagacaaatttgatggctctatagatttgcaagccaactggtatcgaatccaaggaggtcaagttgatattgactgtctctctatggatactgctctgatattcactgaaaacataggaaaacctcgttatgctgagacctgggattttcatgtgtcagcatctacctttttgcagtttgaaatgagcatgggctgtagcaagcccttcagcaactcccacagtgtacagctccagtattctctgaacaatggcaaggactggcatcttgtcaccgaagagtgtgttcctccaaccattggctgtctgcattacacggaaagttcaatttacacctcggaaagattccagaattggaagcggatcactgtctaccttccactctccaccatttctcccaggacccggttcagatggattcaggccaactacactgtgggggctgattcctgggcgattgataatgttgtactggcctcagggtgcccttggatgtgctcaggacgagggatttgtgatgctggacgctgtgtgtgtgaccggggctttggtggaccctattgtgttcctgttgttcctctgccctcgattcttaaagacgatttcaatgggaatttacatcctgacctttggcctgaagtgtatggtgcagagagggggaatctgaatggtgaaaccatcaaatctggaacatctctaatttttaaaggggaaggactaaggatgcttatttcaagagatctagattgtacaaatacaatgtatgtccagttttcacttagatttatagcaaaaagtaccccagagagatctcactctattctgttacaattctccatcagtggaggaatcacttggcacctgatggatgaattttactttcctcaaacaacgaatatacttttcatcaatgttcccttgccatacactgcccaaaccaatgctacaagattcagactctggcaaccttataataacggtaagaaagaagaaatctggattgttgatgacttcattatcgatggaaataatgtaaacaaccctgtgatgctcttggatacatttgattttgggcccagagaagacaattggtttttctatcctggtggtaacatcggtctttattgtccatattcttcaaagggggcacctgaagaagattcagctatggtgtttgtttcaaatgaagttggtgagcattccattaccacccgtgacctaaatgtgaatgagaacaccatcatacaatttgagatcaacgttggctgttcgactgatagctcatccgcggatccagtgagactggaattttcaagggacttcggggcgacctggcaccttctgctgcccctctgctaccacagcagcagccacgtcagctctttatgctccaccgagcaccaccccagcagcacctactacgcaggaaccatgcagggctggaggagggaggtcgtgcactttgggaagctgcacctttgtggatctgtccgtttcagatggtaccagggattttaccctgccggctctcagccagtgacatgggccattgataatgtctacatcggtccccagtgtgaggagatgtgtaatggacaggggagctgtatcaatggaaccaaatgtatatgtgaccctggctactcaggtccaacctgtaaaataagcaccaaaaatcctgattttctcaaagatgatttcgaaggtcagctagaatctgatagattcttattaatgagtggtgggaaaccatctcgaaagtgtggaatcctttctagtggaaacaacctctttttcaatgaagatggcttgcgcatgttgatgacacgagacctggatttatcacatgctagatttgtgcagttcttcatgagactgggatgtggtaaaggcgttcctgaccccaggagtcaacccgtgctcctacagtattctctcaacggtggcctctcgtggagtcttcttcaggagttccttttcagcaattccagcaatgtgggcaggtacattgccctggagatacccttgaaagcccgttctggttctactcgccttcgctggtggcaaccgtctgagaatgggcacttctacagcccctgggttatcgatcagattcttattggaggaaatatttctggtaatacggtcttggaagatgatttcacaacccttgatagtaggaaatggctgcttcacccaggaggcaccaagatgcccgtgtgtggctctactggtgatgccctggtcttcattgaaaaggccagcacccgttacgtggtcagcacagacgttgccgtgaatgaggattccttcctacagatagacttcgctgcctcctgctcagtcacagactcttgttatgcgattgaattggaatactcagtagatcttggattgtcatggcacccattggtaagggactgtctgcctaccaatgtggaatgcagtcgctatcatctgcaacggatcctggtgtcagacactttcaacaagtggactagaatcactctgcctctccctccttataccaggtcccaagccactcgtttccgttggcatcaaccagctccttttgacaagcagcagacatgggcaatagataatgtctatatcggggatggctgcatagacatgtgcagtggccatgggagatgcatccagggaaactgcgtctgtgatgaacagtggggtggcctgtactgtgatgaccccgagacctctcttccaacccaactcaaagacaacttcaatcgagctccatccagtcagaactggctgactgtgaacggagggaaattgagtacagtgtgtggagccgtggcgtcgggaatggctctccatttcagtgggggttgtagtcgattattagtcactgtggatctaaacctcactaatgctgagttcatccaattttacttcatgtatgggtgcctgattacaccaaacaaccgtaaccaaggtgttctcttggaatattctgtcaatggaggcattacctggaacctgctcatggagattttctatgaccagtacagtaagcccggatttgtgaatatccttctccctcctgatgctaaagagattgccactcgcttccgctggtggcagccaagacatgacggcctggatcagaacgactgggccattgacaatgtcctcatctcaggctctgctgaccaaaggaccgttatgctggacaccttcagcagcgccccagtaccccagcacgagcgctcccctgcagatgccggccctgtcgggaggatcgcctttgacatgtttatggaagacaaaacttcagtgaatgagcactggctattccatgatgattgtacagtagaaagattctgtgactcccctgatggtgtgatgctctgtggcagtcatgatggacgggaggtgtatgcagtgacccatgacctgactcccactgaaggctggattatgcaattcaagatctcagttggatgtaaggtgtctgaaaaaattgcccagaatcaaattcatgtgcagtattctactgacttcggtgtgagttggaattatctggtccctcagtgcttgcctgctgacccaaaatgctctggaagtgtttctcagccatctgtattctttccaactaaagggtggaaaaggatcacctacccacttcctgaaagcttagtgggaaatccggtaaggtttaggttctatcagaagtactcagacatgcagtgggcaatcgataatttctacctgggccctggatgcttggacaactgcaggggccatggagattgcttaagggaacagtgcatctgtgatccgggatactcagggccaaactgctacttgacccacactctgaagactttcctgaaggaacgctttgacagtgaagaaatcaaacctgacttatggatgtccttagaaggtggaagtacttgcactgagtgtggaattcttgccgaggacactgcactctattttgggggatccactgtgagacaagcggttacacaagatttggatcttcgaggtgcaaagttcctgcaatactgggggcgcatcggtagtgagaacaacatgacctcttgccatcgtcccatctgccggaaggaaggcgtgctgttggactactctaccgatggaggaattacctggactttgctccatgagatggattaccagaaatacatttctgttagacacgactacatacttcttcctgaagatgccctcaccaacacaactcgacttcgctggtggcagccttttgtgatcagcaatggaattgtggtctctggggtggagcgtgctcagtgggcactggacaacattttgattggtggagcagaaatcaatcccagccaattggtggacacttttgatgatgaaggcacttcccatgaagaaaactggagtttttaccctaatgctgtaaggacagcaggattttgtggcaatccatcctttcacctctattggccaaataaaaagaaggacaagactcacaatgctctctcctctccgagaactcattatacagccaggatacatgatgcagtttaaaattgtggtgggttgtgaagccacttcttgtggtgaccttcattccgtaatgctggaatacactaaggatgcaagatcggattcctggcagctcgtacagacccagtgccttccttcctcttctaacagcattggctgctcccctttccagttccatgaagccaccatctacaactctgtcaacagctcaagctggaaaagaatcaccatccagctgcctgaccatgtctcctctagtgcaacacagttccgctggatccagaagggagaagaaactgagaagcaaagctgggcaattgaccacgtgtacattggagaggcttgccccaagctctgcagcgggcacggatactgcacgaccggtgccatctgcatctgcgacgagagcttccaaggtgatgactgctctgttttcagtcacgaccttcccagttatattaaagataattttgagtccgcaagagtcaccgaggcaaactgggagaccattcaaggtggagtcataggaagtggctgtgggcagctggccccctacgcccatggagactcactgtactttaatggctgtcagatcaggcaagcagctaccaagcctctggatctcactcgagcaagcaaaatcatgtttgttttgcaaattgggagcatgtcgcagacggaccagctgccaacagtgacctgagtggcccccacgctgtggacaaggcagtgctgctgcaatacagcgtcaacaacgggatcacctggcatgtcatcgcccagcaccagccaaaggacttcacacaagctcagagagtgtcttacaatgtccccctggaggcacggatgaaaggagtcttactgcgctggtggcaaccacgccacaatggaacaggtcatgatcaatgggctttggaccatgtgggaggtcgtcctagtaaggcactcgcaaacaaaattacgtgatgaatttttcacgacaacatgggctcagacatttctacaacagaagacgaaggtcacttaggcgatacccatgaaggaatcaaaaagtttattttttttcttccaacatgtgatgtgttggctctccattcttttaaatctcgcacttacatctggatatcagggaaatatctgtggaagggacttgggtggattacctgaaaggcccttcttcaaggccggtgtacaccactttcccacactgtggaactaatgacagtggacttatttgctcataagtaaatgtcttcatgttgatgtgtccgtgaaagttgtgatctgttgtaatatcagttacagtggcagtattgacaataagaaacagtttaacagaaaaatgaaatttaagcacaaaaaatttaagagattttatgtttaaaatggcatttagcacagtatttaacattcttggtcacaaagctatttaagtggactgtatttcagctatgtctcatgttttatatgattaaattatcattgtttgtcctttatgtattctcttctacaatacaacacattgaaactgtatttacttgttatgttgtaatattttgctgctgaatttggggctacttatattctgcagaaaattaattgaaatacctattcaagaagatagttgtaaagatattgtatctcctttaatatactccttaaaaatgtatgttggtttagcgttgttttgtggaataagaaaaaggcttgaaccccggaaaaaattttcctactttaaattgtggatgaaagacccctatcctcccccacaaaaaagttcccccaattcccttgtcctaaagaatctttttttaagtgttcctgtggcctgatttacctaacagtaactgcccattttttgtcctgtgataatcagagtgattttgtaaaacagtggttgttttttccattgtgttttcctccgtggattgttttttctgcgggtcatattcataccttctgatgaagttgtacaacaccagcaacattataatggccctgtagctctgaatgctatttgtgtaactgaaaggttgcactctagggtgaaccaagctataaaagcccatgcttaaataaaaattatgtccaaaagccattgaaaaaaaa

SEQ ID NO: 25289 - DNA, 296 bp, Homo sapiens
  SIMILAR (1)..(153): 841254mologous to Homo sapiens RP3 candidate gene,accession number U02556,Smith-Waterman Score=230.
tgtgtagatggggttttaggtggtgaagattataatcacaacaacatcaaccagtggactgcaagcatagtggaacaatccttaacacacctggttaagttgggaaaagcttataaatatattgatagttgtccctcatatgaatcctgtgcttgccttgcatcctgtgagagcctcaggcccagctgcaggcttgtctgctggcagggtagtgtcagcagtcctggctttttgcttaatgacaacgctgcatcaatgcctcttcctgcaattgcttctacaacagcttctatgag

SEQ ID NO: 25290 - DNA, 2332 bp, Homo sapiens
  SIMILAR (268)..(384): 641254mologous to Homo sapiens RP3 candidate gene,accession number U02556,Smith-Waterman Score=109.
  misc_feature (1)...(2332): n = a,t,c or g
atggctcggagtctcggggtcctggtggcactgccattcccgctcccggttggcttcaatgctgaggaagcccacaatattgtcaaagagttcagccctgggaagagtcatccaagagaaagtttgagtcagcagagagaaacacttgttcaggctggtgcctttcattggtttgggtggagagggaaggagaaactaaagcccaagttcaacacatttgggagactcccaaatgagatgttagaacaatggttatcacccaccaaccagtgtgtagatggggttttaaaggtggtgaagattaataatcacaacaacatcaaccagtggactgcaagcatagtggaacaatcccttaacacacctggttaagttgggaaaagcctataaatatattgtgacctgtgcagtggtccagaagagcgcatatggctttcacacagccagctcctgtttttgggataccacatctgatggaacctgtaccgtaagattngggagaaccggaccatgaacttgtattgtcaacgttttttgccattgcttatttgttctttaactggactaaaaatgttgggctaaagccatttaacttaagaatttgtcagtgtatcctttccaaacagagtgatagttgattactagggtgctagatgaaaagcgtgcagtatgctttaaagctatcaacaaaaactggaatattataagcaagccatatcatagtaattggcagattagctccatattccatacagcatcgtttaaataggaaaaatttaatgctagcaaaaaaataaatttagaaatatggcatgacatgaaaatacaatcttatatttacaccagcttttcactaatattttgtacctaaggtgatggggaactccattcagataataaaattctctttcagctagagaagttaacaggaataaatatatggaacaaaaaagctgccaagggttaaatgtggagaaaatgatgagaattagctaacatttttaagtttttttaaactttcttcccctcagttgtacttaatatttagtggaaagtaataatttttttaattttctatcaactaatagtatagtaacaactatgattaacttgtttactttttctgaggattagtaaatcaattttttttaatttcaaatttttggatttacacttgagggtaaattaaatctggtaaactgaatttcctagttaaataaaattagttgcagtatatgatgaacagtgtatgactcaaacagctgccttacaattcactcattccatgtggaacaaacatttatcagatgcctattatgggcatatgtctctgctaccgcaccatagttggcaatgtgctgtgcaaatgctaagttccttttagcaattgttcagttggaagacgtattaatatttggggaaggaaaagaaagtagttgttttccaagggaggaaaaaagtgaatctggttccacatatggaagtaagcaaaatgaaaagcacttattgctttctgacagaattatagatgtaattttaagagttgctcctagcaagttaaaagtgcatataaaatatgcaactcttagttaaaggccttattatcagtcttacctatacaagtagtaaattttgtcattgctttagttacaaccatctgtaaataacttaaacgactctattatgtggggttcaaattgagtggaataaagtatagattaaaagtatccaatccttatcccggtatcttcagggctaatgaaatggtatttaaatttattatgaaaatagatgaaaaattagggtacacagctggccaccaaatgcgaagtcaatctgctacttaaccctgaaaacaaaatcagttttgcatattaccactaacactaatacatatagagagcggaaccataactcattgaattttggagaggaataagcttagcgttaatattgaccaatattaaggcaatattcttgtaggaatactatgtgcaatgtttgatattttgccaaataacaataattaataattgttcaatgtttaagaataatattaacaaaataaaggagtttaatgcagtgatcttttggtttttgccacatcaaaaattctcagtcattattcatgtttcttttatgctgctggcttttgtgccctggaagatcataatagtgaccaaaatatacatggcagacttgttttttattattgttggtttaagcataatttaagaaaaaaaatttttacctggtgaacttgctatctgctctgtttctagttaaaatataataaatattatcttcctgtgctgtaaaaaaaaaaaaaaat

SEQ ID NO: 25291 - DNA, 2964 bp, Homo sapiens
  SIMILAR (286)..(1446): 511254mologous to Homo sapiens zinc finger protein Cezanne,accession number AJ293573,Smith-Waterman Score=910.
gtcctcaaagcaaaccagcaacattgagaatgggtgtcaagggcaccagagaggaaaagcacttgattttcacccactattgttttgctaagaacaggatgtgctgcttcattcacctagttgccttaatgggaagcctcaggaagaaggctggaggggaattaacagaaccgctgagtaaggaggctgttctgcgtgcagacaggaggctctccagtgggtcgtggtagtttgcatcacctctggcttgtcttttctcatgtcctttctctcctctgttctccctgcctcctggctccaggaatgtgggggtttcacgaccgggacctggtgttacggaaagctctctataccatgatgaggacgggagctgagagggaagccctgaagcggaggtggaggtggcagcagacgcagcagaataaggagtcagggctggtgtacacagaggaggagtgggagcgggagtggacggagctgctgaagctggcctccagcgagccgcgcacacacttcagcaagaatggcggcacgggcgggggacatttaccaccagagggcaagccgctgcatggctgctcctcactgctcagatctggaaagggtggccacgtcaaggcagaacccagcaggctgcagcaaagccaggccaagccacccctgacctctcaaatcagagcactgcactttccaatcccaagccagattaatgaaaagcccggagctggtcattggtcagcaaagctgcatttcccttattggcagcttggggaagctggagaagaagagggctcatcaccacctgacattatgagatgtttgttaacctgcttatctgtccccagcacagccgtgatccccctgacggattctgagcacaagctgctgcctctgcactttgcagtggaccctggcaaggactgggagtgggggaaagacgacaacgataacgcccggctggcccaccttatcctgtcgctagaagccaagctgaaccttctgcacagctacatgaacgtgacgtggatccggatcccctccgagacacgggcgcccctggcacagccggagtctcccacggcctcggcaggggaggacgtgcagtccctggccgactcgctggactcggaccgcgattcggtgtgcagcaattctaacagcaataacggcaagaacggcaaggacaaggagaaggagaagcagcgcaaggagaaggacaagacgcgcgccgactccgtggccaacaagctgggcagcttcagcaagacgctgggcatcaagctgaagaaaaacatgggcggcctcggcggcctggtgcacggcaagatgggccgcgccaactccgccaatggcaagaacggggactcggccgagcggggcaaggagaagaaggccaagtcgcgcaagggcagcaaggaggagtctggtgcgtcggccagcacgtcgccgtcggaaaagaccacgccgtcgcccacagacaaggcagcgggcgcgtcgccggcggagaagggcggtgggccgcggggcgacgcctggaagtacagcacggatgtgaagctgagcctcaacatcctgcgcgccgccatgcagggggagcgcaagttcatcttcgccggcctgctgctcaccagccaccggcaccagttccacgaggagatgatcggctactacctgacgagcgcgcaggagcgcttcagcgccgagcaggagcagcggcgccgcgacgccgctactgcggccgccgctgccgccgccgccgccgccgccacggccaagcggccgccgcgcagaccggagacggagggcgtgccggtcccggagcgcgcctctccgggcccacccacgcagctggtgctcaagctcaaggagcggccgagccccgggcccgcggcagggcgtgcggcgcgggcggcggcgggcggcacggcctccccggggggaggcgcgcggcgtgcgagcgccagcggaccagtgcctggccgcagccccccggcgccagcgcgccagagcgtcatccacgtgcaggcgtcgggcgcgcgggacgaggcgtgcgcgccggccgtgggggcgctgcggccgtgcgccacgtacccgcagcagaaccgctcgctgtcgtcgcagagctacagcccggcgcgcgccgccgccctgcgcaccgtcaacacggtcgagtcgctggcgcgcgcggtgcccggggccctaccgggcgcggcggggaccgcgggggcggccgagcacaagtcgcagacctacaccaacgtgtttggtaaagcatttgtatacaacagagtatgtgcgcttctcaagggtgtatatttgctctatgttttgagaacctcttctattgaatttgaaggaaccagtcagagagctccaggaccaagatgcaaaaactgggacctgacagccgctctgagcgactatgagcagctccgccaggtgcacacagccaatctgccacatgtgttcaatgaagggcggggtcccaagcagccagagcgagagccacagcccgggcacaaggtggagcgaccctgcctgcagaggcaggacgacattgcccaagtttccctgaagctcctggggcacgcagttatcatccatcttcactgtgctggagcacaggctctggtggatgctcctccagatgagagtcggggaagggggctagaaggacccttctctctgctaccagagagattggcagaatcagggcctaaaaagcggctttcccgggggatttcccacgccagctcagccatcgtctccctggcccggtcccacgtggcaagtgaatgcaacaacgagcagttccccctggagatgccaatctacacattccagttgccagacctgagcgtgtacagcgaggatttcaggagcttcatcgagcgggacttgatcgagcaggcaacaatggtggctttggagcaggcagacaactcctccgtgggtgttgaatga

SEQ ID NO: 25292 - DNA, 1119 bp, Homo sapiens
  SIMILAR (475)..(579): 571254mologous to Homo sapiens Human secreted protein, SEQ ID NO: 6720,accession number G02639,Smith-Waterman Score=105.
atgcacaaggcactgtccaacgtccagcagcagggcatatgtgggtccttggggccatattcctttaacctgtggacacttcacccacggctggaggaaattcccgtcagcttgtgggagaggccatctgagagagatttcagcacatccatcccccccgagatccagaaccgtatcaagtcctaccccagtcccgcagagcagcttcttcctccacagcttctgagctgcaccgaagcaggcctccgccagcctttgctacccaaggctgatgttgggtttttaacactcagccaagtcatagggaagagactaaatgagttaatatgtgagaggctcttggaacagggccaggcccatgatgggctctctggtgggctctcaagctctcgccagccgatgatcattgggccctttgatgctgagtgggcagaagctgcagacttcatacactatggaatactatgcagccataaaaagaacaagatcgtgtctcttgtaggaacatggttggagctggaggccattatccttaagaaactaatgcaagaacagaaaaccaaataccacatgttcttacttgactccctgtcccacgggatgcagcaggcagaaagggtgctcatcgcagatggaacaatgcttttatctgcccagtaccagtttgaaaacaaccttcttgtcccaatcctgagagtatcctttcgaaagagcctccagaggaaagaagagccaggccgaaaggcaaagaaatcccagacctcaggggaaggaatcaagaaaagaaggttctggtttgagtggaaggagcccgtggcactttctagccaggggtggtatgaggccaaaggttctgagaggcctgagaaaggacacctaggtctgctgagggcggagtctttccaagatctgaggactgccttaatttccaagccctacttctcagtcccagggaaagttggcccagctataaaatgccctgaaactctcccagaactcaaaacatacccacagtacggtgtcactcttggggaacctgtccgtaatgaacagcaacaagcatcttctttcccttccctctccaacacgcacctttccaagaagagaaatgagagctag

SEQ ID NO: 25293 - DNA, 2315 bp, Homo sapiens
  SIMILAR (720)..(1679): 991254mologous to Homo sapiens Homo sapiens secreted protein gene clone hm236_1,accession number W95633,Smith-Waterman Score= 1616.
gacacaggttgaacatcacggcggagaacgactgccggcggctgcactgctccctgagagacttgagctccctgctgcaggccgtgggccgcctggccgagtactttatcggggatgtgtttgctgcacggttcaatgatgccctcacagtcgtggaaaggttggtcaaagtcactctgtacggatctcagataaaattgtacaacattgaaactgctgtgccatcagtattgaaacctgacctcattgatgtgcatgctcagtccctggctgcgctgcaggcttactctcactggttagcacagtattgcagtgaagttcaccggcagaacacgcagcagttcgtgacactcatctctactaccatggatgcaatcacacctctaatcagcaccaaggtccaagacaagctgctgctatctgcgtgccacttactggtctcactggccaccaccgtgcggcccgtctttctgatcagcatccctgcagtgcagaaagtattcaacagaatcactgatgcctctgccctgcgacttgtcgataaggcccaggtgttggtgtgccgagccctctctaacatcttgctgcttccgtggccaaaccttccagagaatgagcagcagtggcccgtgcgctccatcaaccacgccagcctcatctctgcactctcccgggactatcgcaacctgaagcccagtgctgttgccccacagagaaagatgccactggatgacaccaaactgattatccaccagacactcagcgtcttagaagatattgtggagaatatctcgggggagtccaccaagtctcgacagatttgctaccagtcgctgcaggaatctgttcaggtctccctggccctctttccagcttttatccatcagtcagatgtgactgatgagatgctgagcttcttcctcactctgtttcgaggccttagagtacagatgggtgtgcctttcactgagcaaatcatacagactttcctcaacatgtttaccagagagcagttagccgagagcatcctccacgagggcagcacaggctgccgggtggtggagaagtttctgaagatcctgcaggtggtggtccaggagccaggccaggtgttcaagcccttcctccccagcatcatcgccctgtgcatggagcaagtgtatcccatcattgccgagcgtccctcccctgatgtgaaggccgagctgtttgagctccttttccggacgctccatcacaactggaggtacttcttcaagtccaccgtgctggccagtgtccagagggggatcgctgaggagcagatggagaatgagccccagttcagtgccatcatgcaggctttcggacagtcctttctccagcccgacatccacctttttaaacaaaatctcttctacttggagactctcaacaccaagcagaagctgtaccacaagaagatcttccggactgccatgctgttccagtttgtgaacgtgctgctccaggtcctggtccacaagtcccatgatcttctgcaggaggagattggcatcgccatctacaacatggcctcagtcgactttgatggcttctttgccgccttcctcccagagttcctgaccagctgtgatggtgtggatgccaaccagaaaagtgtgctggggcggaatttcaagatggatcggctatgcccctgccttccaggacctgccctcattcacccagaatgtgcacaggctggtcaacgacctgcgctactacagactctgcaacgacagcctgccccctggcactgtgaagctctaggcctgctactgcctggggacacggacttctgctgctgccacctgcgccagccctaccttccaccacagatgtctcccagatgggccttggtcacactccttggcttctcccaccgcaagcaacgctgcctgcctctgccgctcctccacatcttgccgctgcccagcagagctggcttctgggtccacctgagcactggacggtgctcccagggcgttggagcaggcggaggggtgtgtggccaggatttaggggcctgggaattccctgagctcatgtcagttactcctaaacggcacattctgatggcggaaggagacagcatcccggtcactgttcccattgagtcacaaggagatggaggcccaaagcatgactcacctggggtcacagagctggaagccaggggcgccgtggctgctctgtccattttactgcctagtgaaaggcctgcggggggcgctgtcaggctccttgcggtgctgctggtggagcgccagagcctgggcctggctgcgggctga

SEQ ID NO: 25294 - DNA, 1160 bp, Homo sapiens
  SIMILAR (270)..(878): 981254mologous to Homo sapiens Homo sapiens secreted protein gene clone hm236_1,accession number W95633,Smith-Waterman Score= 1008.
caccgtccctgggtgccacactggagctgattcctgagctccccgtgtctcggcgaccttgcttccagcctctgaagggcactcgaggaagactgattgagactctggggaaggacgatttaggggcctgggaattccctgagctcatgtcagttactcctaaacggcacattctgatggcggaaggagacagcatcccggtcactgttcccattgagtcacaaggagatggaggcccaaagcatgactcacctggggtcacagagctggaagccaaactgattatccaccagacactcagcgtcttagaagatattgtggagaatatctcgggggagtccaccaagtctcgacagatttgctaccagtcgctgcaggaatctgttcaggtctccctggccctctttccagcttttatccatcagtcagatgtgactgatgagatgctgagcttcttcctcactctgtttcgaggccttagagtacagatgggtgtgcctttcactgagcaaatcatacagactttcctcaacatgtttaccagagagcagttagccgagagcatcctccacgagrgcagcacaggctgccgggtggtggagaagtttctgaagatcctgcaggtggtggtccaggagccaggccaggtgttcaagcccttcctccccagcatcatcgccctgtgcatggagcaagtgtatcccatcattgccgagcgtccctcccctgatgtgaaggccgagctgtttgagctccttttccggacgctccatcacaactggaggtacttcttcaagtccaccgtgctggccagtgtccagagggggatcgctgaggagcagatggagaatgagccccagttcagtgccatcatgcagggccttcgcactggctgcctctgctgcctgcagcactgttcactcgcatacctgagtagtttactcctcctctcccttgtcatttttctcaaatgttatcttcccaaggaggcctttccatttaatctatctaaaattccaaatgtccctcccctgacactctccatcttccttctggatggattcctaacagctacaacagaacctggcctccctgatgccacggacacagacctggccaccaaggatgcagcactgagcaaatcatggcccaacttctag

SEQ ID NO: 25295 - DNA, 456 bp, Homo sapiens
  SIMILAR (286)..(414): 371254mologous to Bacteriophage SPP1 gene 24,accession number X97918,Smith-Waterman Score=65.
atggctgcggtagctccagacatcacatccttacccaaccacttccaaatgcaggaaataaggggcattcaggatgagacattgatgtggcgagtgattgaagtcaaagactcaatgcctgttcccaaagagatcaaaatcggccctactgtcttgctgggcattggcgactcagtccacccagtgaagcagacatgcaaaatggctatgcagggtgccgtctttggcaccaggcgacccacatcagctgatgaacagatcctcaacctacggaaagcaccttgcctaacacgggatcaggagctgtatctgaggcctgtttctgagtaccttctccactgtggtcaaggtaactcaagtgtcacctccttggagaagccttctccgacctcactatctgaaggagatcagctccccatctacaaccgccagagtagaacagtggatagagtgtga

SEQ ID NO: 25296 - DNA, 1206 bp, Homo sapiens
  SIMILAR (797)..(976): 371254mologous to Homo sapiens Human prostate cancer- associated protein 33,accession number Y48247,Smith-Waterman Score= 81.
atgcacaaactcaaaaactaccgtacaacacagagggcaaaagaagcaacttacaaaacaatgcagacattgatgtggcgagtgattgaagtcaaagactcaatcctgttcccaaagagatcaaaatcggccctactgtcttgctgggcattgcgactcagtccacccagtgaagcagacatgcaaaatggctatgcagggtacttctttggactcgaggctgtggttggtgtgcatgtggcagggctcggtgacctacagctgggaaccctgtcctgcatgttcaaagcaggagagcccagcccctttgccgcccctgcactgccacagctgcacaaaccaccgtgcggcgtcagaccacctggtgctcaaactgaacccaggcttcacacacattccttcctctccatggaaaatccttggtctccttcctcgtgcgtctttcaggctgctgttatggcaaagaaagaggaacactttgacatagacaagttgggtataccatctcaggcacagtttcaggaagaagggcaaaatgaaaaacacaagaacaagaaggaagtggatcttcagaaactctccaccacccggcagcctgtgctgccctcgtggaggatgctctcggcaactgctctctacagaggagaaagccacacagtgagcaaccacatgttttctgggggccagcatgaaaacccatgctgtggcaagtgcagaacaggagaaaaagccacactttgtcgccagacccaccacttctcccttgaatctgaaactatagatgatgctgtgccagctgcaaaggccagtgtggggtcccactcctgttcccgaggggtcctccagcccagtcccatcgccagtcccagtcccaagtccgcagtccgcattccccgtcccccagtcccccagttccacatgccccaacccatcccatcctatccatcctatccctatggtcccgagttcctggtctggccattgggattcaaaatgaattgggaaatctatttggctgcaagcgacaaaatccagctcaaacagcacaagcaaaaagacaaatttctactggcttatgtgaagaaaaagaaccacaagccattagtggatgaagaaaacacagcctcagtttcctgtggagaaacttcttcccctccagaagacccactccagttcatcaatgttattaataacaagtatgtttaa

SEQ ID NO: 25297 - DNA, 5724 bp, Homo sapiens
  SIMILAR (664)..(563): 971254mologous to Homo sapiens Homo sapiens secreted protein gene clone hm236_1,accession number W95633,Smith-Waterman Score= 180.
ctagaacaacaacataggcattttatttcttttcattaagcttcttagtttcttagtatcacaatggaatgatgagaaaacaacaaaaacgtgagtctttgcaaatctctgacaaagagcagagatctcaaggcaattggggcgggggaggcttgacagaagtgccagagcagttccaacgtcacatctctccttggctggaatggtgagaaggtggcactgtcgtgagctgtccttggcaattctgccccatgagccacgtgcgcctggtctgcatgggccaccccgcgggatttcctggtgcctcctagtacctggccacacacccctccgcctgctccaacgccctgggagcaccgtccagtgctcaggtggacccagaagccagctctgctgggcagcggcaagatgtggaggagcggcagaggcaggcagcgttgcttgcggtgggagaagccaaggagtgtgaccaaggcccatctgggagacatctgtggtggaaggtagggctggcgcaggtggcagcagcagaagtccgtgtccccaggcagtagcaggcctagagcttcacagtgccagggggcaggctgtcgttgcagagtctgtagtagcgcaggtcgttgaccagcctgtgcacattctgggtgaatgagggcaggtcctggaaggcaggggcatagctgcagccaacaacacaccaggtcacccacccaccagaccccaacagctacttccatcccagagtgtgcactgaagataggggagcactttctaaaactcaaaacttctattcactgttgcactgcgtgtcacagagactctgtgccaggcgctgtgggagaaaaagaacaagaggaatacgtccctagggcctctcgggtgccagacactgctgcaatcaacatacagacatcaactcactgagtcctcaccacaaggctgccaccaagccctaccagaaccactagtctaaggacagaaagaccaaagcgctgcaccatgaagaagctggccccagctcacactgaagagaccagcacacttgctcctgagtccggcccctcaaacgcagacatggctgtggtgacagccctcttcttcaccatggccccttgaggtgacgcgcacaccgagcaatgtctgcagaacctttacccacggggctccaggccgcccctgcccctcgagagccacccgagcagcagcaaacacagtcccaaggcctgtcccactgggcgcagcgtgggccatggaaggccctgggccagaagtgaggccctgacctccgccatcatgcacacggtgagaccctgctttttttttcagtgtaggtcccggtgaggactcaaacaggcccagcaagccccagcagagccatgagcaggaccaagttcattttcctgcccaaccactattcctcttccagaactccattcaaagcctgcctcttcccaaagtctgcacagatgcctcctatttcctggccccagcagccagctcagcgcctctgtcctgagcaatctgcttctggggagtgtgtgcaggctctggggccagaacacccaggtctgcctcctgcttcgcagctctaccacttccaagttctgtgaactgctcaccttctgagcccccaccatctgtgaaatgggggagtaacaggacccacacttcagaggcttgttagaaggcttactcgagccaagacatgtcacatgcttggcactatgtggtccacagagggtgctgtattggcctgtctaccatgaaagacttggtgaaggctgggactggtgccccagttcctggcccggggcttgagaagcagctggcttcaaacacacagtgcgtgactgaatggaaggtggtgattcttttattttaccctcaaaaaaccaactaagggatgtcttttaaatcagtggctcccaaatgccaaaccagaatttcctgggtagaacacagaagtctgtttctccatttttaataagtaccccaggtgcttctgatataactagatttttttttttgagacaaagtcccactctgccgcccaggctggagtgcagtggcacaacctccgctcactgcaacctctgcctcccgggttcaagagattcttgtgcctcagcctcccaagcagctgggattacaggcgtgtgccaccacacctgactaattttttttatttttagtagagacagggtttcgccatgttggccaggctggtctcaaaccccctaacctcaagtgatccgcccgccttggcctcccaaagtgctgagattacaggtgtgagacaccgcgcctggcctataactagattttgaaaccacagctttaaatcaaaaagttgactgatattgatgtcgttagaagctgatcattaagtattaggatctggcctctagaaaaaggaaaaaacatatccaggggctgaagtgaactggaagaggcttaggagagaacaagtcccaagaaaaggaagaccccaagacaaaggagaacaggatgagtctaagcaaaagcttccctgccacacgtggcaaatgaggaaagcaggcggccaggtttgcaccagtgagagcaatgtgtgcatctgagcactacggtggagccgtggacaagctgcttcacagaggactcaggtcaagaaccccaagaggaccagggagaaagcgatttcttttcctaatttcatcaagtataaaacggtacaaggaaaagttcccagaagttcctatcaggcaagagagaggcctggtcacctgacacaggaagaagagaacaggtgagccccatggggaaggaggtcccaggcactgtcaggctccaacaagatggcctcatggacaccaagagccagcagcacccagctcccaccgaggtgctgcacgggtggggacagcccacctgacagtccctgcacaggtggcagcagtgggacaagagggtgagtactaggagggctcctcccaggacctggcagcaactcagcccaagctgagctggggctggtctggaaagagcccaagacagccggggaacctgggtcccacctctaaccctggggacccagaagtgcagctcccaagcaccaaccatctcagcctgaatgcaagcctgggcacactccaatgctggccccaccggggctcatcacccaggagggagaacggcagggtcctgggtatgaacaaagatgccaagacaaatggaggggctgcagagccaggaactcgggacctccatggctgagactaagaacatacgtgctacagacaccaagactggggaaaaggctgtgcccctcaatcaggctacagcaccaggtcagcaggcatctcgtgagctgccgccaagctgcagggtgggcacagaccacgcccagaggcctcaatgtgccccctccttgctgcacaggtgccaggcttgcgtgcccactctgccctcctcttagcccggcctctttctctcctcacccgatccatcttgaaattccgccccagcacacttttctggttggcatccacaccatcacagctggtcaggaactctgggaggaaggcggcaaagaagccatcaaagtcgactgaggccatgttgtagatggcgatgccaatctcctcctgcagaagatcatgggacttgtggaccaggacctggagcagcacgttcacaaactggaacagcatggcagtccggaagatcttcttgtggtacagcttctgcttggtgttgagagtctccaagtagaagagattttgtttaaaaaggtggatgtcgggctggagaaaggactgtccgaaagcctgcatgatggcactgaactggggctcattctccatctgctcctcagcgatccccctctggacactggccagcacggtggacttgaagaagtacctccagttgtgatggagcgtccggaaaaggagctcaaacagctcggccttcacatcaggggagggacgctcggcaatgatgggatacacttgctccatgcacagggcgatgatgctggggaggaagggcttgaacacctggcctggctcctggaccaccacctgcaggatcttcagaaacttctccaccacccggcagcctgtgctgccctcgtggaggatgctctcggctaactgctctctggtaaacatgttgaggaaagtctgtatgatttgctcagtgaaaggcacacccatctgtactctaaggcctcgaaacagagtgaggaagaagctcagcatctcatcagtcacatctgactgatggataaaagctggaaagagggccagggagacctgaacagattcctgcagcgactggtagcaaatctgtcgagacttggtggactcccccgagatattctccacaatatcttctaagacgctgagtgtctggtggataatcagtttggtgtcatccagtggcatctttctctgtggggcaacagcactgggcttcaggttgcgatagtcccgggagagtgcagagatgaggctggcatggttgatggagcgcacgggccactgctgctcattctctggaaggtttggccacggaagcagcaagatgttagagagggctcggcacaccaacacctgggccttatcgacaagtcgcagggcagaggcatcagtgattctgttgaatactttctgcactgcagggatgctgatcagaaagacgggccgcacggtggtggccagtgagaccagtaagtggcacgcagatagcagcagcttgtcttggaccttggtgctgattagaggtgtgattgcatccatggtagtagagatgagtgtcacgaactgctgcgtgttctgccggtgaacttcactgcaatactgtgctaaccagtgagagtaagcctgcagcgcagccagggactgagcatgcacatcaatgaggtcaggtttcaatactgatggcacagcagtttcaatgttgtacaattttatctgagatccgtacagagtgactttgaccaacctttccacgactgtgagggcatcattgaaccgtgcagcaaacacatccccgataaagtactcggccaggcggcccacggcctgcagcagggagctcaagtctctcagggagcagtgcagccgccggcagtcgttctccgccgtgatgttcaacctgtgtcctgaccctgaagtgactataaactgttgtaatcccaaataaacttctaaattgtcctgaagaacagggaacagtgtggagaaggcgtgcgtgggcaggagctccatcactttggccaccacctccaagctctgccgtaagtaccgctgccactccgtctgctgatcgtcatccagagtctcatcatccaactcctccagctgggcttggttgtatctgaactggattcgattcaacacctctgtgagcaggagcaccagggcatcttcgtacctgttgagaactgcttccttgtctccaagacgacttttaattttacttgtcagatagtccaaaaacagcgtccagatatccaaacaagagaagtagccttcatgagtaggctgatgaaatgtgtacttgaacaaaagtgtcaaaaactccaccacagggaactgggagtaagactcgattcttcttaggtgaacactcacaaagagccgaagaaagtcagtaaacttctcgatatagctaaatgagacaagacaaaaggtgacaataagaaacccagccacctccttagaacttaaattcaat

SEQ ID NO: 25298 - DNA, 2825 bp, Homo sapiens
  SIMILAR (1699)..(2019): 991254mologous to synthetic construct galanin receptor type 3,accession number AF042785,Smith-Waterman Score=537.
atgtggcctgggaacgcctggcgcgccgcactcttctgggtgccccgcggccgccgcgcacagtcagcgctggcccagctgcgtggcattctggagggggagctggaaggcatccgcggagctggcacttggaagagtgagcgggtcatcacgtcccgtcaggggccgcacatccgcgtggacggcgtctccggaggtaacgctccgttccgggagtcgttccaagacctttcccgagcttgcgctggaatggaggtcctggatctgcaggctctggaggagtttggagctggcctcagctctgtccgctttatctgtggaacccaggtacacagtgagtggtggggggttgtggggactgaccccagctgcctgcttcccacagtcagcaaggccagctgttatgacgccaacgccggcctctttgaggtgtgtggaagctgtcctgcgggtgagggttggtggggcctgttaggctgaggaaggcttgggtgtgtccggctgtgcaaggcccacaagtaccgctatcgccacctggacatggccgacctagaagccaagctgcaggaggcccaggtggggcgacgcctgggtccaccctcagcctccgcctggggaaggaagtgaggcttagagaggccaaaggagatctgctgcctcgcctctagatatggtgccctggtcttcatggatgaatgccatgccactggcttcctggggcccacaggacggtgggaccatgtggcacctgaggcctggggtggggcttctgagggtggctgggaaacgaggaggccactgggtggagcatcaggtacctgcaaggttgtgtccctggggtccccttgtccttttgaagggccctggaggggctcagggaactccaacagtctgccacctgctgtcgttggctgcgcctccaaggccctagatctgctgatggggagtaacaccattgtccagtctatggctgccaagacccagaggtgcgactcccagcagggcaggctcgggggcggagagacgtggtgagagccagcctcatgtgtctgcatgctgggtgatgcccggctggcctctcgcatggcggatgacatgctgaagagaggtaagggtgctgagacaagggaactggtggtgggtcctgagagaagagaaagggaaacccctagactctcagcagtgcatagcgaggaagacattgaccgctgcgtggaggccttcgtggaagtggggcgactgcacggggcactgccctgagctctgggtaaggacgagaagagccaaggtccgcctatccagactgggggccttgggccgcggctgttcaggctgcccagcagtcaaggccaggagaggcgatttgctgctgccaaggccccatcctcccttgtgccccacaacggctcgccgctttcctgttggaggggcctgcgggaggagggcggtctctccctggcgaccttgtggaccccttgtggggtggggagtggggtccccgcagctccaccctcagcgtggtgtgaccttgggaagctcttagtttgctggcggggccagaacagagggcccaggtccacccagaccgacgtgaggcggcacgaggcgagatccagacagcggcgcagaaagtgcgtcgccgcccctgtggctcccaggagccgccgctggcgttgccctgctgcgctggcagcgccggccgtggcagtgcctgtggtctttgccctaatcttcctgctgggcacagtgggcaatgggctggtgctggcagtgctcctgcagcctggcccgagtgcctggcaggagcctggcagcaccacggacctgttcatcctcaacctggcggtggctgacctctgcttcatcctgtgctgcgtgcccttccaggccaccatctacacgctggatgcctggctctttggggccctcgtctgcaaggccgtgcacctgctcatctacctcaccatgtacgccagcagctttacgctggctgctgtctccgtggacaggtgcgctgtgcctggggcacccgctgggcagggctgtgggggcgggggttgggggaggagtcctgaacgtggggctggtgtggctgctggcggcgctcttctcggcgccctacctcagctactacggcaccgtgcgctacggcgcgctggagctctgcgtgcccgcctgggaggacgcgcgccgccgcgccctggacgtggccaccttcgctgccggctacctgctgcccgtggctgtggtgagcctggcctacgggcgcacgctgcgcttcctgtgggccgccgtgggtcccgcgggcgcggcggcggccgaggcgcggcggagggcgacgggccgcgcggggcgcgccatgctggcggtggccgcgctctacgcgctctgctggggtccgcaccacgcgctcatcctgtgcttctggtacggccgcttcgccttcagcccggccacctacgcctgccgcctggcctcacactgcctggcctacgccaactcctgcctcaacccgctcgtctacgcgctcgcctcgcgccacttccgcgcgcgcttccgccgcctgtggccgtgcggccgccgacgccgccaccgtgcccgccgcgccttgcgtcgcgtccgccccgcgtcctcgggcccacccggctgccccggagacgcccggcctagcgggaggctgctggctggtggcggccagggcccggagcccagggagggacccgtccacggcggagaggctgcccgaggaccggaataaaccctgccgcctggactccgcctgtgtccgtctgtctcactcccgttctccgaaggcgggacgccac

SEQ ID NO: 25299 - DNA, 1900 bp, Homo sapiens
  SIMILAR (28)..(1464): 601254mologous to Homo sapiens zinc finger protein,accession number X78933,Smith-Waterman Score=1602.
atgaaggacaaaagtaaaacccttggccttgaggcatccatcttcagaaataattggaagtgcaaaagcatattcgagggactaaaaggacatcaagagggatacttcagtcaaatgataatcagctatgaaaaaataccttcttacagaaaaagtaaatctcttactccacatcaaagaattcataatacagagaaatcctatgtttgtaaggaatgtgggaaggcttgcagtcatggctcaaaacttgttcaacatgagagaactcatacagctgaaaaacactttgaatgtaaagaatgtgggaagaattatttaagtgcctatcaactcaatgtgcatcagagatttcatactggtgagaaaccctatgagtgtaaggaatgtgggaagacctttagctggggatcaagccttgttaaacatgagagaattcacactggtgagaaaccctatgaatgtaaagaatgtgggaaggcctttagtcgtggctatcaccttacccaacatcagaaaattcatactggtgtgaaatcttataaatgtaaggaatgtgggaaggcctttttttggggctcaagccttgctaaacatgagataattcatacaggtgagaaaccttataaatgtaaagaatgtgggaaggccttcagtcgtggctatcagcttactcagcatcagaaaatccatactggtaagaaaccttatgaatgtaaaatatgtggaaaggctttttgttggggctatcaacttactcgacatcagatatttcatactggtgagaaaccctatgaatgcaaggaatgtgggaaggcttttaattgcggatcaagtcttattcaacatgaaagaattcatactggtgagaaaccttatgaatgtaaagaatgtggaaaggcctttagtcgtggctatcacctttctcaacatcagaaaatccatactggtgagaaaccttttgaatgtaaggaatgtgggaaggcctttagttggggttcaagccttgttaaacatgagagagttcatactggtgagaaatcccatgaatgtaaagaatgcggaaagaccttttgtagtgggtatcaacttactcgacatcaggtatttcacactggtgagaaaccctatgaatgtaaggaatgtgggaaggcttttaattgtggatcaagccttgttcaacatgaaagaatccatacaggggagaaaccctatgaaatgtaaagaatgtgggaagggttttagtcggtggctatcaccttactcaacatcagaaaattcataccggtgagaaacctttcaaatgtaaggaattgtgggaaggccttcagttggggttcaagcctagttaagcatgagagagtccatactaatgagaagtcttatgaatgtaaagactgtgggaaggcctttggtagtggctatcaacttagtgttcatcagagatttcatactggtgagaagctttatcaacgtaaggaattcgggaagacctttactcatggctcaaaacttgttcatgaaagaactcatagtaatgataaaccctacaaatataacgaatgtggggaagcctttctgtggacaacttactcaaatgagaaaattgatactgatgaaaccttatgattgaaagttgtaaaagaatattttgtgtgtgtgtatagacaacttatcataataagaactcttactcttgagaaaccttgtgaatgtaagggttgtgcaaaagccattcatttctgtttatgggcaattatcttgctatccagcaattcatactagtgagaaatattttgaatataactaatatgaaaaggcctttagacttctgtacagtcttattggatatcaatttatactgatgtaaaatcatttaaatgtaaaaaaaaaaaaaaaaaaa

SEQ ID NO: 25300 - DNA, 447 bp, Homo sapiens
  SIMILAR (54)..(113): 501254mologous to Homo sapiens PRO2047,accession number AF118091,Smith-Waterman Score=44.
atgaggggcaagaactcagccaccgagttgagtactcggaggcagtatgatgttcagggaaggtcaaagggggaacaggcaaaagggaccaaaaaagaggaggaacctcgctttgtcttcggcattattggcgtcaaccgcactcggcaggtggacaaccacgtcattggagacccgggtagtgttgtctacgacagcagctttgacctcttcaaggaaattgggcacctgtgtcacctctgcaaggccatcgcagccaactccgagctggctacagcatctcctccttcctgcagatgtttgcaccctgagtgcaaggagctgcccgagcccaacctgctcccggggcagctgtcccacggggcagtgggcgtcagggagggccgcgtgcagtggatctccatggctttcgagtcggctggaacaggctccgagcagcctctatga

SEQ ID NO: 25301 - DNA, 861 bp, Homo sapiens
  SIMILAR (341)..(249): 931254mologous to Bos taurus PKR inhibitor P58,accession number U04631,Smith-Waterman Score=146.
atggccgaaggcgaaaggcacatcttacatggcagcagacaagagagaatgagagccaagcgaatttataaaatcttcagatctcggctgttcgtctccatcctcatcttgtccctggtgttcgccagccggctccgccccgccagccgggccccgctactcttccggcctgataccaacatccaggtgctgctggacctcaagtacaacctgagcgccgagggcatctcctgcatcacctgttcagggcaggactcaccttcgtactgcagatccaccaggactagcaggaaggggaataccgagcccagccggctggtcacggagccgggggccaccatgtccgagggctcgcgagtgaagaggaggaaaggttggcgagtgggactatttgatcctttccaggttcgccagcgtggtgttacgagaggaaagcgcagccgcagcgtacgaatgggaaggccaaacacggtcccggggagtctgagggaagctgcagggcgcctggaattggggtctcgagggcccactaatgcagatatggctgcagtgaccaaaaacttagatcacaacatccaagcccatttgaatacctggaatgccttcccaagaaggatgactacaaacaagccctactgtgaagactacaataaatacctaactcttcaatgcccagacaccaacaaacatccacaagcaccaagtcatccaggaaagcatgacctcagcaaacaaactaaacaagattcatccctctttgagagagattcaaatgtgttttcttatcagcttgctgagatatgggccaaagggaaagaggaaggggtgagcctaaaagatgccagcagtaaaatggagtaa

SEQ ID NO: 25302 - DNA, 1495 bp, Homo sapiens
  SIMILAR (206)..(646): 321254mologous to Xenopus laevis type I collagen alpha 1,accession number AB034701,Smith-Waterman Score=93.
ggctcaccacacggcaaggtgcccgcttccaagctgaccccaccagcactcagacacgcatgcacacacacacgcagacctactatgaactggcttgtgctcagcaagagcagaattgatgagcagataccttaagaatcttttagagcaggaccacgtacaagggcaaatcctccttccagacctactcggactacctgcgctgggagagcttcctccagcagcagctgcaggccttgcccgagggctcagtcctgcgccggggcttccagacctgcgagcactggaagcagatattcatggaaatcgtaggggtgcagagcgccctgtgcggcctggtgctatccctgctcatctgcgtggccgcggtggccgtgttcaccacccacatcctgctcctgctgcccgtgctcctcagcatcttgggcatcgtgtgcctggtggtgaccatcatgtactggagcggctgggagatgggggctgtggaagccatctccctgtccatcctcgttggctcctccgtggattactgcgtccacctggtcgagggctacctgctggctggagagaacctgcccccccaccaggccgaggacgcccgaacgcagcgccagtggcgtacgctggaggccgtgcggcacgtgggcgtggccatcgtctccagtgccctcaccacggtcatcgccacagtgcccctcttcttctgcatcatcgccccatttgccaagttcggcaagattgtggcactcaacacgggcgtgtccatcctctacacgctgaccgtcagcaccgccctgctgggcatcatggcgcccagctctttcactcggacccggacttccttcctcaaggccctgggtgccgtgctgctggcaggggccctggggctgggtgcctgcctcgtgctcctgcagagcggctataagattcccctgcccgcaggggcctccctatagcccgggacgggctctggacacttgcacctttggtcccatgggtgggggacaggagctgcttcccagctcgacttcagctagctgtgtccccaggcctgggcccagggcgccctgcgggccagcgtggaggctgacacccacacagatggtgtggaccatgctgccttgtggagctgggagttggagacagccgccaccccacaggccgggctactggcagccacactcggctttttgcccagtggcagaagagaccagccctcctcccatgcccggtcaccatgggggtcaggttatttttgtagggggtctccctctcacactgcctcagtgctcacaaccttccagtgtggatgttacagggtggcccccattctaccgatgtgaaaactgaggcgccaggacacagtggctgccctgtcgctggatcagtagcagagccagagctgcctccgagcgccatgccgccctcgggaatcatacaggaagagcacagtggatccagggtgggggcctctcaccccctaaccccgcccccc

SEQ ID NO: 25303 - DNA, 1596 bp, Homo sapiens
  SIMILAR (830)..(1564): 311254mologous to Homo sapiens Human N-methyl-D-aspartate receptor subunit encoded by clone NMDA24,accession number W87504,Smith-Waterman Score=168.
atgggtgtgagtgtgcgcgtggactgtgggtgtgcgcgggcttctgagtttctagggcggccgcgaggcgctgtccgcggtgctgacccggggagtgggctgacggagacctgcgcgcagtctcgcacatgggcgagagcccgatccaagggcggcttcagactgacgctcaacttttatggacccagatatccctcagaggggacaagcaggggccagaggtcggaagccttgccgttcctggacatccaacatccaactccccttggccgaccaagaatgctgcagtcccgcggggagatggtgcggagctggggcccggtcgtagagggcaagcttgggttctgtccacccctgaccgtctttcccggggggctccgaggcccgcatcccgggctggctggagagcgagagaacttcgcgcgcggcgccaagcaggaagcgtgtttactacaggggcctggggatgctggcctcacacatccctgcccagccacagggtacttccctgaagcctcctgtacctccagatctattcgcatgttcattaactcccaagaacgccagttggctgacatgtccctgttcattgcagattcctggctctgttactctgggatcatctgctggaagtctctggagcaccagaggggtgcaagtctcagctgtgtctacatggaaggaaaagggggaaacatctggatgaaagccagcaacgtcctgccactctgccagatgctgcccacatctggacattcaaaaagtgatctgttcggtggcttagcagtcgagaagcaaatgagacaagatcaccacatcctccttcacgacaggagtggcttccagctggcagtcacgtctcctctattaacaaggcttggcaaaggacacatcatccaggtgccagtgtatgtgctggatgccccgagcagatggctgggcggactgagactctttcgtgatagctcttgcggcctggtgctatccctgctcatctgcgtggccgcggtggccgtgttcaccacccacatcctgctcctgctgcccgtgctcctcagcatcttgggcatcgtgtgcctggtggtgaccatcatgtactggagcggctgggagatgggggctgtggaagccatctccctgtccatcctcgttggctcctccgtggattactgcgtccacctggtcgagggctacctgctggctggagagaacctgcccccccaccaggccgaggacgcccgaacgcagcgccagtggcgtacgctggaggccgtgcggcacgtgggcgtggccatcgtctccagtgctctcaccacggtcatcgccacagtgcccctcttcttctgcatcatcgccccatttgccaagttcggcaagattgtggcactcaacacgggcgtgtccatcctctacacgctgaccgtcagcaccgccctgctgggcatcatggcgcccagctctttcactcggacccggacttctttcctcaaggccctgggtgccgtgctgctggcaggggccctggggctgggtgcctgcctcgtgctcctgcagagcggctataagattcccctgcccgcaggggcctccctatag

SEQ ID NO: 25304 - DNA, 5699 bp, Homo sapiens
  SIMILAR (103)..(1356): 981254mologous to Homo sapiens hypothetical protein,accession number AL117236,Smith-Waterman Score=2129.
atggaccacccaggcttccgggagttctgctggaagccccacgaggtgctcaaggatctgccgctgggctcctactcctactgctcgccccccagctcgctcatgacctacttttttcccaccgagaggggcggcaagatctactatgacggcatgggccaggacctggcggacatccggggctccctggagctggccatgactcaccctgagttctactggtatgtggatgagggcctctctgcagacaatctgaagagctccctcctgcgcagtgagatcctgtttggagcacccctgcccaactactactcagtagatgaccgctgggaggaacaacgggctaagtttcagagcttcgtggtcacctacgtggccatgctggccaagcagtctaccagcaaagtccaggttctctatggggggacagacctgtttgactatgaagtgcgcaggacgttcaacaatgacatgctcctggccttcatcagcagcagctgcattgctgccctggtctacatcctcacctcctgctcagtgttcctgtccttctttgggattgccagcattggtctcagctgcctggtggccctcttcctgtaccacgtggtctttggtatccagtacttgggcatcctgaatggggtggccgccttcgtgatcgtgggcattggtgtggacgatgtctttgtgttcatcaacacctaccgccaggccacccacctggaagacccacagctgcgcatgatccacaccgtccaaactgcaggcaaggccaccttcttcacctccctgaccacagccgccgcctacgcagctaacgtcttctcccagatcccagccgtccacgactttggcctgttcatgtctctcatcgtgtcctgttgctggctggccgtgcttgtcaccatgcctgcagctctgggcctctggagcctctacctggcaccactggagagctcctgccagaccagctgccaccagaattgcagccggaagacctccctgcacttccccggagacgtgtttgccgctcccgagcaggttggaggcagccctgcccagggccccataccctacctggatgatgacatccccttgctggaggtcgaggaagagccagtgtcactggagctgggagacgtgtccctggtgtctgtgtcccccgagggtctgcagccagcctccaacacgggcagccgcggccatctcatcgtgcagctgcaggagctgctgcaccactgggtcctgtggtcagccgtcaagagccgctgggtgattgtggggctgttcgtctccatcctcatcttgtccctggtgttcgccagccggctccgctaccgccagccgggccccgctactcttccggcctgataccaacatccaggtgctgctggacctcaagtacaacctgagcgccgagggcatctcctgcatcacctgttcaggtctgttccaggagaagccccacagcctgcagaacaacatccggacgtccctggagaagaagaggcgaggctcaggggtcccctgggctagccggcctgaggccaccctgcaggatttcccaggcaccgtgtacatctctaaagtgaagagtcaaggccaccccgctgtctacaggctctccctcaatgccagcctgcctgctccttggcaggctgtgtcgcctggggatggagaggtgccctccttccaggtgtatagagcgccttttggtaacttcaccaagaagctgaccgcttgtatgtctacagtagggctgctccaggcggcgagcccctcccgcaagtggatgctgacgaccttggcctgtgatgccaagcggggctggaagtttgacttcagcttctacgtggccaccaaggagcagcagcacacccggaagctgtacttcgcccagtcccacaagccccccttccacgggcgcgtatgcatggcaccccctggctgcctgcttagctccagccccgatgggcctaccaaaggcttcttcttcgtgcctagtgagaaagtgcccaaggcccgtctctcagccaccttcggcttcaacccctgcgtgaacacgggctgcgggaagccggcggtgcggccactagtggataccggggccatggtctttgtggtcttcggcattattggcgtcaaccgcactcggcaggtggacaaccacgtcattggagacccgggtagtgttgtctacgacagcagctttgacctcttcaaggaaattgggcacctgtgtcacctctgcaaggccatcgcagccaactccgagctggtgaagccgggtggggcccagtgcctgccttcaggctacagcatctcctccttcctgcagatgtttgcaccctgagtgcaaggagctgcccgagcccaacctgctcccggggcagctgtcccacggggcagtgggcgtcagggagggccgcgtgcagtggatctccatggctttcgagtcgaccacgtacaagggcaaatcctccttccagacctactcggactacctgcgctgggagagcttcctccagcagcagctgcaggccttgcccgagggctcagtcctgcgccggggcttccagacctgcgagcactggaagcagatattcatggaaatcgtaggcaagcggcagcctcgcccctccatcctgggggtgcagagcgccctgtgcggcctggtgctatccctgctcatctgcgtggccgcggtggccgtgttcaccacccacatcctgctcctgctgcccgtgctcctcagcatcttgggcatcgtgtgcctggtggtgaccatcatgtactggagcggctgggagatgggggctgtggaagccatctccctgtccatcctcgttggctcctccgtggattactgcgtccacctggtcgagggctacctgctggctggagagaacctgcccccccaccaggccgaggacgcccgaacgcagcgccagtggcgtacgctggaggccgtgcggcacgtgggcgtggccatcgtctccagtgccctcaccacggtcatcgccacagtgcccctcttcttctgcatcatcgccccatttgccaagttcggcaagattgtggcactcaacacgggcgtgtccatcctctacacgctgaccgtcagcaccgccctgctgggcatcatggcgcccagctctttcactcggacccggacttccttcctcaaggccctgggtgccgtgctgctggcaggggccctggggctgggacgcagcttcctccaggaagccttcattggtgcccaagtctgggttcgtcgtcccggaactccaggtgaagatgcggattgtcagcagaagatgaatgcccaggtctacctgacgggacgctgcttgtacttacctggtttgcatggggaggagagaagagcttcctcccgggctgtccccagtcactccactctgcctgcccgagcgccttcagggttgatctgccttgcctcgttgcaaactaacacagctggtatcctgataaaaagagggaatttgggcacagacacagctgaaggaagacgaggtgaagacactgggacaaaatgccatgtaaggatggagaataggttggtgcacccacaagccagggacagccagcagagcgtcagaggctacggagaagcaaggaaggaatcccgccccaccaggtttcagagggacatggaaactatcagcaccttggtttcagagtctagcatccgggactgtaagatgagacatttctgttgtttaagccacctggttacgctacagagttatggcagccttcaggaactagcaccctccccaggcctggcatcagagctggcacaacatcacttctgccgcctttggctgtcaaggtgcttcccaaaggacccacacttcaaggaatgcccagtgagttgtctgctcctccaagttaggtctccattctacccaagtccaggggccacttgtcacctaggcttcctggttctcaagaaggatccagtttctccatcctccttttcccagatcatcaatccaacaggaagaaatgaagatcctcctaggcaagtggcacagcactgcgggtggagtgataggcatttgccttttccccctccttgcaaaaccaactggaaactaaagcagccggagggctcggcgggaccctacaatctatggaaactgcaggattttattagcttggctgtagataggcaggggaaccagggcagcaaactcaaccgtggggagacagtcttcagtggaagttccgtatgtgaaatgggtctggaaggtggtggctgggaggatccaaagttctgcccattggccctgcagagacccctgaggaacagtgtgcaaacctctggcctcgacggtctcagggctctgctgtccccggattttccaggaggtactgagctcatccccattctgcagatgagaagactgaggcacaaagcagttatgaaatctgtgcagggtcagctgtgtgctgtccagacagaggcagaagcagcagcaaatttgtgggtggccagggtgagcggaaatgaagttccagtaaatcatggatgtaaggcacagagctcagctgtcctgtgcagggaacctgaggggccacagtggaccgtgggtttcagtggcagctaccggacccggacctggaaggacgggaggctgagctgcacggtgccaccccaggaggagagcctgtttgaagccaacacagaagctgccagccagtgcagagagaactgggcactggaagccagctggatgcaggtggccacagcagacaccatatttgcccaggagctaagccagggccatgtagaatcaaaaagatttttaaaaacagcgccccctgccatgtgggttaatgtggtggctttggttcctgcggaggcgaagggaaatgacaagcttgaaaagattaggaggctgcaggcttcccaggcagaattcccacctcagagcccaaaatcccgccaagtggggaaccgacagctcagaaaattgcaagaatcctgtgatttaaagaaatgcacagcacggaagctaagcggcggccagatggacgcattgggcattggtcactgtgccgttggcggctggggcatctccaggacgtctacactggggttcggaatccagccaccatgctgtgaggaagcccaagcagcccatggagaaactgacatggaaagaagacgaggccctcggcccatggcctcagccaagctctcagctgagccagaaccaacataccaggcagaacgagccttgccagctctgggcttccagagcaggggttttgcaggagagtcagaggttttccagtgccagggggccctgaaagcaacagccacctgcagaggcggcccaaggagaggcagtggtcaaggccccccgctccctgcttgcaagagtggaactgattgtctgactcaggggagactgtgctcagcattgtctagaatgttcttcgatatcagctggtcaaagcgaaaacacattgctgctccctgcagcctctcacccagaaaagagaggaatggggaaaagaaacggggaaaagctgcaatatttcccccacgcagccggcagctgacagctgcaggtctgggcagggcagtgctgcacagctgtggacccaacagcccagtcaaggacaagcctgccaggaaagcgtttgcacctgcagcataa

SEQ ID NO: 25305 - DNA, 1740 bp, Homo sapiens
  SIMILAR (784)..(1269): 281254mologous to Homo sapiens salivary proline-rich protein precursor,accession number K03205,Smith-Waterman Score=132.
atgctctatgcagctgaatgcctcaggaatgtcatgaagctgcaagtcatcccatcagctctgaacgaagccctccaggcccagagcacctggagcgacctgggtttggcttcccatgccctgagcagcacctggtgcctgcacggagaaagcgccgcctggagccagcctgcagttgtggagtgtgggcaacccagagaccagctccagacacacagcgaggcgtggctgtgtgcgctggtggcgactttctcgcaggaactagaacagtttgctgtaacaggagcacagatatcagacaggcagggccacgctgtctgcacggctccaccgagaggccgtccatcgacactgatgacgaatctcgtctgtgcgagcagcgcagatgagtgtggcggcggcaagacagagacacaaacggctggggggcgcctccaaggagctgaaactaggagcagggggcagctcacacgccttatcaccaggacacaggccgcagaacctcggtggttccttcagctcctgaagcggtccgcaaacaggtcgagggcgctgacgaggccgttttctgggctaagcagcgacggcgctaggcgactccgcttgtccttcgtttccgctgtcagctcagcagacacaaaaccaacagttccggtctcttccgatagttctggcagagacggctgcggggagacacgggcggaggcgggtccgggcgggccccacgtcgcgcagcctcagcgtgttgcgcctcccgcggctgcggccagagacttccgcaaacctcggggcctcaatcgacagaacgtgtcacctcaggcccaggagagcagggtccggggcgcgtcctcagaagccggcagggcgggctcctcgctgagccgcagggcgagcccggcttgggcctcttcccgcgggaggaggccgccgcgttccttccccggttctccagccgaccccgccgcctccgtctcccacacgcagggaccctctcccgacaccggcctgcctggaacgtgccagaatcgtctccctaacccggcggccgtggatgagcaaacctgcacccgcggcagcctgaactgccgtttgtcgcgtagtcctcgagtctcggagcgcaggggtcccgagggcaccccgggccgccgtcctgcggcccccccacagtgtgccgggactcggggtctctcaccacgagcagacctcggcgctgctatccggactcctcgagccccttacaggccacatggccaggggcgaccctcccgtcacaactgtgactctgtgagctcacagggctggcctccacattcttgctggtggaagaccacaagcaacgggatgccttggaaagcatcgttctgcagcaggactgctcaaccggccaatcagaacacagggaaccatgaaagaggactgcggagtgtggccatgtttggagacagggcctctagagaggccaccccagctctgtccctgtgtgaatctcagggctgtttcgaggatgaaaaggaggtgtttagccccgagcctcacgtggaaacatctgatgagcctttgccaatatgctcgggacctggggacggctggggtgaccccatcgcaaggccgggccgtggaaacaatctcagccctggaaccagcgcctgggaagtcccgcggtggatccgcgtcacgggggaggattggctcagcactggtcctgcggaatgtgtttttatcaatgacttgacgacgtga

SEQ ID NO: 25306 - DNA, 1831 bp, Homo sapiens
  SIMILAR (447)..(1538): 641254mologous to Homo sapiens Keratin 8,accession number X74929,Smith-Waterman Score=961.
gctcctttctagcatctccgcctggttcggcccgcctgcttcaactcctgcctttaccatgtccatcagggtgacccagaagtcctacaaggtgtccaacttcttgcccccgggccttcagcacgcgctcctacacgagtcggcccggttcccgcatcagctcctcgagcttctcccgagtgggcagcagcaactttcgcggtgacctgggcggcggctatggtggggccagcggagatgggaggcatcaccgcagttacggtcaaccagagcctgctgagcccccttgtgccggaggttgaccccaacatccaggccgtgcgcacccaggagaaggagcagatcaagaccctcaacaacaagtttgcctccttcataggacgaggtagggttcctggagcagcagaacaagatgctgggaaccaagtggagcctcctggaccagcagaagaccgcctcgaagcaacatggacaacatgttcgagagctacatcaacaaccttaggcggcagctggagactctgggccaggagaagctgaagctggaggcggagcttggcaacatgcagccgctggtggaggacttcaagaacaagtatgaggatgagatcaataagcgtacagagatggagaatgaatttgtcctcatcaagaaggatgcagatgaagcttccatgaacaaggtagagctagggtctcgcctggaagggctgactgacgagatcaacttcctcatgcagctatatgaagaggagatccgggagctgcagtcccagatctcagacacgtctgtggtgctgtccatggacaaaagccggtccctggacatggacagcattattgctgagttcaaggcacagtacgaggatattgccaaccgcagccgggctgaggctgagagcatgttccagatcatgtatgaggagctgcagagcctggctgggaagcacggggatgacctgcggcgcacaaagactgagatctctgagatgaaccggaacatcagccgggctccaggctgagattgagggcctcaaagggcagaggggcttccctgggaggccgcccattgcaggatgccgaagcagcgtggaaaaagctggcccattaaggaatgccaacgccaaggttgtccgaggctggaagcccgcccttgcaagcggggcccaagcaggacatggggcggccagctgcgtgagtacccagaagctgatgaacgtcaaagctgggccctggaccatcgaggatcgccacctaccaggaaagctgcttggagggcgaggaagagccgggctggagtctcggatgccagaacatgagtatttcataccgaagaccacccagcggggctatgcaggtcgtcctgagcctccgcctatggggggcttcacaagcccccggcttcagttacaagcctggggctccaggttttggctctggcgcgggctccaggctccttcaaccggcaccagctctctccaggggccgtggttgtgaagaagatcgagacacgtgatgggaagctggtgtctgagtccttctaacgtcctgcccaaagtgaaacagctgcggcagccccttccaagcttacccctcctgcgctgccccagaggcctggggaaggaggccccttatccagggtagcactgggaacagggagacccacctgaggattcagccctaagcctcagccccacctggggagtttactacctggggagcccccttgcccatgcctccaagctacaaaacaattcaattgcttttttttttttttggtccaaaataaaacctcagctagctctgccaatgttcaaaaaaaaaaaaaaaa

SEQ ID NO: 25307 - DNA, 1282 bp, Homo sapiens
  SIMILAR (809)..(1279): 981254mologous to Homo sapiens dJ1069P2.2 (outer mitochondrial membrane translocase HTOM34P),accession number AL109839,Smith-Waterman Score=794.
atggcatatttgtgtaatgccatttgcatgacccacatggtcaccctggaccccgtggatcaggccctgcctggtgccaccaccgccacttctgtgccaggcccccagtgtgatgcaagttgcatgatgctctttgctgtagtgccttttaatggcatagctttggcagcaactcagggagcccagagcatgctgccgccccgcgtgcaagggagcctaagttccaaaccgagcacgcgcagagggcgggacgctccgggcctccaggtctcgcaggccccgccccctcgccgcgggttcgctgttgggcggagatattcgccgccggcgcttgcgcccggaaggtgtgccgcaccacacgggggaggaaggaaggagctcccaactcgccggcctggccacgggatggcccccaaattcccagactctgtggaggagctccgcgccgcgcggcagtgagagtttccgcaacggccagtacgccgaggcctccgcgctctacggccgcgcgctgcgggtgctgcaggcgcaaggttcttcagacccagaagaagaaagtgttctctactccaaccgagcagcatgtcacttgaaggatggaaactgcagagactgcatcacagattgcacttcagcactggccttgggtcccttcagcattaagcccctgctgcggcgagcatctgcttatgaggctctggagaagtaccctatggcctatgttgactataagactgtgctgcagattgatgataatgtgacgtcagccgtagaaggcatcaacagaggtcccggtctcaaggaagacaccactcagaagaggtggaattccttgccttcggagaaccacaaagagatggctaaaagcaaatccaaagaaaccacagctacaaagaacagagtgccttctgctggggatgtggagaaagccagagttctgaaggaagaaggcaatgagcttgtaaagaagggaaaccataagaaagctattgagaagtacagtgaaagcctcttgtgtagtaacctggaatctgccacgtacagcaacagagcactctgctatttggtcctgaagcagtacacagaagcagtgaaggactgcacagaagccctcaagctggatggaaagaacgtgaaggcattctacagacgggctcaagcccacaaagcactcaaggactataaatccagctttgcagacatcagcaacctcctacagattgagcctaggaatggtcctgcacagaagttgcggcaggaagtgaagcagaacctacactaa

SEQ ID NO: 25308 - DNA, 2375 bp, Homo sapiens
  SIMILAR (1245)..(1295): 701254mologous to Homo sapiens hTOM34p,accession number U58970,Smith-Waterman Score=58.
atgcatttattgagtgcctacttcgtgccaggatctatgctagtaggctcaggttatatgatggtgaatatcacagatgtgtccccaccatcatggagcttcctgtgtagcatgctcatcaccacaactcagggagcccagagcatgctgccgccccgcgtgcaagggagcctaagttccaaaccgagcacgcgcagagggcgggacgctccgggcctccaggtctcgcaggccccgccccctcgccgcgggttcgctgttgggcggagatattcgccgccggcgcttgcgcccggaaggtgtgccgcaccacacgggggaggaaggaaggagctcccaactcgccggcctggccacgggatggcccccaaattcccagactctgtggaggagctccgcgccgccggcaatgagagtttccgcaacggccagtacgccgaggcctccgcgctctacggctgcgcgctgcgggtgctgcaggcgcaagggtcttcagacccagaagaagaaagtgttctctactccaaccgagcagcatgtcacttgaaggatggaaactgcagagactgcatcaaagattgcacttcagcactggccttggttcccttcagcattaagcccctgctgcggcgagcatctgcttatgaggctctggagaagtaccctatggcctatgttgactataagactgtgctgcagattgatgataatgtgacgtcagccgtagaaggcatcaacagaatgaccagagctctcatggactcgctttgggcctgagtgggcgccctgaagctgccctcattccccttggtgcctgtgtcagctcagaagaggtggaatttcttgccttcggagaaccacaaagagatggctaaaagcaaatccaaagaaaccacagctacaaagaacagagtgccttctgctggggatgtggagaaagccagagttctgaaggaagaaggcaatgagcttgtaaagaagggaaaccataagatagctattgagaagtacagtgaaagcctcttgtgtagtaacctggaatctgccacgtacagcaacagagcactctgctatttggtcctgaagcagtacacagaagcagtgaaggactgcacagaagccctcaagctggatggaaagaacgtgaaggcattctacagacgggctcaagcccacaaagcactcaaggactataaatccagctttgcagacatccagcaacctcctacagattgagcctagggaatggtcctgcacaggaagttgcgggcagggaagtgaagcagaacctacactaaaaacccaacaagggcaactggaacccctgcctgaccttacccagagaagccatgggccaccttgctctgtgcccgctcctggaaacccagcatgccccaagtggagctctggaagccccctccttcaatcccttggatgggccttcccaccctggttaagagggtttggttgtttcaaattaaattcagtgttagttcaaacacagacatggttgtttgcaccagaaaggtccccactaggagctaagggttgaagctggaagctcttgttccctatttcccccaggcccagctagctgatcacaccaacagatccttattaggcaaagcatttggctttgtcctgtccaagtgggctgcatactgtagtgctgcccttgtagcttccccagaccccaactcactgcagttcatctgaacaacctgagctcctgggccggggtggaaggagggggataaacctaaggccctgaatccaaagcagcctgttgagctggttcccccagggctgccagtctctccagggtgtacagctgctgtcccctgcccctgtccctgtccttgcaaaagtcccccctatgtcctgaagccccccagtgcccttcctgttcgggcccctccctttgggtggggaagggcagagcccctgaccccttgaattggttgtccttgaactctgtgctgctgccttcttgcagagaggcaactaagctgttttaaaagagccccagtgattgtgggctgctccctcctagaggtgggagggggcaagagccctcccttggtcaagtgtccatgctttctgggcagggacttgggttttttgttccaacagtgggccttctccgggcttcatagttctttgtaatatgttgaagttaatttgaattgactgaatttgctgacactgtgtgtttaagctgttgcattaaaaagctttcttctacatgttccaacagtggccttctccgggcttcatagttctttgtaatatgttgaagttaatttgaattgactgattttgttgaactgtgtgtttaagctgttgcattaaaaagctttcttctacatcaaaaa

SEQ ID NO: 25309 - DNA, 491 bp, Homo sapiens
  SIMILAR (397)..(483): 751254mologous to Homo sapiens PRK1-associated protein AWP1,accession number AJ251095,Smith-Waterman Score=86.
gcggcattacctttacccattcaccggcggctaccggcggcggcgcgcagcgtgtcaggcggagagacccgccgccaggtgtgcaactgaggaacatggctcaagaaactaatcacagccaagtgcctatgctttgttccactggctgtggattttatggaaaccctcgtacaaatggcatgtgttcagtatgctataaagaacatcttcaaagacagaatagtagtaatggtagaataagcccacctgcaacctctgtcagtagtctgtctgaatctttaccagttcaatgcacagatggcagtgtgccagaagcccagtcagcattagactctacatcttcatctatgcagcccagccctgtatcaaatcagtcacttttatcagaatctgtaggcatcttctcaattgggacagtacatctgtgggacaaaggcagtacctgaaacagaagatgtgcaggcttcagtatcagacacagcacatgtatt

SEQ ID NO: 25310 - DNA, 1080 bp, Homo sapiens
  SIMILAR (562)..(693): 861254mologous to Homo sapiens PRK1-associated protein AWP1,accession number AJ251095,Smith-Waterman Score=164.
cacttactgctgttggcaattgactataatttaccaatagctggtgtgctcatggagtcccagtatttaggagcatcacctaagcgcttagttataccaaacctctatgctcatcgtaaatctttggcaacgcttgagccttatgcaccgcgtaggcctatgcctatcgcaaggcggtacgctatcccctacatgtcacaccataacggttatatcggggacgtttattaccgcctaactgttgaggagaaaaagtcgtcatttatcgcccgaagatcaattttgacgacagagttcacaataagacgaacgaagaaggtgcccgttccaagtattaacatgtcgtcggcgtcacccctagaggatgagagtcgtccttccgcaggagttcaactacgcaagggacgttataggctcttgcgcgatcggtacagaccaggatgcaactctgtaggcgaatccccgcgtaaaagcagcttctcagatgatatcatggcgacagagagcagagagtcaatcttcgcagaagaaccacgcaccggggagcatagcgtccggggccctgtatcaaatcagtcacttttatcagaatctgtagcatcttctcaattggacagtacatctgtggacaaagcagtacctgaaacagaagatgtgcaggactcactcaatgcctcaccaactaaacaacaatgcggtgcgtacagactgtggatctgtactctaacaacaaagagttattcgcccaaaaatgttaccgacaccgatatatctccagacttaagaagtgttgcctttgtcatgagcttgtacccagagataccatcaaaagcccagagtctttatctgtgggatcctgatacattcataggtattggcaccttctacgcagcagaggcaaggaatgaatctggccacccagggaaacagaaggtgcagcttagccctctcagccctccctcgagcaccagcgtggaatgcccgggtgccgtgggtgtcgcaaccatggaccagccaggggaaaagagccctggaccaggacccaggaggctggggttccagtgtggggagtccctgtga

SEQ ID NO: 25311 - DNA, 1196 bp, Homo sapiens
  SIMILAR (879)..(1196): 1001254mologous to Homo sapiens 11-JAN-1999 cDNA encoding a human interleukin (IL) 173 polypeptide,accession number A58983_cd1,Smith-Waterman Score=571.
atagtggccagaactatagtgccagtagtaaaggtgaacgactaagtgccagactcagagctttacctgggacaaatgaaccttatgaaagtagcagtaacaaagaaataggcaagtactctccacccagttcctccaggcatagcaggtctgaagaagaatgcacaggccctgagcgcgcgaccccaggccctgggcgccccgccgcatgctcgcggctggaagccccagtttgcgtggcccttcgggttattccgctcaagagccgccgcgtcgccccatctcggcgcgaatctgaaagcgctttcgggggagaagatgttgggggcactggcaggatctgggagccgagggaggttatggatgagaatgacacacagggttcggggatcgtggtctgggccacccagatctgcccacatgtggaacctcagtgctgggtggtcccaggagcaggagtggcagctgcagcagggtggctgaaggtgtcatgtgcatcatttttcatattatttagcaacagtgatgagatcactccccatgggcaaacggaggctctggggcttcctgaagaggcactgcagacatctggatggattttcagagttcctgcgactccatggctggtttgtgctcctggtgaggagcccagacctggaaagatgaaggtattggccccagctcagtttccatcacctctaatcatccctggaggactcgtcctttgttcctggattaagccgggccacctgtcactcgctcaagccaagcttcccacgtggccagggacacttctgcgatcccatcagaggggaaaacttgatgtgtttcaagaatgccctggtgccaagcttctgcagagcagcacgcagaaaataatctcctacgacccggcgaggtaccccaggtacctgcctgaagcctactgcctgtgccggggctgcctgaccgggctgttcggcgaggaggacgtgcgcttccgcagcgcccctgtctacatgcccaccgtcgtcctgcgccgcacccccgcctgcgccggcggccgttccgtctacaccgaggcctacgtcaccatccccgtgggctgcacctgcgtccccgagccggagaaggacgcagacagcatcaactccagcatcgacaaacagggcgccaagctcctgctgggccccaacgacgcgcccgctggcccctga

SEQ ID NO: 25312 - DNA, 708 bp, Homo sapiens
  SIMILAR (603)..(707): 1001254mologous to Homo sapiens Human transforming growth factor beta-9, Ztgfbeta-9 variant protein,accession number Y70662,Smith-Waterman Score=185.
  misc_feature (1)...(708): n = a,t,c or g
gtgccagtcaagggaagtattcagtgctttgttgtagagttgttggatagaggcacaggatcatttcatgttgttgaggagaaaggagcaacagcctcctcccaccttattaaaaatagagatttaaaaaaacctctaatttcctcgaagtacagaatctcaagaggtagctctaaggagaatccctctgggttttgagcgcaattccttctttccaggggggccttaattcttggaactgcttttcctttaaatagagaaaatctctctggagccaaaaaatcggccttccccccaaattcccaatcttgtcggcccccactttttcttgttccgggagacttccaaagccaagtccccaacttccttcctttcaagccaagttcgggcccgnacccggcggccggcaagggccagcccttctccttccttcctgcgtggcgcagcacaggccctgagcgcgcgaccccaggccctgggcgccccgccgcatgctcggcgctggaagccccgagtttgcgtggcccttcgggttattccgctcaagagccgccgcgtcgccccatctcggcgcgaatctgaaagcgctttcgggggagaagatgttgggggcactggtctggatgctggtagccggcttcctgctggcgctgccgccgagctgggccgcgggcgccccgagggcgggcaggcgccccgcgcggccgc

SEQ ID NO: 25313 - DNA, 1444 bp, Homo sapiens
  SIMILAR (1028)..(1183): 781254mologous to Homo sapiens alpha-tubulin 8,accession number AJ245922,Smith-Waterman Score=214.
gttagcgtagcgaactgatacggcattcttggccgaggcacgcccaactgagaggtgcgcgggcgaggacagcggtatcgattcgggaatgcatatcagtccacgtgggccaagcgggagttcagattggcaatgcctgctgggagctcttctgcctggaacacggcatccaggcagacggcacttttgatgctcaagctagcaagatcaacgatgatgactccttcaccacctttttcagcgagactggcaatgggaagcatgtgccccgggccgccatgatagatctggagcctactgtagtggatgaggttcgggcaggaacctaccgccagctcttccatccagagcagctgatcacaggaaaggaggatgcagccaacaactatgcccccgggccacctacaccggggggcaaggaaagcattgacctggtggctggaccgcatacggaagctgacagatgcttgctctggcctgcagggcttcctgattttccacagttttggtgggggcactggctccggcttcacttctctgctgatggaacgcctctccctggattatggcaagaaatccaagctggagtttgccatctacccagccccccaggtctctactgcagtggtggagccctacaactccatcctgaccacccacaccacactggaacattcagattgtgctttcatggtggacaacgaagccatctatgacatctgccgcaggaaccttgacattgagcgccctacctataccaacctcaaccgcctcatcagtcagattgtgtcctcaatcactgcttctctccgctttgacggggccctcaatgtggacctcactgagttccagaccaacctggtgccctacccccgcatccacttcccgctggtcacctacgcgcccatcatctctgccgagaaagcctatcacgaacagctctctgtggccgagataaccagctcctgctttgagcccaacagccagatggtgaagtgcgacccgagacatggcaagtacatggccatgctgcatgctctaccggggcgacgtggtgcccaaggatgtgaatgtcgctattgctgccatcaagaccaagaggaccatccagtttgtagactggtgtcccacaggctttcaaggtgggcatcaactaccagcccccgaccgtggtccccgggggagacctggccccggtgcagcgggccgtgtgcatgctgagcaacaccacggccattgcggaggcctgggcccgccttcgaccacaagttcgacctcatgtacgccaagcgggccttttgtgcattggtatgtgggaagaggggattggaagaagggagaattttctgaggcccgcgaggacctggcagctctagagaaggattatgaagaggtgggcgtggattccgtggaagctgaggctgaagaaggcgaagaatactga

SEQ ID NO: 25314 - DNA, 621 bp, Homo sapiens
  SIMILAR (201)..(365): 981254mologous to Homo sapiens dJ75K24.1 (novel protein similar to SH3BGR (SH3 domain binding glutamic acid-rich protein) and SH3BGRL),accession number AL035700,Smith-Waterman Score=289.
tttcgtccgccgggagggagccagatcccagcgatcttccccgacggctgtgctttacccataggctgccggcggctcgtaggtgggttcagctctgcgtccacgccagcccggagcccggggggcaaggggtctgtcccgggcgcagcgagaggatggtcatccgcgtgttcatcgcctcttcctcgggcttcgtggcgataaagaagaagcagcaagatgtggttagatttctggaagccaacaagatagagtttgaggaggtggatatcacaatgtcagaagaacagaggcaatggatgtacaaaaacgtccccccggataagaaacccactcagggcaaccccctgccacctcagatatttaaatggcgaccgatactgtggattgctagtatctttctcagttatttgcatcaagaacccaaactggcacaacttattcttgttgattccctggagtggaatcaatccttactgtgagcaggattcttccttctctgagaatgtgggtgatgagattctaaagaattctggcgttccaagggatttcactagtattctgatacagaaagaaagaaagtctgagaaggttaaaggagttgatcaaggtcatagataa

SEQ ID NO: 25315 - DNA, 428 bp, Homo sapiens
  SIMILAR (361)..(417): 471254mologous to Homo sapiens TRP-1 protein,accession number W06316,Smith-Waterman Score=37.
tttcgtggacgatggcagccacgattcaggccatggagaggaagattgaatcgcaggctgctcacctgctttccctagaaggtcaaaccgggatggccgagaagaagctggctgattgcgagaagacagccgtggagttcgggaaccagctggagggcaagtgggccgtgctggggaccctgctgcaggagtacgggctgctgcagaggcggctggagaacgtggagaacctgctgcacaacaggaacttctggatcctgcggctgcccccgggcagcaagggggagtcccctaagactacgccatctccaagtccgaggtcctctcccagattgaacaagggaaggagccctgcaactggcgccgccctgaccccaagattccagatgttcctgtggaccccagtccagaagcagaaactgaggccc

SEQ ID NO: 25316 - DNA, 484 bp, Homo sapiens
  SIMILAR (214)..(2): 1001254mologous to Homo sapiens Human FADD-interacting protein (FIP),accession number W96153,Smith-Waterman Score=383.
cattttttatctcattgcggttcttttctgtgatatagaagtttgaactatcggcatgctggagtgcaaaatattcatggttggcaagagaccacccatcacagacttcctttattattgcagacagtggttttttctgatcaatttccatgagtttggggtaggcgcccggccattctatggccaccttgacgatgtccgcgggtggcggcattgtaagtccccaaaatgttcaaagccagtgggaatgaggatcctacagcgtaaacggccacacgtgtctatacctgcttggggtcgcaggacagcagcggcaagggttcccggcgatcagagctccggcgacccgccaccattgaaggggaactggaggctctgtcgcccagcgtgggcccgcggcggcgtgggtggctctgcctctatcctgtgcccatcctcgcccgctaacgctcgccccagcacacgcacttacactctgacgaaa

SEQ ID NO: 25317 - DNA, 503 bp, Homo sapiens
  SIMILAR (287)..(487): 641254mologous to Homo sapiens Human FADD-interacting protein (FIP),accession number W96153,Smith-Waterman Score=217.
tttcgtgcgcagaccacgagtgtcctggcgcaggtttcgggggcgttggctgcaactccacaacgtccgctcgggaggagagttcgcggctgatctccggatgccttgcacatgcaaaatgtgtctctggccagcaggaggagggaagaggaagtgagagcagcggcagccggcggtgcagcagccggccgacccagagtgtatagacacgtgtggccgcttacgctgtaggatcctcattcccactggctctgaacattttggggacttacaatgccgccacccgcggacatcgtcaaggtggccatagaatggccgggcgcctaccccaaactcatggaaattgatcagaaaaaaccactgtcttgcaataataaaggaagtctgtgatgggtggtctcttgccaaccatgaatattttgcactccagcatgccgatagttcaaacttctatatcacagaaaagaaccgccatgagataaaaaattggcactatccttccg

SEQ ID NO: 25318 - DNA, 1541 bp, Homo sapiens
  SIMILAR (386)..(454): 911254mologous to Homo sapiens Human secreted protein, SEQ ID NO: 7781,accession number G03700,Smith-Waterman Score=104.
tcaaaaagtcgtgggcatccccctaggcaaagtgcagtgggcagggaccaggcagggtgcgggcgcaaggcgaacgcgcagaccacgagtgtcctggcgcaggtgccgggggcggcggctgcaactccgcagcgtccgctcgggaggagagttcgcggctgatctccggatgccttgcagatgcaaaatgtgtctctggccagcaggaggaaggaagaggaagtgagagcagcggcagccggcggtgcagcagccggccgacccagagtgtaagtgcgtgtgctggggcgagcgggagcgtgcgaggatgggcacaggatagaggcagagccacccacgccgccgcggccccacgctgggcgacagagcctccagttccccttcaatggtggcgggtcgccggagctctgatctccgggaacccttgccgctgctgtcctgcgaccccaagcaggttcgtaaagtttcctgggctggcgccgcgccccgactcgctgaccagttcttgcagaatccgtagcaggcattttccacctcttttacggtgagaactggggccaccagtccagccctgaacatggtgatggtactgtagccagtcatctgtgcatcctctgtggtctgcccactggctggcgtgtagaatatgcccagcaggggattttcagagcttactgggccctccttcttgggctcacctgccagttttccctcctctgtcagacctacaaatgtttgagtgccccaggaacaatcacatcgagtggggacgaatgatgattgtttgacgcagagcgccgagtggacctctagtgagtagcctgttcgaatccaacctggtttatgtggattgaatcgcttcgagattcttgagataccagtggcgtgagtcccaagatccttggaaggagaagttgatggcccatgtttcgattcgagacccctatagagtgggacattggtgctggcatagagccgggttttggcccgatgattccggatgggagtccggattaacgtgttccttgttggccagtggtcttgacagggtggaggaattcgtgtggattgaacagtctttgcaatgtcattttcgggacatttggtttccccttgaacgggagggatttggaccccttgcgattcccttgggaagaaactcagctccggattgtaccagggttgaaattttggggttaaactgtttaaatttgtagagggacgcgtaggtacacctcttggtgcctttagattgagcaccgttttcttaatgtggcccgtcttggagacatcgcactcggagtataagaagtgcacatagcccggtgtcgtggagaggagtatatacggagtgtgtatctttggaagccctgtgtggtggaacttgaggcctgcctgtgccgacttgacattctcagagggcgcaaatcctccacaggaagacgtctggagtttagcagacacctttgtgcacaccacaagaactcggggaatgttcgtgtaatatagcccaaggtctgaaattttcttgatagtatgac

SEQ ID NO: 25319 - DNA, 544 bp, Homo sapiens
  SIMILAR (1)..(252): 871254mologous to Homo sapiens catechol O- methyltransferase,accession number Z26491,Smith-Waterman Score=426.
aagaagaagtatgatgtggacacactggacatggtcttcctcgaccactggaaggaccggtacctgctgcggaaggggacagtgctactggctgacaacatgatctgcccaggtgcgccagacttcctagcacacgtgcgcgggagcagctgctttgagtgcacacactaccaatcgttcctggaatacagggaggtggtggacggcctggagaaggccatctacaagggcccaggcagcgaagcagggccctgactgcccccccggcccccctctcgggctctctcacccagcctggtactgaaggtgccagacgtgctcctgctgaccttctgcggctccgggctgtgtcctaaatgcaaagcacacctcggccaaggcctgcgccctgacatgctaacctctctgaactgcaacactggattgttcttttttaagactcaatcatgacttctttactaacactggctagctatattatcttatatactaatatcatgttttaaaaatataaaatagaaattaagaatctaaatatttaaaa

SEQ ID NO: 25320 - DNA, 2655 bp, Homo sapiens
  SIMILAR (1926)..(355): 991254mologous to Homo sapiens thioredoxin reductase II alpha,accession number AB019694,Smith-Waterman Score=2752.
atcagaaaaagtaccctctttatttgcattgcagaaatgccagggggctcggacatgggtgcccacagggtaggtttccacccaggtcgtcatcatctggcaccaggagcctgggggggggtgcccggcggcagaggctgagaggtgcaggggtgaggtggacagtcccctgagccatccctgtggggcacacgggccacctgtccagcacttgcgctccacgctgaccatctcacaggcgctccaggagagggttgaggccccccaaacctggcctgcagccatcctgggtctggcctccgaggagctggcggcgggcgcaccgtgtgccctggcctgcagggatggcgcttaccctcagcagcctgtcaccgtggggtccaggcctgagcgcttggagatgcgcagcttgactacctcctcagagcatgtgggatggatacccacggtccgcatcacctgcgcataggaagccccacacttgatccccagagcaaatccttgagtaacttcgcctgcgttggggccaaggaaatgcaggcccagcaccagctgtgggggctccctcaggcacaccatctttacataacactgggatgcatctcgtccagccaccgtgaactccagtggtttataatgggcgtgatagacctcaacatgctcctgcccgtggcgagccactgcctcctcctcggacagccccacacagccatactccagtggggtgaagacggtcgtgggaacattgtcgtagtccatcagatctgaggacccgccgaagagccgctgcaccaggagcctcccggccatgatcgctgtgggtgtcagctcaggccgcccctccaccacgtcaccaatggcgtagatgtggggcacagaggtggcttcccgggagtccaccaggatcttctgagtgtcggggctagtatctaccccagccttctccaaattcagacttctggtgtctgggactcgacctatggcccacaggacggtgtcaaaggtgcccgtgtcctccttgccggtggtgctgtcctcccaggtgacctgcagctggccatcagggagcctcctgacccgcgagggggcacagcccctcaggaaccgggtgccatgagatgccatgtgctctatgaccatggaggacatttgctggtcgaagccgcggagggggatgctgcgcatcatgatggtggtgtccagcccaatcccggtgaggaagccagcacactccagggccacatagctggccccgaccaccaacgtttttccaggggattccttcagccagaagatgtcatcacttgtgattccatattccaaggcaccttcgatgtgcgtggggtatctcggccgccctccagtagcaatgatgatgtgatcggctgacagcagaatctctttcccacctttggcaacgccgcaaaccgtgtgctcgtcaacaaagctggctttgatgttaaagtacttgacttttctgtcctgaagctggacacggtggccccagttcaaggatttcacgtgattttgaacagcttctgccatcttcctccagtcatgcggcacgggctgggccacctcccagccatagttgggggcatcttggatcaggcctcccagcagtgccgcctggtgcatcagcttcttggggatgcagcccacgttgacgcaggtgccgccgaggccccaccgggtgccttggggagaaggttccacgtagtccaccacggccaccttccttcccagctgggcggcctccttggcacaagccaggccaccagatcccccgccgaccaccaggagatcatagtcccgctgacctgctgctgcgccccgcgccgcgccccgcaccccgcccgccacggcctgcgtccgccaccggaagcgccctcctaatccccgcagcgccaccgccattgccgccatcgtcgtggggcttctggggcagctagggctgcccgccgcgctgcctgcgccggaccggggcgggtccagtcccgggcgggccgtcgcgggagaggtgagagcgctggctagaccggggccgaatgcggccggattcggggcgggggccttcagactgctgcatccgatattcttccggaccactggatcacaaatcaaaccatgtgactcccgcatgagcaggcagagtggagataacacggatcgctgtgtacactgtgtgctccggttgttgcatccgagggttgatcggatggtggttcccatccagatccaagtcctggcccctgtactggctctccctggattactggatcgcagtcgaatcccctgccagaatcctggtccccctttatcacaccggatcagccccaaagggcagggcttcttgcagcagttccagcctttgctgggggtttccagcccaggtctgaccacatgtttaactttttgaagaactaccaaactgttttccacggcattcacaccagcaatgcaagagggttcccatttcatcacatccttgctaacacttgttattttcaagggaatcccagcgctcttctcctctggcggttgctggagggccttgtgaggtggccgtgggcactgtagcccccaggcactgcattgtggcctgggcgtgttggcctttgagcctttggccttgagcacttccccatcccccat

SEQ ID NO: 25321 - DNA, 1845 bp, Homo sapiens
  SIMILAR (280)..(744): 571254mologous to Homo sapiens Human catechol-O- methyltransferase (COMT),accession number W70988,Smith-Waterman Score=340.
cagcccgcacggcctgcgtccgccaccggaagcgccctcctaatccccgcagcgccaccgccattgccgccatcgtcgtggggcttctggggcagctagggctgcccgccgcgctgcctgcgccggaccgttgcttttccagtcccgggcgggccgtcgcgggagagaaataacatctgctttgctgccgagctcagaggagaccccagacccctcccgcagccagagggctggaagcctgctcagaaggtgctttgaagatgccggaggccccgcctcgtgctgttggcagctgtgttgctgggcctggtgctgctggtggtgctgctgctgcttctgaggcactggggctggggcctgtgccttatcggctggaacgagttcatcctgcagcccatccacaacctgctcatgggtgacaccaaggagcagcgcattcctgaaccatgtgcttgcagcatgcgggagcccggggaacgcacagagcgtgctgggaggccatttgacacctaattgcgagcagaaggagtggggccattgaacgtgggcgacaagaaagggcaagattcgtgggacgccttgatttcaagggagcaaccagcccttccgtgcttgcttggaaacttgggggcctactttgggctacttcagctgttgcgcatggcccggcctgctggtcaaccagggggcgaggctcattcaccattcgagattcaaccccgacctgtgcccgccatcacccaagcggatgggtggatttcgctggcgtgaaggacaaggcgctgttccaggtcacccttggtgtgtggagcgtccccagagacattccatccccccagcttgaagaagaagtatgatgtgggacacaactggacatgggtcttcctcgaccactggaaggaccggtacctgtccggacacgcttcttcttgaaggaatgtggccctgctgccggaagggggacagttgctattggctgaacaacgcttatcgtccccaggtgcgccaagacttccttagcacacgtgtcgcgggaaccagcttgctttggggtgcacaacattaccaaatcgttccctggaaatacagggaaggtggtggacggccttgggagaaggcccatctaacaagggccccaggcagcgaagcaggggccctgactgcccccccccggcccccctctcgggctctctcacccaagcctggtactgaaggtgccagaccgtggctcctgctgaccttagtgcggctccgggcgtgtgtcctaaatgcaaagtcacacgctcgggccgagagcctgcgcgcctgacatagctaacctctcgtgaacatgcaacacgtggagttgttcttcttttaagagctcaatcatgacttcgtttactaacactgggctagcgtatattatcgttatatactaatatcatagtttcacccaatataaaaatagaagattaagaatctaaatatttagatataactcgacttagtacatccttctcaactgccattcccctgctgcccttgacttgggcaccaaacattcaaagctccccttgacggacgctaacgctaagggcggggcccctagctggctgggttctgggtggcacgcctggcccactggcctcccagccacagtggtgcagaggtcagccctcctgcagctaggccaggggcacctgttagccccatggggatcgactgccagcctgggaaacgaagaggagtcagccagcattcacacctttctgaccaagcaggcgctggggacaggtggaccccgcagcagcaccagcccctctgggccccatgtggcacagagtggaagcatctccttccctc

SEQ ID NO: 25322 - DNA, 3460 bp, Homo sapiens
  SIMILAR (1397)..(957): 351254mologous to Homo sapiens Nogo receptor,accession number AF283463,Smith-Waterman Score=171.
  misc_feature (1)...(3460): n = a,t,c or g
tttttttttttaagaaaagagctctttattccacgtcgtccgatatttttacacaagtaaaataaaatgcatatctctatataccgcgatctgggtgggaggcggcgttctggaacaaacgctgccgccgaaccctgtaaacatgatggggtggagatgggggtggcgggcggcaggcgtccatcagggaggacctggcctggcctgccccacgggttcggccgcccggctggcttggcggcgttggagagagaccccgtatgttacacacacctgggctgctgaagcacgctcttgtgtccgctgggggtcaagcagggcccaagcactnttccacagcaccagcgccagggcccaggggggtgaggctgcaggtgaggctgggtagggcacctgagccttctgagtcaccagtcccgccacccccgctgcctgcctggcccagacggcagtggctgcgggtgcggttcttgcgtgaacagcctggcctccggcgagggcccgaggtggggaaccctggtggctcggagccctcgggccgcactgcagtgagcgggggctcagcagagccaggcagagtcccaaagggtgagtcattgatgtgccgtgggccagagccgttgcccggcgggctgtcaccgggcggcacgcgtcccttcagcgcattgcctgccgaagctggtcttccaggctccagtactgaggccttgtcagcggcatctggctggcagcacttgggaagccccagcggctcctcatcggtggccctgccggtccagatgggatggtaagggccggtggccacagcgcagccctgcaggtcattggcagctaggcgtttgaggtcacggccagccaggcgttgcgggaggctgcagggcacctcggaggaggagccgcggaacttctgcagccaggcccagagtgggcgtgcccggcagtcacacaccccaggggttgtcgttgagcctcaggtactgcagggcacgcaggggggccagggcctcagtgggcagcgctgatagattgttggcaaacagatagagtgtcatgaggcggccaaggtcacggaaggcatgcgggtgcacatgggccacgcggttctggtgcagtaggagacggtcgaggctgtgcagcccacggaaggcgcgctcgggcacgctggagatgcggttcccgtgcaggaagaggtgtgtgaggttgcccaggtcgcggaaggtgtcatcaggcagtgcctgcagcgcgttgtcctgcaggtagaggtactgcagggcagccaggccgcggaacagccccgggcccagctcctgcaggccgcagcggtccaggtgcagcgtgtgtaggcggcccagcccgtggaaatgtggccagggtcccacagaccggaagctgtgcaatttatcgctgaaggtccagctgctcccaggagggccaggccagtgaaggcagccgcatcaattcgggccagcacattcgagtgcagccacaggatggtgaggttgcggcaggcacggaagctggcagctggcacatgcgagatgcggttgccgtgcaggaagatgcgctggctggcagcagggatgcccacgggcacagcctgcaggccctgctgggggcagcttgtcgtcaccttgggctcattgtagcatacgcaggcacctgggcatggggctgccacctgccaggcctgcagccacagcacccatgccagcagccggctccggtggtgcggggtcgggggagacaggggaggacatgggggagtggccacgtggcgctcagttctgccaggaagtgggtattgggcgcaaagacacggctcggttcctgccgagacaactgcttttcgtaaaccaacttctgagagtcgggtgaggtgggctctctcctcgctgcagccatggtaattggctccagcctggccccccttggggcctgcccgctggtctccatggcaacccctctgctgagcgagcaggagggggcatctttttatgagataatcaaacccaactttgcagcatgggtttgtcttcacagccggggccctccgtgccctcccaagcttgggctgaagttccacagggatgcctttgcctctgcccagcgatgccaggaggcagcacagggcaggcagctgtggaggcgccgagcaccggctttcatccacgcacagcttggtgccctcgggccccaatgccgcccctgggctgggatcaccggagggtcccatcacctgccgccatccatcctcaggcccacagacacgtgcaggggcagccagaattcccatggtgtttcctgtgcccttccagggctccaggtgctgcggcaggagattggcagcagcttctggtgggggcagtctgcccttgaggggtcctgagtctcctagggaagtgagtaccagcccctgatgccctggccctggcccctgctccttgttgatcttggcttggcaaggtgtgaagtggcccctgtcccaggtgctgtgctgagtgccgcccatacaagaccaggccgaggagccgggtcccaggcactcacggtccagggccagctgaccacgggcagccaccctgctgcatggcaggtgcccaccctccacggcctcaggcctggatgctcctgcagacccatagccaagattgtgaaggaaaagtaggctgtggaggcattttctgtccttgttatcatcattgtaaacatactcatcatcaccatcaccatcctcatcaccatcactatcattatcatcaccataatcatcatcagcatcatcatcatcatcatcaccaccactatcatcattaccattctcattaccatcactatcaccaccatcatcttcatcaccatccatcaccatcaccaccatccttatcctcatcactatcaccatcaccgaggccaggatcaccatcctcatcctcatcaccatcatcacatcactatcatcaccatcactatcaccaccactatcatcctcatcaccatcctcatcaccatcaccagcctcaacaccatcatcaccaacactatcaccatcattatcatcatcaccatcctcatcaccctcaccatcctcatcaccatcatcactatcactatcaccaccatcatcatcaccactatccatccttatcctcatcactatcaccatcaccatcaccatcatcaccatcctcatcctcatcaccatcatcccatcactatcatcaccatcctcatcacaatcactatcatcaccatcaccatcctcatcatcaccatcgtcctcatcaccatcaccgccatcagcatcctcatcactatcatcatcaccatcctcatccctgtcaccatcatcgtcttcatcatcatcaccgtcatcatcactatcatcacaccagctctgtgcaaggcccgggcagccagccagccggtgcctccctcccaggccaggcctgcaggaagccat

SEQ ID NO: 25323 - DNA, 461 bp, Homo sapiens
  SIMILAR (333)..(461): 1001254mologous to Homo sapiens histone acetyltransferase,accession number AF140360,Smith-Waterman Score= 222.
gacgctgagaggcaggaggcactagggatcgtccgcaggattgggactgatacagaggccgccacggagcccgccggagccaccgttcctgctgctgccgccgctgcccgaatcggaaccgtcgggccgcagccgccggcaatgccgcgaaggaagaggaatgcaggcagtagttcagatggaaccgaagattccgatttttctacagatctcgagcacacagacagttcagaaagtgatggcacatcccgacgatctgctcgagtcacccgctcctcagccaggctaagccagagttcttcaaggatttccaggtcctgttcgaaatctggcagtcttttggcactgaggagcctgcttactctaccagaagagtgacccgtagtcagcagcagcctaccccagtgacaccgaaaaaataccctcttcggcagactcgttcatctggttcagaaactgag

SEQ ID NO: 25324 - DNA, 2540 bp, Homo sapiens
  SIMILAR (342)..(914): 961254mologous to Homo sapiens UGTrel1,accession number D87989,Smith-Waterman Score=948.
tgaggattctttatatccctgatgggcatcgggccccaggggcttcccaaagcggcaactgggagcatcccctcctcctcctggagcctggcaaccttgccagctctccttccatgtccttggcatatccccacccttgtggcctgaccattcatcaagaacatcggcgtgcccacgaagagctggcatacacccccaacgacagagcctcctctacaggacacccagcctttattgaagatggcaacccatctccagtccttgcctttgctgcctcccctcgacctaatgatagctacatcttaaaacgggagcccccagaaagctgtgagaaagagcgtgtgtttgaagaagccacaacaagaggaaagtatggggaaggagccaagcaggagacgttcacctttgccttaactttggtcttcattcaatgtgtgatcaatgctgtgtttgccaagatcttgatccagttttttgacactgccagggtggatcgtacccggagctggctctatgctgcctgttctatctcctatctgggtgccatggtctccagcaattcagcactacagtttgtcaactacccaactcaggtccttggtaaatcctgcaagccaatcccagtcatgctccttggggtgaccctcttgaagaagaagtacccgttggccaagtacctgtgtgtgctgttaattgtggctggagtggcccttttcatgtacaaacccaagaaagttgttgggatagaagaacacacagtcggctatggagagctactcttgctattatcgctgaccctggatggactgactggtgtttcccaggaccacatgcgggctcattaccaaacaggctccaaccacatgatgctgaacatcaacctttggtcgacattgctgctgggaatggctgttagttgcccagaccaagggcctgaattagttccaagatgcccttttgttcaagcccttgagaaaccttcctggaaaaacctgcaccagcaggatttgtttgctacttgttactggcacaatgaaggagagtcgtgtgtcagttgtcatgggaagacactcagtagtaaaacacagggaggaatcctgttcactggggagctctgggagttcttgagctttgctgaaaggtaccctgccatcatctataacatcctgctctttgggctgaccagtgccctgggtcagagcttcatctttatgacggttgtgtattttggtcccctgacctgctccatcatcactacaactcgaaagttcttcacaattttggcctctgtgatcctcttcgccaatcccatcagccccatgcagtgggtgggcactgtgcttgtgttcctggggtccacccagataatcttggataatctcaagatccttaatacatctgcaaaaacgttactatacaagacgcccctgtcctggcaagagctagaaggtgagcgtgccagttcctgtgcacacaagcgctcagcatcctggggcagcacagaccaccgaaaagagatttccaagttgaagcaacaactgcagaggacgaagctgagccgcagtgggaaagagaaggagcgaggttcaccactcctaggggaccacgcagtgcggggagcactgagggcgtcccctcccagcttcccctcagggtcccctgtcttgcgactcagcccctgcctgcacaggagcctggaagggctcaaccaagagctggaggaggtatttgtgaaggagcagggagaagaggagctgctgaggatccttgatatccctgatgggcaccgggccccagctcctccccagagtggcagctgtgatcatcccctcctcctcctggagcctggcaaccttgccagctctccttccatgtccttggcatctccccagccttgtggcctggccagtcatgaggaacatcggggtgccgccgaggagctggcatccacccccaacgacaaagcctcctctccaggacacccagcctttcttgaagatggcagcccatctccagtccttgcctttgctgcctcccctcgacctaatcatagctacatcttcaaacgggagcccccagaaggctgtgagaaagtgcgtgtgtttgaagaagccacgcaccaacggagagacagcttcgatataagggaaaaagtggctgaactcaggaagaaaagaaattctggactgagcaaagaacagaaagagaaatatatggaacacagacagacctatgggaacacacgggaacctcttttagaaaacctgacaagcgagtatgacttggatcttttccgaagagcacaagcccgggcttcagaggatttggagaagttaaggctgcaaggccaaatcacagagggaagcaacatgattaaaacaattgcttttggccgctatgagcttgatacctggtatcattctccatatcctgaagaatatgcacggctgggacgtctctatatgtgtgaattctgtttaaaatatatgaagagccaaacgatactccgccggcacatggatggatctggcagtctttga

SEQ ID NO: 25325 - DNA, 2337 bp, Homo sapiens
  SIMILAR (661)..(834): 1001254mologous to Homo sapiens C/EBP-induced protein,accession number AF123073,Smith-Waterman Score=311.
atggctctcccggctgcctgcctcagccccactgcgagactcacacagccccccaacccccgaggccgctgcttatctgctgtacggggcggggaccggccccctcatcctagagctgtcattggactgcggaaacccagaccttccaccccagccaatccacagcttagccttccctttcctgaggatgattggtcgatgagcctagcgatccaagccaagaccccaccctcacaccgcccccttcggttttccaacatcccaggggctgctgattggcctgtacagaagagggctggttctccagcgccaccaatgagaagacgcagaataggggagcgtcacacccagtcccagaacgctccagacgctgagaggcaggaggcactagggatcgtccgcaggattgggactgatacagaggccgccacggagcccgccggagccaccgttcctgctgctgccgccgctgcccgaatcggaaccgtcgggccgcagccgccggcaatgccgcgaaggaaggctgcttcaaattcttttaggacagtggtggatatgagtgaagacggggcaggcaggccacatctcttagaagaggaaggtgattgccacgtctccttcctccatgctgatggcaaggcgtgcgggctgtgttctcttgcagccagcgtcccatgctcggtggccccagaaaagtcagtgtgtaggcctcagccacttcaggtccggcgtacattctccctggacaccatcctcagctcctaccttctgggccagtggccacgagatgctgatggggccttcacctgctgcaccaatgacaaggccacccaggcctatgtgactgtctctaggagacagtgctcagtgtctcctgccacacgcgtcctggtgccaggtggctggacacccagcctttcttgaagatggcagcccatctccagtccttgcctttgctgcctcccctcgacctaatcatagctacatcttcaaacgggagcccccagaaggctgtgagaaagtgcgtgtgtttgaagaagccacgtctccagggtcctgaccgggcctttcctgacttcctgtcctgacaaggaacaaagtccattttcaacccgactggctcagccttctgccccgtcaacctgatgaagcccctcttccccggcatgggcttcatcttccgtaactgcccctcaaacccggggatctcctcttcccccggccagccccaggccaccacctcggaaggatccggaagcctccaaggcctccccactgccattcgagccatggcagcgcacccctaccatcagtaagagccgtgtgctctttccacgagctcccgtgagtggtctcgagggtcccaccccatgccccacttttaccatagagaccagtgccttggtggcaggtccctccccaggtcccctgagatggggtatggaggggcccttccctctcggccttcgagcactttctttcacttactgagtcaaagccctggggtcctcttttttgatgggcaccggcccctctgaacgtgatgggaactggccttctccaatagtagctgggcagctcacaattcacacctgtgtaacctgccacatccctcacttggtgggaaaacacccagaaggtctttgagtcccccacccctgggtgttcagttccaaatggactgtataggaggccctttatttttgtcacagagcaagctgggccatgaacgaaggagagaagacgccacagatttccttccctctcctccaggagaccataagatagatccccccatcctctcagcccttattccccatgcctccctcttcattggagggagctgacccaaaagcagccctaaacgggccattaacacttgacccaattccagctgctggccagagggaggaaacaagtgttttccccaagtggcattttcatctcgctttcaccctgactaaagattgtcttaaagtagcagcccagcccgcccaagccccaggtgggtagtggggaggagagctggcattcctccaggtggcaaatggcgactctatactctccgcccgccccagggctggatggattagaaaaaatgcctaatttttccttgtatcgatgtagaggactctatttttctcccaaagacactaattttttgcagcctgtttgaagtttgtatattttccgtactggcagagcttgacacaaaattgaagaatgttaatgttcgagttttcttatgcttgtgtttagaggttgttttttgcagatcttggtgttaatagaccaaataaataaattaaatatttcccagcaaaaaaaaaaaaaaaa

SEQ ID NO: 25326 - DNA, 1509 bp, Homo sapiens
  SIMILAR (1)..(141): 971254mologous to Homo sapiens Human secreted protein, SEQ ID NO: 5491,accession number G01410,Smith-Waterman Score=230.
atgacggaactagagacagccatgggcatgatcatagacgtcttttcccgatattcgggcagcgagggcagcacgcagaccctgaccaagggggagctcaaggtgctgatggagaaggagctaccaggcttcctgcagatcctcaccaacgaggatgagcccctggtgaccattcccttcttgagccatagctgctcacttgcctatttgctgactacatcagggaaccgtgttaacgcactgctgaagtggctcttgaaacttggggaaaggtggcagatgacggaagaaggaatcaaaggacagagaagtgggcatggaccggagcaggcagaaaacccactgggtgacagcgttccacaagacaccaccaaggacgtcccactgacccagcaccggcttcaccagggattagaagcgggggtccccaaaacctctgtgccggccaggcccggtcttccagttccagcgttgcagcatgctcaaatcccaggtccctgtgagcgagcgctcctccactgccacaacggaccccagcgcctgcagcacagcctgcagggagaggagcagagggagacacatctgcgaggacaggactggccgtgtactttacagatgaggacactgaagcgggaggtgcatgctttaccaggtggccgagctggaggagcagcccgggagggccttggtgcttccatctgtgaaacgggggagcatcagatgaccaacttccaggtcccacgctggcctccttgcttcccagggcaggctggccctgtgctgggcactggtacccgccatggcctagacctgctctcaggcaggccagggaccgtgaggaaaggatcctccgtggcgaggatcatgaaagaggaggtgacagtcacaaaacagtcagccgctgatctaaggcatacaggacaaggccccacctgctgtgtgttgtctggaggccggtgtggcagccaggcctgcagccgcaggcccttctccctgcttctgggtgatgagagtgaaccccacgggcgagggccctttgccgcagctctgcaccaccgcaggaatcctttgaatgatgtgatgcttgtgggcgacgatgcaggacctgcaggacattttgcctcggtctacaacccgctggcctggacggtcaccaccatcgtcaccctgactgttggtttccctggagtccgcgtcacagatgaggcgggccacccagtgccctcgcaggtgtccggcatccaacggtgtcttcaggggatgaaggctccacccgtgacggtgacagtgagcggtgagaaaggcagctgcctttgcgcaagctgtgtcctctgcctggagcatccctacttccctctcgtcccctggctacctcctgtttttcgggacagcgtcattcccagctccacatctccacaggaagctgtattagctgacgtgggcttccgtaacaacgtaccccagagggctcagcttaaaccacagaaacagattctcacaccgttctga

SEQ ID NO: 25327 - DNA, 817 bp, Homo sapiens
  SIMILAR (281)..(421): 531254mologous to Mus musculus alpha-D-mannosidase,accession number AB006458,Smith-Waterman Score=113.
ttcccgggtcgacgatttcgtgccgcagggatggggcagctgtgctggctgccgctgctggcaccgctcctgttgctgcgaccgccaggggtccagtccgccggccccatccgggccttcgtggtgccccacagccacatggacgtgggctgggtctacactgtgcaggaaagcatgcgggcgtacgccgccaatgtctacacctcagtggtggaagagctggcccgcggccagcagcgccggttcatcgctgtggagcaggagtttttccggctgtggtgggatggcgtcgcctcggaccagcagaaataccaggtccgccagctcctggaggaaggacgcctggaatttgttcatcggaggccaggtcatgcatgacgaggctgtgacgcaccttgatgaccagatcctgcagctcacaggtttggccaccctaccctgcacccagggtccctcaggacctccagtggggctgggacatggtatcagaacccccaggttttgagctctgtctgcccctcttagtggggtcggggaccttaaccagtgaaagcagtgatttgctagtgccatattcatgcctcaccaaggaagttgaatgtaggggttaagagcatggatgctagagtcagatggtctcaatatatcctggctctgccaattccctcctctgtgaccctggaaaggaatgtaacttcagtttcctcatagataaaatgagtttgatggtaatacctacctcaaagggttgttgtgagtattaaatgggataattcaaataaagccctttagtaggaaaaaaaaaaaaaaaaaaaaa

SEQ ID NO: 25328 - DNA, 1395 bp, Homo sapiens
  SIMILAR (1252)..(1389): 821254mologous to Plasmodium lophurae histidine-rich protein,accession number X01469,Smith-Waterman Score=300.
atgactaacacaccagtcatgccggatttaacagcaggagacagtgctaacgcactgctgaagtggctcttgaaacttggagaaagatggcagatgacagaagaagggatcaaaagacagagaagtgggcatggaccggagcaggcagaaaacccactgggtgacagcgttccacaagacaccaccaaggacgtcccactgacccagcaccggcttcaccagctctttgggttcctcatggttccatgtggttcttcagagcctccattggtggctctaacctccctgaggtcctcggagtgccctccactggagcagtggccaatgggccgcgtccccgcccgcgcggccgccccgcccctcgcggacccggaagtgggcctggcaccttcccggcctgccgcagggatggggcagctgtgctggctgccgctgctggcaccgctcctgttgctgcgaccgccaggggtccagtccgccggccccatccgggccttcgtggtgccccacagccacatggacgtgggctgggtctacactgtgcaggagagcacgatcccatccagtggggagagcctggtatggagcgagtgcctaatagctgtgtggggggaaagcatgcgggcgtacgccgccaatgtctacacctcagtggtggaagagctggcccgcggccagcagcgccggttcatcgctgtggagcaggagtttttccggctgtggtgggatggcgtcgcctcggaccagcagaaataccaggtccgccagctcctggaggaaggacgcctggaatttgtcatcggaggccaggtcatgcatgacgaggctgtgacgcaccttgatgaccagatcctgcagctcacaggtttggccaccctaccctgcacccagggtccctcaggacctccagtggggctgggacatggtatcagaacccccagcaccataatgaccatgactactaccatcaccaccaccaccacgatgaccatcactaccactaccatcaccaccaccaccaccatcaccatcaccactaccaccatcaccaccatcaccaccaccatcaccatcaccaccaccaccaccatcaccatcaccagcaccaccaccatcaccatcaccactaccaccaccaccaccatcaccaccaccatcaccatcaccaccaccaccaccaccatcaccatgaccagcaccaccaccatcaccatcaccaccaccaccaccaccatcaccaccaccaccctttaccaccatgaccaccaccaccatcaccaccaccatgaccatcaccaccaccatcaccaccaccaccaccatcaccaccaccaccaccaccaccatcaccatcaccaccaccatgaccatcaccaccaccaccactacccttga

SEQ ID NO: 25329 - DNA, 412 bp, Homo sapiens
  SIMILAR (261)..(380): 971254mologous to Homo sapiens G protein-coupled receptor Edg -2,accession number Y09479,Smith-Waterman Score=207.
tttcgtgaggagagcgacaacgtgaaaatgccccgtgccgtggcgttcaccggagtcctgccagctgtccggcgctggggtggacgtctgatttatgaagctccccatccacctatctgagtacctgacttctcaggactgacacctacagcatcaggtacacagcttctcctagcatgacttcgatctgatcagcaaacaagaaaatttgtctcccgtagttctggggcgtgttcaccacctacaaccacagagctgtcatggccgccatctctacttccatccctgtaatttcacagccccagttcacagccatgaatgaaccacagtgcttctacaacgagtccattgccttcttttataaccgaaagggaaagcattcttgccacagaatgggacacagcccgcaacg

SEQ ID NO: 25330 - DNA, 948 bp, Homo sapiens
  SIMILAR (264)..(659): 321254mologous to Schizosaccharomyces pombe putative proline- rich protein verprolin, possibly involved in cytoskeletal organization and cellular growth; actin cytoskeleton- assiociated,accession number AL354632,Smith-Waterman Score=134.
atgcccagcctaaataccatagtcagccctctgggctcccctcacaccagcctgatacctcccatgctcctttctgccaatctgccctttgacaccacaatcatgattaaactccaaactgcctgttctgctcccattcacaacctccagaggccttgtggggaaaacttaaggacaagcacgtttgttaggcggctggacagaaacttagttaaaagtcctcagcccggtggtgggggacaaccgagtcgtcagtgggaagcgagaggtgcggagccccaggggcgcagggacccctcggaggtgcaagtccagcgggacgaggttttgggagaatttcgagggcccctcgcaagccctcccgcgcacccaccccgacccaggggctcggtccgccgctgggtgcgggaggccaggggagcctcgcctcctgcaggccggctcgcaagaacgcacggccacccacccgcgccgcggcccacagcgcgcacccacactctcactggcactcgcacgcgcgcccccaaccacaaagcccgtccgcggcgggacagtcgggagacccgtggccgccagctcgggtcccacccccgcccctcctgcgcttaccccagcgccggacagctggcaggactccggtggacgccccggcacggggcattttcacgttgtcgctctcctcttcccactcgaaaagctctggaaaacatcgcggggcccgcaaaaccccggaaatgtggcctctctttcgtggctcactttctaaactttccagaaggcgcaaagtttctcccagcgccgccctgcactggaggctgcgaagaacgcagaagcggctttgctgctaggaaggtgcatacgtttctagttctgatttttcacttcactggatctgtaaacgaaagcaagtgtgtctgctcccctagttctccatatccacgattataa

SEQ ID NO: 25331 - DNA, 1086 bp, Homo sapiens
  SIMILAR (142)..(387): 671254mologous to Homo sapiens glycophorin C isoform (AA 1- 109),accession number X51973,Smith-Waterman Score=244.
atggataaagctggaatccatcattctcagcaaactaacacaagaacggaaaaccaaacaccacatgttctcactcataagtgggagttgaacaatgagaacacatggacacaggaaggggaacatcacaccctggggcctgtcgggggttgggggcctaggacagggagagcattaggagaaatacctaatgtggatgaagggttgatgggtgtgattgctgctgtggccatcgtcctagtctccctcctcttcgtcatgctgcgctacatgtaccggcacaagggcacgtaccacaccaatgaggccaagggcacggagtttgctgagagtgcagatgcagccctgcaacagagagagagagcacttgattcttcccgagatagccacctggaaacactaggtgcctgcccagggaggaacggaggaggactcgcgctacaagaggccactcccagggacccagggaggcgatggccaccccagaggccaccttttgctccacggaggtgggagaaaatctgggcacatgggcccctgggcagtgcaggacaacatcagctcactggcaggaaagtccttgttgaggggcttggctgtatctgcatggcccacactgatcttcagaacaccagtgtggcaaaaatggcgataaataggcccaatgaatatgcacaagtcagtttagaaaatgatgtatcatgtaaagtgaaagcagtgcaggctcctcagcgtcttcactggcccagtgtggatgctgacactggtgggaggggagctgtgcacatagcctttcccaagcatgttgaaccagagaccccatttgctcacacgatacctgctaggaactcgtggaccaagtggtcctcggagcacattttggaaacactcagcccccagaagcctgccttgccttgggctcccagacagcaagggcgtcctctgggcctcactgcccccatttctaagcggctggggcctggggatgggcctgagggagaagccggtgagcggctggcccaagcccattttatcaacaccaggccacccagcacaggcccaccaggtacccctgcagctgactga

SEQ ID NO: 25332 - DNA, 427 bp, Homo sapiens; identical to SEQ ID NO: 18405
  SIMILAR (82)..(423): 881254mologous to Homo sapiens sialoglycoprotein beta (AA 1- 128),accession number X12496,Smith-Waterman Score=519.

SEQ ID NO: 25333 - DNA, 1179 bp, Homo sapiens
  SIMILAR (148)..(216): 951254mologous to Homo sapiens glycophorin C isoform (AA 1- 109),accession number X51973,Smith-Waterman Score=127.
  misc_feature (1)...(1179): n = a,t,c or g
cggacgcgtgggcgggaggagtgtgacccaagtgccgcttcctctcgccgccgagggttaggacgcccgggagcgcgaccctcccccggcccggcctggcccggcctggccagtccccgcggtctctgcccgggctgacgcccaggaatgtggtcgacgagaagccccaacagcacggcgtggcctctcagcctcgagcctgatccggggatggcctctgcctccaccacaatgcataactaccaccattgcaggagcctgattccagggatgttctggatggccggatggcagaatggagacctccacccccaccataatggacattgtcgtcattgcaggtgtgattgctgctgtgggccatcgtccctagtctccctcctcttcgtcatggttgcgctaacatgtaaccgggcacaaggggcacgtaccacaccaatgaggccaaagggcacggagtttgctgagagtgcagatgcagccctgcagggacgaccctgccctcctaagatgctggtgatagcagcagaaaaggagtactttatttgagggacaacagacttaactttccttgaatgccttcccccatcttccatcaggaaaaattacaccccatccgcccagcaccccctgctggataccacccagacagagagagagagtacacttgatttcttcccgagatagcccacctggaaaacactaaggtgccctgccccccagggaggaaacggaaggaaggaactccgcgcctacaaagaggcccacttcccccagggaccccccagggaaggccgaatggcccaccccccagaggcccacccttttgcctcccacggaggtggggaagaaaatcttggggcacattggggccccctagggcagtgcaggacaacatcagctcactggncaggacaacatcagctcactggcatcactgcagggaaagccctgttgagggttagggggttcttgggttacccgggggctggggaagcaaggaaataagtcatctgtatgctgactggggataatggcatcaaatgtcagtccttgacatttggggggaacagcaggtgccagagctaaaaggtacctttgtctacacattgatccagctcagaacgattggaaataaatttgaaatgtaaccgagcaaaaaaaaaaaaaaaaaaaaga

SEQ ID NO: 25334 - DNA, 599 bp, Homo sapiens
  SIMILAR (59)..(6): 881254mologous to Homo sapiens Human secreted protein sequence encoded by gene 29 SEQ ID NO:153,accession number Y91432,Smith-Waterman Score=93.
ttttttattttacaaatacattcatattcaaagacatgggtgcttatgggagaggatggtgtaaagaaagggaaaaaagccataaaaccagagaatctttgcatgggactgtattcctgagatcccaaaccaaagggatgaatgtgctgttatgccttaaatgtgtgcaccaggaaatgcaaactagaaagggtggctctgaagggtcctcaggtgaggaagacccccagggctgagaatccaccaccttcatccttcaaaagagtacctcagttgtctgcttacgcttcagccagcatgtgtgagcttggtcatttcctgcaagccaggcaaccacaccagtgtataagcctcaagcaaatgtcactcccaaagccccaaatgggactaaggcctctgctgggctaggcgtggtgtaaatcccaggcctggaagctcctacccaaccctcatttgtttcaactcactttcaatatgtgcatagtttcataaagcagacattttccatgaggaaaagaggatggtggtgaaaaagagagtgcttgttccaggtaaaggacttcaagataatttacaggcagatttatttttattagtaa

SEQ ID NO: 25335 - DNA, 1905 bp, Homo sapiens
  SIMILAR (325)..(684): 601254mologous to Homo sapiens Human TANGO 184 protein,accession number Y88275,Smith-Waterman Score=326.
agccgggtcccaagcctgggcctgagcctgagcctgagcctgagcccgagccgggagccggtcgcgggggctaccgttctgtgggaccgctgggcccccaccgaaggcgaccctgtggggaggccttcttcggcttggctccttgctcagcctgtcgtgcctggcgctttccgtgctgctgctggcgcagctgtcagacgccgccaacaatttcgaggatgtcagatgtaaatgtatctgccctccctataaagaaaattctgggcatatttataataagaacatatctcagaaagattgtgattgccttcatgttgtggagccccatgcctgttccgggggcctaatgtagaagcatactgtctacgctgtgaatgcaaatatgaagaaaagaagctctgtccacaatcaaggttaccattataatttatctctccattttgggccttctactttctgtacatggtatatcttactctggttgagcccatactgaagaggcgcctctttggacatgcacagttgatacagagtgatgatgatattggggatcaccagccttttggcaaatgcacacgatgtgctagcccgctcccgcagttcgagccaacgtgctggaacaaggtagaatatgcacagcaggcgctggaaagctttcaagtccaagagcagcgaaagtctgttctttgaccgggcatgttgtcctcagcttaatttggggaattgaattcaaggtgactaggaaagaaacagggcagacaactgggaaagaacttgactggggttttgctggggtttccatttttaattaccttgttggattttcaccaactgtttgctgggaggatttcaaaactggggaggcaaaaacttgcttgattttttttttcttgttaaccgtaataatagagacatttttaaaagcacacagctcaaagtcacgccaataagtcttttcctatttgtgacttttactaataaaaataaatctgcctgtaaattatcttgaagtcctttacctggaacaagcactctctttttcaccacatagttttaacttgactttccagataattctcagggcttttgttgcggggtgttctttgtttgtttgttttggtgccacaggggagggatgcctgggaagtggttaacaacttttttcaagtcactttactaaacaaacttttgtaaatagaccttaccttctattttcgagtttcatttatattttgcagtgtagccagcctcatcaaagagctgacttactcatttgaacttttgccacctgaactgtaattatcctgggtatcctgcctgtgtctgcacttccatggtaaacgggatctaaaatgcctggtggcttttcacaaaaagcagattttcttcatgtactgtgatgtcctgatgcaatgccatcctaggaacaaactgggccatttgctagtttacttctaaaggacttaaacataggtcttgggtgtgtgtgggtcttacttcatcttcctaggtaccctttaagggacaaatccctaagggacttggggacacttggcaataaaggaaatttttatttttaaacccaagcctcccctggattgataatatatacacatatgtgagacatttcccgtcgctgggttgagacagcctgtttttgcgtccaatgtgtgcagctttgaactaaggctggggttgtgggtgcctcttctgaaaggtcttaaccatttattgggttaactggctttttttcttcctatgtcctctttggaatgtaacaataaaaaataatttttgaaacatccatcagtgtatctatctatgtctcctagttttttcctcctccctcttttgctgtataatgagattgaagatataaagacattttgtaccctgtaaaaaaaa

SEQ ID NO: 25336 - DNA, 1326 bp, Homo sapiens
  SIMILAR (246)..(347): 821254mologous to Homo sapiens basal transcriptional activator hABT1,accession number AB027258,Smith-Waterman Score=153.
atgaaattaggtcgtgctgctcgtgtcagtcaacacggaggcagaggaatcggagaaggccgcaacagagcaaaggcgctggaagggacagaccagacactagatgtggaggaggagcaggaggaatccaaagcagcagcctgtggcagcaagaagcgggtagtgccaggtattgtgtacctgggccatatcccaccacacttccagcccctacatgtccgcaaccttctcagtgcctatggtgcagcccctcccattatgacctatggaatctcaagtacttgcaccatttcacctggtcccaccacagcgagcaccttgcctttgagcgccaggtgtgcacacaggcagcacctgagagtggaggtcactcaggccaagtgtgagaccatcttctatcttcaaagtgtggaatggggacaatgctttcttgctgttgatggggatcttgctcacccagatggctcctggacatttgcccaacgtcctactgagcaggaactgagggcccggaaagcagcacagccagtagggaaagttttaaattattacccaacccagttaagtttagagtgtgaggtcccatcccagccaatgggaacgggacacagccataggggattgtgtcaggatgtaaaggttataaatgtccctgtctcctttgtttggtgtgctctcgtggctggactgctggtggtagtcccgcctcctcctcctcaggctccggaggcagaagtctctgatatctccttaaaaagagggcttcagagagagatagaacaatgtagaagggatattcaaaattttccctttccctgcgcttccgaagagctggcttctcagctcttccctctaatggaggtgccacagggtaggggtacaactggattcatgaacgcccctttaaccacctctgaagtccgaggtctaaagaaagagcttaagcctttgctagatgacccagagagagtagcagagcaaattgaccagtttttaggttccaaactatatacttggactgaattaatgtcaatcctgggtatcctcttttcaaaggaagagcggaacatgatctgcagagctgctatgggggcctgggaacgtgattaccctgccggtcaaaatattccggcagcggatgttacatttcctgctcgggacccacaatggaataataataatgctgctcaccagaagaatatgagggatctacaagaattaattataaaaggtatcaaggagtctgcacccagaccccaaaacctcactaaggcctttgatgaacaacaagagaaagatgagggacctatgcactttttagactaa

SEQ ID NO: 25337 - DNA, 490 bp, Homo sapiens
  SIMILAR (37)..(63): 1001254mologous to Homo sapiens basal transcriptional activator hABT1,accession number AB027258,Smith-Waterman Score=42.
ggcacgagcggcacgaggccgctcgtgtcagtcaacatggaggcagaggaatcggagaaggcgcgcaacggagcaagagccgctggaagggacagaacagacactatatgcggaggaggagcaggaggaatccgaagaagcggcctgtggcagcaagaagcgggtagtgccaggtattgtgtacctgggccatatcccgccgcgcttccggcccctgcacgtccgcaaccttctcagcgcctatggcgaggtcggacgcgtcttctttcaggctgaggaccggttcgtgagacgcaagaagaaggcagcagcagctgccggagggaaaaagcggtcctacaccaaggactacaccgagggatgggtggaggtcccgtgacactcgccatagccaagcgggtggcgggccgctctacttaaatagcctatgggtgcccgcaggcgcagccccttccgttatgatctttggaacctcaagtacttgcaccgt

SEQ ID NO: 25338 - DNA, 574 bp, Homo sapiens
  SIMILAR (23)..(574): 991254mologous to Homo sapiens unnamed protein product,accession number AK001403,Smith-Waterman Score=934.
cccgggtcgacccacgcgtccgcacgaagctgggacagggcaggcaggagagagaccgccatccgaccttataagtagagtacgaggctatctggaaatgaggcttcctgatattcctcttcgtcaagatatagctgaggaatgtgttgcctttatgttaaactggagagaaaatgaataccttacactccaagttcctgcatttttgcttcagagtaatccatatgtaaagcttggacagcttttagcagctacatgcaaagaacttccaggccctaaagaaagtagacggactgccaaagacctttgggaagttgttgttcaaatctgtagtgtgtccagtcagcacaaacgaggaaatgatggcagagttagtttaataaaacagagggaatctacgttaggtatcatgtatcggagtgaactgctttcttttatcaaaaaattacgagaaccactcgttttgactattattttatcactctttgtgaaacttcacaatgttcgggaggacattgtgaatgatattacagctgaacacatttctatttggccatcttccattcccaacctc

SEQ ID NO: 25339 - DNA, 1548 bp, Homo sapiens
  SIMILAR (469)..(690): 481254mologous to Homo sapiens dJ1181N3.1 (similar to collagen),accession number AL109824,Smith-Waterman Score=156.
gcggccgctcccttccccgcgcagccccgcacggcccgggcccacgtacaatgactcttcttgcttttcacctaagttgaataagcaccctgtgcactttaatctcctgtcggtaccattgggccaactaaagacaaggttttgaaatctcagctataaaagacatccagccaaactctcagtcttgccttaacaatgttccagaggctgaataaaatgtttgtgggtgaagtcagttcttcctccaaccaagaaccagaattcaatgagaaagaagatgatgaatggattcttgttgacttcatagatacttgcactggtttctcagcagaagaagaagaagaagaggaggacatcagtgaagagtcacctactgagcacccttcagtcttttcctgtttaccggcatctcttgagtgcttggctgatacaagtgattcctgctttctccagtttgagtcatgtccaatggaggagagctggtttatcaccccacccccatgttttactgcaggtggattaaccactatcaaggtggaaacaagtcctatggaaaaccttctcattgaacatcccagcatgtctgtctatgctgtgcataactcctgccctggtctcagtgaggccacccgtgggactgatgaattacatagcccaagtagtcccagcatccttccaaacaagatgctgtctgttcacgttggaactgccatccacaaccaagcagctctttgtcagtcagttgagagctattggcagtgtggaatccagctcctcacacagttccagagtcagtccaagcttggacagcttttagcagctacatgcaaagaacttccaggccctaaagaaagtagacggactgccaaagacctttgggaagttgttgttcaaatctgtagtgtgtccagtcagcacaaacgaggaaatgatggcagagttagtttaataaaacagagggaatctacgttaggtatcatgtatcggtatgtattggaaccactcgttttgactattattttatcactctttgtgaaacttcacaatgttcgggaggacattgtgaatgatattacagctgaacacatttctatttggccatcttccattcccaagaagcaaatgtcctcaaggaccttcatgtctcaggaggaaacagtttgtagagcagctcacacaccctctctcccggaggaaaagtgggtggagcagttgatctacgctctggtagtcgccgcagctagaataatggctatgtgggggccgaatgcagcgtggcttgttttcttggccgcggcgggacctcctcctctcacccctcctcactcccctccactcctcctcctccgcctgctctcggccgttggatggggccgccccttcgggactcggcgtcggggctcccgcggccacccccgggacgcatctccgaagacagcggcgcttgggcttgtggcccggcgctctgtccccgccctgcgatcccgtcccctgcgcctgccctccgagttccggaggccctgcggctatggggaacctgctccgtga

SEQ ID NO: 25340 - DNA, 603 bp, Homo sapiens
  SIMILAR (119)..(307): 461254mologous to Homo sapiens pS2 precursor,accession number X00474,Smith-Waterman Score=99.
ttcacttcccccaagacagcccggaactggggctggttaatgcaggtgaggaaccagcggttggtattgggaaaggctggcggaaagaaggggtcgcctttggagcagagaggaggcaatggccaccatggaggtacaaggttgatctgcgccttggtccctggtttccaatgcggcccctggcaacctttgcggagccccagacagagacgtgtacagtggccccccgtgaaagacagaattgtggttttcctgggtgtcacgccccccccagtgtgcaaataagggctgctgtttcgacgacacccgttcgtggggtcccctggtgcttctatcctaataccatcgacgtccctccagaagaggagtgtgaattttagacacttctgcagggatctgcctgcatcctgacgcggtgccgtccccagcacggtgattagtcccagagctcggctgccacctccaccggacacctcagacacgcttctgcagctgtgcctcggctcacaacacagattgactgcttctgacttttgactactcaaaattggcctaaaaattaaaagagatcgatattaaaaaaaaaaaaaaagggcggccgct

SEQ ID NO: 25341 - DNA, 3673 bp, Homo sapiens
  SIMILAR (2826)..(3593): 581254mologous to Homo sapiens homologue to elongation factor 1-gamma from A.salina,accession number X63526,Smith-Waterman Score =567.
cttcaccactgctagaggacagggaagagggggacctggggaaggcctcggaactagcagagaccccaaaggaggagaaagcagagggggcagcaatgctggagctggtgggatccattctccggggctgtgtccctggggtgtatcgagtccaaactgtgccctctgcccggcgccctgtggtcaagttctgtcatcggccttcaggtctccacggtgatgtctccctcagtaaccggctggccctgcataactcccgtttcctgagtctctgctctgagctggatggtcgagtccggcccctcgtgtacaccctccgctgctgggctcagggtcgggggctgtcaggagagggggaacaggtggaagtcgatggctgggactgcagtttccccagggatgcctcaagactggagcccagcataaatgtggagcccctcagttccctgctagcccagttcttctcctgtgtatcttgttgggatcttcgtggctccctgctgtccctgcgggagggtcaggcactgcctgtggcagggggcctgccttctaatctctgggagggtctgcgccttggccccctgaatctccaggacccttttgacctgagtcacaatgtcgcagccaatgtgaccagccgggtggctgggcgcctacagaactgctgccgagcagcagccaattactgccgaagcctccagtaccagcgccgttcctcccggggtcgggactgggggctgctccctcttctgcagcccagctcccccagctccctgctctctgctacgccgatccctttaccccttgcacccttcacccagctcactgctgccctggtgcaggtattcagggaagcactggggtgccatatagaacaggcaaccaagagaacgcggtcagaaggaggtggaactggggagtcctctcagggagggacaagcaaaagactcaaagtagatggacagaaaaactgctgtgaggaggggaaagaggagcagcagggatgtgcaggggacggtggggaagacagggtagaagagatggttatagaggttggagagatggtgcaggactgggccatgcagagccctgggcagccaggggacctgcccctgaccactggaaagcatggagcccctggagaagaggggcagcccagccacgcagccctggcagagcgggggcccaagggacatgaggcagcccaagaatggtctcagggtgaggcagggaagggggcatccctgccctcctcagcgagctggcgctgtgccttgtggcaccgagtgtggcaagggcggcggcgagcccgtagacgcttgcagcagcaaaccaaggagggagctggaggtggcgctggcacaagagcagggtggctggcgactgaggctcaggtcacccaggagctgaaaggactgagtggtggcgaagagaggccagaaactgagcccctgctgagctttgtggcgtctgtctccccggctgaccgaatgctcactgtgaccccgctccaggatccccaaggcctgttccctgatctccatcatttcttacagaacttcctgcagctgctcccgtctgaccccgaacatgggtctctccctgttgctctccaccccaccagcttctccttcctacagttcgcacagctcgaggggagtgcgggggcagcaccgcgcgtggcacctggcacccgcgcagagttcctgaatggcagagcgatttatgcgcacaaggacggagatttgcgttcagcgttcttcattctctcctttaaacgaggagagttcatcccgttcttaaactgggtaagagatttcaaacctgaacatgggtcaaaagccatgaacatcagaagcgacgatgtcaggtcttccagcgtcagcccctccaggggccgagtccggaggaggtgggagggacagggcgcgttctccctcatgtccctgccctgcttcgggccggagggccggtgccctgctcgcagtaacagcaccctggagctgtcaggggttggatcgccactggataccgaactgtcgtacgtatgtcttctgtttcgtcctcgctttccggctgctgtttctccacggctctcctctttccccctcccttctctcccgggcggcttactttgcggcagcgccgagaaccccaccccctttctttgcggaatcaccatggcggctgggaccctgtacacgtatcctgaaaactggagggccttcaaggctctcatcgctgctcagtacagcggggctcaggtccgcgtgctctccgcaccaccccacttccattttggccaaaccaaccgcacccctgaatttctccgcaaatttcctgccgggcagggtcccagcatttgagggtgatgatggattctgtgtgtttgagagcaacgccattgcctactatggtaatttgcaggggtatatgggaatgggagaatttggagtgagcaatgaggagctgcggggaagtactccagaggcagcagcccaggtggtgcagtgggtggagcttttgctgattccgatatagtgcccccagccagtacctgggtgttccccaccttgggcatcatgcaccacaaacaaacaggccacttgagaatgccaaaggaggaagtgaggcgaattctgggtctgctggatacttacttgaagacggaggacttttctggtgggcgaacgagtgacattggctgacatcacagttgtcagcacccgtgttgtggctcaataagcaggttctagagcccttctttccgccaagccttttcccaataccaacccgctggttcctcaccctgcattaacccagccccagttccccggctgttcttggggcgaagtgaaacttgtgttgagaagatggcccagttttgatgcttaaaaagttttgcaggagacccaaccttaaaaagggacacaccacgggaaagaggaagggtttcacggggaaggagaagcagaagccccaggctgatgcggaaggagggagaaaaagggcgggctgccccctgctccctgaaggagggagatggatgaatgtgagcagggcgctggcttgcttgagcccaaaggccaaggaccccctttcggttcaccttgcccaagagttaccttttgtggttgggatgagtgttaagccgccaagtgactccaattgaggacacactctctgttggcactgccataatttctggggagcacctttgattaaggacggctgggtccctgttggtactcagagtatcgcttccctgtagaactcacttcagaccttcatgagctgcaatctcatcacttggaatgttccagcgactggacaactgaaggaagaatgccttcgccagtgtcatcctttttggaaccaacaatagcagctccatttctggagtctgggtcttccgaggccaggagcttgcctttccgctgagtccagattggcaggtggactacgagtcatacacatggcggaaactggatcctggcagcgaggagacccagacgctggttcgagagtacttttcctgggagggggccttccagcatgtgggcaaagccttcaatcagggcaagatcttcaagtgaacatctcttgccatcacctagctgcctgcacctgcccttcagggagatgggggtcattaaaggaaacctgaacattg

SEQ ID NO: 25342 - DNA, 1233 bp, Homo sapiens
  SIMILAR (857)..(1030): 621254mologous to Homo sapiens proteasome subunit p40 / Mov34 protein,accession number D50063,Smith-Waterman Score=164.
atggcgacgttcccggcggcggcgaccaccggcgccccaggctgggggcggagacttccgcgcgggcatttctccacccacagggaagaagagcctgggcctgatggagccccagggaaatcactaccgctgccggtgtttgcaggtagcagggagccaggcctgggcgaggtgtgtctcgatgccagagctggtagtacagaaggtggtgggccatccccggtgctgctcagcgtggtggatcatttcaaccgaatcggcaaggttggaatccagaaatgcgtcattggtctgttttgggggtcatggcaaaagaaagtacttgatgtattgaacagttttgcagttccttttgatgaagatgacaaagacaattctatgtggtttttagaccatgattatttggaaaacatgtatggaatgtttaagaaagtcaatgccagagaaagaatagttggctggtaccacacaggcctgaaaatacacaagaatggcattaccatcaatgaactcatgaaaagatactatcctaactcggtattgatcattattgacgtgaatccaaaggacctagggctgcccacagaagcatacatttcagtggaagaaatccaagatgatggaactccaaccttgaaaacatttgaacatgtgaccagtgaaattggagcagagagctacctggaaaaagtagccacaggcaagctgcgcatcaaccaccagatcatctacgagctgcaggacgtcttcaacctgctgccagatgttagcctgcaggagcctattaaagccttttacctgaggaccaatgaccagatggtggtagtgtacttggcctcactgatccattctgtgggcctcactgatccattctgtggtcgccctgcacaacctcatcaacaacaagattgccaaccaggatggagacaagaaagaagggcaggagaaaaaagagagcaaaaagatagaaaagctgacaaggggaaagataaagataaggaaaagagtgatgtaaagaaagagcagaaaaaccactgtcttaaagagaagtaccggttcaggcaggattcattaccggatgatccaagagtcctcggacttgaattaacaccaccagttgccaggcagtactcaccacaagacttgagtgagatcccgcgccatgccgacttcaggtgtgacccagcacatttccagctgtggtggtcacagggagagactccttctacttga

SEQ ID NO: 25343 - DNA, 1231 bp, Homo sapiens
  SIMILAR (706)..(1041): 931254mologous to Homo sapiens proteasome subunit p40 / Mov34 protein,accession number D50063,Smith-Waterman Score=526.
gtgaccgctactgctgccggtgtttgcgtgtggcagggagccaggcctggcgagcggggtgtgtcgcgatgccggagctggcagtgcagaaggtggtggtccaccccctggtgctgctcagtgtggtggatcatttcaaccgaatcggcaaggttggaaaccagaagcgtgttgttggtgtgcttttggggtcatggcaaaagaaagtacttgatgtatcgaacagttttgcagttccttttgatgaagatgacaaagacgattctgtatggtttttagaccatgattatttggaaaacatgtatggaatgtttaagaaagtcaatgccagggaaagaatagttggctggtaccacacaggccctaaactacacaagaatgacattgccatcaacgaactcatgaaaagatactgtcctaattccgtattggtcatcattgatgtgaagccgaaggacctagggctgcctacagaagcgtacatttcagtggaagaagtccatgatgatggaactccaacctcgaaaacatttgaacacgtgaccagtgaaattggagcagaggaagctgaggaagttggagttgaacacttgttaccagatatcaaagacacgacggtgggcactctgtcccagcggatcacaaaccacgtccatggtttgaagggactgaactccaagcttctggatatcaggagctacctggaaaaagtcgtcacaggcagagctgcccatcaaccaccagatcatctaccagctgcaggacgtcttcaacctgctgccagatgtcagcctgcaggagttcgtcaagggcttttacctgaagaccaatgaccaaatggtggtagtgtacttggcctcgctgatccgttccgtggtcgccctgcacaacctcatcaacaacaagattgccaaccgggatgcagagaagaaagaagggcaggagaaagaagagagcaaaaaggataggaaagaggacaaggagaaagataaagataaggaaaagagtgatgtaaagaaagaggagaaaaaggagaaaaagtaaaacatgtattaaatagcttttttaatttgtaaattaaaatcttacaaactaaatcagtgtgctgctagagggttctttttcacttgacatgcttattagaaagctgacccaaccagaagcttctgcctccggtcactcttgctgtggtgctacgtggaagtgaatggagactgatctcaaatctgaa

SEQ ID NO: 25344 - DNA, 1569 bp, Homo sapiens; identical to SEQ ID NO: 13606
  SIMILAR (649)..(1503): 311254mologous to Homo sapiens T-complex protein 1 theta subunit,accession number AL163249,Smith-Waterman Score=373.

SEQ ID NO: 25345 - DNA, 2043 bp, Homo sapiens
  SIMILAR (331)..(1851): 321254mologous to Homo sapiens T-complex protein 1 theta subunit,accession number AL163249,Smith-Waterman Score=695.
cccagttcctttacagaatcaaccctggggtggctttaggactgggctctttggagctcatccttggacccacagtggagtgctggtccgtgctgatgtcttcagataccaatcaatgggcatttggctccttgcttccactgacctcttgagtactttcaacgatcggtgtcaggagtgccccagctgctgtttctagagcatctctgcaacccacggtggcctctcctctctctgcgggccatggacagcacagtcccttcagccctggagctgccccagcggctggcactgaacccaagggagagcccgaggagtccagaagaggaggagccccacctgctgagcagcttggctgcagtccagaccctggccagtgtcatccggccttgctatggcccccacggccggcagaagttcctggtgaccatgaaaggagaaacagtgtgcacggggtgtgccactgccatcctcagggccctggagctggagcacccagcagcatggctcctccgggaagcaggacaaacccaggcagagaatagtggggacggcacagccttcgtggttctgctgacggaagccttgctggaacaggcagagcagctgctgaaggctggcctgcctcgcccgcagctccgggaggcctacgccacggccactgcagaggtcctggccacactgccctccctggccatccaatctctggggcctttggaagatccatcctgggccctccattctgtgatgaatacccacaccctgtcccccatggaccacttgaccaagctggtggcccacgcctgctgggctatcaaggaactagacggcagcttcaagcctgagcgtgttggggtgtgcgcgctgcccggggggacactggaggattcctgcctcctcccggggttagcaatatctgggaagctctgtgggcaaatggccacagtgttaagtggtgccagggtggctctctttgcttgcccctttggtcctgcccatccaaatgcaccagcaacggcccgtctttctagtcctgctgatctagctcaatttagtaaaggaagcgatcaattactagaaaagcaagtaggccagctagcagctgcaggaattaatgtggcagtggtgttgggggaggtcgacgaggagaccctcacactggcggacaagtatggcatcgtggtgattcaagctaggtcttggatggagatcatttacctgagtgaggtgttggacacacctctgctgcctcgtctgctccctccccagaggccaggcaagtgccagagggtttacaggcaggagctgggagatggtttggctgtggtatttgaatgggaatgtacaggcacacctgccctcactgtggttctcaggggagccaccacccaggggctgcggagtgcagagcaggccgtctaccacggcattgatgcctatttccagctatgtcaagatcccagactgattccaggagctggggccacagaaatggctttggcaaaaatgctttctgataaaggaagcagattggaagggcccagtgggcctgcattcctagcatttgcctgggccctgaagtatcttcctaaaactttggcagagaatgcaggcttagctgtctcagacgtgatggcagaaatgagtggagtgcaccaaggtgggaacctcctaatgggtgtgggaactgaagggataataaatgtggcccaggaaggggtgtgggacaccctaatagtcaaagcccaaggatttcgagcagtggctgaggtggtgctacagctcgtgactgtagatgaaatcgtagtggccaagaaaagtcccacacatcaggagatctggaatcctgactctaagaaagccaaagaaacacccacctcctgtggaaacaaaaaaaatccttggattgaataactagtgataccctcaataaaacagggattgccaagaagggaacaatcaccccaaaaatgaatgtttgcctttattccgtgtttggtacttgattcactttctttaaataaaaacatgaaggaacataaa

SEQ ID NO: 25346 - DNA, 876 bp, Homo sapiens
  SIMILAR (198)..(614): 481254mologous to Bos taurus LP2,accession number U55188,Smith-Waterman Score=182.
atgaggcgtggggcgcgccgggcgagtccctgcttgcaggaggcgcccgagaggccgtcgcgtaccctggcaagaggagctgcgccgcccagcgcgggccgccgttataaagcagccgccggcgccgggtgcctcacagcacgctgccacgccgacgcagacccctctctgcacgccagcccggcccgctaccacccatggcacatgttcagcagctgtaaggaagatggcgcttggtgcacagcaaaggcttttgatgaaataccatgaaggagcctaggagtgactaatagctttgcgaaaaatgggccgcaatgcccaagcccagatttgtatcatcactgagtgatgggtaaaacccttcaccattaaaaactgagagcactttgaaaacaaacacagttttcttgtacccctggggagagaagtttgaagaaaccacagcctgatgggcagaaaaacttcaggactgtctgcaaactttacagatgggtgcattgggttcagcatcaggagtgggatggggaaaggaaaagcaccaataaccaagaaaaattgaaaagatggggaaattagttggttggagtgtgtcatgaacaatggtcacctgtactccggattctatgaaaaagtaggaataaaaaattccatcatccactttgggacagggagtttaattaaggggatggcccaaggctcagttcaatgagcaaatctccatactgtttctttctttttttttttcattactgtgttcaattatctttatcataaacattttacatgcagctatttcaaagtgtgttggattaattaggatcatccctttggttaataaataaatgtgtttgtgctaataaaaaaaaaaaaaaaaaa

SEQ ID NO: 25347 - DNA, 395 bp, Homo sapiens
  SIMILAR (6)..(395): 341254mologous to Endogenous sheep retrovirus env,accession number X95446,Smith-Waterman Score=197.
cattcctaccagtcaatttgacacatgattggcaaggttcctctgcccttgccaccttagaacgtcccctgtcccaggtcagactcaaaagattcgtaggcacacttatagcctttatggtctcagccatagtcatcctggcaactgctagtatggctgttgcatctattactgaatcagtacaaacagctgcttttatagataatatggccagaaatgtgtctaataaacttctcttacagcaaggtatagatcaaaagattcttgcactactgcaatccctcgaggctgccttagaatatgtgggggagcaacaagacgcactggcattccaacagcaatgaaactgcaactgggggcataaacatatctgtatcatttctctaccatggaat

SEQ ID NO: 25348 - DNA, 358 bp, Homo sapiens
  SIMILAR (251)..(358): 781254mologous to Homo sapiens golgin-95,accession number L06147,Smith-Waterman Score=131.
ggcacgagcccatgtgtggggagacccaccaggccctgcagggggccatggagaagctgtggagccgctttatggagctcatgcaggagagaaggtggacttgaaggagagggttgaggaactggaacattgctgcatctagctgtctggagagagacagacaccatcggggagtgggaagccagggcacggcaaagagagctgcacattggtcagaggggccccagcgtctgagtcctgtcctcctgcaggagagtacatcgcactgtaccagagccagagggcagtgcggaaggaggaggagtgcatcagcaggctggcccaggacaagggagaggtgaaggtgaagctgctggag

SEQ ID NO: 25349 - DNA, 427 bp, Homo sapiens
gtccagtgcggtggaattccgccaggccaaaataacaaagaggaaatggaggttttgcctgagccccctcctccaataaataggaaaaaagacaagagctatgctacagctatgggaccctttcttaggcaagaggcattaagtggggagctcttagcctgcctggtaatacaagattgacagggcaattgggtatataaacccatttcttttaacatttataaaaagttaagaaaaagcattagaggctgaaaccgcgtggccaaatgggtggtaggcagaaggaaatacttggcagcaaaggaagctcgcagacctggagccagcaagtgcttccaggaactcagcctgcacagaggcagcagtgacaaggagccaggcgcagcacaccagagctggcctgatagggaggggcaggaggcgtgca

SEQ ID NO: 25350 - DNA, 705 bp, Homo sapiens
  SIMILAR (332)..(162): 981254mologous to Homo sapiens Protein sequence encoded by clone p199-7 (PL mutet.rsT4),accession number P93369,Smith-Waterman Score=308.
gccgcagccaaaggcaacaatgtggttatcacaagctacatgacaaacagaggcttcttcgaggataaaaaggcaacatttgcgccaagcttcttaatgaacatcaaaggcaataaaacatccgttgtcaaaaacagcatcctggagcaaggacagctgacatggctccaagtagcgaagcgagcaggactgggcggcggccaaagcggtcggacagtgctccgagaacgggtgcgcatagaaattgcatcaacgcatatagcgctagcagcacgccatagtgactggcgatgctgtcggaatggacgatatcccgcaagaggcccggcactgtctggagagagacagacaccatcggggagtgggaagccagggcacggcaaagagagctgcacattggtcagaggggccccagcgtctgagtcctgtcctcctgcaggagagtacatcgcactgtaccagagccagagggcagtgcggaaggaggaggagtgcatcagcaggctggcccaggacaagggagaggtgaagtgccgcaagccaaaggcacaaatgtggttatcaacaagctacatgacaaacagaggcttcttcgaggataaaaaggcaacatttgcgccaagcttcttaatgaacatcaaaggcaataaaacatccgttgtcaaaaacagcatcctggagcaaggacagctgacagtcaactaa

SEQ ID NO: 25351 - DNA, 330 bp, Homo sapiens
  SIMILAR (1)..(234): 621254mologous to Homo sapiens similar to golgi antigen; similar to Q08379 (PID:g2498401),accession number AC004460,Smith- Waterman Score=225.
aacaatgagaacaagagcgtactacagttggagcagcaagtaaaggagctgcaggagaagctaggcaaggtgaaggagacggtaacctccaccccatccaagaaggtctgggaggtggagctgaagagccaagaggctcagagtctgcagcagcagccagaccattacctgggtcacctgcagcagtacgtggccacctatcagcagcaggtggccgcctatcagcagctgacctccaccttctccatgacttgaaaatgccacctgagggcaggtcgctgccgagatgtgactacaatattttggctccagagcagctttatggaccac

SEQ ID NO: 25352 - DNA, 647 bp, Homo sapiens
ttggctccactggtcacctacttttcatctctaagtctcggtttctttaacttaaaagggaagttagcaccttcctcttggaggtgctgaggattaaatgagataatacgtggaaagcattaggcatgtagcacagttagcagatggtggttggctccctctgcttttccatcagtctgtggcctagtttaaatggtgggaggaagggtgtgagatttaaggctggttgtaagggatcagtcagtgtagttggaaaaattgtaagatgaagttataggatatagacacaaaccttcctggaaggccagaaagtctgcatagcttcaataaaggatttggctgaaagcagcgtaatcccctttaccttgagttgatagcaatagagcaaataacatgggaacgtgggggagtttattgaatagcttgtttactcatgtggtcctaagaccaacctttgattatccacgggtgcatgattgctctctactcggtggtcggcaaatttaattacccacaggtgtgttgactcaaagcctctgtcattaaatctatgctgaataaatgccgtcagggccagctagtcaaggtgcacaactctttttgtgcgtggtgtggccccttagctgctctgtcactgaaaaaaaaaa

SEQ ID NO: 25353 - DNA, 728 bp, Homo sapiens
  SIMILAR (683)..(612): 401254mologous to Homo sapiens Human secreted protein, SEQ ID NO: 4598,accession number G00517,Smith-Waterman Score=70.
ggcattcccgggtcgacgatttcgtcaagtgggacagcaggacctctccaactcccggagattttcctaagggtcttgtagccagagataacactgatttaatttacccacacccaaatgcttctgcagaaaaagccagaaatgtcctagctgtggagactgtgcctggagagctggtgggagaacaagctgcatatcagcccaccccagggcatccaaattccattaatttttactctttgaaacagtggggcaatgagctcaagaattcgatgtcttctttccgtcctgggagaggacataatgatagtcggaggactgtgttttataccaatgaagagtgggaacttttagacccaacccctaaggacctagaggagtccatagtacaggaagaaaagaagaagttgacccctgaaggaaacaaagtttcacaaaggctgaaaaatttgcctcatacttccctcaaagccaaacagttgcttcaaacttcatctaccaaataaaggatttgtacctccattgatggaatatttggtaattcttctactccatttgaagatgaaaaataaaggccaaaatcataggcctggcacagaagctggataatgaagacagctccggaggaacacatagatacacacacatatagacacacacatatataaagtacacagacatactatttttaaaaggtttaaatatttttaaagtttttaaaagtttcg

SEQ ID NO: 25354 - DNA, 3565 bp, Homo sapiens
  SIMILAR (679)..(1095): 611254mologous to Homo sapiens golgi matrix protein GM130,accession number AF248953,Smith-Waterman Score=355.
  misc_feature (1)...(3565): n = a,t,c or g
atgagagtaggctttagggatattgttggtagcctttctgagtactctttcggatgccctgtgaattatgaggttttccactctgtctggatcactatcctttgctgcctgatggccaatgaccgaaaaccacagtttctatacttttttcagttctttagttttcacggcggaagaaatttgatgtcttctttccatcctgggaatggacataatgatagtcggaggtctgtgttttatgccaatgaaaagtgggaatttttagacccaacccctaaggacctagaggagtccatagtacaggaagaaaagaaggagccaacccctgaaggaaacaaagtttcacaaaggctgaaaaatttgcctcatacttccctcaaagccaaacagttgcttcaaacttcatctacaaatagaggaactgtcattactgccacgagactggcctttgatcttaggacccagtccactaagtgttctcaccctgcttctggttcctctggtcacagcacagatttccagctggaaggggaatggggactatgggatctaggaacgaaaggtttcaagctgccttactcccttagcatagacattgacaatgtgaaaagcccacactttccccatgagctcaaaacgttgacagtgtctctgggtagcaataggagaatgggtttggaaaagaaagagtgccaccaaaagcagggagccctaagggagcagttacaggttcacattcagaatgtagaaatccttgtatcagagaaagctgagttacagcctggcttacactcagcatgctgccaggcagaaagaaggagtctgaggatctggccagccgcctttagtattccaggcagtgtgtgggagagttggagcaggctctctgctgtctccacacagcagaagaaagcagacaggttcattcctttctctactgcttctggccataaccgaagcaatgaggacctgaagcaggagaaatcagaattggaagagaagcttcaagtcctggtgactgagaaggctggcatgcagcttattttagaagagccgcaaaagaaattacaaatgatggcactcctgcttcaacaggctagggggtgcactgtgtggaacggcccaggctccccaaatctaaacttctcactcttcaccatccagttttcaaggcactgtgaagcccctgatgcgaaacagcagttaccgcaggccatggaggagcgggcacagctgaaagcacatctagggcaggtgaagctttgcaggggagggatgtggaaggaagatgaccccaggtggccaggagcaggagtaggaggagaggctgctggagctggagcaggtggccgagctcttgcgggagcaggcagagtcacgcaggcaaatcctggagaccatgcagaacaaatgcaccaccatcagccacgtgctcacccagaaccacaagctcaaagagcagctgtctccgctgcagaacggattcataaagctgaccaacctttgattatccacgggtgcatgattgctctctactcggtggtcggcaaatttaattacccacaggacagacccctgcaagtggtgtcccgcgtgaggcacactgtgaaggatcacaacggacccctcgaaaacaaaggtgaaaagaactgcacagtcaataagtcattcccagaaaaaggaacgctagacgtagagctctgggaacaagtggggagaaatcttaatcagcatcatgtgcaagggcaatgggtcccagtatcatctttaatgctatgggccttagtcagggcagccctggctccattatacacagaagagcctaaaaaggggaaggaggaggaaccgtcacctgctttaccacctccttttccctcagccccaatatcgccaggccaaaataacaaagaggaaatggaggttttgcctgagccccctcctccaataaataggaaaaaagacaagagctatgctacagctatgggaccctttcttaggcaagaggcattaagtggggagctcttagcctgcctggtcagacccgaaagattcataggcacacttacagccttcatagtctcagccatagtcatcctagcaactgctagtgtggctgtagcatctattactgaatcagtacaaacagctgcttttgtagataatttggccagaaatgtttctaatgaacttctcttacagcaagaccaacctttgattatccgcaggtgcatgattgctctctacctgggggcagggggagttaattacccacaggtggagctgaagagccaggaggctcagagtctgcagcagcagcaggaccagtacctgggtcatctgcagcagtatgtggccacctatcagcagcaggtggtcacctatcagcagctgacctctgaggaggaggagctgcacaaccagttactgctgcagacccagctcgtggaccggctgcagcagcagaaagctcaaagcaaagctgtggccaagatgggctgccaagagttgcgggagacccaggagcacctggaagctatcagccagcagaaccagcagcctcaggccccagttgagcctcatggctctccctggggaaggtaccggagactgctcacaggaagaggagagagccccaggaggaaacgggaactgtgtccacactaagtttggcaccaatatggtgaccttctgggagcaggggaccaccaggttaggttgcctaagggtgggtgaactggcccaggagatggacagtgaggaggaggaggaggtgcctcagcccatgccaagcatcccggaggatctagagagccagaaggccatggtggcatttttcaactcagctgtagctagtgccgaggaggagcaggcacggctatgtgggcagctgaaggagtgcactgccagcgcctggctcatctgttggcctcggcccagaaggaacctgaggcagcagccccagccccaagaactgggggtgatcccatgtgtggggagacccaccaggccctgcagggggccatggagaagctgtgggagagtacatcgcactgtaccagagccagagggcagtgcggaaggaggaggagtgcatcagcaggctggcccaggacaagggagaggtgaagatctttgtgaggtgagccttgccagcagtggggagtctgcacaaggagaggcggggaagcattctccctgtgacaaccccactgagcagcagatcatgcaactgcttcatgagatgcagaacctccaggagcacccaggcttgggcagcagcccttgcattccttttttgtaccaggcttaataagaccaatgaggtgaagatcaccatcatttaaaagccggccactgtcagcaaaacctggggaagtggggctggaggctctgcccctaccatgtccctaccaccccttcccagtcaaccctttaccctcacagtagcaagcataagacccctgtctaatgtggggagacaggtggagatgaggtgaagatccccataatctaaaaggccactaaataaaaaaataaaaaattttaaaaaggtancaaaaacaaa

SEQ ID NO: 25355 - DNA, 1353 bp, Homo sapiens
  SIMILAR (323)..(358): 831254mologous to Homo sapiens C-terminal binding protein 2,accession number AF016507,Smith-Waterman Score=50.
atggagggcgcaccagttcttgtgtgggaaatctctcagagcccccgtggaggcccccaaagtggctctggcaaagctgtaggggtggagagaattagtaaattggggttccctgttgaaaacagacaaatggaaggtccactgggcggaaagccccagccgctcatcactacaagaggagagaagggaacagttgacagagtgggaccctttaaaagtgtgggaccctttaaaagtgtggggcccaaacttcaaaggcccctcttgcttgtgtctaaggctagtgttgctctgaaccctatggctccaaggagaacaaccttccacgcaggaaatccacgagaaggttctaacgaagccatgggtgccatgatgtaccacaccatcatcctcaccagggaggacctagaaaagtttaaggccccgagagtgatcgtgcagataggcagtggctacgataacgtggacatcaaggctgccagcgagctcggaattgctgtgtgcaatatcccgtctgcagccgtggaagagacaccggactctaccatctgccacatcctcaatctgtaccagaggaacacatggctgtaccaagcactgcgggggcaggcggttgcagttcgagccaaggcctttggattcagcgtcatattttatgacccctacttgcaggatgggatcgagcgatccctgggcgtgcagagggatttgctgtatcagagcgactgcgtctccttgcactgcaatctcaacgaacataaccaccacctcatcaatgactttaccataaagcagatgaggcagggagcattccttgtgaacgcaccccatggtggcctggtggacaagaaagccttagcacaagctctcaaggagggcaggatacgaggggcagccctctatgtgcgtgagtcggagccctttagctttgctcagggtccgttgaaagatgcaccgaatcttatctgcactcctcacactgcctggtacagcaagcaggcgtcactggagatgagggaggcagctgccactgagatccgccgagccatcacaggtcacatcccagaaagcttaagaaactgtgtgaacaaggaattctctgtcacatcagcgccttggtcagtaatagaccagcaagcaattcatcctgagctcaatggtgccacatacagatatccgccaggcatcgtgggcgtggctccaggaggacttcctgcagccgtggaagggatcatccctggaggcatcccagtgactcacaacctcccaacagtggcacatccttcccaggcgccctctcccaaccagcccacaaaacacggggacaatcgagagcactccaacgagcaatag

SEQ ID NO: 25356 - DNA, 1188 bp, Homo sapiens
  SIMILAR (463)..(1185): 861254mologous to Rattus norvegicus ribeye,accession number AF222712,Smith-Waterman Score=1141.
  misc_feature (1)...(1188): n = a,t,c or g
atggggaaaaaacagaacagaaaaactggaaactctaaaaagcagagcacctctcctcctccaaaagaatgcagttcctcaccagcaacggaacaaagctggacggagaacgactatgacgagctgagagaagaaggcttcagacaaccaaattactctgagctacgggaggatagtcaaaccaaaggcaaagaaattgaaaactttgaaaaaaatttagaagaatgtataactagaataaccaatacagagaagtgcttaaaggagccgatggagctgaaaaccaaggctcgagaactacgtgaagaatgcagaagcctcaggagccgatgtgatcaactggaagaaagggtatcagcaatggaagatgaaatgaatgaaatgaaagcagatgggcgaggtggcctagggagcggcccgcatccgtggggagacgctgggcctcaacggctttggttgcacggggcaggcattgcagttcgagccaaagcctttggattcagcgtcatattttatgacccctacttgcaggatgtggtcgagcggtccctgggcgtgcagagggtctacaccctgcaggatttgctgtatcagagcgactgcgtccccttgcactgcaatgtcaacgaacataacaaccacctcatcaatgactttaccataaagcagatgaggcagggagcattccttncacccaagcccttcaaggagggcacgatacgaggggcagccctcgacatgcatgagtcggagcccttcagctttgctcagggtccgttgaaaaatgccccgaatctcatctgcactcctcacactgcctggtacagcgagcaggcgtcactggagatgagggaggcagctgccacagagatccgccgagccatcacaggttgcatcccagaaagcttaagaaattgtgtgaacaaggaattctttgtcacatcagcgccttggtcagtaatagaccagcaagcaattcatcctgagctcaatggtgccacatacagatatccgccaggcgtcgtgggtgtggctccaggaggactttctgccgccatggaagggatcatccctggaggcatcccagtgactcacaacctcccgacagtggcacatccttcccaagcgccctctcccaaccagcccacaaaacacgtggacaatcgagagcaccccaacgagcaatag

SEQ ID NO: 25357 - DNA, 1254 bp, Homo sapiens
  SIMILAR (335)..(550): 721254mologous to Homo sapiens C-terminal binding protein 2,accession number AF016507,Smith-Waterman Score=249.
atgaatcttgcaagagaaagtggtcagaaaaggatccagtggcagaattccaggatgaagtctagtcatcagaagggagttgaggccagagaattgatgactatgagagtgaattctgaagaaaagaatccagtcattgaagaggaccaggtttcagaaacaaaatccaggtacctaagagcacgaatcaggaaatacagagttaggatagccaatttaaactcagaaccctctcctcattatcagcaatgtagtggtgcttttcatttcatggatttattgtttgtgaccgtttatgttatatgtgagcatcagcactctatacattgctttctgccacatcctcaatctctaccggaggaacacgtggctgtaccaggcactgtgggaaggcacgcgggttcagagcgtggagcagatgggcgaggtggcctagggagcggcccgcatccgtggggagacgctgggcctcaacggctttggttgcacggggcaggcattgcagttcgagccaaagcctttggattcagcgtcatattttatgacccctacttgcaggatgtggtcgagcggtccctgggcgtgcagagggtctacaccctgcaggatttgctgtatcagagcgactgcgtccccttgcactgcaatgtcaacgaacataacaaccacctcatcaatgactttaccataaagcagatgaggcagggagcattccttgtgaacgcagcccgtggtggcctggtggacgagaaagccttagcacaagccctcaaggagggcacgatacgaggggcagccctcgacatgcatgagtcggagcccttcagctttgctcagggtccgttgaaaaatgccccgaatctcatctgcactcctcacactgcctggtacagcgagcaggcgtcactggagatgagggaggcagctgccacagagatccgccgagccatcacaggttgcatcccagaaagcttaagaaattgtgtgaacaaggaattctttgtcacatcagcgccttggtcagtaatagaccagcaagcaattcatcctgagctcaatggtgccacatacagatatccgccaggcgtcgtgggtgtggctccaggaggactttctgccgccatggaagggatcatccctggaggcatcccagtgactcacaacctcccgacagtggcacatccttcccaagcgccctctcccaaccagcccacaaaacacgtggacaatcgagagcaccccaacgagcaatag

SEQ ID NO: 25358 - DNA, 1540 bp, Homo sapiens
  SIMILAR (956)..(1414): 721254mologous to Rattus norvegicus ribeye,accession number AF222712,Smith-Waterman Score=566.
atgttgctccaaaagactcaatttgagtacgcctttaaaaagaaaagaaaattagaagaaagtaaaaaacgtggtgctggaccagccagctcggacccaaggtggcgggggtccagccagacggcccctcatgccagcgaggtctccggtgcccctctggggaggagctgcgagaccacacgggacaccggggtgggacccagcccgcgccagtggctcggagcaggggcagggacctggcagcaccgggccagagctgcctccacccccagcagtcgcggactccgggcgctccagacctggggtggtggtgaggtcatgaacggccccctgcactccaccacccccccgggtggcactgctggactgcgcaactgcaccgtggagatgcccatcccaaaggacctggccaccatggccttctgtgatacgcactccacgcaggagatccacgagaagattttacatgaagccctgggcgccatgaggtatcacaccatcaccctcgccagggcggacctggagaagttcaaggccctgggagtgatcgtgcgcataggcagtggctacgacaatgtgaacatcaaggctgcctgcgagcttgagattgctgtgtgcaacatcccgtccgcagctgtggaagagacagccaactcaaccatctgccacatcctcagtctgtaccggaggaacacgtggctgtgccaggcatgggccagaaagcacgtgtgttacagcatggggcagatccgagaggtggccttgggaggggctcacatcggtggggagacgcaggggcctcatcggctttggtagcacggggcaagcggttccagttcgagccgaggcctttggattcagcgtcatattttatgatccttacttgcaggatgggatagagcggtccctgggcgtgcagaggatgagtcagggagcattccttgtgaacgcagcccgtggtgccctggtggacgagaaagccttagcacaggccctcaataatggcaagataagagggcagctctcgacgtgccccagtcagagctctttagctttgctcagggtgtccctggagatgagggaggcggctgccaccgagatccgacgaaccatcacaggttgcatcccagaaagcttaagaaactgtgtgaacaaggaattctttgtcacatcagctccttggtcagtaatagaccagcaagcaattcatcccgagcttaatggtgccacatacagatatctgccaggcttcgtgtgcgtggctccaggaggacttcccgcagccacagaagggatcatccctggaggcatcccagtgactcacaacctccccacagtggcacatccctcccaagctccctctcccaaccagcccacaaaacacggggacaatccagagcaccccaacgaacaaagcagagaatgccggaaggtaatcattcagatacacttgcggccaagagacagtgaaaaattgatgaactcagagaaaacgaatctgacggtctttttagctgattctggacatatgcattattga

SEQ ID NO: 25359 - DNA, 2598 bp, Homo sapiens
  SIMILAR (781)..(1419): 1001254mologous to Escherichia coli aspartase,accession number X02307,Smith-Waterman Score=1098.
atgggtaaaactgccgaagcctttgccatggatgaaggaaatggcacgaaggggccaggtggtatctccacgcaaatagttttatatttcttaacttcccaaggtaatcaccttgcgattacagtatcgtacctcggtccgtcgccacgatcggaatacgacggttaccagcggcagaatgacatatttgccaatcagatctttgtaacgcggatcttccgggttaacggctacgccagtatcgcccagcagggtttctggacgggtagtcgcgaccaccagataatctttaccgtctgcggttttcgcaccgtcagccagcggatagcggatgtgccacatcgaacctttcgattcgcggttttcgacttccaggtcagagatagcggtgcgcagtttcggatcccagtttaccaggcgtttgccacggtaaatcaggtcttctttatacagacgaacgaaaacttctttcaccgcattggacaggccttcgtccatggtgaagcgttcacgctcccagtcgacggagttgccgagacggcgcatctgacgggtaatggtgccgccagattccgctttccattcccagattttgtcgatgaaagcttcgcggccgtagtcgtgacgggttttaccttcttctgcggcaatcttgcgctcaacgaccatctgggtagcgatcccggcgtggtcagtaccgacctgccacagggtgtttttgccctgcatgcgctgatagcggatcatgatcagctcggtacctgccaaaacttaacgtacgctgaactgctgctggaagttaaccttggtgcaacagcaatcggtactggtctgaacacgccgaaagagtactctccgctggcagtgaaaaaactggctgaagttactggcttcccatgcgtaccggctgaagacctgatcgaagcgacctctgactgcggcgcttatgttatggttcacggcgcgctgaaacgcctggctgtgaagatgtccaaaatctgtaacgacctgcgcttgctctcttcaggcccacgtgccggcctgaacgagatcaacctgccggaactgcaggcgggctcttccatcatgccagctaaagtaaacccggttgttccggaagtggttaaccaggtatgcttcaaagtcatcggtaacgacaccactgttaccatggcagcagaagcaggtcagctgcagttgaacgttatggagccggtcattggccaggccatgttcgaatccgttcacattctgaccaacgcttgctacaacctgctggaaaaatgcattaacggcatcactgctaacaaagaagtgtgcgaaggttacgtttacaactctatcggtatcgttacttacctgaacccgttcatcggtcaccacaacggtgacatcgtgggtaaaatctgtgccgaaaccgatgtcgcgaaaagtcgcctgaagatgagtaatccgtggcatctacttgctgtcggattcggaagtggattaagcccgatcgttcctgggacgatgggctcgctggcagcgattccgttctggtatctgatgacctttttgccctggcagctctactcgctggtggtgatgctggggatctgtatcggcgtctatctttgtcatcaaacggcgaaagacatgggtgtgcacgatcatggcagcattgtctgggacgaatttattggtatgtggatcacgctcatggcgctgccgaccaatgactggcagtgggttgccgccgggtttgtgattttccgtattctggatatgtggaagccgtggccgatccgctggtttgatcgcaatgtgcatggcggcatggggatcatgatcgacgatattgtcgccggggtgatttccgcaggcatcctgtattttatcggtcatcactggccgctgggcctggactcttatttaaatcctacgacaggatgcggtttatacggcgtttccagttgctcggtcctcctgagctgtgcatacgcacagctggcggcgttactggggatcacggtcatgggcgaaattgagccgttggtgccgtggggcgaactgaccatgcctgtgccgggactggagctggcttcctggattgaagcgcgtctgggacgtaagccgttatggtgtggcgataccggacctgaggtggtccagcgcgtcgcctggtgcacgggcggcgggcaaagttttatcgatagcgccgcgcgttttggcgtggatgcttttattactggcgaagtttctgaacagaccattcattcagcccgcgagcagggattgcatttttatgctgcaggtgaaacggcggtagtgctggaactggaaccgccggtgacgctggctagccagaaacggatctggcgactggcgcagcgtctggtggatatgccgaatgtggttgaagccattcccggcatgaacaatatcacggtgattttgcgtaatcctgagtcgctgtgttatatatcgtgtgctacactgctaacctatgcactctgtgctatgataagtaaatttgttgctcctatccatttgtttggagtggtgaagtgccgatcgatgcataatgtgttgaagatcgattgcatcagaccctga

SEQ ID NO: 25360 - DNA, 2547 bp, Homo sapiens; identical to SEQ ID NO: 24475
  SIMILAR (2547)..(1777): 981254mologous to Escherichia coli ATP phosphoribosyltransferase,accession number U02070,Smith-Waterman Score=1284.

SEQ ID NO: 25361 - DNA, 1162 bp, Homo sapiens
  SIMILAR (132)..(545): 861254mologous to Homo sapiens MO25 protein,accession number AF113536,Smith-Waterman Score=576.
tttcgtggggagcggcgcggcctgggagacacagagccttcaggcgccggggcgggggcacaggcggaagacaacggaagacagccccgtagcacaggcggagtgcagcggaggcccctgccgctgccgtcatgccgttcccgtttgggaagtctcacaaatctccagcagacattgtgaagaatctgaaggagagcatggctgttctggaaaagcaagacatttctgataaaaaagcagaaaaggctacagaagaagtttccaaaaatctggttgccatgaaagaaattctgtatggcacaaatgaaaaagatcctcagacagaagcaggagctcaacttgctcaagaactctataatagtgggctccttatcaccctggtagctgatttacagctcattgactttgagggcaaaaaagacgtggctcaaattttcaacaatattctcagaagacaaattggtaccgagaactcctactgttgaatacatctgcacccaaacagaatatttttgttcatgttattgaaagggtatgaatctcccagaaatagctctaaatttgtggaataatgttaagagaatgcatcagacatgaaccacttggcaaaatcattttgtggtcggaacagttttatgatttcttcagatatgtcgaaatgtcaacatttgacatagcttcagatgcatttgccacattcaaggatttacttacaagacataaattgctcagtgcagaatttttggaacagcattatgatagatttttcagtgaatatgagaagttacttcattcagaaaattatgtgacaaaaagacagtcactgaagcttctcggtgaactactactagatagacacaacttcacaattatgacaaaatacatcagtaaacctgagaacctcaaattaatgatgaacctgctgcgagacaaaagtcgcaacatccagtttgaggcctttcacgtttttaaggtgtttgtagccaatcctaacaagacgcagcccatcctagacatcctcctcaagaaccaggccaaactcatagagttcctcagcaagtttcagaacgacaggacggaggatgagcagtttaacgacgagaagacctatttagttaaacagatcagggatttgaagagaccagctcagcaagaagcttaa

SEQ ID NO: 25362 - DNA, 554 bp, Homo sapiens
  SIMILAR (553)..(368): 1001254mologous to Homo sapiens G protein-coupled receptor,accession number AF096786,Smith-Waterman Score=328.
cagaacctcccagtagaacaggaaaatggggagagttggaaacagccttgttgacatggtctcattctctttctcaattcttctgctctatagtttttggacttagaaatcagtaattcacctggtctgtgggtttctttcagagattcccttgaacacttgggtggtataagctgtctgggcaagtggaaaaaaggtctttggggtataatgagcaaagctggcacttcaatgggcattcaaagggaagcacatcagtgaagatggtgcggatcatcccaccacatcaaaaccctggaacgcgatatccgttaccagaattcagggccagggctttcttcccctgaacaggatgtccttccgttaagccccgggagatcgtggtgtcctgcaggaccagctggaccctggaaggccggtgggccctgatgttcatgcggaattctttgatgacaaagtagtagcagaaaacatccaggcagcagttgacattggagaaacacatggacaattgcaagaagaagctgatgctctgcttggctctgcactctacg

SEQ ID NO: 25363 - DNA, 3279 bp, Homo sapiens
  SIMILAR (1227)..(1532): 931254mologous to Escherichia coli aspartase A (AA 1- 478),accession number X04066,Smith-Waterman Score=486.
  misc_feature (1)...(3279): n = a,t,c or g
atgagtcagcaaaacaccagtggggactgcctgtttgacggtgtcaacgagctgatgaaaaccctacagtttgcagtccacatccccaccttcgtcctgggcctgctcctcaacctgctggccatccatggcttcagcaccttccttaagaacaggtggcccgattatgctgccacctccatctacatgatcaacctggcagtctttgacctgctgctggtgctctccctcccattcaagatggtcctgtcccaggtacagtcccccttcccgtccctgtgcaccctggtggagtgcctttacttcgtcagcatgtacggaagcgtcttcaccatctgcttcatcagcatggaccggttcttggccatccgttacccgctactggtgagccacctccggtcccccaggaagatctttgggatctgcatgcacaatctgggtcctggtgtggaccggaagcatccctatctacagtttccatgggaaagtggaaaaatacatgtgcttccacaacatgtctgatgatacctggagcgccaaggtcttcttcccgctggaggtgtttggcttcctccttcccatgggcatcatgggcttctgctgctccaggagcatccacatcctgctgggccgccgagaccacacccaggactgggtgcagcagaaagcctgcatctacagcatcgcagccagcctggctgtattcgtggtctccttcctcccagtccacctggggttcttcctgcagttcctggtgagaaacagctttatcgtagagtgcagagccaagcagagcatcagcttcttcttgcaattgtccatgtgtttctccaatgtcaactgctgcctggatgttttctgctactactttgtcatcaaagaattccgcatgaacatcagggcccaccggccttccagggctacagaagaagtttccaaaaatctggttgccatgaaagaaattctgtatggcacaaatgaaaaagagcctcagacagaagcagtagctcaacttgctcaagaactctataatagtgggctccttagcaccctggtagctgatttacagctcattgactttgaggccagcttggggctccacggcctggagcaggcagtggacttggcactgcccatcgcacaagcccagggtgaagtcctgaacaacggaaaatgcatggatcagttcccggtagacgtctaccagggcggcgcaggtaccttacgtaaacatgagcaccaacgaagtgctggccaatattggtctgggactgatgggtcaccaaaaaggtgaatatcagtacctgaacccgaacgaccatgttaacaaatgtcagtccactaacgacgcctacccgaccggtttccgtatcgcagtttactcttccctgattaagctggtagatgcgattaaccaactgcgagaaggctttgaacgtaaagctgtcgaattccaggacatcctgaaaatgggtcgtacccagctgcaggacgcagtaccgatgaccctcgggtcaggaattccgcgctttcagcatcctgctgaaagaagaagtgaaaaacatccaacgtaccgctgaactgctgctggaagttaaccttggtgcaacagcaatcggtactggtctgaacacgccgaaagagtactctccgctggcagtgaaaaaactggctgaagttactggcttcccatgcgtaccggctgaagacctgatcgaagcgacctctgactgcggcgcttatgttatggttcagggcgcgctgaaaacgcctggctgtgaagatgtcccaaattctgtaacgacctgcgcttgctctcttcaggcccacncgggctcttccatcatgccagctaaagtaaacccggttgttccggaagtggttaaccaggtatgcttcaaagtcatcggtaacgacaccactgttaccatggcagcagaagcaggtcagctgcagttgaacgttatggagccggtcattggccaggccatgttcgaatccgttcacattctgaccaacgcttgctacaacctgctggaaaaatgcattaacggcatcactgctaacaaagaagtgtgcgaaggttacgtttacaactctatcggtatcgttacttacctgaacccgttcatcggtcaccacaacggtgacatcgtgggtaaaatctgtgccgaaaccggtaagagtgtacgtgaagtcgttctggaacgcggtctgttgactgaagcggaacttgacgatattttctccgtacagaatctgatgcacccggcttacaaagcaaaacgctatactgatgaaagcgaacagtaatcgtacagggtagtacaaataaaaaaggcacgtcagatgacgtgccttttttcttgtgagcagtaacttaaaaataacaatctaatatcaacttgttaaaaaacaaggaaggctaatatgctagttgtagaactcatcatagttttgctggcgatcttcttgggcgccagattggggggaataggtattggttttgcaggcggattgggggtgctggttcttgccgctattggcgttaaacccggtaacatcccgttcgatgtcatctccattatcatggcggttatcgccgctatttctgccatgcaggttgctggcggtctggactatctggttcatcagacagaaaagctgctgcgccgtaacccgaaatacatcacgatcctcgcaccgatcgtgacctatttcctgactatctttgctggtactggcaacatctctctggcgacactgccagttatcgctgaagttgcgaaggaacaaggcgttaaaccttgccgtccgctgtctactgcagtggtatccgcgcagattgcgatcaccgcatcgccaatctcagcggcagtggtttacatgtcttccgtgatggaaggtcatggcatcagctacctccatctgctctccgtggtcatcccgtccaccctgctggcggttctggtgatgtccttcctggtcactatgctgttcaactccaaactctctgacgatccgatttatcgcaagcgtctggaagagggcctggttgaactgcgcggtgaaaagcagattgaaatcaaatccggtgcaaaaacgtccgtctggctgttcctgctgggcgtagttggcgtggttatctatgcaatcatcaacagcccaagcatgggtctggttgacaaaccgctgatgaacaccaacaacggcatcctgatcatcatgctcagcgttgcaactctgtacaccggatcacactatgtcattaaacaatag

SEQ ID NO: 25364 - DNA, 669 bp, Homo sapiens
  SIMILAR (325)..(239): 411254mologous to Homo sapiens Similar to heterogeneous nuclear ribonucleoprotein A/B,accession number BC002625,Smith- Waterman Score=49.
tcaagccttggaaggactaaaacgcatcttggatgcaatgcagcaaaacgatttaccataccaggtacaaaacaaggtgacaggggacagcctcgctgcccgccccaaatcctccaaaattcggagaactaagagattttcggtgaactggagtccggaagcagtctccgcaccagcgctgtcccactcggcgcccagccgtctcgcgctgagcaaaggccgctccctcctggaaacgccctccctgccgcgcgcatgcgctgtgtcccttctcgccttgcaggactccacccggtccatgccctccggctgaatccgggcggccctatttggaataaaactaaaatcctcttggaatacttcattatcttcatctgatgtgacctgggtaaataactcccctctggacctcagtgccttgcttccactgatggtgttaaatttctccagaatatttctcacaggttcctcttctttggggggtgacgaaaacaagacattgtcttttgttagactttggatccactgaaagttcaatggcctccatctggaaacacaggcaaagctcagggccaatgccttcccctggctcaggcccttctctacgggggctgcagctttcaagatagcaaacgtcaaccctcttggtcttccagtgttgggattcat

SEQ ID NO: 25365 - DNA, 1108 bp, Homo sapiens
  SIMILAR (337)..(504): 571254mologous to Homo sapiens dJ152L7.2 (PTD011 protein),accession number AL109918,Smith-Waterman Score=107.
atgcgcgcggcagggagggcgtttccaggagggagcggcctttgctcagcgcgagacggctgggcgccgagtgggacagcgctggtgcggagactgcttccggactccaggtaccgcgcttgggcggcagctggccccagacttctgtcttttcagctgcagtgaaggctcggggctgcagaattgcaaccttgccaatggacctgatcggttttggttatgcagccctcgtgacatttggaagcatttttggatataagcggagaggtggtgttccgtctttgattgctggtctttttgttggatgtttggccggctatggagcttaccgtgtcttccaatgacaaacgagaatgtaaaaagtgtcactggtttacagcctttcttcctgggctaccatcaatgggtgtgagatttaagaggtccaagaaaataatggcctgctggtttggttgcaggtttaaagcctcatggatgatcctgagacttgtcttgttgctgctctgagcatctggaggaacagaaaactaagttcatgtcatcctgctgtaatgggcagagcatattttttttgtatttaaaagataaacttcaatatggaatgctagagacacaaatagcactgtcacctctaatatgaacattagtttgaaggtagtttttttctaaagcaaaaattttaactgttttcctaattgtccaagcactattttcattaaaagtgtctaatgaatcatgatatactcttccattttgttgtgtctattttttatatatttggtattttttgaaaattccaaatactcatgtctcaagtaagcttaaactacaacttgtcacataaaggaagtcttaagtggagttcacagaatgataatgtatctatttgtcgatttgtgttatatttgaaattattagaaattatgctttttccattttaattgtattgctgccagtgctatttttttctttaaaaaattttattcttagcacactgttatgttcctaactgaaatgtattcaggtattcaaataaaagacaaatgacaaatagatacattatcattctgtgaactccacttaagacttcctttatgtgacgtcgacg

SEQ ID NO: 25366 - DNA, 2043 bp, Homo sapiens
  SIMILAR (2043)..(1123): 991254mologous to Escherichia coli K12 putative transport protein,accession number AE000276,Smith-Waterman Score=1523.
ctactttctgcttttcagttgccgcaaagtagcctgcttacgctcacgcaatatgcttttcttgctaccgcactggcctgcttcgctcaggcgttttgcggtcatcgtcgcgctattatggaagggccaggtggctatcacccttggtgaagcatcgcgcgggacaccgatcaacgatatcgccaccagcctggcagtggggattgcactctccggcgtgctgacgatgttgattggttttagcggattaggccatcgccgccgttcgcgctctcggtggcggtgatgtgcctggtactggcgatgattatcttcctgccgcaacgttttgcccgttatggcctgctggtcggcaccataaccggctggttgttgtggtacttttgctttccttcttcgcactcgctctccggtgagttgcactggcagtggttcccgctcggcagtggcggtgctttgtccgcgggaatattcgcagcagagccacagcagtacagggaagccagcaagagacaacgaagcagcaatcgaccaaagcgcaaggaaggacggcgcgacggagcgcttgtcgctatcgtcagtcagataatgccgcaacagggtaaagtcttcgcgctccagcaattgcggcagcagagtcatcagtttccagctcatgctctgtttgttaaaggcgctctctttggggatttccggtaacacccggacgaacatatcccagataaagctcgctggcagcggaaaatcaatgtttgccgcaataccaaacttttgcgacagggtcatttgcagccactgtgccataccggtactttgcaccagaatcatctctggttcgaaaggatcgtccagccgttcgcgttcgacaataaactccatcaacgcttccagcacgtccagacgattggaatggtagaccgattcgggcaatgcaggcgggtcatctcgccttctctgcccccgggtgaaactagcgtaacgctgatgctgacacatcccgcctgcgatgtctgcattcggttgacctgccagttggcaggtggcgaaatcgcgcgcagttgcgtttgctgccagccatgccgccagagctgttggtactggtttctgctggcaagactgttcattaatgttcgcgcgcggcgtcatgatcccgcgcagagaacgcgacgccagcgtcagtacgccgttaatcatgtaacgttcttcttcggcaaatgcaccttccgggatcggcatcggcatcgggttatcggcatcgtgctgaacattggcctgacgtttcccgcccatcaaacgcaggatggcatcggcagtacgcgctcgcagcggcaaagtcgactggtggcgaataaagttgcgacgcgcaatctggttaaacacttcgatgatgatcgagaagccaatcgcggcatacaggtaacctttcggaatgtggaaaccgaaaccttctgccaccagactcagaccaatcattaacaggaagctcagacagagcaccaccaccgtggggtgctggttaacgaatcgcgtcagcggtttggatgccagcaacataaccgccatcgcaatcactaccgccgccatcatcaccggcagatggttaaccatccctactgcagtaattaccgcatccaacgagaagacggcgtcaaggatgacaatctgtgtgacgaccacccagaaactggcgtagcctttaccgtggccggaatcatgatcgcggttttccagccgttcatgcagttcggttgttgctttgaacagcaagaatatccccccgaacaacataatcaggtcgcgtccggagaaggagaaatccatgacggtaaatagcggtttggtcagcgtgaccatccatgaaatcagcgacagcagccccagacgcataatcagcgccagtgataaccccagcaaacgcgctttatcgcgttgttttggcggcagtttgtcagcaagaatggcgatgaagaccaggttatcgatacccagcacaatttcgagaacaacaagcgtgagtagccccgcccaaattgaggggtccat

SEQ ID NO: 25367 - DNA, 1444 bp, Homo sapiens
  SIMILAR (625)..(873): 981254mologous to Escherichia coli PnuC protein ,accession number D90714,Smith-Waterman Score=423.
atgggccaactgcatcaagcacaagcatcagcagacatagccacgagtagactgcagcagactagccttacagatgtgactcgccaccagcagttctttagcacgtacaataccgatgatttcatccagttcaccgcgacataccgggaacagactagaacgcgacgccagcgtcagtacgccgttaatcatgtaacgttcttcttcggcaaatgcaccttccgggatcggcatcggcatcgggttatcggcatcgtgctgaacattggcctgacgtttcccgcccatcaaacgcaggatggcatcggcagtacgcgctcgcagcggcaaagtcgactggtggcgaataaagttgcgacgcgcaatctggttaaacacttcgatgatgatcgagaagccaatcgcggcatacaggaagctcagacagagcaccaccaccgtggggtgctggttaacgaatcgcgtcagcggtttggatgccagcaacataaccgccatcgcaatcactaccgccgccatcatcaccggcagatggttaaccatccctactgcagtaattaccgcatccaacgagaagacggcgtcaaggatgacaatctgtgtgacgaccacccagaaactggcattcagctgtatgccagcctgctattacaggtgtttttctttgccgcgaatatttacggttggtatgcgtggtcgcgacaaaccagtcagaacgaggcggagttgaaaattcgctggttgccattgccgaaggcactcagctggttggcggtttgcgttgtttcgattggtctgatgacggtatttatcaatccggtgtttgcatttttgacccgcgtggcagtcatgatcatgcaagcattaggaattacagggtgtgatgcctgaactgcaagcggacgctttcccggtctgggattcatgcatgatggtgttatctatcgtggcaatgattctgatgacgcgtaagtatgtggaaaactggctgttgtgggtgattattaacgtgattagcgtcgttatttttgcacttcagggcgtttacgccatgtctctggagtacatcatcctgacctttattgcgctcaacggcagccggatgtggatcaacagcgcactgatccatcaggtagtgttggatctgatccaacaaggcatcgtgatcgtgtggcgggatcacctgcacatgcaacgtcttcaccggcttctcgcctaccatccatgcatgtacctggtgcacattgcggacttccgggatttcccggcccatacgaggcttcaggttcagcgatttccagcgataccggtgcaccttcaagttattcattcacgctatctttctacagtcgccacgcgctacgcagaatctgaagcgacaccagtgtccggagcattgggtctcctgtgtccgacattgccgattgtattctggcgggaataa

SEQ ID NO: 25368 - DNA, 669 bp, Homo sapiens
  SIMILAR (325)..(239): 411254mologous to Homo sapiens Similar to heterogeneous nuclear ribonucleoprotein A/B,accession number BC002625,Smith- Waterman Score=49.
tcaagccttggaaggactaaaacgcatcttggatgcaatgcagcaaaacgatttaccataccaggtacaaaacaaggtgacaggggacagcctcgctgcccgccccaaatcctccaaaattcggagaattaagagattttcggtgaactggagtccggaagcagtctccgcaccagcgctgtcccactcggcgcccagccgtctcgcgctgagcaaaggccgctccctcctggaaacgccctccctgccgcgcgcatgcgctgtgtcccttctcgccttgcaggactccacccggtccatgccctccggctgaatccgggcggccctatttggaataaaactaaaatcctcttggaatacttcattatcttcatctgatgtgacctgggtaaataactcccctctggacctcagtgccttgcttccactgatggtgttaaatttctccagaatatttctcacaggttcctcttctttggggggtgacgaaaacaagacattgtcttttgttagactttggatccactgaaagttcaatggcctccatctggaaacacaggcaaagctcagggccaatgccttcccctggctcaggcccttctctacgggggctgcagctttcaagatagcaaacgtcaaccctcttggtcttccagtgttgggattcat

SEQ ID NO: 25369 - DNA, 1033 bp, Homo sapiens
  SIMILAR (300)..(467): 571254mologous to Homo sapiens dJ152L7.2 (PTD011 protein),accession number AL109918,Smith-Waterman Score=107.
ggcctttgctcagcgcgagacggctgggcgccgagtgggacagcgctggtgcggagactgcttccggactccaggtaccgcgcttggcggcagctggccccagacttctgtcttttcagctgcagtgaaggctcggggctgcagaattgcaaccttgccaatggacctgatcggttttggttatgcagccctcgtgacatttggaagcatttttggatataagcggagaggtggtgttccgtctttgattgctggtctttttgttggatgtttggccggctatggagcttaccgtgtcttccaatgacaaacgagaatgtaaaaagtgtcactggtttacagcctttcttcctgggctaccatcaatgggtgtgagatttaagaggtccaagaaaataatggcctgctggtttggttgcaggtttaaagcctcatggatgatcctgagacttgtcttgttgctgctctgagcatctggaggaacagaaaactaagttcatgtcatcctgctgtaatgggcagagcatattttttttgtatttaaaagataaacttcaatatggaatgctagagacacaaatagcactgtcacctctaatatgaacattagtttgaaggtagtttttttctaaagcaaaaattttaactgttttcctaattgtccaagcactattttcattaaaagtgtctaatgaatcatgatatactcttccattttgttgtgtctattttttatatatttggtattttttgaaaattccaaatactcatgtctcaagtaagcttaaactacaacttgtcacataaaggaagtcttaagtggagttcacagaatgataatgtatctatttgtcgatttgtgttatatttgaaattattagaaattatgctttttccattttaattgtattgctgccagtgctatttttttctttaaaaaattttattcttagcacactgttatgttcctaactgaaatgtattcaggtattcaaataaaagacgattttggttcaaaaaaaaaaaaaaaaaa

SEQ ID NO: 25370 - DNA, 432 bp, Homo sapiens; identical to SEQ ID NO: 4245
  SIMILAR (148)..(432): 981254mologous to Homo sapiens L7a protein,accession number X52138,Smith-Waterman Score=480.

SEQ ID NO: 25371 - DNA, 885 bp, Homo sapiens
  SIMILAR (103)..(882): 841254mologous to Homo sapiens L7a protein,accession number X52138,Smith-Waterman Score=1104.
atgaaagttggtgtggcctactcacccctctctgtagcagggttctttcttcaggtagagtcgtctgaagaacgcttcaatttttgtagcttcaccctcaggaaagaaggccaagggaaagaaggtggctccggccctgctgtcgtgaagaagcaggaggttaagaaagtggtgaatcccctgtttgagaaacggcctaagaattttgacattggacaggacattcagcccaaaagagacctaaccagctttgtgaaatggcccccactatatcagcggcagagagccatcctctgtaagtggctgaaagtgcctcctgagattaaccagttcacccaggccctggaccaccaaacagctgctctgctacttcagctggcccacaagtacagatcagagactaagcaagagaagaaacagaggctgttggccctggccaaaaagaaagctgctggcaaagggggcatccccactaagagaccacctgtccttcgagcaggagttaacaccatcaccaccttgctagagaataagaaagctcagccggtggtgattgcacacgacgtggatcccatcgagctggttgtcttcttgcctgccctgtgtcataaaatgcgggtcccttactgcattatcaagggggaggcaagactgggacgtctagtccacaggaagacctgcaccactgtcgccttcatacaggttaactcagaagacaaaggcgctttggctaagctagtgggagctatcaggactgactacaatgacagatacaatgagatccgccgtcactggggaggcaatgtcctgggtcccaagtctgtggcttgcattggcaagctcgaaaaggcaaaggctcaagaacttgcaactaagctgggttaa

SEQ ID NO: 25372 - DNA, 922 bp, Homo sapiens
  SIMILAR (278)..(832): 391254mologous to Homo sapiens L7a protein,accession number X52138,Smith-Waterman Score=199.
ggcacgaggcccaagatgccgaaaggaaagaaggccaagggaaagaaggtggctccggccccagctgtcgtgaagaagcaggaggctaagaaagtggtgaatcccctgtttgagaaaaggcctaagaattttggcattggacaggacatccagcccaaaagagacctcacccgctttgtgaaatggccccgctatatcaggttgcagcggcagagagccatcctctataagcggctgaaagtgcctcctgcgattaaccagttcacccaggccctggaccgccaaacagctactcagctgcttaagctggcccacaagtacagaccagagacaaagcatgagaagaagcagagactgttggcccgggccgagaagaaggctgctggcaaagggtgacgtccccaacgaagagaccacctgtcccttcgagcaggagttaacacgttcaccccccttggtggagaacaagaaagctcagctggtggtaattgcacacgaacgtggatcccatgcgaggctggttgtctttcttgcctgccctggtgtcgtaaaatgggggtcccttactgcattatcaaagggaaaggcaagactgggacgtctagtcccacagaaagacttgcaccactgtacgccttcacacaggtgaactcggaaagccaaaggcggctttgggctaagctggtggaagctatcaggaccaattacaatgatatgatacgatgagatccgccgtcactggggtggcaatgacctgcgtcctaaagtctgtggctcgtattcgccaagctcgaaaaggcaaaggctaaaagaacttgccactaaactgggttaaatgtacactgttgagttttctgtacataaaaataattgaaataatacaaattttcccttcaaaaaaaaaaaaaaaagggcggccgct

SEQ ID NO: 25373 - DNA, 1179 bp, Homo sapiens
  SIMILAR (688)..(1170): 591254mologous to Anopheles gambiae 60S ribosomal protein rpL7a,accession number AF079312,Smith-Waterman Score=433.
atggagaaagaacttgtagatcacactggcctttttctttctgcacatgcctctgaagctctggcgttaaagctgatgatctattccgaggtggcccataaactaagggcagtcagaagccagcacccagacatgggcgtctctctgcccctaacacctgccaattcctgccctaaaactattgaaagaatgcggaggtccagggagcttgagcgggaaaaggaccaaagcatagaaacagaccatcttccctgggcctttgggtctacatttctgaagactcccttgtcatgtaaaactttgatgaaatacatttgttatgcttttatcatcaacctgtcttttgttaaaggggtgtcagctgtgaccctcatgatgagtgaggaaagtaacatgcagatgcagtttagtgtctcaattacttctggatttggtccattcaagagtcatatcatcgctgctataccaaatgctgaaaggaaagaaagccaaggagaaaaaatggctccagctcctgctgtcataaagaagcaggaggccaaggaagtggtgaatcccctgtttgagaaaaggcttaagaattttggcattggacaggatatccagccccaaagagacctcacccgctttgtgaaatggccccactatatcaggttgcagcggcagagagccatcctctctggcccacaagtacaggccagagacaaagcaagagaagaagcagaggctgttggcccaggccaagaagaaagctaccagcaaagggacatccccactaagagaccacctgtccttcgagcaggagttaacatggtcaccaccttggtggagaacaagaaagctcagctggtgatgactgcacacgatgtcgatcccatcgagctggctgtcttctgcctgcctgccccatgttgtaaaaagggggtcccttactgcattatcaaggggaaggcaagactgggacatctagtccacaggaagacctgcaccactgttgtcttcacaaaggttaactcggaagacaaaggagctttggctaagctggtggaagctatcaggaccaactacgacagatacgatgagatccactgtcactggggaggcaatgtcctgggtctcaagtctgtagctcacattatcaagctcgaaaaggcaaaggttaaagaactttgccactga

SEQ ID NO: 25374 - DNA, 524 bp, Homo sapiens; identical to SEQ ID NO: 24003
  SIMILAR (80)..(523): 901254mologous to Rattus norvegicus clathrin-associated protein 17,accession number M37194,Smith-Waterman Score=669.

SEQ ID NO: 25375 - DNA, 981 bp, Homo sapiens
  SIMILAR (302)..(643): 401254mologous to Drosophila melanogaster adaptor protein complex AP-2 small chain sigma2,accession number AF228055,Smith- Waterman Score=127.
  misc_feature (1)...(981): n = a,t,c or g
gctggctctgactcttcacccatcttcacccaggctggcccctttggtgaaactacaactcccaggggtctgtgcgcgagaaggcaggcgggtttttctaccggaagtccgctctagctctgggccctacaactgcaccctgagccggtagctgcccattcgccgcgggaccggggccgctggggtctggacggtgttttgttttgatccgctttatcctcatccagaaccgggcaggcaagacgcgcctggccaagtggttacatgcagtttgatgatgatgagaaacagaagctgattcgaggaggtgcatgccgtggtcaccgtccgagacgccaaacacaccaactttgtgggagtttccggaacttttaagatcattttaccgccgctatggctggcctctaattnttgcatctgtgtgggatgtcaatgacaacaaacctgggcttacctgggaggccattcacaacttctgtggagggtcttaaacgaatattttccacaatgtctgtggaactgggacctgggtgtttcaactttctacaaaggttttacacggttcgtgggaacgaggatgtttcctgggctgggcgaaaatccgaagagacccagcccagacgaaaggtgcttgaaacagcttgctgatgcttacaagtccctgggagtttaggggcaggcgagcaccccaccgccggccccgggcccctccgtggacttcgcctgctcgcttccccttcccaagcccgtggccaacccagcaagtccttccctcagctgccttaggaggaagggaccccagctgggtctgggccacaagggaggagactgcaccccacttgcctcttgggccctgggctgttggggcagaggccaccgtgtgtgtcccgagtaaactgttgccgttgttcgtgttgatgccataagcgtctgtgcgtggagtccccaataaacctgtggtaactgcctggccttgcaatc

SEQ ID NO: 25376 - DNA, 476 bp, Homo sapiens
  SIMILAR (26)..(475): 911254mologous to Homo sapiens Amino acid sequence of super long human FAIM,accession number Y41258,Smith-Waterman Score=740.
gcggtgtctgcgcggtcggtgagacccgcgcgggtgagacgctggccctccttacagcctagaaaaaatgacagatgtcgtagctgtttgggatgttgctttaagtgacggagtccacaagatcgaatttgaacatgggactacatcaggcaaacgagtagtatatgtagatggaaaggaagagataagaaaagagtggatgttcaaattagtgggcaaagaaacattctatgttggagctgcaaagacaaaagcgaccataaatatagacgctatcagtggttttgcttatgaatatactctggaaattaatgggaaaagtctcaagaagtatatggaggacagatcaaaaaccaccaatacttgggtattacacatggatgaaaaagatgctatggacgtatggtgcaatggtaaaaaattggagacagcgggtgagtttgtagatgatgggactgaaactcacttcagtatcg

SEQ ID NO: 25377 - DNA, 893 bp, Homo sapiens
  SIMILAR (273)..(740): 591254mologous to Homo sapiens Amino acid sequence of super long human FAIM,accession number Y41258,Smith-Waterman Score=386.
gctgggttggggctgaggaaggcctatgcgcggagggtgcggccttcggctgaggcagaggaccagggttgggtccgtggcggcgggaggggtggcctcctgcgctggtcgccccaggggacctgagaggcgcgacaaacagtcggcgcgtttggtactcgcgcctgcagagctttcaacctgcgcgccggctgcgctagtttctcggccaggggagcaaggccacgcggctagcgcagccgagtcggaaccaaccggttgtttggtgaaacctaccccagagcctcccccggcccacagagcacagccctccttacagcctataaaaaaatgacagatctcgtagctgtttgggatgttgctttaagtgacggagtccacaagatcgaatttgaacatgggactacatcaggcaaaccgaagtagtatatgtagatggaaaggaagagataagaaaagagtggatgttcaaattagtgggcaaagaaacattctatgttggagctgcaaagacaaaaagccgaccataaatatagacgctatcagtggttttgcttatgaatatactcctggaaattaatgggaaaagtctcaagaaagtatatggaggacagattcaaaaacccaccaatactttgggtattacacatgggatggttgagaactttagaattgttttggaaaaagatgctatggacgtatggtgcaatggtaaaaaattggagacagcgcgagatttttgtaaaatgagtgatacaatatcagatgacacgaaggtagacgaacaggaaagggcactctcacgaaccccagaggacaagtggaattttagaccagcagtgccaatgcgaggagaaagaggctcccccagtcactgtggccaggcacactga

SEQ ID NO: 25378 - DNA, 1236 bp, Homo sapiens
  SIMILAR (499)..(717): 891254mologous to Homo sapiens fibrillarin,accession number X56597,Smith-Waterman Score=341.
atgcagctcaagtttcctggccgccagaagatccacatctcaaagaagtggggcttcaccaagttcaatgctgatgaatttgaagacatggtggctgaaaagcggctcatcccagatggctgtggggtcaagtacatccccaatcgtggccctctggacaaatgccaccatggaaaatgtgtggcaactgggacctcatacatgtgcaagtgtgccgagggctatggaggggacttgtgtgacaacaagaatgactctgccaatgcctgctcagccttcaagtgtcaccatgggcagtgccacatctcagaccaaggggagccctactgcctgtgccagcccggctttagcggcgagcactgccaacaagggttgttgggaggagtacgtgagatgttgagatgtaaagtcagaagcaacattgtcacgatgaaggccaaactgtcatttagaatctgcatgaccttgactatcctggccaacatgtggccccggcccatcttgggcggggtggaccagatccccatcaagcccaagtccaaggtgctgtacttgggcgccgcgtcgggcaccaccgtctcccatgtctccgacatcattggcccagacggcctggtctacgccgtcgagttctcccaccgcgccggccgcgatctggtcaacgtggccaagaagcgcaccaacatcattccggtcctggaggacgcgcggcacccgctcaaccggaccagggcccgctcggtggccctgaacgcccacaccttcctgcgcaatgggggccactttctcatctccatcaaggccaactgcatcgactccaccgcatccgccgaggctgtgtttgcttctgaggtgaggaagttgcagcaggagaacttgaagcctcaagagcagctgaccctggagccctatgagcgggaccacgctgtggtggattacagctcctcgtcagcaacagaacaaagaaggacggagaatgactctgacaagttgacagaagtaggcttcagaaagttggtaataaacttctccaagctaaaggaggatgttcgaacccatcacaaagaagttaaaaaccttgaaaaaagattggatgaatggctaactaggataaacagtgtagagaagaccttaaatgacctgatggaagctgaaaaccatggcacgaagaagtacgtgacacaagcacaagcttcagtagcctatttgatcaagtggaagaaagggtatcagtga

SEQ ID NO: 25379 - DNA, 1111 bp, Homo sapiens
  SIMILAR (195)..(422): 341254mologous to Homo sapiens fibrillarin,accession number M59849,Smith-Waterman Score=66.
atgggtcagcttccttttggctacccccaacccccaacgcggaggggcttaacatacatctcccacgttaaggataagcggcaggccattcggcaaaaaaaagctgtcttagcttgcttcccgcgtggagttttccgttgggttcgacccgagcccagtggcacgttcgccggcttcaggcaaggatctcaggaggcggtagacatcgatgtggccggcgtggccaagagcaagacccgccgcagaatggggcccatggtggtgtcggtggagccgcaccggcacgagggcgtcttcatctaccgcggggcggaggacgcgctggtcacgctgaacatggtgccgggccagtctgtgtacggcgagaggcgcgtcacggtgaccgagggcggcgtgaagcaggagtaccgcacgtggaacccgttccgctctaagctggccgcggccatcctgggcggggtggaccagatccacatcaagcccaagtccaaggtgctgtacctgggcgccgcgtcgggcaccaccgtctcccatgtctccgacatcattggcccagacggcctggtctacgccgtcgagttctcccaccgcgccggccgcgatctggtcaacgtggccaagaagcgcaccaacatcattccggtcctggaggacgcgcggcacccgctcaagtaccgcatgctcatcgggatggtggacgtgatcttcgccgacgtggcccagccggaccagtcccgcatcgtggccctgaacgcccacaccttcctgcgcaatgggggccactttctcatctccatcaaggccaactgcatcgactccaccgcatccgccggaggctgtgtttgcttctgagggggagaagttgcagcaggagaacttgaagcctcaagagcagctgaccctggagccctatgagcgggaccacgcttgtgtgggtcggggtctaccgacctcttcccaagagcagcagcaaatagcacccagctcaggctcgcctgccatctccccaaggctgcgttgtgtttgctattattttctgtgtgttttctttgtgagtgttttgttttgttgtttttctattaaactgcataaagaaacggcaaaaaaaaaa

SEQ ID NO: 25380 - DNA, 1156 bp, Homo sapiens
  SIMILAR (1156)..(707): 961254mologous to Escherichia coli Hypothetical protein 126: PIR:Q3ECTC,accession number D10483,Smith-Waterman Score=744.
tccacgcccaacttggaaggccggaccgcgaatttaaaagaacgcgataatcgtggctattactgtgatggaggtcactggcgcgaccacggctggtggaaacaacattatgaatggcgaggcaatcgctggcacctacacggaccgccgccaccgccgcgccaccataagaaagctcctcatgatcatcacggcggtcatggtccaggcaaacatcaccgctaaatgacaaatgccgggtaacaatccggcattcagcgcctgatgcgacgctggcgcgtcttatcaggcctacgttaattctgcaatatattgaatctgcatgcttttgtaggcaggataaggcgttcacgccgcatccggcattgactgcaaacttaacgctgctcgtagcgtttaaacaccagttcgccattgctggaggaatcttcatcaaagaagtaaccttcgctattaaaaccagtcagttgctctggtttggtcagccgattttcaataatgaaacgactcatcagaccgcgtgctttcttagcgtagaagctgatgatcttaaatttgccgttcttctcatcgaggaacaccggcttgataatctcggcattcaatttcttcggcttcaccgatttaaaatactcatctgacgccagattaatcaccacattatcgccttgtgctgcgagcgcctcgttcagcttgttggtgatgatatctcccgcagaatgtgatacagatctttccctcgggcattctcaagacggatccccatttccagacgataaggctgcattaaatcgagcgggcggagtacgccatacaagccggaaagcattcgcaaatgctgttgggcaaaatcgaaatcgtcttcgctgaaggtttcggcctgcaagccggtgtagacatcacctttaaacgccagaatcgcctggcgggcattcgccggcgtgaaatctggctgccagtcatgaaagcgagcggcgttgatacccgccagtttgtcgctgatgcgcatcagcgtgctaatctgcggaggcgtcagtttccgcgcctcatggatcaactgctgggaattgtctaacagctccggcagcgtatagcgcgtggtggtcaacgggctttggtaatcaagcgttttcgcaggtgaaataagaatcagcat

SEQ ID NO: 25381 - DNA, 2116 bp, Homo sapiens
  SIMILAR (1251)..(1844): 701254mologous to Escherichia coli FhiA,accession number D38582,Smith-Waterman Score=635.
ttaacgctgctcgtagcgtttaaacaccagttcgccattgctggaggaatcttcatcaaagaagtaaccttcgctattaaaaccagtcagttgctctggtttggtcagccgattttcaataatgaaacgactcatcagaccgcgtgctttcttagcgtagaagctgatgatcttaaatttgccgttcttctcatcgaggaacaccggcttgatgcacttaaaatccctcctttttgggccgatttcccctttttgggtgaaatccccagcccacccaaagggcccctcaaatggggacttactgccttggagcgacgggctcgtacggacccacgagcgtgacaccgacgggtgcttcctgcgctcacattctggtttggttcgtctgtttgcgtctttgtttgttgcaaattgtcgacccttgttgtagtcgtggtggcaatggcatcgcttgtttaacttgttgtcgacccttgttgtcgttgattcctgttgttgcaatcgtggttgccctatcgatgtcgcttgcaccgtcgattgtcgatgcagtgctcgtagttgtgctatcgcatgtcgctgtgatgtgtgtcgttgcgttgccttgtgtcgtgtgcctgatgtcgtgtgcggcgatcgggggaagtctggacctgatttacgtaaaacccgcttcggcggctttttgcttttggaggggcagtaagatgaatgactgtccacgacgctataccctaaagaaagcggcttatcggtcagtttcacctggtttacgtaaaaacccgcttcgtcgggtttttgcttttggaggggcagaaagatgaatgactgtccacgacacctcgggggcgcggaggcgcagaagcgcgggaacccggaagtttccgccttaattccgtagcacataagacccttggggccgtgatgcgacggcttgacgcgtcttatcaggcctacaaccggtgccgcagtccgggcagagttgggctggcaggcaagtggtcgctgaagtgcagatgcattgacgcatcttatcaggcctacaatgggtaccggatcggtaggccggataaggcgtttacgccgcatccaggtctgcgcccaaatcacgccgctggcatattccggcggcagcagcgggattaaggcttccagcgtcgcagtcaacgcgatgtgtcgctgtcggtcaaattcagatgccccacggcttgaaccactgcactcgtggtcgttgtggtcgcccccctgttcctccctacgtgtttggtcttcgattccttgctgtgtgtcacagtagtcgcgcagtgcggcttttcgcgcgccttttcgagaatttgcccggccccattcacccgttgctgaaggttccgggctctggtgccgaaggcttctccctgcgcgaattgttcccagtcgccacggtgctggtcgccagtagcacggctgacgaaaagattcatattcctgctggcggccgattgtgcgcctggcattgcggcgcagcatttacccatccgttcgttcgcaagcaggagctgacggtgtatacgctgaataatgagctggaaaatctgctgaccaacgtggtgaatcaggcgcaacagggcgggaaagtgatgctcgacagcgtgccggtcgatccgaatatgctcaaccagttccagagtacgatgccacaggtgaaagagcagatgaaagcggcggggaaagacccggtgctgctggtgccaccgcagctgcgccctttgctggcgcgttatgcaaggttgtttgcgccggggctgcatgtgctgtcgtataacgaagtgccggatgagctggagttgaagattatgggggcgttgatgtaagtatccagcattggtgcacaactgccggatgcggcgtgaacgccttatccgtcctaccgttcaggcacaagtttgtaggcatgataagacgcgccagcgtcgcatcaggcatctgcgcataactgccggatgcggcataaacgccttatccggcctaccgatccggcacaagtttgtaggcatgataagacgcgctagcgtcgcatcaggcatctgcgcacaattatgaaatgatacgctccccggcactaaaatccgttacgtccccc

SEQ ID NO: 25382 - DNA, 1314 bp, Homo sapiens
  SIMILAR (169)..(648): 771254mologous to Homo sapiens AMMECR1 protein,accession number AJ007014,Smith-Waterman Score=620.
gcgcgcggggcagccgcgtggctaggcagacggggccgggagcggcgcgcgcgcgccccgccagcctctggcgcgcccccggcggcatgagccgcagcgtgctcgcccccgccgccagctcgcctcacttatgggtcggaaacgctgcgtgggggagactgttccaagatggcggcgggttgctgcggggtgaagaagcagaaactgtccagttcgcccccctctggctcgggtggcggtggtggcgcctcctcctcctcccactgcagcggagagagccagtgccgagctggggagctgggactaggaggcgccggtacgcggctcaacgggctgggaggtctaaccggaggaggtagcggcagcggctgtaccctctctcccccccagggctgcggcggcggcggcggggggatcgccctgtcgccacctccgagctgcggagtggggaccctaactttctaccccggccgccgccacctcttcctcaccctcctcatcgtcccgcccgcctcgtcctcatcgccgggctcccggaaagatggtggtgtcaacagaagatgtgcttgcttttgcttcgatgtgctctactgtcacctgtatggaatcctagcagcccccggcccccccgattcaccaacgagccctacccactgtttgtaacatggaagattggtcgagacaaaagattacgtggatgcataggtactttttctgccatgaatttgcattcaggactcagggagtacacacttaccagtgcccttaaagatagccgttttcccccgatgacaagggatgagctgccacggcttttctgctcagtgtctctgctcactaactttgaagatgtctgtgattatttggactgggaggtgggtgtacatrggcattagaatagammttcatcamtgtaaaaaggcatcaaaacgcgaccgccacctacctaccggaggtgtgcaaaggagcaaggatgggaccatatacagaccatagactccttattgaggaaaggaggatacaaagctccgattactaatgaattcaggaaaaccataaaactgaccaggtatcgtagtgaaaagatgaccctgagctatgctgaataccttgctcatcgccagcatcatcatttccaaaatggcattggggatccccttccggcatacaaccattattcctgacactgagccgcacaaccagtcactgggcctctctgcagacctcttcccaggagaccctacaccttcttggtctagctatctcttttactgtaccattttatgatgatagtttccgttgccatggtgaagc

SEQ ID NO: 25383 - DNA, 386 bp, Homo sapiens
  SIMILAR (6)..(125): 951254mologous to Homo sapiens calbindin D28K,accession number S46006,Smith-Waterman Score=214.
tgggggacctcccttgggagatcaatcccctgtcctcctgctctttgctctgtgagaacgatccacctatgacctcaggtcctcagactgaccagcccaagaaacatctcacgaatttcaaatctgatctgctcaacttagcgactgaagattaatgctgcctgatcacctcagaagccccctggaccatcacagatgcccaacttcaggtgactctcaagtggagggcctctgaacccaagccaagccatcgcatcccctgtgatttgaaggtatatgcccgggtggcctgaagtaaccgaagaatcgcaaaagaagtgaaaatgcgctgccccgccttaactgatgacattccaccacaaaataagtgcaaatgccagtccttg

SEQ ID NO: 25384 - DNA, 1710 bp, Homo sapiens; identical to SEQ ID NO: 11861
  SIMILAR (1318)..(1677): 741254mologous to Homo sapiens putative p150,accession number U93572,Smith-Waterman Score=432.

SEQ ID NO: 25385 - DNA, 2664 bp, Homo sapiens; identical to SEQ ID NO: 3058
  SIMILAR (970)..(1689): 1001254mologous to Homo sapiens heat-stable enterotoxin receptor,accession number M73489,Smith-Waterman Score=1251.

SEQ ID NO: 25386 - DNA, 466 bp, Homo sapiens
  SIMILAR (32)..(445): 381254mologous to Human endogenous retrovirus tripartite fusion transcript PLA2L,accession number Z14310,Smith-Waterman Score=199.
cctgtttggtggtctcttcacacggaggcgcatgaaatttggtgccgtgactcggatcaggggacttcccttgggagatcaatcccctgtcctcctgttctttgctcgtgagaaagatccacgtacgacctcaggtcctcagaccgaccagcccagtaaacatctcaccaatttaaaatccgcctccactcctccaccctataatccttttatcacctcccctcctcacacccggtccggcttacagtttcgttccacctctagccctccggcacctgctcagcaatttactcttaaaaaggtggctgaagctaaaggcatagtcaaggttaatgctcctttttccttatcagacctctcccaaatcagtgtgcgtttaggctctttcatcaaatatgaaaaatccagcccagttcatggctcgtttggcagcaaccctgagacactttacagccctagaccctga

SEQ ID NO: 25387 - DNA, 261 bp, Homo sapiens
  SIMILAR (67)..(44): 751254mologous to Pyrococcus abyssi TYPE I RESTRICTION MODIFICATION ENZYME, SUBUNIT M,accession number AJ248283,Smith- Waterman Score=33.
tcagtcagtggccgagagatgttcagggacagctgtggctgggacctgatgatccaccagccggatcttagcaaatagcagctctgtgtccagctctgtctgcataacactttccattttgaaaagccatttctcctcccatttttccttaaggctcctaaccctggggtgtccagggctgtccgagcctgtgtctttattcctaaacctttcctctagaccagcaggaaccacgaagcctcttctggcactaagcgatgt

SEQ ID NO: 25388 - DNA, 513 bp, Homo sapiens; identical to SEQ ID NO: 3059
  SIMILAR (25)..(507): 441254mologous to Murine leukemia virus gag-pol polyprotein,accession number U13766,Smith-Waterman Score=295.

SEQ ID NO: 25389 - DNA, 419 bp, Homo sapiens; identical to SEQ ID NO: 18570
  SIMILAR (91)..(222): 861254mologous to Homo sapiens calbindin D28K,accession number S46006,Smith-Waterman Score=207.
  misc_feature (1)...(419): n = a,t,c or g

SEQ ID NO: 25390 - DNA, 825 bp, Homo sapiens; identical to SEQ ID NO: 19718
  SIMILAR (85)..(14): 371254mologous to Homo sapiens Human secreted protein, SEQ ID NO: 7115,accession number G03034,Smith-Waterman Score=39.

SEQ ID NO: 25391 - DNA, 403 bp, Homo sapiens
  SIMILAR (231)..(317): 651254mologous to Homo sapiens Human secreted protein, SEQ ID NO: 7340,accession number G03259,Smith-Waterman Score=87.
ctgcaagtcacaggggatgcgatggcttggcttgggctcagaggcctgatattcctgccttcttatattaataagaaaaataacacaaaatagtgttgaagtgttggggcggcgaaaatttttgggcggtggtatggagagagaatgggtgatgtttctcagggctgcttcaagcgggattaggggcagcgtgggaaccaatttcaaatccgagtcacggcaccaaatttcatgtgcgtctgtgtgaagagaccaccaaacaggctttgtgtgagcaataaagctgtttatttcacctgggtgcaggtaggctttcagatttttgaaaagcctgaacccattgaagagatatgcaaggtatgttggaggccgatggcttagagaggattgggcctttgagagg

SEQ ID NO: 25392 - DNA, 1059 bp, Homo sapiens; identical to SEQ ID NO: 806
  SIMILAR (328)..(459): 881254mologous to Homo sapiens calbindin D28K,accession number S46006,Smith-Waterman Score=211.

SEQ ID NO: 25393 - DNA, 1080 bp, Homo sapiens; identical to SEQ ID NO: 5259
  SIMILAR (514)..(1044): 481254mologous to Murine leukemia virus gag-pol polyprotein,accession number U13766,Smith-Waterman Score=416.

SEQ ID NO: 25394 - DNA, 2394 bp, Homo sapiens
  SIMILAR (31)..(402): 861254mologous to Homo sapiens neural adhesion molecule NB- 3,accession number AB003592,Smith-Waterman Score=565.
atggctactttgctggcagagcaggtgaaatacaagatgatcctggaactctctcttgtatcagaaaggaagaattcaaagaagggtgatggtcttttaagccgtcctatttttactcaggagccacatgatgtcatttttcctttggatttatcaaaatctgaggtcatcctgaattgtgctgctaatggttacccttcgcctcattataggtggaagcaaaatggcacagacattgattttactatgagttatcactacaggttggatggaggcagtcttgcaatcaatagcccccacacagatcaagatattggcatgtaccagtgcctggccaccaatcttctggggacaattctgagtcggaaggcaaagctccaatttgcatggtgtgcaaatttcgtgtgtagcggtctgtatattcgcgtaaattcagctattaagattggtgtcttggggggagcaggaggaaaatgtcccgctgctttcatctgccaagatgttcagctctctctgctcctgctgtcacaccagaaattgattgatctgtatgggttcaaacagctacaaagtgcatctgagaaaagaaaatggaagcactctaagaaaaaggtagctgtccccatggagcagataaaacctgaacctaagtatgccaagatgaactggagatataggtcttcagggaccccaaggatattaaaaaggaggcccaaggaagaatttcacaagctgcggaggattgggaagtgggttcagatacgggaacattcagagctctatgtagatgaagcccacctgcacccaggtgaaataaacagctttattgctcacacaaagcctgtttggcggtctcttcacacagacacgcatgaaatttggtgctgtgactcggatcgggggacatcccttgggagatcaatccgccgtcctcctgctctttgttcctacctctctacctcttctccactttcctggggcagggccaagtacccctcaaccccttctccttcaccctcagcggcaagtcccgctttcctggggcagggccaagatttaattaacctcgtcttcaaggtgtacaataatagaaaaaagttgcaattccttgcctccactgtgacacaaaccccagccacatctccagcacacaagaacttccaaacacctgaaccgcagcagccaggcgttcccccagaacctccttccccaggagcttgctacaagtgccagaaatctggccaccaggccaaggaatgcccgcagctcaggattcctcatttatcttatgcatggaccttcaatgataaccccttatacgtccaagaggacaataggcgatttgtatctcaagagacgggaaacttgtacattgccaaagtggaaccatcagatgtgggcaactacacttgctttataactaacaaagaggcccagagaagtgttcaaggtccacccactccattagtgcagcgcactgatggtgtgatgggggaatatgaaccaaagattgaagtgcgttttcctgaaactatacaagctgcaaaggattcatctgtaaaactggaatgttttgcccttggaaagattgatgacagtataagagagaaaggagcaattaggattaaaccgtcttctattctaatgaggtgtaactgtttagtccagtccccgatattagttggagaaggttggacgggagcccgttgccagggaaagtcaagtacagcaaatcccaagctatccttgaaatcccgaacttccaacaagaagatgaaggcttttatgagtgcattgcaagcaaccttcgaggaagaaaccttgcaaagggtcaactcattttttatgcataatgtcttggataactgccttttaccaaacagtggcacttgcctttttgaaacagctcctccagaatgggaacagaaaatccaaaatacacacctctctatctatgacaacttgctctgggaatgtaaagctagtggaaagccaaacccttggtatacatggttaaaaaatggtgaacgactcaacccagaggagagaattcaaatagaaaatgggacactcatcataacgatgctgaatgtgtcagattctggtgtgtaccaatgtgctgcagaaaacaaatatcagataatttatgcaaatgctgaattgagagttttaggttctcagctggttcatttcagagaaaatggtacttgtctctctgatgaggttataagagactcagattttatgtccggaatgacagttgtgcatgcttttacctctggcagccaaggaacaaccacggaaaatcaggatgaattacagattaagtttatctctgcaaggcattctcaggcaactgagggaatcaattccacatctgctaagtttgattaa

SEQ ID NO: 25395 - DNA, 759 bp, Homo sapiens; identical to SEQ ID NO: 19790
  SIMILAR (511)..(654): 851254mologous to Homo sapiens calbindin D28K,accession number S46006,Smith-Waterman Score=217.

SEQ ID NO: 25396 - DNA, 2206 bp, Homo sapiens; identical to SEQ ID NO: 15055
  SIMILAR (2)..(889): 1001254mologous to Homo sapiens potassium channel homolog; KvEBN2,accession number AF033347,Smith-Waterman Score=1565.

SEQ ID NO: 25397 - DNA, 1236 bp, Homo sapiens; identical to SEQ ID NO: 247
  SIMILAR (907)..(1236): 1001254mologous to Homo sapiens heat-stable enterotoxin receptor,accession number M73489,Smith-Waterman Score=568.

SEQ ID NO: 25398 - DNA, 2604 bp, Homo sapiens
  SIMILAR (1567)..(1725): 641254mologous to Homo sapiens neutral protease large subunit,accession number M27826,Smith-Waterman Score=153.
atgcccctccagccactagcgactccgtttacttcccctggaagcccatcagttgctcaagtgacaaccaacaccggagagccagggttcgcccaacaggagtacgcggagacaccccagacgacagcgcgtcccccccacccccaccccgccctccgggcgctccaggccagcgtccaccagaccccacgcctgggggactgcttgggctctagcgagagtgccacggctctgcacggcagcggggagccgaacaagttagccccgccggggcgccctacggaacgcggtgggcttttcaagtgctcagtccctctgcggacagtgcgaggctgccgggccgggctccgggggaccgagactgtaccttccagccttcagcgccagcccgcgggagacgtaggatggatcaacaacaaaagcaccacagccctagacagaacgccgactgacacccagcggaccaggcgaccccggccgccaaaacagaaacaaagaggcagagcgctcaaggagcggcccagagactccgacagcgcgcgcgaaggcccactgaaggcggtcgcgggcctgtttggtggtctcttcacacggacgtgcatgaaatttggtgccgtgactcggatcgggggacctcccttgggagatcaatcccctgtcctcctgttctttgctccacgagaaagatccacctacgacctcaggtcctcagactgaccagcccaagaaacatctcacgaatttcaaatctgatctgctcagcttagcgactgaagattaatgctgcctgatcacctcagaagccccctggaccatcacagatgcccaacttcaggtgactctcaagtggaggatcctataagatggccccacgcttatctccctttgctgactctcttttcggactcagcccgcctgcacccaggtgaaataaacagccatgttgctcacacaaagcctgtttggtggtctcttcacaccgacgcgcatgaaatttggtgccgtgactcggatcggggggacctcccttgggagatcaatcccctgtactcctgtgttctttgctccgtgagaaagatccacctacgacctcaggtcctcagaccgaccagcccaaggaacatctcaccaattttaaatcagacaaaggagacatgttttatccgtggacccaaaactccagtgccggtcacggactgggaaggcagccttcccttggtgtttaataactgcagggacacctctctgattatacacccacgtttcaagggtgtcagaccacgcagggatgcctgccttggtccttcacccttagcggcaagtcccgcttttctggggaaggggcaagctgctcctcgccaggccgagctaggtcccaattcttcctcagcctctgctcctccaccctataatctttttatcacctcccctcctcacacctggtccggcttacagtttcgttctgtgactagccctcccccacctgcccagcaatttactcttaaaaaggtggctggagccaaaggcatagtcaagaccatcacagacgccgagcttcgggtaactctcacagtggaaggccgagacagtttaactaaattatctgcttccctgacgattcctggactacagccacatctcattgccgtccttctccccaacccaaagcctccttcgcgtcttcctctcatatccccctaccttaacccacaagtatgggacatctctactccttccctggcaactgatcacatgcccattaccatcccattaaaacctaatcacccttaccccactcaacgccaatatccaatccctcagcacgctttaaaaggattaaagcctgttatcactcgcctgctacagcatgggcttctaaaacctataaactctccttaccattcccccattttacctgtcctaaaaccagacaaggcttacaagttagttcagaatctgcgccttatcaaccaaattgttttgcctatccactccatgaatgctccttattttctctccgagtcgtggactctatgcctgctcatgtgtcaagacgtagctcaacttccaacttcactaaaattatcaacctcacgaactagctaccaagtgaccactttgacgagccttgaggaaaaggcggagggggctttagcacacactcagctaacgaaagtgtgccggttcatttcccacagctccacacaaactcccagggcctctgcagttctgggagaaccagtacccatcagtgctctagggctcccaagtcctgcagccttctgggaatgcctttcctttcccatctgccatcacactaatgataatagtcggccacctccaggatgccctaggattcccaaggccacatcacctacaccacttcttgacagagccaagagtgatgctggaaggggaagcaggaagcagaagaagaaagggacccagaacagtggaatgcaggagctcaggggccacgcaggagtgtggttctgcgtctggcccaggcacatcacacctgccttgggcatagtatcctcaaacctgctagttgaggggcgggaaaaattcacagaatattttagtgatttcttgctcagataa

SEQ ID NO: 25399 - DNA, 2268 bp, Homo sapiens; identical to SEQ ID NO: 19792
  SIMILAR (1618)..(1776): 831254mologous to Homo sapiens Human secreted protein, SEQ ID NO: 5210,accession number G01129,Smith-Waterman Score=224.

SEQ ID NO: 25400 - DNA, 4345 bp, Homo sapiens
  SIMILAR (3296)..(3204): 961254mologous to Human endogenous retrovirus tripartite fusion transcript PLA2L,accession number Z14310,Smith-Waterman Score=166.
ttaaatcagtaagagtttagtaagcatcttctcttcgttaagccctgcatcaggtgaatataatcttgtcctgatctcacgtagctctgagacagacaggtaaacatagcattcctcaccattacccaataaagctactgtaacagttttaagagtcaggtggaaagaaggtggtgatcgagtttttgaaacttgatggggtcttgggaccaggactggctcttcaccagcagtgaatggccactctgcaaagagatcacctgcaaagggcaggaatggccttccaaaagtcagaatggaattacctgtttgtggatatctgggggctgttgccttggttggactcggagtctgtgtgccatgggtgaatgctcccgaggtagggctggcctgggatgggctgccaggtgtggccattatctcagcagcaggcgccaaaaggcttgtagtgttcatggcttcctcggtccctgcagtagtcggtggggaagaacgagtttcccagagagaccctccaggttttttctcactgatggtctgagcccagggcacggacgatatggaagcccacgtctgtctgtcagctgtcaaccactgagttctggccaccctcctggtagccaaggctgggagagtgtgggaggcactgaaccatgtggctgtggccctggctggaagctcaggaggcctgcctgtgttcagggtctcctctgtttctgaaggagcagctgtctctgtccagggagaggatctcagagcagatgcccagggtgtgctctgggtccagtgtccggggcttgtacttggtagtgttttctggcttttggttgtgggctttgaagtcctggcagttcccctggtagctgcaccttcagggaggcagtcaatggtaacattaacatgcttgacactttgggcataaaaaaactgaaaggtcactggactgcaaatatatgaatgtggagattcaaacctttctctaattaaaagtatcaggcatttgctatgtttcctgaacagattctgacccctgtcagagcctttcttccacctccagccctcagcctctccaggactctggtacatgtctttggaagaggaattagtctcctccatatgccttatggatacaactaaatttcatgtgcgtccgtgtgaagagaccaccaaacaggctttgtgtgagcaataaagctgtttatttcacctggggtgcaggcgggctgagtctgaaaagagagtcagtgaagggagatagaggtggggcattttattaggatttggggtaggtaaaggaaaattacagtcaaagggggtttgttctctggcgggcaggagtgggggtctcaaggtgctcagtgggggtgctttttgagccaggatgagccaggaagaggactttcacaaggtaatgtcatcagttaaggcaaggaccggccatttacacttcttttgtggtggaatgtcatcagttaaggtggggcaaggcatattcacttcttttgtgattcttcagttacttcaggccatctgggcatatacgtgcaagtcacaggggatgcgatggcttggcttgggctcagaggcctgacattcctgccgtcttatattaataagaaaaataaaacaaaatagtgttgaagtgttggggtggcaaaaatttttggggggtgatatggagagagaatgggcgatgtttctcagggctgcttcaagcgggattaggggcgccgtgggaaccttccactgtgagagttacccgaagctcggcatccgtgatggtctagggggcttcaaccgaggcgatcgggcagtgtcagtcttcagccactaagccgagaagatctgggaaggagtcagtcagagagccttgggccagagttccaggggctgtgggagtggctgccaggtgagttgaacagtccgatttccagtggggtcccgatttaaaattggtgagacgtttcttgggctggtcggtctgaggacctgaggtcgtaggtggatctttctcatggagcaaagaacaggaggacaggggattgatctcccaatgggaggtcccccaatccgagtcacggcaccaaatttcatgcgcgtccatatgaagagaccaccaaacaggctttgtgtgagcaacaagactgtttatttcacctgggtgcaggcgggctgagtctttgtcaaaaatcagttgaccataaacatatgaatttatttctggactttcaatgtcattctgttgatcaatgtatctgtccttatgccagtaccacatagttttgattactgcaaatttgtggtaagttttgaaatcaagaagtgtaaattctccaacttcattcttttccaagattgttttggttattctgggtcccttgcatttccacatgaattttggaatcagcttgtcagtttttctctcccgctctcggtttgttattgggaaggtgctgaaggatgctggggctgccaacctggtgcctaattccccaaagcagaggcagctgtggtccagaagccccagggcctgtttccactgtcctccctggggaaatgcgggtattaggcccagagaggcccaggacttatctcgacactctcctttccccggccaagaaaatgcttcctcttcttggaggatggagatgcaaacactccctttctggagcaggtagtaagaatccaggagagcatagcctggggattctgcagtgtggaatactgcaagggcttttatcagggagccagccaaggccttggtgactgatatctcccctagtaacatcatggggtggataggcaaaacaatttggttgataaggcgcagatcctgaactaaccagtaaggcttgtttggttctaggacaggtaaaatgggggaattgtaaggagagtttctaggctttaaaaggccatgctgtaacaggtgagtgataacaggctttaatccttttaaagtgtgctgtgggatgggatattggcattcatcggggtaaggttgattaggttttaatgggatggtaaggggtgcatgatcggtcaccaaggagggagtagaggtatcatacttgtgggttaaggtggggagatacaaggggaggatgtgaaggaggttttgaacctccactgtgatagttacccagagtgtctgtgatggtcctgtaggcttccaaggcgattgggtagggtcagtcttcatcggatttgaaattggtgagatgttccttgggctggtcggtctgaggacccgaggtcgtaggtggatctttctcatggagcaaagagcaggaggacaggggattgatctcccaagggaggtcccccaatccgagtcacggcaccaaatttcatgcgcgtccatgtgaagagaccaccaaacaggctttgtgtgagcaacaagactgtttatttcacctgggtgcaggcgggctgagtcagtatgggttcgtcgatgctgaatcagaattgcgcttcggctgaatgcctttgcacactcgtcacatgcataaggtttctttccactgtggattctctgatgtaaaataagggctgagctctgactaaagattttgccacattcatcacatttctgttgttttttccaagaagggtttccttgtctcttttcaaacctaccatcttgttcataggttcctctatatgtggaactctgggagccattcatatgaaggatattggaaacattgcaatgcagttctatgcctaaagaagtcttttgccttgaagcagatttcacatttgtagttttgatgtcttcatcatgtggtcttaaggactgaagctcccatgatgctccctggagctgcttcttcacgggcatgagctggctacttggcaattcctcagtgatttctgaaggtgctagcttctctgcaatcatgtccttccttcgtccaaaaaagatctgctttggtccatcaagctctctctccacatcctccagcatagtcacagtttcctctccattctctggatgatgcttctgcacccaggcctgaagctcttttgggaggatggccaggaactgctccagcaccagcagctccaggatctgctccttggtgtgcacttccggcctcagccagagatgacaaagttcccagagccggctcagagcctcatggggcccaggtgaatcctggtagccaaactgcctgaattgctggcggaaggtctctgggctgtagctgctgctccagtggaggctagagtctggatcacaggtctgctcttcctcttccatcttctctgtcagaatcccattacactcctctgaagtttgtgttaggagtgatgatgactttcccaattttgcagacat

SEQ ID NO: 25401 - DNA, 5213 bp, Homo sapiens
  SIMILAR (2614)..(4473): 941254mologous to Homo sapiens putative p150,accession number U93572,Smith-Waterman Score=3044.
atgctgttttgggcctttgacaaaattcaacagcccttcatgctaaaaactctcaataaattaggtattgatgggacgtatctcaaaataataagagctgtttatgacaaacccacagccaatatcatactgaatgggcaaaaactggaagcattccctttgaaaactggcacaagacagggatgccctctctcaccactcctattcaacatagtgttggaagttctggccagggcaatcaggcaggagaaggaaataaagggcattcaattaggaaaagaggaagtcaaattgtccctgtttgcagatgacatgattgtatatctagaaaaccccatcatctcaacccaaaatctccataagctgataagcaacttcagcaaagtctcaggatacaaaaacaatgtgcaaaaattacaagctttcttatacaccaataacagacaaacagagagccaaatcatgagtgaactcccattcacaattgcttcaaagagaataaaatacctaggaatccagcttacaagggatgtgaaggacctcttcaaggagaactacaaaccactgctcaaggaaataaaagaggatacaaacaaatggaagaacattccatgctcatggataagaagaatcaatattgtgaaaatggccatactccccaagaggactccattattatcgctgcctagtacattatatgaggagctgtggagacttaggtcctacttcccattgtgccctcaactttacaacatggagcagaataccacagactgggtaatttataaagaacagtgcatttggctcacagctctggagactggggagtccaagagcactgcaccagcatttggcaagggttatcccatggcagaatacatcatatggggcagattgacacctcacatggctggctactcctctgagacaaaacttccagaggaacgatcaggcagcaacatctgctgttcaccaatatccgctgttctgcagcctctgctgctgatacccaggcaaacagggtctggagtggacctccagcaaactccaacagacctgcagctgagggtcctgactgttagaaggaaaactaacaaacagaaaggacatccacaccaaaaccccatctgtacgtcaccatcatcaaagaccaaaggatcaaattcacacataacaatattaaccttaaatgtaaatgggctaaatgctccaattaaaagacacagactggcaaattggataaagagtcaagacccatcagtgtgctgtattcaggagacccatctcacgtgcagagacacacacaggatcaaaataaagggatggagggagatctaccaagcaaatggaaaacaaaaaaaggcaggggttgcaatcctagtctctgataaaacggactttaaaccaacaaagatcaaaagagacaaagaaggccattacatgatggtaaagggatcaattcaacaagaagagctaactaccctaaatatatatgcacccaatacaggagcacccagattcataaagcaagtccttagagacctacaaagagacttagactcccacacattaataatgggagactttaacaccccactgtcaacattagacagatcaacgagacagaaagttaacaaggatatccaggatttgaactcagctctgcaccaagtggacctaatagacatctacagaactctccaccccaaatcaacagaatatacattcttctcagcactacaccacatttattccaaaattgaccacatagttggaagtaaagcactcctcagcaaatataaaacaacagaaattataacaaactgtctctcagaccacagtgcaatcaaactcgaactcaggattaagaaactcactcaaaaccgctcaactacatggaaactgaacaacctgctcctgaatgactactgggtacataacaaaatgaaggcagaaataaatacattatttgaaaccaacgagaacaaagacacaacataccagaatctctgggacacattcaaagcagtgtgtagagggaaattcatagcactaaatgcccacaagagaaagcaggaaagatctaaaattgacaccctaacatcacaattaaaagaactagagaagcaagaacaaacacattcaaaagctagcagaaggcaagaaataactaagatcagagcaaaactgaaggaaatagagacacaaaaaatccttcaaaaaatcaatgaatccaggagctggttttttgaaaagatcaacaaaattgatagaccactagcaagaccaataaagaagaaaagagagaagaatcaaatagatgcaataaaaaatgataaaggggatatcaccactgatcccacagaaatacaaactaccatcagagaatactataaacacctctatgcaaataaactagaaaatctagaagaaatggataaattcctcaacacatacaccctcccaagactaaaccaggaagaagttgaatctctgaataaaccaataacaggctctgaaattgaggcaataattaatagcttaccaatcaaaaaaagtccaggaccagatggattcatagccaaattccaccagaggtacaaggaggagctggaggccagcatcatcctgataccaaagcctggcagagacacaaccaaaaaagagaattttagaccaatacccctgatgaatattgatgcaaaaatcctcaataaaatactggcaaaccgaatccagcagcacatcaagaagcttatccaccatgatcaagtgggcttcatccctgggatgcaaggctcgttcaacatatgcaaatcaataaacgtaatccaggatataaacagaacgaatgacaaaaaccatatgattatctcaatagatgcagaaaaggcctttgacaaaattcaacaacccttcattctaaaaactctcaataaattaggtattgatgggacgtatctcaaaataataagagctatctatgacaaacccacagccaatatcatactgaatgggcaaaaactggaagcattccctttgaaaactggcacaagacaggggtgccctctctcaccactcctattcaacatagtgttggaagttctggccagggcaatcaggcaggagaaggaaataaagggcattcaattaggacaagaggaagtcaaattgtccctgtttgcagatgacatgattgtatatcgagaaaaccccatcgtctcaacccaaaatctccataagctgataagcaacttcagcaaagtctcaggatacaaaatcaatgtgcaaaaatcacaagcatttttatacaccaataacagacaaacagagagccaaatcatgagtgaactcccattcacaattgcttcaaagagaataaaatacctaggaatccaacttacaagggatgtgaaggatctcttcaaggagaactacaaaccactgctcaaggaaataaaagaggatacaaacaaatggaagaacattccatgctcatgggtaggaagaatcaatatcgtgaaaatggccatactgcccaaggtaatttatagatttaatgccatccccatcaagctaccaatgactttcttcacagaattggaaaaaactactttaaagttcatatggaaccaaaaaagagcccgcattgccaagtcaatcctaagccaaaggaacaaagctggaggcatcacactacctgacttcaaactatactacaaggctacagtaaccaaaacagcatggtactggtaccaaaacagagatatagaccaatggaacagaacggagccctcagaaataatgccacatatctacaaccatctgatctttgacaaacctgacaaaaacaagaaatggggaaatgattccctatttaataaatggtgctgggaaaactggctagccatatgtaggagaaagctgaaactggatcccttccttacaccttatacaaaaattaattcaagatggattaaagacttaaatgttagacctaaaaccataaaaaccctagaagaaaacctaggcaataccattcaggacataggcatgggcaaggacttcatgtctacaacaccaaaagcaatggcaacaaaagccaaaattgacaaatgggatctaattaaactaaagagcttctgcacagcaaaagaaactaccatcacagtgaacaggcaacctacagaatgggagaaaatttttacaatctacccatctgacaaagggctaatatccagaatctacaaagaactcaaacaaatttacaagaaaagaacaaacaaccccatcaacaagtgggtgaaggatatgaacagacacttctcaaaagaagacatttatacagccaaaaggcacatgaaaaaatgctcatcatcactggccatcagagaaatgcaaatcaaaaccacattgagataccatctcataccagttagaatggcgatcattaaaaagtcaggaaacaacagaccaagctccaatgtcttctctgtgaaactttctgagatccaatccttggctctcatagagactaggtgcttaatgaatgctgatgaacagggtgtgccactgattcaagaaatgctggaatcttgggcaagtatttgcaaagttcccaagtatccaaatgccgaagcagtgcggccagaagagcaaacaccccacctgcacccaggtgaaataaacagccatgttgctcacacaaagcttgtttggtggtctcttcacacggacacgcatgaaatttggtgccgtgactcggatcgggggaccgacctcccttgggagaatcaatcccctgtcctcctgctctttgctccgtgagaaagatccacctatgacctcaggtcctcagaccgaccagcccaagaaacattctcaccaatttcaaatccggagcttgctacacttgctggaaatctggccactgggccaaggaacgcccgcagcccgggattcctcctaagccgcgtcccatctgtgtgggaccccacttgaaaattcggacttgttcaactcaccttgggcaagccactcccagagcccctggaactctggcccaaggttctctgactgactccttcccagatcttctcggcttagcggctgaagactcacactgcctgattgcctcggaagccccctagaccatcacgcacgccgagcttcgggtaactctcacagtggaagaaggcaggaatgtcaggcca

SEQ ID NO: 25402 - DNA, 434 bp, Homo sapiens
  SIMILAR (129)..(428): 881254mologous to Homo sapiens R31181_2, partial protein,accession number AC006942,Smith-Waterman Score=463.
atggcagcattcccagcagccctaaaccgcccgacgcgagcgcgcgcgcggcgcaggcgcatttctgctcattccgcggcgtcggctgcggctgcagtggtggtggcgggtaccgcacggggtatggtccccgggtccgagggcccactgccgcgccgtgagacgaggtggccgactgggagattgtgattgagggtacggccaacctgggaccctacttcgaggggctccgcaagcactacctgctcccggccatcgagtattttaatggtggtcctcctgctgagacggacttcgggggagactatggggggacccagtacagcctcgtggtgttcaacacagtggactgcgctcccgagtcctacgtacaatgtcacgctcccaccagcagcgcctatgagtttgtcacctggctcgatggcattaagtga

SEQ ID NO: 25403 - DNA, 385 bp, Homo sapiens
  SIMILAR (145)..(225): 481254mologous to Homo sapiens Human secreted protein, SEQ ID NO: 4859,accession number G00778,Smith-Waterman Score=72.
caaccggtgaatgaaaaggacagcaacgataaaaacgctgccttggcaccaacatcatggcaccaacgaggccaaaacccagggaaaagctacagacttaagcacggcctcacaacgtataaaatcattcctccaaagtcagagatgcgatgttacgacagagataaatgctggagcccagcactcacacttaattatatttatgggcaaagtaaaaagaatcatgccttagactgattttggacctttgagacttttaccacatacagatggatgaaactacttactgatttaagatcttttgaattttagaaaaaacatatgaatcagatggaacaatctgaatgtgatatgctccatgatgctgtgtgttttggtagtaaga

SEQ ID NO: 25404 - DNA, 499 bp, Homo sapiens
  SIMILAR (25)..(216): 341254mologous to Arabidopsis thaliana putative proline-rich protein,accession number AL050399,Smith-Waterman Score=108.
ggtccatccctctcgctgggcagcatctcaggggtgtccgtgaagtcggagatgaagaagcgccgagcccctcctcctccaggttcagggccacctgtgcaagacaaggcatcggaaaaggtatctcttgggtcacagattgatttacagaagaagaagcggcgagcgccagctccccctccaccacagccaccaccaccgagtcccctgatccccaaccgcactgaggataaggaggagaacaggaagagcacgatggtttattgctgtgcgtcattccctactcaggccaagcgcttctgatggacgggcctcttcctgacctcggacctttcccagtgtctcttctgccctggctctgattttcctgttggtcttcctcctttcaggataaaagggctcattgtatacccagaatttacttcctttggggtttacatataaatgcattaataacagagatttgtttgattgaggtttatatttttttgaaggaggc

SEQ ID NO: 25405 - DNA, 521 bp, Homo sapiens
  SIMILAR (169)..(489): 281254mologous to Homo sapiens Human Protease and associated protein-2 (PPRG-2),accession number Y70008,Smith-Waterman Score=87.
gactctcattacgccaagcttggcacgaggaacagacagtatttggccacccagcatttttgggccgaagaaaaaattcaaacctgttgtccagagaccaggcccaaaagacacatccctgcactctgccctgatggaagccatccactctgcgggagggaaggacagactacgcaagacggcagaacacaccggggagggcaggccagcgaaactgtcctacacggaggcagagggcgaacgatctgcactgctggcagctatccgcgggcacagcggcacctgcagcctgaggaaggctctctctgcaccaaggacggcctccaggttcagcacgggcaccctcagcaacaccgcagacgcaaggcaagccttgatggacgccatccgctccggcacaggggctgcgagactgagaaaggtgcccttgctcgtgtgaatgaacagaggccagagaattgcagaaacccacctgtaatatgcccacaggcgtcactcaaggagtctgcatagccaggaac

SEQ ID NO: 25406 - DNA, 1497 bp, Homo sapiens; identical to SEQ ID NO: 22989
  SIMILAR (1084)..(1284): 1001254mologous to Homo sapiens KIAA0633; similar to mouse cordon-bleu gene product,accession number AC005535,Smith-Waterman Score=340.

SEQ ID NO: 25407 - DNA, 5355 bp, Homo sapiens
  SIMILAR (2073)..(3962): 981254mologous to Homo sapiens KIAA0633 protein,accession number AB014533,Smith-Waterman Score=3240.
  misc_feature (1)...(5355): n = a,t,c or g
agacgattccagccccttccgtccgccgcgctccgccgctgtcctccgccggcccgcgtgggaggacgatgggtcagcgcggaaaaagtgaatgagggcggcagcggtggcggcggtagccagcgcctgactcggcgggcccggagcaccgcccgcgtcccggcccccggcaccatggacgcgccgcgcgcctcggcggccaagcccccgaccgggaggaagatgaaggctcgtgctcccccacctcctggaaaggctgccactctgcatgtgcacagtgaccagaagcccccccacgatggggccctcgggtcgcagcagaacttggttcgcatgaaggaggcgctgagggccagcaccatggacgtcaccgtggtcctgcctagcgggctggagaagaggagcgtgctcaatgggagccatgcgatgatggacctactggttgaactttgccttcagaaccacctgaatccatcccaccatgcccttgaaattcggtcttcagaaacccaacaacctttgagttttaagccaaatactttgattgggaccctgaatgtgcatactgtgtttctgaaagaaaaagttcctgaagagaaggttaagcctggtccccctaaggtgcctgagaaatctgtgcgtttggtcgtgaattacctgcggacacaaaaagctgttgtgcgtgtgagccctgaggttcctctccagaatattctcccagtcatttgtgcaaagtgtgaggtcagcccagagcacgtggttctcctcagggacaacattgccggagaggagctggagctgtccaagtccctgaacgagctcgggataaaggagctctacgcgtgggacaacagaagagaaacctttaggaaatcatcacttggcaatgatgagacagataaagagaagaaaaaatttctgggatttttcaaagttaataaaagaagcaatagtaagggctgtttaacgacccccaactccccatccatgcactcacgttctcttacgctgggtccatccctctcgctgggcagcatctcaggggtgtccgtgaagtcggagatgaagaagcgccgagcccctcctcctccaggttcagggccacctgtgcaagacaaggcatcggaaaaggtatctcttgggtcacagattgatttacagaagaagaagcggcgagcgccagctccccctccaccacagccaccaccaccgagtcccctgatccccaaccgcactgaggataaggaggagaacaggaagagcacgatggtaagcctgcccctggggtctggcagccactgcagcccggatggagccccgcaggtgctgtcagaggcggaggagaccgtgtcagttggcagctgttttgcgtcggaggacacgaccgaggactcaggagtgatgagttccccctcagacatcgtctctctggactcgcagcaggacagcatgaaatacaaagacaagtgggccacagaccaggaagactgcagtgaccaggacctcgctggaaccccagacctgggtccccagaagagccccttgtgggagaagaatggctctgagaactcacatctgagaactgaaaaagctgtcacagcctcaaatgatgaagaagacctattaattgctggagagttccgtaaaacccttgcagaacttgatgaagacctggaagaaatggaagacagctatgaaacagacaccagctccctcaccagctccatccatggtgcatccaaccactgcccacaggatgccatgatccctcacggcgacacagatgcaatcccagtaacattcataggggaagtttcagatgatcctgtggattcggggttgttttccaatagaaacaacaatgctgggtctttcgactcggagggtgttgccagcaggagagactccctggcgccacttcaagctgagcacagccagccccatgaaaaggcaagggaggaagtacctgccctgcaccccgcttcccatgacgtcggaaaaggaatccgtgtggccttatctaacatctctaaagatgggaatctaatggaaacggcgcccaggagaaacataattttgcgttgaatcttcacacagacaacctaaatgcaaaagtgaaagacaaagtgtatggctgtgctgacggggagaggactcaagccacagagagagtgaattcccaaccggtgaatgaaaaggacagcaacgataaaaacgctgccttggcaccaacatcatggcaccaacgaggccaaaacccagggaaaagctacagacttaagcacggcctcacaacgtataaaatcattcctccaaagtcagagatgcgatgttacgacagagatgtgtccctctccaccggagccattaagattgacgagctggggaacttggtgagtcctcacgccaccggcatcaggatcatttccctgtcttcgtctgtgcctgaagcagaatctcagcccattgggaaagtcagagagttctggaggtgcaactctgtggaaaaacacctgggccgaccctcagagagctctgccaggggacccccctccacccctgtgcccacgcagacgcagaatccagagagcagactccaagcagaccccaagccaatatcgccccagcagaagtctgcccaccatgagggccggaaccccctaggggaggggagaaaccagccccccaccatgggcatgggtcacgtgagggtgccagcagctcacaccacagaagtcacatttctcaagcctcagagaagaacgtccagccagtatgtggcctctgccattgccaagcgcataggagccccaaaagtccatgctgatgtggtgaggccacacggttatgccgagaagggttatgcaggcaaggcgccagtgctggctgcaccacctgtcactgtgaaagatgacaggacatccagcccacactcagagacacaaggatggaaggatggtgcccagtggccctgtgtcactcctcccaacaaccacggggaagatttggcagtgggagcccctcctaggggggaggtcattggcccacacaggaagttgtctactcaggacagacctgctgctatccacagaagctcctgtttctcactggttcagtcttcccagagggatcgtgtttctgtgggacagagctgtggtttcagtggaaagcaaagcacaagtagccaggaggccagctcagcatctgagcccagacgcgcacctgatggtacagacccaccccctccacacacatctgacactcaggcctgcagcagggagctggtcaatggctctgtgcgcgccccaggccacggcgagccttcccaccctccaggagggtctggcacagaaagccacattctcctagaaagagaggaaaagcccagtgtgttctctacagatggaaatgaaacagacagtatttggccacccagcatttttgggccgaagaaaaaattcaaacctgttgtccagagaccagtcccaaaagacacatccctgcactctgccctgatggaagccatccactctgcgggagggaaggacagactacgcaagacggcagaacacaccggggagggcaggccagcgaaactgtcctacacggaggcagagggcgaacgatctgcactgctggcagctatccgcgggcacagcggcacctgcagcctgaggaaggtggcatcctctgcttctgaggagctccagagcttccgagatgccgcactctctgctcagggctcggaaagtcctcttgctagaagaccttggtcttcttgttccccaccagccattcccccaccaccccctccaccctcccaggctctctctgcaccaaggacggcctccaggttcagcacgggcaccctcagcaacaccgcagacgcaaggcaagccttgatggacgccatccgctccggcacaggggctgcgagactgagaaaggtgcccttgctcgtgtgaatgaacagaggccagagaatttgcagaaacccacctgtaatatgcccacaggcgtcactcaaggagtatgcatagccaggaacatcaagttttggtgttacttttcttgtctacaggccaaaatgcgcacagttgtttttcggtgtgttcctgtataacggcttgaaaggaaaggagaagatgctgtgtcgctgccgcagcctcgtgtgccccaaggaaatgtgttttgccctctgaatatccttaagttgcctaataaacgattccttgttggcaggttaatggggactattaaatgctgggagcccagcacttcacacttaattatatttatgggggcaaagtaaaaaggaatcatgccttaggactgattttngggacctttgagacttttaccacatacagatggatgaaactacttactgatttaagatcttttgaattttagaaaaaacatatgaatcagatggaacaatctgaatgtgatatgctccatgatgctgtgtgttttggtagtaagaaaaaaaaattgggaggcttttcaaaggtggctttgttaggtagtaaaactgctggattcttcttcctcaaatatttggggctaacacttcacagagggtcacagtccatgatctgaccaactaagcttttaaaaatcaactattaccacccagaaaacagtcctacgtgatcatgtggccagggcatgcccgagtcctgcaagggtggcgggtggctgaggtcacaccaccactggagtggatgggcagtgccccacatggacagccattccccaggctatgaagtgaccataggccctnccccccacggtgccctgtgtacggagccctgatgaccttcactgggagcccttcctggaatcctgcagagggtcaaggagcagggatgttggatgcccacctgtcaagagttcagatccaaagttgcgctgagagcgtcacaattttggttcagcccttgacgcgtttgtcccaacagctcattggctccctttggtnaggatatcgtggtcgttcgtcaacgatggtgcccagtcaccaatattttataatgaggtcctaacctacagcagttagttttttcatatatatcgtctaaaacattttgttatattggaaaaaaagtaataggaaatcaaggatgtgttgatgaaataaaatgtgtatctgagtgggaaaacaagtatggtgagggtcactttaatgtttcacagcgatctcagatctaggcctcaggtagaatggaagctgttctgcattcactgattaacgttgctaaactcttggtgaggcacgagctaccagccaattgctcttcatcacagctatctgtcttttagtgccgacaaataaaagaaaatcaaatctta

SEQ ID NO: 25408 - DNA, 415 bp, Homo sapiens
  SIMILAR (1)..(387): 1001254mologous to Homo sapiens c380A1.1a (novel protein),accession number Z97653,Smith-Waterman Score=678.
cttgacctctcgtggtgcccacgcatcaccgacatggcgctggagtacgtggcctgcgacctgcaccgcctagaggagctcgtgctcgacaggtgtgtacgcatcacggacactggcctcagctatctgtccaccatgtcgtccctccgcagcctctacctgcgatggtgctgccaggtgcaagacttcgggctgaagcacctcctggccctggggagtttgcgcctcctgtctctggcaggctgcccgctgctcaccaccaccgggctgtcgggcctggtgcagctgcaggagctggaggagctggagctgaccaactgccccggggccacccccgagctcttcaagtatttctcgcagcacctgccccgctgcctcgtcattgagtagcgcgaggcccccgccccggtcgcgc

SEQ ID NO: 25409 - DNA, 1750 bp, Homo sapiens
  SIMILAR (618)..(755): 931254mologous to Homo sapiens c380A1.1b (novel protein),accession number Z97653,Smith-Waterman Score=207.
atggtgctggcgcgggtggcgcgccggccggcggggtctgcggaggcccaggcgtccctggcggggaaggcggcgcttccggagcgtgccaggaagatgtcgagcccgggcatcgacggcgaccccaagcctccatgcttgcctcgaaacggtctggtgaagctgccgggccagcccaacggcctgggtgcggccagcatcaccaagggcacgccagccaccaagaaccgcccctgccagccaccacccccacccaccctcccaccacccagcctggctgctccactgtcccgggctgccctggctgggggcccgtgcaccccggcaggtggaccagcctcagccttggcacctgggcacccagcggagcggccgccgctggccacggacgagaagatcctcaatgggctcttctggtatttctcggcctgcgagaagatgtgtgctggcccaggtgtgcaaggcctggcggcgcgtgctgtaccagcccaagttctgggcaggcctcacgccggtgctgcatgccaaggagctctacaacgtgctgcctggtggcgagaaggagttcgtgaacctgcagggttttaccgccagaggcttcgagggcttctgcctgggttggcgtctccgacctggacatctgtgagttcattgacaactatgcgctctccaagaagggtgtcaaagccatgagcctcaagcgctccaccatcacggacgcaggcctcgaggttatgcttgaaacagatgcagggcgtggtgcgtctggagctgtcgggctgcaacgactttcaccgaggccgggctgtggtccagcctgagcgcgcgcatcacctcgctgagcgtgagtgactgcatcaacgtggccgacgacgccatcgcggccatctcgcagctgctgcccaacctggcggagctgagcctgcaggcctaccacgtgacggacacggcgctggcctacttcacggcgcgccagggccacagcacgcacacgctgcgcctgctctcctgctgggagatcaccaaccacggcgtggtcaacgtggtgcacagcctgcccaacctcaccgcgctcagcctctcgggctgctccaaggtcaccgacgacggcgtggagctcgtggccgagaacctgcgcaagctgcgcagccttgacctctcgtggtgcccacgcatcaccgacatggcgctggagtacgtggcctgcgacctgcaccgcctagaggagctcgtgctcgacaggtgtgtacgcatcacggacactggcctcagctatctgtccaccatgtcgtccctccgcagcctctacctgcgatggtgctgccaggtgcaagacttcgggctgaagcacctcctggccctggggagtttgcgcctcctgtctctggcaggtgagacccccgtttctgctctgacgctggcagtgaccacccacccccacttagtccacccgcccaacctgcccggtccttgtgcaaactcacacccggcgcggacacacagtcccgggtccgaggcggaggaggagggaggcgcggcccggccgtccccgcccgagccctgggccgcgcgcactgagccgccctctgaccccgccgcaggctgcccgctgctcaccaccaccgggctgtcgggcctggtgcagctgcaggagctggaggagctggagctgaccaactgccccggggccacccccgagctcttcaagtatttctcgcagcacctgccccgctgcctcgtcattgagtag

SEQ ID NO: 25410 - DNA, 738 bp, Homo sapiens
  SIMILAR (121)..(696): 961254mologous to Cloning vector pSacBII SacB,accession number U09128,Smith-Waterman Score=972.
atgcggcgcctgactcgtcggctggttctgccagtcttcggggtgctctggatcacggtgctgctgttcttctgggtaaccaagaggaagttggaggtgccgacgggacctgaagtgcagacccctaaggtaaatgtgtcaaaatctgatgacacactcaaaatcaacggagtggaagatcacaaaacgatttttgacggagacggaaaaacatatcagaacgttcagcagtttatcgatgaaggcaattatacatccggcgacaaccatacgctgagagaccctcactacgttgaagacaaaggccataaataccttgtattcgaagccaacacgggaacagaaaacggataccaaggcgaagaatctttatttaacaaagcgtactacggcggcggcacgaacttcttccgtaaagaaagccagaagcttcagcagagcgctaaaaaacgcgatgctgagttagcgaacggcgccctcggtatcatagagttaaataatgattacacattgaaaaaagtaatgaagccgctgatcacttcaaacacggtaactgatgaaatcgagcgcgcgaatgttttcaaaatgaacggcaaatggtacttgttcactgattcacgcggttcaaaaatgacgatcgatggtattaactcaaacgatatttacatgcttgggcacccaagtttgggaaccactgatctaatcaataccttcaagtccaatcagttccacctgtag

SEQ ID NO: 25411 - DNA, 903 bp, Homo sapiens
  SIMILAR (118)..(684): 931254mologous to Cloning vector pBACe3.6 levansucrase,accession number U80929,Smith-Waterman Score=917.
atgcggcgcctgactcgtcggctggttctgccagtcttcggggtgctctggatcacggtgctgctgttcttctgggtaaccaagaggaagttggaggtgccgacgggacctgaagtgcagacccctaagaacgttcagcagtttatcgatgaaggcaattatacatccggcgacaaccatacgctgagagaccctcactacgttgaagacaaaggccataaataccttgtattcgaagccaacacgggaacagaaaacggataccaaggcgaagaatctttatttaacaaagcgtactacggcggcggcacgaacttcttccgtaaagaaagccagaagcttcagcagagcgctaaaaaacgcgatgctgagttagcgaacggcgccctcggtatcatagagttaaataatgattacacattgaaaaaagtaatgaagccgctgatcacttcaaacacggtaactgatgaaatcgagcgcgcgaatgttttcaaaatgaacggcaaatggtacttgttcactgattcacgcggttcaaaaatgacgatcgatggtattaactcaaacgatatttacatgcttggttatgtatcaaactctttaaccggcccttacaagccgctgaacaaaacaggggcttgtgctgcaaatggggtcttgatccaaaccgatgtgacattcactttactctcacttcgcagtggccgcagcccaaggcaacaatacctgcaggaagcggcggcggaagtcaggcatacgctggtaactttgaggcagctggtaacgctctatgatccagtcgatgggtaccgagctcgaattcgtaatcatggtcatagctgtttcctgtgggaaattgttatccgctcacaattccacacaacatacaagccggaagcataa

SEQ ID NO: 25412 - DNA, 1083 bp, Homo sapiens
  SIMILAR (5)..(463): 981254mologous to Homo sapiens unnamed protein product,accession number AK022753,Smith-Waterman Score=840.
gggccactgtgaggtgaacagggactggctccagcctctgttgcacagggtcaaagaggactacacgcgggtggtgtgccctgtgatcgatatcattaacctggacaccttcacctacatcgagtctgcctcggagctcagaggggggtttgactggagcctccacttccagtgggagcagctctccccagagcaaaaggctcggcgcctggaccccacggagcccatcaggactcctatcatagctggagggctcttcgtgatcgacaaagcttggtttgattacctggggaaatatgatatggacatggacatctggggtggggagaactttgaaatctccttccgagtgtggatgtgcgggggcagcctagagatcgtcccctgcagccgagtggggcacgtcttccggaagaagcacccctacgttttccctgatggaaatgccaacaccgtatataaagaacaccaagcggacagctgaagtgtggatggatgaatacaagcaatactattacgctgcccggccattcgccctggagaggcccttcgggaatgttgagagcagattggacctgaggaagaatctgcgctgccagagcttcaagtggtacctggagaatatctaccctgaactcagcatccccaaggagtcctccatccagaagggcaatatccgacagagacagaagtgcctgggaatctcaaagggcagaacaaccaagaaaccccaaacctaaagttgagcccctgtgccaaggtcaaaggcgaagatgtcaaagtcccagggtatggggcctttcacattacacccaggcagattccttccagggggagcttgttgccttgttcagttcattcacctttgtttccctgggcgccccagtggtttcttgttcctttgcaagaatgggagattgaccgacagcaatgggaccaaaatggtttcccacattcgaggcacataggcttcccacctctgcctcgatacagatatgttcggtgatggcaccgagaacggcaaggaaatcgtcgtcaacccatgtgagtcctcactcatgagccagcactgagacatggtga

SEQ ID NO: 25413 - DNA, 3275 bp, Homo sapiens
  SIMILAR (5)..(133): 1001254mologous to Homo sapiens unnamed protein product,accession number AK022753,Smith-Waterman Score=225.
gaccatgcggcgcctgactcgtcggctggttctgccagtcttcggggtgctctggatcacggtgctgctgttcttctgggtaaccaagaggaagttggaggtgccgacgggacctgaagtgcagacccctaagccattcggacgctgactgggacgacctgtgggaccagtttgatgagcggcggtatctgaatgccaaaaagtggcgcgttggtgacgacccctataagcctgtatgcttttcaaccagcgggagagtgagcggatctccagcaatccgggccatcccggacactcgccatctgagaaagaaggcaacaagtaattcactgagcaggcagcaattggcatcacctctaccgagaagctcctactgtggggtcactcctggccccatcgccattggcccactctggacttctggttccttgaggacacccaatcatattgatacagtctttgcccctggtctccctcaaccctggttccacctcaactacctacgagcaatgccctccctctcctctgctcctaaatgcacactgctggtgtattgcacggaccttccacccactagcatcatcatcaccttccacaacgaggcccgctccacgctgctcaggaccatccgcaggccaccagcagtatctacctctcagatggcaatgacagcagccgccctcactccagctcctctgcgcacatattctgtgcacctcagctgcagagcacatcagctggtgccgatgccacagagaaaaaaatatgatgaaacatgggtcagagagcacacgaaacacagcaaaatctcattgtttccatcatgcaggctacacttttcctgtctctcccgccgccgcatggctgtgggcagtgggaagttccaggtgatgggagatctaggggagccatttctcagagtaaggtggttaagaatttggactctggggccagattttcatggctctgcccttaacagtgtattaaaccgctacccctacgcatctgatccgggaaatcatattagtggatgacttcagcaatgaccctgatgactgtaaacagctcatcaagttgcccaaggtgaaatgcttgcgcaataatgaacggcaaggtctggtccggtcccggattcggggcgctgacatcgcccagggcaccactctgactttcctcgacagccactgtgaggtgaacagggactggctccagcctctgttgcacagggtcaaagaggactacacgcgggtggtgtgccctgtgatcgatatcattaacctggacaccttcacctacatcgagtctgcctcggagctcagaggggggtttgactggagcctccacttccagtgggagcagctctccccagagcagaaggctcggcgcctggaccccacggagcccatcaggactcctatcatagctggagggctcttcgtgatcgacaaagcttggtttgattacctggggaaatatgatatggacatggacatctggggtggggagaactttgaaatgatgactgtgcaggtgctgcagcctcgaagatcagaggccctaatctgtacctggaaggtccaccacctcacacgtgaatctacagcacttctgatagcacttgtccaagcccccttcacaggacctcaggctaagaagttgcagcagagcccctgccccgccatgctggcccctgaatatgctccagaggccagcgtgttggtttgcactgtttccctgctcacttataccaccctccaaagtgaaatctccttccgagtgtggatgtgcgggggcagcctagagatcgtcccctgcagccgagtggggcacgtcttccggaagaagcacccctacgttttccctgatggaaatgccaacacgtatataaagaacaccaagcggacagctgaagtgtggatggatgaatacaagcaatactattacgctgcccggccattcgccctggagaggcccttcgggaatgttgagagcagattggacctgaggaagaatctgcgctgccagagcttcaagtggtacctggagaatatctaccctgaactcaggtatccgtcctacctgttggagctttggctggctgaaagcagaggccctcagctggcttggtctggagaagagacagacaatgaccaactggatgagggcttttatgtatatcagagcatccccaaggagtcctccatccagaagggcaatatccgacagagacagaagtgcctggaatctcaaaggcagaacaaccaagaaaccccaaacctaaagttgagcccctgtgccaaggtcaaaggcgaagatgcaaagtcccagggatatagtctaccctcagaggacacgctcaaaggcgaagaagcaaagccgcagtgtgtgggctactggctgtggagcatgcaaggttgtcattgggaactggccaagaagaagaatctcttgccactctcccctgtcaaggtggagctgatctttggttttaatgtctacaacctggaagaagaatctcaggggcaggtatgggccttcacatacacccagcagatcctccaggaggagctgtgcctgtcagtcatcaccttgttccctggcgccccagtggttcttgtcctttgcaagaatggagatgaccgacagcaatggaccaaaactggttcccacatcgagcacatagcatcccacctctgcctcgatacagatatgttcggtgatggcaccgagaacggcaaggaaatcgtcgtcaacccatgtgagtcctcactcatgagccagcactgggacatggtgagctcttgaggacccctgccagaagcagccaagggcccatggggtggtgcttcccctggacccagaaccagactggaaactggggcagcaagcaagcctgcaaccaccctcagacatccctggactggggagggtgggaggcagagccccccccaggacaggagcaacttgtctccaggggaggacagaggaaaacatcacaagccaatgggggctcaaagacaaatccccacatgttctcaaggccgttaagttcccagtcctggccagtcattccctgattgggatctggagacagaaacctaatgggaagtgtttattggtccctttcctacaaaggaagcagtctttggaggccagaaagaaaagccttctttttccctaggccagggctacattgagagatgaagaatggaggttgtttcccaaagaaataaagagaaacttagaagttgtctctggaaaaaaaaaaaaaaaaa

SEQ ID NO: 25414 - DNA, 2442 bp, Homo sapiens
  SIMILAR (973)..(1089): 431254mologous to Mus musculus SPR2D protein,accession number AJ005562,Smith-Waterman Score=73.
atgcctttgaaaaagaaaggtgatgagcctcaaatggaaaaatacattcaagaaaggtcaatgctagctccccccagctgctctgaccaccgagacacccactcccgctgcatccctcacatccaaaggctcttccagtgccctctgggaccttggttccagggtgagcaacgcaaccaagctcgtggggagggcggagcactccatcctcttcctgtgaccgcagggaccgtggctctcccgggtgctgcccagcctaccccagctcggggcaatgtcactgagagccttcaaggggcaacagtgaagctagtttgcaagaaaacgtctttcatcttcatctattgccagcacccagcacagtgcctggcacttgcctgtgaccatgaatgcattgatctgtgcacacatgtggcatccacatcgctctgcctacgtggttaccaaggcatgaagagaacaatagagagagccctgacagcaaccctggctcagggcacagctgtacccccatttccttcagatgtcccctcacagaaggatgccgctgtcagaggaaagggggatgggagtgaatgggagaggactctgaccatgaagcgctctaatctaaactcggagaaaattctcccagccattcttctgctcacagaatttccgcggcaccagtctccctgcagctttgacaaaccacatcacccaaacacccttggctgctggcttccaactgtattagagacgaggggaggcactaatggccagtcaagtgggaagagagaagctacactgtgtccttgtcccctgcttggactccccatctcagaagaagactgtgtccctccagcactcctgcttccaccgagaggctcttcctccagggctccaactatcatgggccccagtccctcagtttcctccccttggcccttcatccttggggataccagctccccactggtgctaaacttggggtgcctcccatctcttgtttgtccacctacctctgcccacacttctgaagtagccccttctttaaagtctccagcagaaccatctccaccagcccgactgcccagatcccaccagcctgctctgtccagagagatgagacattcggactattcagtgtccgttcatgccatctgctgggatcatgatttctatactctggtcacacattacatgaataatacttcccccatttcctcaaaaagatcctcagacaagctcaacccccatgtgctagtagttcaggattctatgaccatcctaagtttacacaaccacttggccttggctggccaagacatgatggtgtgggagcctaggaagacccttcagagacggcagcaaccagactcctcttctcacagtccccctccagctctggtggagtgtcacccactagagccagagccccttgtggcaggaatcatgtactcattttcaggtctccagggagttgggttaagggacagggctgtggacgaaacaaacaaaagaaatgaaaaacgaacattagaaatgtcaagagtagaagcactttcttcctttgagaattcagaatttgggtgcccaccatcaattaataccagggaaataacaggaaattctctggaggggaatgtgaaaaaaggagtcagtgttcctaattgcactgcccctggaaaacgcacggagaagaaatacagcaaaatacatgagatggtgaaacactctggcaactgcaagcggacagatgggatctgggaggaatatggatggagctggaggctacatatgaaaaaggtttttcccggttttatgttagttaaaggaggggaagatgcagcaccagggacaaaagagataaagagtgtaagcggtatttttcaaagagggaaaaagaagcccagagggagaaaagaaaagaaccggaaaaaaagaggctttgcatttagcaaggaaaccaattttgtttatctcctcattttggtctgcctcattggcaaagttgtagtatggttgaccagtgcctgtgctgagaagcccaagccacatggggaggccacctgcagacattctgggccatcagccccgttgaacttccagccaacgagggtgatgcctatggcatcatttgtccagaacactctggctatctgtgctcccatgtggcaactgaaggctgcaaacatttccctggtcaattcccgcaccagctggcttccagttagcttctgccaatgtcagcactgtcaggagactggaaacagggatgaagatcccagggtccctgcaatgtcaatgagagcacaggcttctggcttccctaaggtggcagcagcaggagcaacagcagcagcagcagtactctccggtgcaatgcttctttgtgccatcccacttatgaccagaaatgggctccttcttcctgtcatactggtgaatggtccatcttga

SEQ ID NO: 25415 - DNA, 1272 bp, Homo sapiens
  SIMILAR (44)..(913): 971254mologous to Homo sapiens 5-HT1D-type serotonin receptor,accession number M89955,Smith-Waterman Score=1438.
agccaaatgtgtggaggtctgtgggaagagagagccacctagcatgtccccactgaaccagtcagcagaaggccttccccaggaggcctccaacagatccctgaatgccacagaaacctcagaggcttgggatcccaggaccctccaggcgctcaagatctcccttgccgtggtcctttccgtcatcacactggccacagtcctctccaatgcctttgtactcaccaccatcttactcaccaggaagctccacacccctgccaactacctgattggctccctggccaccaccgacctcttggtttccatcttggtaatgcccatcagcatcgcctataccatcacccacacctggaactttggccaaatcttgtgtgacatctggctgtcctctgacatcacgtgctgcacagcctccatcctgcatctctgtgtcattgctctggacaggtactgggcaatcacagatgccctggaatacagtaaacgcaggacggctggccacgcggccaccatgatcgccattgtctgggccatctccatctgcatctccatccccccgctcttctggcggcaggccaaggcccaggaggagatgtcggactgtctggtgaacacctctcagatctcctacaccatctactccacctgtggggccttctacattccctcggtgttgctcatcatcctatatggccggatctaccgggctgcccggaaccgcatcctgaatccaccctcactctatgggaagcgcttcaccacggcccacctcatcacaggctctgccgggtcctcgctctgctcgctcaactccagcctccatgaggggcactcgcactcggctggctcccctctctttttcaaccacggtaaaaataaagcttgtgacagtggccctgaaacgcaaagaggattctgctgctcgagaaaggaaagccactaaaatcctgggcatcattctgggggcctttatcatttgctggctgcccttcttcgtggtgtctctggtcctccccatctgccgggactcctggtggatccacccggcgctctttgactttttcacctgggtaggctatttaaactccctcatcaatccaataatctacactgtgtttaacgaagagtttcggcaagcttttcagaaaattgtccctttccggaaggcctcctagttttattcggtgatgactcttgttattttttgtgtcctgtaacctcatcgggattgtctttttttttttttaattattttctgagacttggatt

SEQ ID NO: 25416 - DNA, 441 bp, Homo sapiens
  SIMILAR (171)..(10): 291254mologous to Erwinia herbicola gene products,accession number L08484,Smith-Waterman Score=62.
ttctgaaaaacaaaaaaaacatttatttctgtaaactgtctgagtgcagagatgttctttacaatcccaatacagtacagatttcttccccaaaacgaaatgagcaaggaaaaacagaaaaagagctatatcaaatgtgctcatgaagaaccaagccaatctcacctttctttaaaaacaaaacaaaacgatccttttgattgtgtggtgcagacgcaggactgaagccacaggcttttggggtgctgtgagcccagggctttgctcagctcacagctagcgcggcgggcagagcaacccttcggcccaagccatcctcgcagcttgcacagaagcttcctgaacctaagggatccgtgcagcaaagccactgccaggtaagttttaaggcaaattttatctcttcttattcagtctgagccggacctaaccttctcacca

SEQ ID NO: 25417 - DNA, 1918 bp, Homo sapiens
  SIMILAR (541)..(591): 821254mologous to Homo sapiens deduced protein product shows significant homology to coactosin from Dictyostelium discoideum,accession number L54057,Smith-Waterman Score=71.
agtggaagccgccgccgcgctgggagctcgcaggcgccgcgtagccgtcgccaccgccgccagcccgtgcgccctcggcgcgtacccgccgcgctcccatccccgccgccggccaggggcgcgctcggccgccccggacagtgtcccgctgcggctccgcggcgatggccaccaagatcgacaaagaggcttgccgggcggcgtacaacctggtgcgcgacgacggctcggccgtcatctgggtgactattaaatatgacggctccaccatcgtccccggcgagcagggagcggagtaccagcacttcatccagcagtgcacagatgacgtccggttgtttgccttcgtgcgcttcaccaccggggatgccatgagcaagaggtccaagtttgccctcatcacgtggatcggtgagaacgtcagcgagctgcagcgcgccaaaaccgggacggacgagaccctggtgaaggaggtcgtacagaatttcgctaatgagtatgtgatcagtgatcggaaggagctggaggaagaattcatcaagagccgagctgaagaaggcggtgggagccaattacgacgcccagacggagtaaccccagcccccgccacaccaccccttgccaaagtcatctgcctgctccccgggggagaggaccggccggcctcagctactagcccaccagcccaccagggagaagagaagccatgagaggcagcgcccgccaccctgtgtccacagcccccaccttcccgcttcccttagaaccctgccgtgtcctatctcatgacgctcatgggaacctctttctttgatcttctttttcttttctcccccctcttttttgttctaaagaaaatgtcattttgatgcaaggtcctgcctgccatcagatccgaggtgcctcctgcaagtgaccccttttcctggcatttctcttccacgcgacgaggtctgcctagtgagatctgcatgacctcacgttgctttccagagcccgggcctattttgccatctcagttttcctgggaccctgctttcctggtgtaaccactgagggggcagctggggccagggagctgtgcccggttgcctggcagccttcataagcacacacgtccattccctactaagggcccagacctcctgggtatctgtgccccgggcttccctcatcccacctccatccggagttgcctaagatggcatggtccagcatagggcagggatttgttcgggtggtgagaaggttagttcccggctcagacttgaataagaaggagataaaattttgccttaaaacttacctgggcagtgggtttgctggcacgggtttgaaaaccacctgtttcccaccctctttgaccgaaattttccttgttgacacagaggaaggggcaaaggtctgagcccagagtttgacgggagggagtattttcagggtttcatttcagggggttcccaaagcgaccaagatcgtttagggagagaggcccaaggggtggggcctgggaaattaaaggaaagctggggaacggatccccttaggttcaggaagcttcctgtgcaagcctgccgaggatgggtttgggccgaaggtttgctctgccccgccgcgcctagctgtgagctgagcaaagccctgggctcacagcaccccaaaagcctggtggcttcagtcctgcgtttgcacccacacaatcaaaaggatcgttttgttttgtttttaaagaaaggtgagattggcttggttcttcatgagcacatttgatatagctctttttctgtttttccttgctcatttcgttttggggaagaaatccgttccgtaatggggattgaaaggaacatctctgcactcagacagtttacagaaataaatgttttttttgtttttcagaaaaaaaaaaaaaaaaaaa

SEQ ID NO: 25418 - DNA, 3944 bp, Homo sapiens; identical to SEQ ID NO: 17667
  SIMILAR (3093)..(3686): 961254mologous to Escherichia coli GAD alpha protein,accession number M84024,Smith-Waterman Score=1061.
  misc_feature (1)...(3944): n = a,t,c or g

SEQ ID NO: 25419 - DNA, 567 bp, Homo sapiens
  SIMILAR (21)..(239): 471254mologous to Escherichia coli similar to H. influenzae HI1439,accession number U82664,Smith-Waterman Score=146.
atgctggtgattctcaacgacatgaaatgtcgatttccgaaaatgtcggcgcgctcaacaaccatctggccagctgctttccggcgggaaaaagttttctctggcgtgccgccaattaaagagctgctcaaacgcaccgaaaacatattaaaggcattggtagtgcctggcacgttgtttgaagagctggctttaactacatcggcccggtggacggtcacgatgtgctggggcttatcccacgttaaagaacatgcgcgacctgtaaggcccgcagttcctgcatatatgaccaaacaaggtcgtggttatgaaccggcagaaaaagacccgatcatcttccacgccgtgcctaaattcgatccctccagcggttgtttgccgaaagtagcggcggtttgccgagctagtcgaaaatctttggcgactggttgtcgatacggcagcgaaagacaacaagctgatggcgattactccggcgatggtgaaggttccggcatggtcgagttttcacgtaaattcccggatcgctattcgacgtggcaattgccgagcaacacgcgctga

SEQ ID NO: 25420 - DNA, 744 bp, Homo sapiens
  SIMILAR (1)..(741): 911254mologous to Escherichia coli Hypothetical protein 126: PIR:Q3ECTC,accession number D10483,Smith-Waterman Score=1169.
atgctgattcttatttcacctgcgaaaacgcttgattaccaaagcccgttgaccaccacgcgctatacgctgccggagctgttagacaattcccagcagttgatccatgaggcgcggaaactgacgcctccgcagattagcacgctgatgcgcatcagcgacaaactggcgggtatcaacgccgctcgctttcatgactggcagccagatttcacgccggcgaatgcccgccaggcgattctggcgtttaaaggtgatgtctacaccggcttgcaggccgaaaccttcagcgaagacgatttcgattttgcccaacagcatttgcgaatgctttccggcttccttatcgtctggaaatggggatccgtcttgagaatgccccgagggaaagatctgtatcaattctggggagatatcatcaccaacaagctgaacgaggcgctcgcagcacaaggcgataatgtggtgattaatctggcgtcagatgagtattttaaatcggtgaagccgaagaaattgaatgccgagattatcaagccggtgttcctcgatgagaagaacggcaaatttaagatcatcagcttctacgctaagaaagcacgcggtctgatgagtcgtttcattattgaaaatcggctgaccaaaccagagcaactgactggttttaatagcgaaggttacttctttgatgaagattcctccagcaatggcgaactggtgtttaaacgctacgagcagcgttaa

SEQ ID NO: 25421 - DNA, 756 bp, Homo sapiens
  SIMILAR (756)..(22): 881254mologous to Escherichia coli K12 putative aldolase,accession number AE000464,Smith-Waterman Score=1126.
ctataggattggttctcccgatttcggtgcgcaaacgtcacgcagcatcagctcgttgtctggtaaaccgacgaccgatgcccagactgcacggcctgccaggaatcccgatgcgcccgccgtcattgccacgcgtacggcacgcgggaacagtttttcgtcgacaccggaagagaggatcacccatggcatattgatatggtcattcagacgttgtgaagcacagagaagctcttgttgcggacctttgccataaagcggcatttcaactttgtagaggtcagcgccactgtcgcccagctctttggcggcatcgatgatcgcttgttcgcgatcgaatttatcgccacgacgcggtgggcggacgactggctcaatgatgcttaccagaccgtgtgagtggcacagttcgttgaactctttcaccatatccagacgttgctgcgcatcttcatcactacgccacagcaccagcagttttaaggctttgccaccgtcttgtttgatctgtagcggattgattttgcggtcaataaccacgctatcgaccggaataccgttgccaggaatgaactcatcggcggcgacaatcatggcgcaacttttggcaatcgcgttttgctcaaccacctggcggtagcagaattgttgatctaccagaattcgccggaggcataaggcgagagggccggagcgggtgccccagccggcgggaaagatcatgcgcatggcttcgcgctgatcgagcgccagcat

SEQ ID NO: 25422 - DNA, 1908 bp, Homo sapiens
  SIMILAR (1908)..(1330): 961254mologous to Escherichia coli K12 aerotaxis sensor receptor, flavoprotein,accession number AE000389,Smith-Waterman Score=973.
ttagcggcgtttagccatcatttcgtcgacgatatcgccaagttgttgtaatttcggtgcgcaaacgtcacgcagcatcagctcgttgtctggtaaaccgacgaccgatgcccagactgcacggcctgccaggaatcccgatgcgcccgccgtcattgccacgcgtacggcacgcgggaacagtttttcgtcgacaccggaagagaggatcacccatggcatattgatatggtcattcagacgttgtgaagcacagagaagctcttgttgcggacctttgccataaagcggcatttcaactttgtagaggtcagcgccactgtcgcccagctctttggcggcatcgatgatcgcttgttcgcgatcgaatttatcgccacgacgcggtgggcggacgactggctcaatgatgcttaccagaccgtgtgagtggcacagttcgttgaactctttcaccatatccagacgttgctgcgcatcttcatcactacgccacagcaccagcagttttaaggctttgcaccgtcttgtttgatcccagcctgcgacttgcctggcactgtttcggcgctggtaattacagcgtttgtcgacggcagctttctgcgcattcgtactatgctgcatgcaggtggtgcgggttaattgtgctaatggccggttttctccgggcctaaatcgtggcggtttagattgttcgggctgttctccgttgcgggtggtgtttagtttcttggtgggaactcggacagtacgcgttttactggttgggggcacttcgcttgtgttgggcttgaatttcatgttcgcattgacgtttgctctcgtgttacacctggcggtctgggactcgtgttggttcttgcgcaaggaggtttggagttcttgaagcgcgtggttctttggttcaatgtgactgtgcttctctactgtgcatttaggcggttcttttcctttgctgaaggcgtcaactcgctgatgttcatgaaaaacctgacaatttctggcggattcctgctgctggcaattaccggtccgggcgcgtatagcatcgaccgcctgctgaataaaaagtggtaagcacgcgctatacttaacgataaaaaacgaggaggaagctcctcgtttttgcgcacgctgatcatgcgcaaactcaaaggactggaaccgtttatttccgtttccgtagtgaacccgctgatgctggaaaacggttggacctttgatgacagttttccgggagcaaccggagacacgctctatcaaaatgaatttctgtatcagctttatctccacgccgatccacactacagcggacgaggtactgttcccgtgcgcacgtaatgtcagccccagctcatcgctgcgattcatatgctcaacactattacgttctccggtcgccaccttctttgcctgatgggcaacattttctatcgggcgcacaatctgccattcaaaacaggcgcttgccaacaataccactaatgcacagaggatatacgtcaccaccggggcagcaacaaaccaaagcatggccgccagcaagataaacatcagggtcatcactccacgcgcccgccagcgaacgggtaatgaaggcagtttacccagccagcctttacgcaccaccaggcctttatgaatacgcttactggtacgtccggcgttcaacgctttgtacagctgttccaccgccgcgatctcttcatccgttgtccgggtacgaatcgacatatagccactgatttttccctcgcgcaccatcggtaccgcattggcccgcacccaataatggtcaccatttttgcggcgatttttcacgatgccgctccagggctccccttttttcagggtgaaccacatatccgcaaacgtcgcttttggcatatccgggtgacgcaccat

SEQ ID NO: 25423 - DNA, 473 bp, Homo sapiens
  SIMILAR (3)..(185): 1001254mologous to Escherichia coli succinate dehydrogenase small subunit,accession number J01619,Smith-Waterman Score=316.
gcttgttagcggcatatcgtttcctgattgatagccgtgataccgagactgacagccgcctcgacggtttgagtgatgcattcagcgtattccgctgtcacagcatcatgaactgcgtcagtgtatgtccgaaggggctgaacccgacgcgcgccatcggccatatcaagtcgatgttgttgcaactcccaccaaacgtcgaaaagttcgctggtgcgtacctcatccagtttgcgctcttccagccacttacgcacaatcgcctgatgttcttcggtgcatttgccgatttcctgcatgcagatcagaccttcccaggccagataaccgctgccgtcaaaggccagtttgttcgacgacggctacggttctttgccattatttcaccctctcgaacattaagttccatactccgtgaccaagacgatgaccacgttgatcaaatttcgtcaccggacgtgatgccggacgcg

SEQ ID NO: 25424 - DNA, 1602 bp, Homo sapiens
  SIMILAR (759)..(842): 671254mologous to Escherichia coli similar to H. influenzae HI1439,accession number U82664,Smith-Waterman Score=97.
atgagttttgatattgccaaatacccgaccctggcactggtcgactccacccaggagttacgactgttgccgaaagagagtttaccgaaactctgcgacgaactgcgccgactatttactcgaccagctctttggaaccgggaaacggcacaggcgggacaccaagacacattccgcgggggcaacgccacaaatccccgggtacacagaaaagggcgggtctgcacccgttcccgtggcgcggcgaaaggcgaatatgacgtattaagcgtcgggcattcatcaacctccatcagtgccggaattggtattgcggttgctgccgaaaaagaaggcaaaaatcgccgcaccgtctgtgtcattggcgatggcgcgattaccgcaggcatggcgtttgaagcgatgaatcacgcgggcgatatccgtcgtgatatgctggtgattgtcaacgacaatgaaatgtcgatttccgaaaatgtcggcgcgctcaacaaccatctggcacagctgctttccggtaagctttactcttcactgcgcgaaggcgggaaaaaagttttctctggcgtgccgccaattaaagagctgctcaaacgcaccgaagaacatattaaaggcatggtagtgcctggcacgttgtttgaagagctgggctttaactacatcggcccggtggacggtcacgatgtgctggggcttatcaccacgctaaagaacatgcgcgacctgaaaggcccgcagttcctgcatatcatgaccaaaaaagtcgtggttatgaaccggcagaaaaagacccgatcacattccacgccggttctcttcgctgtagttcaactggctgcgatagtggcccgacatcaggaagtaacgcacggtttccgcggtcataaccacggccggttgtaccccccggggaaaagcttcccccatcggatggcgggcgccctccccgggtggccccggagacccccggggcagcggcgtaaccgggggaatacccggatcggactagctcctacaggcccccaccagccccccaccccccccccccactcgccccccccaccaaccaccccctccaccccccacccaaaccccagaaagacaggccagatcgtactggtaagcacacattacatgcggcgtgccttcacgggcaaccacggtgagggtttcttcaaactgcagcaggcgagctgccagttgcgcttcacgatcttcacggatgataaccccggcgcctgcacgccagttgtgcctccttcgctcacatttctcgctttacgcgaacacggacaatacacgcgtgtatgcatactgcatgtatggcgcggtattaccctcaaacgccagcatgttgtcccagtcgaaagatgtagataccgtggatgcgcgtttttggagagatccgcatatttcaccgcaccaataccaaccgcgttagccagtttttccagctcgtcggctggcatatccgggttcttttctgccaccagacggccgtgcacgttccagggcttcatccagcagatcggccagtttcactgtaccacccgcgcgggttttgaacggtttgccgtctttacccgagctattcaatga

SEQ ID NO: 25425 - DNA, 1305 bp, Homo sapiens
  SIMILAR (567)..(13): 941254mologous to Escherichia coli No definition line found,accession number U00039,Smith-Waterman Score=941.
tcaaactaagaaagtcggaccgctgatctcccgcagattcggcagatcgacaacaggcggcagggcgtgattgatttcagcgatccccagccagtcggtgaggcacgggtcatattccccaagactcatgttgtagaggttggactcggaaatattgctctcttcacagcctttgacgccagttaaacaccagcgcaggtagtcgtgcgtcatcatcacgcagccaatttgcgcgtagcgttctggttcgtgctctttcagccagcgtaacagcgacaccggatgcccggtccacaaggtttgtcgggtcagcgggtagagtttttccgggatgccatcttcctgccagcgacgaacgatttccatcgcccggcggtccgaggacaaaatagcattcccgagcggtttgtcgtttttatccagcaaaaacaagccctttccctgtgcggagatgccgataccgacaatttgttccccgctaacaccagaatgagtaagcagggcgcgaatgacagccatgcagcattgccacagttctgccatatcgcgctctgcccagcctggctcatccacggctttcagcagatcagctccctgcggcacatctttaacaaacatgtcgcgaacctgattccccagtgcgtcgctaaaggctttgcggtcgagatcggtgatgacttccacgcccgcttctttcatgccgtcgatgattttttgctgatcttcagcaaccagtttgcgctgatagttacccgcttcttgtgcagatgaaactagcgcctgctggaactccggacttaagccatcaaacttcgctttgttgatcaccaccagaagcggggaataggcgtggtgcgtcagagaaaggacttctgcacttcgaaaaattttcctgtcttgtcgataagtacaaacgcgccatctattacatcgatcttgctgtacaagatctatgaacgctggcgcgtcgttgatggtgagcacaccttcaaagcaaaccgtttggatctttccacttttaccatcaccagaaaaatactgtggccgttccgatatgggatgcacatcttcaacgcgcgccgcattgcccaatttacgttgcaaccacgcgatttgttctgcttcttttattaacggaacccgacagcgtttaatattccctttactgtccaggcgcttttgattgtcgagaatagttttgatcggatttgcccgaagccgaaaatagagtggaacaccaacctgaagttgaaattcaacctgtttagttttaatgactgtcgcaacggcagttgaaacaggcat

SEQ ID NO: 25426 - DNA, 2974 bp, Homo sapiens
  SIMILAR (1788)..(1093): 911254mologous to Escherichia coli GlpX protein,accession number Z11767,Smith-Waterman Score=1044.
ttagtcctgggttgtttttctctgcgtcttgggggggagttgttctgtgggggggttgttcacggtgtgtggcgcggtgtagtggtctgtggtcttgtggtggcccttttggtggttgttttgtgttcgtcttggtgttgggtgtcgttgtgttgtggggtggagctttggttctgcgcggggccggcgcgtgggcctggggctctggcgcagtagcgctctttttatggtattgtggcccatgttggatgtgtgcagtgcggggccgtgcgtgccaggtgctttgggggagttgttgcttggtttggggggtctttcttgttgctttgtgatttcgggttgcccgtgattatttcgggccggtattttgcctggatctgtttgcactgtgggtatgtggacgggtaagtcgtcagctgtagtaggtcggcgtagcccgtgttgtgggcccaggtagtgagtcagtagatcgcggatagtcagacggtatacgtcatgtcgtgggtcgtgctccggggtgtttcgtagtacatatacgatatagtggtatatccacactgccagatagcacaatgtgaccgtgcgtatatcgtccagctgctttctggatgaccggtgaagcctgctctgcttatccgctggtatctgagtctgcctactttttatggcggcggtactggtgattatgctgatgaccccaggaatggcgatttcggtatacccgtacagggtgagggcaataatctttacaccaacgccccgtaaatcgtcagtagtgcaatcaccaccacgaccacgaacgaggttttcttcgccattgaaaccgctgccttcggcgtctccaccatgaccgatcaaggcatataccacacccgcaagacgaaccggcacccaatccagtacatgaagcacggcatcaatgccggactgcatttccgggtctttgcgatccagatagtggatggactgaatgcggcgaatggtgcgtgacttgccgcggatcagcagcgtttcggtagtcgcgatattgcctttgcggctaatgccttccagcagatcgcctttggtaataccggtggcagagaagatgacgttatcgctgcgcgccatatcgcccaggcgcaatactttaccggcttcgatgcccatcgctttgcagcgtgccagctccgccgcagaaactacgccttccggcgcgccaccaataccgtacagcacgtcaacttcgctgtctggcatacaggtgagaattgaggccgcaacgtcgccgtccggaatagcaaatacgcgtacgccgagttgctgcatttcagcgataacggcatcgtggcgtggtttagccagaatcgttaccgtcagttcgctcaacggtttgccgagcgccgccgctacattgcgcaggttatccgccagcggcaggttcagatcaatggtgcctttggctcccggcccgacaatcagcttctccatatacatatccggcgcattgaggaagcagcctttatcgcctactgccagcaccgccagcgcgttagcctggcccatcgccgtcatgcgcgtgccttcaatcggatcaacagcaatatctaccgcgtcgccgcgaccagtaccgactttttcaccaatgtagagcatcggtgcttcgtcgatttcaccttcaccaatgacgatggtgccgtcaatgttgacctggttgagcataatacgcatggcgtttaccgccgcgccgtccgcggtgtttttatcgccgcgtcctaaccatttgtagccagccagcgccgctgattcgtgacgcgggttggcgcgggtggtggcgcgtccgtgtggtacgtgcgcggtggtttcgtggttatccgtgttggttattgtctgttggtttcgttgtggtattggcgtggcgattttcttgtcgctgggcgtcgcctgtctgtttgttggtggtgcgggtggtgtctggtagcccatggctcttgggtggataccactggggttgaatacgccgcgatgctgctgaccgtgaaataatgagctaaatattttgacgcacagggctgacattgtaatgatgatgatgagttgattataatgatgatgattgatgatgatgtggatgatgatgatgatgatgattgtgtactcatccagtttgcgctcttccagccacttacgcacaatcgcctgatgttcttcggtgcatttgccgatttcctgcatgcagatcagaccttcccaggccagataaccgctgccgtcaaaggccagtttgttcgggtcgataacctcgttaataaaatcatcaacgggtttatcaatctgttcttccgatgtaccttccgggaatcgccatgccaccgaaaatcctaattcctggaattcgtcgatgtgcatttttttacgcagacgacggctacggttctttgccattatttcaccctctcgaacattaagtcccatactccgtgaccaagacgatgaccacgttgttcaaatttcgtcaccggacgtgatgccggacgcggtacgtaatcattgctctctgacaggtttttataaccgtcaatagaagacatcacttcaagcatatgttccgcataaggttcccagtcggtcgccatatggaatacgccccccagctgcagtttgctttttaccagttcggcaaacggcacctgaacgatacggcgtttattatggcgcgctttgtgccacgggtcagggaaaaagagctgcaccatgcgcaatgaattgtcaggaatcattttatgcagcacttcaaccgcatcgtgacacatcacgcgcaggttgcttaaaccttcttcatgcgcagaagccaggcacgcaccaacgcccggtgaatgcacttcaatgccgaggaagtcctgctcagggcgatctttagccattgccaccagcgacgcccccatgccaaaaccaatctcaagcgtcaccggcgcttcacgggcaaaaagcgcgg

SEQ ID NO: 25427 - DNA, 2229 bp, Homo sapiens
  SIMILAR (645)..(376): 421254mologous to Escherichia coli FhiA,accession number D38582,Smith-Waterman Score=124.
gacggataaggcgttcacgccgcatccggcagttgtgcaccaatgctggatacttacatcaacgcccccataatcttcaactccagctcatccggcacttcgttatacgacagcacatgcagccccggcgcaaacaaccttgcataacgcgccagcaaagggcgcagctgcggtggcaccagcagcaccgggtctttccccgccgctttcatctgctctttcacctgtggcatcgtactctggaactggttgagcatattcggatcgaccggcacgctgtcgagcatcactttcccgccctgttgcgcctgattcaccacgttggtcagcagattttccagctcattattcagcgtatacaccgtcagctcctgcttgcgaacgaacggatgggtaatgctgcgccgcaatgccaggcgcacaatcggccgccagcagaatttgatctttcgtcaccgtgctactggcgaccagcaccgtggcgactgggaacaattcgcgcagggagaagccttcggcaccagagcccggaaccttcagcaacgggtgaatggggccgggcaaattctcgaaaaggcgcgcgaaaagccgcactgcgcgactactgtgacacacagcaaggaatcgaagaccaaacacgtagggaggaacaggggggcgaccacaacgaccacgagtgcagtggttcaagccgtggggcatctgaatttgaccgacagcgacacatcgcgttgactgcgacgctggaagccttaatcccgctgctgccgccggaatatgccagcggcgtgatttgggcgcagacctggatgcggcgtaaacgccttatccggcctaccgatccggtacccattgtaggcctgataagatgcgtcaatgcatctgcacttcagcgaccacttgcctgccagcccaactctgcccggactgcggcaccggttgtaggcctgataagacgcgtcaagccgtcgcatcacggccccaagggtcttatgtgctacggaattaaggcggaaacttccgggttcccgcgcttctgcgcctccgcgcccccgaggtgtcgtggacagtcattcatctttctgcccctccaaaagcaaaaacccgacgaagcgggtttttacgtaaaccaggtgaaactgaccgataagccgctttctttagggtatagcgtcgtggacagtcattcatcttactgcccctccaaaagcaaaaagccgccgaagcgggttttacgtaaatcaggtccagacttcccccgatcgccgcacacgacatcaggcacacgacacaaggcaacgcaacgacacacatcacagcgacatgcgatagcacaactacgagcactgcatcgacaatcgacggtgcaagcgacatcgatagggcaaccacgattgcaacaacaggaatcaacgacaacaagggtcgacaacaagttaaacaagcgatgccattgccaccacgactacaacaagggtcgacaatttgcaacaaacaaagacgcaaacagacgaaccaaaccagaatgtgagcgcaggaagcacccgtcggtgtcacgctcgtgggtccgtacgagcccgtcgctccaaggcagtaagtccccatttgaggggccctttgggtgggctggggatttcacccaaaaaggggaaatcggcccaaaaaggagggattttaagtgcatcaagccggtgttcctcgatgagaagaacggcaaatttaagatcatcagcttctacgctaagaaagcacgcggtctgatgagtcgtttcattattgaaaatcggctgaccaaaccagagcaactgactggttttaatagcgaaggttacttctttgatgaagattcctccagcaatggcgaactggtgtttaaacgctacgagcagcgttaagtttgcagtcaatgccggatgcggcgtgaacgccttatcctgcctacaaaagcatgcagattcaatatattgcagaattaacgtaggcctgataagacgcgccagcgtcgcatcaggcgctgaatgccggattgttacccggcatttgtcatttagcggtgatgtttgcctggaccatgaccgccgtgatgatcatgaggagctttcttatggtggcgcggcggtggcggcggtccgtgtaggtgccagcgattgcctcgccattcataatgttgtttccaccagccgtggtcgcgccagtgacctccatcacagtaatagccacgattatcac

SEQ ID NO: 25428 - DNA, 2505 bp, Homo sapiens; identical to SEQ ID NO: 25027
  SIMILAR (1270)..(1157): 781254mologous to Escherichia coli Xylulose kinase (EC 2.7.1.17) (Xylulokinase),accession number D90793,Smith-Waterman Score=154.

SEQ ID NO: 25429 - DNA, 3348 bp, Homo sapiens
  SIMILAR (2632)..(3327): 991254mologous to Escherichia coli Acyl-CoA dehydrogenase (EC 1.3.99.-),accession number D83536,Smith-Waterman Score=1202.
atggctgacactcgccctgaacgtcgctttacgcgcattgatcgtctcccgccctacgtttttaacatcaccgctgaactgaaaatggctgcgcgtcggcgcggcgaagatattatcgatttcagcatgggtaacccggacggtgcgactccgccgcatatcgtcgaaaaattatgtactgtggcccagcgcccggacacgcatggttactccacttcacgcggcattccgcggttacgtcgcgccatttcccgctggtatcaggatcgctacgacgttgaaatcgacccggaatcagaagccatcgtcactattggttcgaaagagggcctggcgcatctgatgctggcgacgctggatcatggtgacacggtgctggtgccgaatccaagttacccgatccatatttatggcgcggtgattgccggggcgcaagtacgctcagtgccgctagtggaaggtgtcaatttcttcaacgaactggagcgaagccttcgtgaaagtttccgagacggaaatgatatcatgggttcccgtggaaccaacgggcaagcgtggaactgggagttctccaacagtagggggctcgggaaagtacaagtgcggtggtcataccggcaatcgcgtccggcaatgcccgtgccgcagcagttctcactcagccagaacggcctggttaacgcagcagataactatcagaacgcgggctggcgcaccttttttgttgatcatcaggtgaagacgctgattagcgaggcgctggtgaataatcgggatttgcgcatggcgacgctgaaagtgcaggaggcacgggcgcaatatcgtctgaccgatgccgaacgctacccacagctcaatggcgagggcagtggcagctggagccgcgatttaccaccagcggttcaacgcaacaatcagaccctgaaagtcgttgagcaaatcgagaaatactacttcacccatgaaaaagacaacatcatgtcggtgtttgccaccgttggttctggccctgggggtaacgggcaaaacgtggcgcgaatgtttatccgcctgaaagactggagcgaacgcgacagtaagaccggcacctcgtttgccattatcgagcgtgcaacgaaggcgtttaaccaaattaaagaagctcgcgttatcgccagcagcccgccagcaattagcggtcttggtagttctgcaggttttgatatggagttgcaggaccacgctggagcgggtcacgatgcgctgatggcagcacgtaatcagttgctggcgctggcggcggaaaacccggagctaacccgtgtgcgccataacggcctcgacgacagtccgcagttgcagattgatatcgaccagcgtaaagctcaggcgctgggcgttgctatcgacgatattaacgacacactgcaaaccgcctggggttcgagctatgtgaatgactttatggatcgcggtcgcgtgaagaaagtctatgtgcaggcagctgcgccgtatcgcatgctgccagatgacatcaatctctggtatgtccgaaataaagatggcggcatggctcgccgcgtctggaacgctataacggttattctgcggttgagattgttggggaacccccccgggggttcgtaccgggacgggaaaggtatatgggacctttttgagaagttccccagcggtgtgctgagtgagggcatttttatgagaggttcggggcaggccgcgagagtggacgacgccaaacaaaggatgttacaaaagggaacatcggcccccagtcacgtaccaaagtcacggcgtgaacttcactgtggaacgacgcgactgcaacagtttttacgcctgaacaaccctaaagcgatctggtgtttgcggatctgcaccttcgcaacggtcatcggcggcaccttgctaagccttccgctgatgtggcaactggcagatatcataatggcctgcatggctattaccaatttgaccgccattttactgctctcgcctgtggttcataccattgccagtgattatctacgccagcgtaaactcggcgtgcgcccggtgtttgatccattgcgttatccggatatcggtcgccagctttctccggacgccccgttgaccaccacgcgctatacgctgccggagctgttagacaattcccagcagttgatccatgaggcgcggaaactgacgcctccgcagattagcacgctgatgcgcatcagcgacaaactggcgggtatcaacgccgctcgctttcatgactggcagccagatttcacgccggcgaatgacggaatagctccgagaataatccgactatacgcggtgaggctaaaagggtaccgattgttcctttcggactaccgcgtttcccggggtaaattcgagccgggggttagcgacgtcccggacacccgggtctcagcggacgaatcacgacccactggcgctaatctacgcattatcagcgcattcgtgggaaacaccgatgccaaacttaggccggagtcgtcgcgaggacccgtctgtatgagtcgaagagaggagtatcccaacttgaaagagccaattttccggacgcgtataacgccagaaaaatcggacgttaacggcgagaagactaccttatgcccaagcccggaagcgggttccgatgcgggcgcgattccggacaccgggattgtctgcatgggcgaatggcagggccaggaggtgctggggatgcgtctgacctggaacaaacgctacattacgctggcaccgattgcgaccgtgcttgggctggcgtttaaactctccgacccggaaaaattactcggcggtgcagaagatttaggcattacctgtgcgctgatcccaaccaccacgccgggcgtggaaattggtcgtcgccacttcccgctgaacgtaccgttccagaacggaccgacgcgcggtaaagatgtcttcgtgccgatcgattacatcatcggcgggccgaaaatggccgggcaaggctggcggatgctggtggagtgcctctcggtaggccgcggcatcaccctgccttccaactcaaccggcggcgtgaaatcggtagcgctggcaaccggcgcgtatgctcacattcgccgtcagttcaaaatctctattggtaagatggaagggattgaagagccgctggcgcgtattgccggtaatgcctacgtgatggatgctgcggcatcgctgattacctacggcattatgctcggcgaaaaacctgccgtgctgtcggctatcgttaagtatcactgtacccaccgcgggcagcagtcgattattgatgcgatggatattaccggcgggcgcaccgattgccatcaccgttga

SEQ ID NO: 25430 - DNA, 2548 bp, Homo sapiens
  SIMILAR (849)..(781): 341254mologous to Escherichia coli K12 putative heat shock protein,accession number AE000297,Smith-Waterman Score=41.
tcagatgttttcagccagctcttcatcatccaccatgttatgttgatcgtggtcgtaattgttatccattttatacttaacacgcttccaggggcgacacgcagtcatatgtcgcgcgcagattgtcttgcattcatcattgctcgccaagtcgtgcactaagtccagaatgtgctcatcgctctgttttgcaaactccaggctccggtcgcgcacgggacgaactgcggggagtgagccgcgcgggccgccgtagtcagctggagcggtgatccacagatgggtgcccatctcttctttgatttgccctttattgcctaaccagccaaaaccagtcggcactacggaatttttaccaaaatcaaagatgcggtcggtttcctgttccagccaacggttgtggcttagggtgttaaaccatttcattccttttatcctcatcttagcggcgtttagccatcatttcgtcgacgatatcgccaagttgttgtaatttcggtgcgcaaacgtcacgcagcatcagctcgttgtctggtaaaccgacgaccgatgcccagactgcacggcctgccaggaatcccgatgcgcccgccgtcattgccacgcgtacggcacgcgggaacagtttttcgtcgacaccggaagagaggatcacccatggcatattgatatggtcattcagacgttgtgaagcacagagaagctcttgttgcggacctttgccataaagcggcatttcaactttgtagaggtcagcgccactgtcgcccagctctttggcggcatcgatgatcgcttgttcgcgatcgaatttatcgccacgacgcggtgggcggacgactggctcaatgatgcttacaagaccgtgtgagtggcacagttcgttgaactctttcaccatatccagacgtttgcgcatcttcatcactgccatagcctcggatagagatgatattacaggcatgagccgttccagccagacgccaaccaacggcaatcgtttgattttgtcgccgtcttcgccggagagcagccccagatagcgccgctcggtttgccagtgttgttgcagcgatttcaccaggtcggtggtcagtgtggatttaccggtgccatcacacccgaccaccgcaatcagccccggaatgtagttgggcgctgatgtaatcgcttctggcagctgtgcctgcgcctgctggcgaatgtgcaacatcattgcgcagaccagatcctcaaacagcgctacctgctgcggttttaagccgctggcaccgaggaacgattttggtgatttcacaaaccacacttcttctggatcatcaatgtactgtgccagtgaggaaagaccgaactgcacgcttttcgccgtaacatcgatatcttcttcgcggttataacgaatcgcccgacgtaacagcgcctgcgtttcatcgtcgtctgccggaacatcatgatggcggtacagccattcgcttaccgcttcacgcgttggcgcgcaaagcattgaaggcagcagcgtgctgtcgttttccatttttagcaaatgcggtttaccgtcacgcatgaccgccactgaacagtttgctgtaccgtaatcaaaaccaataaacacgaaataatccccatgccggtgaagaaggggcgtgactttagcgaaatgttgccgtcgcgacaaccggaatatgaaagttaagcgcagcgtctgaataacgtttatgctgaaagcggatgaataaggagatgcgatgtataccctgaactggcagccgccgtatgagtgaagaagatcccggaggttctccaggtcgttggatatttggatcacgtttctggaaggcatactggtgaggacctgttggtagactgccagtgtctggtccatcttggataaggtcaggatggggtggagcccaggaatgaagtccaaaccggtgactttctgtttggaggagactgactggatcgtaccgttacggaaatcaacatgtgcagccgtgttatggttagcggcaccggtcacactgcaagatcctgtcgattgatactgaaggtctgaccgctgagcaaatccgccgcggaaaaaccgtagttgttgaaggttgtgaagagaaagtggcaccactggacgtgattcgtctcggcatgaagtttccgtcactcttgcagtaaacaaactattgtctggcaaatcatcaccaaagatcgccttaatcgccagcaatgactggacgcgcgctttcccttcggcactactttgtacagccttctgaataacaggtaacagtgggtcactgatttctatcggatttccctgttcatcaacaccaccgacataacgcatccaacccgcgacgcccagcgccagcagatcgaacttgctgtcatgcgccagatgccagcgaacagaatccaacatccgctgtggcaatttctggctaccatccatcgcaatctgccaggttcgatgacgtaacgccgggttgctatagcgtgcaattaatcggttagcgtaatcttgcaacattcctaaaagtgtagcgaatgccat

SEQ ID NO: 25431 - DNA, 2257 bp, Homo sapiens
  SIMILAR (1)..(891): 931254mologous to Escherichia coli Sensor kinase CitA,accession number D90702,Smith-Waterman Score=1393.
atggcaatgaatcaggcgaaaattattgcctccaatgacagtgtcatctctgcggtgaaaacgcgtgactacaaacggctggcgaccatcgctaacaaattacaaagagataccgattttgattatgtggtgattggggaccggcactcgatccgcctttaccatcctaatccggagaaaatgttcaccaaacagggcgcgctggagaaaggggagagctacttcattaccgggaaagggtcaatggggatggcgatgcgcgccaaaacgccaatctttgatgacgatggaaaagtcatcggcgtggtgtcgattggctacctggtgagtaaaatcgatagctggcgggctgagtttttattaccgatggcaggtgtgtttgtcgtgctgttagggattctgatgttgctgtcgtggttcctggccgcgcatatccgtcggcagatgatgggcatggagccaaagcaaatcgcacgcgtggtccgtcagcaagaggcgctgtttagttcggtttatgaagggctgattgcggtggatccgcatggttacattaccgccatcaatcgtaacgcaagaaagatgctggggctgagttcccccggacggcaatggttgggtaaacccattgttgaagtggtcaggcccgccgatttctttaccgaacagattgatgaaaaacgtcaggatgtggtggcgaactttaacggtctgagcgttattgccaaccgggaagctattcgttcaggtgatgatttgctgggggccattatcagctttcgtagtaaagacgaaatttccaccctcaatgcgcaactgacgcaaataaaacaatacgttggagagccttcgtacattgcgacacgagcatctcaattgatgtcgacgctcaattttccccacaactcgcggccgccgaaaagtcctggccctggcgtgggcggtcactgcattgctgttgatccgtggtttatcgtggcacagaacccccagcaggcgcggcttatccgtaccgcgcgcgaagtgaacgatcacaaaccgttctgggttatcgatcaggtgaaagcggcggtggctgattgcctggcggctaccgataaacgcgccagtgaactgaaaatcgcctgctttggtctggcgtttaaaccgaatattgatgacctgcgcgaaagcccggcgatggaaatcgctgaactgatcgcccagtggcatagcggcgaaactctggttgttgagcctaacatccaccagttgccgaaaaaactgaccgggctttgtactctggcgcagcttgacgaggcgctggcaacggcagacgtgctggtgatgctggtcgatcatagtcagttcaaagttatcaatggcgacaatgtccatcagcagagtctggcgctgatgagaaaaattctgataacaggtggtgccgggtttattggctcggcgctggtgcgttatatcatcaacgaaacgagcgacgcggtggtagtggtcgataagctgacctacgccgaacctgatggtaccgatttcaagtacttactggaaaacagcctgcgctacactgacatcgtcggcagctgcaaatctctgccgggcagcgcgacaaaacggttcccgcaaccgtgccagcggcggttccgggctggggctggcgatttgcctgaacattgttgaagcacataatggtcgcattattgctgcccattcgccttttggcgggcattacagtagagttaccgctggaacgggatttacagagagaagtatgaccgagttaccaatcgacgaaaacacaccgcgtattttgatcgtggaagatgaaccgaagctggggcagttgctcattgattatctgcgtgctgcgagctatgcgccgacgcttatcagccacggcgatcaggtactgccgtatgtgcgccagacaccaccggatctgatcctgttagatctgatgctccctggcaccgatggcctgacgctgtgccgggaaattcgtcgtttttctgacattccgatcgtgatggtgacggcaaaaatcgaagagatcgatcgcctgctggggctggagattggcgcagatgattatatctgtaagccgtacagcccacgggaagtggtagcgcgcgtcaaaccattttgcgccgttgcaaccgcagcgcgagtacacctgattaaagactttaaagcagcaaacccgaacggtttcctggtttatttctctgaccacggtgaagaggtttacgacacgccgccgcactaa

SEQ ID NO: 25432 - DNA, 2169 bp, Homo sapiens
  SIMILAR (607)..(1515): 821254mologous to Escherichia coli No definition line found,accession number U00039,Smith-Waterman Score=1320.
  misc_feature (1)...(2169): n = a,t,c or g
agcgacttcggtcgctcttttttttacctgataaaatgaagttaaaggactgcgtcatgattaagaaaatttttgcccttccggtcatcgaacaaatctcccctgtcctctcccgtcgtaaactggatgaactggacctcattgtggtcgatcatccccagcccccctctggagattacaccctacatccgttaccccccataattcgcgcaaaccgaccgaaccgtttccgaattaacgccggctgcacccgcactttcactctcagcaccccgatcaacgtctttcgccacaaaattcttcgaacgcaagagttcccttctctgacgcaccacgcttattccccgcttctggtggtgatcaacaaagcgaagtttgatggcttaagtccggagttccagcaggcgctagtttcatctgcacaagaagcgggtaactatcagcgcaaactggttgctgaagatcagcaaaaaatcatcgacggcatgaaagaagcgggcgtggaagtcatcaccgatctcgaccgcaaagcctttagcgacgcactggggaatcaggttcgcgacatgtttgttaaagatgtgccgcagggagctgatctgctgaaagccgtggatgagccaggctgggcagagcgcgatatggcagaactgtggcaatgctgcatggctgtcattcgcgccctgcttactcattctggtgttagcggggaacaaattgtcggtatcggcatctccgcacagggaaagggcttgttttttgctggataaaaacgacaaaccgatcgggaatgctattttgtcctcggaccgccgggcgatggaaatcgttcgtcgctggcaggaagatggcatcccggaaaaactctacccgctgacccgaccaaccttgtggaccgggcatccggtgtcgctgttacgctggctgaaagagcacgaaccagaacgctacgcgcaaattggctgcgtgatgatgacgcacgactacctgcgctggtgtttaactggcgtcaaaggctgtgaagagagcaatatttccgagtccaacctctacaacatgagtcttggggaatatgacccgtgcctcaccgactggctggggatcgctgaaatcaatcacgccctgccgcctgttgtcggatctgccgaaatctgcggggagatcaccgctcagacagccgccctgaccggtctgaaagcgggtacgcccgttgttggcggcctgtttgatgtggtttccaccgcactctgcgccgggatcgaagacgaatttaccctcaatgcggtgatggggacctgggcggtgaccagcggcataacccgcggtttacgtgacggtgaagcgcatccgtatgtctatggtcgctacgttaacgatggtgaatttatcgttcacgaagccagccctacctcttccggcaacctcgaatggtttaccgcacagtggggagaaatctcgtttgatgagatccatcaggccgttggcagcttgccgaagctgggggcgatctcttttcctgccgttcctgtacggcagcaacgccggaatccagataccangggttctaaggatgcaggctcagagggctggaaaattacaggggccgaagcggaggattttaaccacccaccgggccttaaataccccagcgggaacagatgtaacgaaaacagggcccaccagcgaagttcagaagacctctacgccgcttacaacggggtcccgcgcgcacaaaccgagattaccgccacgtggcgttcaagtgacacggccgggcatcagacaacgattgtttcgacagataaaggctactgtcagttactttcaccgacattacgtattcgtgattacttccagaaacgttggctggatgcgccatttatcgataaagaatttggcgttcaaccgcagcagttgcccgattactggggacttgcggggatcagcagttcaaaggtaccgggtgttgcgggaatcggaccaaaaagcgccacgcagctgctggtcgagtttcagagtctggaagggatatatgagaatctggatgcggttgccgaaaagtggcgcaaaaaattagaaacccataaagagatggcgtttctgtgccgcgatattgcccgcttacaaaccgatttgcatatcgacggcaatttacagcaattgcggttg

SEQ ID NO: 25433 - DNA, 3077 bp, Homo sapiens
  SIMILAR (3077)..(2226): 1001254mologous to Escherichia coli IS5 39.3kDa protein,accession number U70214,Smith-Waterman Score=1481.
ctatagggctctaaagtgatcgccgtggctgataagcgtcggcgcatagctcgcagcacgcagataatcaatgagcaactgccccaggttcggttcatcttccacgatcaaaatacgcggtgtgttttcgtcgattggtaactcggtcatacttctctctgtaaatcccgttccagcggtaactctactgtaatgcttaccccgccaaaaggcgaatgggcagcaataatgcgaccattatgtgcttcaacaatgttcaggcaaatcgccagccccagcccggaaccgccgctggcacggttgcgggaaccttcggtgcgataaaaacgttcaaacaatttttgtagctgatcgtcactgacacctggcgcactgtcggcaaaggtcaggcgcaccgttttgtcgcgctgcccggcagagatttgcaggctgccgccgctgtcagtgtagcgcaggctgttttccagtaagttattgaataactgcattaaacggtcggcgatcgccaaatacggtaatactgtcggtgctttttgataggcgagagcgccttcatcagacatcgacaactgatggagatcgtcaaccagtttggtcagtgtaccgacctccgcctgtaaagacgccaccgtctccggcgtgaatttacgcacgccatcctgaatggcttccagttcaccgcgcagcaccgcggcagtcagttgcgtattgcggcgtatggcccgcatgccgccaatgttgttggactgaccgaccagaccgatctcttctacaccatgaaagccgctctggggctgaaataaaaccgcgcccggcagtgaattttcgctgccgggtggtttttttgctttccattcatcaggagccagccaggttgggtgtgccgggcaatccttatagccaaatttttccaacgtttttgaatagatttcaattttgccgcttggcgtacccagcgcatttttcaccggatcggcgcggaaatcaccataacgaacgtactgttcgttcttctcgctgtggcgcatttcgatcagtttattttgctgccagaaggcattaaacattggcatagtgacgcgttgcgcacgggcacctttctgagcggcatcatagaaaaatttcagccacgccatttcatctttaccttcggtatagatctcttttccgccaggtttgagtaattccgcaagatcggcaaacacgtcaaaatcgttacgcgcttcaaattgcggagcaacagcctgcttcatcggcacaatatgctggttgctgtaatcaccggtcatcgtcaagtcattgcgctcaaacgatgtggtgatcgggaatacgatatctgcgtgtttggctgctgcggtccagtagcattcagaaacgacgatcatcttcggtttctgctctagatgcctgtggccgaggcaggggtcccgggcctcctgatcgcagagtgggccggtccagcctgggcggcactcgcacaccacgctgtccttctccacggagcggcacaggccgtgcttgcacacggtgcaggacttgcagcctggtgacacccccagggactgtggtgggagggccttgaagtcctgcagctcgttgttgatgcgcacctcatggatgcatccgtggaagccgcctagaggccggtccgtgccctggcgcaaggcagagaggccggtggaggtggggatgccatcaatattcacaaaggctttaccgcgtttaaccgacgcttcattttgccggaacttcgcgacgccgtgcgtaccgtcagcgccgatattgtttgcctgcaggaagtgatgggcgcgcacgaagttcatccgctgcatgtggaaaactggcccgatacctcgcactacgagtttctcgccgacactatgtggagcgattttgcctacggtcgcaatgccgtatacccggaagggcatcacggcaacgccgtactgtcgcgttatcccattgaacattatgagaatcgcgatgtttcggtcgatggtgcggaaaagcgcggcgtgctctactgccgcattgtgccgccgatgaccggaaaagcgattcatgtgatgtgcgtacatctgggcctgcgtgaggcgcaccgtcaggcgcagcttgcgatgctcgccgaatgggtgaatgagctgtgaagagtccccaataagcgcctctgcgtggcgactcttcccgctccgtgcgccccccgtcaccaaaatcatcataccgactcgtatcatttggtccgcccgaaacaggttggccagcgtgaataacatcgccagttggttatcgtttttcagcaaccccttgtatctggctttcacgaagccgaactgtcgcttgatgatgcgaaatgggtgctccaccctggcccggatgctggctttcatgtattcgatgttgatggccgttttgttcttgcgtggatgctgtttcaaggttcttaccttgccggggcgctcggcgatcagccagtccacatccacctcggccagctcctcgcgctgtggcgccccttggtagccggcatcggctgagacaaattgctcctctccatgcagcagattacccagctgattgaggtcatgctcgttggccgcggtggtgaccaggctgtgggtcaggccactcttggcatcgacaccaatgtgggccttcatgccaaagtgccactgattgcctttcttggtctgatgcatctccggatcgcgttgctgctctttgttcttggtcgagctgggtgcctcaatgatggtggcatcgaccaaggtgccttgagtcatcatgacgcctgcttcggccagccagcgattgatggtcttgaacaattggcgggccagttgatgctgctccagcaggtggcggaaattcatgatggtggtgcggtccggcaaggcgctatccagggataaccgggcaaacagacgcatggaggcgatttcgtacagagcatcttccatcgcgccatcgctcaggttgtaccaatgctgcatgcagtgaatgcgtagcatggtttccagcggataaggtcgccggccattaccagccttggggtaaaacggctcgatgacttccaccat

SEQ ID NO: 25434 - DNA, 2872 bp, Homo sapiens
  SIMILAR (2485)..(1508): 1001254mologous to Escherichia coli No definition line found,accession number U00039,Smith-Waterman Score=1656.
  misc_feature (1)...(2872): n = a,t,c or g
tcatcgagtaatctccggatatcgacccataacgggcaatgataaaaggagtaacctgtgaaaaagatgcaatctatcgtactcgcactttccctggttctggtcgctcccatggcagcacagggttagtcccgtcagtaaaattacagataggcgatcgtgataatcgtggctattactgggatggaggtcactggcgcgaccacggctggtggaaacaacattatgaatggcgaggcaatcgctggcacctacacggaccgccgccaccgccgcgccaccataagaaagctcctcatgatcatcacggcggtcatggtccaggcaaacatcaccgctaaatgacaaatgccgggtaacaatccggcattcagcgcctgatgcgacgcttgcgcgtcttatcaggcctacaaattcccgcaccatccgtagtacggataaggcgtttacgcgcatccggcaacggtgccgactgcctgatgcgacgcttgcgcgtcttatcagggctacaaattcgcgnacctggcgctccaatcgcctcgatgggcttctcctccagatacagctgcagatcctgggcgggcacaccgttgagcgtcacctcgtagtgcagattgcactcgttgtcaatggacatccaggccatgccgacggcatgtggattctgtgcatccgtgtgctcctgtcgcttcagcagaatgggttccgccgagtcccgagcatcggccactggacggggcactaggcggccacggatcaggctcgtctcatgctcggtggccacattaacgcccagttcgccggcatacagcgactcgaggaccttgggacccaacttctccacactaccaatggcctggttgaagttgaagctcggcgtcagatcctccagcttggccttccgcttgccctgctcctcaatcaaactgatgttgggcctatcccgggtgttcacgtgctccgtttcgatgttgtaggccagagatccatcggtgttcaagtagacccacgccaaaccgctgctcttggtcgaggattcggcactgtgcggcgccagcagggtctggaagatttcgcagctggctcgggtcacgatgtgtccctggatgcgcagatgtgggtacttcttggactccacggtcagcaggagtttgccacgcgacatcagtcgaagattctgtatggaaatgggcgacgacagctccaggacattgatctcggcaaagggtttgcgcacacgtggaatctcatcgaagatcaactccttccgttcatgactcataaaggtgataccccgatgaccattactccggcaactcatgcaatttcgataaatcctgccacgggtgaacaactttctgtgctgccgtgggctggcgctgaccatatccaaaacgcacttcatctggcggcagcaggctctcgcgaccgtggcgtagatgtcggcgcgaaaaaagagatctatcaactgattaaccagttcaaagccgatggcttgagcatcattctcatccacggctttcagcagatcagctccctgcggcacatctttaacaaacatgtcgcgaacctgattccccagtgcgtcgctaaaggctttgcggtcgagatcggtgatgacttccacgcccgcttctttcatgccgtcgatgattttttgctgatcttcagcaaccagtttgcgctgatagttacccgcttcttgtgcagatgaaactagcgcctgctggaactccggacttaagccatcaaacttcgctttgttgatcaccaccagaagcggggaataggcgtggtgcgtcagagaaaggaacttctgcacttcgaaaaattttgctgaccagacgacgttgatcgggtgttcctgagcgtcgatagtgcgggtttccagcccggtatagacttcggcaaacggcatcgggatcgggttagcgccaaagactttgaatgcggcgatattcatcgggctattgttggtgcggattttcagccctttcaggtcggcgggggttttaaccggtgcgcgcgagttggtgacatcgcgccagccgttttcccagtaggccagtactttcagtcctttaccttcaagtgaggctttcagatcatcaccgactttgccgtcgagcgttttatgcgcgtgagcggtatcgcggaacaggaaagggacatcaagcaagttcatcactggtgataacccggcaaagttattcgagccggacatttccatatcgatggtgccgccacgtacgccgctgatcatcgcctgcgcgttaccgagagtgctgtccgggaacagttttaatttcagctcgcctttggttctctcctgcaataaatcattgaattttttcgccgcaatatgttgcgagtcggtttgtgatgtttcataaccgaaacgtaaagattgtgccgccagagaagatgtgctgaatgcagccaggccagcaatgaataatgcgtaggttacagagcgtaatttcataatattttcctttaagctgctgggctgcgagctactgttctgcaccaatgcggcaggctcgctgcgtccggaagtgggggcaggcagcgatgcggaataccgcgcactgcgttcagttgttgccccataccgcccggtatcgcgcaacgtgttgttcagttcatccagcagtcgctcaagacgaaaagccagctgttgccctgcatctgtaagcaccacttcacgcgtggttctgtccagaaggcgaacaccagtatgattttccagttccttcacactgtgactcactgccgactggctcaggccgatacgctctcctgcacgactaaaacttttctcctgcgctactgtgacgaaaacctttaattgttttaaagaataattcat

SEQ ID NO: 25435 - DNA, 2768 bp, Homo sapiens
  SIMILAR (750)..(1082): 1001254mologous to Escherichia coli Hypothetical protein 126: PIR:Q3ECTC,accession number D10483,Smith-Waterman Score=562.
atgatcgccattctaagtggcctgagatgctccatcgttgccaactacatttatgccgaaaacaatctcttctggttacgcctgaacaaccctaaagcgatctggtgtttgcggatctgcaccttcgcaacggtcatcggcggcaccttgctaagccttccgctgatgtggcaactggcagatatcataatggcctgcatggctattaccaatttgaccgccattttactgctctcgcctgtggttcataccattgccagtgattatctacgccagcgtaaactcggcgtgcgcccggtgtttgatccattgcgttatccggatatcggtcgccagctttctccggacgccccgttgaccaccacgcgctatacgctgccggagctgttagacaattcccagcagttgatccatgaggcgcggaaactgacgcctccgcagattagcacgctgatgcgcatcagcgacaaactggcgggtatcaacgccgctcgctttcatgactggcagccagatttcacgccggcgaatgcccgccaggcgattctggcgtttaaaggtgatgtctacaccggcttgcaggccgaaaccttcagcgaagacgatttcgattttgcccaacagcatttgcgaatgctttccggcttgtatggcgtactccgcccgctcgatttaatgcagccttatcgtctggaaatggggatccgtcttgagaatgcccgagggaaagatctgtatcacattctgcgggagatatcatcaccaacaagctgaacgaggcgctcgcagcacaaggcgataatgtggtgattaatctggcgtcagatgagtattttaaatcggtgaagccgaagaaattgaatgccgagattatcaagccggtgttcctcgatgagaagaacggcaaatttaagatcatcagcttctacgctaagaaagcacgcggtctgatgagtcgtttcattattgaaaatcggctgaccaaaccagagcaactgactggttttaatagcgaaggttacttctttgatgaagattcctccagcaatggcgaactggtgtttaaacgctacgagcagcgcgctgaatgccggattgttacccggcatttgtcatttagcggtgatgtttgcctggaccatgaccgccgtgatgatcatgaggagctttcttatggtggcgcggcggtggcggcggtccttgttatcgaaccgaacaaactggcctttgacggcagcggttatctggcctgggaaggtctgatctgcatgcaggaaatcggcaaatgcaccgaagaacatcaggcgattgtgcgtaagtggctggaagagcgcaaactggatgagtttccggttgggccctttcccggggaaaaaaccaaccgggggttggttgcgaagcaggcgcccgtcgacacgcccgagaagcgcgcatcggtgatgagcgacaccgtcttgccccacgagatatgctttagcgcggagcgcgacaaaacggtgcgcctgacctttgccgacagtgcgccaggtgtcagtgacgatcagctacaaaaattgtttgaacgtttttatcgcaccgaaggttcccgcaaccgtgccagcggcggttccgggctggggctggcgatttgcctgaacattgttgaagcacataatggtcgcattattgctgcccattcgccttttggcgggcgtggtgataagccccagcacatcgtgaccgtccaccgggccgatgtagttaaagcccagctcttcaaacaacgtgccaggcactaccatgcctttaatatgttcttcggcataccagccgccatattttttatcacgcagtgcgccgttcatggctttgataccgtgatcaaccaacgagtaagcgccaggtcgacccatcgccgcagcaacggaataaaccggcgtttagccatcatttcgtcgacgatatcgccaagttgttgtaatttcggtgcgcaaacgtcacgcagcatcagctcgttgtctggtaaaccgacgaccgatgcccagactgcacggcctgccaggaatcccgatgcgcccgccgtcattgccacgcgtacggcacgcgggaacagtttttcgtcgacaccggaagagaggatcacccatggcatattgatatggtcattcagaccttgtgaagcacagagaagctctttgttgcggacctttgccataaaacggcatttcaacttttgtgaggcgctagtttcatctgcacaagaagcgggtaactatcagcgcaaactggttgctgaagatcagcaaaaaatcatcgacggcatgaaagaagcgggcgtggaagtcatcaccgatctcgaccgcaaagcctttagcgacgcactggggaatcaggttcgcgacatgtttgttaaagatgtgccgcagggagctgatctgctgaaagccgtggatgagccaggctgggcagagcgcgatatggcagaactgtggcaatgctgcatggctgtcattcgcgccctgcttactcattctggtgttagcggggaacaaattgtcggtatcggcatctccgcacagggaaagggcttgtttttgctggataaaaacgacaaaccgctcgggaatgctattttgtcctcggaccgccgggcgatggaaatcgttcgtcgctggcaggaagatggcatcccggaaaaactctacccgctgaccccgacaaaccttgtgggacccgggcatccgggggttgctgttacacctggcctgaaaagaggcacgaacccataa

SEQ ID NO: 25436 - DNA, 523 bp, Homo sapiens
atgaaaatgaagaccgcttaatcaggagtgataacggcattctatattaacaatgggttaattttacacattactatactacagaaaatctaattattgcaaaattgtaaaacagcgatggcttatagtttttttccccgccgtatagtttttttccctgccggttagtcctaattctaaaaataactatggtgaagcccaattcaatatgcatataaaagaatttcatccatcttaaatttttttttaatgttttaatattgaaatcactaacattacttcctcttttggctgcaggaagtaagtacagcctggaattcccctcctactggaaaactggacaacaagcaatacatgattatgatccctaggaaaagagaaacaaatacggtaagccatacctagcccaggagtaagaaatcttaattctaaacctttgcgcttgaaagtaattatcatactgcagtgaagggaaagggaacccagggtctagcaatcttgctgggttgaggagaaagagatt

SEQ ID NO: 25437 - DNA, 2655 bp, Homo sapiens
  SIMILAR (1746)..(1114): 991254mologous to Escherichia coli methionyl-tRNA formyltransferase,accession number X63666,Smith-Waterman Score= 1085.
tcaaaaatactttcgaaaccacgccagatcacgttctctctgcttataagagataacgccgccgtaatggaaggttctgaagtgggccgctactttgctgaccacgaaacgggccgctacgatttccatcaggaaccggcgcatattctgatgaaagtcgaaactcacaaccacccgacggcgatttctccgtggccgggcgcggcgaccggttccggcggtgaaatccgcgatgaaggtgccaccgggcgcggcgcaaagccgaaagcgggtctggttggtttctccgtttccaacctgcgaattcctggcttcgaacagccgtgggaagaagatttcggtaagcctgagcgcattgtcaccgatcccatcgacattgtgttttgttgtctcggcaccacgcggcgagaagcggggagcaaagaggcgtttattcatgccgattacacgctggtaggcttttgccccttctttggtggaaaaatccacgttcaacggctgattaaaccagcttgctgtcagtggttcactttgcagatcgctattgataaagctgaatttaccgctcaaatttttcagggtgctgtcgagtggtttgataaacagactgttattacgcagcgtcacttcacctttcgcggttaccagttcgccgttcagcgggatatcaagatgtaagcgagcattcacatcgccgtcgagctggagttcttgcagggtcgcacgcagagaatctttcagcggtgtctcatcaaagtaagggccaacggctttacccggacctttaatgtcagcgtcaatcagcagtttttcttttgagtagtcagggatcactgcggtaagattactcgcgcgcacgccgcccagattaacgccatcggttttcatccataaaccgtcgttaataaagtccagttcaatatcaaggttagttaatgcaggccagtccgggggcgtccggaagagggcgttaagaaaaccggtttctctctggtaacgctgaaaaagccgcgggagttcaaccacgatgacaacgatccggtggatatcctcatcaccatggcggcggtcgatgccaatactcaccaggaagtgggcatcatgcagatcgtcaaccggctgtccttcaatttccagccagctcattggccatggattgaaagcgcgaatgcagcgttcaagctgtgctgccgaaagtgaccagtcaatacgcgcttcttctttactcaacttctcggcgtaagtgacaagagtttcgtcctgaacttctggtttcgccgtgccgtctgccagttgtttcaacgtggtgataagcccttgtgggccaagctctgccagcttgtcgtacagcgtaccactggtatcttctgcagtaatcgggcaggagagcttatagagcatatcaccggtgtctaaaccgacatccatttgcataatggtcacaccagtttctgcatcacccgcccatagtgagcgttggattggtgcagcaccgcgccagcgtggcagcagtgaaccatgaacgttgatacagccaagacgcggcatctccagcactgctttcggcagaattaaaccataggcgacgacgaccataacatcagcctgcagttcggcgaccagttgctggttttcttgtggacgcagggaaacaggttgaaaaacgggcagacctttttcctcagccagaactttaaccgggctgggcatcagttttttaccgcgtcctgccggtcgctctggtctaagatcctgctgtctattggccagtctggtttgtgactgccactggactgaactctgtccccaagagtggtgtgccatcaactcagctccaatgggttgctgctctgtggagctggtgcttttggtcccaagagggtaggtgctgcatggttctggcataggtcgtgacggcttaccctgggctgaagctccagttcccgtggggtttaggcaggggctggttctggcacaggggttggtagtagcagctgctctgcaggtacgaggctttgagtaggctcctctttgctgtttctttgcttctgttgctcttgctgtgcgctgtcgtgccttgctggttggctcctctgtctgcttcttcggaatgaagggcgagcaggactcaacacgtatcttgtccactgtgtggggtccaactcttttcgcgcttttcgcgctttgtcccctcacggtatagctctctgacctctgggcgctttcggtttcctgtggtcctgtgggaccctgggcccctgtgttcgctctgtcttccccgctttggttgccttccggtgccattcgcctaacggtataggtcgcccggatagtgtgaactcctattctccttgtgccacatattgagcccactccatgaaagcgaataagtgagatactttcagactgagcacggagacagctctctgtggatagtgatgcttcttgtattctggcaagactcttttcacagaacttctcatactcctccatcttcccacagtcacacttattattttcactgacagcagatgcctgaacatcggcctgtttactgcgtttattatcgtggtaccacacataaccagataaccctaaatagcaaatcgcgacgccagccaggccgatcgcggtaatacgtgagaccattttcat

SEQ ID NO: 25438 - DNA, 4017 bp, Homo sapiens
  SIMILAR (1387)..(2124): 931254mologous to Escherichia coli 37KD protein, similar to YI22-ECOLI,accession number D85613,Smith-Waterman Score=1213.
atgaccaaaaaactccatattaaaacctggggctgtcagatgaacgagtacgattcatcgaagatggccgatctgctggatgccacccacggctatcaactgaccgacgtggcggaagaagcggatgtgctgctgctgaacacctgctcaatccgcgagaaggctcaggaaaaagtcttccatcagttgggtcgctggaaactgttaaaagagaagaatccagacctgattatcggcgtcggtggctgcgtggcatcgcaagaaggcgagcacattcgccagcgcgcccactatgtcgatattatttttgggccgcaaacgctgcaccgtctgccggagatgatcaactccgtgcgtggcgaccgcagcccggttgtagatatcagcttcccggaaatcgagaagtttgaccgtctaccggaaccgcgcgccgaagggccgaccgcgtttgtctccatcatggaaggctgcaataaatattgcacctactgcgtggtgccttacacccgtggtgaaaagttgaaccagtttattacttttaccggtcggattcagcgcactgttatgatgtttcccatagtcaacaatgccgccgcccgtaacaactgggcaacgttcggtgttacagtacccactttcgggttgggcatcaggccgcgcggacccagaaacctggcccagctggccaacaacgcgcattgcatccggagaagcaataacaacgtcaaagttcatttcgcctttcttgatctgccctttagcagcttcagcgtttgcaccttgggtaaatacggctacgcgaacggaacggccagtaccgtgcggcagtacagttgcaccacgtacgttctggtcagatttacgagcgtcgatgccgaggttaacagctacgtccacgctttctacgaatttagcagtcgccagctctttcagcagtgcgatagcttcgttgatgtcgtactgtttggttgcatcaactttctcgcggataacacgcatgcgcttggtcagtttagccatttcttagtcctccactaccaggcccatggaacgtgcagtaccttcgatggagcgagtcatcgcttcaatgtcggcaccagtcatgtcggcagctttggtctgcgcgatttcctgcagctgagcgcgggaaattttacccactttgtctttgttcggcttaccggaaccagacttgataccagccgcttttttcagcagaactgctgccggcggggtcttggtaacgaaagtgaaagaacggtcagcgtaaacggtgattactaccggaatcggcagacctttttcgatggaatcagtttttgcgttgaacgctttgcagaattccatgatgtttacgccctgctgacccagagccggacctactggcggactcggttgcacgtccttctcagacgaaccgatactggatggatggccgccgcagtcgtcacaactgatgatacggatgtgcttctccgtatacaccatgttatcggagagctgccaaggtatggttatcgtcgggtatgggcgctgcttcgcagacaggcagaacttgatggtatgcctgcgatcaatgccaaacgtgtttaccggatcatgcgccagaatgcgctgttgcttgagcgaaaacctgctgtaccgccatcgaaacgggcacatacaggcagagtggccgtgaaagaaagcaatcagcgatggtgctctgacgggttcgagttctgctgtgataacggagagagactgcgtgtcacgttcgcgctggactgctgtgatcgtgaggcactgcactgggcggtcactaccggcggcttcaacagtgaaacagtacaggacgtcatgctgggagcggtggaacgccgcttcggcaacgatcttccgtcgtctccagtggagtggctgacggataatggttcatgctaccgggctaatgaaacacgccagttcgcccggatgttgggacttgaaccgaagaacacggcggtgcggagtccggagagtaacggaatagcagagagcttcgtgaaaacgataaagcgtgactacatcagtatcatgcccaaaccagacgggttaacggcagcaaagaaccttgcagaggcgttagagcattgtaacgaatggcgggaccgacacgaaagctatgacatgattacaattcttgctcgaagggagcttcctgaggacaaagatgctatggggacaaggatccccgatattcgttacagcctgtcggatcgtattcgttattactggccgcatagtcggattaaaaatagcgtcgaaacgatgatggtgaatcttgaaggcgtggacatcccactgggcatgattagtcagtatcttcccaaacaatttgaacgcattcagtccggggaattatcagcaataccgcatcagctgattatggataaaatttatgatgttttgcgcgcctatcgctacggctatcaggtggatcaactgcaagccaacggcgtggcggcggcgtgccttaactcgacgcaaacccgcgaacagcaacttgaagtgatgacaggctgccgcaccgggcaaattcgtctgctttatatcgccccggaacgcctgatgctggataactttcttgagcatctggcgcactggaatccggtgttattagccgttgatgaagcgcactgtatctcccaatggggccacgatttccgcccggaatatgccgcgctcgttgcgccagcggttcccgacgctgccgtttatggcgctgaccgccacagccgacgacaccacgcgccaggatatcgtggggatcccaaagaggcgtttattcatgccgattacacgctggtagtggataccgcattaaccgggcggcgactgggcgcgcagcatatgttggtagtcagtgcgatgggtgccaataaagctatccagctgcacccgctggtttgtgcggcatataacgccgacttcgatggtgaccagatggctgttcacgtaccgctgacgctggaagcccagctggaagcgcgtgcgctgatgatgtctaccaacaacatcctgtccccggcgaacggcgaaccaatcatcgttccgtctcaggacgttgtactgggtctgtactacatgacccgtgactgtgttaacgccaaaggcgaaggcatggtgctgactggcccgaaagaagcagaacgtctgtatcgctctggtctggcttctctgcatgcgcgcgttaaagtgcgtatcaccgagtatgaaaaagatgctaacggtgaattagtagcgaaaaccagcctgaaagacacgactgttggccgtgccattctgtggatgattgtaccgaaaggtctgccttactccatcgtcaaccaggcgctgggtaaaaaagcaatctccaaaatgctgaacacctgctaccgcattctcgatttcatgtacaccgggcgttttcgccctatgcagcggcgttttctggtgcattctgttggtatcgatgacatggtcatcccggagaagaaacacgaaatcatctccgaggcagaagcagaagttgctgaaattcaggagcagttccagtctggtctggtgctcagggatcatttgtttgatgagatgttcttgcatagttctgaggaatcaccagcatcaggctcaaacatcacagacattgtgtatcgcttatcatctggcacctgcctctgctccacaatgcctcaaggcttattgacagtagtttatggagtatatcatgacaaaggcaaaggtaagaacgacaacaaacctctctctccggaaacctggcagcatctgaaaggcctggtgaccaggcagctttccggcaaacgtctgttcgttgtcgacgctttctgtggtgcgaacccggatactcgtctttccgtccgtttcatcaccgaagtggcctggcaggcgcattttgtcaaaaacatgtttattcgcccgagcgatgaagaactggcaggtttcaaaccagactcccgggagatgtaccgcgaggaaaccaatagaaaggagaagtga

SEQ ID NO: 25439 - DNA, 2388 bp, Homo sapiens
  SIMILAR (463)..(1008): 981254mologous to Escherichia coli NADPH-sulfite reductase hemoprotein component,accession number M23008,Smith-Waterman Score= 943.
atgcgcatcatggacattatgctgtcgattccttcgttggtactgacaatggcactggctgccgctctcgggccgagtttgtttaacgccatgctggctattgctattgtgcgaattcccttttatgtgcgcctggcgcgggggcaagcattagttgggggatcttcatccggcacgcagcccgatgctgggcagatcctcaactcgctgattaacagtattttgttaatcgatgacaacctggcgatccattacgccaaccctgccgcgcaacaactgctcgcccaaagctcccgcaaattgtttggtacaccgttaccggaactgttgagctacttctcattaaatatcgagctgatgcaagaaagtctggaggcggggcaaggttttaccgataacgaagtgacgctggtcatcgacgggcgctcgcatatcctttctgtgacggcccagctccccttccagacgtttcagttccacggcattctgaaaaagaacgtcaaaccggtgcaccagatgctgcactcggtcggtcttgatgcgctggcgacagctaacgacatgaaccgtaacgtactctgcacctcgaacccttacgagtcgcagctgcacgcggaagcgtacgagtgggcgaagaagatttctgagcatctgttgcctcgtacccgcgcgtatgcggagatctggctcgaccaggaaaaagtcgccactactgatgaagaaccgatcctcggccagacctacctgccgcgtaaattcaaaaccacggtagtgatcccgccacagaacgatatcgatctgcacgccaacgacatgaacttcgtggcgatcgccgaaaacggcaaactggtgggctttaacctgttggtgggcggtgggctttccatcgaacacggcaacaagaaaacctacgcccgcaccgcgagtgagtttggctatctgccgttggagcatacgctggcggtggccgaagccgtcgtgacaactcagcgtgactgggtggagcgtcgcgcggggatcaaatttgaaccgatccgtccatatgagttcaccggacgaggcgatcgtattggctgggttaagggcattgatgataactggcacctgacgctgtttatcgaaaatggtcgcatccttgattatccggcgcgtccgctgaaaaccggcctgctggagatcgcgaagatccacaaaggcgatttccgcattacggcgaaccagaatctgatcatcgccggtgtaccggaaagcgagaaagcgaagatcgagaagatcgccaaagagagcggcgacaaagcgcacctggttccggtgcgtctggaagaatatgccggattcgtcttcatcaacatggaccccaacgccaccagcgtagaagatcaattacccggcctgggcgcgaaagtgctggaagcctgcccggaagtccacgatctgaaactggcggcccgctttaccacccgcacgcctgccaactggaagaacattgtcgataactatctcgagtgctatcactgtggtccggcgcatccaggtttctccgactccgtacaggttgatcgttactggcacaccatgcacggtaactggacgctgcaatacggtttcgccaaaccgtccgaacagtcgtttaaatttgaagagggtacggatgcggcattccacggtttctggctgtggccgtgcacgatgctgaacgtcaccccgatcaaagggatgatgacggtcatttatgaattcccggtggattctgaaactaccctgcaaaactacgatatttacttcaccaatgaagagttaacggaagatttccgcgcccgcattgataaaatcaaggactggttaggagatggcgtcattgccgacttcgacgacaaacagatcgagcaagcgctggctgatgtcgacgtccccattgttggggttggcggctcgtatcaccttgcagaaagttacccacccgttcattacattgccaccgataactatgcgctggttgaaagcgcatttttgcatttaaaagagaaaggcgttaaccgctttgctttttatggtcttccggaatcaagcggcaaacgttgggccactgagcgcgaatatgcatttcgtcagcttgtcgccgaagaaaagtatcgcggagtggtttatcaggggttagaaaccgcgccagagaactggcaacacgcgcaaaatcggctggcagactggctacaaacgctaccaccgcaaaccgggattattgccgttactgacgcccgagcgcggcatattctgcaagtatgtgaacatctacatattcccgtaccggaaaaattatgcgtgattggagttatgaacagaagaacagtccgctctccgttcagagagtccctaaaaatatcaccctga

SEQ ID NO: 25440 - DNA, 1723 bp, Homo sapiens
  SIMILAR (121)..(474): 991254mologous to Escherichia coli Benzene 1,2-dioxygenase a subunit (EC 1.14.12.3) (P1 subunit),accession number D90823,Smith- Waterman Score=626.
  misc_feature (1)...(1723): n = a,t,c or g
atggtaaagcagctaaagctggtgtccttcttattacgacctggtgattctaaacaaggttatgataaacactcctccctgcaggttggactgatgatcccggtctgttcttgcatacggtttcgcaaaccgtccgaacagtcgtttaaatttgaagagggtacggatgcggcattccacggtttctggctgtggccgtgcacgatgctgaacgtcaccccgatcaaagggatgatgacggtcatttatgaattcccggtggattctgaaactaccctgcaaaactacgatatttacttcaccaatgaagagttaaccgacgagcaaaaatcgctgattgagtggtatcgcgatgtgttccgtccggaagatttacgtctggttgaaagcgtacagaaagggctgaaatcgcgtggctatcgtggtcaggggcgcatcatggccgacagtagcggtagtggcatttccgaacatgcctggtgcatgagccgtggagcgcaaggcagacaattctgtaaaggagcgaagatgagtcaggtactgattacaggcgcaacggggctggtgggcggtcacctgctgcggatgttgattaacgaaccgaaagttaacgccattgctgcgccgacgcgacgtccgttgggcgatatgcccggggtgtttaatccccatgatccgcaactgagtgacgcgttggcgcaggtcaccgatcccatcgacattgtgttttgttgtctcggcaccacgcggcgagaagcggggagcaaagaggcgtttattcatgccgattacacgctggtagtggataccgcattaaccgggcggcgactgggcgcgcagcatatgttggtagtcagtgcgatgggtgccaatgcccactcgccgtttttctataaccgcgtcaaaggggagatggaagaagcattaatcgcccagaactggccgaaattgaccattgctcgcccgtcgatgttactgggcgatcgtagcaaacagcggatgaacgaaacgctttttgcgccgcctgttccgtttgttaccaggaattatcctgcttgaggagctcaactggaaaacgtgggctgaaagatggaattcaatgttaggccccagagctgtgaaagtttttttcagtttggccttcttgccaggcacacttgagcctgcacaaattctgttccccacgcagagacagggaaagaaagctgccttgctgttaggactatggaagctagagatttacagcgacaataggcgctctccggaagtaagtacagcctggaattcccctcctactggaaaactggacaacaagcaatacatgattatgatccctaggaaaagagaaacaaatacgactacgaggggggcaagcaacgcgcgattagatccgccaagccgcaagggatataaggggcactacgaaacgatcgggcacgcgcttgagcacgacaaacagagccaggggtcatataacgtagagcacacgatcaagcggcaaacgccccgagtaaggcgatgcaccagtatcattgcgggtatttaccaagaactaggtgaaggagctncggatgaggtttcccgccgtaactggcgggctttttttgccccagaattttccctttcaacatcctgtaaacgaacaactgcgcccgaagcgcagtttacatcgttgactggtgaattctgggtaacaaggacaatggagagactaaccccatga

SEQ ID NO: 25441 - DNA, 1560 bp, Homo sapiens; identical to SEQ ID NO: 11055
  SIMILAR (747)..(418): 901254mologous to Escherichia coli K12 L- ribulokinase,accession number AE000116,Smith-Waterman Score=553.

SEQ ID NO: 25442 - DNA, 2118 bp, Homo sapiens; identical to SEQ ID NO: 24939
  SIMILAR (1)..(660): 971254mologous to synthetic construct aceB,accession number A31765,Smith-Waterman Score=1140.

SEQ ID NO: 25443 - DNA, 3960 bp, Homo sapiens
  SIMILAR (781)..(1476): 681254mologous to Escherichia coli uvrB,accession number X03678,Smith-Waterman Score=706.
atgattggttcgctactcggagactctagggatccccgataccgagctggaactcaacatattattgaaaaagcgcgcgtacactatgccatcacaaatagcggcgggatctcgcccaacgtggtccaggcgcaggcagaagtgctttatcttatccgcgcccccgaaatgaccgacgtgcagcatatttatgatcgggtcgccaaaatcgccgaaggtgcggcattgatgaccgaaaccacggttgaatgccgcttcgacaaagcctgttccagttatctcccgaatcgcaccttagaaaatgccatgtaccaggccctatcccattttggtaccccggaatggaactccgaagaactggcttttgcgaaacaaattcagcgtacgctcacctccaacgatcggcaaaacagtctgaataatatcgccgcaaccggtggcgaaaacggcaaggtttttgcactacgtcatcgtgaaacggtactggcgaatgaagtcgctccatatgccgccaccgataacgtgcttgcggcatcgactgatgtcggcgacgtcagttggaaactgcctgttgcccagtgtttcagcccctgttttgccgtcggtacaccgctacatacgtggcaactggttagccaggggcgaacatctattgctcataaaggaatgctgctggcggcgaaaaaatgccctgcgcaccagacgttacttggcgtgactggctcagggaaaaccttcaccattgccaatgtcattgctgaccttcagcgcccaaccatgccggaagcctatgtaccgagttccgacactttcattgagaaagatgcctcggttaacgaacatattgagcagatgcgtttgtccgccaccaaagcgatgctggagcggcgtgatgtggttgtggtggcgtctgtttccgcgatttatggtctgggcgatcctgatttatatctcaagatgatgctccatctcacggtcggtatgattatcgatcagcgcgcgattctgcgccgactggcggagctgcaatacgctcgtaatgatcaagcattccagcgtggtactttccgcgttcgtggcgaggtgatagatatcttcccggcagaatcggatgacattgcacttcgcgtggaactgtttgacgaggaagtggaacgattgtcgttatttgacccgctgaccgggcagattgtttccactattccactgaacgccgaccgacgtattcaggccactctgacagcccgtgaccgccaaagacatatcgattctctgaccgaagaagaacagaactggcgtcggcagctggtcaatggcaccgttgacgggcgtattcctgaaggcgagtcaatgcaggagctcagcgatcgcgtcaatgcggcactggaatcttgccgggacttaccgcagggaagccgaccgctgctgaagctattgcgcagtgccacaggagacgcgcaaccagctgattgtctcgatgccaagcggaaacttcggcgattaaacggcgactctactggagaagtcactcggtctaccggtgaaacgtattattgctgcgaccatcgtgaacgataccgtgccacgtttcctgcacgacgttcagtgatcacccaaagcgactcaggcgacgttatccaactcgatgtacaagctatcacggataccgtatatcgtgtccgcatcgtgccagacgcggccttttcttttcgtgctggtcagtatttgatggtagtgatggatgagcgcgacaaacgtccgttctcaatggcttcgacgccggatgaaaaagggtttatcgagctgcatattggcgcttctgaaatcaacctttacgcgaaagcagtcatggaccgcatcctcaaagatcatcaaatcgtggtcgacattccccacggagaagcgtgtgtcagcaccagagaactgaacaccgccttgtcgaagaactccggcgcgttgatgccgtgcagcacggagagacgttgcgcgacggtgcggctctctttctccagcgtaccgcggttgatcgacgggttggcactcaacaaccagaagagactgctcacattagcgattaatggcaggatcagtcccccaacatgcagtatggctatggtcaatggtcaacctcaacagcattgtgatcagttaacgtataacgttgacacccgtcatctgttatcttcgaccgtcaaaggtgtaacgacagaagtggttgcagcagagaaaaaggcatacaccgcaaaggccatcactaccagccagatccccatatccgggattagccccaaaaccgccagcgccagtgcatatcgccggattcggtcgttttgggcagattaccggacgtttactgctctccagcggggtgaaaatggtgattattgccgcgcccgcgatgtcgaccactacattcgtttgcgtcaggcaggcgttgaaaagccggagcgtgaaaccttcgaaggtgcgctgaaaaccgggcgtctggcactggaaagtttaggtctggggccatggtggcggaagttgagcaaaattgcgccgctcataccatctttgcttcgaatacgtcatctgtaccgattggtgatatcgccgcgtcacgccacgcgacctgagcaagttatcggcctgcatttcttcagtccggtggaaaaaatgccgctggtggagattattcctcatgcggggacatcggcgcaaaccatcgctaccacagtaaaactggcgaaaaaacagggtaaaacgccaattgtcgtgcgtgacaaagccggtttttacgtcaatcgcatcttagcgccttacattaatgaagctatccgcatgttgacccaaggtgaacgggtagagcacattgatgccgcgctagtgaaatttggttttccgacaccggtacttccactgaccgcacaacgcacggtaaaacgcgccttaacgctgcttgaccgacacctgcgcgaaacaggcgtggcattcacctccactcaggctgctcgtgactggctgaagctgaaaatggcggggctggagcgtgaagaatttatgatgctgtatctgaaccagcagaaccagttgattgcccacgaaaccctgtttgccggttctattagcagtaccgagatcatcggggtaaaacggtttatgacgtggcttccggcgacgcgttatttatttctgaactcggtcgttaccggaaaatgttacctggttatcgccggaaggggagtttcagaagtggaacgcacagcctgggtgaaggatacggaagcagaaaaactgttccggatccgggaggcggaagaaacaaaaaacaacctgatgcaggtagccagtgagcatattgcgccgcttcaggatgctgcagatctggaaattgcaacggaggaagaaatctcgttgctggaagcatggaaaaagtatcgggttttgaattcccgggcaatggcacttatacttacacctgacttaattcgttcgaataccgcctgtttctgttcttcattcgttctggcgggtcaaacggcgaaagccgctgccgatgacggactgttcccaccgatttttgcccgtgtaaataaagcgggtagcccagtggcggggctgattatcgtcggtattttgatgaccatcttccagctcagcagcatttcaccaaacgcgaccaaagagttcggtctggtttcttccgtctcggtcatctttacactggtgccatatctttacacctgtgcggcgttactgctgctcggacacggtcactttggtaaagcacgcccggcatatctggcagttactaccattgccttcctctactgcatctgggccgtggtggggtccggagcgaaagaggttatgtggtcatttgtcaccctgatggtcatcaccgccatgtatgcgctgaattacaaccggctacataaaaacccgtatcccttagatgcaccaataagcaaagattaa

SEQ ID NO: 25444 - DNA, 2493 bp, Homo sapiens; identical to SEQ ID NO: 18200
  SIMILAR (403)..(1233): 951254mologous to Escherichia coli similar to,accession number D90881,Smith-Waterman Score=1342.

SEQ ID NO: 25445 - DNA, 761 bp, Homo sapiens
  SIMILAR (389)..(760): 921254mologous to Escherichia coli Tail fiber assembly protein G,accession number D90798,Smith-Waterman Score=603.
ggggggtttcttattattttgggggcccgcaaaatggcgcgggtgggccccaacacaagagttccggtgcatttggtggcacgaacacgagcattttccctaatggttataccgcgatttcaaatctaagcgcggggattatgagcacaacaagcggtagtggccagactcgtaatgcagggaagacatcatcagatggtgctcatacccactcgctgtccggcactgctgcaagcgcaggcgcgcatgcacatactgtcggtattggtgctcatacgcactccgttgcgattggttcacatggacacaccatcaccgttaacgctgctggtaacgcggaaaacaccgtcaaaaacatcgcatttaactatattgtgaggcttgcataatggcattcagaatgagtgaacaaccacggaccataaaaatttataatctgctggccggaactaatgaatttattggtgaaggtgatgcatatattccgcctcatacaggtctgccagcaaacagtaccgatattgcaccgccagatattccggctggcttcgtggctgttttcaacagtgatgagtcatcgtggcatctcgttgaagatcatcggggtaaaacggtttatgacgtggcttccggcgacgcgttatttatttctgaactcggtccgttaccggaaaatgttacctggttatcgccggaaggggagtttcagaagtgcagcggcacaactagggtgaagaatgcgaaagcataaacactgttcc

SEQ ID NO: 25446 - DNA, 1282 bp, Homo sapiens
  SIMILAR (238)..(675): 981254mologous to Escherichia coli Tail fiber assembly protein G,accession number D90775,Smith-Waterman Score=767.
atgccggtatcttcttatgaaagaggacatgcggagaagcgtgtggttcaggagtgctgtggtatcaacttgacatcatctgcgaataccatactgtcggattgtgagcgagtcaacggatactgcgtattgtgccatacgacccgtgcgttggtcactggcaaccatcaccgtaacgctgtgtacgcggaaacaccgtcaaacagtcgcattaactatattgtgagctcgcataatgcattcagaatgagtgaacaaccacggaccataaaagtttataatctgctggccggaactaatgaatttattggtgaaggtgatgcatatattccgcctcatacaggtctgccagcaaacagtaccgatattgcaccgccagatattccggctggcttcgtggctgttttcaacagtgatgagtcatcgtggcatctcgttgaagatcatcggggtaaaacggtttatgacgtggcttccggcaacgcgttatttatttctgaactcggatcgttaccggaaaatgttacctggttatcgccggaaggggagtttcagaagtggaacggcacagcctgggtgaaggatacggaagcagaaaaactgttccggatccgggaggcggaagaaacaaaaaacaacctgatgcaggtagccagtgagcatattgcgccgcttgcaggatgctgcagatctggaaattgcaacggaggaagaaatctcgttgctggaagcatggaaaaagtatcgggtattgctgaaccgtgttgatacctcaactgcacaggatattgaatggccagcactgccgtagggtaaaacatataacttctataattagatgtatctttccatttacggcaaggaagggggcttggaagacgtaaagcatctcacaccgagattattttttatatgtcaggagtctgaagttttgctttggctcttaaaatggtttgccgcgaggttttgaattcccgggcaatggcacttatacttacacctgacttaatttggtcgaataccgcctgtttctgaacttcatttaacacaggtgggcgaccaaaacgtttccctgcgccgcgggctcttactatcccggaatgagtgcgttcaagtaaaaggcctcgttcaaattcaccgactgctgaaattacttgcatcatcatttttcctgttggactggtcaggtcaatgccccccaatgctaagcaatgccctctgatacctgtttcgggcaagtgatccactggtttcctgatatccattggattacaacccaggc

SEQ ID NO: 25447 - DNA, 2304 bp, Homo sapiens
  SIMILAR (22)..(600): 951254mologous to Escherichia coli K12 putative kinase,accession number AE000393,Smith-Waterman Score=926.
atggtttccccggcacgtccgcaccgctatgtttcccagcgcgcacattcgctgctgaatctgacggaagatgactccggcctggttgtggcgcatcttggcaatggcgcgtcaatctgcgcggttcgcaacggtcagagtgttgatacctcaatgggaatgacgccgctggaaggcttgatgatgggtacccgcagtggcgatgtcgactttggtgcgatgtcctgggtcgccagccaaaccaaccagagcctgggtgacctggaacgcgtagtgaataaagagtcgggattattaggtatttccggtctttcttcggatttacgtgttctggaaaaagcctggcatgaaggtcacgaacgcgcgcaactggcaattaaaacctttgttcaccgaattgcccgtcatattgccggacacgcagcttcattacgtcgcctggatggaattatattcaccggcggaataggagagaattcaagcttaattcgtcgtctggtcatggaacatttggctgtattaggcttagagattgatacagaaatgaataatcgctctaactcctgtggtacggactggaaaaacgaaattaatgtccgcgattttattcaacataactatacaccgtatgaaggcgatgaatctttcctcgccgaagcgacgcctgccaccacggaattgtgggaaaaagtaatggaaggcatccgtatcgaaaatgcaacccacgcgccggttgatttcgataccaatattgccaccacaattaccgctcatgatgcgggatatattaaccagccgctggaaaaaattgttggcctggcaacggatgcgccgttgaaacgtgcgctacacccgttcggtggcattaatatgattaaaagttcattccacgcctatggccgagaaatggacagtgaatttgaatatctgtttaccgatctgcccttccaacgcctgccgccggatcgctattttactgaaatcaccgtcagccatcggatggaggttgtgaaagagcagattgatttgctggcgcaaaaagccgacttctttatagagcacggcctgctggcatcggtcaatattgatggccctacgctcatcgccctgcgtcagcaaccaaaaatcctgcgccagattgagcgtcttccctggctgcgtttcgaactggtggagcatatccgtctgccgaaagattcaacctttgcctcgatgtgtgaatttggcccgctgtggctggatgattttggtaccgggatggcaaatttctctgcgctaagtgaagtgcgttatgactacatcaaaatcgcgcgagaactgtttgtgatgctgcgtcagtcgccggaaggacgcacactcttttctcagcttttacatctaatgaatcgctattgtcgcggggtgattgtcgagggcgtagaaacgccggaagagtggcgtgatgttcagaactcgcccgcattcgccgcacaaggctggtttctttcacgcccgggcaccgatagaaacgctgaatacggcggttctggcgctataagctgcctcattttccgcctggctggactatctttaagactggcacaggaagaatatgaagaagcgaacgatgagcaaagcaagcaaaataaccgctgcgatttcacgggctttcttggtgttgaatcgttcgttcgctatccgtggcgatctgggcgtggtgtggggacggccaacacaggaactggctggcgcagctgggtgccgtggccccatgtcacgccgaagacatcattcttggcaatccaccggatatttccgcaaacactgatgtgcaatttcctacgcgtagaagcaacacctgctctcgcttgcgctgctggaccaaacgggctggctgccggccggcagcagcggtttcacttcattcactaccacgctttcaccacggaacagaatgttaccctgagcgatacctttcgctgcctgcaacaggtctttgtcgtcacgaccaaacaccaccagcagtttgacgtaaggattctgcggatggttaatcatctcaatcaccggggcttttaccgccggatgatcgcgcaggaagtccggccgtttgtcgttggttgcaaagacaatggcattgcgatccggcagttggttatagagtaccgggaagttctgcccacgccagccagaacgcgaaccaaaccacgaggcgacaatggcagaggcttgttgcagcccaacatccggcgcacccgcaaagaccatcggcaaggtgttggtgcggttatcgctcgggtcaaagaatggcaccgggaagtgtga

SEQ ID NO: 25448 - DNA, 2652 bp, Homo sapiens
  SIMILAR (2625)..(1627): 971254mologous to Escherichia coli sensor-regulator protein barA,accession number D90894,Smith-Waterman Score=1682.
ttacgccgcgtcttccgcgctgccgcctgtcagacgtaccgccagataaccggcactgaaagagtcgccagctgcggtggtatcgatcactttttctttcggcagtttcaccgccggaacatccactaacccttcgccagcaatggacaccaggcaagaatccgccccgcgtttcaccaccacttctttcacgcccgcgttatgggtgcgcgcaatgacgtcttccaccggctgttgaccccacagcgcgtcttcgtcgtccagcgtcaggaaggcgatatccgtgcattccagcatttgttggtacacctgctgtgtctcttctttgctggcccacaggcgcggacgatagttattgtcgaaaatcacttttccgccgttggcgcggcattcgcgcagcagggaaagcagcttttcgcggctggtcgggcttaagatcgccaggctaatcccgctcaggtagagataagtcgaaattcgccagctcttcgcaaatcgccgcagactgctcactctccagccagaatttggcggcggcttcgttccgccagtagtagaacgtacgctcgccggtggggcgatatagacggaagtgttcagggtatcgccgccgaaaccgcgcttaacgtccgcgcctttctcggaaagctcaatcatgcattcgccaatcacggcaatctttttggacatagtcgtgaacctgatggcgcgcgataatctttgtcgagtccgggcagcatcacttttaaacacaggacatctttgatgataaggcaggttatccagcgaataagcaaccctgaagcaagcatcgagagcttgcaggaacggcgtttttggttgcagtgtgagcgtgcttacacctggcagccgatcgtcagccatcggatggaggttgtgaaagagcagattgatttgctggcgcaaaaagccgacttctttatagagcacggcctgctggcatcggtcaatattgatggccctacgctcatcgccctgcgtcagcaaccaaaaatcctgcgccagattgagcgtcttcgctggctgcgtttcgaactggtggagcatatccgtctgccgaaagatacaacctttgcctcgatgtgtgatttggtaagtaatctctaccgttaaaatacgcgtggtattagtagaacccacggtactcatcacgtcgccctgggtgacaatcaccaggtcaccagacatcaagtaacctttatcgcgcagcagattaaccgcttcgctggcagctgctacgccgtcattagcgctatcaaagtgcaccggcgtaacgccacgatagagagcagtcaggttcagcgtacgttcatggcgcgacatggcgaaaattggcagaccagagctgatacgggaggtcatcagcgcggtacgacccgattcggtcatggtgatgatcgccgtaacgcctttcaagtggttagctgcgttcattgctgacatggcaataggttcttccccttgtcgacctgacggcccacgggtttgaacgtgttgtcggattttccgaccagcaagcgcccggtgacgtttgaggatgcccgggttgtgagacccggggccccaggtggtgccactagcgcgcgggtggataccccgggccggcggcatctgtttcgcccgttcaaccgcctgatgcccgctatcgcaaagttccacatgttgcaccatatcttccagcaatgcgccgataagtttcaggttagcggggttgtcatcaaccgccatgactgtcattgccagcttactttcatcggttacaggcaaaagcgtgttttgtttgtgatgacaaaattccgtcagggcaggcaacaggcgtgtaggtgttaatggtttcagcagacacgcgccgataccatcttgcttgagtttttcagcattgacttgtgcatggcaaggaagtgccagcatcaggaaatcggtcatcgataccgctttcgctaatcgctcatgttgcattgttagcggctcgcggaaggtcaccgcgatgcctaacaacatcatgtcgtaatgcgcgggaggcagcgcggagaacgttgggctataaaccacttccagcggcgtttcacttaaaatatccagcgtgcattgcgctgctgcggagtttggttcgacataggccaggcgcttacctgcgaggcactgggtggatggcccttcgataataatgttcgggttcagatcgagattaatgtggaaccagaaagttgaaccgcgattcggctggctatggaacgaaatatcgccgcccatttcattaaccagtttttgtgtaatcaccagccccagcccggtgccaccatgacggcgggaaatactggcatcagcctgtcggaaggcctggaataagcgcgattgatcgcgttcaggaataccaatgccggtatcccgaatctgcacttcaatctgcactttggtattactcagcgcacgtttttctaccagaatatcaatgttgccattcaggttagtgatgatttgctgtaatcgcagcgggtcgccgatcacgttatcaggcacgtcgcttttaatattgagcgtcagttctaaccctttatcgtgagaagaatgtgccagcagagtaacgacttcatccagcgtgctgcttccagtttcgagaagtcgagacat

SEQ ID NO: 25449 - DNA, 905 bp, Homo sapiens
  SIMILAR (422)..(472): 1001254mologous to Escherichia coli No definition line found,accession number U00039,Smith-Waterman Score=82.
ttatcttttctgtctttttccaggttcttttctcttgtcgttactttgtctttcccttgtgattttttcctctcttttatttcgtgtttgttcttcctccttttgtcgtgttttttcccacgtttgtctaccttgccggtctgtcgtgttcactgtagatggcccgtccgccttttccatcccttggtcaggaagtatcaacgttctcgccgtgccaggcgccagcatctgctggctaaaactgtccgttcccagcgccgttacgtaatgacggttaatgccgcaggatcgacacctggcagccgatctatcaaacatgcgggcggttaatggccgtggagctattaacggtggtcacgcatcccttgaacccttcgcaacgcctgccgccggatcgctattttactgaaatcaccgtcagcatcggatggaggttgtgaaagagcagattgatttgctggcgcaaaaagccttctctcttgcttatctctcaccatgcgaatccggcctttgatctgggaaaaacctggccgatggtaaaggtccgtctgatggcaccaacttgtgttgtaatgaggggcgtcgaatggtcctgaggcgcaatgttgttgtgcgttgcgaattgatacacctttgtgaatctggggggcgccccctgggcgggttggttgtttgccagctgtgcgcacggcgccctggggggaataccgatttgtgaacaccgtgtgcagcgtgggtggcacaagtggggaacgtggcccttcgggccggattgtctggagaaaatgggtcggctgctgtgtaggcgtgggcgaatgaatgtatgcgaacctgcctgctaaatgtgcgtgcatgggcgtgatacgtgtgcaacgccatcctgcaggatttcgcctccttgccat

SEQ ID NO: 25450 - DNA, 652 bp, Homo sapiens
  SIMILAR (46)..(615): 871254mologous to Escherichia coli K12 probable ornithine aminotransferase,accession number AE000389,Smith-Waterman Score= 797.
ccgcaagataatgcgaagaagctccgcccccaccaattatcctcggatgaaggacacacgggcatggggggcacggccaaagatgttgggtttgtaagcatgagaacgtacagctggatatcctctgccttgccaaagcggctcggcggcggcgtaatgccgattggcgcgaccatcgccactgaagaggtgttttcagttctgttgggcaacccattcctgcataccaccacctttggcggcaacccgctggcctgtgcggcggcgctggcgaccatcaatgtgttgctggagcagaacttaccggctcaggctgagcaaaaaggcgatatgttgctggacggtttccgtcaactggcgcgggaatatcccgatctggtacaggaagcgcgtggtaaagggatgttgatggcgattgagtttgttgataacgaaatcggctataactttgccagcgagatgttccgccagcgcgtactggtggccggaacgctcaataacgccaaaacgatccgcattgaaccgccactgacactgaccattgaacagtgtgaactggtgatcaaagcggcgcgtaaggcgctggcggccatgcgagtaagtgtcgaagaagcgtaatatcaaatcggatggcgatacgacgtcgccatcc

SEQ ID NO: 25451 - DNA, 2082 bp, Homo sapiens
  SIMILAR (1276)..(1845): 971254mologous to Escherichia coli Nodulation protein NolK,accession number D90843,Smith-Waterman Score=986.
atgacttctcccgtcaatgtggacgtcaaactgggcgtcaataaattcaatgtcgatgaagagcatccgcacattgttgtgaaggccgatgctgataaacaggcgctggagctgatggtgaaagcgtgcccagcaggtctgtacaagaagcagaatgacggcagtgtgcgcttcgattacgccggatgtttggagtgcggcaccagtcgcattctggggctggggtcggcgctggaacagtgggaatacccgcgcggcacctttggtgtggagttccgtaacggcagatgttggtttgatacctccgccgccataacccagttcggagaacagacgcttttcaaagacgtgcgggttattggcgatcaggatgttccccgctttcagaatacgcccggaagagcgatagttctgctcaagtttaatcaccttcagcgccggaaaatcctgactcagcagcaccaggttttgcggacgtgcaccgcgccaggagtagatcgactggtcatcgtcacccaccacgcagtttcaccagctcatactggctggtgttggtgtcctgatactcatccaccagcagatagcgaattttgttctgccagcgcttgcggacttcttcattgcgttgcagcagcaacgtcggcaataaaatcagatcatcgaagtcgagaacgttacaggctttcaggcatggatgatcctgccataccattcacaacattaagttcgagatttaccccaagtttaagaactcacaccactatgaatcttaccgaattaaagaatacgccggtttctgagctgatcactctcggcgaaaatatggggctggaaaacctggctcgtatgcgtaagcaggacattatttttgccatcctgaagcagcacgcaaagagtggcgaagatatctttggtgatggcgtactggagatattgcaggatggatttggtttcctccgttccgcagacagctcctacctcgccggtcctgatgacatctacgtttcccctagccaaatccgccgtttcaacctccgcactggtgataccatctctggtaagattcgcccgccgaaagaaggtgaacgctattttgcgctgctgaaagttaacgaagttaacttcgacaaacctgaaaacgcccgcaacaaaatcctctttgagaacttaaccccgctgcacgcaaactctcgtctgcgtatggaacgtggtaacggttctactgaagatttaactgctcgcgtactggatctggcatcacctatcggtcgtggggaaagcgagttgttgcagggcacgctggagccgactaacgagccttatgctattgccaaaatcgccgggatcaaactgtgcgaatcatacaaccgccagtacggacgcgattaccgctcagtcatgccgaccaacctgtacgggccacacgacaacttccacccgagtaattcgcatgtgatcccagcattgctgcgtcgcttccacgaggcgacggcacagaatgcgccggacgtggtggtatggggcagcggtacaccgatgcgcgaatttctgcacgtcgatgatatggcggcggcgagcattcatgtcatggagctggcgcatgaagtctggctggagaacacccagccgatgttgtcgcacattaacgtcggcacgggcgttgactgcactatccgcgagctggcgcaaaccatcgccaaagtggtgggttacaaaggccgggtggtttttgatgccagcaaaccggatggcacgccgcgcaaactgctggatgtgacgcgcctgcatcagcttggctggtatcacgaaatctcagtggaagcggagcgtgccatcacttaccaggtcagagatctggatgcagcgaatgtcgttattaatgctgtattcagttacgtcaccaatgtatggggatgggcatttgaatggtatatggtggtgatgcttttcggttggttctggctggtgtttggcccgtatgccaaaaagcgtttaggtaacgaaccgccagaatgtagctccgcaaggtggatcaatatgatggggtaccgagcaagagttcgtctaaatggtctgcactag

SEQ ID NO: 25452 - DNA, 747 bp, Homo sapiens
  SIMILAR (1)..(474): 1001254mologous to Escherichia coli betT protein homolog(PIR:S10898),accession number D10483,Smith-Waterman Score= 872.
atgaagaatgaaaagagaaaaacgggaatagaaccgaaggttttctttccgccgttaataatcgtcggcatactttgttggcttacagtcagagatctggatgcagcgaatgtcgttattaatgctgtattcagttacgtcaccaatgtatggggatgggcatttgaatggtatatggtggtgatgcttttcggttggttctggctggtgtttggcccgtatgccaaaaagcgtttaggtaacgaaccgccagaatttagcaccgccagttggatctttatgatgttcgcctcctgtacgtctgctgccgtactgttctggggatcgattgagatctactactacatctccaccccgccgtttggcttagaaccgaactcgacaggggcgaaagagttggggctggcttacagcttgttccactggggacctctgccgtgggccacttacagcttcctttcagtcgccttcgctacttcttctttgtccgcaaaggtaccagctcgagtctatcatgcttatactaaacgggcactgctggtttgcattgggcaaattatcgccccggcaaaagatgacgttgaatttcgacatcgcataatgaatccgctcactgaagatgagtttcaacaactcatcgcgccgtggatagatatgttctaccttaatcacgcagaacatccctttatgcagaccaaaggtgtcaaagcaaatgatgtgactccaatggaaaaactgttggctggg

SEQ ID NO: 25453 - DNA, 1845 bp, Homo sapiens
  SIMILAR (43)..(669): 981254mologous to Escherichia coli valyl tRNA synthetase,accession number J03497,Smith-Waterman Score=1123.
tcaattactttctaattgttgctcttctgcacattgtttaatgctgcacgttaagcagtcgttgccgcagttgacgcgcttggcctgctggaagaaattaaaccgcacgacctgaccgttccttacggcgaccgtggcggcgtagttatcgaaccaatgctgaccgaccagtggtacgtgcgtgccgatgtcctggcgaaaccggcggttgaagcggttgagaacggcgacattcagttcgtaccgaagcagtacgaaaacatgtacttctcctggatgcgcgatattcaggactggtgtatctctcgtcagttgtggtggggtcaccgtatcccggcatggtatgacgaagcgggtaacgtttatgttggccgcaacgaagacgaagtgcgtaaagaaaataacctcggtgctgatgttgtcctgcgtcaggacgaagacgttctcgatacctggttctcttctgcgctgtggaccttctctacccttggctggccggaaaataccgacgccctgcgtcagttccacccaaccagcgtgatggtatctggtttcgacatcattttcttctggattgcccgcatgatcatgatgaccatgcacttcatcaaagatgaaaatggcaaaccgcaggtgccgttccacaccgtttacatgaccggcgtcgtcgcgcagctgcgcccacatctcacgggtaggtaacgtaataccgctacgggtaaacagttcgccaactttcgccgttttcggctgccagttcccttgcagatattggctaaaatattcaccactggcatagcgtgactgtttgaacccggcgaaggtttcaccgcgttcgcgtgccagcaacatcgaggtacgcagtgcatgccaggtgatggcatagaaatagagattggtgaaatccagtgcttccggcgaaccataagcgatgccttctcgcgccagatagccgtgtaaattcatctgccccagtccgatggcgtgcgaggcggcatttccggcttcgatggacggcacgctgcggatatgactcatatctgatactgccgttaaaccgcgcacggcagtctctaccgtgcgggcaaaatcgggggaatccatggtgtgcgcaatattcaacgaacctaaattgcaggaaatatcatggcctgtgcgggtatagtcgagattctcgtcatactctgaggcgctgttaaccgtgtcttcatacatgatgttcgctccaacgcctaaacagaacggtggcatcacgtcatagaaaaagccgttgtagtgatctggcgcaaacagcaccaccagttcaggggagaatgccgcaatacgctcgcgggcgctggcaatcacgccattgacctcatcgagcacctcttgcgccgggtcgacataccccaccagcggcgagtgggaaagacagtgaagataagcgtgcatatcaggcttttcgacagaaacgtcggcatcagggcgggtcagcgtcatcaccgacgccagtttattcagggtcttgcccagggtttgcggaatggcggtggcggcaacaaagcgatccgggcgcatcaccaccagcgaagcattgtgttgcgcgaaccagctacgcaggcgaccttgcgtatcgcccacgcgtagtacgccgtcgtggttatcctgtgcggtatgaatttgcacttccggcaccacctgaatgaagcgtgtgcccaacgcgcgccactgctggatttgctcgtcgctcatcccccacagtggattgcatccccagccaattaccgcgaagttcgcgccgatcgcgttatcgagcagcgtcacgtcgccgttttccagcgtgactttcggctgaataaacat

SEQ ID NO: 25454 - DNA, 705 bp, Homo sapiens
  SIMILAR (705)..(385): 991254mologous to Escherichia coli K12 putative tRNA synthetase,accession number AE000389,Smith-Waterman Score=538.
tcagccaagctcctctgtgctcagggcactgacttcctctaggcagctgacaatcgcagacggaacgcttttggaggcctctctccgccaagcttccaggatcttggaaatttctgctggattgctgggactcaagtcacaaagagcatacacggctgctaactgtataccccatggtatatctcccacggcgtccctcccacgacacatgggaattttttttcctgttccagcgcctttatcgaacgcgtggcagatatcagccagcatatcattgaacagtgtgaactggtgatcaaaagcggcgcgtaagggctggcggcatgcgagtaagtgtcgaagaggcgtaatatcaaatcggatggcgatacgacgtcgccatccgatgcccgcaggcatcatccgctccggcgttaacagcacgctttcactgccgtcatcggtttccgcacacaacagcatgcattccgacgtttcaccacgcattttcgctttttgcagattgcataagaccaccaccgttttccccatcagctcttcttcgctgtagtacggcaccaggctggtcacggtttgcagcgttttttgccccacatcaacctgtacgatgtacagcttgtcggcgttttcatggcgtttcacttccacaatctttccgacgcgcatttccagacgtgcaaaatcagcgtaagccacggtttccat

SEQ ID NO: 25455 - DNA, 900 bp, Homo sapiens
  SIMILAR (340)..(579): 981254mologous to Escherichia coli K12 probable ornithine aminotransferase,accession number AE000389,Smith-Waterman Score= 391.
atgtgccatgttggtgtgctgcacccactaactcgtcatttacattggtacccgatatcgactgtatactgtctacgcacaccaagaagaacaaagatgggtgactgccacgctgccctggcctttatcggtcgacctctacgacgccaaggatcaacgccggcgcattatccaccctttaataagaaaagagacaagtactttattacacttgacgcaaatattacacttttcgtggccacgatattcgtgttctctattccaccgccagatatagaaagacaaagcacaaacgctactgataccttcgtttcggtaccggtttcgtccactggcttagaatatcccgatctggtacaggaagcgcgtggtaaagggatgttgatggcgattgagtttgttgataacgaaatcggctataactttgccagcgagatgttccgccagcgcgtactggtggccggaacgctcaataacgccaaaacgatccgcattgaaccgccactgacactgaccattgaacagtgtgaactggtgatcaaagcggcgcgtaaggcgctggcggccatgcgagcatcatccgctccggcgttaacagcacgctttcactgccgtcatcggtttccgcacacaacagcatgcattccgacgtatcaccacgcattttcgctttttgcagattgcataagaccaccaccgttaaccccatcagatcttcttcgctgtagtacggcagccaggctggtcacggtttgcagagtaattagccccaaatcaaactgtacgatgtacagcttgtcggagtttacatcggcgatatcagcatatcccaacaacatcttatccagacagacgcaattatcccaagaccgtgacacacactccgccgtacagccagcg

SEQ ID NO: 25456 - DNA, 1425 bp, Homo sapiens; identical to SEQ ID NO: 17591
  SIMILAR (415)..(1155): 961254mologous to Escherichia coli CG Site No. 553,accession number U00039,Smith-Waterman Score=1206.

SEQ ID NO: 25457 - DNA, 5148 bp, Homo sapiens
  SIMILAR (1329)..(88): 921254mologous to Escherichia coli valyl tRNA synthetase,accession number J03497,Smith-Waterman Score=2025.
ctatggaaaccgtgaacaaagggctgtctccagccacacaaacacctgggtgaatcgggcactggccagaggctggagcagcctgggatacaggtggtgggtgagtgcctggaccccttccagacgtttcatatcccagttgatgtcacgaccggtagacgccagcgccgccaaggtgaagcgcagcgcgtcagtaccgtgcggctcaataccgttcggaaactgcttctcggtgcgcttacggattttgtccgccagctgcggctgcatcatattgccggtacgtttttccagcagttctggcagcgaaataccgtcaaccatatccagtgggtcgataacgttacccttggatttggacatcttctggccttcgtcatcacgaatcaggccggtcatgtaaacggtgtggaacggcacctgcggtttgccattttcatctttgatgaagtgcatggtcatcatgatcatgcgggcaatccagaagaaaatgatgtcgaaaccagataccatcacgctggttgggtggaactgacgcagggcgtcggtattttccggccagccaagggtagagaaggtccacagcgcagaagagaaccaggtatcgagaacgtcttcgtcctgacgcaggacaacatcagcaccgaggttattttctttacgcacttcgtcttcgttgcggccaacataaacgttacccgcttcgtcataccatgccgggatacggtgaccccaccacaactgacgagagatacaccagtcctgaatatcgcgcatccaggagaagtacatgttttcgtactgcttcggtacgaactgaatgtcgccgttctcaaccgcttcaaccgccggtttcgccaggacatcggcacgcacgtaccactggtcggtcagcattggttcgataactacgccgccacggtcgccgtaagatacggtcaggtcgtgcaggttaatttcttccagcaggccaagcgcgtcaactgcggcgacgactgctttacgtgcagctaaacgctccagtttctggaactctgcagggatttcgctgcagtaaacgtcagattcgttacctttggtatcgaacacctgggcgctttcacggatatcgtcatcaaaggtcaggatgttgatcatcggcaggggttgacgtttacccacttcatagtcgttaaagtcgtgcgtcggagcgattttcacgcagccgtgtcctgtttccatgtcgacgccttcgtcgccaaccatcggcatacgacggtcaatcagccgtagcgagacatatttgccaatccgatctttgtaacactgatcttccgggttaacggctaccagtatcgcccggcaaggttcctggcagcgcagcggcatcccccgttcgttcttaacccctgacagggtcagagtacgcacgttcggcagtgatttgatttcatcgctcagcggaatggtatcgcagacaacgacttcatcaattacagagttacgcaggttgttcgccgcgttgccagagaagatcgggtgagtcgcgtacgcaaatacacgtttagcaccacgttctttcagagcttcagcagctttacacagcgtaccgccagtgtcgatcatatcatcgaccagtacgcagtcacgacttgcaacgtcaccgatgatatgcatcacctgtgaaacgttcgcacgcggacgacgtttgtcgatgattgccatatcggtatcgttcagcagcttagcgatagcgcgggcacgcacaacgccgccgatgtccggagaaaccacaattgggttatccagattcagctgcagcatgtcttccagcaggatcgggctaccaaatacgttatcaaccggaacgtcgaagaaaccctgaatctgttcagcgtgcagatccactgtcagcacacggtcaacaccgacgctggagaggaagtctgcaaccactttcgcagtgattggtacacgagcggaacggacgcgacggtcctggcgcgcatagccaaagtaggggataacagcggtgatacgacctgcggaagcacgacgcagggcatcaaccataacgactaattccatcaggttgtcgttagtaggggcacaagtggactggatgatgaaaatatcaccaccgcgtacattttcattaatttgtacgctgacttcgccatcgctaaagcgacctacagcggcgtcgccgagtgaagtgtacaggcggttggcaatacgttgtgctagttccggggtggcgtgaccagcaaaaagcatgtcgatttcgtcgtagttcagggtccacgggaagaatgcgttctcccactgcataaaaccggcgcccatgctgctgccgtcgtctccggtcacaagatcagtcaagcccacgcaatgcgcttctgcgccgtcgaaacgaccaaacttgacgctactgccatcaatcactttgatgccgcctttgccggtcaccgatttgaagctcggctgcattgcgccctgctccagcgactgtttttccttcatcactttttccatcagctgtgcgaccaggctttcggtaaactggccttccggcagctgggcaatgatggtttcgcggatgcgctggctttcggttttgtcggctggcacgctggcgggcacggacgccgttaccgggatcgattcatcacattcggtgatggtaaaacccagtagatccgccacttcacgggcttccggggtaataatgctggcgcgcagaaccacggacattgcctgttcgccgcgcgcgtgtgcttcacgaatatcattcgctgcttcctcctgtttggtgagagatgccagataatccaccagttgctgcacgctttgcgggtcgtggctgtttagctcgaacatcggctcttcgaaacccgtctcaagcaataactttcgcgttgcggcgacgtcagcatctggcatgtccgttttactgatgacggcgatttgccgtttgctgacgccaatatccagcaacccggcaggcaaccgactttccgggtcatttgcgccatggacatagatcagcatgtctacatcctgtagcgtggtaattaaggcgtgataccagcggggatggttaaaatattcacccggcgtatcaatatcgcccttatcattaaattccacggcctgtgtttttctggcgagggtagacctcccccatgaagaatatctctccggggaattccagacacggaaatgcagacgggccatcgtcaccggatcgcttagcagcaccaggcgacgatcgcgattcagcttatctggcgtctcgttcagcgcctgttcaacgtggcggtcacgggcgatttccagcaccttactggcgcggtgacgcgcggtcgccattgcggttgccagagcgttaaatgacgggttaaacactgcgtgcataaagccatcatcaagggagcgttgacgattcatctcaaggaaccgatcggtatcaaccagcacctgcggcggcgaatactcttccgggatcaggaacagtttccagcgtttggtgcgcagaccaacggtggcacggctggaaatcaccgaaacaaacggtgacaggatcaacgagaagacaatcggtgccagccagaacaggaaacgcagatccagccacgccatcccaacagcccacactaaccctaacagcagcggtttgtatgggcaatcgatactcttgtagagctgccaaaggctggcaccaaagtactcttcagcagaaagcgagcttaagccaccgagatccagccattcatttggcgtcagcacgccctgcgcgtaaagcgtcatcacatagtcgtcgtaatgctcttcttcgtcgcacggcaccatattccacagaatacgcttaccggcgagacgcacggcggtacgataaaattcgtcaagcagcagtatatgctgggtggagccacaatcttcgccccccaggctgccgctttcattatgacggaagcggttttcatcaatcaggaagaagctgacttccacacccagcgaggcggcccagttttccagcaggctacatttacgttgtagcaattggcgctcttcgctatcgagccaggattgatgacagacccagatatccaggtcagaggaacaactttgccctacggacgaggtgctgcccatggtgtatacaccagtaattggaagctcacctttcggcggatcctgtactgacattccacgatacagttcaagctcgttcaggtagtggcgttgagtttcatcaggcgtgtaaaggcaaatgccgtttaataatggatcgtattcgtcatattctggctgcgttgcacgattgcccgaaaataggacgtcgtccgggtcggcagccacaccgcgtgcagtgtaggtaatctcttcgtcatcatccatccgcttaccggagaacaacgcagcgtctgtttgccgccccatcggattaatgaatttttccgccaaccgtttacgacgcgctagcgcgccgcgaagaatacgggcacggcgtgattcatgctgtttgccgtgattttcatcttcatactcttcgtcgtcttcatactcatcttcatcgacccaggtatcatcgcgacgggtacgattactggcgaaggtgagaatgtttaaaatccagccgccgagtttttcagcaatggtcacccatgaccaaccggtgaacaacgtcaggcccgctgccgggaataccgcaatttcacggctgtacggatgcgcccactcggcgaccagttcgctctgaatgtgcggcgcgttcaccagcgggttatcttccagcggccagacaccggctttcacctggtcaatttctgcgcggatagccagcatcgcgtcgataaagcgatccagttccactttgctttcagattcagtcggttcaaccatcagcgtacccgccaccgggaacgacatcgtcggcgcgtggaaaccgtagtcgatcaggcgcttggcaatatccagctcgctgatgccggtttcttctttcagcgggcgaatatcgagaatacattcgtgcgccacgcgaccgtcgcgaccggtatacagcaccgggaaggcatcctgcaggcggctggcaatatagttggcgttgaggattgccacctggcttgcttttttcagcccttctgcgcccatcatgcggatgtacat

SEQ ID NO: 25458 - DNA, 1728 bp, Homo sapiens
  SIMILAR (490)..(1212): 781254mologous to Escherichia coli caiT,accession number X73904,Smith-Waterman Score=969.
ttacacgcccggtgtacatatatgtggatttattaatagcatatcgagcatatgatatgaaacccatacttgaacatcgagtaacagcgccaacgccaaatccgcctgcaagctgcgctcatgaaattcatcaaggatcaccagtccaacaccgctcagttccgggtcacgctggatcatgcgcgtcagcacgccttcggtaaccacttccaggcgggtattcggcccgacgcagttttgcgcacgcatccggtagccaacggtatcgcctggcttttcgttaagcagctccgccagccgttgcgcgacgttacgcgccgccagacgacgcggctccagcaggataattttcccgttaatgccgggatgcgccagcagttgcagcggcagccaggttgatttcccggccccggtcggcgcacttaataatacgcttgatgacgccggacaatggctgcgttcgcgtgtggtgtggtaagggatgcgtcggaagtgattcgccccagctcgacactggtgccgctggtaggtgaaaaacacgccaaagggttgttcggcactatcgtcgacaacttctatctcgtcgccttgatcttcgcgatgggtaccagtctgggccttgccacgccgctggtgaccgagtgtatgcaatggttgtttggcattccgcataccctgctgggatttatacctacaacgccatttgcgtcgcttgcggtctgcaaaaaggggtacgtatcgccagtgacgtgcgtagttacctgagcttcctgatgctgggttgggtgttccattgtcagcggtgccagcttcatcatgaactacttcaccgattcggtggggatgttgctgatgtatctgccgcgcatgttgttctataccgatcccatcgctaaaggcggcttcccgcagggctggaccgtgttctactgggcatggtgggtgatttatgctatccagatgagtatcttcctcgcccgcatctcccgtggtcgtactgtgcgtgaactgtgctggatcctgtggactgtactcggtagtaacactctgctgttgatagataaaaacatcatcaacattccaaatctgatcgaacagtacggtgtggcgcgcgccatcattgaaacctgggccgctctggcactcaacaacggcaacatgtggggcttcttcatcctctggtttattggccccggtacgctggttaacgcctggcagaatatccgcgcccagtttgttcatcacatcctgcggcgaaacggtattgccgatggatttagacatcttgcggccctgaccatccacggtaaagccgtgggtcagtacctgacgatacggcgctttacccttcatcgcggtggagatcattagggaagacatgaaccagccgcggtgttggtcagaaccttccagatacatgtccgctgcgtgaccggcaaattccggacgcacgtcaacaacagaagagtgggtagatccggagtcaaaccatacatccaatgtgtccggcactttcacgtactgatcagcttcgtcgccgaggatctctttcgcatcgagatcccaccacgcctggatgccatcgacttcaacgcgttttgccacttcttccatcagttcaagggtacgcggatgcagctcttccgtgtctttgtgcacgaacagtgacatcggtacaccccaggtgcgctgacgggagatacaccagtcaggacggttagcaaccat

SEQ ID NO: 25459 - DNA, 4251 bp, Homo sapiens
  SIMILAR (3365)..(3904): 981254mologous to Escherichia coli betT protein homolog(PIR:S10898),accession number D10483,Smith-Waterman Score= 915.
tcataggacctgctccatgatatccgccggcacactattactgtcgatacccatatccgccagtgctttgacaaaacgttccgggtagacgctgtcacggtcgcactcggcaaaataggcctcccagttttcgctggccatcagttcgcggataccggcgacaaacagttccataatgttgacgaagaacagcgggcatcctccggcgataatggcggtttgaatcggtttcaggccgccgagcgccagcagaacaataccgataatgccaaccagaattgaccaaccgatacgcaccagcagaggtggttcttcaccatcgcgtacttcgcggcaagtggacatcgccagggtataagagcaggcgttaaccagcgtaacggtggcaataaagcagaggatgaagaagccccacatggtggcggtgctgagtggcagagcggcccaggtttcaatgatggcgcgcgccacaccgtactgttcgatcagatttggaatgttgatgatgtttttatcggtataacatgaatgttctgtatcgccatcccgctgggcctggcacgcgaaaataaaggcgtagcggcattcgctggcttcatcggttatgcggtaatgaacctcgcggtaaacttctggttgaccaataaaggcattctgccaaccacggatgccgcggttctgaaagccaataacatccagagcattcttgggatccagtcgatcgataccgggatcctcggtgcggtgatcgccggtattatcgtctttcagagattgttgtgttgcttgattattgcattcgcgcatcttttgctgctgtggcgtcaaacttttttcgccaggcgcagacttgctgttcttcaggcaatcactcatgtaggtcttacgagcatcccctttcaacgcctgcgccgtcgcctgctgattacaggaggtcatatgctgttgttggcccttaaattctctctgcagatccagcctgtaggcatgtatgattagccgccaaaaccccaaatcggcaaaaatgacacgggttgtgcttctcccagcctgctggatggcattgtcgtgaattattacggccaagccgagccgcgcgtcagctgcaagcgtaacggtagaagattcccgtacactgaaaatcaacgtgtttgatcgttcaatgtctccggccgttgaaaaagcgattatggcgtccgatcttggcctgaacccgaactctcgggtagcgacatccgtgtgtcctgccgccgctgacggaagaacgtcgtaaagatctgaccaaaatcgttcgtggtgaagcagaacaagcgcgtgttgcagtacgtaacgtgcgtcgtgacgcgaacgacaaagtgaaagcacattctgggctcgaccggctcgattggttgcagcacgctggacgtggtgcgccataatcccgaacacttccgcgtagttgcgctggtggcaggcaaaaatgtcactcgcatggtagaacagtgcctggaattctctccccgctatgccgtaatggacgatgaagcgagtgcgaaacttcttaaaacgattcccctcacgatctaaagcgcgcagcagcattcctttcgaaatgatgccgacatactgttggtcctcgtcgaccacgggcaccgcacagggtgcctgtccgacatgagagagcaactcgctaagaggcgtttgtgcatcgactgctaacggcgcatcaatcagcgccgcatcaagaccttgctgtttgtcatgcagctccaccgattttgagaacgacagcgacttccgtcccagccgtgccaggtgctgcctcagattcaggttatgccgctcaattcgctgcgtatatcgcttgctgattacgtgcagctttcccttcaggcgggattcatacagcgccagccatccgtcatccatatcaccacggacctgcagagatatcttcaccgcgacggcgaatattttgcccgtacgcacttcagcagtaaaacgcacgccattgtccatttgttcagtctgctcctgcatcaccaccgcttcgcagccttccggcaccggcgcaccggtcataatacgaatgcaggtacccgcaggccattcaccatggtatggctgaccggcaaaggatttaccggcaacgggcagcggttgcccggaggcaatatcggctaaacgcaccgcgtagccgtccattgcggagttatcaaaccccggaacatcaagcggcgaaacgacatcgctcgccagaatacgaccaaaacactgtaccagtggcagcgtttcctgggcggtcagtggggtgacgcgagaaagcatctcattaagcgcggtgtcgagcgacatcaatccggtggtaaattccatgaaaacactcagactgcaggcatggaagcttttgatggcctcgagaatagtcagtggcacgttggtgatcgcctgttgaccggatttattcacctgaccggagatataggccttttgtgagcggaaggcggcgatattaacgtccacctcagcctcccaaagtgctgggattacagctggcgtaacggcgataacgcctgttttgacttcatcagcaatatctctgaggccgggcagttcgacgtctacgtcaatgaccacaaagcagggaccttcactgcggaccggaagaacgctgagaaagttctgtccactctcggagactgcagcaacgactgatagtagtatcttccccagcaaattcaccccgacagctagcaggctgccggggttttcttttatcaggagcccgaaaatgacccaatccgtgttgctgccaccggggcctttcacccggagacaagcgcaagcgttcactaccacgtacagcaatatcacactcgaagacgaccagggcagtcacttccgtctggtggttcgtgatactgaaggccggatggcatccgtacagacacggccacccgctgatcgcgaagcatttacccgcattcacctccccgaacacactttatatccccatacgccagccatcgccgctggcgtttttattgacggagacatacccatgacaacacagacgcagcacgacctcgcacccgctaaccaacccgaatttgaactgaccgtcacgccggtccccgatgaacagcgtatcgatttctggccacagtactttggcgctatcccgcagtggctactcctggagccgcatatcttcgcctggatggaccgcttctgtgagggctacagcggtggtatctggtcgttctacaccctcagcaatggcggcgcatttatgtcccccgagcctgacaacgatgagacatggcgtctgtttaactgcctgaacgccaccatgccgccgtacagaatgacgtgcgggacggtgatttatgctatccagatgagtatcttcctcgcccgcatctcccgtggtcgtactgtgcgtgaactgtgcttcggcatggtgctggggctgacagcgtcaacctggatcctgtggactgtactcggtagtaacactctgctgttgatagataaaaacatcatcaacattccaaatctgatcgaacagtacggtgtggcgcgcgccatcattgaaacctgggccgttctgccactcagcaccgccaccatgtggggcttcttcatcctctgctttattgccaccgttacgctggttaacgcctgctcttataccctggcgatgtccacttgccgcgaagtacgcgatggtgaagaaccacctctgctggtgcgtatcggttggtcaattctggttggcattatcggtattgttctcgtggcgctcggcggcctgaaaccgattcaaaccgccattatcgccggaggatgcccgctgttcttcgtcaacattatggtgacgctctcctttattaaagacgcgaaacagaactggaaagattaattaacccccaaaatatcaagaggttgaaagatggattttaatttaaatgatgagcaggaactgtttgtcgccggtatccgcgaactgatggccagcgaaaactgggaggcctattttgccgagtgcgaccgtgacagcgtctacccggaacgttttgtcaaagcactggcggatatgggtatcgacagtctgctgatccctgaagagcacggtggtctggacgcggggtttgttactctcgccgccgtgtggatggagctgggacgtctgggggcaccaacctatgtcctgtaccagttgccgggcgggttcaacaccttcctgcgcgaaggcacacaagagca

SEQ ID NO: 25460 - DNA, 3741 bp, Homo sapiens
  SIMILAR (1123)..(1761): 961254mologous to Escherichia coli K12 probable carnitine transporter,accession number AE000114,Smith-Waterman Score=1077.
catataaaacaaattacaccgataacagcgaatattacgctaatgtcggttttaacgttaagcctgtaaaacgagatggtaagatgagcgtaatgtctgacccagacacggcgatttatcctttccccccgaagccgacgccgttaagcattgatgaaaaagcgtattaccgcgagaagataaaacgcctgctaacagaacgtaatgcggtgatggttgcccactactataccgatcccgaaattcaacaactggcagaagaaaccggtggctgtatttctgattctctggcaatggcgcgcttcggtgcaaaggatcccgcttctaatttgttagtcgccgggggtggaacctgcaggtctgtcgttattaatgctgtattcagttacgtcaccaatgtatggggatgggcatttgaatggtatatggtggtgatgcttttcggttggttctggctggtgtttggcccgtatgccaaaaagcgtttaggtaacgaaccgccagaatttagcaccgccagttggatctttatgatgttcgcctcctgtacgtctgctgccgtactgttctggggatcgattgagatctactactacatctccaccccgccgtttggcttagaaccgaactcgacaggggcgaaagagttggggctggcttacagcttgttccactggggacctctgccgtgggccacttacagcttcctttcagtcgccttcgcttacttcttctttgtccgcaaaatggaagtgattcgccccagctcgacactggtgccgctggtaggtgaaaaacacgccaaagggttgttcggcactatcgtcgacaacttctatctcgtcgccttgatcttcgcgatgggtaccagtctgggccttgccacgccgctggtgaccgagtgtatgcaatggttgtttggcattccgcataccctgcaactggacgctatcatcattacctgctggattatcctcaacgccatttgcgtcgcttgcggtctgcaaaaaggggtacgtatcgccagtgacgtgcgtagttacctgagcttcctgatgctgggttgggtggtcattggcagcggtgcccgcttcatcacgaactacttcaccgattcggtgggggatgttgctgatgtatctgccgcgcatgttgttctataccgatcccatcgctaaaggcggcttcccgcagggctggaccgtgttctactgggcatggtgggtgatttatgctatccagatgagtatcttcctcgcccgcatctcccgtggtcgtactgtgcgtgaactgtgcttcggcatggtgctggggctgacagcgtcaacctggatcctgtggactgtactcggtagtaacactctgctgttgatagataaaaacatcatcaacattccaaatctgatcgaacagtacggtgtggcgcgcgccatcattgaaacctgggccgctctgccactcagcaccgccaccatgtggggcttcttcatcctctgctttattgccaccgttacgctggttaacgcctgctcttataccctggcgatgtccacttgccgcgaagtacgcgatggtgaagaaccacctctgctggtgcgtatcggttggtcaattctggttggcattatcggtattgttctgctggcgctcggcggcctgaaagcgattcaaaccgacattatcggcggaggatgcccgctgttcttcgtcaacattatggtgacgctctactttattaaaaacgcgaacacagactggaaagcttcattaacccacaaaatatcaaaaccccgcacaggtgaagcccagcgcgtcagtacggtgcggctcaataccgttcgggaactgcttctcggtgcgcttacggattttgtccgccagctgcgcctgcatcatattgccggtacgtttttccagcagttctggcagcgaaataccgtcaaccatatccagtgggtcgataacgttacccttggatttggacatcttctggccttcgtcatcacgaatcaggccggtcatgtaaacggtgtggaacggcacctgcggtttgccattttcatctttgatgaagtgcatggtcatcatgatcatgcgggcaatccagaagaaaatgatgtcgaaaccagataccatcacgctggttgggtggaactgacgcagggcgtcggtattttccggccagccaagggtagagaaggtccacagcgcagaagagaaccaggtatcgagaacgtcttcgtcctgacgcaggacaacatcagcaccgaggttattttctttacgcacttcgtcttcgttgcggccaacataaacgttacccgcttcgtcataccatgccgggatacggtgaccccaccacaactgacgagagatacaccagtcctgaatatcgcgcatccaggagaagtacatgttttcgtactgcttcggtacgaactgaatgtcgccgttctcaaccgcttcaaccgccggtttcgccaggacatcggcacgcacgtaccactggtcggtcagcattggttcgataactacgccgccacggtcgccgtaaggaacggtcaggtcgtgcggtttaatttcttccagcaggccaagcgcgtcaactgcggcaacgactgctttacgtgcagcaaaacgctccagtttctggaactctgcagggatttcgctggaataaacgtcagattcgttacctttggtatcgaacacctgggcgctttcacggatatcgccgtcaaaggtcaggatgttgatcatcggcagggcgtgacgtttacccacttcatagtcgttaaagtcgtgcgccggagtgattttcacgcagccggtgcctttttccatgtcggcgtgttcgtcgccaacgatcggaatacgacggttaaccagcggcagaatgacatatttgccaatcagatctttgtaacgcggatcttccgggagatcgtctcgttaatcggccctaacggtgccggaaaaaccacggtttttaactgtctgaccggattctacaaacccaccggcggcaccattttactgcgcgatcagcacctggaaggtttaccggggcagcaaattgcccgcatgggcgtggtgcgcaccttccagcaaagcgaagcgctcgaccgcgccgcgacctggcttgagcgcattggtttgctggaacacgccaaccgtcaggcgagtaacctggcctatggtgaccagcgccgtcttgagattgcccgctgcatggtgacgcagccggagattttaatgctcgacgaacctgcggcaggtcttaacccgaaagagacgaaagagctggatgagctgattgccgaactgcgcaatcatcacaacaccactatcttgttgattgaacacgatatgaagctggtgatgggaatttcggaccgaatttacgtggtcaatcagggacgccgctggcaaacgtacgccgagaaattcgaggcaggccccagtaacagtgacaaaatccattcaggacatgctgaaggcaataaggaagcgcgtggtaaagggatgttgatggcgattgagtttgttgataacgaaatcggctataactttgccagcgagatgttccgccagcgcgtactggtggccggaacgctcaataacgccaaaacgatccgcattgaaccgccactgacactgaccattgaacagtgtgaactggtgatcaaagcggcgcgtaaggcgctggcggccatgcgagtaagtgtcgaagaagcgtaa

SEQ ID NO: 25461 - DNA, 1656 bp, Homo sapiens
  SIMILAR (571)..(867): 981254mologous to Escherichia coli PUTATIVE MALATE OXIDOREDUCTASE (NAD) (EC 1.1.1.38) (MALIC ENZYME),accession number D90874,Smith-Waterman Score=496.
atgtttctcagaaaagagcagagagaagtgtacgagcaggccgccgaatgtgacggcgaggtggttcgtcccaaggaaccgaactggacagcctgggcaaacgaaattcgcctgatgtgtgtgcaggatggtcgtactcacaaacaaatctgcgagatgtacagccgcgtcagccgcgatccgttctggtgccgtaacgtgctcagcccgtcgaagctgcgggaaaaatgggatgagctttccctgcgcttatcgccgtccgtcagcacgtacacagaaaaacgcgaagacccgtacttcaaagccagttacgacaatgtggactacagccagatcccggcaggattcagggggcggaagaactggagtccaggggcttataccgtcgtgctgcaacggtgtggatggcggcattccgtgaaagccactcccagccagaacgaaacaattttctggcgcgtcgtgaacggtgtttacggaaaagcagtaagcgggctgcatcagttctcgaagatgggtaagtcgagtcagggacacaggatgagtcctgggtttactgaccagcggccgggtgccgcagcaatcgcctgtatgaacctgctggtagcgctgggtctgcaaaaacataacatcgtggtttgcgattcaaaaggcgttatctatcagggccgtgagccaaacatggcggaaaccaaacgcgcatatgcggtggtggatgacggcaaacgtaccctcgatgatgtgattgaaggcgcggatattttcctgggctgttccggcccgaaagtgctgacccaggaaatggtgaagaaaatggctcgtgcgccaatgatcctggcgctggcgaacccggaaccggaaattctcgcgcgctggcgaaagaagtgcgtccggatgccatcatttgcaccggtcgttctgactatccgaaccagaaaatgccgctgcctgaacgttcgcaacgttaagctgataaacattcgacgcattgcggttatgatgaggagcagcaaaatggctagcgaacgcagtactgatgtgcaggcatttatcggggagctggacggcggcgtatttgaaaccaaaatcggcgcagttctcagtgaagtcgcttccggtgtgatgaacacgaaaaccaaaggtaaggtctcactcaacctggaaatcgaaccatttgatgagaaccgtctgaaaatcaaacacaaactctcatatgttcgcccgactaaccgtgggaaaatttccgaagaagacaccaccgaaacgccgatgtatgtcaatcgcggtggtcgcctgactattctgcaggaagaccagggacaattactgactcttgccgtgtccgaactatccgcgacattctgcgttagccctgcgcaagaggccacccagcagcacggcacgcaaggtttcgcggtgctgtcgtatgtgtatgaacacgaaaaacgcgacttagccagccgcattgtctccacccagcatcatcaccacgacctctccgtcgccacgctgcatgtgcacatcaaccacgacgactgtctggaaatcgccgtgttgaaaggtgacatgggtgacgtgcagcattttgccgatgacgttatcgcccagcgcggcgtgcggcacgggcatttgcagtgcttgccgaaggaagattga

SEQ ID NO: 25462 - DNA, 588 bp, Homo sapiens
  SIMILAR (6)..(122): 381254mologous to Volvox carteri f. nagariensis hydroxyproline-rich glycoprotein DZ-HRGP,accession number AJ242540,Smith-Waterman Score=67.
atggctcagtgcagcctggacgccctggaccagcccctcctgcgcctgggccacggccgctgccttcagggcatcactgtgccctggccccacccacccgtgtcagcaccgcccaccgccctggcaccacccaccgagttctcgcccatgaggaagggggaccctgagtggaggtttcaaaccttaggggccgtccctgccgtgcagggctctacccccacctgccccatggcccccatttcatgtctgtggctcaccagcttttccccagacccagctccggagcccacaggcgtggccgatgcagaaacctcaggaagaaccttccagaacgtgccttccacgggacggaaacttccggaacatgccttccacagcatggaaacttctggaacgtggcttccatgggatggaaccttccggaacgtgccttccatgggacagaaccttctggaatgtgccttccacgggaccctctcatgcccttgcacaactgcaccattttcctgtgtcaccgaggaggacgtgggctccgagccgctgagtgacctgttgggggcagggctggcgctggccgtcccagcttaa

SEQ ID NO: 25463 - DNA, 1629 bp, Homo sapiens
  SIMILAR (873)..(968): 341254mologous to Escherichia coli Regulatory protein KdpD,accession number D90708,Smith-Waterman Score=46.
  misc_feature (1)...(1629): n = a,t,c or g
atgcttgaagaggatatngaagacctgctgcaagctgccattgatgttttcactaccgtcaacgttcagcatctggaaagtctgaatgatgtggtcagcggcgtcaccggaattcaggtacgggaaaccgtgcccgatccttttttcgatgccgccgacgacgtggtgctggtggacttgccaccggacgatctgcgccagcggctgaaagaaggcaaagtctatattgccgggcaggcggagcgcgccattgaacattttttccgcaaaggtaatctgatcgccctgcgcgaactggcactgcgccgtactgccgatcgcgttgatgagcaaatgcgcgcctggcgggggcatcctggcgaagagaaagtgtggcacacgcgcgacgcgatccttttatgcatcggccataacaccggcagcgaaaaactggtccgcgcagcggcgcggctggcgtcacggctgggtagcgtctggcacgcggtgtatgttgaaacccctgccctgcaccgcttaccggaaaaaaaacgtcgggcaattctcagcgccttacgtctggcgcaggaactgggcgcggagacggcaacactttctgatccagcggaagagaaagcggtagtgcgttatgcccgtgaacggggatcatctagagtgacttgcacgctgcactttcgccgcaaaacatggttcatcccaatgctgaacggtgaacgggtaatcgtcgaaatcgagactttccacgcgagtaaacggcggcaccgcatagatgcgcttatcgcgccccgcgccgaacagttgcagggcgggcatcatgtccatttttgggttatcgaatttcgggatcggcgacgggtccatcacgtagcgcccatttaccttcaccggataggcgtaggtggtggcgatataaccgaagcgggcgatatcttcatacagtttcacctgcatcacgccgtactcttccagcgcgtgcatggtgcgggtttccgtttcgcgcggctcgataaagcgcagcggctcggggattggcacctggaagataattatctgatcttcggtcagcggcgtttcggggatgcggtgacgcgtctggataaccgtcgcatcgtccaattgcagcaatatggcgacgccattacattgtgtttctcaaaaagcttaaacgttggtaaaccggcccggtttagtgaggatcgcccgttgtcagaactactctctttcgccctttttctcgcctctgtgctgatttacgcatggaaagcgggacgtaacacctggtggtttgcagccacgttaacggtgctggggctatttgtcgttttaaatatcaccctgtttgccagcgactattttactggcgatggtattaacgacgcggttctctataccttaaccaacagcctgaccggtgctggcgtcagcaaatacattttgccgggtatcggcattgtgctggggctgacagcggtgttcggtgcgctgggctggatcatgcgccgtcgtcgccatcatccgcaccattttggttacagcctgctggcgctcttactggcgctgggttcggtggacgccagcccggcatttcgtcagataacggaactggtgaaatcccagtcacgcgacggcgag

SEQ ID NO: 25464 - DNA, 1998 bp, Homo sapiens
  SIMILAR (1059)..(1085): 1001254mologous to Escherichia coli Glutathione-dependent formaldehyde dehydrogenase (EC 1.2.1.1) (FDH) (FALDH),accession number D90701,Smith-Waterman Score=52.
atggtcggcgtgcgttttgcgttgggcctgatgtggctgacgctgattgttgccgaaaccatttctgccaattcaggcattggttatctggcgatgaatgcgcgggagtttttgcaaacggacgtggtggtagtcgctattattctttacgccctgctcggcaaactggctgacgtcagcgcgcagctgttagagcgcctctggttgcgctggaacccggcttatcatttgaaggaggccacgttatctgccgaacaggctgctcgcatcagggaaatgacggtcatcacctccagcctgatgatgagtctgaccgtcgatgaaagcgatctttctgtgcatctggtaggacgaaaaatcaataaacgggaatgggctggcaacgcgtctgcatggcatgacacaccggcggttgctcgtgatttatcacacgggctttcctttgctgagcaggtagtttctgaagcacattccgcaatagtgattctcgacagccgggggaatatccaacgcttcaatcggttatgtgaagattacacagggttgaaagaacacgacgtcattgggcaaagcgtgtttaaactgtttatgagccgtcgtgaagctgcggcatccaggcgcaataaccgtgtattttttcgaagcggcaatgcatatgaagtagaaaatgttcccgatccgggcgttgaacaggcagatgatattattctgcgtattacggcaacggcgatctgtggctctgacctccatctttatcgaggcaaaatacctcaggttaaacatggcgatatttttggtcatgaatttatgggggaagtagttgaaaccggaaaggacgtaaaaaatttgcaaaaaggcgaccgagtggtaattccgttcgtcattgcttgtggcgactgttttttctgtcgattgcaacaatatgccgcctgcgaaaataccaatgcgggtaaaggcgctgcgctcaataaaaaacagataccagctccagcggcattgtttggttatagtcacctgtatggcggcgttcctggtgggcaggcggaatatgtccgcgtcctaaagggaatgtggggccgtttaaatgacgcgcagcctggtttccgctcatctcgccctctacggtatggagctggcatcatgactttacttaacatctccggcctttcccatcactatgcgcacggtggatttaacggaaaacatcaacatcaggcggtgctgaataacgtttccctgaccctgaaaagcggcgaaaccgtcgccctgctggggcgcagcggctgcgggaaaagtaccctcgcgcggttgctggtgggtttagaatcgcccgcgcaggggaatattagctggcgtggcgaaccgctggcgaaactcaatcgcgcccagcgtaaagcgttccgccgcgatattcagatggtatttcaggactccatcagcacctgtgaatccgcagccaaaccgtctgcatattgtacttttcctcttactcgacttaaccagtaccaacccagcttctcaacggatttataccatggcactttaaagccagcatcactgacaatgagcggtgtggtgttactcggtagaatgctcgcaagaccagtcaacaagtacaatgggcatcgtattgcccgaacagataaagctagcatgccaacggtatacagcgagtcgctctttgtggagcccttggagcgcgttttatacgtcgctgtaatactgactcagataataagaggcttgcgggacactgaaatcgagacgataaaccctgatatcgcagtccacttcgcgctttgtttccacgggttaggttcaattcccaccaagggtgctgaaaaatcccctttcctgactatccataaggtacgcgttaaaccggatataccctcccccgtgtccatcatggcaccctgccgggcccatccaacatgtgaagctttgttcaataactccactgcgctacactctccctggttctgtgactctttgtga

SEQ ID NO: 25465 - DNA, 3039 bp, Homo sapiens
  SIMILAR (2587)..(2988): 991254mologous to Escherichia coli rhsA,accession number X78541,Smith-Waterman Score=707.
atgacacgcaaaccccgtcgccacgctctttctgtgcccgtgcgcagcggttcggaagtggggttcccgcagagcctgggggaggttcacgatatgttgtacgataaatcccttgagagggataactgtggtttcggcctgatcgcccacatagaaggcgaacctagccacaaggtagtgcgtactgcaatacacgcactggcccgcatgcagcaccgtggcgcgattctcgccgatggtaaaaccggcgacggttgcggcttgctgttacaaaaaccggatcgcttttttcgcatcgttgcgcaggagcgcggctggcgtttagcaaaaaactacgctgtcgggatgctcttcctgcatcaagatcctgaactcgccgctgccgcacgccgcatcgttgaagaagaactgcaacgcgaaaccttgtcgattgtggctggccgaattgatcgctgccacgctaaaagaaaccataattgggcatatcgccatcgtggcaataccgagacgtgcggagaacatttgcggaatggagaacggcgaaccgaccgagatatcaatcaccgaatttgccaccagtacgatttccaccgcaccggtgacaaagccggtaatgccgccactattggtctggtgctggttcttattcctgtggtgatgactgctattgttggctggcattggtttgatgcggcaacttatgcagctaactggaatactgcggataccactgatggtcatgcgatcattaaaagtattctgctctgcctgtgggccttcgtgggtgttgaatccgcagctgtaagtactggtatggttaaaaacccgaaacgtaccgttccgctggcaaccatgctgggtactggtttagcaggtattgtttacatcgctgcgactcagggcgaaaaagttaaatttcaaggccagctgaaagggcaacaacttacagtcagcgaactggatgtcgtcgcgtttgaaaatcagccgccggtaaaactggtgggggaatttgctatgccgctcgtgccggatggacttcctgtaagtgggcatgctactgcgacgttaaacttgccgcaggaaccgtcactggtggatgccgagctggactggcaggaaaatagcgggcaattgatcgtgctggcacgggataacggcgatccgttgctcgatttgccgtggcaaattactcgtcaacaattgaccgtaagcgatggtcgctggagctggccgtatgcaggttttcctttgagtggccgactgggtgtcaaagtcgacaactggcaggcagggcttgagaacgctctggtcagcggacgactgagtgtgctgacccaggggcaagcggtggcgctactggggaaaagggagttttacacgcgtatgcaatgccacctggcgatgtcgcaggacaaaggcgatttacatgctggtgagattggcccggttcgggtaaatggtcgctgggacggtattcgtctgcgcggtaacgcctggtggcctaaacaatcactgaccgtattccagccgctggtgccacccgactggaagatgaacttacgcgatggtgaactgtatgctcaggttgcattttctgctgcgcctgaacaaggattccgcgcgggaggacacggcgtgttgaaaggcggtagtgcctggatgccagataatcaggttaacggtgtcgattttgtcctgcctttccgttttgccgatggagcctggcatctggggactcgcggtcccgttacgttgcgaattgccgaagtgattaatctggtgacagcgaaaaatattacggctgatttgcaagggcgttatccgtggactgaagaagaacccttgctgttgactgatgttagcgtcgatgtgttaggcggcctggagcacttggagacgagtggctcgtgtgccctccatggaccctctctctccgttgggcacatcgagtctccagcgctacttgagatcatcggttgtctcattccttcgaccatcttcggcctatgctcgtccggtattgtgcaacatctacagttctacccacatatatgttccacggcgctaggtggcttcgacgcatatggtgagcaatggagcagcatccgagggtcaggtggtcgcgcgtcaattaccagtagatatgacgacaatggtcgtagccgccgtttccattgggatcctggagtcatctggttgctattcttactagaaacagcagccacgatatcttggtccaaagcatgggtatctggttataaacacgaaacagttgtcaccagaaccgcgcaagaggccacccatcagcacggcacgcaagttttcgcggtgctgtcgtatgtgtatgcactcgttagacgcgacttagccagccgcattgtctccacccagcatcatcaccgcgacctctccgtcgccacgctgcatgtgcacatcaaccacgacgactgtctggaaatcgccgtgttgaaaggtgacatgggtgacgtgcagcattttgccgatgacgttatcgcccagcgcggctttttcttcgctttttcgtatgaagatactgtcattaaaataatagaaaaggattttacgatgagcggaaaaccggcggcgcgtcagggtgacatgacgcagtatggcggtagcattgttcagggttcagccggggtacgtattggtgcccccaccggcgtggcctgttcggtgtgccccggcggagtgacgtccggccatccggtcaatcccctgctcggtgcaaaggtccttcccggtgaaaccgacatcgccctgcccggcccgctgccgttcatcctctcccgcacctacagcagttaccggacaaaaacgcccgcgccggtggggagcctcggccccggctggaaaatgcctgcggatatccgcttacagctgcgcgataacacactgatactcagtgataacggcggcagaagcctgtattttgagcacctgtttcccggtgaggacggctacagcccgcagcgagtcactgtggcttgtgcgccgcggcgtggcaaaactggatga

SEQ ID NO: 25466 - DNA, 2784 bp, Homo sapiens
  SIMILAR (2448)..(1783): 981254mologous to Escherichia coli 37KD protein, similar to YI22-ECOLI,accession number D85613,Smith-Waterman Score=1184.
tcatgctcccacgatggcgatatagggtaagtttttgataatccgtgacgtgcgttcttcaaacaccgaaagcccgctggcatcgatgtcattttcatcacgatgacgcaggtcgtgagttatcgcgatccccagcagcatcaccatgccaataaagatttcgatggattcagggttaagatgtgggaaatagcgcacgactaccacacgggtcatcagtaccaccacggcggcgatcagactttgcttccagccaaactggtagaaaatcgccaccagcgggaacagtgcaaaagctgaaaccaccggcgagcttaattcccccaggctacctaatacatccaccggcagcgcggtcagcagctggtttactggcaacaggcaagtaaggatcaacacgccccagatagcgccaagacccatccgcgccgaggtggatacccaggttgcggagttgcagcgactggagcgtgtgctgcagcgccagctaaccgccacgcaaccgaaattcaagaatatctccccgcatttacagcgcattaaagcgttcaaaaccctcgggtaaattggatccacgcagcactgcagcgaacgggccgaggccgacggcgacacgaacagcatggcgaagaccatttcgttaatggcgcggcaggcgtccatcaggcggcgaacgggctggtaaacccaccacggcaccaggttttcggcgctcatcaggccaaaggggatggagagaaccaccgccagcgcggtgccccagacggcgatttgcagcgtgacggccatttcggtgaggtaatcctgccactggctgaaatcgggcgggaagaagtcggcggcgaacgtcgccatgttgccgccgtctttgatcagcgtaagcggggccatttccgcgccctgccacgagacgaccaacacggcgagtacaacggcccagctcagaagcgagaaccagctgcgcttgggtggggcgatggtgatggtttgcatgtttggctccggtctgtaggccggataaggtgcttgcaccgcatccggcatcaacgccgaactcatcgcgcttagcgcgttgttcaggcggtccaggtcatccagctgcgcctgaatctcggtggtttttgccagcttgtcctgctcattcagtcctttattgcttttcacgccctgcatctctttaaacagcgcgagctggcgaatcggcaccagttgcaggtcgctggaagcgcggaatggcgcccagcccaggcgttccagcaccgctttttcttccggcgttttgccgtagttcataaagaagtcgtagatcttgtctttggtggtttcggaaagattcttgcgccagacgatcggatcgcctgggatcagcggcgacttccagatcaccttcagttctttcagcttctctggcgcggaggttttcagcttgtcgaggttttcggtgttgttggtggcaacatccacctgcttgcctgaccgtcctttgattaaatcacatgtcattacacactgcccataatgcaactccgaatacacgaagataacggcatgtacatctgcccggaatgtgcctacgaatggaacgacgcagaacctgcacaggaaagcgacgagctgatcgttaaagatgctaacggcaatctgctggctgacggcgacagcgttaccatcattaaagatctgaaggtgaaaggtagctcttcgatgctggtgttcgccggtatttaacgtcgcattcagacccgcagaaaccagaatgagatttttcagttcgcgatgataatagccaatatgcggatgccattcgttataatgctcgaacgcctctgcaaggttctttgctgccgttaacccgtctggtttgggcatgatactgatgtagtcacgctttatcgttttcacgaagctctctgctattccgttactctccggactccgcaccgccgtgttcttcggttcaagtcccaacatccgggcgaactggcgtgtttcattagcccggtagcatgaaccattatccgtcagccactccactggagacgacggaagatcgttgccgaagcggcgttccaccgctcccagcatgacgtcctgtactgtttcactgttgaagccgccggtagtgaccgcccagtgcagtgcctcacgatcacagcagtccagcgcgaacgtgacacgcagtctctctccgttatcacagcagaactcgaacccgtcagagcaccatcgctgattgctttctttcacggccactctgcctgtatgtgcccgtttcgatggcggtacagcaggttttcgctcaagcaacagcgcattctggcgcatgatccggtaaacacgtttggcattgatcgcaggcataccatcaagttctgcctgtctgcgaagcagcgcccatacccgacgataaccatacgttggcagctctccgataacatggtgtatacgagaagcacatggatcaggattgctgggcgtctttcttgccggaggaacggttgttctggcggccgatcccagcgccacgctcggatcgcgtggagtgtgtggattcacttccgctgacggcggtcgggaaagtcgataaaaaacaattacgtcagtggctggcgtcacgcgcatcagccagggctcaaaggaggagtccacttgcagaagccaggaagccacaatatgtgcaccaaggtatggacaacgcaaggacagctcttcagaaaccagagcaagcacgggcacacacagaggttcattggacttaacttccagtgtctgggcagcctccat

SEQ ID NO: 25467 - DNA, 1746 bp, Homo sapiens
  SIMILAR (692)..(832): 821254mologous to Escherichia coli phnD protein,accession number J05260,Smith-Waterman Score=190.
atgggcaacagggggtggaaccgcggatttttcgccggagttcgtctccttcccggagatacacaagtgcttcatgcgaaatggtgtgacccacaggcatttagcatagctcttctgggacggcgaattcaggtgctcaatcctatttatgttagtatgggtggagttcaaaaacttaagtatttagaaatgatgggaagtctaatgggtaaaacatgtttccgtgctaaagcaccctgtgaacttaagggaactctgtttgctcttggacaagtcctgatgtccagggacagacacccagtaagaagcaagtcagagcagaatgattccaaatgggctgctgtggaggaggaccctaggaccaggcatctaccaggcatctctggtattaccccatgtccaaggtcagcgcgtttccaccctctccgcggccagcagcaacgtgtggcgattgcccgtgcgctgatgcagcaggcgaaagtgattctggccgatgaacccatcgcctcgctggacccagaatcagcgcgcatcgtgatggacaccctgcgcgacatcaaccagaacgacggcatcaccgtggtcgtcacgctgcatcaggtggattacgccctgcgctactgcgaacgcatcgtcgccctgcgccaggggcacgtcttctacgacggcagcagccaacagtttgataacgaacgttttgaccatctctaccgcagcattaaccgccatgttcagcctcagcaccctgttaagcccggcgcacgccgaagagcaggaaaaggcgttgaatttcggcattatttcaacggaatcacagcaaaacctgaaaccgcatggacgccgttcttgcaggatatggagaagaagctgggcgtgaaggtcaacgccttctttgccccggactacgcgggcattatccaggggatgcgcttcaataaagtggatatcgcctggtacggcaatctgtcggcgatggaagcggtggatcgcgccaatggccaggtcttcgcccagacggtcgcggcggatggatcgccgggttactggagcgtgttgatcgtcaacaaagacagtccgatcaacaacctgaacgatctgctggcgaagcggaaagatctcacctttggcaatggcgatcctaactccacctctggcttcctcgtccccggctactacgtcttcgccaaaaacaatatctccgccagcgacttcaagcgcaccgtcaacgccgggcatgaaaccaacgcgctggccgtcgccaacaagcaggtggatgttgccaccaacaacaccgaaaacctcgacaagctgaaaacctccgcgccagagaagctgaaagaactgaaggtgatctggaagtcgccgctgatcccaggcgatccgatcgtctggcgcaagaatctttccgaaaccaccaaagacaagatctacgacttcttaatgactacttgccgatttggtgttttgtgtgcctggggaatgtttcgtcggtgtccatatgggggggttggcagcgacagagtgccaaaggccgacaccgccgctgtgtttatagtggtgtcgagtcgtagtcgtagtcgtagtcgtagtctagtcgtagtcgtagtgttagtcgtagtcgtagtcgtagtcagtgcggtcgtagtcgtagtcgtcgtagtcgtagtcgtatggtgccctgtccgtggtcgtgtcgtagtccagtccagtccagttcagtccagtgtcagtccatcgtcgtcgtag

SEQ ID NO: 25468 - DNA, 858 bp, Homo sapiens
  SIMILAR (298)..(549): 971254mologous to Escherichia coli alternate gene name yhhG,accession number U00039,Smith-Waterman Score=412.
atgaaaggcaccgttgaacgggccgatatgcactacatcatccgtgatttcgaccgtaaacagtttgaagcgcgtaaacgtaaaatgatggagatcgccaaaaaagcgggtgtcattcgcctgctgaaaaagctacaacaacagtttggcaccgcctgcctgttcatcacccacgacttacgcctggtagaacgcttttgccagcgggtaatggttatggacaacggacaaatcgtcgaaacccaggtggtgggagagaaattaaccttttcctctgacgccggacgtttaacgcaaatgcaacgagtcaccatcacgcttgatgacgatttactggagacgctggacagcctgagccagcgtcgtggttataacaaccgttccgaagctatccgcgacattctgcgtagcgccctggcgcaagaggccacccagcagcacggcacgcaaggtttcgcggtgctgtcgtatgtgtatgaacacgaaaaacgcgacttagccagccgcattgtctccacccagcatcatcaccacgaccttatttgtgcgaaaaccgatggttgtaacgaggctcgctggttctcgctgacgacgcgcaatgttaaaagaaggaaagcggctggcggacatcgccaaaaaacagccgctgaccctgctctactcagcaaaaaacaccacgcagaaccatgcgctggtgctggccgactggctaccgcggcaatggaagacggcgatgcactgattttcatgaacttccgtgctgaccgcgcgcgtgaaatcactcgtgctttcgtgaacgctgatttcgatggcttcgcgcgtaagaaagtggttaatgaagatctcggtaccgtaccg

SEQ ID NO: 25469 - DNA, 291 bp, Homo sapiens
  SIMILAR (32)..(70): 461254mologous to Meleagris gallopavo adrenergic beta-4c receptor,accession number U13977,Smith-Waterman Score=37.
atggtcgcaagccttgtgttctctgacctggggttcttggcctcacggattccaaagaatggaatcttgggccatgcgggcaaacccgggcacttagctgtgcaggaacaatggcgagcctttagccagatcaggagcagcaatgggcgccttgctggatcgggagcacagcagacaccctgccggatctggagggatggaagtcagcagcaggtctgcgacagcggcgggtctgtgacagcggcaaacaccagtggtgggcagcaagtgaaagctcagctcgagctgtaa

SEQ ID NO: 25470 - DNA, 4484 bp, Homo sapiens
  SIMILAR (2589)..(2810): 871254mologous to Escherichia coli nikE,accession number U00039,Smith-Waterman Score=321.
atggcccccatttcatgtctgtggctcaccagcttttccccagacccagctccggagcccacaggcgtggccgatgcagaaacctcaggaagaatacggcgggcgaagattacaaggagggcggtagcaggaaggactccggccagtacgaaaaggactttctggaggcggatgcttacggagtctcttacaacatgaaagctgacatagaagatgagctagataaaaccattgaattgttttctaccgaaaagaaagataaaaatgattccgagagagaaccttccaagaaaatagaaaaggaactaaagccttatggatctagtgccatcaacatcctaaaagagaagaagaagagagagaaacacagggagaaatggagagacgagaaggagaggcaccgggacaggcatgcggatgggctgctgcggcatcacagggacgagctcctgcggcatcacagggacgagcagaagcccgccaccagggacaaggacagcccgccccgcgtgctcaaagacaagtccagggacgagggcccgaggctcggcgatgccaaactgaaggagaaattcaaggacggtgcagagaaagaaaagggcgacccagtgaagatgagcaacgggaatgataaggtagcgccatccaaagacccaggcaagaaagacgccaggcccagggagaagctcctgggggacggcgacctgatgatgaccagcttcgagaggatgctgtcccagaaggacctggagatcgaggagcgccacaagcggcacaaggagaggatgaagcaaatggagaagctgaggcaccggtccggagaccccaagctcaaggagaaggcgaagccggcagacgacgggcggaagaagggtctggacattcctgctaagaaaccgccggggctggaccctccatttaaagacaaaaagctcaaagagtcgactcctattccacctgccgcggaaaataagctacacccagcatcaggtgcagactccaaagactggctggcaggccctcacatgaaagaggtcctgcctgcgtcccccaggcctgaccagagccggcccactggcgtgcccacccctacgtcggtgctatcctgccccagctacgaggaggtgatgcacacgcccaggaccccgtcctgcagcgccgatgactacgcggacctcgtgttcgactgcgccgactcgcagcactccacgcccgtgcccaccgctcccaccagcgcctgctccccctcctttttcgacagagctataacacttaccgcatggcccaagattccattccttggaatccataaggccaagaaccccaggtcagagaacacgacgcttgccaccatcttggaagcagcctgccgccattttggaagctgcccgctaccatcttgggagctctgggagcaaggaccccctagtaacacatccacatacgtccgctatccaaatgtccatccatatacgtccactatccaaatgtcgaaatatccactgtccaaatacgccccatggggcgggatgtgggatcctgggaccaagccagcttctcacaaaggaggggggtcaggcagcagcagctcagggcaggctcagggagagcaggagggcggcagcgggggctgccagcaggctccaggggcgccgccgtctctcctgaccgccacaggcttcctgggccacctcaatcagatgccggtgctgtgtgaatcaccgtttatcatcgccgatgaaccgaccaccgaccttgacgtggtagcacaggcgcgcatcctcgatctgctggaaagcattatgcaaaaacaagcgccgggaatgctgctggtgacccatgatatgggcgttgtggcgcgtctggcggatgacgtggcggtgatgtctgacggtaagattgtcgaacagggcgatgtagaaacgctgtttaacgcccccaaacatacagtgacgcgcagcctggtttccgctcatctcgccctctacggtatggagctggcatcatgactttacttaacatctccggcctttcccatcactatgcgcacggtggatttaacggaaaacatcaacatcaggcggggctgaataacgtttccctgaccctgaaaagcggcgaaaccgtcgccctgctggggcgcagcggatgtgggaaaagtaccctctcgcgagtgctggtggggttagaatcccccgcgcaggggaatattagctggcgtggcgaaccgctggcgaaactcaatcgcgcccagcgtaaagcgttccgccgcgatattcagatggtatttcaggactccatcagcgccgtgaatccgcgcaaaaccgtgcgcgagatcctgcgtgaaccgatgcgccacctgctatcactgaaaaaatccgaacaactggcgcgcgccagcgaaatgctgaaggcggtcgatctcgatgacagcgttctcgacaaacgcccaccgcagttaagcggcggccagctccagcgcgtctgcctggctcgcgcgctggcggtcgaaccgaaactactgattctggatgaagccgtttctaaccttgatctcgtgttacaggcgggtgtcattcgcctgctgaaaaagctacaacaacagtttggcaccggcttccctgttcatcacccacgacttacgcctggtagaacgcttttgccagcgggtaatggttatggacaacggacaaatcgtcgaaacccaggtggtgggagagaaattaaccttttcctctgacgccggacgtgtgctacaaaacgcggtattacccgcattccccgtgcgccgtcgcaccacagaaaaggtttaacgcaaatgcaacgagtcaccatcacgcttgatgacgatttactggagacgctggacagcctgagccagcgtcgtggttataacaaccgttccgaagctatccgcgacattctgcgtagcgccctggcgcaagaggccacccagcagcacggcacgcaaggtttcgcggtgctgtcgtatgtgtatgaacacgaaaaacgcgacttagccagccgcattgtctccacccagcatcatcaccacgacctctccgtcgccacgctgcatgtgcacatcaaccacgacgactgtctggaaatcgccgtgttgaaaggtgacatgggtgacgtgcagcattttgccgatgacgttatcgcccagcgcggcaggatccccagcgacttcaagcgcaccgtcaacgccgggcatgaaaccaacgcgctggccgtcgccaacaagcaggtggatgttgccaccaacaacaccgaaaacctcgacaagctgaaaacctccgcgccagagaagctgaaagaactgaaggtgatctggaagtcgccgctgatcccaggcgatccgatcgtctggcgcaagaatctttccgaaaccaccaaagacaagatctacgacttctttatgaactacggcaaaacgccggaagaaaaagcggtgctggaacgcctgggctgggcgccattccgcgcttccagcgacctgcaactggtgccgattcgccagctcgcgctgtttaaagagatgcagggcgtgaaaagcaataaaggactgaatgagcaggacaagctggcaaaaaccaccgagattcaagcgcagctggatgacctggaccgcctgaacaacgcgctaagcgcgatgagttcggcgttgatgccggatgcggtgcaagcaccttattcggcctacagaccggagccaaacatgcaaaccggtacgaactctagctcggtaccccacctggaagataattatctgatcttcggtcagcggcgtttcggggatgcggtgacgcgtctggataaccgtcgcatcgtccgtacgttccgtggtgtttaccccggtcacgcgcttgaagaagttgcgaatcgacacggcgttggtggtgtcatccgcgccctggtcaatcaccttcagcacgtcgctttcgccaatcacgctggcgagcgcgggtcgaccatcgccatattcatgggttttggctcgctcatgccgaacaccagcccgttgtggcgcaggacgtccctccttatgtcattgcgcagggtaaccacgcaacgccgttcgggtgtcaatatagaagggctgaagcgccgcggattcagccgtgaggcgattccggctatccgcaatgcgtaataagctgatttatcgtagcggtaaaacgctcgatgaagtgaaaccggaaattgctgaactggcggaaacatatccgaaagtgaaagcctttaccgatttctttgcacgctcaacgcgcggtctgattcgttaatgactgaacagcgtccattaacgattgccctggtcgccggagaaacctccggcgatatcctgggggccggtttaatccgcgctttgaaagaacatgtgcccaacgcccgctttgttggcgtccccgggccacgaatgcaggttgaaggctgcgaagcctggtacgaaatggaagaactggcggtgattgtca

SEQ ID NO: 25471 - DNA, 1302 bp, Homo sapiens
  SIMILAR (11)..(67): 941254mologous to Escherichia coli peptidase N,accession number M15273,Smith-Waterman Score=102.
atgcttgcggtcgaatgtcgatctctcccatttccgccgttggtacagccagtccggtacaccgatgtgaccgtcaaagacgactacaatccggaaaccgagcagtacaccctgaccatcagccagcgcacgccagccacgccggatcaggcagaaaaacagccgctgcatattccgtttgccatcgaactgtatgataacgaaggcaaagtgatcccgttgcagaaaggcggtcatccggtgaattccgtgctgaacgtcactcaggcggaacagacctttgtctttgataatgtctacttccagccggtgcctgcgctgctgtgcgaattctctgcgccagtgaaactggaatataagtggagcgatcagcaactgaccttcctgatgcgtcatgcgcgtaatgatttctcccgctgggatgcggcgcaaagtttgctggcaacctacatcaagctgaacgtcgcgcgtcatcagcaaggtcagccgctgtctctgccggtgcatgtggctgatgctttccgcgcggtactgcttgatgagaagattgatccagcgctggcggcagaaatcctgacgctgccttctgtcaatgaaatggctgaattgttcgatatcatcgacccgattgctattgccgaagtacgcgaagcactcactcgtactctggcgactgaactggcggatgagctactggctatttacaacgcgaattaccagagcgagtaccgtgttgagcatgaagatattgcaaaacgcactctgcgtaatgcctgcctgcgtttcctcgcttttggtgaaacgcatctggctgatgtgctggtgagcaagcagttccacgaagcaaacaatatgactgatgcgctggcggcgctttctgcggcggttgccgcacagctgccttgccgtgacgcgctgatgcaggagtacgacgacaagtggcatccgaacggtctggtgatggatcactggtttatcctggcagccacccggcccgcggcgaatgtgctggagaccgggcgcgggctgttggagcatcgctcatttaccatgagcaacccgaaccgtattcgttcgttgattggcgcgtttgcgggcagcaatccggcagcgttccatgccgaagatggcagcggttacctgttcctggtggaaatgcttaccgacctcaacagccgtaacccgcaggtggcttcacgtctgattgaaccgctgattcgcctgaaacgttacgatgccaaacgtcaggagaaaatgcgcgcggcgctggaacagttaaaaaggctggaaaatctctctggc

SEQ ID NO: 25472 - DNA, 1056 bp, Homo sapiens
  SIMILAR (502)..(993): 961254mologous to Escherichia coli unidentified protein,accession number J01663,Smith-Waterman Score=787.
atggataaggaagacttcctgatccagattatggctggcgaagagttcggcgatgtcgaagcgattttccacgaaggcgcgtgctcttccaccaccgagtgggacggcaagggagtagtaatgagcaactctgaagggccactggtatctgccggtatcaccgacattaacattgaagacgaccagggcattcacgtccgcctgatagttcgtgatgccgaagacgctttgaacctgaatacacactcggggcgagcgccagtgcagttgttggggcgttactggctgatcaccaatggcaatggccgtgaaaccgaagtccagggcgaaggagtggttggcgtccagccacttatcgcgcctggcgaagagtaccagtacaccagcggtgcaatcattgaaaccccgctgggcaccatgcagggtcactacgaaatgatcgatgaaaatggcgtccctttcagcatcgacattccccgacccctgacacaaacgcattttgtgatgagtgcgcctgatattcgccacctaccttccgataccggaattgaagtggcttttgcaggccgttccaacgcaggtaaatccagcgcgctgaacacgctgactaaccagaaaagcctggctcgtacctcaaaaaccccagggcgcacccagcttatcaacctgtttgaagtggctgacggcaagcgtctggttgacttgcctgggtacggttatgcggaagtcccggaagagatgaagcgcaaatggcagcgtgcgctcggcgaatacctcgaaaaacgtcagagcctgcaaggtctggtggtgctaatggatattcgccatccgctgaaagatttggatcagcagatgattgagtgggcggtagacagcaatatcgccgttctggtgctgctgaccaaagcggacaaactggcaagcggcgcacgtaaagcgcaattgaatatggtgcgtgaagctgtactggcgtttaaacacatcatctcggtacccgtccacgccgccgctgcagcgggtcttttattctctgccatgattttgccagtccgttaa

SEQ ID NO: 25473 - DNA, 1803 bp, Homo sapiens
  SIMILAR (34)..(741): 901254mologous to Escherichia coli Ferrienterochelin receptor precursor,accession number D90700,Smith-Waterman Score=1160.
atgatagagtcaactagtaggtatgatacatgccatacccgctcgaaatatggcgatgaaaccaaccgtctgtatcgccagtactacgcgctgacctggaacggtggctgggataacggcgtgaccaccagcaactgggtgcagtacgaacacacccgtaactcgcgtattccggaaggtctggcgggcggtaccgaagggaaatttaacgaaaaagcgacacaggatttcgtcgatatcgatcttgatgacgtgatgctgcacagcgaagttaacctgccgattgatttcctcgttaaccagacgctgacgctgggtacggagtggaatcagcaacggatgaaggacttaagttccaacacccaggcactgaccggaacgaataccggtggcgctattgatggcgtgagtaccaccgaccgtagcccgtattcaaaagcagaaattttctcgctgtttgccgaaaacaacatggagctgactgacagcaccatcgtaacgccggggctgcgtttcgatcatcacagtattgtcggcaataactggagcccggcgctgaacatatcgcaaggtttaggcgatgacttcacgctgaaaatgggcatcgcccgtgcttataaagcgccgagcctgtaccagactaacccgaactacattctctacagtaaaggtaacgatgacctgaaagcagaaaccagcatcaacaaagagattgtctggagttcaacgcgacggtactggcggcgtcacctgttccgaacgatatcgcataggaccggccatcactccgtgcttgttgtgcgttgtaagaacgtcagtgtttcctgcgcgtacacgcaaggtaaacgcgaacaattcagcggctttaaccggacgctcgacgccattaataatgttttccgtaaattcagcgccttccatgatgagacaggtgcgcgtgatattcgccacgtaccttgcgataccggaattgaagtggcttttgcaggccgttccaacgcaggtaaatccagcgcgctgaacacgctgactaaccagaaaagcctggctcgtacctcaaaaaccccagggcgcacccagcttatcaacctgtttgaagtggctgacggcaagcgtctggttgacttgcctgggtacggttatgcggaagtcccggaagagatgaagcgcaaatggcagcgtgcgctcggcgaatacctcgaaaaacgtcagagcctgcaaggtctggtggtgctaatggatattcgccatccgctgaaagatttggatcagcagatgattgagtgggcggtagacagcaatatcgccgttctggtgctgctgaccaaagcggacaaactggcaagcggcgcacgtaaagcgcaattgaatatggtgcgtgaagctgtactggcgtttaacggtgatgtgcaggttgaaacgttttcttcgttgaagaaactaggcgtggacaagctgcggcagaaactggatacctggtttagcgagatgcagcctgtagaagaaacgcaggacggcgaataattttcttgccttaatgcttgtgctggatgtggcgtatccggcccgtaaattcaatagattacaattctcccgttggcctgataaacatagcgcatcaggcattacggatcttttctttcgcccaataaaaaacgccccagtcatttctgcttggggcggctaaaatattcagccaactccgatttcgcaaagtaaaaggtgtgaaagatagaccattttacctttgtaacgaactcgtcaggccgggatctccgctccggttcctgcaggcgtcccccc

SEQ ID NO: 25474 - DNA, 1121 bp, Homo sapiens
  SIMILAR (666)..(1118): 991254mologous to Escherichia coli unidentified protein,accession number J01663,Smith-Waterman Score=757.
agcgcggacggcatacacgtgcatcgcctcgcgcctacggccaaaatggcggcttccggtcagatgcagtaaggttttcagatcgcgtaaatcctcagggacagccctcgatgttgacgttgcaaaaattgcaatgtgacgttgtagtacagcaccttaacaggaagacaccattggatcaggggtcctcaggtgaggtgaatgtgcagcaaaagattacatcaggagcaggtctgaagccctgcatgcgcctgccagtggcaggcttctgtgatgctttgccccacttctcacaaagcatggcttctggggacaggacagagttgcaggatgctcagtcagtgctccttgagtgcatgaagggcacacaggcaaagatgacacaaggtgagagctttgcggaaggaggctgcaaagaatgggaggtagcaaactgcaagcactttcctgaaaagggggaaatgcgcgtcacggcaaagcaagctgtgcggcaaccgccgcagaaagcgccgccagcgcatcagttcatattgtttgcttcgtggaactgcttgctcaccagcacatcagccagatgcgtttcaccaaaagcgaggaaacgcaggcaggcattacgcagagtgcgttttgcaatattcttcatgctcaacacggtactcgctctgggcggcacccagcttatcaacctgtttgaagtggctgacggcaagcgtctggttgacttgcctgggtacggttatgcggaagtcccggaagagatgaagcgcaaatggcagcgtgcgctcggcgaatacctcgaaaaacgtcagagcctgcaaggtctggtggtgctaatggatattcgccatccgctgaaagatttggatcagcagatgattgagtgggcggtagacagcaatatcgccgttctggtgctgctgaccaaagcggacaaactggcaagcggcgcacgtaaagcgcaattgaatatggtgcgtgaagctgtactggcgtttaacggtgatgtgcaggttgaaacgttttcttcgttgaagaaacaaggcgtggacaagctgcggcagaaactggatacctggtttagcgagatgcagcctgtagaagaaacgcaggacggcgaataa

SEQ ID NO: 25475 - DNA, 1179 bp, Homo sapiens
  SIMILAR (403)..(606): 951254mologous to Escherichia coli inorganic pyrophosphatase,accession number M23550,Smith-Waterman Score=343.
gacctgcgaaaatccaacggttaatggagcggccaacgccatagacgacatggctgccgagactgcagagactataagtaagcgtttccacatagggttgtcctcgtcggggtagttattattggttaaaagatgttcgcgaaaaaactatagacaattcgttatgtaacagattgcgttacatcacacttcaaaaaagtaaataaaacgttaatcacaagtttgtaatcgctttcatctcactatgaaaaatgcggctacggttatggattttcctgctctgtataccgtcttaaaactggtgaaaaaggaaaatgaagacgaaaacaagcgaagacattcggcgcgagttggctataatactcggcacttgtttgccacatatttttaaaggaaacagacatgagcttactcaacgtccctgcgggtaaagatctgccggaagacatctacgttgttattgagatcccgcgtaacgcagatccgatcaaatacgaaatcgacaaagagagcggcgcactgttcgttgaccgcttcatgtccaccgcgatgttctatccatgcaactacggttacatcaaccacaccctgtctctggaggaggatagcgaccatgctgcgggcattagcccgccttcttctcaggatatgtttttctggccggactctaaagattgcctgcttactgttacttgtggcaggagcgaccatccttatcgccgatcgccagcgttgtaccacgccggaaaagtgaaatggctgctggtaagtggcgataacggacgtaaaaattacgatgaagcatcaggtatgcagcaggctttgatcgctaaaggcgtaccagcaaaagtgatcttctgcgactatgccggattctcaacgctggattcggtagtgcgtgccaaaaaggtttttggtgaaaaccatatcaccattatctcgcaagaatttcataatcaacgcgccatctggctggcaaaacagtacggcatcgacgctatcggttttaacgcgccagacctcaatatgaagcacggtttttatactcaactgcgggagaaactcgttattgcaaagggacatgggagcctactcacagacctcccagtggccaaagctggaacaatgtgggcaatagaaatagatgacgtggccaggcacagtcgctcacacctataa

SEQ ID NO: 25476 - DNA, 627 bp, Homo sapiens
  SIMILAR (627)..(133): 981254mologous to Escherichia coli K12 orf, hypothetical protein,accession number AE000233,Smith-Waterman Score=811.
tcaatccgttctactcagcgatgcgtaacatcggcgggtattcgtcacattctggcgcgtcatgtggaaggtgcttcgcacatggcggaaggttatacccgcgctacggcagggaatatcggcgtatgtctggggacttccggtcgatgctgctttcggctctgctggtaaattatcgcccggtatgcagtaacgaaatttaccgccctgatttacgcgaatcagacgacctttgctgattgccattgccagcgttgaagccactttgcgtgatgtggtaccaaacaatgtagccagctcatcagccgtttgtggtcctcgttgttcaatcgtcgcggttaaatcgcactctgagattttcgctactgttgctgtggtgatttcttccggcagttctgcctgcgctggctgttcctgctgaacattgttatcagccacacgccaggtgtacgcgcttttatcaacaaaaccagcctttttcagttcccatagttcgttcagcacttcttcacgactgatatcaagtcgcgcagcaagttctatggatgtggcttttcccattgctttcagtgcgtcaaaaacagtctccattaaatttttctcccggtaaaaattacttcgcaattc

SEQ ID NO: 25477 - DNA, 1227 bp, Homo sapiens
  SIMILAR (487)..(1212): 971254mologous to Escherichia coli glyoxylate carboligase,accession number L03845,Smith-Waterman Score=1237.
gggcagaattacacttcaattctggctgggtggccaccggataccaacgttgaagagttcgaatttgccattcgtacggtctgtgaacctatctttgagaaaccgctggccgaaatttcgtttggacatgtactgttaaatctgtttaatacggcgcgtcgcttcaatatggaagtgcagccgcaactggtgttactccagaaaaccctgctctacgtcgaaggggtaggacgccagctttatccgcaactcgatttatggaaaacggcgaagcctttcctggagtcgtggattaaagatcaggtcggtattcctgcgctggtgagagcatttaaagaaaaagcgccgttctgggtcgaaaaaatgccagaactgcctgaattggtttacgacagtttgcgccagggcaagtatttacagcacagtgttgataagattgcccgcgagcttcagtcaaatcatttggcccagcccaattggccgcgcctgtccccggatcccggtattctctcggagcctaaagcggcgctgacactgctggtagaagtggcgcaggagatgcaaaaagcgggtcgtctgccgtgtcgtaaagaatgggtcgccgactgccagcagcgtaaacgcactttgctgcgcaaaacccacttcgacaacgtgccggtgaaaccgcagcgcgtgtatgaagagatgaacaaagcctttggtcgcgatgtttgttatgtcaccaccattggtctgtcacaaatcgctgcggcacaaatgctgcatgtctttaaagaccgccactggatcaactgtggtcaggctggtccgttaggctggacgattccggctgcgctaggggtttgtgccgctgatccgaaacgcaatgtggtggcgatttctggcgactttgacttccagttcctgattgaagagttagctgttggcgcgcagttcaacattccgtacatccatgtgctggtcaacaacgcttatctggggctgattcgtcagtcacaacgcgcttttgacatggactactgcgtgcaactcgctttcgagaatatcaactccagtgaagtgaatggctacggtgttgaccacgtaaaagtagcggaaggtttaggttgtaaagctattcgggtcttcaaaccggaagatattgcgccagcctttgaacaggcgaaagccttaatggcgcaatatcgggtaccggtagtcgtggaagtattctcgagcgtgtga

SEQ ID NO: 25478 - DNA, 1470 bp, Homo sapiens
  SIMILAR (1)..(687): 1001254mologous to Escherichia coli livF,accession number U00039,Smith-Waterman Score=1157.
atggaaaaagtcatgttgtcctttgacaaagtcagcgcccactacggcaaaatccaggcgctgcatgaggtgagcctgcatatcaatcagggcgagattgtcacgctgattggcgcgaacggggcggggaaaaccaccttgctcggcacgttatgcggcgatccgcgtgccaccagcgggcgaattgtgtttgatgataaagacattaccgactggcagacagcgaaaatcatgcgcgaagcggtggcgattgtcccggaagggcgtcgcgtcttctcgcggatgacggtggaagagaacctggcgatgggcggtttttttgctgaacgcgaccagttccaggagcgcataaagtgggtgtatgagctgtttccacgtctgcatgagcgccgtattcagcgggcgggcaccatgtccggcggtgaacagcagatgctggcgattggtcgtgcgctgatgagcaacccgcgtttgctactgcttgatgagccatcgctcggtcttgcgccgattatcatccagcaaattttcgacaccatcgagcagctgcgcgagcaggggatgactatctttctcgtcgagcagaacgccaaccaggcgctaaagctggcggatcgcggctacgtgctggaaaacggccatgtagtgctttccgatactggtgatgcgctgctggcgaatgaagcgtcggagagaaaattatggctggagatgttatctcccccaaaagacgactctaaggatccccaggcaaaactgtttatcaccgcagcaaccgaaggtcggggaatggatgccctgcgcgagcatctgcttcagttgccggaacgcgagcacgccagccaacatagtttccgcctcgcgattgaccgcgcatttaccgtaaaaggtgccgggctggtcgtcaccggtacggcgttaagcggggaagtgaagataaccttgctgaactggtcttcgacaccccgttatggctggcagaatgatacgcccaacgcgccggtggtgacgcgtgaagcgcagttagatattcagtcgcaatcacaaccgccgacagaagaacagctgcgggcgcaattagttaccccacaaaatgatcctgatcaggtggctccggtcgctccagaacctatacaggaaggccagccagaagagcagccgcaaactacccaaacgcaaccattccagccagatagcggaattgataatcaatggcgctcttaccgtgtcgaacccggtaaaacgatggcgcagctgttccgcgaccacggactgcccgctaccgatgtctatgcaatggcgcaggtagaaggcgcgggtaagccgctgagtaatttgcaaaacgggcagatggtgaaaatccgccagaacgccagcggcgtggtgacgggcttaaccattgatacggggaataatcaacaggtcctgttcacccgccagccggatggcagttttattcgtgcgcggtag

SEQ ID NO: 25479 - DNA, 1023 bp, Homo sapiens
  SIMILAR (882)..(343): 981254mologous to Escherichia coli p-aminobenzoate synthetase,accession number K02673,Smith-Waterman Score=938.
ttaccgaattttcgtttcacaggaagagaaagttatttcgtcagtcccaggcgttcgggtgctaactgcctggagttcacagctacttccagttaggccgctgtggatagtttctccaagtggaataggagttaaaagcacatgagcatgcaactgggatgcacttctgtcatgttctagcaccactgtcttagtatcggtctgttcgtgcgtgcccgtgatgccatctactgtatggccgggatgttgtacaggtgatctagcaagtcccgtgtgttctgatgagacagaggttttgagagcacagaggtacgccaaagggctctggttaaaacaaagaggtacctggcgaaatttttcgccgtactgctcgcgggtcatattggattgccagtcggaagtgagcgtgaaatcttcctgcggcgagaattgctggctttccagccaggcccgacgggcattgacatcattatgactcagcaaagaaactgtatgacgctggtggtcgacaatgagcgcccaatcgtagatacccactgccatatccggcagaacgatatcttgttccgcaatttctggcagtgactcaaaacggcggcccagatcgtagccaaacaaccccagtgcgccgccctgaaatggcaaatcttcgttatgcgttgggcgaatgtctgcgcgatccagcacctgctggagcacctgtagcgggtcatcagtggtcgttgtgcgtttttcgctttcactaacaacggtttctttaccgaaagtggttaaagtgcaaatcggctcggcgaccacaatatcaaagcggctatacggatgatcggcatagccggagtgtaaaagcatcgcccacggcaggtggctcgctcggagaatgtagccgcgtacaggtatcagttccgtaatcagcactgtcacgcacatcaacaggtatgagcccaaatgaaagccagcatgcactgtgattttccggagtcgcaagcctggtcttatcaatcccagattagcaccggccaccat

SEQ ID NO: 25480 - DNA, 759 bp, Homo sapiens
  SIMILAR (749)..(654): 441254mologous to Homo sapiens zinc finger=ZNF126,accession number S52507,Smith-Waterman Score=70.
aagcaggtagttatcgtctttaatgtcgaggatttttttgcgcgcggtatcgatgcaatccgaaatgtcctcgtacaactgataccgtatctccggcaatctgacggcaatgttaatatcagtcaccaactcgctgaagccaatccaaagctgatcaccttctggatcgcggcgaacgatatgcacgttttcaagaattttttcggcccctgctttttccacgtatagcatgcaaggaataggctggctttcgtggtgctgccggatcagttgcgtgcaacagcactcgacccaaaaattcgctgacgtcatggagcgatttgaagacggaattctttagtcgttctcgcttttcaatgaatgtcagtttatgaatatcagacatttcttttggtcggagaaaaacctcatccaaccattgacagacgttatccgcgatgtgcttgtagcggtatttcttaagtgagtactgctgatgtagaacctggcctttacgcttagcgcagaccgaagccataggcgctctaaatggcgtaaggatgtggggtaagtcccgtttgacgtagattttgcggcctgaccgagattggtcatcttcgacacgctgcttgaaccactcaagtaggtctggtcgtaagtaggacttgtcatcagcactgtgaatgcgtcgagaatgctcgcccttgcgcgtcacagtatcaaggatgcggccccaaatgtcttcggcgacggtttcgaaactgagaatgaccccatgta

SEQ ID NO: 25481 - DNA, 4570 bp, Homo sapiens
  SIMILAR (2570)..(3457): 991254mologous to Escherichia coli K12 putative enzyme,accession number AE000280,Smith-Waterman Score=1575.
tgacgccgatgaagcagcaaatcaccctggcagacgtggccgacattaaagtctctaccggaccgtcgatgctgaaaaccgagaatggcgcgcccgacgagctggatttatatcgatgcccgcgatcgtgacatggtgtcggtggttcacgatttgcaaaaagcgatagctgaaaaagtgcagttaaaaccgggcaccagcgtggcattctccgggcagttcgagctactggagcgcgccaaccataagcttaaactcatggtgccgatgacgttgatgattatcttcgtgctgttgtatctggcgttccgtcgggtgggcgaagcgttgctgattatcagcagcgtaccgtttgcgctggtgggcggcatctggttgctgtggtggatgggctttcatctttccgtggcgacgggcactggctttatcgccctcgccggggtcgccgccgaatttggcgtggtgatgctgatgtatttacgtcacgccatataggccgtgccgtcgttgaataatccacaaacattcagcgagcagaagctggatgaggcgttatatcacggcgcggtcctgcgcgtgcgcccgaaagcgatgacggtggcggtgattatcgccggtctgctgccgattctgtggggaacgggggctggttcagaggtgaagagcccggattggcgcgccgatgattggcggcatgatcaccgcacctttgctgtcgctgtttattatcccggcggcgtataagctgatgtggctgcaccgacatcgggtgcccctcaacaaaaaagacacacaggggaaaggcgtgaaaaacgcgtcaaccgtatcggaagatactgcgtcgaatcaagagccgacgcttcatcgcggattacataaccgtcatattcaactgattgcgttgggtggcgcaattggtactggtctgtttcttggcattggcccggcgattcagatggcgggtccggctgtattgctgggctacggcgtcgccgggatcatcgctttcctgattatgcgccagcttggcgaaatggtggttgaggagccggtatccggttcatttgcccactttgcctataaatactggggaccgtttgcgggcttcctctctggctggaactactgggtaatgttcgtgctggtgggaatggcagagctgaccgctgcgggcatctatatgcagtactggttcccggatgttccaacgtggatttgggctgccgccttctttattatcatcaacgccgttaacctggtgaacgtgcgcttatatggcgaaaccgagttctggtttgcgttgattaaagtgctggcaatcatcggtatgatcggctttggcctgtggctgctgttttctggtcacggcggcgagaaagccagtatcgacaacctctggcgctacggtggtttcttcgccaccggctggaatgggctgattttgtcgctggcggtaattatgttctccttcggcggtctggagctgattgggattactgccgctgaagcgcgcgatccggaaaacagcattccaaaagcggtaaatcaggtggtgtatcgcatcctgctgttttacatcggttcactggtggttttactggcgctctatccgaacatccccattgactcgataaacacgatgattaacacggcagtcatggtcagaatggaaacgggatcgaaaatcggcataccaaacgacatcggcgtaacaatcgcaaaccatgaagcatcatgtagcccggataaattgacttcattcatcatccacgaaagaggtcagatgggtatcatagctcaaaataaaatcagttcattgggcatgctgttcggtgccatcgcttggatgatggggattatccacttttcattcggccctttctccgcaccaccgccaacgtttgaaagcatcgtggcggacaaaacggctgaaattaaaagaggtcttctcgccggaataaaaggcgaaaaaattaccaccgtggagaaaaaagaggacgtagatgtcgataaaatcctcaatcaaagcggtatcgcactggccattgctgcgctcctttgcgcatttattggcggtatgcgtaaggaaaatcgctggggcattcgcggcgcgctggtttttggcggcgggacgctggctttccataccttgctttttggtatcggcatccattttgctgatattccttatcttttccttcctgaccggcggttcactggtttaagcagcctgaataatgcccgccgggtgatcatcagcgggcattatcgtcagaacttctgttttttctcctccaccttcaccccttgtgtcggccggtgtcatagtcgcgtacaactggcgaatagccatcttgtggacgtggacgaaacgcccccatccagcgcggccgtgcatctttacgccacggacgcagactccattggtaactgcggaacggatcgcgaattttgtccatgtaatccaataaggcgtcatgcattttgctgcgaacgtctgcaaaacggatatcatcgatcagggtatgcatttcatttgggtcattacggcgatcgtaaagtcatcactaacttttattctctgattgccaaaaatcatctttcacactggctcgaaacgctgcccgcgcagattgctaactggcagcgcgagcagcagcacgggttgtttaagcagtggtcaaatgcggtggagtttctacctgaaattaaaccgtatcgtcttgatttattgcatagcgttacggcagaaagcgaagagccactgagcgcagggcaaattaaacgcattgaaacgctgatgcgcaacctgatgccgtggcgcaaagggccgttctcactgtatggcgtcaacatcgataccgaatggcgttccgactggaaatgggatcgtgttctgccccatctttctgatttaaccggacgcaccattctggatgtcggctgcggcagcggttatcacatgtggcgcatgattggcgcaggcgcgcacctcgcggtggggatcgaccctacgcaactgtttctgtgccagtttgaagcggtgcgtaaactactgggtaatgatcagcgcgcgcatttgttacctattgaacaacttccggcactgaaagcctttgataccgtcttttcgatgggcgtgctttaccatcgccgttcaccgctggagcatctatggcagttgaaagatcaactggtcaatgaaggtgaactggtgctggaaacgctggttattgatggtgatgagaacacggtgctggtaccaggcgatcgttacgcgcaaatgcgtaatgtctatttcatcccttccgcgctggcgctgaaaaactggctgaagaagtgtggttttgtagatatccgcattgcggatgtgagcgttaccaccacagaagagcagcgacgcaccgaatggatggttaccgaatcgctggccgatttcctcgacccacatgatccggccattttccagatctggccatgcaccttcatgcacgcataccacgccttttttgatcccgtcagtcaccaccgcgcctgtcaaaatctgaccacgtttgttccagacacgcaccagatcgccattcgcaataccaaagcgtgcagcatcttcgtttcatttgcgcttcgtaccacgcattcgtgcgccatttcacattcgtctctagaggatcccccggcgattctgtttaagattgccgatcgaatggaacaaaacctcgagctgttagcgacactggaaacctgggataacggcaaacccattcgcgaaaccagtgctgcggatgtaccgctggcgattgaccatttccgctatttcgcctcgtgtattcgggcgcaggaaggtgggatcagtgaagttgatagcgaaaccgtggcctatcatttccatgaaccgttaggcgtggtggggcagattatcccgtggaacttcccgctgctgatggcgagctggaaaatggctcccgcgctggcggcgggcaactgtgtggtgctgaaacccgcacgtcttaccccgctttctgtactgctgctaatggaaattgtcggtgatttactgccgccgggcgtggtgaacgtggtcaatggcgcaggtggggtaattggcgaatatctggcgacctcgaaacgcatcgccaaagtggcgtttaccggctcaacggaagtgggccaacaaattatgcaatacgcaacgcaaaacattattccggtgacgctggagttgggcggtaagtcgccaaatatcttctttgctgatgtgatggatgaagaagatgcctttttcgataaagcgctggaaggctttgcactgtttgcctttaaccagggcgaagtttgcacctgtccgagtcgtgctttagtgcaggaatctatctacgaacgctttatggaacgcgccatccgccgtgtcgaaagcattcgtagcggtaacccgctcgacagcgtgacgcaaatgggcgcgcaggtttctcacgggcaactggaaaccatcctcaactacattgatatcggtaaaaaagagggcgctgacgtgctcacaggcgggcggcgcaactgctggaaggtgaactga

SEQ ID NO: 25482 - DNA, 2950 bp, Homo sapiens
  SIMILAR (80)..(295): 811254mologous to Escherichia coli glyoxylate carboligase,accession number U82664,Smith-Waterman Score=287.
gttttgtcagtcagggtgagctggtcatatacaccgcccgcgatatcagcacggcgttgggactgaaagcacatccataatgtctgtcgcatcccgctctgcggagcgggtttttttgacaaaatttgaaagttggaaaaattttccaataaatagaggtaggaataaaatggcaaaaatgagagccgttgacgcggcaatgtatgtgctgaagaaagaaggaatcatctcccgccttcggttgttccgggagctgccaatcaatccgttttactcaccgatgcgtaagcacggccggtattcgtcacattttggcgcgtcatgtggaaggtgcttcgcacatggcggaaggttatacccgcgcaacggcagggaatatcggcgtatgtttggggacttccggtcctgcgggcacggacatgatcaccgcgctctattccgcttctgctgattccattcctattctgtgcattaccggccaggcaccgcgcgcccgtctgcataaagaagattttcaggccgtagatattgaagcaattgctaaaccggtcagcaaaatggcggttacagttcgtgaagcggcgctggtgcctcgcgtgctgcaacaggcatttcacctgatgcgttctggtcgtccgggtccggtactggtggatttaccgttcgacgttcaggttgcggaaatcgagtttgatcctgacatgtacgaaccgctgccggtctacaaacctgctgccagccgtatgcagatcgaaaaagctgtagaaatgttaatccaggccgaacgtccggtgattgttgccgggggcggggtaattaatgctgacgcagctgcactgttacaacagtttgctgaactgaccagcgttccggtgatcccaacgctaatgggctggggctgtatcccggacgatcatgaactgatggccgggatggtgggtctgcaaaccgggcatcgttacgagaaatacaccgaagggcgcaaaatcgttcatattgatattgagccgacgcaaattggtcgcgtgctgtgtccggatctcggtattgtctctgatgctaaagcggcgctgacactgctggttgaagtggcgcaggagatgcaaaaagcgggtcgtctgccgtgtcgtaaagaatgggtcgccgactgccagcagcgtaaacgcactttgctgcgcaaaacccacttcgacaacgtgccggtgaaaccgcagcgcgtgtatgaagagatgaacaaagcctttggtcgcgatgtttgttatgtcaccaccattggtctgtcacaaatcgctgcggcacaaatgctgcatgtctttaaagaccgccactggatcaactgtggtcaggctggtccgttaggctggacgattccggctgcgctaggggtttgtgccgctgatccgaaacgcaatgtggtggcgatttctggcgactttgacttccagttcctgattgaagagttagctgttggcgcgcagttcaacattccgtacatccatgtgctggtcaacagacctgcagcgaatggagctcaggggtcatgtcaccctgacgcgccggcggttttccgctcatctatcttcatacgaaaaagcgaagaaaaacttgtggtcacaatgaatgaattgagtgcgtcacgagcgttaccagaggaaaccatgcccggacgctttgaactaaaaccaaccctggagaaagtcttgcacgcgccggacaattttctcttcatggaccctctgccgccgatgcatcgtcgggggatcattattgccgccattgtattggcggtcggatttctgcttccatctgatgatacgcccaacgcgccggtggtgacgcgtgaagcgcagttagatattcagtcgcaatcacaaccgccgacagaagaacagctgcgggcgcaattagttaccccacaaaatgatcctgatcagaacctatacaggaaggccagccagaagagcagccgcaaactacccaaacgggacttaccccacatccttacgccatttagagcgcctatggcttcggtctgcgctaagcgtaaaggccaggttctacatcagcagtactcacttaagaaataccgctacaagcacatcgcggataacgtctgtcaatggttggatgaggtttttctccgaccaaaagaaatgtctgatattcataaactgacattcattgaaaagcgagaacgactaaagaattcggtcttcaaatcgctccatgacgtcaggactgtagaggatccaagtggtactcagctcgaagtcgtctcaaataacccgtgggatccgaagcgtcagttgctgaaatgggacggcactaagtggaccggctgggatattccggactacagcgcagcgcctccggaggccgtgccgtcgttgaataatccacaaacattcagcgagcagaagctggatgaggcgttatatcacggcgcggtcctgcgcgtgcgcccgaaagcgatgacggtggcggtgattatcgccggtctgctgccgattctgtggggaacgggggctggttcagaggtgatgagccggattgccgcgcctatgattggcggcatgatcaccgcacctttgctgtcgctgtttattatcccggcggcgtataagctgatgtggctgcaccgacatcgggtacggaaataaaagcaggataccccgtttaaccgtgtggattgtgtcttgcgacgatgggcactaaatgttaaaaggtgcccctcaacaaaaaagacacacaggggaaaggcgtgaaaaacgcgtcaaccgtatcggaagatactgcgtcgaatcaagagccgacgcttcatcgcggattacataaccgtcatattcaactgattgcgttgggtggcgcaattggtactggtctgtttcttggcattggcccggcgattcagatggcgggtccggctgtattgctgggctacggcgtcgcc

SEQ ID NO: 25483 - DNA, 570 bp, Homo sapiens
  SIMILAR (262)..(555): 831254mologous to Escherichia coli O157:H7 sensor histidine protein kinase (RstA regulator),accession number AE005384,Smith- Waterman Score=415.
ctcgttctgctggccgaccaaatgctcgccctggacgatcagtacacgtttttacagcgtatcccgcgcagcccatacgggctggcatttggtcctgttcctcatctccattatctccatcagatgcgattgctggatatcgccccgatcgcttttagggctatgtccctcgcctttccggtcaattatctggatgcagtccgcactggcagcatatgttcaaactgcaaccagcggagcaacgattcggcgatgggcatctcaatgaacgtatccaccttgatgagggttcgagccatttgggtatatgctgcttatatggagcgcgtgctggataatttgctcaataacgccctgcggtactgccattcaacggttgaaaccagcctgctactgtcggggaatagagcgacattaattgttgaggatgatggcccagggattgccccagaaaaccgcgaacatatctttgaaccttttgttcgcctcgatcccagccgggatcgctcaaccggcggctgcgggctggggctggcaattgtccactctatagcacgtggcaactgggcg

SEQ ID NO: 25484 - DNA, 876 bp, Homo sapiens
  SIMILAR (327)..(464): 651254mologous to Escherichia coli possibly rffA or rffC,accession number M87049,Smith-Waterman Score=106.
cgcaacagctgctgaatattagacctttgtcagacgcatagtttgcaaaaatcgtggtgaactggagataacgtccatcaaccagatgtacctcgaggcgggcaacctgaccgttgaactgctcgggcgcggatttgcctggctggataccggcactcacgacagcctgattgaagccagcacctttgtacagacggtggaaaaacgcaagggctttaagattgcctgccggggaaaacgccttcttgggtgttaacagcgccatcgtgcgcataacgtctgaagcaccgctcctgacgccagacgcgtaagcgccgcggtcacgggtgcaggccaaaattgcggcatcaaatacgggtgaactgaatgccctgcaacagctgggattctcccctggtagaaggtgaagttgatttggcgctaacccgtgaacaatgcccagtgatagcggtgctgtagtggcaccaagagacggatattcccgcataacgtcagttagccagcgccgcatttgcgcaaagccgttttcgtgcgccgtggtatgcgcctgacgccagcagtcgcttttatgcacagtggattgaaaatgccgtgcgcggcacctttgatcatcaatgtctgattttacgtgcggcgtccggcgatattcgcggctatgtctctttacgggaactcaatgcgacagatgcgcgaattggcctgctggctggacgcggtgcaggtgctgagctgatgcaaacggcgctaaactgggcgtatgctcgcggtaaaacaactttgcgggtggcgacccaaatgggcaacaccgccgcgcttaaacgatacatacaaagtggtgcgaatgtagaaagcaccgcgtactggttatacaggtga

SEQ ID NO: 25485 - DNA, 1570 bp, Homo sapiens
  SIMILAR (707)..(1552): 1001254mologous to Escherichia coli K12 putative regulator,accession number AE000455,Smith-Waterman Score=1458.
gttttcaccaccaggcttgcacgatgcaggtgaggcggtgttctggcgggtgaataaatcggcaaactacggagtactggataagttggcccgaggatatgcagatctgtcaaaagcggagagtcagtgggatgagatgatgcgaaccgctggttcgctgaagttgggtacaattcatgcgtccatcaactcattgtttgagaacattaccgccgctcctgccgacccgattctgggcctggccgatctgtttcgtgccgatgaacgtcccggcaaaattaacctcgggattggtgagaatcccagctgttgcaggacatccagttcacccgtatttgatgccgcaatttggcctgcacccgtgaacaatgccagtgatagcggtgctgtagtggcacaagagaccgatattcccgcattacgtcagttagccagcgccgcatttgcgcaaagccgttttcgtgcgccgtggtatgcgcctgacgccagcagtcgcttttatgcacagtggattgaaaatgccgtgcgcggcacctttgatcatcaatgtctgattttacgtgcggcgtccggcgatattcgcggctatgtctctttacgggaactcaatgcgacagatgcgcgaattggcctgctggctggacgcggtgcaggtgctgagctgatgcaaacggcgctaaactgggcgtatgctcgcggtgatcacatgattccatttaacgcaccgccggtggtgggaaccgaactcgactatatgcagtcggcaatgggtagcggcaaactgtgtggcgatggcggttttacccgtcgctgccagcagtggctggagcaacgttttggcagcgccaaagtgttactgacgccgtcctgcaccgcttcgctggagatggcggcgctgctgctcgatatccagcctggcgatgaagtgatcatgccgagctacacctttgtctccaccgccaatgcctttgtgctgcgtggcgcaaaaatcgtttttgtggatgttcgcccggacaccatgaacatcgacgaaacgctgattgaagcggcgatcaccgacaaaacgcgcgttatcgtgccggtccattacgcgggtgtggcctgcgaaatggacaccattatggcgttggcgaaaaagcataatttgtttgtggtagaagatgccgctcagggcgtgatgtccacttacaaagggcgtgcactgggaaccattggtcatattggctgctttagcttccatgaaaccaaaaactacacggcgggcggtgaaggcggcgcgacgctgattaacgataaagcgttaatcgaacgagccgagatcatccgtgaaaagggcactaaccgcagccagttcttccgtggtcaggtcgataaatatacctggcgcgatattggctccagctatttgatgtccgatctgcaagctgcatacctgtgggcgcaactggaagcagcggatcgtatcaaccagcaacgtctggcgctgtggcaaaactactacgatgcgttagcgcctctggcgaaagccgggcgtatcgagctgccgtcgattggtaccgagcatcgattg

SEQ ID NO: 25486 - DNA, 1875 bp, Homo sapiens
  SIMILAR (1137)..(367): 951254mologous to Escherichia coli RstB,accession number U41101,Smith-Waterman Score=1235.
ttaaggaaatgtgcattgaatttgagtggagattgatgacttgacaatgacgagttgaagagaaccatgtgttggatgatgctgttggataatagcatgtgggttgaccactggtaaatgcccttgacagaatgaataattgacacctctccatgacgaatgacgtaatgcccaacatggtggctgttttcgttttcggatcaaacgggcaccttgatctcgatatgatgtacatggaacgatgtatacatgcaccaacggtgaatgaccataactggaaagacgaaaacgttgctggcacatggctgggtacccggccgtgtagttatgttggctgtgcgcagcaaattgcgcgctgaagtggtccattgccagtgctatagagtggacaattgccagccccagcccgcagccgccgtttgagcgatcccggctgggatcgaggcgaacaaaaggttcaaagatatgttcccggttttctggggcaatccctgggccatcatcctcaacaattaatgtcgctctattccccgacagtagcaggctggtttcaaccgttgaatggcagtaccgcagggcgttattgagcaaattatccagcacgcgctccattaagcgcatatccaacgccgcataatggccttgcacgagcgtttttatccgtaccgttttatcgggcgttactgcctgaatatctgccagatgcgttgacagccacaacggcaggtctggttcgctaagatgaagctcgttttgtgggcgatcgagtcgggcataagtcagcagctcttcaattaaagcttcaagttgactgatatcacgattcaacgcctgggattcggcggcgctcaggttatcgctcatctccagtcgataacgcaggcgcactaacggtgttcgcagttcgtgagcgataccgtcaataagctgttttttgctggcaattaaggcgttgatattgtccgccatctggttaaatgcgacgccaagtcgttcaaagctcgaaccctcatcaaagtggatacgttcattgagatgcccatcgccaaatcgttgcgccgctgcttccagttttaacatatcctgccagtggtttctttctgagtatggtcccccgaaccaggttgccagcgggaaaacatccccatttgtgatcgtgttcaagcaaccccggtatcgggctgtcacgaagccgaactgtcgcttgatgatgcgaaatgggtgctccaccctggcccgtatgctgcctgtcatgtatgcgatgctgatgcccgttctgttcttgcgtggatgctgtttcaaggttcttaccttgccggggcgctcggcgatcagccagtccacatccacctcggccagctcctcgcgctgtggcgccccttggtagccggcatcggctgagacaaattgctcctctccatgcagcagattacccagctgattgaggtcatgctcgttggccgcggtggtgaccaggctgtgggtcaggccactcttggcatcgacaccaatgtgggccttcatgccaaagtgccactgattgcctttcttggtctgatgcatctccggatcgcgttgctgctctttgttcttggtcgagctgggtgcctcaatgatggtggcatcgaccaaggtgccttgagtcatcatgacgcctgcttcggccagccagcgattgatggtcttgaacaattggcgggccagttgatgctgctccagcaggtggcggaaattcatgatggtggtgcggtccggcaaggcgctatccagggataaccgggcaaacagacgcatggaggcgatttcgtacagagcatcttccatcgcgccatcgctcaggttgtaccaatgctgcatgcagtgaatgcgtagcat

SEQ ID NO: 25487 - DNA, 1249 bp, Homo sapiens
  SIMILAR (703)..(825): 971254mologous to Escherichia coli possibly rffA or rffC,accession number M87049,Smith-Waterman Score=194.
atggagcgcgtgctggataatttgctcaataacgccctgcggtactgccattcaacggttgaaaccagcctgctactgtcggggaatagagcgacattaattgttgaggatgatggcccagggattgccccagaaaaccgcgaacatatctttgaaccttttgttcgcctcgatcccagccgggatcgctcaaccggcggctgcgggctggggctggcaattgtccactctatagcactggcaatgggcgtcaacgctcaggccgatttcatgaagctgacaggcgctgatgagcaaatcgcggcttattgcttcaagatgccattcgttttccacctgatcgaagaagttagccgcaactttggctacgcgctgtgcctgatcaatatcgatcataaagcggcgttgaatattacgcagcgtacggctgcgaatatcctgctcgacggccagatgcaacatgccgtagaccaggccttcacgcagcgcaccgcccgccagggtagcacgtttgtacagtatgcccgacttgctcgaaaactggctacggccaatatctgctggagttacttcgtgcccgtccgcgccagtattgagccactaacctgggaaaacgccttctttggtgttaacagcgccatcgtgcgcattacgtctgaagcaccgctcctgacgccagacgcgttagcgccgtggtcacgggtgcaggccaaaattgcggcatcaaatacgggtgaactggatgccctgcaacagctgggattctccctggtagaaggtgaagttgatttggcgctacccgtgaacaatgccagtgatagcggtggctgtagtggcacaagagaccgatattcccgcattacgtcagttagccagcgccgcatttgcgcaaagccgttttcgtgcgccgtggtatgcgcctgacgccagcagtcgcttttatgcacagtggattgaaaatgccgtgcgcggcacctttgatcatcaatgtctgattttacgtgcggcgtccggcgatattcgcggctatgtctctttacgggaactcaatgcgacagatgcgcgaattggcctgctggctggacgcggtgcaggtgctgagctgatgcaaacggcgctaaactgggcgtatgctcgcggtaaaacaactttgcgggtggcgacccaaatgggctacaccgccgcgcttaaacgatacatacaaagtggtgcgaatgtagaaagcaccgcgtactggttatacaggtga

SEQ ID NO: 25488 - DNA, 2006 bp, Homo sapiens
  SIMILAR (244)..(810): 951254mologous to Escherichia coli K12 glucose-1-phosphate thymidylyltransferase,accession number AE000455,Smith-Waterman Score=924.
atgttcggtaataccaacggtgtaagtgccgtcggcttctttacgcagccattcgtgttctttgctgtatttcagttctgctgtaaatcacgcgacggctttgccgttacgcacaaaaacaggttttgtcactttaaccggcatttcacggttgcgaatttgcacaatcgccgtttcgccaataccttccggcacgcgcgccagcgcaatgctgtaacccagcgtcggggagaaagtaccgctggtgataatgccttcatgctggttgccctgcgcatcggcttcagtccgaagctgcgtcatgttgcggcgcgcaccgaaggggcgacggtttttggctatcaggtgatggacccggaacgctttggcgtggtggagtttgacgacaatttccgcgctatctcgctggaagaaaagccaaaacagccgaagtcaaactgggcggtgaccgggctttatttctacgacagtaaagtcgtggagtacgcaaagcaggtgaagccgtcggagcgtggtgaactggagattacctccatcaaccagatgtacctcgaggcgggcaacctgaccgttgaactgctcgggcgcggatttgcctggctggataccggcactcacgacagcctgattgaagccagcacctttgtacagacggtggaaaaacgccagggctttaagattgcctgcctggaagagattgcctggcgtaacggctggctcgatgacgagggtgtgaagcgtgctgccagttcattagcgaaaactggctacggccaatatctgctggagttacttcgtgcccgtccgcgccacgccatcgtgcgcattacgtctgaagcaccgctcctgacgccagacgcgttagcgccgtggtcacgggtgcaggccaaaattgcggcatcaaatacgggtgaactggatgccctgcaacagctgggattctccctggtagaaggtgaagttgatttggcgctacccgtgaacaatgccagtgatagcggtgctgtagtggcacaagagaccgatattcccgcattacgtcagttagccagcgccgcatttgcgcaaagccgttttcgtgcgccgtggtatgcgcctgacgccagcagtcgcttttatgcacagtggattgaaaatgccgtgcgcggcacctttgatcatcaatgtctgattttacgtgcggcgtccggcgatattcgcggctatgtctctttacgggaactcaatgcgacagatgcgcgaattggcctgctggctggacgcggtgcaggtgctgagctgatgcaaacggcgctaaactgggcgtatgctcgcggtaaaacaactttgcgggtggcgacccaaatgggcaacaccgccgcgcttaaacgatacatacaaagtggtgatcacatgattccatttaacgcaccgccggtggtgggaaccgaactcgactatatgcagtcggcaatgggtagcggcaaactgtgtggcgatggcggttttacccgtcgctgccagcagtggctggagcaacgttttggcagcgccaaagtgttactgacgccgtcctgcaccgcttcgctggagatggcggcgctgctgctcgatatccagcctggcgatgaagtgatcatgccgagctacacctttgtctccaccgccaatgcctttgtgctgcgtggcgcaaagatcgtttttgtggatgttcgcccggacaccatgaacatcgacgaaacgctgattgaagcggcgatcaccgacaaaacgcgcgttatcgtgccggtccattacgcgggtgtggcctgcgaaatggacaccattatggcgttggcgaaaaagcataatttgtttgtggtagaagatgccgctcagggcgtgatgtccacttacaaaggggcgtgcactgggaaccattggatccatcacagtttgcccgtctgactatgaaaactgacacacttatgtgccttaacatcactgagctttgtaaaacaaataaacaaatgactttcttgatgtga

SEQ ID NO: 25489 - DNA, 1893 bp, Homo sapiens
  SIMILAR (1890)..(667): 861254mologous to Escherichia coli p-aminobenzoate synthetase,accession number K02673,Smith-Waterman Score=1769.
ttaataatcgatccctatctgcgcttttacaccggcatcaaacgcatgtttgacggggcgtaattcacttaccgtatctgccagttcaagaatatcccgatgacaaccacgacccgtgataatcaccgtctgttgatgtggacgttcatttaacgcctgcaccacttcttccagtggcaaatagtcatacgccaccatatacgtcagttcatcaagcaaaaccatatccagtgaggaatcagcaagcatccgctttgcatgttgccagacttcgcggcaggcggcggtatcagactcgcggttttgtgtatcccaggtaaagcccgttgccatcacctgaaactcaacgccatgtggctccagcagattgcgttcgccattaggccaggtgcctttaataaactgcacgacgcctactttttttccgtgaccaactgcgcgtgttgccgtaccaaatgccgcggtggttttgccttttccattgccggtaaagacgatgataataccgcgttccttggggagacgcagatccggcggaatatgccgaccattggggtacctggtagccatggacgctatcgacgggctgcagaacgccgataactcaaacggcgaaagccgtatagcgacctcttctttcaggtcgcgcagcgcgcggcgatagttctccagttgcttcaggatacgattaactttatcaaaagtttcctgatattccgcttcttcctggctatcggcgacaattccaccgcccgcagagcagaaaatttgtccgttaatggcagtcagcgtgcggatagtaatactggtatccatgttgccgcaaaagctcaaatagccaatgtgccgcaccaggcattgcgtcgctgcggttccagttcgtcgataatttccatagcccgtactttcggagccccggttattgagccaccaggaaaagctgcgcgcagcagatcgctggcgtgtaactgttctggtagttgcgccgttatggtgcagatgatgcacggcagggaagggttccaccacgaacagctctggtacttttaccgaacctgctacggcaacacgaccgatatcattacgcattaaatcgacaatcatcagattttcggcacgatctttcgctgagttcgccagttttactgcttgtttgctatcttcctgaggatcgggcaggcgtggtagcgtgcctttaatcgggcgggtctggatttcactattatcacaaagaataaaccgctctggcgaaagctttaaaattgcaccctgttcaagacgtaaaaaagcgctaaatggcgcgcggttgccgtgattaagctgaaggaatgcctggcattcatcgccagaataggtcgcatgaaaacgttgggcgagattcacctgatagcaatcaccgctgtgcagatattcctgtacctggcgaaatttttcgccgtactgctcgcgggtcatattggattgccagtcggaagtgagcgtgaaatcttcctgcggcgagaattgctggctttccagccaggcccgacgggcattgacatcattatgactcagcaaagaaactgtatgacgctggtggtcgacaatgagcgcccaatcgtagatacccactgccatatccggcagaacgatatcttgttccgcaatgtctggcagtgactcaaaacggcggcccagatcgtagccaaacaaccccagtgcgccgccctgaaatggcaaatcttcgttatgcgttgggcgaatgtctgcgcgatccagcacctgctggagcacctgtagcgggtcatcagtggtcgttgtgcgtgtttggctgtcactaacaacggtttctttaccgaaagtggttaaagtgcaaatcggctcggcgaccacaatatcaaagcggctatacat

SEQ ID NO: 25490 - DNA, 2565 bp, Homo sapiens
  SIMILAR (1398)..(661): 941254mologous to Escherichia coli f772,accession number L10328,Smith-Waterman Score=1297.
ttaggtgattccttggaaagggcattgaccaattgcgtttccagagggaacaggtatggcattggtgttcctggccacagttttcccatggtgttcctggacaccgcttgatctggtgttccaggaaccgcataacatgggttctgcaccgtattccattgtgtcctggcccgtttccatctttccgacccgttcatcgttaggacgcatattccggttacgccaccagccgacaatcgctgcggtaataattcccgccaggatcggtgccgccaggtcgtgccagaaagtcatggcaaactgcgcgagcgtcatatagccgccttgttgtaatgacaacattttgcggctattcttgaagtgtttccggttacgccaccagctgacaatcgctgcggtaataattcccgccaggatcggtgctgccaggtcgtgccagaaaatcatggcaaactgcgcgagcgtcatatagccgccttgttgtaatgacaacattttgcggctattcttgaagtgtgtcgatagtgatcgacaagccacccagtgagtaaccaaacagactcgccaacagcgccggacgcaccagcggatggtattgcccacggttaaagacgtataccgcccacgccagcgcccagccgccacaggcaagacaacgacactagcgacggaggccgagcgggcaaacaagacagcttcttcctcaccaacggtgtccttgagcacgttccacaccagttcgttgtagatgtacgcataatggttatgcattttctgcggatcggaaccgtcaaaccactgaacatcagttgggatacgttcgccaaagtcggtcttaaagcaatcaacgcccatcgcgaccagacctttcagtttgtcggcgtaccatttgcaggcatccggattggtaaagtcataaatcgccagacctggctgccatttatcccactgccatagcgaaccgtccgggcgtttgagtaaatagcctttctcttgtaactctttaaagacgggggatttttgaccgatataggggttaatccagacgcagattttcagtcctttcgctttcaggcggcggatcatcccttccgggtcagggaaagtcagcgggtcccactcaaaatcgcaccactggaaggctttcatccagaaacagtcaaagtggaaaacatgcagcggcagattgcgttccgccataccatcgataaagctgtttaccgtcgcttcgtcgtagttggtggtaaatgaagtggttagccacaggccgaaggaccacgcgggcggcagcgccggacgaccagtaaagcgggtataacgatcaagtaccgctttcggcgtcgggccgtcgatgaacaagtattcgagatattcactcttcaaagctgaactggactttgggggacttcctccgatcccacggttgtactgatttcgtccgacacctgtgatttctatcactatccggtcaggcctcgggacaggcgctgtccggctggttgcgggatctgtgccggccgggatttggcgtagatcagcaacctggcgcaagagttctgctttaagtatctcgagattatggatcgcagagtggtaatcgcctgccacaaggatatctaacacaatatcaatacgttcggcaacgcgctgggcatcaaattcagacatcaaggacatccagcgttcgaaggcgacggcgggcatcggtttggcaaacaaaaatccttgccgctcattgatcccgttcttggttaaaaaagcatcttcctttgcactctctacaccttcggcgatcacctgaagattcaatgcctgggccacagcgacgatcgcccggaccagtgactgcgagacaggttgtttgtgaatatctcgaacaaaaacctggtcaagtttgatggcatcgatcggaaagcgcgccagttgcgaaagtgaagagtagccggtaccaaaatcatccagatgcacttgcgcacctagttggctaaattgttgaataacagacagtgccagttcatcattctcaatcagacaactctctgtcagttcaacatctatagggcagtattcaaattgaggttcctggagaacctgtttcagggcggtgactggcccggcgtggatctgattccaggccgtaggagatgcgtctttgtggaggtcaggtctaccctcccttttggggccacgctttcgataggcctcccgcgtgtgatgtaaccaggtcggtctagtgtggaaatccgtctgtgggaaccccctttccagcatagagcgcggaataagcgcaatgcctgctcctgcgatcacacaggccaacattccgtgataagactccatctcatggatagttcccggagcggcaccgtcagcatgaaaccagctctcgaagtggcgacgatacgaacaattggcgcggaaggcataaatgttactgccattaacctgactggcacgggttactggcgcatatccttgtggcgtgacgatcatcagtacctcgcggtataccggtatcccgacgatggcagcatggttaatgggtccatcaaataaacgccgcat

SEQ ID NO: 25491 - DNA, 1344 bp, Homo sapiens; identical to SEQ ID NO: 17897
  SIMILAR (1299)..(1343): 1001254mologous to Escherichia coli Membrane-associated ATP- hydrolase amsA,accession number D90735,Smith-Waterman Score=74.

SEQ ID NO: 25492 - DNA, 1116 bp, Homo sapiens
  SIMILAR (442)..(1113): 921254mologous to Escherichia coli Membrane-associated ATP- hydrolase amsA,accession number D90735,Smith-Waterman Score=1036.
  misc_feature (1)...(1116): n = a,t,c or g
atgctcctgaatgaccagtggatcaatgacaagattaagaagaaaattgaaaaatattttgaaacaaatgataatggaaacacaacataccaaaacctatgggatacagcaaaagcagtaccagaagggaagtttattgctgtgaagaagctaagtctcagaaagataactcacccaagaggacacaaggataaacctgatacccatggcagtagaaagcctacacttacccactcagatgctcatcaatggaggagagacttatgcctggaggaactggaaaagagggggacaatacaaatcagcgacactgaatacggggcaacctcatgtccgagctcgcgagctcgtcgacagcgacacacttgcatcggatgcagcccggttaacgtgccggcacggcctggcgttgcccgcgttattcacgttgatcgctgtcgttacttcgctgttaagcccacaatttatcaggcagatactctggtccaggttgacaaaaacaaggcaacggccattctcagcggcctgagcgatatgatccttacttcatcgcccgagtctgcaccggagatccaactgctgcaatcgcgcatgattctcggtaaaaccattgctgaactgaatctgcgcgacatagttgagcagaagtattttccgattgtgggtcgcggctgggcgagattaaccaaagaaaaaccaggtgagctggcgatcagctggatgcatattccacaactgaatggtcaggatcagcaactgacactcacggttggggaaaacggccactatacactggaaggtgaagagttcaccgtcaatggtatggtcggccagcgtctggaaaaagatggcgttgcgctgactatcgcggacattaaggccaaaccaggaacacagtttgtcctgagccagcgtaccgaactggaagcgattaacgcattgcaggaaacctttaccgttagcgaacgcagtaaagaaagcgggatgctggaacttaccatgactggtgatgatccccagttgattactcgtattctgaacagcatcgctaacaactatttgcaacagaatatcgctcgccaggcggcgcaggattcacaaagcctngtttattaa

SEQ ID NO: 25493 - DNA, 755 bp, Homo sapiens
  SIMILAR (695)..(742): 1001254mologous to Escherichia coli ATP sulfurylase (ATP:sulfate adenyltransferase),accession number U29579,Smith- Waterman Score=85.
  misc_feature (1)...(755): n = a,t,c or g
atggtggaacgctatatagcgctggccatgacaaangcattatgcgcacagcacaagatctgccgcagccattgtttggccgcagttgcagcactagagacacggttgtctatcaaatacgacttactcacctgcggcaactggaggcggaaagcatccacattattcgcgaggtggcggcagaattctcaaatccggtgatgctctactctatcggtaaagattccagcgtcatgctgcatctggcgcgcaaggcgttttatccaggtacgctgcctttcccgttgctgcatgtcgataccggctggaaattccgcgagatgtatgagttccgcgatcgtactgctaaagcctacggctgcgaactgctggtgcataaaaacccggaaggcgtggcgatggggattaatccattcgtgcacggcagcgcgaaacataccgatattatgaaaactgaaggcctgaaacaggcgctgaacaaatacggttttgatgccgccttcggtggtgcgcgccgtgacgaagagaaatcccgcgctaaagagcgaatttactctttccgtgaccgcttccatcgctgggatccgaaaaatcagcgcccggagctgtggcacaactacaacgggcaaattaacaaaggcgaaagcatccgcgtcttcccgctctctaactggaccgagcaggatatctggcatacatctggctggaaaatatcgacattgttccgctatatctcgctgcgaacgtccggctaa

SEQ ID NO: 25494 - DNA, 2130 bp, Homo sapiens
  SIMILAR (814)..(1671): 841254mologous to Escherichia coli ATP sulfurylase (ATP:sulfate adenyltransferase),accession number U29579,Smith- Waterman Score=1251.
agttggttattcactatcaaccgaaaatcacctggcgtggcgaagtgcgcagtctggaagcactagtacgttggcagtcacctgaacgtgggttgattccaccgttggacttcatttcctacgccgaagagtcagggctaattgtgcctttaggccgttgggtgattctcgatgtcgtacgccaggtggcaaagtggcgggataaaggcataaacctgcgagtggcggtaaatatttctgcacgtcagctcgccgatcaaaccattttcaccgccctgaaacaggttctccaggaactcaattttgaatactgccctatagatgttgaactgacagagagttgtctgattgagaatgatgaactggcactgtctgttattcaacaatttagccaactaggtgcgcaagtgcatctggatgattttggtaccggctactcttcactttcgcaactggcgcgctttccgatcgatgccatcaaacttgaccaggtttttgttcgagatattcacaaacaacctgtctcgcagtcactggtccgggcgatcgtcgctgtggcccaggcattgaatcttcaggtgatcgccgaaggtgtagagagtgcaaaggaagatgcttttttaaccaagaacgggatcaatgagcggcaaggattttggtttgccaaatggcactttttgatattagctttgccaaatcgttattccgttaaggaactactcattctaattggtaatttcattcgttctcttacgctccctatagtcgaaacatctgatggcaagaaaatagcggtattgcaaaggaacggttatggatcaaatacgacttactcacctgcggcaactggaggcggaaagcatccacattattcgcgaggtggcggcagaatactcaaatccggtgatgctctactctatcggtaaagattccagcgtcatgctgcatctggcgcgcaaggcgtattatccaggtacgctgcctttcccgttgctgcatgtcgataccggctggaaattccgcgaaatgtatgagttccgcgatcgtactgctaaagcctacggctgcgaactgctggtgcataaaaacccggaaggcgtggcgatggggattaatccattcgtgcacggcagcgcgaaacataccgatattatgaaaactgaaggcctgaaacaggcgctgaacaaattacgacatcccgcgctaaagagcgaatttactctttccgtgaccgcttccatcgctgggatccgaaaaatcagcgcccggagctgtggcacaactacaacgggcaaattaaccaagggcgaaagcatccgcgtcttcccgctctctaactggaccgagcaggatatctggcaatacatctggctggaaaatatcgacattgttccgctatatctcgctgcggaacgtccggttctggaacgcgacggtatgttgatgatgattgatgacaaccgtatcgacctgcaaccgggcgaagtgattaaaaaacggatggtgcgtttccgtacgctgggctgctggccgctgaccggtgcggtggagtcaaatgcacaaacactgccggaaatcatcgaagagatgctggtttccaccaccagtgaacgtcagggccgcgtgattgaccgcgaccaggcggggtctatggagctgaaaaaacgtcagctcattgagttgattatcaacgttcacaatctgctcaagaacggctttggcttccaggttaaggtcaaccgaatcgcgctgctggcgataaacgttgagtttttcttccgcttggtccagctcgctgcgcacttcagttcgggtacgctggctcaggacaaactgtgttcctggtttggccttaatgtccgcgatagtcagcgcaacgccatctttttccagacgctggccgaccataccattgacggtgaactcttcaccttccagtgtatagtggccgttttccccaacctgccaatatactcatacgccaccatatacgtcagttcatcatccattcccatatccagtgaggaatcaccaagcatccgctttgcatgttcccagacttcgcgtcagccgccggtatcagactcgcggttttgtgtatcccaggtaaagcccgttgccatcacctga

SEQ ID NO: 25495 - DNA, 566 bp, Homo sapiens
  SIMILAR (18)..(356): 991254mologous to Escherichia coli Cytochrome bd-ii oxidase subunit ii (EC 1.10.3.-),accession number D90735,Smith-Waterman Score=583.
gagctcggcacccggggatcttcccgctgctgggattcttctgcccattgtttacggtgatggcgatttatcgtggtcgcccgggttggggatttttgatggcatcattgatgcaatttggcgtgattttcacggcaggcatcacgctgttcccctttgtcatgccgtcaagcgtgagtccgatctccagcctgacgttgtgggacagtacttccagtcagctgacgctgagcattatgttggtaatcgtgctgatatttttgcccattgtgttgctctacactctctggagctactacaaaatgtgggggcgcatgacaacagaaactctccgccgtaacgaaaacgagttgtactaaggagcagaaacaatgggggatttactttgggtcgtcggcattttgttgatgtgttcgctctccacccttgtgttggtatggctggacccgcgtctgaaaagttaacgaacgtaggcctgatgcggcgcattaacatcgcatcaggcaatcaataatggccgaaatgaaaagcggaaacctattcgtgaaagcgatcctcttaaagcc

SEQ ID NO: 25496 - DNA, 933 bp, Homo sapiens; identical to SEQ ID NO: 13858
  SIMILAR (807)..(217): 981254mologous to Escherichia coli ORF_f252; was ORF_f87p and ORF_f234p before splice,accession number U28377,Smith-Waterman Score=1001.

SEQ ID NO: 25497 - DNA, 981 bp, Homo sapiens
  SIMILAR (609)..(67): 891254mologous to Escherichia coli O157:H7 homolog of Salmonella peptide transport periplasmic protein,accession number AE005377,Smith-Waterman Score=842.
ctagtgtctaatagaaggtgatacttgagtattttgtagtgtggaatctcctgtcagaatataagctctgagctctttctctaacttccgggcatattctgccgacatgaccgaagcataatgggttgcgaggtgccacaaaaaagaagcatccggctgggcgagtcggaactcaacggtatgattatccagtttgcggacgcttttcacgttatcggcaaattgcaggctgtcgaagtaggggaagttgctgccgttgacgttatgccacgggttgttgcggtcaaaaattcgctggaaggtaaacaccacatcgtcggcattcattttaccgagtgggagtaaacgcagtcggtttttgtgaaacggaacatcgcgacgcaggtggaagcgataggtcgcgccgttgtcgagtacttcccagctttcggcaagttccggcatcaggcgataggtatagggatcgacatccagcagtcgatcataaaactgggcggtaagggtatcgacaattaacccactgctcgctttggatgggttaaaggtgttgacttgcccgctgacgcaatagacaagaccgctttgccattgacgttcgtgttcaggggtcgtaatgagggctgtgtgcttccgctctttcgtgttctgctctttgtctcgtgtgcgctgcttctcgtctctgtctcgtgtgttctgcgtctgctgttttgttgttcttcttttgtctctctttttgtctggtctgggtggtggcaggtctccaaaggctggggatgttttcagagacaggcgttgagattgtgaggtccagatcttctttcgacgtggaagtttgcttccattgccaatctcaggggctactgctttgattttatgaagggagagaccaagcttccacaggcgattcggacgcgtggccgcccctggaatgcggaccactgctcggcatctgtcggggctggcgaatcccctcactgacat

SEQ ID NO: 25498 - DNA, 1074 bp, Homo sapiens
  SIMILAR (802)..(701): 521254mologous to Escherichia coli CG Site No. 97; alternate names colE1-i, mtcB, refI, tol-8,accession number U28377,Smith- Waterman Score=61.
ctattttgtctgaaaacgccggaaattaatgcgctctatgggataagcaataaaggtgcgggaactttcgataaaattaaaaatgtgctttcgttgataaaaactctgcacggatgaaaatatcgcaactttatggtcatcggcagcatggtatttggaaaaaaagctatcacacacgtagcgggagtcaagaggcgtacggctgtggttgtcggttttaaagttttcgacattcagcgcagccagttccggatagtagttaccggtgatctggcgcagctgctctaccgcgttatcaaggttattacgtgcggtcacttcgttcgccagcacggtatcgtactgtgcgcgggcgttctgcacgtcggtgatcgctaccaggcccacgttaaaacgttgggtggtttgatctaattgacggtagatcgcttctttttgtgcctgtgtataggaaagaacgtcaatagcattcaacacgttgaaataagcggtcgcggtgttgaggatcaaggtttgctgatcggtctgatacgtgacgtcctgaatccctgctgctttttcctgcagcgttaacgcacgccatttcgacatatcaaaaatggattgagttaactgcaaggacgcactggtcgcgttagagttgatgccgttcgcgtcgcggtagccgttgctataggtgtaatctgcacctaaacctaggcaattccgggttactaaggggtgcttggttgataacttggcttcagttcccgggctggattcaagaaatggaaccaggaaggtccggcccatacaatgggggcccacttctaattgacatccagcgcggtatcgcgcgttatgctctccccagcctgacaacaataaacctcttccggggagtttccgcgacactggtagggctgctccggttgatgggtatcctccagccaggcgtaaacatacagtttccacaaactcccgcgcagcaccagttgtaacggcgtctcctccgcaagtgttggcagagtaaccaacgccaatagccagacgattctgcgccagttcacttatttcacctgcatcccggtccat

SEQ ID NO: 25499 - DNA, 1491 bp, Homo sapiens
  SIMILAR (791)..(868): 801254mologous to Escherichia coli peripheral membrane protein,accession number L08399,Smith-Waterman Score=88.
atgcagcggcgcacgatggcgacgttccgccgtatgactggggacaatcccgatgcaccacgctggttaagatatccgggattcattcctcagttgagaaataacgcagacagtgtaatctttattaatcagatacaaggattattggcagatgagcgttatctctcactactcaactgcgagctgtcgcgtttcaccgatgattacgatgcttcagttcccgcgggcgagattattattgtaccttggatggagcttcaagtgcataacggccacgaaagcgcgccgttccgcgccgtagaccgcatcagctacagcgtaaaacagggcgaagtggtcgggattgtgggtgagtccggctccggtaagtcggtcagttcactggcgattatggggctgattgattatccgggccgcgtaatggcagaaaaactggagtttaacggccaggatttgcagcgtatctcagaaaaagagcgccgcaacctggtgggtgccgaagtggcgatgatcttccaggacccgatgaccagccttaacccgtgctacaccgtgggtttccagattatggaagcgattaaggtgcatcagggcggcaacaaaagtacccgccgtcagcgagcgattgacctgctgaatcaggtcggtattcccgatccggcatcgcgtctggatgtttacccgcatcagctttccggcggcatgagccagcgcgtgatgatcgccatggcgattgcctgtcggccaaaactgctgattgccgatgaaccgaccaccgcgctggacggggaccattctagcgccaatcatcgaactactgctggagctacaacagaaagagaacatggcgctggggtcacgcacccaccacggttcgtcaccaaacagtggctctgctttttgccagatggcctgctgctcttcgctgaagcccgctttgtgatctggcagatgcagccagccgtgatggctgtggatgtcgccgctttcgcgcatcttttcaatcagcaacagtaccagcgcttcatcttccattggcaacgccatacgtcgcagacgttcgcgcccagggccaggcctacaagttcagcgatctacattagccgcatccggcatgaacaaagcgcaggaacaagcgtcgcatcatgcctctttgacccacagctgcggaaaacgtactggtgcaaaacgcagggttatgatcatcagcccaacgacgcacagcgcatgaaatgcccagtccatcaggtaattgccgctgatactacgcagcacgccagaaaaccacggggcaagcccggcgatgataaaaccgattccctgcataaacgccaccagcttgccagcaatagccgggtgcacagagtgatcgagcgccagcagcaaacaaacggaaacgcgccgcccagaccttacccacacaccatcgcccacaataccggcgaattgcatcggcagccaaataaagccgcagaacccccccgattgtaa

SEQ ID NO: 25500 - DNA, 4677 bp, Homo sapiens
  SIMILAR (2488)..(3255): 951254mologous to Escherichia coli glutamate synthase, large subunit,accession number U18997,Smith-Waterman Score=1290.
atgttgcatttgcctgtcagttatgcacccatcgatgtctggtgggatgaacacggcaggccaggtacaggctgcctgaacactaaaggcagccagcagcagcatcgtcacgattccactacgcaacacattcatcttcaattactcgttatccgggttaagacgacgacgactaataattcgcagcagacgccacagtacccatgccagcaatatcacactgatagccgccagcaccgccagcagaatcggatggtttgccagcgcataccacacgcgctcgaaccacggcagatgacctacgctgttgataccggactcgcggatcaccgcgaccgaaccgaacatggtggcgcgtttgccgctatcgttcagaacgcagaaagcgtattgtgttcctcgccaaagaagacacccgtggaaaatcgttcggaccggaaaaccgaccaagaagtttttcgcgcgcctgaacgcagcctgttaaaaccaaagagaatctcggttccggatttatcagcctgttccgcggagctggaagagcagcttttgatcgccgatgtgggtgtggaaaccacacgtaaaattatcaccaatctgacggaaggcgcatcccgcaagcagcttcgtgacgccgaggcgctctatggcctgctgaaagaagagatgggcgagattctggcgaaagtcgatgagccgctgaatgttgaaggcaaagcgccgtttgtgatcctgatggtgggcgtcaacggtgtgggtaaaaccacgacgattggtaagctggcgcgtcagtttgagcagcagggtaaatcggtgatgctggcggcgggtgatactttccgtgcagctgcggttgaacagcttcagatgagacacttacgagctatacgcaccgtacaggtcatccagcaactgattgagcgcatcactctggctaacgaagcggccgggattggcatctgggagtgggagttgaagccgaatatttttagctgggataagcggatgttcgagctgtatgaaattcctccacatatcaaaccgaactggcaggtgtggtacgagtgcgtgctgccggaagatcgccagcatgccgaaaaagtgattcgtgattcgttgcaatcacgctcgccctttaaactggaatttcgcattaccgtaaaagacggtattcgccatatccgcgccctcgccaaccgggtactgaataaagaaggcgaagtcgaacgtctcctcggcatcaatatggatatgaccgaagtgaaacagcttaacgaggcattgtttcaggaaaaagagcgcctgcacattacgcttgattccatcggtgaagccgtggtctgtattgatatggcgatgaaaattacctttatgaatccagtggcggagaagatgagcggctggacgcaggaagaagcgttaggtgttccgctcctgacggtgttgcatattacttttggcgacaacggaccattaatggagaacatttacagtgccgacacctcacgttccgcgatcgagcaagatgtggtgttgcactgttcttcggtcatgcacttccagcgggccgtgaaccacgttttcgtcagccagaaccgccagcgcagaggccaacccctgcaatcacaggggatcttcaccgatcctcagtcatatattacttacgcgaccgcgctggcttatcgtggcgaaaaagcaaaattaaaaaccgccgagcatgtcggcggctttctgacttacaaagtaacagattacatcagcggcattgccaaacgcacaatgctaatcagcggttgtggccatacacccagcaccagtaccaacagtgcagagatcagcacaacgataccgcccgcgctgtactgccagtttgatgaggccgattgccgaaccgacaaccacggcacccaccagccaccacaagtgtgcctggacaccgaccgccagcacgtagaacttaccgataaagcccagcgtcatcgggataccggccagagacagcatcatcaccgtcatcactgccgcgaggatcggacgatgccagaacagaccgcggtaagagaacagggaatcagcatccgggccacgatacgggctggacatcaggctgaccacgccgaacgcgccgaggctgctgaacagataaccggccagaatatagctgtcgccagagcgggtgacattgtaagcgccagattcggcattccatggaacgccaccatccgcatcggcatatgtatccgttgcccttctggcaaaagcagccacatgcgcggcgttaccatcttccggtgtgtttcgccaacaatttggaacttggaggctttccaatttttgtctgaatgcatactttcaaaggcggtgaccgatgatgagtatgatgatgagaatgatgatcacgatgatgatgatgatgacgatgatgacgatgatgatgatgacgatgagatgatgggatgtgatatgggaatagaatatatgaattaccacccgcctgcaagaacaaccccggatatggacccggaactgcgtgccttcctcgactttaactccacgcatatggagccgtgggatggcccggcgggcatcgtgatgtccgacggtcgttttgccgcctgtaacctcgaccgtaacggtctgcgtccggcgcgctacgtcatcaccaaagataagctcatcacctgcgcctctgaagtcggtatctgggattaccagcctgacgaagtggtcgaaaaaggccgcgtcgggccaggcgaactgatggttatcgacacccgcagtgggcgtattctgcactcggcagaaaccgatgacgatctgaaaagccgccatccatataaagagtggatggagaaaaacgtccgccgactggtaccgtttgaagatctgcccgatgaagaagtgggtagccgcgaactggacgacgacacgcttgccagctaccagaaacagtttaactacagcgcggaagagctggactccgtaattcgcgtactgggcgaaaacggtcaggaagcggtcggttcgatgggcgatgataccccattcgccgtgctctccagtcagccgcgcattatttacgactacttccgccagcagtttgcccaggtgactaacccgcctatcgacccgctgcgtgaagcgcatgttatgtcgctcgccacccgtatcggtcgtgaaatgaacgtcttttgcgaagcagagggccaggcgcaccgtttaagctttaaatacgccgatgtgctctactccgatttcaacaatcacgacggcggcccacaggctgccaacaaatacccgacggattgtgccatccccgagagtgccgcgcctgatgcgcagaaaccacatgccatattgcccccacacatctgcgccaatatgcaaccgctgcggcgcaaaatagagcccacaggaacgtaccagcgcggtatcgcgcgttatgctctccccagcctgacaacaataaacctcttccggggagtttccgcgacactggtagggctgctccggttgatgggtatcctccagcacaaggcgctaaactattacaagttgtccaccagaacgtccgctaatcggcagtggttgagtcgaagttcaagcaccagttgtaacggcgtctcctccgcaagtgttggcagagtaaccaacgccaatagccagacgattctgcgccagttcacttatttcacctgcatcccggtccattcactcactgccgcaacactgtgctgcgcaggtgcatatggaccggggaatccgttaaaggcaggctgcagtagcctggagcgccttatggatattaactccctcaaccctgacggcagcccagtggggagggtgcacttcccttcaagtcttacagtaagggatcctctagagtcacctacagcatggcaaggcgcagctgaaaaccctgctgcaacagctcaagctttgctgagccggacgataacgatgaccattgagaaaattttcaccccgcaggacgacgcgttttatgcggtgatcacccacgcggcggggccgcagggcgctctgccgctgaccccgcagatgctgatggaatctcccagcggcaacctgttcggcatgacgcagaacgccgggatgggctgggacgccaacaagctcaccggcaaagaggtgctgattatcggcactcagggcggcatccgcgccggagacggacgcccaatcgcgctgggctaccacaccgggcattgggagatcggcatgcagatgcaggcggcggcgaaggagatcacccgcaatggcgggatcccgttcgcggccttcgtcagcgatccgtgcgacgggcgctcgcagggcacgcacggtatgttcgattccctgccgtaccgcaacgacgcggcgatcgtgtttcgccgcctgatccgctccctgccgacgcggcgggcggtgatcggcgtagcgacctgcgataaagggctgcccgccaccatgattgcgctggccgcgatgcacgacctgccgactattctggtgccgggcggggcgacgctgccgccgaccgtcggggaagacgcgggcaaggtgcagaccatcggcgcgcatttcgccgaccacgactctcctgggaacctcagggggttctctttcagtctggtcatgatttcgcgtcatgtattgggtagtacgggcatgacgctgtag

SEQ ID NO: 25501 - DNA, 2179 bp, Homo sapiens
  SIMILAR (1)..(744): 921254mologous to Escherichia coli CG Site No. 231; alternate gene name alt,accession number U28379,Smith-Waterman Score=1162.
atggacgaagcaccggatgccgatgatctgatgctggctgaaacaccgcggacgaagatgctgccgaagccgccgcgcagcgtggaatctgaaatcgggcgcacgactgacccggtacgcatgtacatgcgtgaaatgggcaccgttgaactgttgacgcgcgaaggcgaaattgacatcgctaagcgtattgaagacgggatcaaccaggttcaatgctccgttgctgaatatccggaagcgatcacctatctgctggaacagtacgatcgtgttgaagcagaagaagcgcgtctgtccgatctgatcaccggctttgttgacccgaacgcagaagaagatctggcacctaccgccactcacgtcggttctgagctttcccaggaagatctggacgatgacgaagatgaagacgaagaagatggcgatgacgacagcgccgatgatgacaacagcatcgacccggaactggctcgcgaaaaatttgcggaactacgcgctcagtacgttgtaacgcgtgacaccatcaaagcgaaaggtcgcagtcacgctaccgctcaggaagagatcctgaaactgtctgaagtattcaaacagttccgcctggtgccgaagcagtttgactacctggtcaacagcatgcgcgtcatgatggaccgcgttcgtacgcaagaacgtctgatcatgaagctctgcgttgagcagtgcaaaatgccccgagaaaacttcattaccctgtttacggcaacgaaccagcgatacctggttctacgcggcaatgcgatgaccagccgtggcaatcgtggcgacagcgccatcctgcgcggcttacttgatgccatcaacattctcaatccacacgccgaagtggatgtgatgagccgctatccggtcagttcttcctggctgctcaaccgcccggtaatgggcgatccgctgttcctgcaaatgaaacaacacaacagcgcggcgggcgttgtcgggcgcgttaaaaaagtcctccgtcgccgctaccagcatcaggtattgctctcacgcgtcaccgacactggcaagctgcgcaatatcgccatcgcccagggattcaccgacttcgtgcgcctgctgtcaggttacgacgccattatccaggtcggcggatcgttttttgtcgatctctatggcgtgccgcagtttgaacatgcactttgcacgtttatggcgaaaaagccgctgtttatgattggtcacagtgttggcccgttccaggatgagcaatttaaccaactggcgaactacgtttttggtcactgcgacgcgctgatcctgcgcgaatcggtcagctttgatctgatgaaacgcagcaatatcaccaccgcaaaagtggaacatggcgtcgataccgcgtggctgaggatccccaagcatggcgacatgacgcatatggcggtagcattgttcagggttcagccggggctgcgcattgcgtgcccccaccggcgtggctgttcggtgtgccccggcggagtgacgtccggccatccggtcaatcccctgctcggtgcaaaggtccttcccggtgaaaccgacatcgccctgcccggcccgctgccgttcatcctctcccgcacctacagcagttaccggacaaaaacgctcgcgccggtggggagcctcggccccggctggaaaatgcctgcggatatccgcttacagctgcgcgataacacactgatactcagtgataacggcggcagaagcctgtattttgagcacctgtttcccggtgaggacggttacagccgcagcgagtcactgtggctggtgcgcggcggcgtggcgaaactggatgaaggtcaccggctggccgcactctggcatgcgctgccggaagaactccgcttaagtccgcatcgttatctggcgacaaacagtccgcatgggccgtggtggctgctcggttggtgtgagcgggtgccggaagcggatgaggtgctgcctgcgccgctgccgccgtaccgggtactgaccgggctggtggaccccttcgggcgcacacagacgtttcaacgcgaacgccggtgaattcacggcgaatcacggcgtgacgatgtgctggcgtacttcggctgtactacaccagccagggcagagacccgcacagcattccgcggacgacgtcgcttctatactccggtaa

SEQ ID NO: 25502 - DNA, 1140 bp, Homo sapiens
  SIMILAR (516)..(196): 731254mologous to Escherichia coli peripheral membrane protein,accession number L08399,Smith-Waterman Score=422.
atgtccatacggagggtcgcctgctgcagcgggagccggccgaccacacactcgggctgtgcattcaacatcgcctccgtcaactgtgccctggaagtgacttttgagtcgacaaaccaaaaactcaacagccagtcgatagcctgcaacagcggttgttgcagggtggcctcttgcgtactcatagtgtcgcgtcccggcatcatcaagtgggtaatggcatttggactgacgcccgtcagcgagcatattcagcgccggttcttcagcgcgacatctgtcagtggcataggggcagcgcgggttaagcaggcagccgttcgggcggtcgtacttgccgggaacgacacctggcaacgacgccagacgttctttgtcctgagcaaattctggcagcgcacgcagcaatgcctgagtatacggcattgtagtgaggaacagttggcaaatttcgcccgattgctcacccataatgaaaaaggcaaaactcgcctctccagcgtactgatgcgcaacgaactgtttaaatcgatggaagggcatcccgagcaacatcgccgcaactggcagctgattgccggagaattacagcattttggggcgatagtatcgccaacaaactgcgcggacacggactctttctgcatcccagtggagggtcccagcccgggcgcggacaaggaggagggtcccagcctggacgcagacccagaggagggttccagcccgggcacagacaaggagaagggtcccaggccggatgcaggcccagaggacgggatcaacagttactacctgaccagcgacggcagcaccatgagttaccgcacccgtgttcgtaccccgagctttgcgcatttgcagcaaattccggcggcgatccgcggcagcctgtatcgattttgttatgtcagatgtggaccgctaattatgcacgagaatcaacaaccacaaaccgaggcttttgagctgagtgcggcagagcgtgaagcgatcgagcacgagatgcaccactacgaagacgcgcgtgcggcgtccattgaagcgctgaaaatcgttcagaagcagcgtggctgggtgccggatggtggatccacgcgatcgccgatgtgctgggtattccggcaagcgacgtcgaag

SEQ ID NO: 25503 - DNA, 1036 bp, Homo sapiens
  SIMILAR (822)..(601): 891254mologous to Escherichia coli peripheral membrane protein,accession number L08399,Smith-Waterman Score=368.
tcattcgtcatgtgaggtgcatctctcttcgttcttgttatctccgttgtagtgcgtgtctcgtgcttctgttattgtgttcttgctggttatttgatgatgctggatgtatcgatttgtcatcactatggatatcatgtctagtgagccattgatgtagcgaatttcgatgtcgcggataccctgtctgaagagaagcacacagcatcggttcgttgtgtttcggcctctactgactgttcttcgcttctcttcctccttcctttgcttctcttcttctgtgctctttcgttttcttttgcttgtgttgatctgcctgtcgctgctgccttgtcgtcgttccgctgttcgtctgtctcgttcctcgctttctcttgctcctacttttcctcttctggcctctttctcttcttctcgcgcgtcgcgtgtcgtcgccttcggtctcgggtctctccgcgctggttcggcgctttgtctgccttgcgctgctgtcgtgctggccctgagatcagctggcacttgcttggaatggtggtggtggcattcagtggtgcttcctccagaaacaaagcgactcccctccacctcccttatcccatatcctgcttcagtgagtatataacgcccgtcagcgagcatattcagcgccggttcttcagcgcgacatctgtcagtggcataggggcagcgcgggttaagcaggcagccgttcgggcggtcgtacttgccgggaacgacacctggcaacgacgccagacgttctttgtcctgagcaaattctggcagcgcacgcagcaatgcctgagtatacgggtgacgcggcgtagcgacattaaggtacggaggtaccgactgattgtatgcgatacagcgcctgataggccgcatgatcatcggctcgcgaatacccgcttccagcacaatgcgcagaccttcggcgctaacttcaccagcttttagcttttcaagtaacacgccctcttgctgcccgtggcgtatcagctcggaccacactatatgtttcttattctcacag

SEQ ID NO: 25504 - DNA, 2239 bp, Homo sapiens
  SIMILAR (1781)..(2191): 1001254mologous to Escherichia coli K12 putative ATP-binding component of a transport system, fragment 1,accession number AE000424,Smith-Waterman Score=694.
ggcttcttcaatcccttggcccgtgtttcccaacgggaaggccccctactataaggatccagaaaccccttttgaaagatttattggattggacacccctaatggagtggggcttttccttaacccacttttggaaggttattgggcttttaagcccaaaacaaccccttgtgcctctttgccctctgtccccgtcatgaccaatgccccgttgttgctgggtattgtgacctgtctgggctacatcctactgcgcaaaagtgtcagcgttattattaaaggcacgattaaaaccataattggtttcatgttgttgcaggcagggtccggcatcctcaccagcaccttcaaaccggtggtggcgaaaatgtccgaagtctacggcattaacggcgcaatttccgatacctacgcttcaatgatggcaaccatcgaccgcatgggcgatgcctatagctgggtgggttacgccgtattgttagcgctggcgctgaacatctgttacgtgctgttgcgtcgcattaccggcattcgcacaatcatgttgaccggccacatcatgttccagcaggccgggttgattgccgttacgctgtttatcttcggctactccatgtggaccaccattatctgtaccgcgattctggtttcgctctactggggcatcacttccaacatgatgtacaagccgactcaagaagtgacggatggctgtggtttctccatcggtcaccagcagcagtttgcatcatggattgcctataaagtcgcgccgttcctcggcaaaaaagaggagagcgttgaagacctcaaattgattatgggtggcgctatggggctgggtaactggacgcctgcggctgaatttaatatttacgttgacccggaagcggcagaaattgtcttccagtcagggatcccggtggtgatggccggtctggatgttactcaatgcgcaggtttcgtgacggcttactggaacccgccgacgctcaatggcgtactgatgaaacttagcgttgggcaatatctggcaaaagataaaggcgcaacgatcgacgtcgccaaacgctttgacagcggcgtggcggtaggggtatgggcggcaatcagtaacgtatctaaagatgactacggcgaaggcggctttagtaaaggtttttatatctcgattccattcgacttgatgaccattggacctaaccgcaaccgcgcggtggtttcgtggacaccattgacgcgtgatggtggacaaatgctgtcacgcaaataccagctctatccaatgacggcagagcgagaagtaccgaatttatcgaccagtaacaaggatgtcattgaactacctgacaatcagtatgacctggacaaaatggtcaatatctatcccgtcacgccaggattgattgatcagttgcgcgccaaaccgattatgtcgcaggctaacccggagctggagcagcaaatcgcaaactatgaatatcgtatcgggattggtgatgacggtctgatcacccggactaacaccccgagcaaccgtagcggtggtcgacatgatatggtaaaagataaagcggcctataaatctttcctgcgtgaactgggctacctggtgccgcaaccggagcgcgtgacgaagatatcgagtatgttgagtcgatcaaaaacgctgccggagtcattgccgctcggcattcgccagcggctttcgctggcggtggcggtgattcatcgcccggagatgttaatcctcgatgagcctacttctggtgtcgatccggaagcggcagggcagagcaacgaagccgaagcgccgcccgtggtacacgacaccacccacgcgccgcgtcagggatttagcctgcgccgtctgtttagctacagccgccgcgaagcgctggaactgcgacgcgatccagtacgttcgacgctggcgctgatgggaacggtgatcctgatgctgataatgggttacggcatcagtatggatgtggaaaacctgcgctttgcggtgctcgaccgcgaccagaccgtcagtagccaggcgtggacactcaacctctccggttcccgttactttatcgaacagccgccgctcaccagttatgacgagcttgatcgtcggatgcgtgcgggcgatatcacggtggcgattgagatcccgcccaatttcgggcgcgatatcgcgcgtgtacgactggactgtcatcgtcagtgcggtacgtactgctatcggtag

SEQ ID NO: 25505 - DNA, 6385 bp, Homo sapiens
  SIMILAR (3662)..(4735): 931254mologous to Escherichia coli SapA protein,accession number X97282,Smith-Waterman Score=1789.
agtcccagctgtgctgctgctccacttgggaaggcaaacctggacaagctccgccattcaggaaagcttcaggcctacattgttctcgtggagctcgtgtgtaataggaaacgctgtggcgtccagatccactcttctcagcagctcagtgcatcttcgctgctgtcatctgcttcttcagagggagaggggagtgtgtggaaaaccatgctgcccaacagtccccggtctcttttcaacgctcttgaaccgttggcctctgatgacacagcgagtcctgaacatggagctcactttaccccaagaagaaggaagaacctcatcatttccccaaatggagcctcccacttcctcacctacaaatggatttggcagaactcctgtgtttgtttggcgttggaattaacgcactggctgctggggtgcgttttattcataaagcaaggctgtatgagcgagaaattaaagatagtctatcgcccattacaagaattgtcaccgtatgcgcacaacgccaggacgcacagtactgagcaggtggcacaactggtagaaagtattaagcaattcggctggactaatccagcgctgattgacgaaaagggcgaaattattgcgggtcacggtcgtgttatggcggctgaaatgctcaaaatggattctgttccggtcattgttctgtctggcctgacggatgagcagaagcagcgattacgatcagtatcgctcccgtaatgcattaatccgtcgccacattgagaaaatggatgccagtttgcacgtcggaacgaaggagtttgatatttcaaaggtttccgaggtggattctgttgatgatttactcattgataatgccgctcgttatctgctgaaagactggaaaggggttggtgaactggttaatggtgttgaggttgcactggaatatacggcagaacgagggatcgcgctgcttaagcagaatccagagttgtactggcagatccttgcagaagcagccagcatcgcccaggtcgggggcgaagtgtggatcgcccccaaatttgaaaggaatgggctcagacttttggcaaattccgagattggagccgcgtcgcaattacaaacttaccaccgagtggaccctggacgtccgtgtaaattggacctttccggcggcatgagccagcgcgtgatgatcgccatggcgattgcctgtcggccaaaactgctgattgccgatgaaccgaccaccgcgctggacgtgaccattcaggcgcaaatcatcgaactactgctggagctacagcagaaagagaacatggcgctggtgttaattacccatgacctggcgctggtggcggaagcggcacataaaatcatcgtgatgtatgcaggccaggtggtggaaaccggtgatgcgcacgccatcttccatgcgccgcgtcacccgtatactcaggcattgctgcgtgcgctgccagaatttgctcaggacaaagaacgtctggcgtcgttgccaggtgtcgttcccggcaagtacgaccgcccgaacggctgcctgcttaacccgcgctgcccctatgccactgacagatgtcgcgctgaagaaccggcgctgaatatgctcgctgacgggcggtctttggagtcccacacattcgccgtttttaagcagtcagcccagccccgtttgctggtattggactgtctggctacatcctactgcccaaaaggtcagcgttattataaaggcacgattaaaaccataattggtttcatgttgttgcagccaggttccggcatcctcaccagcaccttcaaaccggtggtggcgaaaatgtccgaagtctacggcattaacggcgcaatttccgatacctacgcttcaatgatggcaaccatcgaccgcatgggcgatgcctatagctgggtgggttacgccgtattgttagcgctggcgctgaacatctgttacgtgctgttgcgtcgcattaccggcattcgcacaatcatgttgaccggccacatcatgttccagcaggccgggttgattgccgttacgctgtttatcttcggctactccatgtggaccaccattatctgtaccgcgattctggtttcgctctactggggcatcacttccaacatgatgtacaagccgactcaggaagtgacggatggctgtggtttctccatcggtcaccagcagcagtttgcatcatggattgcctataaagtcgcgccgttcctcggcaaaaaagaggagagcgttgaagacctcaaattgccgggctggctgaacattttccacgacaacatcgtctccacggcgattgtgatgaccatcttctttggtgccattctgctctccttcggtatcgacaccgtgcaggcgatggcaggcaaagtgcactggacggtgtacatcctgcaaactggtttctcctttgcggtggcgatcttcatcatcacgcagggtgtgcgcatgtttgtggcggaactctctgaagcatttaacggcatttcccagcgcctgatcccaggtgcggttctggcgattgactgtgcagctatctatagcttcgcgccgaacgccgtggtctggggctttatgtggggcaccatcggtcagctgattgcggttggcatcctggtcgcctgcggctcctcgatcctgattattcctggctttatcccgatgttcttctctaacgccaccatcggcgtgttcgctaaccacttcggcggctggcgtgcggcgctgaagatttgtctggtgatggggatgatcgaaatctatggttgcgtctgggcggtgaaactcaccgtaggaaccgacggcaacgtagactactgtcttcagcattcaggagagatggcactgtgcatgcttatggaacttatatcttatgggcgagcggaaaataactgccctgatttctgtttttatctcgctgaaacgctgatggtgattgaccatcagaaaaaaagcacccgtattcaggccagcctgtttgctccgaatgaagaagaaaaacaacgtctcactgctcgcctgaacgaactacgtcagcaactgaccgaagccgcgccgccgctgccagtggtttccgtgccgcatatgcgttgtgaatgtaatcagagcgatgaagagttcggtggcgtagtgcgtttgttgcaaaaagcgattcgcgctggagaaattttccaggtggtgccatctcgccgtttctctctgccctgcccgtcaccgctggcggcctattacgtgctgaaaaagagtaatcccagcccgtacatgttttttatgcaggataatgatttcaccctatttggcgcgtcgccggaaagctcgctcaagtatgatgccaccagccgccagattgagatctacccgattgccggaacacgcccacgcggtcgtcgcgccgatggttcactggacagagatctcgacagccgtattgaactggaaatgcgtaccgatcataaagagctgtctgaacatctgatgctggttgatctcgcccgtaatgatctggcacgcatttgcacccccggcagccgctacgtcgccgatctcaccaaagttgaccgttattcctatgtgatgcacctcgtctctcgcgtagtcggcgaactgcgtcacgatcttgacgcctgcacgcttatcgcgcctgtattatcgtctcttttggtgattgctggacttgtgagtggtcaggcaatcgccgcgcctgaatctcccccgcatgctgatatccgcgacagcggttttgtctattgcgtcagcgggcaagtcaacacctttaacccatccaaagcgagcagtgggttaattgtcgatacccttgccgcccagttttatgatcgactgctggatgtcgatccctatacctatcgcctgatgccggaacttgccgaaagctgggaagtactcgacaacggcgcgacctatcgcttccacctgcgtcgcgatgttccgtttcaaaaaaccgactggtttactcccactcgtaaaatgaatgccgacgatgtggtgtttaccttccagcgaatttttgaccgcaacaacccgtggcataacgtcaacggcagcaacttcccctacttcgacagcctgcaatttgccgataacgtgaaaagcgtccgcaaactggataatcataccgttgagttccgactcgcccagccggatgcttcttttttgtggcacctcgcaacccattatgcttcggtcatgtcggcagaatatgcccggaagttagagaaagaagatcgccaggagcaactcgaccgtcaaccggtcggcaccggtccgtatcagttgtcggaataccgcgccgggcaatttattcgcctacaacgtcatgatgacttctggcgcggtaaaccgttaatgccgcaggtagtggtggatttaggctccggcggcaccggacgtctgtcgaaactcctgaccggggaatgcgacgttctggcctggcctgctgccagccagctatccattttgcgtgacgacccgcgcttgcgtttaacgctgcgtcctgggatgaacgtcgcctatctggcatttaacaccgccaaaccgccgctaaataatcccgctcgcctgatgcaatccatctattatggtacggctgaaacggcggcctctattttaccgcgcgcctcgtgggcctatgacaacgaggctaaaattactgaatatgaaataagtgaactggcgcagaatcgtctggctattggcgttggttactctgccaacacttgcggaggagacgccgttacaactggtgctgcgcgttctacgccgcttttacatcactgtgtcgcccggaatgggtcactaacagcacgacggtaccgagctcgactgctcttctcagtaacggacggaagaaactgtccgggtcgttactgtccgtcgcccaaccggataacgtcagatcatggctcatatccatcaaccgcgcctcctgaaagcgaccttctaccggcacaatcaccacttttacgccaacctgcgccatatccgcctgaatcagttcggcagttttcagtggactgggtgatacaacagcgtcggtgcacactgggcaaggcaaccaggctctggcttgatcctcgcctgcgtggggcattatttgccgcctggcccagagtgtctgccgcggcgttttccggcttttatgtggcgatgatcctggtgctgtgctcactgttcttccgcccgctggcctttgattatcgcggaaaaatcgccgatgcacgctggcgtaaaatgtgggacgccggtctggtcatcggcagtctggtgccgccggtagtcttcggtatcgccttcggcaacttgttgctcggcgtgccgtttgccttcacaccgcaattacgcgtggagtatctcggcagcttctggcaactgctgacgccattccctttattgtgcggattgctcagccttgggatggtgattttgcaaggtggcgtctggttacaactgaaaactgttggtgtgattcatctgcgttcacagctggcgaccaaacgcgctgcactgttggtgatgctgtgctttttgctggcgggttactggctgtgggtcggtattgatggctttgtactgctcgcccaggatgctaacggtccttccaatccgttaatgaaactggtggcagtgctacctggtgcctggatgaataattttgtcgagtcgcccgttttgtggatcttcccgctgctgggattcttctgcccattgcttacggtgatggcgatttatcgtggtcgcccgggttggggatttttgatggcatcattgatgcaatttggcgtgattttcacggcaggcatcacgctgttcccctttgtcatgccgtcaagctccggaacggacacggtgaccaaatctagtgaccgtgatttaaacccgccggatattagtgggcgggtaccaggggtcccgaaacgaatgaaggactctggttgtacgccagccccatcttcacccggtgttttcgccctgaattctccgcgtcttctcgctggaccttctgtgtgctctcgttgcggtccaccagcccggtcagtacccggtacgtcggcagcggcgcaggcagcacctcatccgcttccggcacccgctcacaccaaccgagcagccaccacggcccctgcggactgtttgtcgccagataacgatgcggacttaagcggagttcttccggcagcgcctgccagagtgcggccagccggtgaccttcatccagtttcgccacgccgccgcgcaccagccacagtgactcgctgcggctgtaaccgtcctcaccgggaaacaggtgctcaaatacaggcttctgccgccgttatcactgagtatcagtgtgttatcgcgcagctgtaa

SEQ ID NO: 25506 - DNA, 1467 bp, Homo sapiens
  SIMILAR (927)..(475): 811254mologous to Escherichia coli CG Site No. 736,accession number U00039,Smith-Waterman Score=604.
tcatggtgtttcctcaccttgctcttcctgctggtgataaaccagcgacaccgccagcacgccctctacgttgcgtactgactcaatggtttggatcagcgtttcgctgtcttctgcttccaccaccacaatcaactgaccgctcggcgcgtcgctgacagcaacttcacagccgggaaaggcgttcagttgggtgctgatgtctgaaattcgttcgcttttggcgatattgtacaccatataacacgacgtgggcagcgtcagagaaatggcgataaccatcaccgttaaaaacgtggcgaacggtttgcttttcagatcctgcaatgcgccgtggaaggcatagcgcacctgttcgttgaaaacgttggttttgcgatttaccggttttggcgaggatttcgcgcgttttggtgcgttacgaccgccgtcgcctgagccgccgaccgatttacggaagcgatcaagacgcccgccaaagcctccatgcaagtgaccatcgctcagggtgagcatgcgataggaacgccgcgagatcaggttgatgtcgtgcgttgccatcaatacggttaccccaacgcggttaaactcttcaaacagacgtaaaatgccttccgacagcgcgtcgtccaggttaccagtcggttcgtccgccagcagtaccgcgggcttgttcaccaccgcgcggcaatgccaacacgcgcccgaaagctgaatagggaagttcttcgctttgtccagtagcccgactttatccagcgccgccgaaacccggcgacgaatatcgtcaccgctggcaccggcgataatcagcgggatcgccacgttatcgtagacagtacggtccatcagtagatggtgatccatgttcatcactggtctttccgaaaggctgtaagaaataacttcgttgttgaagagatctattactggagacaaatacagcttgcgcccattgactgcaaattcagtaacatcggtaacccacttctcgtttggccgcgtagccttgaaatctccgccagtgagcgcgaattgcgtcagcaacgggtgattagcgccgctgagaagtttgttgaggatcagagaacgctgcatccgctcaacccgatttgggataaccagttcatgactttgctggagcagggacgcatacaggaactggatgccgtcagtaacgaagagctttccgccattgccggaaagtcgacacatgaaatcaaaacctgggtcgccgcttttgccgctatttctgcgtttggcaactggcgtagcgaagggcgttattaccgcccaatcccggagtggattgccggatttggcgaagccgccaccagccgttttctgaatgtagaagaagcgggtaaaacgctgcgcatccattttaatgactgcggacaaggcgacgaaacccgttgtcctgctgcatggttccggcccgggtgctactggctgggcgaacttcat

SEQ ID NO: 25507 - DNA, 3045 bp, Homo sapiens
  SIMILAR (99)..(242): 671254mologous to Escherichia coli isocitrate dehydrogenase kinase/phosphatase,accession number M18974,Smith-Waterman Score= 156.
atgatgttctttatgctgatagctgccgtagcaggatcctgtcgcagttcggcggttctgctcgtttcctcgtctcactgggcgcgctttggaacattccccgccgtggcgaagactttcacccggatacgttgggaatctctactgatgcgcgttatcagcgacttaccgctgcgctgcgctggcagaataaaagccgtgacatccattacattattcgccatctacggaaacgctggggacagacaacctcgcggaaagtcatttacagacggagacggcgagttatttattgatacctgcctgacgacgaccgccgaagcgacattgtttttggctttgcgcgttcttattttatggtttatgcgccgctgccgcagcgctggtcgagtggctacgggaaattctgccagggctgtaatgagcagttcattaagcgccgggtattcgtggaatggtgatgttggtgtttacgctgccgggtttgatcgggtattcaaagtcatcaaagacagaaaggatgtctgccgctcacgttcgtgcctgctatcaactggtgaaagagcacatcgcgtgggccgaatggcggacacccaggagtttgaaaactttgtgctgagaagcggcatatttccccggcattatatggaattactgcttcagaagagcggaataaatcacctatctggtaccgaagctgatatttctccgtgtaatgtagtttgtgtctggtgtatgaacatcgcagcggtgtctatcactatcgattcccatcatgcgtgtgacctattgtactcgacaatccgcacagttatacggtatacgatccgacggctgtacgtagtatccagtaatgaatcgttaaacccgaatgtgcttcagaaaccattcgggtgttttctatccattcgccagcggctgcgcttcctgcggctgataatggataatattgctgtgacaaattccacacccggctgcaccacgatggcaatcacaccagagaaggacgctctcgcgaacagcagctggccatactccacactgaacctggccgtatgcggcagttgcagcagcagcatagtcaaacgagactggccgataccccgccgatggtctgcggcatttcaccgcgcagcagcgcctgatgccactcagctccaggcgatcttcgtcaccgcgccagttgatgcttcagctgtcggcatctacacggatccccatggaggaaagctcaaacgcatcttcagtaccgggttccacaccagaatatcgccgttcagacccgcatggcccactctgacggggtgctccagtcatcataatccggtgcgcgcacgtcgtgggatgaccatcgctcagcttgccgccaatcccgacaaggaataccgcgccagatctttcgctatcgcccgctcacgccctttggcatcaagatccggatacgagacagtaactcctggctgtacccgtcgcgccgcctaccagcgcaaccggcttgtggcccgcctgctgaagcgtttcaggcataacaatggaacaagatgccccaaatgcaagctgcagcgctcaggaatttactttcaggataccgcgggcagaaatgcgactggactgctcgaaacccatgcaccatctggctatcacgcgggcggctatgaatatttctcacttcgagagtcgaaagtcgttctgctttaccgatcaccatcacctgcgctcaaggcacaaacgcgtcagcctgctcgatgtcgtctagcagcccatcggctcatccataccaaagggggttttgaatttctcttccatcacatcgaaggcctgatcccaggaaatagccttaatgcagttcaggccacggttaaccggtgcgtccgggtcgccctgaaggccaccacatcgtacactgctgcgttccgaccagaacgccgcaaccataccgcagaaacgggcatcggcgcttatcccattaatgcgcatcctgcccgttcgatatgggcatctcctgctctgctgaccgtatatcaaagcgaagatcaaccgtcagggaatctggatcgaaaaactggaaataatccaggcaaatatatcccggaagagctgcgcaaagcgggagaagggaagcggtatgtcagcacacatttccccgttgagcctgattcaggcactacacaagaggcacatccttatgaaaaagatccttgtggcatgcggtaccggcatgtcgacttcaacatgattgcacacaagctgcaagagttcctgactgaacagggcatttcagcactaccgcccaatgctttcgcaggttgtattgcgcaggttggtgaaaaagtcaaagactggaagtggggcaacgcgtcgtatcggataaacaagccggtcaacgatgtatccggtgttttgtccaggccttgtgaaacaagacgaatcgcatgcggtcatataacgcttccagactgctgtctgcttccggcagctcttggaggccgccaccagcagacgcatcgggattttttctacgtgtgcacgttgcggaactggcgctcgttaatggcgtgcgacggcaatgttggcccgattgcctttattggcctgatgatgccgcatatggcgcgttgctggtgggtgccgatcatcgctggtcgctgcccgtcacgctacttgctcccctgccctgctgctgtttgccgatatcatcgggcgggtgattgtgccggcgaactgcgcgtttctgtggtcagtgcgtttattggtgcaccggtgcgatcttcctcgtgcgacgtaaaacgcgaggtggtgcatgatttacgtcttcgccgattactcatcacctgtttgctgctggtttccgcctgtgtggttcaggtatctggggattacgcagcggtgccgtcacgctggaaacctcgcagtattcgccgcgctgatgggcgatgcgccgcgcagtatgacgatggtggcaccgaatggcgtttaccacgcgtgctgatggcgctgttgattggcgcacactgggcgtcagtggcgcgatttttcagtcgctga

SEQ ID NO: 25508 - DNA, 2273 bp, Homo sapiens
  SIMILAR (1547)..(822): 981254mologous to Escherichia coli K12 putative DEOR-type transcriptional regulator,accession number AE000357,Smith-Waterman Score=1181.
cgtaaagcgtttaaagcgattaagtcgctgattactgacgtgagcgaaacgcataagatcagcgccgaattgctggcatcgcgtcggcaaatcaaccaactgctgaactggcactggaaactgaaaccgcagaacaatttgccggagctgatttccggctggcgtggtgagctgatggcggaagcattacacaatttattgcaggaatatccgcagtaaaatcttccgaagccggactgggcgcgctcagcgccacatccggcttcggcaaactacaaatccaacaccaggcgtttacccttcgcacgcgaacaacagatcaacatactttgctggctggcacgctcttcatcgctaaaatattgatcccgatggtcagcttcaccttccagtattgctgtttcgcaggttccgcataccccttcacgacataaacattccactttcgcggctttattattttcaataacctgcaaaatagtcatctcttccggcaccacaaactcttttccggaacgggcaagcaccagggtaaatgcatcgccggttttgtcttcgatagcaaattgctcaaagtgcagcgtatcggcggcgatgtccagacgcgcagcttcacttcttaccgcttcaattagcgcctcgggcccacaggtataaacgtgtgtgccaggttcgatatccgccaatattcgcgctaattcccagtcgtgttccggttgatgaatgatgcaaatggactttctcagcctgcggatgtcagatttatattgataccggatcgccgaacagcgggcggctgtcattttataaaataaagtagtctcatgcttcttcagcaaagagagatcctgcttcaccagcgcgcgactggcactctccggcaaaccgtcgtctgtaataatctgatcaaactcgcttaatggtaacgccagccatgtcgccacctgaccatatttcgtcgcatcacagaccaaaactcgctggcggctggcactggcaatcgcccgtttcaccgtgactttatcttccgctggcgtagaaatcccccgcacactccatgacgatgcagaaataaaagcctgatcaatcatcaggctgcgcagcatggtcgcagcggcttccccgacacaggaacggttttcccgacacactgcaccgccagtgtgaataattgtgcaattactgttgtcgagcaagtagtccgcaataacgaaatcgtttgtgaccacagtcagtgactccatgtgaatcagatgctgtgctatcgctaacgtggtcgttcccgcatccagatagatacaacttcccggctgaacaagacttgccgccagcttgccaatagccgctttttgcgtcattgccagcgcagtttttacctgatgagaaggttcatgcgccacgcgtcccggagactggacgcctccggacaccagcacaacggctccctgctgctccagtttttgtaaatcccgacgaatggtcatatgtgacacattcattctgtccgttagttcagcaatactgacaatgcctttttcagctaccatcgtatcgtccagcgctggccgccttagcgatacgttggtcagggttatctgtatttttatgctcgccgtaatctgcgtgaagtagtagtttttatctgcaaaccaccgattaaggtagtaatcggcggttaacgccgagaagtcgactaatttgctttccagcgtgtcgagggcttgcgcaacgtcggcctgcggtgagcgatagcgatgtaccatttcactgataaccgccagcaaaggaacttcccagaggatgacttcacgccacgggccgcttaaacgaatatccagcttgccattatcgttggacacggtgacttgttccgggttaaagcggaactcgcgtaaccagttaagatagtcggccttaaagaaaggcagggcagaaagccactgatattcatcatcctgcaggcgcaggtgctgcatcgcctgaacctgttcacgaatagcatcggcataaatacccagcagatcgtcacctcggcaacgaaactccgccgcgacatgcacatcgtaatagtgatgaaacacggcttgctgcatatgcaacttataagcatacggaatgatgatccaacctttatccagcgcaccgttgaaatggctaaagcgttcgaacagcagacgggtcagttttgccggatagcttaccgctggcgcgtcatcgaatttatcgcccgcattggttgagttacaggcgcgtttcgacgaagaagccaacat

SEQ ID NO: 25509 - DNA, 3393 bp, Homo sapiens; identical to SEQ ID NO: 14960
  SIMILAR (1356)..(613): 991254mologous to Escherichia coli K12 6-phospho-beta- glucosidase A; cryptic,accession number AE000373,Smith-Waterman Score=1350.

SEQ ID NO: 25510 - DNA, 1875 bp, Homo sapiens
  SIMILAR (1229)..(1828): 421254mologous to Escherichia coli DNA recombinase,accession number M64367,Smith-Waterman Score=268.
atggtggcgtggacactggtgtgcccgctcccgttcattcgctgccagcagagcttcgtttcccaggcaatcagtacatcgccaaattccgcgctcgacaaaagtgttgtggagccacgcgcgccagaatccagaacttcgacgtttttatacagtgccgaacaaaatcctgtgcttttgcctgatcgttgttgttgtgatgcagccgtagccccaggctgccaggtagttccagcgcgcgccaccagagcttttggattaggcgtgatcaccgaaacacccggtttaatcagatcgttccagtatggatctgcttcggatttcccttacgtaccaggaaaacaatggtggaatgtacggtgcggagttatccggcagacgtttgatccactctttatcaatcgcccgctttgctgtttccatgacatgattacaattcttgctcggtacctgaaagcggatttcgctaccgataacccaggctgtccagttcgcctaaacttcccggcatataacgcgcaccgaccacaaatgctcttcacgcacgacaaagttcaccgccagatcgcctctcgcgccttgcgcagtcgccagtcggctaacagttgcagacaggccgttggcgtgcatctccggcgcaacgacttcctgacgacgcatttgcatcaggcggcattcatcagcgccgcagatcttcactgcctgatggagaaattttgtgatggacggatcgcgcaggatcgctttcagcggtaccagtcggtgatcccgagtggatcgattagcgccagatgctcgccatcaaaagttgaatcaaccccagctgcgggtaataagtgcgcgtacgaacaattcagtatccagggctatcgccggaaaggcacggacggcttcacacaaaaagccagcgcatcgtccgtggtaatcatttgctcggcgagcttttaccaaaaagctgttccatatcctgatcctggtagttggcgggatatcttcaatcacgtcatgcagcagcgccgccatcagcgtttcatagtcagtttcatctcggccagaatgcaggcaaccgctaccgggtgcgtgatatgggttcaccgcttgaacgtgtttgcccctcgtgagcatcacgtgcaacggatacgcctgccgcagacgcttgatttggtcttccggcagcggctcctgctcttgctgttcctggcgttcgcgaacgtcgaggatctggttgctgatcagaccttcttcgatttcgcacagcgcgagcatgttagccttacgtgccggagcacagcgttttctgcccagccgctgagcgccaatgacacgctgaaaaataactcctcgccgcttaccgttcaagccaacgggcgcacaggcacgcgtagtggcggagatcagcgcgatatggcgctggatgtgccgatgatgcgtctggttccggtaaaacgctggtcgccgccctcgccgcgttgcgtgcgatgcccacggcaaacaggtagcattgatggcaccaaccgaattactcgccagcagcacgccaataacttccgcaactggtttgcaccgctcggtatcgagtgggctggctcgccggtaagcagaaaggtaaagcacggctggcacagcggaagccatcgccagcggtcaggtgcagatgattgtcggtacacacgcctcttccaggaacaggtgcagtttaacggcctggcgctggtgattatcgagaacagcatcgttttggcgtgcatcagcgtctggcattgtgggagaaagccagcagcagggcttccatccgcatcagttgatcatgaccgccacgccgtcccccgcacgctggcaatgactgcgtatgccgatctcgatacctcggtatag

SEQ ID NO: 25511 - DNA, 3011 bp, Homo sapiens
  SIMILAR (2377)..(3009): 991254mologous to Escherichia coli Probable nitrate reductase (EC 1.7.99.4),accession number D90850,Smith-Waterman Score=1135.
atgtgggctgcgcagcacatcgcccacactcgcccggaaaatttcatcacctccagcggtttaggtaccatgggttttggtttaccggcggcggttggcgcacaagtcgcgcgaccgaacgataccgttgtctgtatctccggtgacggctctttcatgatgaatgtgcaagagctgggcaccgtaaaacgcaagcagttaccgttgaaaatcgtcttactcgataaccaacggttagggatggttcgacaatggcagcaactgttttttcaggaacgatacagcgaaaccacccttactgataaccccgatttcctcatgttagccagcgccttcggcatccatggccaacacatcacccggaaagaccaggttgaagcggcactcgacaccatgctgaacagtgatgggccatacctgcttcatgtctcaatcgacgaacttgagaacgtctggccgctggtgccgcctggcgccaaaaccttagaacgtgttttacgcgtggtgcgtcatcgtggtttccacgtctgctcaatgaatatggccgccgccagcgatgcacaaaatataaatatcgaattgaccgttgccagcccacgagcacaaccacatcacaacaaatccgcgcctgagcgcaaaaggaatatcagaatgaccacgaagaaagctgattacattgggttcaatggggagatggttcgctgggaagacgcgaaggtgcatgtgatgtcgcacgcgctggactatggcacttcggttttagaaggcatccgtagctacgactcgcacaaaggaccggtatttcacgccgtacatcaacccgaaaaacggccgccgaacaccgacaacgggcgctccgtgaatacggccctatattgtcatagggttacatgtccctgtaatcacttcacctgggttctctctaagaacgctccccgttggcaccttttccttgtcaaccataaccggaccgtcaaagcatggttatccaccagtaatatggctgccataacactgatgccatttgattccatcttgtcaaaatatgctttcataactagcccgaaatcaccgcaggcagcacgcacgcccctcaggacggctggaaaccacgccaagtctgttttgcatttatgtgaggtggtccaggtaacggttgttgttggaatgcttctggttaggtcaccagaacgctgtgacgtacagagtgacatcaaggggcacaagggtcacgcacggcccacagggacgcctggagttcgcgaaacgttccgagacctaaagccgacggacgaaccaatacggcacactgccgacacacagggggcccgcaaaacaggcgagacacacaacacattccgtcttggcaaagaaacaattctgttacgtaccggctggaccgcgttcgatgaagaaaagaccgaactgatcaaccagacggtgacctgtcatatcgacctgattttgcaaggcattatcgcaaaggagtttgtcagtcgatcgcacaacaaacccgtgggcatccgtctcagcagctctgcacccctcgccagcgccattgccaagccttggccactggcccgtcgttttcacacaccgtccgacaacaatccacgcacatattatccggacgctaagaccttgcggctggttacagtcaggctgcaacgacggccccgacaccagatacgaccctatacacccaaatcaagatattggcagccaggcaccttgaaaattgaattttatgatctaaatctaacctctcaggggatgtgtctctcttctggcgtcttcctcggtgtgtctcccgaggcgcttttacgacattgggcccgggttatgcccttccctatggtccgccgaggtggtaggcggttgcgccagcttcacatcctggataggcaggaacgtttccctatcatactcctgtcccgggtctcatgtgtctcagttcaaacagacactgccgtctatcttcaagctgcaatgaagctgagagccacagaaaacacctgtaccatggtttcagggaggagtctcttccctcagccgaaaacagacagctttgctggtcatctgttctccactgcgaggacgctgccactcagtgtggagagaggaaggggttctgcctatggtgcaagaaggtcggactcggcagctggtgttcagccaaaagcgaccgatttcagacatcagcacccaactgacgcgtttccgggctgtgaagttgctgtcagcgacgcgccgagcggtcagttgattgtggtggtggaagcagaagacagcgaaacgctgatccaaaccattgagtcagtacgcaacgtagagggcgtgctggcggtgtcgctggtttatcaccagcaggaagagcaagctaacgccgttgcggccgctgcggcggctgccggtctcagcgtgccgggcgttgcccgcgccgttgttggtcagcaggaagccatcaaatgggataaagcgccgtgccgtttctgcggtactggttgcggcgttctggtcggaacgcagcagggacgtgtggtggcctgtcagggcgacccggacgcaccggttaaccgtggcctgaactgcattaagggctatttcctgcccaaaatcatgtacggtaaagaccgtttgacgcagccgctgctgcgtatgaaaaacggtaaatatgacaaagaaggcgaatttaccccaatcacctgggatcaggccttcgatgtgatggaagagaaattcaaaaccgccctgaaagaaaaagggccggaatcgatcggtatgttcggttctggtcagtggactatctgggaaggttatgccgcgtccaagctgtttaaagcgggcttccgttcgaacaacatcgacccgaacgcgcgtcactgtatggcgtcggcagtagttggctttatgcgtacctttggtatggatgagccgatgggctgctatgacgacatcgagcaggctgacgcgtttgtgctgtggggcgcaaacatggcggaaatgcaccc

SEQ ID NO: 25512 - DNA, 1953 bp, Homo sapiens
  SIMILAR (599)..(742): 441254mologous to Escherichia coli rhamnulokinase,accession number L19201,Smith-Waterman Score=84.
atgacctttcgcaattgtgtcgccgtcgatctcggcgcatccagtgggcgcgtgatgctggcgcgttacgagcgtgaatgccgcagcctgacgctgcgcgaaatccatcgttttaacaatgggctgcatagtcagaacggctatgtcacctgggatgtggatagccttgaaagtgccattcgccttggattaaacaaggtgtgcgaggaagggattcgtatcgatagcattgggattgatacctggggcgtggactttgtgctgctcgaccaacagggtcagcgtgtgggcctgcccgttgcttatcgcgatagccgcaccaatggcctaatggcgcaggcacaacaacaactcggcaaacgcgatatttatcaacgtagcggcatccagtttctgcccttcaatacgctttatcagttgcgtgcgctgacggagcaacaacctgaacttattccacacattgctcacgctctgctgatgccggattacttcagttatcgcctgaccggcaagatgaactgggaatataccaacgccacgaccacgcaactggtcaatatcaatagcgacgactgggacgagtcgctactggcgtggagcgggggccaacaaagcctggtttgggtcgccgaagcatccggggaatggggcgtgctggcctgcaccctttttgcctggaatcgcaactactttgttttgctattcgttggcgtctttcttagcagctttggctcgaccgctaacccgcaaatgtttgcccttgcccgtgaacatgccgacaaaaccggacgtgaggcggtgatgttcagctcttttttacgcgctcaggtttcactggcatgggtcattggcccaccgctggcttatgccttagcgatgggtttcagctttacggtaatgtatctgagcgcagcggtagcgtttattgtttgcggtgtgatggtgtggctgtttttaccgtcgatgcgaaaagagcttccgctggcgaccggcacgatcgaagcgccgcgccgtaaccgtcgcgatacgctgctgctgtttgtcatttgtacattgatgtggggctcgaacagcctgtacatcatcaacatgccgctatttattatcaacgaactgcatcttcccgagaaactggccggtgtgatgatggggaccgccgccgggctggaaatcccgacgatgttgattgccggatatttccgccaaacgtctgggcctacggcttacgggcgaagtgtaggccggataaggcgttcacgccgcatccggcagtcgtgctattatcaacgcatattcagtttattggcgtgcgaactggccaacgcgctggaacgcccggaaaacttctgcgggatgcacttctttaacccggtccaccgaatgccgttggtagaaattattcgcggcgagaaaagctccgacgaaaccatcgcgaaagttgtcgcctgggcgagcaagatgggcaagacgccgattgtggttaacgactgccccggcttctttgttaaccgcgtgctgttcccgtatttcgccggtttcagccagctgctgcgcgacggcgcggatttccgcaagatcgacaaagtgatggaaaaacagtttggctggccgatgggcccggcatatctgctggacgttgtgggcattgataccgcgcatcacgctcaggctgtcatggcagcaggcttcccgcagcggatgcagaaagattaccgcgatgccatcgacgcgctgtttgatgccaaccgctttggtcagaagaacggcctcggtttctggcgttataaagaagacagcaaaggtaagccgaagaaagaagaagacgccgccgttgaagacctgctggcagaagtgagccagccgaagcgcgatttcagcgaagaagagattatcgcccgcatgatgatcccgatggtcaacgaagtggcacctgctggggaacagccaatttaa

SEQ ID NO: 25513 - DNA, 2857 bp, Homo sapiens
  SIMILAR (1744)..(1926): 1001254mologous to Escherichia coli ribonuclease D (AA 1-375) (start codon uug),accession number X07055,Smith-Waterman Score= 321.
atggcggcccggacaaggggtacccacacccagcgcaaccggcataagtacaggaaatcaacgactcaccggcgaccacacccagcaccaccctacggccaactgccacggggccaacagcgaacagcagggcgaccaaaagcaaccagggcacgcaagcgcggggggcagccctcaacgccgggaaaacgcccacacaggggcgcccacgacagcccggcgcaaaaacaagctcacaggcgacacaggaaccggccgacacgacaagccgacccgcagtctacggccccgcgggaacaccgaaaccgcacgcaagcaaagccaacagtggcgtcccaaggcgcaccacggtcagggacacggctgtcagccgccaagagcgcgcggccccgacgaaccacgcggcgccaccagccgcgccgcctcgcaggaaatgcctttccaactggacgtttgtacagcacaattctattttgtgcgggaggcgttgtggatttctcaatcatggtttacgcagttattgcgttggtgggtgtggcaattggctggctgtttgccagttatcaacatgcgcagcaaaaagccgagcaattagctgaacgtgaagagatggtcgcggagttaagcgcggcaaaacaacaaattacccaaagcgagcactggcgtgcagagtgcgagttactcaataacgaagtgcgcagcctgcaaagtattaacacctctctggaggccgatctgcgtgaagtaaccacgcggatggaagccgcacagcaacatgctgacgataaaattcgccagatgattaacagcgagcagcgcctcagtgagcagtttgaaaacctcgccaaccgtatttttgagcacagcaatcgccgggttgatgagcaaaaccgtcagagtctgaacagcctgttgtcgccgctacgtgaacaactggacggtttccgccgtcaggttcaggacagcttcggtaaagaagcacaagaacgccataccctggaccacgaaattcgcaatctccagcaactcaacgcgcaaatggcccaggaagcgatcaacctgacgcgcgcgctgaaaggcgaccataaaacccagggcacctgggccgaggtactattgacgcggtcgctggaggcttccggtctgcgtgaagggtatgaatatgaaacccaggtcagcatcgaaaatgacgcccgcttcgcggatgcagcccggatgtcactcgtgcgctctgccgacagggaaaagatcgtggtgatccgactgccgaaattgaccccgactacgctgctggtggcgctgcgcactatcgccaacctgtggcgttatgagcatcaacgccgcaacgcccagcaaatcgccgatcgtgccagcaagctgtacgacaagatgcgtttgttcatcgatgacatgtccgcgattggtcaagtctccaccagagcgcaggatcaattatcggcaggcaatgcagaaactctcttcagggcgcggagatgtgctgcgcagcagagcctttcgcgtttagatacgatgagcgctggacccaacaagaaaaataagccgcccatttcgcacattgccaggcctgacgcaacctgcttggtgaagcggccgatccggtatcgggccctcattcggctatctaccgtccagactggccgaaaagcggggattgtgcctgccaagggccgattaaaggttcggctaatcggccagcggttgttccccacgtacacggaccgcagtgaagatctggaagtgttcctcaatgtctttggcgaattaccacaacccttgattgacacgcaaatccttgctgccttctgcggacgcccgatgtcatggggtttcgcttccatggtggaagagtattccggcgttacgctggacaagagtgaatcgcgcaccgactggctggccagacccgctgccggaacgtcagtgggaatacgcatcgccgaatgtctggtatctgttaccgatcaccgccaagcttatggtagaaacggaggcctccggctggctacctgcggcgctggatgaatgccgcctgatgcaaatgcgtcgtcaggaagtcgttgcgccggaagatgcctggcgtgatatcaccaatgcctggcaattacgcacacgccaactggcctgtctgcaactgttagccgactggcgactgcgcaaggcgcgagagcgcgatctggcggtgaactttgtcgtgcgtgaagagcatttgtggtcggtagcgcgttatatgccgggaagtttaggcgaactggacagcctgggtttatccggtagcgaaatccgctttcacggtaaaacgctgctagcgctggtggaaaaagcgcagacattgccggaagatgccttaccgcagccgatgcttaacctgatggacatgccgggttatcgtaaagcgtttaaagcgattaagtcgctgattactgacgtgagcgaaacgcataagatcagcgccgaattgctggcatcgcgtcggcaaatcaaccaactgctgaactggcactggaaactgaaaccgcagaacaatttgccggagctgatttccggctggcgtggaatatccgcagtaaaatcttccgaagccggactgggcgcgctcagcgccacatccggcttcggcaaactacaaatccaacaccaggcgtttacccttcgcacgcgaacaacagatcaacatactttgctggctggcacgctcttcatcgctaaaatattgatcccgatggtcagcttcaccttccagtattgctgtttcgcagttccgcaggccacttactgccatcgtatagcgccgattttgggaaatggcgcaatgaaaccgggaagaaaaataagctaa

SEQ ID NO: 25514 - DNA, 3318 bp, Homo sapiens; identical to SEQ ID NO: 24291
  SIMILAR (1585)..(2160): 941254mologous to Escherichia coli ribonuclease D (AA 1-375) (start codon uug),accession number X07055,Smith-Waterman Score=933.

SEQ ID NO: 25515 - DNA, 531 bp, Homo sapiens
  SIMILAR (507)..(154): 831254mologous to Haemophilus influenzae Rd transcription accessory protein (tex),accession number U32738,Smith-Waterman Score=483.
atcgcgacccggtttttccagctctttgatgatgtcggttacggtcggcacacggaatttctcatcagtaaaagtcaaacgctttcaggttacgcagttcgctgctgttacccatcagatctttcagtgcctgctgtgttgctgcccgaatgccggaacagaagcagtgttgagatcgacgccaacggcgtttacgcagtcttctactactgcgtccagtttgcgggccagttgcgtctggctgacgtcatgctgatactgacctacgccgatagatttcggatcgattttcaccagctccgccagcggatcctgcaaacggcgggcgatagacaccgcgccacgcagcgaaacgtcgagatccgggaactcctgtgcagccagctcggaagccgagtaaaccgacgcgcctgcttcgctgacgattactttctgcgcggtcactttcgggaactgcttctgcacatcgagatagaaacgctcagtttcgcgggaagctgtaccgttcaccgactcgctacccagttcagg

SEQ ID NO: 25516 - DNA, 1404 bp, Homo sapiens
  SIMILAR (763)..(680): 711254mologous to Escherichia coli exonuclease V (AA 1- 1180),accession number X04581,Smith-Waterman Score=103.
tcagtgcctgccaaagatgaatcttagacactgtctgatgctgaggcatataattcggtgttcctctcctcccttgaggactccgggtatatggcgcgtgcggcgtttgtgatggaccgtctgatgcaggcgctgggcttgccggggaaatcctttgtgccgctgatcgtcggtttcggttgtaacgtaccgtcggtaatgggtgcacgtacgcttgatgcaccgcgtgaacgtctgatgaccatcatgatggcaccgtttatgtcctgcggcgcgcgtctggctatcttcgcagtattcgcggctgccttcttcgggcagaacggtgcgctggcggtcttctcgctgtatatgctgggtattgtgatggcggtgctgactggcctgatgctcaagtacaccatcatgcgcggtgaagcgacgccgtttgtcatggagttgccggtctatcatgtaccacacgttaaaagcctgattatccagacctggcagcgtctgaaaggcttcgttctgcgtgctggtaaagtgatcatcatcgtcagcattttcctgagcgctttcaacagcttctcgcccggtcttcaaagcaattggcgtgcatgaagataactggcaggcaacgttggccttgttacaaggtgcattggcgaacgacgtgtagtgggtacgctcacaacctccagttcgggtcaaccggctgggtaaaatccaggtcttcaaacaaactgttgccagaacgtcccccgtgacgcccccgccggaaactggtgttgttgttaacgtcggttcttcaacgacgctggcaacgcctgcagcatcgacatccagccgaggcatcaaatcctgggcgataccgtgaccacgctgttgcaaaccagagtagctggtgacgcgccagttatcgccgggcaatcgttgtaacgtcttcgcattcagctctgctgtagaaacatcattaacctgccagggttggttatcaccagtttgtgccgtttgccaggcaatatcatcatcgcataacgcttcaatacaggtgcgaagccctgccgcatcttgcggttcccctttttgcagcaaacgcccgagcgcactttggtggacgtcggtgtcaccttttttatcgccacgacggcgcaccagcggtgcaaacgccgagagtgtcagcgccacgtaaagcaaacgcagatcttccgccagacgttcggcctccgcgaggtcgacgctttctggcgcagcattaagatccagaactgcctcaaacgagtggcgatcgtgataaaacgcctgctcctggacgcgggaattggtgataaacggcagccaaggaccaatgggatattccagcccctttcgatttgtggatcgggacaaactgcaccagatgttatcactttcgagacgcat

SEQ ID NO: 25517 - DNA, 1758 bp, Homo sapiens
  SIMILAR (814)..(1497): 721254mologous to Haemophilus influenzae Rd transcription accessory protein (tex),accession number U32738,Smith-Waterman Score=830.
  misc_feature (1)...(1758): n = a,t,c or g
atgattaacatatgtccggcaatcactgacgcgaatgcgcccgttatcactactcagagcaagattctcgatgacgctaggatcccaagtcgtagcgcttacgatggtacggtgttcccacctaacgttgaaggtggtcgttttgtctcatggctggcaagccaggaacgtaaagcgtttcactggatggcgagccataagcctgatctggtcatcaaactcaatgttgaccttgaagttgcctgtgcacgtaaacccgaccataaacgggaatcgctggcgaggaagattgccataacgccacagttaacctttggtggtgcacaactggttgatatcgatgccaatcagccactggaacagcgttacggtgccccacgcctgacggatgaactgcgtgctcagggttacccctttaacgtaaaaaccgtggcggcaagcctgcgccgtcagggactgagggcaaaggcctcccggaagttcagcccggtcagctaccgcgcacacggcctgcctgtgtcagaaaatctgttggagcaggatttttacgccagtggcccgaaccagaagtgggcaggagacatcacgtacttacgtacagatgaaggctggctgtatctggcagtggtcattgacctgtggtcancgttgccgttattgggctggtcaatgtcgccacgcatgacggcgcaactggcctgcgatgccctgcagatggcgctgtggcggcgtaagaggccccggaacgttatcgttcacacggaccgtggaggccagtctgttcagcaatttcgggcactgaagcggcatattacagcttcccgcgaaactgagcgtttctatctcgatgtgcagaagcagttcccgaaagtgaccgcgcagaaagtaatcgtcagcgaagcaggcgcgtcggtttactcggcttccgagctggctgcacaggagttcccggatctcgacgtttcgctgcgtggcgcggtgtctatcgcccgccgtttgcaggatccgctggcggagctggtgaaaatcgatccgaaatctatcggcgtaggtcagtatcagcatgacgtcagccagacgcaactggcccgcaaactggacgcagtagtagaagactgcgtaaacgccgttggcgtcgatctcaacactgcttctgttccgctgttaacccgcgtggcgggcctgacgcgcatgatggcgcaaaacatcgttgcctggcgcgatgagaacggtcagttccagaaccgtcagcaactgttaaaagtgagccgtctggggccgaaagccttcgagcagtgcgcgggcttcttgcgcattaaccacggtgataacccgctggacgcgtctaccgttcacccggaagcctatccggtggtggaacgcattctggcagcaacacagcaggcactgaaagatctgatgggtaacagcagcgaactgcgtaacctgaaagcgtctttccttgataatgaagaaaactggccgctgttacttgatgcgcttattcctgtcgccaatacctgcgaaatgatcctgatgcccgcctgcttcggtctggccgatgacaaactgtggcgttggttgaatgaaaaactaccttgttcactgatgcttttgccaacgctgccgccttccgtgctgggcattcgtctgcaaaaccagttacagcgccagtttgtgcgccagggtggcgtgtggatagaatgcggcgatggcggcgataccaccacgattacgattacccaacgggatttataa

SEQ ID NO: 25518 - DNA, 1881 bp, Homo sapiens; identical to SEQ ID NO: 8711
  SIMILAR (727)..(1836): 721254mologous to Haemophilus influenzae Rd transcription accessory protein (tex),accession number U32738,Smith-Waterman Score=1355.

SEQ ID NO: 25519 - DNA, 4332 bp, Homo sapiens; identical to SEQ ID NO: 5034
  SIMILAR (454)..(1386): 991254mologous to Escherichia coli formylglycineamide ribonucleotide synthetase (EC 6.3.5.3),accession number M19501,Smith-Waterman Score=1557.

SEQ ID NO: 25520 - DNA, 4173 bp, Homo sapiens
  SIMILAR (2950)..(2870): 771254mologous to Escherichia coli phosphoenolpyruvate carboxykinase,accession number U18997,Smith-Waterman Score=98.
ttatttctgtgggcgcatcgccgggaagagaataacgtcgcgaatagtatggctgttagtaaacagcataatcattcggtcgataccaatacccagaccagcggttggcggcagaccatattccagcgcagtcacgtaatcttcgtcatagaacatggcttcgtcgtcacctgcagctttagcattaacctgttcctggaaacgttcagcctgatcttctgcgtcgtttaattcgctaaaaccattaccgatttcacgaccaccgatgaagaattcaaaacggtcggtgatttccgggttaacatcattacggcgtgccagcggggacacttctgccggatattccgtaataaaggttggctgaatcagatgtgagagagcatcacgtcgtgcccgtaacggcacgatctgctgatggcggcccctgccggacggcgtgcaacgatgggcctcgatccgggtctgcgtactggggtaaaagtgacgatggtcgatgccactggcaaactggtggcgaccgacaccatttacccgcacaccggacaggccgcaaaagcagcgatgaccgttgctgcgctgtgtgaataacataacgttgaactggtagcgatcggtaacggtacagcttcccgcgaaactgagcgtttctatctcgatgtgcagaagcagttcccgaaagtgaccgcgcagaaagtaatcgtcagcgaagcaggcgcgtcggtttactcggcttccgagctggctgcacaggagttcccggatctcgacgtttcgctgcgtggcgcggtgtctatcgcccgccgtttgcaggatccgctggcggagctggtgaaaatcgatccgaaatctatcggcgtaggtcagtatcagcatgacgtcagccagacgcaactggcccagcaaactggacgcagtagtagaagactgcgtaaacgccgttggcgtcgatctcaacactgcttctgttccgctgttaacccgcgtggccgcgcgggtttcaaccgccagacgggttgtcgtgcatgctggtgttccactgtggcggccgccgggggtgacccatttttgtaccagtcgccatgtcttcccattcgagttcccccgattccggatggcccgtgcgccaccggtcgtttcgacccgagtttgaggaacatgaagtcctcgttttcggtgccgcgcttcatcccccactcttccggtttgaaggtcagggcttccatctccagatcctgtttggctttggtcagctttccaggtttgcggcatcatgatgcgtcgcaggttcgggtgaccgtcgaaagtaatgccaaacagatcccaggtttcacgctcataccagttagcgttcgggaacagtttggtgaaggtcggtacgtgcaggtcgttttctgccagcgccaccttcagcatgatgtcgcggttacgatcgatagaaatcagatggtagaaaacggaaaaatccgcggcaggtaacccttcgcggtgtgtgcgcagacgttcgtccatgccgtgtaagtcaaacagcatgacgtaaggtttcggcagtttctttaagaaatcgccaacttccagtaattgttcacgcttgatccacacaacgggaaccccggtgcgagtcgcctgaacagtaaaggcatccggcccaaaacggttgcgcagttcgccaatcaccggatcatcaagatgatcgcgggtctgccaggcgggttcttgcgcggttaagtcggtcatattgttcaccattgcaaatggtccgtggtgaccagctggtggggggatggcggcgatatcttccggcgcggcatcatttttgaagatccggtggatgctggcgatagcgtcatcctcgcttatgccgtgcagcgggcaaggataaagcgcgcgataaacatgacccggcatcaggagcctgaccggtgcggtagtgcgaggaagtatgcgtgcgttggctggtgttacgtcgcctttgtcagttcttcgtgctggggatgtttttgagcggtccatggtttggtgtgtggatctgtgcacgtgcaatctacagacagtagcctgtgtattgcgagcacgcgtgtccgctgaccgatccgctgatgacgctgcaaagtcttgccagtggtcatctgcctgtaactcagtatttgcttttccagccagcgtccagccacccatcggatgatgaggtgaaaggcgcatggccgcgcgtaccatccagatgaagctcaggtgaagcgtcaggaagaggtggcgaaagccatctacgaccgccggatgaacagcattgagcaggcgctgccgaggaattacctgattcagaaatgttcctgcttgggcgtccaatgcttcaggctcgactggaaaatttacaggccgtcggtccggcctttgatctcgactatgatcagaatcgggccatgttaaaccaccctgaatgttggtccaaccctggatccgcgttttcagacctatcgctatttgcgtacgccggaagaaccggtaaaacgcgatagcccacgtcgtgccttcctgatgattatgtggggcattgtcggggggtgtctgccgcgcatttcgcgggttccgtgtcgtgtgttcgactgttgtctgcttgtgctcggcctctgtggcgtcatcttgggctggctttgctgcgtgtctggtgccgcactttcctgttgctgtcggctttagcttcggtcttctgtccttgctctgtcgtgtggggccgcctgcttttttcggcttctttgtcggttgtggtttggggcggtgtgtttctctctccgcttgggtcgttgtctccccgtggtactgctcgcctgggtgcggcgtgtcgctctcgtgaggatggcgtcgataatggcgcggtatctttaatcgagatacgtttgccagtgccgttccagccagtgttaacccagataagccctgcgcgcccgccgcctgcatacgtttcaccagcacttctgcgtactgagtcgggtgcagcgacaggaatgccgcgccgaagcaagcggagaaggttggcgtcggttcggtgatgccacgctcagtaccggccagtttggcggtgaagccagagaggaagtgatactgggtttgatcggcagtcaggcgagaaaccggcggcaacacgccgaaagcatcagcagtcaggaagataaccttagtcgcgtggcccgctttggaaaccggcttaacaatgttatcgatgtgatagatcggataagaaacgcgggtgttctcggtttttgaaccatcatcaaagtcgatagtgccatcttcacgcacggtgacgttttccagcaacgcatcacgacggatagcgttgtagatttcaggttccgcttctttcgacagcttgatagtttttgcgtagcagccgccttcgaagttaaacacgccgtcatcgtcccagccgtgttcgtcatcgccaatcaggcgacgtttcgggtcggtggaaagggtggttttaccggtgccggaaaggccgaagaacaccgcaacatcgcctttctcaccaacgttggcggagcagtgcatagaagcgatacccagcgcagttttcgccgccccggtgagggtcgccgcatcaatgatcatttccggtttctgcgcactggcatcaatcagaccatcggcaagcaccagacgcccttcggcatcagtgttcatcacttcaacttttttaccgttgcgataggtgatgatatcgcccagcttgaacgcattgccgctaatcaggttatccgcacagcagaggaacagcttcacgcgcttgttcagtccgcgcgtaatggcaaatgccagcgccccggtaaccgttgccgcgccgcccatgtccgacttcatcgagtccataaacgcagtctgtttgatgcaggcacgcgtacactggcgcttctttatcgccagttgggttgtaatccagccgccagcaataccggagaacgttctgaaccgcgtccgactgtgtgcagccccagggacgttatgtctcacgacgtttgtgtcttcttccggtgatcgctgaaacgcactttgtaaccgatgcaaccgcccggctccgtgtttcagatcttccgcaatacggttcgccactgttcttgccgccagacgacacgactgggtatggccgatcagtcctttaatcccgcgccccagctccat

SEQ ID NO: 25521 - DNA, 4402 bp, Homo sapiens
  SIMILAR (2725)..(3810): 991254mologous to Escherichia coli Proteinase IV (EC 3.4.-.- ),accession number D90820,Smith-Waterman Score=1831.
cgggcgatgcaagagcagttggccttctcccaactcgtacggccagttcgcgccgttctgccagtaacgctaataatttttcatccagcgcgctattatctctcgcagcgccagtaacgggtattccgatgtcatagtgttgctcttcttcaacttcttcgacgaagttggcgtctttcaccgatgttgcggcacgacgtgcttcgcctttgttcttccagtttattgaactcgccgttccagcttgttgatcaattcgttaattgcggtgtacatatcttcatgtttaccactggcaaccagaacgccgttaggtgtattgattgtggcgtcagcaacaaacccttgtggctctttggacagaatgatatgtggattaatcagatgtgtttgccatttttccagtttggcgagacggtctgcgacatgttggcggatggccggagtaatttccatttgtttgctggtaatgttcattgtcataaattttacctcttgtcttcccgtcttggtgaattcagcataccgttcttttaacagttgctgacggttctggaactgaccgttctcatcgcgccaggcaacgatgttttgcgccatcatgcgcgtcaggcccgccacgcgggttaacagcggaacagaagcagtgttgagatcgacgccaacggcgtttacgcagtcttctactactgcgtccagtttgcgggccagttgcgtctggctgacgtcatgctgatactgacctacgccgatagatttcggatcgattttcaccagctccgccagcggatcctgcaaacggcgggcgatagacaccgcgccacgcagcgaaacgtcgagatccgggaactcctgtgcagccagctcggaagccgagtaaaccgacgcgcctgcttcgctgacgattactttctgcgcggtcactttcgggaactgcttctgcacatcgagatagaaacgctcagtttcgcgggaagctgtaccgttaccgatcgctaccactttagagcgcactctcatagagcgcactcgcaacttctgtgatgtggtaagcaacaccctgacggcagaacccagccgtttcaccactgcggtagataaaatcgtgctcaaccgtttcctcggtctgccgattttcctctttgtgatgtacctgatgttcctgctggctatcaacatcggcggggcgttacagccgctgtttgacgtcggctccgtggcgctgttcctctccttccttgaggactccgggtatatggcgcgtgcggcgtttgtgatggaccgtctgatgcaggcgctgggcttgccggggaaatcctttgtgccgctgatcgtcggtttcggttgtaacgtaccgtccgtttcaatatatggccagatggagccttcgcggccggcatggctgtcttcgccggtgccgctggcgaccgatgagacatcatccatattggcgaccggtacgacaattcgtatctgcggatggcgcattgcgggcgggttgactaccgtaaccgggcgatcgccaccaagaaatgctgccacatcgctggctgagcgcacagtggcagaaaggccaattcgctgtgctgaggtgtggagcagcgcatcgagccgctccagacttaacgccagatgcgcaccacgtttactgcccgctaccgcgtggacttcatcaataattaccgtttcgacgccgcgtagcgtttcgcgcgcgcgggaggtcagcatcagatagagtgattcgggtgtggtgatcagaatatccggcggattacgggtgagtttgctgcgttcctgtgcaggcgtatcgccagtacggatccctacgcgaagattgacttccgtttcgccgcgccgccgccgttcatcggcaatacccttcaacgggatctgcaagttgcgctgaacgtcggtgcccagggcttttatcggtgaaatatagaggatgcgtgaggttttacgcttatgcgcctcgcgggtatcttcgccgccttcgcggaagagccgatcgagggcgtagagaaatgctgccagcgttttcccggagccggtcggtgcaatcaccagcgcatgttcgcttcgcgccgccacagccaggttgcggctgacgacacagctcctggcagaagagcaaaggtgaagaaggatggtcgaccctggtgcggaactggggccaatgcccgttgaagacctggcgcaacggcatacaggcagcagtgaagaggttgcgtcgtatctggaaaatcttcttgcagtaaaacgaatcttcccagcgatgataagcggacaggagcgtcttgcccgcttcgcgacctctttctgcgctatctccgggctcatgctctggtcacggctgaacaactggctcatgagtttagtctcggtattgccattgtcgaagagcagcttcagcaactgcgtgaacagggtctggtgatgaatctgcaacaagacatctgggtgagcgatgaagtatttcgtcgtctgcgtttgcgctcgctgcaagccgccagagaagcgacgcgtcccgttgcagccacgacctatgcgcgattgctgctggaacgtcagggcgtattacccgccaccgatggtagcccggcgctctttgcctcaacatcgccaggcgtttatgagggcgtagatggcgtgatgcgggtgatcgaacagcttgctgcgagcgctatcaacgcctcactctgggaaagccaggagttcgtctatgggaaaccggtttatgccgttggcgagaactacagccaggggcaatattatctcgccagtttcgccaataaaatttggctgtctccgcaaggcgtggttgatctgcacggctttgccaccaacggtctgtactacaaatcgttgctggataagctgaaagtttccacccatgtgttccgcgtgggtacgtataaatctgccgttgaaccgtttattcgtgatgatatgtcaccggcagcccgcgaagctgacagccgctggattggtgagctgtggcaaaactatctgaatactgttgccgctaaccggcagatccctgctgagcaggtattccctggcgcgcaagggttgcttgagggtttaaccaaaaccggtggcgataccgcgaaatatgcactggaaaacaagctggtcgatgcactggcatcgagtgcggaaatcgaaaaagcactgaccaaagaattcggctggagtaagactgataaaaattatcgcgccatcagttattacgattacgcattgaaaacgccggcagataccggtgacagcatcggtgtcgtctttgctaatggcgcaattatggatggcgaggaaactcaggggaatgttggcggtgataccactgcggcacaaatccgcgacgctcgccttgacccgaaagtgaaagcgattgtcctgcgtgttaatagcccaggcggcagcgttaccgcgtctgaagtgattcgcgctgaactggcagcagcccgggcagcgggtaagcctgtggttgtatcgatgggcggcatggcggcatctggtggttactggatttccacgccagctaattacattgtggctaaccccagcaccctgaccggttctatcggtatcttcggcgtgatcaccaccgtagaaaatagtctggattcgattggtgttcatactgatggtgtctcaacttcaccgctggcggatgtttctatcaccagggcactgccgccggaagcgcagctgatgatgcagttaagcattgagaatggctataaacgctttatcacgctggttgctgatgcgcgtcattcgacgccggagcagatgataaaattgcccagggccacgtctggaccgtctcggggatttcgatgatgcggtcgccaaagcagcagagctggcaaaagtgaaacagtggcatctggaatattacgttgatgaaccgaccttcttcgacaaagtgatggacaacatgtctggttctgtccgggcaatgttgccagatgcgttccaggccatgttacctgcaccgctggcctcgtatcaggtgcgctccccctgcctcacgtatatacttttgctctttcgatatcattcatatcaatatcatgcaaaagaaatcaatttacgttgcctacacgggcgggaccatcgggatgcagcgttccgagcagggttatataccggtgtcaggtcatctacaacgccaactggcgctgatgccggaattccatcgcccggagatgcccgatttgccattcatgaatatatcccgcgtaatggatcctccagatttaaccccggaaaactggcacctcatgctcgccatatttacgcccatgacgaccataagggctggcaattggccgcgcccaccaagggaataccccttgcccgcgcccggccagaactggacaccgcgctttaa

SEQ ID NO: 25522 - DNA, 1668 bp, Homo sapiens
  SIMILAR (1)..(666): 911254mologous to Escherichia coli mannose permease subunit III-Man,accession number J02699,Smith-Waterman Score=1013.
atgctgttaggcgagcaggaaaacgtcggctggatcgatttcgttccaggtgaaaatgccgaaacgctgattgaaaagtacaacgctcagttggcaaaactcgacaccactaaaggcgtgctgtttctcgttgatacatggggaggcagcccgttcaatgctgccagccgcattgtcgtcgacaaagagcattatgaagtcattgcaggcgttaacattccaatgctcgtggaaacgttaatggcccgtgatgatgacccaagctttgatgaactggtggcactggcagtagaaacaggccgtgaaggcgtgaaagcactgaaagccaaaccggttgaaaaagccgcgccagcacccgctgccgcagcaccaaaagcggctccaactccggcaaaaccaatggggccaaacgactacatggttattggccttgcgcgtatcgacgaccgtctgattcacggtcaggtcgccacccgctggaccaaagaaaccaatgtctcccgtattattgttgttagtgatgaagtggctgcggataccgttcgtaagacactgctcacccaggttgcacctccgggcgtaacagcacacgtagtgatgcatgttggaatgcgtgcgcagcgagctagcgtgtatgtgggcgccgtgggattagttctgacgcacctgctggcacatcgcaaatttttgctgggaagttttttgctgctggcggcaacgctggtagtcatggcctgtttgccttccggcagttcattaacgctgctgctttttgttctcttcagcaccaccatttcggcagtcagtaatctggtgggcattttgcctgcggaaagttttcctactgacattcgctcgctgggcgtcggttttgccactgccatgagtcgacttggcgcggcggaggtgcgaatgaacattctgttagcgtttaaagccgaaccggatgccggaatgctggcggaaaaagagtgcagcgcgctcagaccagtttggggcgaaaagcagaaaaatcgccagagggatagcgcccggaaagcatatccagcgtggcgtcaaaaacacgtcttggcagatctttccacggtgcggcacggcgtacgcgggagtaccattcgtctacctgtaatgcatccatcgccgcggcggcaacggtttgctgcgcaaggacacccggatacaacgtccacgccgccagcgtctgtggatactaccgcaaccaacacgcaaacacctgccgtaactgcgccagcaccagctgttgatccgcaacagaatgcggttgtttcgccttcgcaggcaaatgttgataccgccgcgaccccggcaccaacggcagcaacaacgccagatggtgctgcgccgttgccaaccgatcaggctggcgtgaccacgccggtggctgatccgaatgcgctggtgatgaactttactgccgattgctggctggaggtcactgatgctaccggtaaaaaattgtttagcggtatgcagcgtaaagacggtaatttgaacttaaccggccaggcaccgtacaaactgaaaattggtgcgccagccgcagtacagatccagtatcaagggaaacctgtcgatctgagtcgttttatcagaactaaccaggttgcgcgtctgaccctcaatgccgaacaatcaccggcgcagtaa

SEQ ID NO: 25523 - DNA, 1236 bp, Homo sapiens; identical to SEQ ID NO: 14857
  SIMILAR (487)..(1005): 991254mologous to Escherichia coli ThiJ,accession number U34923,Smith-Waterman Score=873.

SEQ ID NO: 25524 - DNA, 3061 bp, Homo sapiens
  SIMILAR (2015)..(2569): 951254mologous to Escherichia coli K12 low-affinity phosphate transport,accession number AE000381,Smith-Waterman Score=903.
atgctcgatcgtgaaggcaatccgattgaatcgcagttcaactatacgctggaagcggcacaatccagtttacctatgacgccgatgaccctgcggggcatgtatttttatatggctgatgcggcgaccttcactgattgcgcgaccggaaaacgtttcatggtagcgaataacgcagagctggagcgtagctacctggctgcgcgcggtcacagtgaaaaaccggtgttactgtcagtagaaggtcactttacgcttgagggtaatccggataccgacgagagttctcagcgcctgcgtatggaaggcaagcgcgtggcgctggtgcctaccatgggtaacctgcacgatggcccatatgaagctggtcgacgaagccaaagcccgcgccgatgtggtcgtcgtcagtattttcgttaacccgatgcagttcgaccgcccggaagatctggctcgttatccacggaccttgcaggaggactgcgagaagctaaacaaacgtaaagtggatttagttttcgccccttcggtaaaagagatctacccgaacggtactgaaacccacacttacgttgacgttcctggcctttcgaccatgctggaaggtgccagccgtccgggacattttcgcggcgtttcgactattgtcagcaagctgttcaacctggtccagccggacatcgcctgcttcggtgaaaaagattttcagcaactggcgctgatccgcaaaatggttgccgatatgggcttcgatattgagattgtcggtgtgccaattatgcgcgccaaagacggtctggcgctaagtcccgtgtgcgaaaagcgcggctggaaaaaatgggcgcagcagcgtggactgcgcaacatgcaatttttcccgctgcaatcgtatgacgctttacccgcactgctgaagatgggcgattgccatctggtggtgcaaaaacgcggcgcggcagatgccgtattgccgtcgaaactgaccaatattctggcagtaggcggtaacgcggtgattactgctgaagcctacacagaactggggcagctttgcgaaacctttccgggcattgcggtttgcgttgaaccggaatcggtcgaggcgctggtggcggggatccgtcaggcgctcctgctgcccaaacacaacacggtggcacgtgaatatgccgaacgcacgctcggggcgttcatacattccgagccccatgtcgttatcttcgggcacattgatctgaattttcgggcagccacgagcaatcagctttttctccagccgattaagcaacgcattggcaatcccacgcccacgaaactctggatgcacgccaagataataagcagacccgcgatgcccgtcataaccgcccatcaccgttccgaccacgtcaccgtttacctcagcgaccaaaaacaaactgacgtcatggttcatcttacgctcgatgtccatttccggatcgttccacggacgcagcaagtcgcaacgctcccaaagggtgatgacctcttcgaaatcttcctggcgaaatacgcgtatctccatggtattcgttacctttttgcggaaaataacaaaatggcggaaatcgcccaattcctgcatgaaaattatttgagcgttgacaccacagtggaagtatctattaccgtaacccgcgatgaaaagcttatcgcgtgcggtggaattgccggaaatattattaaatgcgttgctatcagtgaatccgtccgcggtgaaggactggcgctgacattagccactgaattgataaacctcgcctatgagcggcacagcacgcatctgtttatttataccaaaaccgaatacgaggcgctgttccgccagtgcggtttttccacgctgaccagcgtacccggcgtgatggtgctgatggaaaacagcgccacgcgactgaaacgctatgccgaatcgctgaaaaaatttcgtcatccagggaacaagattggctgcattgtgatgaacgccaatccctttacgaatggacatggtgaccgtattcaccgcattccggaagatcgcaaaaagaaaaaaggcaaacgtaaaccgccattctggacgcgtattgcgctgattgtttccgctgcgggcgtggcgttttcgcacggcgcgaacgacggacaaaaagggatcggcctggtaatgctggtactggtggggattgcccctgctggcttcgtcgtcaatatgaatgcgtccggctatgaaattacccgtacccgcgatgccgttaccaacttcgaacactacctgcaacagcatcctgaactgccgcagaagttgattgcgatggaacctccattgcctgcagcatcgactgatggcacgcaagtaacagagtttcactgtcatccggcaaatacctttgatgctattgcgcgcgttaaaacgatgctgccaggcaatatggaaagttacgagccgttaagcgtgagtcagcgcagccagctgcgccgcattatgctgtgcatctctgatacctccgcgaagctagcgaaactgccaggcgtcagttcacccttccgggtgatcctgtacaactttcgggatctgacgggtcaggacttaaccccggaaaccgtgacgcgtctggctctgcaaaacgagaatatcgttggcatcaaagacaccatcgacagcgttggtcacttgcgtacgatgatcaacacagttaagtcggtacgcccgtcgttttcggtattctgcggttacgatgatcatttgctgaatacgatgctgctgggcggcgacggtgcgataaccgccagcgctaactttgctccggaactctccgtcggcatctaccgcgcctggcgtgaaggcgatctggcgaccgctgcgacgctgaataaaaaactactacaactgcccgctatttacgccctcgaaacaccgtttgtctcactgatcaaatacagcatgcagtgtgtcgggctgcctgtagagacatattgcttaccaccgattcttgaagcatctgaagaagcaaaagataaagtccacgtgctgcttaccgcgcagggcattttaccagtctga

SEQ ID NO: 25525 - DNA, 3039 bp, Homo sapiens; identical to SEQ ID NO: 4611
  SIMILAR (1798)..(3036): 961254mologous to Homo sapiens semaphorin SEMA6A1,accession number AF279656,Smith-Waterman Score=2068.

SEQ ID NO: 25526 - DNA, 1365 bp, Homo sapiens; identical to SEQ ID NO: 15717
  SIMILAR (777)..(812): 1001254mologous to Escherichia coli phosphoglycerate kinase (AA 1-387),accession number X14436,Smith-Waterman Score=60.

SEQ ID NO: 25527 - DNA, 3954 bp, Homo sapiens
  SIMILAR (3810)..(2362): 851254mologous to Escherichia coli K12 fumarase B= fumarate hydratase Class I; anaerobic isozyme,accession number AE000485,Smith-Waterman Score=2080.
ttacgccgcgactttaccgatatcatcgacgctgtgcgggaaaacgacgctatccgccagattgcggtcacaaccaatggttaccgtctggaacgcgatgtggcgagtggccgatgcgggcttactggcattaacgtcagtgtcgacagtctggacgcccgccagttcaagcactatcaacaaatccgcctcctgcaaaatatagttggtgctgcgagccgtgatccccagcatacccagcgacaacggatgcgcttttggcaacatgcccagcgccattaaagtcatggtggtaggcagttgcgctttctccgccagttcacgcacccgtgcgggcgcattgatcacaccgccgcccagataaagcaccgggcgtttggcagcgttaatcatcgccgctgcgtcacgaatgctttcttcgctaaaggcgggggcggcggctttttctgccatagcgggctgtgtttcaatctcaaaaactgccgtttgcacatccttaggaatgtctatccacaccgggcctgggcggcctgattgcgcaatgcggaaggcatcgctcatgacctgcgggagttcttcgatatgtctgaccagatagttgtgtttggtgatggggatagagatgccgtaggtgtccacttcctggaaggcgtcggtgccgatcatcgaggcgggaacctgaccagtgatgcaaatcagcgggatggagtccagccgcgcatcggcaatggcggtcaccaggttagtcgcacccggtccgctacaggccatacagaccgccggtttaccgtcggtgcgcgccattccctgagcgataaagcccgcgccctgttcatgacgggccagaatatggcggatttgcgtgctttggcttaaggcatcgtaaacaggcaggatagaaccgcccggaatgcctgtcacaatcttaatgccctgctgttccaggaaatgaacgataaattgacgaccactgcggcggatgtcgcagttggtagtagttttgcgttgagcatggaagtagtcattggggaccttgttggttttgtgtttaacaatatttatacaagcacagcttttgaagcgattgcggacggtggccacccataattggaccgcaacgatgtaaagcttaccgtagaggaaccctgtaaacgccaatggaggcaaccacgatcggcacagtgccatggtcgatgcaccaaaaccccggtcaatggcgcacacttgatcaaaacgttggtcatgtctgtaattaagatgaccgatctggatcttgctgggaaacgtgtatttatccgtgcggatctgaacgtaccagtaaaagacgggaaagtaaccagcgacgcgcgtatccgtgcttctctgccgaccatcgaactggccctgaaacaaggcgcaaaagtgatggtaacttcccacctgggtcgtcctaccgaaggcgagtacaacgaagaattctctctgctgccggttgttaactacctgaaagacaaactgtctaacccggttcgtctggttaaagattacctcgacggcgttgacgttgctgaaggtgaactggttgttctggaaaacgttcgcttcaacaaaggcgagaagaaagacgacgaaaccctgtccaaaaaatacgctgcactgtgtgacgtgttcgtaatggacgcattcggtactgctcaccgcgcgcaggcttctactcacggtatcggtaaattcgctgacgttgcgtgcgcaggcccgctgctggcagctgaactggacgcgctgggtaaagcactgaaagaacctgctcgcccgatggtggctatcgttggtggttctaaagtatctaccaaactgaccgttctggactccctgtctaaaatcgctgaccagctgattgttggtggtgggaagtgggtgcaatgcagcgtcgttacgcttaccaccgcgtgctgacgctaaagccttcaagcgccgcgcagccgctcccgggcagcgctttattgcagggctgattggtgtcgtaaaaatagggggcagcgcgtgcgcagacgcgccagcgagcagggcgcgggagagtaccgcgtaatcacgacgcacgcgctcgtgagccgccaggtcggtgttccgtaccagtgcgccgatgcgcagcccacccgcgtcggtcacttcaatcttatcgagcccgaggccgttcacatcgataaggtgggtgggcgtttcaatttccagcttcatcaggtccagcagattggtcccgcccgcgataaattttgcgccgggtacgcgctgagcgctaagtgccgcctcggcacagcgacagatgttgccgctcatacgttcacggatctcatcggcagttgtttctggagcggaaaccaaatcgaccgtgacgtgactgggaatgccgtcctgaatctcttttagcaccgctactgatgagcaaatttgcccggaggtgcagtagccgcactggaagccatcatgcttgataaaggccgcctgcatggggtgaagattatctggcgaacccaggccttcaatggtggtgatctcggccccctgatgcatgactgcaagcgtcaggcaggcattaagcctttcgccagcatgatcatgtgccgcgtgggattgcagcagatccacgtaggagtccatactggctgcggtggttgggccaagtgaacctgatggataaccggcaggggttttcgccggacccgcgtagtagatcgggtgatctttgatgtactgcggaagttctttaccggcgtcaatcagctctttcagcttggcgtgtgcaatatctcggcccacgataatggtgccggtgagcgacaaacgagtggataccgggtattgcgaaagctgggcgaggatctctttcatcgggcggttaaggtcaactttcacccgttcgccttcaccggcctggcgcagttcttgtggaatgtactggcctgggttgtgttccagtttttcgatccagataccttcgcggttgattttcgctttaatgttacggtcagcggagcaggagacgcccatgccgaccgggcaggatgcgccgtgacgtggcagacggataacgcgaatgtcgtgcgcgaagtatttaccgccaaactgcgcgccaagaccgagtttctgggcctcttccagcagttcctgttccagctggacatcgcggaacgcctgaccatgttcgatcccttccgtcggcagttcatcgtaatagtgagcgcttgctaacttgacggttttcaggttggtttccgcagacgtaccgccaatcacaaacgcgatatggtacggcgggcaggctgcagtaccgagggtacgcattttctcgacgaggaagtttttcagtttgccgggagtcagcagggctttggtttcctggtagagatacgttttgttggcagagccgccgcctttcgcaacgcaaaggaatttgtactcatcgccatctaccgcgtacaggtcgatttgcgcaggcaggttagtgccggtgttgacctctttgtacatgtccagcgccgcattctgtgaatagcgcaggttatcttcgatataggtgttatagacgcctttcgacagcgtttcttcatcaccgccgccggtccacacgcgctggccttttttaccgacgatgatcgcggtgccggtatcctggcaggtcggcagcacgcctttggcggcgatttcggagtttcttaagaattgcagcgccacgtacttgtcgttttcgctggcttctggatcgtgaagaatagccgcaacctgtttctggtgtgccgggcggagcataaaagaagcgtcgtgaaaggcttgtgcgccagcagggtcagggcttctggttccactttcaggatggtttcgccgtcgaagtcggcaacgctgaacgcgtaatcggtggcgtgattgtgccttgctgagcaaccgggtgataccctgctgacttggtatagagcgcat

SEQ ID NO: 25528 - DNA, 1631 bp, Homo sapiens
  SIMILAR (289)..(810): 711254mologous to Escherichia coli RecF protein,accession number K02179,Smith-Waterman Score=608.
atggtggcgagcttgaggtcgcgagccggggcggcaatgctcaacatgccctccggcccgctggcggaaaccagcgcaaccacggtaaaggagaccacctctaacgagaaattccgcggcgtacgtctttatgtcagcgaaaaccagctgaaaatcaccgccaacaacccggaacaggaagaagcggaagagatcctcgacgttacctatagcggtgcggagatggaaatcggcttcaacgtcagttatgtgctggatgttctgaacgcgctgaaatgcgaaaacgtccgcatgatgctgaccgattcggtttccagcgtgcagattgaagatgcggccagccagagcgcggcttatgttgtcatgccaatgagacttggcaaaaccagcgtgctggaagccatctatacgctcggccatggtcgggcgtttcgcagtttgcagattggtcgcgtcattcgccatgagcaggaggcgtatgttctccacgggcgattacagggcgaagagcgcgagacagcgatcggcttaaccaaagacaaacagggcgacagcaaagtccgcatcgacggtacagacgggcataaggtcgcggaactggcgcacctgatgccaatgcagttgataacgccagaagggtttactttactcaacggcgggcccaaatacagaagagcattcctcgactgggggatgctttcacaacgaaccgggatttttcacgtctggagcaatctcagccgatggtcaagccagcccaatgggggcctagccaagtggacacgttcgaacagataccccggggataagagatatccccgggggacaataccctggcccggaatagcgacacacacacaccaagcgaagcacagccaccagaacatgccaaagcaaagcgttccggccattgctgcggtacgcggcctggggtcgatgattgcggtagagtttaacgatccgcaaacgggcgagccgtcagcggcgattgcacagaaaatccagcaacgcgcgctggcgcaggggctgctcctgctgacctgtggcgcatacggcaacgtgattcgcttcctgtatccgctgaccatcccggatgcgcaattcgatgcggcaatgaaaattttgcaggatgcgctgagcgattaatagcccaacgcaataatgtctgatgcgctgcgcttatcaggcctgcaaacgacgtattgattatgtatgccgaataaagcattcacgccgcatccggcaagttgtattgctcaacttcgctaaatctggtgctttttcaacaacgcgcggaactgatgataagttaaccccagtaattcagccgcgcgcttctggttatatttcccttgttgcaaactgagttgcagcaactctttttcctgctgcatctgaaactcacgtaaatccagcggcagtgttggaagcgaggtggtttctgaaacggcgatagcgtcttcaggcggacgccgtttaaagggatcaataatgatgtcatcaagcggataatcgctggtgccgtggcgatacactgaacgttccaccacgtttttcaattcacgaggggatcgctctagagtcaacgggcagtcagtcaagtcgaaattcagcctttttagctctgccat

SEQ ID NO: 25529 - DNA, 1255 bp, Homo sapiens
  SIMILAR (1060)..(1158): 751254mologous to Escherichia coli 4-aminobutyrate aminotransferase (EC 2.6.1.19) (Gamma-amino-N-butyrate transaminase) (GABA transaminase) (Glutamate:succinic semialdehyde transaminase),accession number D90768,Smith-Waterman Score=125.
atgcgctatgagagcatgatctctaagagaggaaaggagtacgatgtgaagaagggcgtccccccctcgtccaaagctcgtacgcgaacttctctctttgaatgggttacctatggcctgaatttccctgctctttgggccctccacgcgccatggcgctctgggactattcgccttgggcagtgtacccggggagtgggtgggcatggcggggacaccccctgctggcgcactctacccctggctttttctgcatgcaagtattcgggctgtgcaccctggtacccccatactttcgtgggcctacctggcttgtcccacctttcccaggaaattcttttgggtattcgcaagacggaccaatggttaaatccccttcaaagtaccttccaagacgtttgtgatcctcagcaggaattttccagattctgcgttgtttacgccttgagttatatccgtaagattacacggcatttcaacacaggactccctcgcacgccatcgaacgcttgtttaaatcagacatcgaagcgaagcaggtggcggcgattattttcgaaccggtgcagggcgagggcggtttcaacgttgcgccaaaagagctggttgccgctattcgccgcctgtgcgacgagcacggtattgtgatgattgctgatgaagtgcaaagcggctttgcgcgtaccggtaagctgtttgccatggatcattacgccgataagccggatttaatgacgatggcgaaaagcctcgcgggcgggatgccgctttcgggcgtggtcggtaacgcgaatattatggacgcacccgcgccgggcgggcttggcggcacctacgccggtaacccgctggcggtggctgccgcgcacgcggtgctcaacattatcgacaaagaatcactctgcgaacgcgcgaatcaactgggccagcgtctcaaaaacacgttgattgatgccaaagaaagcgttccggccattgctgcggtacgcggcctggggtcgatgattgcggtagagtttaacgatccgcaaacgggcgagccgtcagcggcgattgcacagaaaatccagcaacgccgcgctggcgcaggggctgctcctgctgacctgtggcgcatacggcaacgtgattcgcttcctgtattccgttgacattcccggatgcccaattcgatgcggcaatgaaaattttgcaggatgcgctgagcgattatagcccaagcaataatgtcttatgcgctgcgcttataggctga

SEQ ID NO: 25530 - DNA, 598 bp, Homo sapiens
  SIMILAR (402)..(244): 561254mologous to Homo sapiens Human ZSMF-3 protein sequence,accession number Y22113,Smith-Waterman Score=131.
aattttaagatattgtcataatttatctaattactttttctaaattctaacttaatagtgcttataaactacttttaatttgttgatggaaaacctaagtgttaagtgccttccttagcctacacacaatgaatgcaattttcaagtccagttgccaaatatggtttattagaagagaaccaccctggcagaaggaagccaggaagaattgatgagggtcaaccacagctagggcatgattaccctgttataaggtgtagaaaacgttgcccaggacaacatcacgcccgttgatacgaatcacatctgtaactgccctggagaatgttgaaataaaaatgagagtctcccaggaactgagcagttcaagcgcgccttcaggaacgacgtccactgtttctcccaggactctttgagatcctcccatatcattcttacaaacctgagccactcttgggaaaactacctgcagaggaaaaacacatagggaaaattaaatgcattcattttgcaaggagatcttagtagaatctgcattccttgaaaacagaaacaaaacaacaaggtgcttaatactgtttctaaaatcagtaacaaa

SEQ ID NO: 25531 - DNA, 2090 bp, Homo sapiens
  SIMILAR (1037)..(1411): 991254mologous to Escherichia coli phosphoglycerate kinase (AA 1-387),accession number X14436,Smith-Waterman Score=609.
atgaggggccacaattggattgacatggaccaagcccgtcaacaatccacgccacacacagacaggaaaatatgccacaagaacgacagaccgcggacaacacccctgagaaaaatagacgcacatccccacactttaataattttacccgcggagagcacattatcaaccacgaaatacaaattacgagctcttctggtcgagaacacaaataaggacaaaagcgccgtcagtgttgtcttcagaggctctgtcttgcatcagcaggctgcaaattttcctaacttgatgctctgcttccaattaaagaacggtgttaacgcctgcaatgacttcataatgctctttgtcgacgacaatgcggctggcagcattgaacgggctgcctccccatgtatcaacgagaaacagcacgcctttagtgaaagcgttccggccattgctgcggtacgcggcctggggtcgatgattgcggtagagtttaacgatccgcaaacgggcgagccgtcagcggcgattgcacagaaaatccagcaacgcgcgctggcgcaggggctgctcctgctgacctgtggcgcatacggcaacgcctgcaaacgacgtattgattatgtatgccgaataaagcattcacgccgcatccggcaagttgtattgctcaacttcgctaaatctggtgctttttcaacaacgcgcggaactgatgataagttaaccccagtaattcagccgcgcgcttctggcgagtacaacgaagaattctctctgctgccggttgttaactacctgaaagacaaactgtctaacccggttcgtctggttaaagattacctcgacggcgttgacgttgctgaaggtgaactggttgttctggaaaacgttcgcttcaacaaaggcgagaagaaagacgacgaaaccctgtccaaaaaatacgctgcactgtgtgacgtgttcgtaatggacgcattcggtactgctcacctgcgcgcaggctttctacttaccggtatcgtgtaaattgcgctgctcgttgcgctgcgcaggcccgctgctggcagctgaactggacgcgctgggtaaagcactgaaagaacctgctcgcccgatggtggctatcgttggtggttctaaagtatctaccaaactgaccgttctggactccctgtctaaaatcgctgaccagctgattgttggtggtggtatcgctaacacctttatcgcggcacaaggccacgatgtgggtaaatccctgtacgaagctgacctggttgacgaagctaaacgtctgctgaccacctgcaacatcccggttccgtctgatgttcgcgtagcaaccgagttctctgaaactgcaccggctaacctgaaatctgttaacgatgtgaaagctgacgagcagatcctggatatcgtcagagatctggatgcagcgaatgtcgttattaatgctgtattcagttacgtcaccaatgtatggggatgggcatttgaatggtatatggtggtgatgcttttcggttggttctggctggtgtttggcccgtatgccaaaaagcgtttaggtaacgaaccgccagaatttagcaccgccagttggatctttatgatgttcgccctcctgtacgtctgctgccgtactgttcggctcggtagagaaatacaccgaagggcgcaaatcgttcatattgatattgagccgacgcaaattggtcgcgtgctgtgtcggatctcggtattgtctctgatgctaaagcggcgctgacactgctggtgaagtggcgcaggagatgcaaaaagcgggtcgtctgccgtgtcgtaaagatgggtcgccgactgccagcagcgtaaacgcactttgctgttataagtgtagaaaacgttgccaggacaacatcacgcccgttgatacgaatcacactgtaactgcgtttgtttagcttctcgcagtcctcctcaaggtccgtggataacgagccagatcttccgggcggtcgaactgcatcggttaacgaaaatactgacgacgaccacatcggcgcgggctttggcttctcgaccagcttcatatggccatcgtgcaggttacccat

SEQ ID NO: 25532 - DNA, 987 bp, Homo sapiens
  SIMILAR (1)..(741): 741254mologous to Escherichia coli O157:H7 outer membrane protein 1b (Ib;c),accession number AE005453,Smith-Waterman Score= 926.
atgaaagttaaagtactgtccctcctggtcccagctctgctggtagcaggcgcagcaaacgctgctgaagtttacaacaaagacggcaacaaattagatctgtacggtaaagtagacggcctgcactatttctctgacaacaaagatgtagatggcgaccagacctacatgcgtcttggcttcaaaggtgaaactcaggttactgaccagctgaccggttacggccagtgggaatatcagatccagggcaacagcgctgaaaacgaaaacaactcctggacccgtgtggcattcgcaggtctgaaattccaggatgtgggttctttcgactacggtcgtaactacggcgttgtttatgacgtaacttcctggaccgacgtactgccagaattcggtggtgacacctacggttctgacaacttcatgcagcagcgtggtaacggcttcgcgacctaccgtaacactgacttcttcggtctggttgacggcctgaactttgctgttcagtaccagggtttcggtatcggtggtgcgatctccagctccaaacgtactgatgctcagaacaccgctgcttacatcggtaacggcgaccgtgctgaaacctacactggtggtctgaaatacgacgctaacaacatctacctggctgctcagtacacccagacctacaacgcaactcgcgtaggttccctgggttgggcgaacaaagcacagaacttcgaagctgttgctcagtaccagttcgacttcggtctgcgtccgtccctggcttacctgcagtctaaaggtaaaaacctgggtcgtggctacgacgacgaagatatcctgaaatatgttgatgttggtgctacctactacttcaacaaaaacatgtccacctacgttgactacaaaatcaacctgctggacgacaaccagttcactcgtgacgctggcatcaacactgataacatcgtagctctgggtctggtttaccagttctaa

SEQ ID NO: 25533 - DNA, 1183 bp, Homo sapiens
  SIMILAR (761)..(937): 981254mologous to Escherichia coli outer membrane protein,accession number K00541,Smith-Waterman Score=308.
atgatggcagtatccgcaccctatgtaggcgacaacatcgacgatggcggaatatacacgcaaagcgagacccatacaatcagttccgattgtgtgctggacaccgccgccatgtggactccactttcggccgtgataggctgcaccactaaccctgctcagtacccagcaaacgctgctgaagtttacaacaaagacggcaacaaattagatctgtacggtaaagtagacggcctgcactatttctctgacaacaaagatgtagatggcgaccagacctacatgcgtcttggcttcaaaggtgaaactcaggttactgaccagctgaccggttacggccagtgggaatatcagatccagggcaacagcgctgaaaacgaaaacaactcctggacccgtgtggcattcgcaggtctgaaattccaggatgtgggttctttcgactacggtcgtaactacggcgttgtttatgacgtaacttcctggaccgacgtactgccagaattcggtggtgacacctacggttctgacaacttcatgcagcagcgtggtaacggcttcgcgacctaccggaacactgacttcttcggtctggttgacggcctgaactttgctgttcagtaccaaggtaaaaacggcaacccatctggtgaaagctttactagtggcgtaactaacaacggtcgtgacgcactgcgtcaaaacggcgacggcgtcggcggttctatcacttatgattacgaaggtttcggtatcggtgtacacccagacctacaacgcaactcgcgtaggttccctgggttgggcgaacaaagcacagaacttcgaagctgtagctcagtaccagttcgacttcggtctgcgtccgtccctggcttacctgcagtctaaaggtaaaaacctgggtcgtggctacgacgacgaagatatcctgcaaatatgttgcatgtcagacccgacacaaaatcgccaggccagtgccaagctcgccctgccttgccaggtcgcactcctcagcagtgcatccccccatcatgcattcacaccttccacaagcatcatccaaccagctcacatcattattcattcttcaccaccaccatgggcatcatcacacagcatttccacacatcagcagcacacacagtgttcatcgtcatccaacacacttgcagtgcactag

SEQ ID NO: 25534 - DNA, 1980 bp, Homo sapiens
  SIMILAR (801)..(133): 961254mologous to Escherichia coli K12 putative enzyme,accession number AE000136,Smith-Waterman Score=1118.
tcattgccagagtcgtgtcccaaatgcgaacatcctcgtgcttacttcatgcagcttcagacccgctctgcagatgagccgatgaccaccttctacaagtgctgcaatgctcagtgtggacaccgatttgaacaggctacgaaacgatgagaggccgctgcagaccacatcaccgacccagacggcaccgcgcgcctggttgagttccagagccacttcgcaggttttattgccactgtagcgaaaatcgatagtggggtatttcttatccacgtccatgacaaactcgccgttttcatcggttcgggttcggccgatatggttgttaatccgtgcgttagccagcagtgtgccgtcttccgcacggatacgaccggagacggtaaccatctgcttcacctctggctcaatgacagcgacattgcctggatagagagtcagacgacttttgcggccgctgacgatatcgtaactgtcgagtgagtttttgctgttctgtaactccacctcatatcttccatagggagagagcgggagatagttacgcttgccgttaagcgggaaaatccgcccgttgattttggcgctgatctgaccgtcgtcctccagcccggtgttgaatatcaccccagcgttgccatcagtccgcccgctggcagcaatgtttttaccctgccagccgacgctgccattggcggtcaagttggtattgacgtagccgtccgccgcgctattgacgttcagcgttccgctggcgtaacgagcgtcgaattgtgcatacgccccgccgccggcgtttcgcgcagtattcctcgctcgtttcatctcaattgtgtctctgggtttgctcggcgtcgcggtgccggtgcagatccagatgatgacacattccacctggcaggtggggctttcggtgacgctgaccggcggcgcgatgtttgttggcctgatggtcggcggtgtgctggcggatcgcttgctaccgttgttaagccttccggcgttgccaccgccaccgcagccgcgtgagcatccgttgaaatcattactggcaggatttcgttttctgcttgccagcccgctggtgggcgggattgcgctgctgggtggtttattgacgatggcgagcgcggtgcgggtactgtatccggcgctctggccctggttgccctgggtggccggtgtccgtgctctctggctcgctccgggcagtgcgcctctcgtgcttagaggctcgccgcgggagcattcaggaggccttcccggaggtaggctgttgggaagaagggtccagctcggggagcattcagggaggccttcccggaggtaggctggtgggaagaaggggtcagcgccgggagcattcaggaggccttcccggagataggctgctgggaagaaggggtcagcgcggggagcattcaggaggccttcccggaggtaggctggtgggaagaaggggtcagcgcggggagcattcaggaggccttcccggaggtagggtggtgggaagaaggggtcagcgccgggagcattcaggaggccttcccggaggtagggtggtgggaagaaggggccagcgtggggagcattcaggaggccttcccggaggtagggtggtgggaagaaggggtcagtgtggggagcattcaggaggccttcccggagatagggtggtgggaagaaggggtcagtgtggggagcattcaggaggccttcctggaggtagggtggtgggaagaaggggtcagtgtggggagcattcaggaggccttcccggagatagggtggtgggaagaaggggtcagcgcggggagcattcaggagccttcccggagatagggtgctctggtccggcgcgtcgtcgcgctgcctccgtctttgttgtcttgtggtccgcgttgggcggctggcggttcgcgttgctgcctcgctgtttctgtctcttggtgtgtgtggggttgtctgttcggtggtcat

SEQ ID NO: 25535 - DNA, 3462 bp, Homo sapiens
  SIMILAR (2823)..(2179): 1001254mologous to Escherichia coli 2- acylglycerophosphoethanolamine acyl transferase/acyl carrier protein synthetase,accession number U29581,Smith-Waterman Score= 1099.
tcaggcgggtcgtgcaccgagatccagcgctgtcttccaccagcgaataatcaatacgaattcaacgcggtataaattcggcagtaccataaacggcacgtaagcgtaaacaatgccgatataaacggccagattggtatgcagaatggtcagcggttgatcgataacccccagccacagcagaaaattattcagcacaccgttgttttttaatattcccatccaggcataaacgcggatcagaaacgaggtccacgacggcaggatcaccagtagtaataaaatattacgggtcgaaggcttactgtgcgccaccgcccacgccagcggatagccgatcagtaaacagcaaaatgtcgaaatcgcagccacctgtttcctctggatcggcagatcgcagagcagcgggtcctgcaccaccatagccagaccctcctggaacacgtccatggcctcggagtgcggcagcgcctcttcttcgtcctcatcttcctcttgcgcctcggtcccacccgcggcctccgtctcctccagggccgcccctctcagccgggctctgcccgcactgccagcccgcactagggaggccaagcgcgcacgcgcaggaactgcggcccgccccagcgaggccgcccagccactggcgcgccggggggggtggggcggctgcagtgaccaatgacaagtgcgagacagcctgcagcagggccgggagcgcagaatcgccctgtctattggttggttggtgtggcgggaaggctgccaggaccaatgtgagctcgaggcgggcggcgcctcggcgctgacccggcgtgggagctgccgggagttggaccctgcgccgttcgcgaccatgctgctgttctgccccggctgcgggaacgggctgatcgtggaggacggaccaacgctgccacgcctcgaccgatgcggtccccccttcataaagatcggccagattgttttgcgcgtcactatggccttgtaatgcagctgtttgtaccagaaaaatgccagcgcatagtcttttgcgactccgttgccatttctgtacatccacccaagattattttgcgcataagacattccgctctccgcggctatctgataccagacaaccgcttctttataattgggggcttctccacgatccagtgtccagccaagggcgttggaagcgaaagtatggccttgtagggcagcttttttcagccagaagatggcttgctcattatctttatgacggcttttatcctcggtatacttttgccctaaggaatactgtgcttcacaatgaccttgctcagcggccagcttcagccagtaaaaggctttttcgtcgtccggagaatcaattgcgctatcgcgattataataaaacccaacaatatattgagcctcgcaatcgcctttttcagcacgttcgataatctcatcgataaatccggcgacaaaacggtctgccggatagtggtacagctccagcggtttcccaacctgcgccacgcgaccggcgtccagcaccacgattttgtcggccagcgtcatcgcttcgacctgatcgtgggtgacgtaaatcattgtgcggcccaggcgtttatgcagacgggagatttcgatacgcatttgcacacgcagtgcagcatcgaggttggagagcggttcatcgagcaaaaatacgcttggctcggccaccagcgtacggccaatcgccacacgctgacgctgaccaccggagagcgctttcggtttgcgatccagcaaatgcgccagttgtagcacttccgccacctggttaacgcgttggttaatcacctctttttttgcgccagccagtttcaggccaaatgacatgttttctgctactgacaggtggggatagagcgcgtaagactgaaacaccataccaacgccgcgttctgctggcggagtgtcattcatccgtttctcaccgatgaacaggtcgccgctggtgatcgtctcaagcccggcaatcatgcgcagtaaagtcgatttaccgcagccagacggtccgacaaacaccacgaattcaccttcatggatatcgagattgatatctttagcaaacgccgatatacaacactgaagaagcggcgccactgaagcccgccatacggcgcattgacagagcgcggaatcaaacgaagggccacggtagctgatgcctgcattgggcagcattaagccgatgcgttcgccttcaacactgtatttttcaaggatgcgtccaacaaacagcgttttcgtaagcaatttgcgataggagtctggggtaaagttgacgtcttcgacacatttcttcccggctccgaagcggtacattgcactcagtaaagattcgtacagcgtttcacgcgggcgcaccgccattcgcgcttccatcattatttgatgcagcatttcgccagcgattttgcgacggtcacgggcacgcggcgcatccggcatcgccacctgcgttggtggcaaaatatgcagagtaatttgcgggaacaagcgacgtttaaccagacctttcaggcggctgaagtgcgtaagttccgccccttcaatacgcacaggaataaccgttgcaccagacttcgccgcgacaaaacccgcgccatcgtagattttcatcagcgagcctgtcgtggtgatgcgtccttcagggaaaatcaccactggtcggccctgttccaccagacgtaccagatgtttaatagccataggttgcgtcgggtcgagaggaacaaagtcgataaatgatttcagccaacgcatataccactgttggcttattgaggtgtaaacggcaaacacgaaagaacgtttttgttcttcgttcttctctgactcctctcttttctccgtgtaaacatgcacaccgacatacacgatgagatcaaagacccacagagcacagacactcaagaggagaacgaagaactctagaggatccccttcacgcagctcagccagttcgaccagcgcatcctggtaacgaccttccgtaaagtacggctccagcttgtcacgtagcaccacaacctgcatcgccagtttaatttcttccggctgtttgttcgccgccgccagtgcagcagctgcatccagggtacggaaatgcgataccgctttcatacgggcatcgaaatcagccggacgagtcggacgacgcgccagtaccgcctggatggtgtcaacggtataaccttcgtcctgataccaggcgcggaagcgaccgagcataaagtcgataacatcatcaactacgttggcattagtcagcttatcgccatacagacgcaccgcttcttcggtcagcgtttgcagatcaaggttgaggttcttctcaacgataattcgcagcacgccaagcgcggcacgacgcagcgcaaacgggtctttgtcgcctttcggatgctgaccgataccgaagatacccgccagggtatccat

SEQ ID NO: 25536 - DNA, 844 bp, Homo sapiens
  SIMILAR (81)..(239): 561254mologous to Platichthys flesus RNA polymerase III smallest subunit,accession number AJ310422,Smith-Waterman Score= 123.
taccaatctgaagggggagctgccgggagttggagcctgcggagttcgagaccatgctgctgttctgccccggctgcgggaacgggctgatcgtggaggagggacaacgctgccacccgctgtggcctgcaacacgtggcccctacgtgcacaacatcaccccgcaaggtaacacaatctggaagtacccaaaactgaaagaatgtgggagtgatgtgcttggtggagcagctgcctggggagaatgttgactctactgcagagtcgtgtcgcgaaatgcgaacatcctcgtgcttacttcatgcagcttcagacccgctctgcagatgagccgatgaccaccttctacaagtgctgcaaatgctcagtgtggacaccgctggagggattagggccagggatggcccagctgccctagtgtgtgcttgccttgtccctcggggtagatgcttagctggcagtatgagtcgtgtgtcctgagggtctttgctagtgtggtggaaagataaaccttttgaggtgaagagccagggggtcaggaaatatggcctatctgccaggcagggtggatgaagtcatgaatgtctgggagtttttctgtgtggggaggagacagagacccataactaaatatgctctgtgtaaagtcctattctttcatcttccactttattggcagttgacattcccttactcccaatcaacactcttaaatatttgtactgtttgtaaaacttagtacatgtccctaaatatttaactgttacttgtaaacttgtgtaatttattatttattttaatcaaaattctgaatatttcatttaaatgaaagttggaatattgc

SEQ ID NO: 25537 - DNA, 567 bp, Homo sapiens
  SIMILAR (276)..(533): 571254mologous to Escherichia coli peripheral membrane component,accession number M14031,Smith-Waterman Score=219.
ctaccgactataccctttgtgttgcagacaatccatgcagattcgagcgaacatggcatactcactaaaacacaaaagaaactccgaggacacccagcgttttagcggcgtgtagcgtgtgcgtccacgggcaaacgaggaggcgtaaagggtgaactccgtcaccgcatacgaccagttaaaacctggcggcgggattgtcaccgcctcgctggcgtcgcgcaataaggtaatatgtggatgaaacggacgattgctttgaaaacaaccgctgcgggcagcctgtgaacggagcatattcgccagctggattaagccgcgtggcggctgacgcatccctaaccacaccacacgcgaaatagactttaagatccctgacactgcatcagcacgataaaacgcgtaccgaactactgaatgatgtcgcaggggcgctggctcttgatgacaaactcggacgtagcaccaatcaactttccggcggtgaatggaccccctccttggccagacccttcctcctgcttgggccacgcaagatgcgcctgcttccccttcaccttccgccat

SEQ ID NO: 25538 - DNA, 891 bp, Homo sapiens
  SIMILAR (177)..(791): 851254mologous to Escherichia coli peripheral membrane component,accession number M14031,Smith-Waterman Score=862.
cattgtgatggaaagcattttactggcgttggcaaaataatgtctattgggatgcagttacaagatgttgcggaatctacccgcctggggccgctttctggcgaggttcgggctggggagatcctgcacctggtgggcccaaatggggccggtaaagagtcccttactggccgggaatggccggaaatgcccaccgtaaagggaaccatccagttcccgggccaccccctggaagcatggtccgcaaaaaaaactcgcgttgcttcgcgcctatcttttcccaacagcagacgccgccgtttccaccgccggtctggcactacctgacactgcatcagcccgataaaacgcgtcccgaactactgaatgatgtcgcaggggcgctggctcttgatgacaaactcggacgtagcaccaatcaactttccggcggtgaatggcaacgcgtacgtcttgctgcggtggtgttgcaaatcacaccacaagccaatcccgcaggccaattgctgcttcttgatgagccgatgaacagtcttgatgttgcgcaacaaagtgcgttagacaaaattctgagcgcgctgtgtcagcaaggactggcgattgtgatgagcagtcacgatctcaaccacacattgcgtcatgcgcatcgggcgtggttgctaaaaggtggaaaaatgctggccagtggacgcagggaagaggtgctcacgccgccaaatctggcgcaggcctatgggatgaattttcgccgtctggatatcgaaggtcacagaatgctgatttcgaccatctgatttcattagtatcttgaaaatcgggtaattacgccgctaaattaatgcaagaataaaaaacagaggaaccgtacggaatgcgtttctgccttatttt

SEQ ID NO: 25539 - DNA, 430 bp, Homo sapiens
  SIMILAR (419)..(183): 961254mologous to Escherichia coli ATP synthase a subunit (atp-2),accession number J01594,Smith-Waterman Score=394.
aatcaggttgacgcgctgcgccttccaggaatttacccccgaggatgccgataccgatcgcagcaccgattgccgccagacccatcatcacagcggcagccatgtacagcagatccatattcaggttttccatgacagtctccagtttgtttcagttaaaacgtagtagtgttggtaaattaatgttcttcagacgccatcgacagatagacgatcgtcagaaccatgaagatgaaggcttgcagcgtaatgatcaggatgtggaaaatggcccacggcacattcaggatccactgtgaccaccacggcaagagaccagcaatcagaatgaagatcagctttccggcgtacatgttaccgaacagtcgcaaaccgagggaagctggtttggacagcatgcttaccccttctaggattagtcgacacaatg

SEQ ID NO: 25540 - DNA, 796 bp, Homo sapiens
  SIMILAR (224)..(796): 861254mologous to Escherichia coli similar to rhamnose operon regulatory protein,accession number L10328,Smith-Waterman Score= 846.
ggtatctgttttgcggaccttccaccaggtgatcaccgccaccagcagcgtaaaaccgacaaaactcaagatttgtaacgaattcatctcatagcccttatttatgtttatgtcccggacgcatgaatatagggagaggtaaaatgcgtcgggtcaggcagtcagattcttaaaatacaaacgtcgtatccctgaacggattgttttctgttaagttcaggttgtaagcataattcgccggagggattttaaaatgaatggaaaattgcaaagttcagatttaaaaaccggaaactccggacaatattccccttattgattaaagaaaattgtgatcttcaaccggaattttttttgatctcggtctgggcatacctacgccgacgagcattaccgggtgatctggccgcgggacaagaagaaaccgcttatcgccaactcatgggttgcggtgtataccgtacaaggatgtgggaaaattcttttaaagaatggcgaacaaataacactgcatggcaactgtattatattcttaaagccaatggatattcactcttatcactgtgaaggtttagtctgggaacagtactggatggaatttacccccaccagtatgatggatattcccgttggtcagcaaagcgttatttataatggcgaaatttataatcaggaactcaccgaagttgctgagttaataacttcaccagaagcaataaaaaataatctggcagtcgcttttctgacgaaaattatttatcagtggatttgtcttatgtacgcagatggtaaaaaa

SEQ ID NO: 25541 - DNA, 976 bp, Homo sapiens
  SIMILAR (229)..(255): 1001254mologous to Escherichia coli H-NS-like protein,accession number X69210,Smith-Waterman Score=43.
atgaatggaaaattgcaaagttcagatgtaaaaaacgaaactccgtacaatattcccttattgattaacgaaaatgtgatctccagcggaatttctctgatctcgctctggcatacctacgccgacgagcattaccgggtgatctggccgcgggacaagaagaaaccgcttatcgccaactcatgggttgcggtgtataccgtaacaggatgtgggaattcggaccgtttaaataacattcgcaccctccgtgcagatggctcgcgaattctccattgacgttcttgacgaaatgctccaacaattcagggttgtcactcctgacagacccgaacataaacaactgccacagcatgaactggcagagcgccaggaaaaaattagcacctggctggagctgatgaaagctgacggaattaacccggaagagttattgggtaatagactctgctgctgcaccacgcggctgggaaaaaacgccagcccggttcggcgaaatatttattcacccgatgttaacggtgaaactaaaacctggaccggtcagggccgtacaccgaagccaattgctcaggcgctggcagaagactgtcatggaaaacctgaatatggatctgctgtacatggctgccgctgtgatgatggctctgcgggcaatctgtgcttcgatctgaatcgacattgcggcctgggtgtgcggttacgaccacgaaaaatcaatggtgattaccgctcacggttttgccatgccggtgaaacaggcgtttgcgccggtgctgaaactacgcaaatggctgaatccggtgtctctggtgccgggctggcagtgcgaggggaacgcgatggcaaacgatcgcctttgcaaatcgccataatgatgaatggcagcagcgggcaggcaatcagcagcaacgtgatcatcctccaactttttctggtggaggtgataaaatctttaaggatgctctatatgtag

SEQ ID NO: 25542 - DNA, 1362 bp, Homo sapiens
  SIMILAR (652)..(1098): 981254mologous to Escherichia coli GlxB6,accession number U89279,Smith-Waterman Score=785.
atgaaccgaccggacgggctggatgtgtcggtgcaggcccgcctgctcgacctgctgcgcggcctggtggtggagctgaacctcgcggtggtgattgtcacccatgatttaggcgtcgcccgcctgctggcggaccgtttgctggtgatgaagcaggggcaagtggtggagactgctggtgtcatcggttttgcagaattgagccggtgccggatgcggcgtaaacgccttatccggcctacaaatgcgctccccgtaggtcggataagacgcgtcagcgtcgcatccgacacccgaaccacgaggcgaaaaatgattaacgtacaaaacgtcagtaaaaccttcatcctgcaccagcaaaacggcgtgcgcctgcccgtcctcaatcgcgcctcgctcaccgtcaacgcgggcgaatgcgtggtgctccacggccattccggcagcggcaaatcaagctctgctacgctcgctgtacgccaactatctgcccgacgaagcgcgcaaagtggtggaaatccgcaaaatcaccgtcggctgggtgagccagttctgcgcgtcatccgcgtatctcagactggaagtgtgatgcagcgctgtcgataccgggtccggttaagctgcgcccacaaaagcgaagacctggaccaacaacaggtcttcggtggcgaaggcattgaaacgttcctgtatgtgatctctggaaatatcactgccaaagccgaaggcaaaacatttgccttaagcgaaggtggctatctttattgcccgccaggctccttaatgacgtttgttaacgcccaggccgaagacagccaaatctttttatataagcgccgctatgttccggtagaaggctatgcaccgtggctggtttctggcaatgccagcgaactggaacgcattcattatgaaggcatggacgatgttattctgctggattttctgcccaaagagttaggttttgatatgaacatgcatatcctctcttttgcaccaggtgccagccacggttatatcgaaacacacgttcaggaacacggtgcctatattctttccggtcagggggtttataacctcgacaataactggatcccggtgaaaaaaggcgattacatctttatgggcgcttattctttacaggctggttatggtgtagggcgtggtgaagcgttcagctatatttactcgaaagattgtaaccgcgacagaagagaaaagaagagaagcgagaacgaacagcagaagagcacacgagcagcaaagaagagaacacaagataagaagaaagaaagacaagcgaagacaaagaaacaagagaaaagagatgttgtagcagtccgcggtgtggcccccaaatag

SEQ ID NO: 25543 - DNA, 921 bp, Homo sapiens
  SIMILAR (442)..(918): 951254mologous to Escherichia coli HisP-like nucleotide binding protein (phnK),accession number J05260,Smith-Waterman Score =751.
atgttttatcaaaaggtcggcgacaactcaatcgacagctggaaaaacgcgggccgtgtctttaaagacagcgataagttcgacgccaacgatccgatcctgaaagatcagacgcaagaatggtccggttctgcaacctttacatctgacggaaaaatccgtttattctacactgactattccggtaaacattacggcaaacaaagcctgacaacagcgcaggaggggaaaatggagactcagagagggagtgacttttcccccaggtcacacagcaaggaagactatgatgcgcaaaatgctgctggcggcacactttcagtgacggcaatgaccgctcacgccgactaccagtgcagcgtcacgccgcgtgacgatgtgattgtcagcccgcaaaccgtgcaggtgaagggcgaaaacggcaatctggtgatcacgccagacggcaacgtgatgtataacgttactgccggcaatatcggcgagcggctgatggcgaccggggcacgtcattacggcgatattcgtgctaccgcgcagaagtggctggaagaggtggagattcccgccaaccggatcgacgacctgccgaccaccttttccggcggtatgcagcagcgtttgcagattgcccgcaacctggtgacgcatccgaagctggtgtttatggatgaaccgaccggcgggctggatgtgtcggtgcaggcccgcctgctcgacctgctgcgcggcctggtggtggagctgaacctcgcggtggtgattgtcacccatgatttaggcgtcgcccgcctgctggcggaccgtttgctggtgatgaagcaggggcaagtggtggagagtgggttaaccgaccgcgtgctcgacgacccgcatcatccgtatacacagctgctggtgtcatcggttttgcagaattga

SEQ ID NO: 25544 - DNA, 693 bp, Homo sapiens
  SIMILAR (355)..(690): 961254mologous to Escherichia coli HisP-like nucleotide binding protein (phnK),accession number J05260,Smith-Waterman Score =528.
atggggcggcgcgctcgtggcgttgggtgtgttgtctcgcgcgtgtggtgtgggccggcgtgcgcgtgtagcctgcgccggtggctggcgcacactgtccactgggtcttcacagaagctcagagcatcaagagccacagctcagacatgtggccagatggcctagctcttagtcctggctgtgccatgggaccttcaggaagttgctcccggggaaaaaacgtagggggggcaacaaaaaattttaggggcgtccacaacatctactgccacaagccaatccccaccacacaacacgagtcgaaatacgcacgacaaactacaacagaagagtgtacacaaaccagttcccacgacttccggaccactttttccgccgtaatgcagcagcgtttgcagattgcccgcaacctggtgacgcatccgaagctggtgtttatggatgaaccgaccggcgggctggatgtgtcggtgcaggcccgcctgctcgacctgctgcgcggcctggtggtggagctgaacctcgcggtggtgattgtcacccatgatttaggcgtcgcccgcctgctggcggaccgtttgctggtgatgaagcaggggcaagtggtggagagtgggttaaccgaccgcgtgctcgacgacccgcatcatccgtatacacagctgctggtgtcatcggttttgcagaattga

SEQ ID NO: 25545 - DNA, 1571 bp, Homo sapiens
  SIMILAR (642)..(4): 1001254mologous to Escherichia coli genF peptide,accession number M27058,Smith-Waterman Score=1081.
ttataagaacccgtacatcgcggcgaagatccagccgaagacgcacgatacgctcacaccaatcaaccccggcagaataaagctgtggttgatgacgaagcgaccgatgtgggtggtgccggaacggtcaaactgaatcgctgccagatcgctcggataagtcggcaggatgtaataaccgtagcaagccggtgctgaagccacgatgtatgccggatcaacgccgatcgccagcgcgaccggaacaatcgccgccagcgccgcagcctgagagtttacaaacttggaaaccagcagcagaacaatggcataggcccacggatactctttcaccatttcacccagtacgccctgaatttcagacatatgcgcaccgaacatggtttctgccatccatgcgataccgtacaccgccacgatggcgatcataccggaacggaagacttcgttttttgagatagacgcgggattggttttggtcaggataataatcagcgccccggtcagcagcataaacatctgaataaccagtaccatcgacagcggtttgccgccgaaggatggacgcaggtccgaatcagcaccaagaagggcgactacagcgattgccccgaggaaaatccacattgccagccagttgctggtcgttatcattattcgctcgttggtcgggtgtcgaatgcgacgctggcgcgtcttatccgaccaccgcgggttcagctccaccaccaggccgcgcagcaggtcgagcaggcgggcctgcaccgacacatccagcccgccggtcggttcatccataaacaccagcttcggatgcgtcaccaggttgcgggcaatctgcaaacgctgctgcataccgccggaaaaggtggtcggcaggtcgtcgatccggttggcgggaatctccacctcttccagccacttctgcgcggtggcacgaatatcgccgtaatgacgtgccccggtcgccatcagccgctcgccgatattgccgcctgccgacacctggcggcgcaggccgtcgagtggatgctgatgcaccacgccccattcggtacgcagcaggcgacggcggtcggcctcgctcattgcatacagcgaacggttctcgtagtgaatttccccctgactccctctcgaacgataatccgacacgctgaaatgagttaagttgtagtcgcgggcataaccagccatcactcccaaacgccaactgtcactatcggtaaaaccaccggttaacagatcgccccctaactgcgagacgtagcgatgcgaggtcgttctcaactgtccgttgctgtcacgccaggcattatgcccgccaatttgacgtagccaaagtcggcttgaacgctcctgttcagttacaggatcgatgtagcgcgtttcacccgcacggtcgttcagacgcataacaaaaagagtgttagcagctgccaggttagcgacgtaacttccagcttcggggcgcaggacgggggtaggcgtttctgttgattctgaatttccctctgagctgttatcctcctcattcactgactgataacttgtcaaataccagtttttgc

SEQ ID NO: 25546 - DNA, 2547 bp, Homo sapiens
  SIMILAR (1395)..(1348): 1001254mologous to Escherichia coli HisP-like nucleotide binding protein (phnL),accession number J05260,Smith-Waterman Score =74.
atgggggacccaatggccaaaacccatggggtcaccaaggggaacaaccgcccgggtttaacagaccaatgggggccccccgtgctgggttcttctgtgccttatggcgtgcccggcttatatattataacccccaaatttaatcaggggcctttacccccggggccccgcaccaccccctttaggaacctcgtaaatgggcaaatttacccaggcagtaatatacaacgtttccaggagccgtatgggcggcgcttgtggcataaaccttacgcccactatattcccgtttcaccaccaaccacccaccacgacccagaattactagctctgtaccagaccccaaggattatcatcgtgtcagtgtacatacagtcaaaaccgtgtcttgccctgcgcggtgctggatataatgaaggttttcgctaccgtaatctattcgatcagtctttgacgtcacccaattacctgtcgattggcttggctgtggtgcggttaccagtattcctgagtaactcgcagtcagtaattgagttctatacagcccgaccgacaatcgaaactgtgccgcaatgggggccaaacttgcaattgcccacggaatttgcactgacgtaccgaggtggtactcggacggccaaggtgtcgtctaggttactagcggtcacggcccccccgcgaggcaatcgacaaaaaaagtcggaacgggtcaatcgtcaagacgagttgggcgaaaaagcccggaccaaggaactatcctatgaattccctagggcgcttttgcccccttctttgtatcccccaccaacgtgtggaattcacccactgggcttgtgtggactttcgggccggcaagcccaattttttcgccccggcaacaggccgccaaggttcgcgatccgcttgcgaccaggcttccgtcggccgccagtgctcttctcgtactgctgcatctgcgcatcaattctccagccgatcgccgccgtcgcgcacgtcgccaattccacggcatccagtacggtggtgatgccgctcgccaccatcagcgcgtctggctgctcatcgccgagtgggcaggccagtcaactttcgggcgcgggggaagaatttatccagattatcggtatgcagctcaatcagccccggcagcgccagccgccttcgccgtccatcgcctccggcaggcggctctggctttcgcaaaggcgcggatttcgccgttctgcacctccagcgaaccgcttaccactcgttttccagcaccagcttaacgttattgataatcatgaagaggctccattgggtgcaggcggtcggcgacgtcattacgtacagcttcgtcatggagatgcctacgatggctgcgccacgggttttggcttcgcgaatcagttcaccaccgcggcgctgtttttggcgtccagcgaggcggtgccacaggcgttcggcacgttcaggcgggtgagaagacgcgcggctttagcggcgcaggcttacgcggaacgccggtatcgagcagcggctgcatcaccacttccagtgctagatacgcgggatgacgcgcagaaactggctcacccagccgacggtggtttgcggatttccaccactttgcgcgctggcgcggtgaccagcaagatatcagcaggggccagcggatattgcagcgcctcttcaggtgagcaccagacagcgcctgatgttcatgtgcctgtaacgtcccgtggaagtcgggtacggccaggcatgaagatggataatccgccccgaaacttctcgctgatggctgcaacatattcacccacagttgcttcgatgcccagttcttcgcgcgcagaacgtctggatccgcacactgtacgatcgccatgttttgttacacgcggcacgctgggctggattgaaaccggtgatttcgaaaagtaccgccggatctgcgtttcttcgccgggggcgaccgcagtattctggctacaaatacaaatctatcgctccgaaatacgccaacggactggatattggcaagtcaccggcggctggcgcgatctcaccttgtctgacgttcgttatgagcgccaggcgtggcggtcaccgcgggcaatctgcctctggctgtcgggcttagtgcctgtggaacagccagtggaggaccccttgacctatttcttcagcgcaggaggattcccgaggatcaccagcaatcgtcaacgtaacggatctcgccgtgagatatcgcgccaagcaactgcgtctcagcatcatccgaagggtgtccgtctcgattaccgggttgtattcgcccggctgatagagcacgcagtgcgccatatgacaggtggcgttaataggcgatcagtatcgcgcacaaccattcgcaccagggcagacgcgctagcgaaacggccgtttgattatctcgactgcgcggggcccaacctgatccaggacaaaagaccccgttattggcctagcacaccgaatgatttccataagggcgaggttatagagccctacgcagcattacgacccattgtggtgagtcggtga

SEQ ID NO: 25547 - DNA, 1213 bp, Homo sapiens
  SIMILAR (1)..(474): 971254mologous to Escherichia coli isovaleryl-CoA dehydrogenase precursor homolog(PIR:C34252),accession number D10483,Smith-Waterman Score=804.
atgttcggtcgggaaggtaacggctttaaccgcgtcaaagaagagttcgaccatgaacgtttcctggtagccctcaccaactacggtacggcgatgtgcgcctttgaagatgcggcgcgctacgccaatcagcgcgtgcagtttggcgaggctattggtcgtttccagttgattcaggaaaaattcgcccacatggcgatcaaattaaactccatgaaaaacatgctgtatgaagcagcgtggaaagcagacaacggcaccatcacctctggcgatgcagcgatgtgcaaatacttctgcgccaatgcggcatttgaagttgtggatagcgcaatgcaggtgctgggcggtgtcgggattgcgggcaaccaccgcatcagccgcttctggcgtgatctgcgtgtagaccgcgtctccgggggatctgacgaaatgcagatcctgacgctgggtcgtgcgtcgagaagaaaatacgagaacagacagcagctattaggagaccataaggagcatatctccacccaaagctcgtcctatccgcatgtgtgcagattgcccgcaactggtgacgcatcgaagctggtgtttatggatgaaccgaccggacgggctggatgtgtcggtgcaggcccgcctgctcgacctgctgcgcggcctggtggtggagctgaacctcgcggtggtgattgtcacccatgatttaggcgtcgcccgcctgctggcggaccgtttgctggtgatgaagcaggggcaagtggtggagactgctggtgtcatcggttttgcagaattgagccggtgccggatgcggcgtaaacgccttatccggcctacaaatgcgctccccgtaggtcggataagacgcgtcagcgtcgcatccgacacccgaaccacgaggcgaaaaatgattaacgtacaaaacgtcagtaaaaccttcatcctgcaccagcaaaacggcgtgcgcctgcccgtcctcaatcgcgcctcgctcaccgtcaacgcgggcgaatgcgtggtgctccacggccattccggcagcggcaaatcaagctctgctacgctcgctgtacgccaactatctgcccgacgaaggtcaaatccagatcaaacacggtgacgagtgggtagacctggtcaccgcgccagcgcgcaaagtggtggaaatccgcaaaaccaccgtcggctgggttgaccagttctgcgcgtcatccgc

SEQ ID NO: 25548 - DNA, 2139 bp, Homo sapiens
  SIMILAR (737)..(678): 951254mologous to Escherichia coli aceE,accession number V01498,Smith-Waterman Score=103.
atgattccttacgacccttcggtctcgccggccatgtgggtagttttcgtccagccagatacagttcgggatagtcagcgactgaatgtggctgtgaccatcttcgtgctgcagaccttcgccgttcagggtggtacgaccggaagtaccgccgatcaggaagccacgcgcttgctggtcgccagccgcccagcacagatcgccaatacgctggaagccgaacatcgagtaatagatgtagaacgggatcatcggcagattgttggtgctgtaagaggtcgccgctgccagccaggaacaacctgcgcccagctcgttgatcccttcctgcagaatctgacctttctcgtcttctttatagtaagcaacctgctcgcggtcctgcggggtgtactgctgaccgttcgggctgtaaataccaatctgacggaacagaccttccataccgaaagtacgcgcttcgtcggcgatgatcggtaccagacgatctttgatcgacttgttcttcagcatcacgttcagagcacgaacgaaagcgatagtggtagagatctctttgctctgctcttccaacagcgcgccgaagtcttgcaggctcggcagctcaagcttctcggtgaagttcggctgacggcttggcagataaccgtgcagtttctgacgctgagcgtgcagatagaaccttccgggaaggtgatgtacggcagtttttcgatatctgcatcagacaccgggattttctcgttcttcttctcttcgttcctttctctttgttttctctttcgtctgtcttctctgtcttccttttttggcgcgagcagcgaggaagtcggaggtaagcaaggtgagaaggaagaagcgagaaagacaaaacttgtttctctcctcaccgttaattttgttctacgcctttcctcttcggtcttggacccctcctgttgtacactcctccgtcccaaaccgcgtgtatataccacgcgcttcgttacgcgagatgagtcgaccccgttccttggctaccgatggcgctggacatcacatccactgcgcctgcccgacagtttcgcaagcgcattatcgcatcgcttatgccgaccggggcacgtcattacggcgatattcggtgccaccgcgcagaagtggctggaagaggtggagattcccgccaaccggatcgacgacctgccgaccaccttttccggcggtatgcagcagcgtttgcagattgcccgcaacctggtgacgcatccgaagctggtgtttatggatgaaccgaccggcgggctggatgtgtcggtgcaggcccgcctgctcgacctgctgcgcggcctggtggtggagctgaacctcgcggtggtgattgtcacccatgatttaggcgtcgcccgcctgctggcggaccgtttgctggtgatgaagcaggggcaagtggtggagactgctggtgtcatcggttttgcagaattgagccggtgccggatgcggcgtaaacgccttatccggcctacaaatgcgctccccgtaggtcggataagacgcgtcagcgtcgcatccgacacccgaaccacgaggcgaaaaatgattaacgtacaaaacgtcagtaaaaccttcatcctgcaccagcaaaacggcgtgcgcctgcccgtcctcaatcgcgcctcgctcaccgtcaacgcgggcgaatgcgtggtgctccacggccattccggcagcggcaaatcaactctgctacgctcgctgtacgccaactatctgcccgacgaaggtcaaatccagatcaaacacggtgacgagtgggtagacctggtcaccgcgccagcgcgcaaagtggtggaaatccgcaaaaccaccgtcggctgggtgagccagtttctgcgcgtcatcccgcgtatctcagcactggaagtggtgatgcagccgctgctcgataccggcgttccgcgtgaagcctgcgccgctaagccgcgcgtcttctcacccgcctggaacgtgccggaacgcctgtggcacctggcaccatcgacattttccggtggcgaacagcagcgcgtcaacatcgcccgcggctttatcgtcgactaccccattctgctgcttgacgaaactaccgccttccttgacgccaaaacagcgccgcgc

SEQ ID NO: 25549 - DNA, 2342 bp, Homo sapiens
  SIMILAR (406)..(999): 991254mologous to Escherichia coli HisP-like nucleotide binding protein (phnK),accession number J05260,Smith-Waterman Score =1013.
atggcagaggtagaggagaagaagcagcggatcttccgcaagttcacctaccgcggtgtggacctgggccagctgctggacatgtcctttgagcagctgaggcagctgtacggcgcgcgccagctgcggcggctgaaccacggcctgtggcggaatgctgaggctcaagccgcattcgctgctgaggcgcctatgctaggccaagaaggaggcgccgaccatagagaagcaggaagtggtgaagacgcacctgcgggatatgatcatccctcccaagatggtgggcagcagggtgggcgtctacaacggcaagaccttcaaccaggtggagatcaagctggagatgatcggccacgacctgggcgagttctccatcacctacaagcccagcgaggcaaaaaaccaatgaatcaaccgttactttcggtcaataacctgacccacctttacgcgccgggcaaaggctttagcgatgtctcttttgatttatggccgggggaagtgctgggcattgtcggggaatccggctccgggaagaccacgctgctgaagtcgatctccgcgcgcctgacgccgcagcagggggaaattcactacgagaaccgttcgctgtatgcaatgagcgaggccgaccgccgtcgcctgctgcgtaccgaatggggcgtggtgcatcagcatccactcgacggcctgcgccgccaggtgtcggcaggcggcaatatcggcgagcggctgatggcgaccggggcacgtcattacggcgatattcgtgccaccgcgcagaagtggctggaagaggtggagattcccgccaaccggatcgacgacctgccgaccaccttttccggcggtatgcagcagcgtttgcagattgcccgcaacctggtgacgcatccgaagctggtgtttatggatgaaccgaccggcgggctggatgtgtcggtgcaggcccgcctgctcgacctgctgcgcggcctggtggtggagctgaaactcgccgggtgtgattgtaacctcttccccagaccaggactggggctttaccccagagcctcgcctcgccgcccgcttcccaggatccactcactcgtcccggagccgccgcaaccgcggccgccgccatccccggccccggagcctgcccacacccagcgcaccccacagtcgggcgcccggagatggcgtcaagctcgtcccgcccccggcgcgcgtgacccgaaatgagcccgcaccttccgactcagtaactttgggggttccacacgagcccggggcgtgtattgggaccccaattctgacctttgtccgaccctcgacttcagctataaaatgccgctgctgaagaatccactggaacaatattatttggtgcagggcggttttaagcgcactgacctgaacgataccgaatctgactccactacgctggtggcttctcgctactgggatctctccagcggctggcagcgtgccattaacctgcgctggagtctcgaccactttactcagggtgaaattaccaataccacgatgctgttttatcctggggtgatgattagccgcacgcgttctcgtggtggcctgatgccaacctggggcgactcgcaacgctactctatcgactactccaacacggcctggggttcagatgtcgatttctccgttttccaggcgcagaacgtctggatccgcacactgtacgatcgccatcgttttgttacacgcggcacgctgggctggattgaaaccggtgatttcgacaaagtaccgccggatctgcgtttcttcgccgggggcgaccgcagtattcgtggctaccaataccaaatctatcggtccgaaattacccaacggtgacactgaaaggggcctcgaagttgataaccggatcgctggaataccagtacaacgtgaccggaaaatgtaccaagtggcagttcggcgaatggctggcgcccggcgaggtgcgcctggcccccggcgccacgctggccacgcccgagctggtggccagctgctcgaccgagggcctcaacggcctggccgccaatttccacgccgaactgcgcgcccgcctgccctggcacggcggcgcgatgaagccgcgcccggtgcacctgaacacctgggagggcttctatttcgatctccagcccgacaaggtcaaggcgctggccacggccgccgcggcgctcggcgtcgagcgcttcgtgctcgacgacggctggttcaatgcccgccaccacgaccgcgccggcctcggcgactggtggcccgatgcgacgaagttcccgcaggggctgggcgagctggtcgcgcatgtcaaccccttttatgcataa

SEQ ID NO: 25550 - DNA, 285 bp, Homo sapiens
  SIMILAR (251)..(177): 961254mologous to Homo sapiens Protein cognate of protein kinase C-theta (clone 3-1 product),accession number W15776,Smith- Waterman Score=127.
catggagaagccggaagtggtgaagacgcacctgcgggacatgatcatcctacccgagatggtgggcagcatggtgggcgtctacaacggcaagaccttcaaccaggtggagatcaagcccgagatgatcggccactacctgggcgagttctccatcacctacaagcccgtaaatacatgaccggcccggcatcggggccacccactcctcccgcttcatccctctcaagtaatggctcagctaataaaggcgcacatgactccaaaaaaaaaaaaaaaaaaacc

SEQ ID NO: 25551 - DNA, 558 bp, Homo sapiens
atgctggcaggagtcgatggcgtcggcggtatcccgtttgataattaccccttcgcctacatggtaagtaacctggcactggcgattattttgctcgacggcgggatgcgcactcaggccagttcctttcgtgtggcgttaggaccggcactgtcgctggcgacgctgggcgtgcttatcacctctggtttaaccggcatgatggcggcgtggctgtttaatcttgatttgattgaaggcttattaatcggcgctatcgtcggctctaccgatgctgcagcggtcttttctctgctgggtggtaaggggcttaacgaacgtgttggctcgacgctggaaattgaatccggcagtaatgatccaatggcggtctttctgacgattaccctaattgcgatgatccagcatcatgagagcaatattagctggatgttcattgtcgatattctgcaacaatttggtctgggcattgtaataggtcttggcggcggttatttactactgcaaatgatcaaccgcatcgcctgcccgccggattatatccattgctggcattaa

SEQ ID NO: 25552 - DNA, 657 bp, Homo sapiens
  SIMILAR (633)..(409): 971254mologous to Escherichia coli seryl-tRNA synthetase,accession number X05017,Smith-Waterman Score=374.
cggcgctcagatacttttcgtctatttgtggatggcgcttcgcaaggtgcgaatcgaataaaagtaatgtaatgcgtggtgccattgcaaggcaacgatcgctgtgtttttccaaaccacggcgactcacttcacaaccaataccgcatcagggattttcgttttcataatggctcactcaagcatgctcacgatgatttcaagtacaaaccgtattgtgtaattatttctatagcagttcgctatataggcttgtatacatcgaataatttgaaaatcaaagagataggtagattttcactcgaaagtagtattacgtgtaagtgaggagtaattattgttcggtatcaaagggagacaaaaaaagcgcccgcaggcgctttttagattcagaaaaattgggtattagccaatatattccagtccgttcatatacggacgcagaacttctggtacttcaatacgaccatcagcctgctgatagttttccattactgcaaccagcgtacgaccaacagccagaccagacccgttcagggtatgaaccagacgggttttcttgtccgacttgctgcggcaacgtgcctgcatacaaagagcctggaaatcccaaacgttggagcaggaagagatccccggggccgagtctcgaaattt

SEQ ID NO: 25553 - DNA, 1318 bp, Homo sapiens
  SIMILAR (594)..(692): 961254mologous to Escherichia coli histidine-tRNA synthetase,accession number M11843,Smith-Waterman Score=164.
cgaaatccgcttcccgattgtagagcagaccccgctattcaatcgtgctattggtgaagtcaccgacgtggttgaaaaagagatgtacacctttgaggatcgcaatggcgacagcctgactctgcgccctgaagggacggcgggctgtgtacgcgccggcatcgagcatggtcttctgtacaatcaggaacagcgtctgtggtatatcgggccgatgttccgtcacgagcgtccgcagaaagggcgttatcgtcagttccatcagttgggctgcgaagttttcggtctgcaaggtccggatatcgacgctgaactgattatgctcactgcccgctggtggcgcgcgctgggtatttccgagcacgtaactcttgagctgaactctatcggttcgctggaagcacgcgccaattaccgcgatgcgctggtggcattccttgagcagcataaagaaaagctggacgaagactgcaaacgccgcatgtacactaacccgctgcgcgtgctggattcaaaaaatccgggagtgcaggcgcttttcaacgacgctccggcattaggtgactatctggacgaggaatctcgtgagcatttttgccggcctgtgcaaactgctggagagcgcggggatcgcttacaccgaaaaccagcgtctggtgcgtgggctggattactacaaccgtaccgtttttggcagtttgccgtcagcggcaaccggttcagtctggaaaccggaactatcaactttttgctgggcaacgaaacgaccatcttcgacgttaatccagtgcagataaccttcactgtcaccgaccaccaggttgccattatacagcaccggagaagtcagcaggcgatgcagcagatcgctttgtgtccacagcgtaacgccgccatcaatggtcaacgccatcacccggtcattttgatcgaccagatagatgcgattgccgtcgacgatgaaatcattcaccgaacccagttcgcgtttccacataatctgaccactgcgcagatcaagcgccgtcaggttaccattataggccagcgcgaaaacaacgccgttaacaacgacgggagtcgtgtcaacatcgctcagacggtcaatttcggtagaaccggtcgcctgggaaatacgctgctgccaaatcatctggccctgttccatcagcactgcgctgacgcgaccattatcgccccccacgacggccgcaccaaaagccgttgtcggcgcagactcgccacgcaaagagagcgaaggcatatcgaggttaactgtccatttgacagcgccgtcagctttgttcaacgcttgtaa

SEQ ID NO: 25554 - DNA, 1218 bp, Homo sapiens; identical to SEQ ID NO: 15768
  SIMILAR (4)..(621): 811254mologous to Escherichia coli CG Site No. 18232; alternate gene name hypF,accession number U29579,Smith-Waterman Score=820.

SEQ ID NO: 25555 - DNA, 843 bp, Homo sapiens
  SIMILAR (1)..(489): 871254mologous to Escherichia coli K12 transcriptional regulatory protein,accession number AE000355,Smith-Waterman Score= 691.
atgctggtggataaaaaatacgttcctgagctttgtgatgatatcgcccctgaccttaacgaagtcggggtaatgttgcctgcgaacccgctccagcatttgctgttacaggaactgcaatgcccgctggtgatgacctccggcaacctgagcggtaaaccaccagctatcagcaacgaacaggcgctggcggatttgcagggcattgccgacggattcttgatacataaccgcgacatcgtgcagcggatggatgattcggtggtgcgcgaaagcggcgaaatgctgcgccgttcgcgggggtatgtgccggatgcgctggctttgcctccgggctttaaaaatgttccgcctgtgctgtgtctcggcgcggatctgaaaaataccttctgcctgcggcgtgtctggcaacatcagtggccgctggatggcggtgatgtcattgctttgacgctcgacggtatcggtatgggggagaacggcgctttgtggggcggcgagtgcctgcgggtgaactatcgcgaatgtgagcacctgggcggcttgcctgcagtggcgcttccggcaagtgtgcaacagcaaaactggagcgtgctggcgcgggccattgagcgtggaattaacgcgccgctggcgtcatcgtgtgggcgttttttcgatgcagtggcggcggcactgggctgtgcgccagccacgttaagttatgaaggtgaagcggcttgtgctctggaggcgctcgcagcctcatgccacggaagtgaacgccatcccgggttgaaccaattggccccgccgggcggttgggacaaatccaactgtatcaatcagctcggtaccgggtga

SEQ ID NO: 25556 - DNA, 1368 bp, Homo sapiens
  SIMILAR (817)..(1365): 931254mologous to Escherichia coli alpha-galactosidase (AA 1- 451),accession number X04894,Smith-Waterman Score=906.
atgccccaaaacagaggggggtttttggacaagaaaaacccaggtgcccccctggaaggcgcggtatatgtcaattgctttacacgcttcccgggtatcggttatgagggaagaaccgccgtcttttgtggggccgccaaggtccctccggggttaaactatcggggaattggggctttcccgggtggcaattttgcaagcaaaagaagccggggccgaaaccttgctggcgcaaggtgcctgcgcttttgtccgaaagtggcaaaaattactctgaaacagcaagtgtgcaacagcaaaactgaagcgtgctggcccgggccattgagcgtggaattaacgcgccgctggcggtcatcgtgtgggcgttttttcgatgcagtgccggcggcactgggctgtgcgccagccacgttaagttataaaggtgaagcggcttgtgctctggaggcgctcgcagcctcatgccacggagtgacgcatccggtgacaatgccgcgggtggacaatcaactggatctcgccactttctggcagcagtggctgaactggcaggcaccggttaatcaacgcgcgtgggcgtttcatgatgcgctggcgcagggttttgccgcgttgatgcgtgagcaggccacgatgcgtggtatcactacgctgcacccagaaggcctggagagaatgtctgccggccatgagtcatggttagaacgacgtaacggggagttaggggaaggaaaggggagcaaagcctacccaactggagaccacaagggtgcagacctttacgatgattctaactttctgatacagaacatttttgttgaggacacacgtggtttattaaggcaaggtcgtgaggatttgattgagcgttataaagacccgctgaatgagaacccgaaacgctgcgtcgagcagctggcgaactggcataaagagctggaggagtataaaaaagcctcccggattgatattaaaccgtcacgggaatatgccagcacaatcatgaacgctatctggactggcgagccgagtgtgatttacggcaacgtccgtaacgatggtttgattgataacctgccacaaggatgttgcgtggaagtagcctgtctggttgatgctaatggcattcagccgaccaaagtcggtacgctaccttcgcatctggccgccatgatgcaaaccaacatcaacgtacagacgctgctgaccgaagctattcttacggaaaatcgcgaccgtgtttaccacgccgcgatgatggacccgcatactgccgccgtgctgggcattgacgaaatatatgctcttgttgacgacctgattgccgcccacggcgactggctgccaggctggttgcaccgttaa

SEQ ID NO: 25557 - DNA, 1566 bp, Homo sapiens
  SIMILAR (778)..(1089): 1001254mologous to Escherichia coli histidine-tRNA synthetase,accession number M11843,Smith-Waterman Score=518.
atgcctgatgaagaaaaccgatttaatgccctgaaagcggtttttagccagttaatgacagatgcgacgctgacgccgctgttcaactatcactatcgcattagtgcccctcccggcgtgaacggattatctatgaaacgtgctgtcgttgtgttcagtggaggtcaggattccaccacctgtctggtgcaggcattacaacaatatgatgaagtccattgcgtgacgttcgattacggtcagcggcatcgcgcagaaatcgacgtggcacgcgaactggcgctgaaactgggggcacgcgcgcataaggtgctggatgtcaccctgctcaacgagctggcggtcagtagcctgacgcgtgacagcattccggtgcctgattatgaacctgaagccgatggtatcccgaatacgtttgtcccagggcgtaatattttgttcctgacgctggcggcaatatatgcgtatcaggtaaaagcagaagccgtaattactggcgtctgcgaaacggatttctccggctacccggattgccgcgatgagtttgtgaaagcactaaaccatgcccataaagaaaagctggacgaagactgcaaacgccgcatgtacactaacccgctgcgcgtgctggattcaaaaaatccggaagtgcaggcgcttctcaacgacgctccggcattaggtgactatctggacgaggaatctcgtgagcattttgccggtctgtgcaaactgctggagagcgcggggatcgcttacaccgtaaaccagcgtctggccgttaatccggaatttaaagccgatcctgttgtcgatatatacctggtggcttcaggtgctgatacacaatctgcggctatggcattagctgagcgtctgcgtgatgaattaccgggcgtgaaattgatgaccaaccacggcggcggcaactttaagaaacagtttgcccgtgctgataaatggggtgcccgcgttgctgtggtgctgggtgagtctgaagtggctaacggcacagcagtagtgaaggatttgcgctctggtgagcaaacggcagttgcgcaggatagcgtagccgcgcatttgcgcacgaaggagaaggacagcgtggaaatttacgagaacgaaaacgaccaggtagaagcggttaaacgcttttttgctgaaaatggcaaagcactggctgttggggtgattttgggcgttggcgcactgattggctggcgctactggaacagccatcaggttgattctgcacgctccgcttctcttgcctatcaaaatgcggttaccgcagtgagcgaaggcaaaccggatagcatcccggcggcggaaaaatttgctgctgaaaataaaaatacttatggtgcgctggcttctttggaacttgcgcagcaatttgttgacaaaaatgaactagagaaagctgccgcccagttacaacaggggctggcagacacgagcgatgaaaatctcaaagccgtgataaatctgcgtcttgctcgcgttcaggtacagctcaagcaggctgatgccgcgctgaaaacccttgataccatcaaacggtga

SEQ ID NO: 25558 - DNA, 3906 bp, Homo sapiens
  SIMILAR (3881)..(3904): 1001254mologous to Escherichia coli PutA,accession number U05212,Smith-Waterman Score=41.
atgaaaatttcccgcctcggagaagcgcctgattaccgcttctcgctggctaatgagcgtacttttctggcgtggatccgtactgcactaggatttctggcggcgggggttgggcttgatcaacttgcgccagatttcgccacgcccgtcattcgcgaactgctggcgttgttgttgtgtctgttttccggcgggttagcgatgtatggctacttgcgctggttacgcaatgaaaaagcgatgcgtctgaaagaggacctgccctacaccaacagcttattaatcattagcttaatattgatggtcgtggcggtgatcgttatgggactgcgggccatgctgatggcgatggagccgatatgggagagtgattttcatacgctctcatatggcttccggcctgagcgcagtgtccaccacgcgatccgcacggtgaaattacagctcacagactgtggtgaaacccggggacgctgggtgattgaaggcgacctgtccagttacttcgacaccgtacatcatcgactgctgatgaaggctgtacgccgcaggatcagtgacgcacgtttcatgactctgctgtggaaaaccatcaaggcgggacatatcgatgtcgaagataaacgggcggccagtgaaggtgtgccacagaacaaaattatatcgccgctattatcgaacatcatgctgaatgagttcgatcaatacctgcatgagcgatacctgagcgggaaagccagaaaagatcggtggtactggaataacagtatccaacgggccgaagtacggcggtcagagaatactggcagtggaaacccgcggtggcgtactgccgctatgccgatcaccgcccgtcgcccgacgctgcttcgtccgctgtggtgcgaaaatcgatggacgggaatggtcgagctggatcgctatctgaatgaacatggcgtacagggatcggcgctgggacgtccgtggctacctccaacggagtctggtgcgcttctcaatgttgtggcgctggccctcgtcgttcttgccattgtggtacaaatggcggtaaccatggtgctgcatggtcaggtcgaaagcattgatgttattcgttctatcttctttggtttgctgattacgccgtgggcggtctactttctatcggtggtcgtcgagcaactggaggagtcacgacaacgtctgtcacggctggtgcaaaaactggaggagatgcgcgagcgcgatttgagcctcaacgttcagttaaaagataatattgcccagctaaatcaggaaattgccgttcgtgaaaaagcggaagcagaactgcaggaaaccttcggccaactgaaaattgaaatcaaagagcgcgaagagacacaaattcataacccccatactagcctggcggatacttatccattacctccagagggtagccgtttagtggggcagtcgtttactgtaactgttcctgatcacaatacccagccgctggagacttttgccgcacaatacgggcaagggttaagtaacatgctggaagcgaacccgggcgctgatgtttttttgccgaagtctggctcgcaactcaccattccgcagcaactgattttgcccgacactgttcgtaaagggattgttgttaacgtcgctgagatgcgtctttattactacccaccagacagtaatactgtggaagtctttcctattggtatcggccaggctgggcgagaaaccccgcgtaactgggtgactaccgttgaacgtaaacaagaagctccaacctggacgccaacgccgaacactcggcgcgtatatgcgatacgaggggagagtttgcctgcatttgttcctgcgggccccgataatcccatggggctgtacgcgatttatattggcaggttgtatgccatccatggtaccaatgccaattttggtattgggctccggggcatcaccatttctcctgatgaaattgtcattactgccggggcgttagaggcattaaacctcagtttgcaagcggtaactgaaccgggcgattgggtgatagtagagaatccttgtttctacggtgcgttgcaggcgctggagcggctacggctgaaggcgttatcggtggcgacggatgttaaagaagggatagatcttcaggcgctggaactggcgttgcaggagtatccgattattcctgcgcagtcatttatcgccagtgatgcccggccttcgcaagctatccgcgccagtcgtgggagttcaatgcgcgtggccctggagctggtgaaagaagctcgagcgcaagcctgtgtcagtgccggtaataccggggcgctgatggggctggcaaaattattactcaagcccctggaggggattgagcgtccggcgctggtgacggtattaccacatcagccaaagggcaaaacgatggtccttgacttaggggccaacgtcgattgtgacagcacaatgctggtgcaatttgccattatgggctcagttctggctgaagagaaaataacaggagtgatgactatgagtcgtttagtcgtagtatctaaccggattgcaccaccagacgagcacgccgccagtgccggtggccttgccgttggcatactgggggcactgaaagccgcagacggactgtggtttggctggagtggtgaaacagggaatgaggatcagccgctaaaaaaggtgaaaaaaggtaacattacgtgggcctcttttaacctcagcgaacaggaccttgacgaatactacaaccaattctccaatgccgttctctggcccgcttttcattatcggctcgatctggtgcaatttcagcgtcctgcctgggacggctatctacgcgtaaatgcgttgctggcagataaattactgccgctgttgcaagacgatgacattatctggatccacgattatcacctgttgccatttgcgcatgaattacgcaaacggggagtgaataatcgcattggtttctttctgcatattcctttcccgacaccggaaatcttcaacgcgctgccgacatatgacaccttgcttgaacagctttgtgattatgatttgctgggtttccagacaagaaaacgatcgtctggcgttcctggatggacccggcggacccgagagatattgtgggctatgtgccgtgaagccacgccgcgtgaagtagaacaggcgctggaaagtgcggttaataacgcgccaatctggtttgccacgcctccggctgaacgcgcagcgattttgcaccgcgctgccgtgctgatggaaagccagatgcagcaactgattggtattctggtgcgtgaggccggaaaaaccttcagtaacgccattgccgaagtgcgcgaagcggtcgattttctccactactacgccggacaggtgcgggatgatttcgctaacgaaacccaccgtccattagggcctgtggtgtgtatcagtccgtggaacttcccgctggctattttcaccgggcagatcgccgccgcactggcggcaggtaacagcgtgctggcaaaaccggcagaacaaacgccgctgattgccgcgcaagggatcgccattttgctggaagcgggtgtaccgccaggcgtggtgcaattgctgccaggtcggggtgaaaccgtgggcgcgcaactgacgggtgatgatcgcgtgcgcggggtgatgtttaccggttcaaccgaagtcgctacgttactgcagcgcaatatcgccagccgcctggacgctcagggtcgccctattccgctcatcgctgaaaccggcggcatgaacgcgatgattgtcgattcttcagcactgaccgaacaggtcgtcgtggatgtactggcctcggcgttcgacagtgcgggtcagcgttgttcggcgcctgcgcgtgctgtgcctgcaagatga

SEQ ID NO: 25559 - DNA, 2297 bp, Homo sapiens
  SIMILAR (1997)..(1464): 631254mologous to Escherichia coli Formate dehydrogenase a chain (EC 1.2.1.2),accession number D90792,Smith-Waterman Score= 504.
  misc_feature (1)...(2297): n = a,t,c or g
ttatctgttgattgtcggtgaacgctctcctgagtaggacaaatccgccgggagcggatttgaatcacggcaggtttcgacgtcatgataccccgcgaggataaatgcttgtcgcaccgcttcgccatgctgccagccatgttccagaagcagaaagccgccggataccagcgcgttacgcgactgttcgatgatatgcacgatgtctgccattccactgtctgccgcaaccagcgcagtgagcggctcaaagcggacatcgccttgttgaagatgagggtcctgctcgtcaatatacggcggattgctgacaatcatcgcaaactgctgcccggctagcgcgctaaaccagtcgctttgcagaatgtggatatttttgatcgccagatgctgggcattacgttgtgccagggagacagcatcaggcatacgatctacagcgataatttcgcagtccgggcgctcgctagccagcgcaagcgcaatcgccccggtacccgtcccgagatcgagaatacggcaaggttgttcaggcaaccgcgccagtgcctgctccaccagacactccgtatccgggcgcggaattaaggtcgctggcgaaacaaataacggcaacgaccagaattctcgcaccccggttaaatgagcaatgggttcaccatcgcgacgacgtgtcagtagcgcatcaagttgctgaaacacgtgggagagagaggggacggaggaggagggatagcggaggtacggaaagtggggatgcggttgtggcaaagagaggggggagtgggagcgaaggtagacaggtggcgtaaccaagtgagggtgatgtgaagtgtctgtgaccgacggttgggcgggggtgaggaccgggcgacgagtgggtggcataaatcgtcgtgttgtactgatcgtggctgcgtactgtcgccatgaccagcttactgttaaacgctgaagagggatcttctaacagccctttgctggtaatgaaattagccttacctgacggcgtcatccagcgcctttcagcagctgcatttatcaggtgaaaaccaccgggatgacggatgcgctggttatagtcggcgaactctggcagcacagcttcaatgtcattgcgaatgcgatcataatcttccaccagatactcccaggctaccacgctctggggtagtgctgcctgcgcgattcccgcgaccactgcacactctgatttcagcattacaccggcgggttttaacacgccacgcgaggcatgaatcatcgacattgaatcctcaacggttaccgcctgcgcaccgtttttttgcatgtcaatctcgctacgtcccaggaccggcagaatatagctatgccgtgcggtcaacagatgagagcggttaagcttagtggctacgtgtaccgccaaatctaattgcgttaacggtacagcgctcgcttcccgatctggcattgccagcgcaaaattgccccccatgcagatcaatgctcgagcctgccccgtacatattgcttggcatgctggcaacttggncagcatgtccaggtgcatgaggtggggtgaagccatagcgctcacccagacgagccagaaactctgcagacggtttctcggtgataccgacggttcggtcgccctgtacattagagtgtccacgtagtgggcagatacccgcaccaggcttgccaatgttacctttcatcaacagcagaataaccagttgctgtacgttctgggtaccatgttcgtgcagagtgatccccattccgtaacagataatggtgcgttcggcagcggcatatgcgtcagcaatgtggacccgacggggggcgaaagggaagaccgcttcacgcaggtctgccctaaggccttttatcagctcgatatcgcgttcttcgcactcagctaaaagtcggaatatttcccactgaatgtcccattcttgctctacagctgggttttctttaagctcttcatcgctcatttcgcgaccagcctgagtcatttccagcatcgcaacggtcgtgatggaggtcttactcacttccaccgcgtgttcgagcgtttcaccactcaaacgcgaatggaccagttcacttaacgccacgcaggcatcgattgccggataaacgccgtacagatcgaaatcgtcggctgaaggaatcgcttcttcaaatttctccagttggctgtcgaaatttacttttgcgtctttaacggtcagcgtttcccagatgagatcgagaatgcgacggtaaatttgcccatcaccaaaaccggtttgctggcagaacat

SEQ ID NO: 25560 - DNA, 769 bp, Homo sapiens
  SIMILAR (472)..(768): 881254mologous to Escherichia coli matches PS00327: Bacterial rhodopsins retinal binding site,accession number U00006,Smith- Waterman Score=449.
atggaggaaggtaaaggggaagagagacaccttcacaaggtggcaagaaggagaaatgcaagcaggggaaatgccagacacttacaaaagcatcggatctcctccatcatctgcaatatggaaataacaataatcacacccatggactgttgtgagtttcccagaaagtggttagatcaatgtaaatgcgcattacaaaggccgtatgcatttcagtgcattgttcctgatggtgagctgccagcagtatcaggagtgacttatctgtggagctgccctcctggaatgctgatgtcatggccacgaagcgatgatccccatcgtcaggccagcaacagcagctgccccgccggcaatagccccagccgtttcccagttatcctgagtcgtgcctttcatacaggtattggtgtgaaccagacgaccctgatcgtcataaaccggaacgcagggcgaatccgtcaccctccagagatcagcctgaatttacagccggtacaccaggtgacgctgccaggatacaccttccgtgtgggtgggggcgatctacaacccaaaggcaattacaccagcgaaaaagcgatagtggcactgtttgaccatcagcaacgcattggtgaactgacgccggagcggcgtttttatgaagcacgccgtcaacaaatgatggaaccgtcaattcgctggaacggcatccatgactgttatccggtcatgggggagaaaactggcccggatcgttacgcttttcgtttgtatgtacaaaccg

SEQ ID NO: 25561 - DNA, 3709 bp, Homo sapiens
  SIMILAR (2594)..(2800): 1001254mologous to Escherichia coli K12 transcriptional regulatory protein,accession number AE000355,Smith-Waterman Score= 349.
atggtgcgttcggcagtggtcgcgggaatcgcgcaggcagcactaccccagagcgtggtagcctgggagtatctggtggaagattatgatcgcattcgcaatgacattgaagctgtgctgccagagttcgccgactataaccagcgcatccgtcatcccggtggttttcacctgataaatgcagctgctgaaaggcgctggatgacgccgtcaggtaaggctaatttcattaccagcaaagggctgttagaagatccctcttcagcgtttaacagtaagctggtcatggcgacagtacgcagccacgatcagtacaacacgacgatttatggtatggatgatcgctatcgaggggtattcggtcaacgagatgggtaccgagataactgcgaagagattgcccaactggctgaagactgtggcaatctcttcgcagttacggtgttccggtgcccagccggtgcgaatcttcagggtaacaggaacgtccactgcattgacgacctcggtaaggatcgatttaacgacatccggaacgttcaggcggctgaactgctggcggagatggcgatttccagcgcccagcgccgtatgcgtgcggccaaaaaagtggtgcgtaaaaagctgaccagcggcccggcgttgcctggcaaactggctgattgtaccgcgcaggaccttaaccgtaccgagctgttcttgtggaagggggaacagaatgcgctgcttcgaggctttcccgccgttcgacttcacagcctgctgatagttttccattactgcaaccagcgtacgaccaacagccagaccagaaccgttcaggcggcttccagctatgcggcgctaccggagacggtacgtatcggaaccgatacgacctacgcaccgggtaccgaaactacttttgcttataagaggatggccacagacaggtattggtgtgaaccagacgaccctgatcgtcataaaccggaacgcagggcgaatcgtgagcacagcccgccagcaatgcgagcgcgcgagcaccgtcatgagtttatgaccgtcgagcacttgttactggcgctgctcagtaacccatctgcccgggaggttgtcgatattctgcaacaatttggtctgggcattgtaataggtcttggcggcggttatttactactgcaaatgatcaaccgcatcgccctgcccgccggattatatccattgctggcattaagtggcgaccgaaaacttcgcagcccaactgatggaactgacgataacgccctttctgcggacgctcgtgacggaacatcggcccgctggtggcgcgcgctgggtatttccgagcacgtaactcttgagctgaactctatcggttcgctggaagcacgcgccaattaccgcgatgcgctggtggcattccttgagcagcataaagaaaagctggacgaagactgcaaacgccgcatgtacactaacccgctgcgcgtgctggattcaaaaaatccggaagtgcaggcgcttctcaacgacgctccggcattaggtgactatctggacgaggaatctcgtgagcattttgccggtctgtgcaaactgctggagagcgcggggatcgcttacaccgtaaaccagcgtctgcggatggatgattcggtggtgcgcgaaagcggcgaaatgctgcgccgttcgcgggggtatgtgccggatgcgctggctttgcctccgggctttaaaaatgttccgcctgtgctgtgtctcggcgcggatctgaaaaataccttctgcctggtgcgcggtgaacaagcggtgttgagtcagcatctgggcgatttaagtgacgatggcatccagatgcagtggcgcgaagcgttacgcctgatgcaaaacatctacgattttaccccgcaatacgttgtgcatgacgcgcatccgggctatgtctccagccagtgggcgcgtgaaatgaatctgccgacgcaaacggtactgcatcatcatgcccatgcagcggcgtgtctggcagagcatcagtggccgctggatggcggtgatgtcattgctttgacgctcgacggtatcggtatgggggagaacggcgctttgtggggcggcgagtgcctgcgggtgaactatcgcgaatgtgagcacctgggcggcttgcctgcagtggcgcttccgggtggcgatttggcagcgaagcagccgtggcgaaacctgctggcgcagtgcctgcgctttgtgccggagtggcagaattactctgaaacagcaagtgtgcaacagcaaaactggagcgtgctggcgcgggccattgagcgtggaattaacgcgccgctggcgtcatcgtgtgggcgttttttcgatgcagtggcggcggcactgggctgtgcgccagccacgttaagttatgaaggtgaagcggcttgtgctctggaggcgctcgcagcctcatgccacggagtgacgcatccggtgacaatgccgcgggtggacaatcaactggatctcgccactttctggcagcagtggctgaactggcaggcaccggttaatcaacgcgcgtgggcgtttcatgatgcgctggcgcagggttttgccgcgttgatggcgtgagcaggccacgatgcgtggtatcactacgctggtatttagcggcggggttattcataaccgtttgctgcgtgcacgtctggcgcattatctcgctgatttcacattgctctttccacagagtttaccggcgggtgatggcggtttgtctctggggcagggggttattgctgcggcgcgttggttagcgggtgaagtccagaaccggaataaaaccgtgttgcatttggaatttgtgtcacataagcggcctgacatcgttaggaatgagaggtctgtccccgtgtctatgtacgtgggtctatgcgtgaccgtcatggcgtcactacgtgtagtgggtgtgtcagacgctagaggtgccaaccaactgattttgcccgacactgttcgtaaagggattgttgttaacgtcgctgagatgcgtctttattactacccaccagacagtaatactgtggaagtctttcctattggtatcggccaggctgggcgagaaaccccgcgtaactgggtgactaccgttgaacgtaaacaagaagctccaacctggacgccaacgccgaacactcggcgcgaatatgcgaaacgaggggagagtttgcccgcatttgttcctgcgggccccgataatcccatggggctgtacgcgatttatattggcaggttgtatgccatccatggtaccaatgccaattttggtattgggctccgggtaagtcagggctgtattcgtctgcgcaatgacgatatcaaatatctgtttgataatgttcctgttgggacgcgtgtgcaaattatcgaccagccagtaaaatacaccactgaaccagatggctcgaactggctggaagttcatgagccattgtcgcgcaatcgtgcagaatatgagtctgaccgaaaagtgccattgccggtaaccccatctttgcgggcgtttatcaacgggcaagaagttgatgtaaatcgcgcaaatgctgcgttgcaacgtcgatcgggaatgcctgtgcaaattagttctggttcaagacagatgttttatcttgtggaaagccttgctttgaatgtccctgggcctatgaccccctttattcaaacgcaaggaaataactgctga

SEQ ID NO: 25562 - DNA, 369 bp, Homo sapiens; identical to SEQ ID NO: 11482
  SIMILAR (13)..(189): 401254mologous to Myxococcus xanthus response regulator FrzZ,accession number AF049107,Smith-Waterman Score=92.

SEQ ID NO: 25563 - DNA, 447 bp, Homo sapiens; identical to SEQ ID NO: 58
  SIMILAR (131)..(340): 411254mologous to Streptomyces coelicolor A3(2) putative acyltransferase,accession number AL391515,Smith-Waterman Score=123.

SEQ ID NO: 25564 - DNA, 2130 bp, Homo sapiens
  SIMILAR (1061)..(1126): 901254mologous to Homo sapiens putative p150,accession number U93563,Smith-Waterman Score=104.
atggtgttggaagttctggccagggcaattaggcaggagaaggaaataaaaggtattcaattaggaaaagaggaagtcaaattgtccctgtttgcagatgacatgattgtatatctagaaaaccccatcgtttcagcccaaaatctccttacactgataagcaacttcagcaaagtctcaggatacaaaatcagtgtacaaaaatcacaagcattcttatacaccaacaacagacaaacagagagccaagtcatgagtgaactcccattcacaattgcttcaaagggaataaaatacctaggaatccaacttacaagggatgtgaaggacctcttcaaggagaactacaaaccactgctcaaggaaataaaagaggatacaaacaaatggaagaacattccatgctcatgggtaggaagaatcaatatcgtgaaaatggccatactgcctaaggtaatttacagattcaatgccatccccatcaagctaccaatgactttcttcacagaattggaaaaaactactttaaagttcatatggaaccaaaaaagagcccgcatcgccaagtcaatcttaagccaaaagaacaaagctggaggcatcacactacctgacttcaaactatactacaaggctacagtaaccaaaacagcatggtactggtaccaaaacagagatatagatcaatggaacagaacagagccctcagaaataacgcagcatatgtacaactatctgatctttgacaaacctgagaaaaacaagcaatggggaaaggattccctatttaataaatggtgctgggaaaactggctagccatatgtagaaagctgaaactggatcccttccttacaccttatacaaaaatcaattcaagatggactaaagacttaaacgttagacctaaaaccataaaaaccctagaagaaaacctaggcattgccattcaggacataggcatgggcaaggacttcatgtctaaaacaccaaaagcaatggcaacaaaagacaaaattgacaaatgggatctaattaaactaaagagcttctgcacagcaaaagagcttctgcacagcaaaagaaactaccatcagagtgaacaggcaacttacaaaatgggagaaatattaaaccttcttaatttatctggcaattcagagatttctttttcaactgcaaccattgctgaggatctgggatttttgccctggtgtaccagaagaatcggatcacacctgggcttggagaatgagtgccaggttttactgagtggaagtagctctcagcagatgaaggagccagaagggagatggagtgggaaggtttcccctggagtcgggcctctcagcagctggactcttctccaactgccctggccaaactccgcattgttctgccggtggatggcctgcctgagtgctgggtcttcgggtttttatacgcacaggatcggggtatggtgggccaggggtgtcttggaaaatgcaacgtttgggcacaaaggcaagagtgcctgtcctcacctaagtccgtgggcctatgcccgagggacacaatatccttttttcaagcctgttctttggaagacgagttctcattatagttgcatggtaacaccaatccctggtaacaccagagtaaatggtcagtgccataaggctatgtctgggcagtttaactgcagtctcatgctgtaccaaacatcacgcactttgaccatcaatcaggtcctgcaactgattacctcaggcaatgaggggcttagtacacgggccagcggctgcggagggtgtactgggtcccccagcagtgccagcccacctgcgctgcgctggatttctcaccaagccttagctgccttcccgcggggcagggctcaggacctacagccagccatgcctgagcctcccacccactccatgggctcctgtgcagcccgagcctccccaatgagcgcctccccctgctccacggcgcccagtcccatcgaccacccaagggctgaggagtgcaggcgcatggtgcgggactggcaggcagctccacctgcagcccctgtgcgggatccactgggtgaagccagctgggctcctgagtctggtggggacgtggagaacctttatgtctaa

SEQ ID NO: 25565 - DNA, 2234 bp, Homo sapiens; identical to SEQ ID NO: 14013
  SIMILAR (1383)..(874): 451254mologous to Felis silvestris polyprotein,accession number X51929,Smith-Waterman Score=350.

SEQ ID NO: 25566 - DNA, 537 bp, Homo sapiens; identical to SEQ ID NO: 3181
  SIMILAR (22)..(141): 771254mologous to Homo sapiens Human secreted protein, SEQ ID NO: 6395,accession number G02314,Smith-Waterman Score=144.

SEQ ID NO: 25567 - DNA, 455 bp, Homo sapiens
  SIMILAR (254)..(135): 871254mologous to Homo sapiens Human secreted protein, SEQ ID NO: 7102,accession number G03021,Smith-Waterman Score=178.
cattgtgggtccgtaattggtgggttcttggtctcactaactttaagaaccaagctgcgaaccctcgcggtgagtgttacagctcttacagtggtgtgtctggagtttattccttctgatgttcggatgcgttcagtttcttccttctggtgggttcgtagtctcgctggctcaagagtgaagctgcagaccttcgcagtgactgttacagctcttaaggcggcgagtctggagttgttcgttcctcccggtggtctcgtggtctcgctggcttcaggcgtgaagctgcagacggcggctgcaggtaaagctgcctgccagtcctgcgccatgcgcccgcactcctcagcccttgggtggtcgatgggactgggcaccgtggagcagggggcggcgctcatcggggaggctcgggacgcccaggagcccatggagggggtgggaggctcaggcat

SEQ ID NO: 25568 - DNA, 564 bp, Homo sapiens
  SIMILAR (438)..(539): 581254mologous to Human coxsackievirus B3 polyprotein,accession number AJ304427,Smith-Waterman Score=127.
tcagcttgcagggaggtgtggagggagaggcatgagcgggaaccggggctgcgtggggcgcttgcgggccagctggagttccgggtgggtgtgggcttggtgcgccctgcactcggaggagccggccagcccggcgctgcgctcgatttctcgccgggccttagctgccttcccgcggggcagggctcgggacctgcagcccgccatgcctgagcctcccaccccctccatgggctcctgtgcagcccgagcctccccgacgagcgccgcctcctgtccacggcgcccagtcccatcgaccacccaagggctgaggaatgcgtcgcacggcgcgggactggcaggcatgatgaactgatagttgcattgccattcatgatgatcccctggcattcgtccattcagccattcaccattcacccattcaactggaattttggttgaatgccggaattgtgtccacaaattgtggatggatagttggttggctggctggatggctggctggatggctggctggatggatggtgaatggctggcggcggttcggttgctttgaagcat

SEQ ID NO: 25569 - DNA, 522 bp, Homo sapiens
  SIMILAR (447)..(85): 651254mologous to Homo sapiens hypothetical protein,accession number AL162044,Smith-Waterman Score=378.
atgcctttctgtagtactttccacaggcactgccgctgtaagcaggaggattcccaggtcaccatcatcttggctgctaaagatgggccccgcactcggagcagccggccagccctgctggccccgggcaatgagggacttagcacccgggccagcggctgcggagggtgtactgggtcccccagcagtgccagcccatcggcgctgagctcgatttctcaccgagccttagctgccttcccgcggggcagggctcgggacctgcagcccgccatgcctgagtctcccaccccctccatgggctcctgtgcagcccgagcctccccaacgagcaccaccccctgctccatggtgctcagtcccatcgatcacccaagggctgaggaatgcgagtgcacggcacaggactggcaggcagctctacctgcagccccagtgtgggatccactagaaatgtcaggtctttttgatagagctgaaaaacgctacatccgctcctttgctagaaaagattcaatgtaa

SEQ ID NO: 25570 - DNA, 861 bp, Homo sapiens; identical to SEQ ID NO: 11883
  SIMILAR (635)..(769): 681254mologous to Homo sapiens Human secreted protein, SEQ ID NO: 7141,accession number G03060,Smith-Waterman Score=140.

SEQ ID NO: 25571 - DNA, 1349 bp, Homo sapiens
  SIMILAR (357)..(274): 921254mologous to Homo sapiens Human secreted protein, SEQ ID NO: 7102,accession number G03021,Smith-Waterman Score=143.
ctagatatctccacctagtccaaaactctttatgcggctgttggaaggtttcaatcccatactgttgttggtctgaggttgctttctctcatcatttgattgtctccatagcagctggcttcccctagaatgagtgcggcctgagaataattctccatagccctcagcttcaccatctgggctctgggtttgttgttctttttctttaagaatgaagccgcggaccatcgcagtgagtgttacagttcttaaaggccgcgtgtgcggagtttgctccttctgatgttcggatgtgttcgttgtttcttccttctggtgggttcgtggtcttgctggctcaggagtgaagctgcagacatcctgctgattggtccattttacagagagccgagtggtctgttttgacagggtgctgattggtgcgtttacaatccctgagctagacacaaaggttctccaagtccccaccagattagctagatagagtgtggacacaaaggttctccacgtccccaccagagtagctagatacagagtgtcgattggtgcattcgcaaactctgagctagacacggtgctgattggtgtgtttacaaaccttgagctagatacagagtgccgattggtgtatttacaatccctgagcagagtagctagatacagagtgtcgattggtgcattcacaaaccttgagaaaccttgagctaaacacagggtgctgattggtatatttacaatccctgagctagacgtaaagattgtccacgtccccaccagactcaggagcacaactggcttcacccagtggatcccgcaccagggatgcaggtggagctgcctgccagtcccggtgccctgcgcctgcactcctcagcccttgggttgtttgttccttcccggtcgatgggactgggcgccgtggagcagggggtggcgctcgttcggggaggctcgggctgcacagaagcccatggagggggtgggaggctcaggcatggcgggctgcaggtcccggagccctgtcctgcgggaaggcagctaaggcccggcgagaaatcgagctcagcgccggagggctggcactgctgggggacccattacaccctccgcagccgctggcccaggtgctaagcccctcattgcccggcgccggcagggctggccggctgctccgagtgcagggccggccaagcccacgcccacccgtatctccagctggcccgcaagcgcagcccgcagccgcggttcccgctcgcgcctctccctccacaactctcttcaagctgagggagtgggctccggccttggccagcccagaaaggggctcccacagtgcaacggtgggctga

SEQ ID NO: 25572 - DNA, 394 bp, Homo sapiens
  SIMILAR (388)..(338): 521254mologous to Escherichia coli thiamine-monophosphate kinase,accession number D17333,Smith-Waterman Score=43.
gcgcagtgcctgcccctgtaaaatacgcggcgatggacggagatgacgtttgatcaagtagtccgcatctttagcatcggcaacctgcaaacggttttgcaaaatcgccagcccggcggcgctatcgcccggtgtaccggtcacatagatccagtcacccggtttcgccccagagcgcgttaaggctcgtcccatcggaacaaagccgtggatacccaacgtcattgataatggcccacgcgtggtattaccgccaatgagtcgcatatcgtaataattgagaagatcaaacaaactgtcgctgaaggactcaagccacgcttcgtctacgtccggtaagggtaatgccaacgtcagccaagcccggatcggcccccatcgctggcagaatcgt

SEQ ID NO: 25573 - DNA, 1107 bp, Homo sapiens
  SIMILAR (320)..(162): 601254mologous to Escherichia coli 5-methyltetrahydrofolate- homocysteine transferase (AA 1-1200),accession number X16584,Smith- Waterman Score=159.
ctaccagatcctgagcgcaaacgaggtcaccagcatggtggtggcattactgctctgtaccagtgcgtaacgccgatccccgcgcaaaaggcgagcggctttttttcgacgctccgggcgggcataatcttcaacctgatcgcgctgaatttgtgctacaggtagtacttgctgtccgggtggctgaagtacaaccccggaaccggatgcccgggcccacatggcgaaagattctgtgagtttcatgccagtgtgttttccacttccagcagctcccagatggtggctttttccgtatgttccgggcagccggatagcccggtgccggacggatgcccacttcatcttccagaatgcgcggatacttccggccagcgaccaggtcataaagaacggtgtccagtcgatgtaattacgagcgtttcgatgctggcttcgacttccgccccgctcgatcccggccttcttcgtccaggtgatggtctggttcccgggaggcgcctcatcgtgggcgctgcttcttcgtacgagggctctgacttggccgcccggagaaagtggtgctggtgtttctgcagcacaggctcggcatcttcggctcctgaggtggcggggccggtaccctttgggaccgcagcttccatcttcgggtatagatgctgccaggagagtctccatctgctcccaaggccacgtttcccaactccctgcagctaggtcgccttccctcctagcattgtggatgggcctaccagggccaggactgggctcgctcctcatcaaactccagacacccataccatccagtctttggagatcaatccagcctttccagataacacgactccattcagaatcatgggagccttcaaatatacccaggcgggaggtggtagcatctctgattcctttccagggctccgggggttctggagggcaaacctgaggatacctagaggaggtctggagaaggggactcctaaaagacttggatgggtgtcttccccacatgcatctgttttccttgcagggttcatatttggtgaccacttgaggcctcttggtgtgcaaggcacctggatttgccctgaatccgggtccactcat

SEQ ID NO: 25574 - DNA, 465 bp, Homo sapiens
  SIMILAR (211)..(462): 831254mologous to Escherichia coli fatty acid oxidizing complex,accession number M59368,Smith-Waterman Score=345.
atgctcattttggctgacaaaccagctcgtatctcctcgcgctcagacagtgtcaggagacgtgacgcaccagcagacaatcgccatcacacgaatacaggaaccacatccgggccaggtggacacccatttcgcatcatcaagcgacagttcggcttcgtgaaagccagatacaaggggttgctgaaaaacgataaccaactggcgatgttattcacgctggccaacctgtttcgggcggaccaaatgatacgtattaaagatcggggactaattgagcagattgacgagaagatcaacttcaacggtggcgcgatcgcgctgggtcatccgctgggttgttccggtgcgcgtatcagcaccacgctgctgaatctgatggaacgcaaagacgttcagtttggtctggcgacgatgtgtatcggtctgggtcagggtattgcgacggtgtttgagcgggtttaa

SEQ ID NO: 25575 - DNA, 2580 bp, Homo sapiens
  SIMILAR (1945)..(2577): 941254mologous to Escherichia coli SEL B (AA 1-614),accession number X16644,Smith-Waterman Score=1047.
atgttcgccattatcagctactccagccttgctgctgtactgctgaccgcgactctgaccgccgcaggcattatctccttccccgtggcgctctgtctggtgattggtgctaacctcggttccggtctgctggcaatgctcaacaacagtgccgccaatgccgcagcccgccgtgtcgcgctgggtagtctgctgtttaagctggtgggtagcctgattatcctgccgtttgtccatttgctggcagagacaatggggaagttgtcattgccaaaagcggaactggtgatctatttccacgtcttctacaaccttgtacgttgcctggtcatgctgccatttgttgacccgatggcacggttttgcaaaacgattattcgcgatgaaccggaactggatacccagctacggcctaaacatctggatgtcagcgcgctggatacgcccacgcttgctctggcgaacgccgcgcgcgaaacctgcgcattggcgacgccatggacagatgatggaagaaaatatgcttattcagcagcttctggtgggcgacgaagtgctacgaaagtaatggtagttgtaactgacggtgaatcacatgatggttcaatgttgaaagctgtgattgatcaatgcaaccatgacaatatactgaggtttggcatagcagttcttgggtacttaaacagaaacgcccttgatactaaaaatttaataaaagaaataaaagcaatcgctagtattccaacagaaagatactttttcaatgtgtctgatgaagcagctctactagaaaaggctgggacattaggagaacaaattttcagcattgaagatatggacctcggcgatgaggtctacaccgtcgggcgtccacatccgatgatcgacccaaccttacgcaaccagttaattgccgatctcggcgctaaaccgcaagtgcgcgtgttgctgcttgatgtcgtgattggcttcggtgcgaccgccgatcctgccgcctcgctggtgagcgcctggcaaaaagcctgtgccgcgcgtttagataatcaaccactgtatgccattgccacggtgacaggcactgaacgtgacccgcaatgccgctcgcagcaaatcgccacgctggaagatgcggggattgcggtcgtgagttcgctaccggaagccaccttgctggcggcagcgttaattcatccgctctcgcctgccgcacagcaacacacaccgtcattactggaaaacgtcgccgtgattaacatcggattacgcagctttgcgctggagctacaaagcgccagcaaaccggttgtgcattaccaatggtcgccagtcgccgggcagggaaaatggctggcgaatcctgagctgctggaagccgatgcagatgcggaatacgcggcagtgatcgacatcgatctggcggatattaaagagccaatcctgtgtgctccgaacgacccggatgacgcgcgtccgctgtctgcggtacagggtgagaagatcgacgaagtgtttatcggttcctgcatgaccaacatcggtcacttccgtgctgcgggtaaactgctggatgcgcataaaggtcagttgccgacccgcctgtgggtggcaccgccaacccgtatggacgccgcacagttgaccgaagaaggctactacagcgtcttcggtaagagtggtgcgcgcgtatcgagtatcccctgtgctgttccctgtgtatgggcgcgtgtggcggacggtgcaacggtggtttccacctctacccgtaacttcccgaaccgtctgggtactggcgcgaatgtcttcctggcttctgcggaactggcggctgttgcggcgctgattggcaaactgccgacgccggaagagtaccagacctacgtggcgcaggtagataaaacagccgttgatacttaccgttatctgaacttcaaccagctttctcagtacaccgagaaagccgatgggcttttgaagccccgtttccgcccgtggcagcggaaaattctcgacacattagcgacttatcatgagcaacatcgcgatgaacctggccctgggcgcgaacgtctgcgacgtatggcgttgccaatggaagatgaagcgctggtactgttgctgattgaaaagatgcgcgaaagcggcgacatccacagccatcacggctggctgcatctgccagatcacaaagcgggcttcagcgaagagcagcaggccatctggcaaaaagcagagccactgtttggtgacgaaccgtggtgggtgcgtgacctggcaaaagagacgggaaccgacgagcaggcaatgcgcctgactctacgccaggcggcgcagcaaggaataattaccgcgatcgttaaagatcgttattaccgtaacgatcggattgtcgagtttgccaatatgatccgcgatctcgatcaggagtgtggttcaacctgcgcggcggatttccgcgatcgcttaggcgtaggccgaaagctggcaattcagattctggaatattttgaccgcattggctttacgcgtcgtcgtggaaatgatcatttattgcgcgacgcattattatttccggaaaaataa

SEQ ID NO: 25576 - DNA, 1227 bp, Homo sapiens
  SIMILAR (199)..(741): 971254mologous to Escherichia coli K12 putative enzyme of polynucleotide modification,accession number AE000169,Smith- Waterman Score=911.
atgggcgtacttaataactggttgagcgaagaagaaagtctatggatccagtcgcgcattcatctacgggctctacgttattatagtaactggcggcaatactttgccggttatacctttggtcggcaatattggcagtctcccgaagatgatcatctgcctttattacgcgaattcttagcgcgatatgagcgacctatgaaaaattgctggaagatcctcgatatagaggaaacgactgacgtcgatattatccgccgcgcttatctggcgctgttaccgtcctttcatccagaaaccgatccgcaggattttaaacaacttcgtcaggcgtatgaggaggcgctacggattgcgcagtcgcctgctaaatctgtttggcaaccagaagaatatgaggtagcagaacatgaaattctgctcgcctttcgtgcgttacttgcctctgatagtgaacgttttctgccctccgcctggcagcgattcattcagcaattaaattattgctcgatggaggagattgatgaattacgctggtcgctgtgcacaatcgccatgaacactgcccatttatccttcgagtgcgtggtgttattagcagaaagattgcggtggttacaggaggaaaataccggggaaatagacgaagaagaactgggatcctttttatatgccattgcgaaggggaatgtttttaacttccagaccattctgcatctgcccgttgcccgccgtcccgacatctgcacccagcacaatgaccagagccggtgcgagggctaccagatcctgagcgacaaacgaggtcaccagcatggtggtggcattactgctctgtaccagtgcggtaacgccgatccccgcgcaaaaggcgagcggctttttttcgacgctccggctaaggacagtacgcaaacgcgcgccgaagacgcgcattacgccggttcgaacaatatgagtcccccagaccagcagggcgacggcagaaagcagatttgggaatcagtccgcgtccataccccagttcggtgccagcagcggtcacttccggtaacgtcataccttaacggcggggaaatcttcaacctgatcgggctgatttgtcgaacacggagaattgcggcccggtgggtgaagtcccaccggaaccgtgcccggagtttcgaatgcctcaagcgccatcgcttcgtggttgcctttaaccgacgtaaaccagggttggtttag

SEQ ID NO: 25577 - DNA, 2058 bp, Homo sapiens
  SIMILAR (1036)..(1461): 1001254mologous to Escherichia coli exu regulon repressor,accession number D13328,Smith-Waterman Score=761.
ctataccacgacctcaaaggccgacagcaggctcagaagacgctccagtgtggccagagtgcgttcaccgaagacgtgcgccacaaccgtcctccgtatcctgtcatacgcgtaaaacagccagcgctgacgtgatttagcaccgacgtagccccattgttgcagcgactcttcgccggtgacatacagcgtattcatctgctgggccagtttgcacagcgtttgcagtagcagcgtggatttccccgcaccagggttaccgccaatcagaatggcacttcctggcaccacgccgccgcctagtacgcggtcgaactctttaaatccggtggaaaaacgcggcagctcttcaaggctgatatcggagagtttctggacttttgccaccccggcgctaccggcatagccgctgagacgctcgttacgcgccaccattggcgacgcagcaagacgcacctcggtgatggtgttccaggcatgacaggcactgcactgcccccccatcaggtcagcgtgacggatggtgacttccgccttttcattcacttttggcttggcatggtaggcaatccccagccctgccgctttgatcatcggcaggtcattggctccatcgccaatcgccacggtctgcgccagcgggatttcatactcctgcgcgaggcgagtcagagttttcgctttgtactgcgcgtctacgatgtcgccgatcacattgccggtaaatttaccgtccatgatctccagttcattggctaccacggcggtcaggcgcagcttgtcgcgcataaaccgtgcaccagcggggggatccccagggtggacaaacctttttgcctgtttccggaaatgttgaaccatcgctaagccgttgtcgcattctggcagtgtcgactggtaggtccctggtatctggacctgaaagagcgcatcgaacagggcgtctatctggtgggtgataaactgcctgcagaacgctttattgccgatgaaaagaacgtcagccgtacggtagttcgtgaagccatcatcatgcagccgcgccatcagcaggcggctgacaataatatggaattcgccaattacggtccgtttgagttgcttcaggctcgccagctcatcgaaagtaatattgccgaattcgcggcaactcaggtaacgaaacaggacatcatgaaactgatggccattcaggaacaggcgcgcggcgaacaatgcttccgtgattccgagtgggatttgcagttccacattcaggtcgctctggcgacgcagaactccgccctggcggctatcgtggaaaaaatgtggacccagcgtagtcataacccgtactggaaaaaactgcacgaacacattgattcccgtaccgtcgataactggtgtgatgaccacgatcaaatcctcaaggcgctgattcgcaaagatcctcatgctgctaagctggcaatgtggcagcatcataccgtttactggatcaaacgccggacgcagcgtggcgagggcttccacggtggtttccgggcgaatcacttcgtcgtaattaaactgcttcaggacgccgtcggcatcgtgaccaccggtcgggatgatttcatttttaaatgcggccgactgcgtggcggcccaggcgcgggcgtgtgaccgcgcggcaaaggcatcctgcatttcacggctgataccgtgcatacgcgccagcatttctgccgttaagcccatcatgcccgccgctttggcgacattgcggctcaggccggggtgaaaatcgacgccgtgactcatcggcacatggcccatatgctccacgccgccaaccagacatgcctgcgcatcgccagtcatgatcattcgtgctgcgtcatgcagtgcctgcatggatgaaccacacaagcgattaacggtaaccgccgggacagagtgtggtacttctgccagcagcgccgcgttacgggcgatattaaaaccctgctccagcgtctgctcctccttcttcctcctccttcttcttcctcctcctcctccttcttcttcctcctcctccttcttcttcctgttcat

SEQ ID NO: 25578 - DNA, 3552 bp, Homo sapiens
  SIMILAR (2921)..(2541): 431254mologous to Salmonella typhimurium LT2 95 1040187392dentity with E. coli 3-ketoacyl-coenzyme A thiolase (FADA) (SW:P21151); contains similarity to Pfam family PF00108 (Thiolase), score=797.4, E=5.3e-236, N,accession number AF233324,Smith-Waterman Score=161.
atggcagacgtagacagagccaacgcactcgcgggcgtaatattcacagagacagttacaacagcagtacaacacacacatgaggcgacggaggctcacactcccacgcggggcgcaatcacaaccgccacagcaacacgcaaccacatctcaacgagcgcagcgccacataacaccaccgcccgcagacgagacccaggcaagacacgacagagtaggacagacgagcagcagcagagggcacacagaacgcaacaaccagtgggaccacacgtggacacacgaccgaggaccgcacacgcagaggccgccgaacatagatcccgggatagatacacccgacgctcacacggacggctccagggcgcacgcacaccgatagacacgacagacggctatccacgcgaagctcgcatccggaaaagtgcgaccacaagagcaccccaacaccgagatgtagacaccacacaaaccaccgaccagacggagaaccgtacagaagacacggcaatcccacgacagcgcacagaaaagcaccacaggggagcatacgacaacccgcatcgcacgacaagaagaccacgtgagttcgagaaacaagcagacaagcccaccagcgaggaaaacagaaagcgcggcaacagagaacccacaactggcagacaccgacatggacgcagcgacagcaaggagaaaacgaacacgacagaacaccacaccacaaggaacatacacagacaacaagaacaaacaacagaggctagacttaaggaccgccgaattaatggcgtgtcgatgcctaacttctggtggcgtaaatcctccgaagaggagcttacaacggtgtatacgccaaaatggttcggtataccaacaaccaccatacgacatgcgatgatggcatatacacttttagacttaccaatcagatttgtcacacccatatacttaacggataagatcctagcaaaaccccgcattcctttcgttcaccctctcccccacatggatacccgggcgaatgccgcccgtacgggctcggagccccatgtggcttggaccccaatttacagaataccaaacatagtccagcaaacagggctatccaagatagaatccggacagacttctacagttgaacttgatactggaaaccagcaaataacaacaaatgggagatacaagaaagaagcggtctaccttacagttgcacctataatttctccccttaaacgctacgagcaacatactgaattaagccgacacataaacgtagtgaatctgggggaccgtaaccgtagacagcaactgattctcgaccaaggcaaatcgtcccagaggaatatatacctgtcccacgttgcgcaaaaaataccgggtcgggctacatacgcgttaagccattccgttgacatgattacaattcagctcggtacccttttgcggtgcgctcctccccaccgcagaagatatgccggacgcttcttttgccggtcagcaggaaacttcctcaacgttcagggttttgacgccgttctcgtggcagtgaaacatgatttgcttctctgtttaacgatcgcgccatctcttatcgtgtgcaccaggttacgatcaccgtggtgtggcgctctccgccggtgttcaacggatggtcgctctgacctcgcatcatctggcgtgatgttctccattgataccgaatcggctttgaccaggtggtgtttatcacttccgcatggggccttgggtaagattatcgccgaaggcctgctatcggtcatcgcatcgaaagcatctgccatcgtcacaaccgtggcggtcgtacctgtcacgcggcgatcatcgctcgtgaactggcattccggcggtagtgggctgtggagatgcaacagaacggatgaaagagaccaacaagcatcacaaggtaccaccaggatgggccgaacacaacggaactacagccccaccagacaagccatacacaagaccggatcccccaccatggcaacaactagcaacacagaacagccaccccacgaaaaacccaacacactaacacaacacccgagaaacccagaccggaccatacacccaaaagcgacacacaatgaactaacacaagacacaccacaacgagacgcaaaacaaaacggcgaaaagacacaacggaaaaaaaattgccttagcgaattaaacgacgcagaagatcaggctgaacgtttccaggacaggttaatgctaaagctgcaggtgacgacgaagccatgttctatgacgagattacgtgactgcgctggaatatggtctgccgccaaccgctggtctggtattggtatcgaccgaatgattatgctgtttactaacagccatactatcgcgacgttattctcttcccggcgatgcgcccacagaaataaatttcacttaatgaacgaagcagtcaggcgactgcttcgttcatcgttccgcaaatcagttttgaggagagacgcttcgtttcacgataaccagcgggtccactcactacagctcctaaaagagagaaaaaaatctttaatacatggcaggatctgcgcggcaaaggcttcgttatttcaaacacgccgatatcgctggcagaaagccccgcttttttcagcgcagtttcgaggccggaaccgggccgtaacccataatcgatgggtcacaacaacgaccgccatcgaacgcacacgagcgcgcggcttaagacctaattctgggcgcggctttcactcatcaccagcatggcagctgcgccatcggaaatgcagaagatgtgcccgccgttaccataccgtttactggatcaaacgccgacgcagcgtggcgagggcttccacggtggtttccgggcgaatcacttctcgccggggtgaaaatcgacgccgtgactcatcggccattgcccatatgctccacgccgccaaacagacatgcctgcgcatcgccgtcatgatcattcgtgctgcgtcatgcagtgcctgcatggatgaaccaccaagcgatttaacggtaaccgccgggacagacgccgggttagcgccagcaggctacgcattaaatgagcggagagatcttctgcacgcacttacgaaaagcaccgcccttcgaacggcccatcggggtcccaaccggacgggctggctcaaccggaggatagtacggttcgttatgaccgctttattccgcagaccttccggcacttcatacagcgggccgaggtgcgatattgctgtgcctatccagaccttcgagctctgtacccatgtcaataataatgcatacacctgctatatggcccgctacaacgttcaacaggcgctgaatattgcccgccattcggctgtagcgacgatgcgtttatccatcgcgccgaaatgttcctcaagagctatggatgccagaaattcagcccgacggcgttttgccgcaggatattcgtttatggctaagccggcgattaatctggcgaaatacaaagcggcgcggggaagcaaaccatactgctggattattcacgcgcagaagtga

SEQ ID NO: 25579 - DNA, 1587 bp, Homo sapiens
  SIMILAR (1225)..(1296): 831254mologous to Volvox carteri f. nagariensis hydroxyproline-rich glycoprotein DZ-HRGP,accession number AJ242540,Smith-Waterman Score=134.
atgcctaaggcgcgccctgcctggcagcatcgagtctgcgccgacggcgcccccgccgcctccgagtggcgaaggcagccaggcatacatctcccgccttcctgcaaccctgattgtgcttatcctagaaaggagacagctgttgggggtgtggaggcgagctcggtgctgctcccttatcaacctcgcgcaccggaggcattgtgggatgcctacccgggaatccccgtgcgccatcctcgcgcggcgatacgaaggccgacgatcgccttccacagttgcgcagcccccccccccacccccccccatcgagctcgccccctcaacgtcggaaaccccgatacaggccacacgcggtgcacaccctgcgcagccgtcctcaggccacccgcgcggcacggcccccggaacgcccaccggtccccgaacagggcccaagcggtacacacccagacccgacgccacgggcccgacaaacgcgccacaacgcccctcggcaccactcgaacacgactaactgacccactaggcatatgcaccaattgccggatgcggcgtaaacgccttatccggcctacggttcggactatttgtaggcacgataagacgcgacagcgtcgcatcaggcatcatgcaccaattgccggatgcggcgtaaacgccttatccggcctacgccaaaatcgagcgggcataagagaacccggtgccgtccgcaatcaaaatcatcggacgctcttcatcatcgggcaggcaagcttctccgggggaatggcgacccgcattggaggtcttggagaatgggcccgaatggttccggaaagagaccacgtagagcagcagaaagaatttcgtgctgcagaaatgctcagggtaggactcacagtcaaaaggcgtatattcaacagcagccacaatgttgtgtcaatgttcacttgcaaccaccagatcaacacctgcacaacatcacaaacactgtcaccaccagattcacagcaccgccactaccagcatatccatccaccaacatccaacagcaccaccacccacatcatccccaatgtcgtcagcattgtgaagccccacccccaacactgtggagcaagacctggtcaaggcaaggaacgggacgaaacggaacggaaggacgcgaaggaacggaaccgaaggaccgccacaccgacgacacgtcatacggaccggctgccacgcacggcacacggaccgccgccgccccgccccccccccccccccccccccccccccccccccccccccccgcgacagcccacgccgaccacgacggagagagaagcccgaacagcagaaggagggagggcagacagggaggacacagcgcaaggagacggcgaggcgaggggaagagagggaaacaggaaggaagaagacgcgaggggcccccccaccgaggcccgccgcagcgagaaggccacacgagacggcggagacgaaaaggcggccgccagcgcgacagcaccggccgccgcgccgccgcccgagcgacggaacagagagaacaagacaccaactgggatttataatgctggggttattgagttggaatga

SEQ ID NO: 25580 - DNA, 1623 bp, Homo sapiens
  SIMILAR (110)..(1021): 961254mologous to Escherichia coli fatty acid oxidizing complex,accession number M59368,Smith-Waterman Score=1480.
  misc_feature (1)...(1623): n = a,t,c or g
ggaatccgttaaattcaccggacaatttaaggaagggacagtggaggtccacaatgtgtgtttgtgtcaatctcaagtagacatcgtgagttcggtgctcatgagagtttcggtgactgttctgatgcattcctgtactctccttcaagcactgcatgacgcagcacgaatgatcatgactggcgatgcgcaggcatgtctggttggcggcgtggagcatatgggccatgtgccgatgagtcacggcgtcgattttcaccccggcctgagccgcaatgtcgccaaagcggcgggcatgatgggcttaacggcagaaatgctggcgcgtatgcacggtatcagccgtgaaatgcaggatgcctttgccgcgcggtcacacgcccgcgcctgggccgccacgcagtcggccgcatttaaaaatgaaatcatcccgaccggtggtcacgatgccgacggcgtcctgaagcagtttaattacgacgaagtgattcgcccggaaaccaccgtggaagccctcgccacgctgcgtccggcgtttgatccagtaaacggtatggtaacggcgggcacatcttctgcactttccgatggcgcagctgccatgctggtgatgagtgaaagccgcgcccatgaattaggtcttaagccgcgcgctcgtgtgcgttcgatggcggtcgttggttgtgacccatcgattatgggttacggcccggttccggcctcgaaactggcgctgaaaaaagcggggctttctgccagcgaantcggcgtgtttgaaatgaacgaagcctttgccgcgcagatcctgccatgtattaaagatctgggactaattgagcagattgacgagaagatcaacctcaacggtggcgcgatcgcgctgggtcatccgctgggttgttccggtgcgcgtatcagcaccacgctgctgaatctgatggaacgcaaagacgttcagtttggtctggcgacgatgtgtatcggtctgggtcagggtattgcgacggtgtttgagcgggtttaaccacttgccggatgcggcgtgaacgccttatccggtctaccgatccggcaccaatgtaggcgtgggcgtacacacagagggttccagacccggatgtttctgtggggataaagcctttttgaaagcccctgattcgagccatatttctcaacccaggttcaatcactggttctttcccgaaagcctgtaagaaataacttcgttgttgaaagagatctataactggagacaaatacagcttgcgcccattgactgcaaattcagtaacatcggtaacccacttctcgtttggccgcgtagccttgaaatctctttggagaacattaggggcggtttgccctacctctcctctgtaagagcggtatcgcttgaccttaatcgctgctttaagtgagagggttcccatcaggcgctgaacagctttatggttaatctgtttcccttctcgatgaagagacagcgttaccctacggtatccgtatcggcctctattctcgtgataaatctcactaatacgctttttaacgtccgcatacttgtcaggcttgctgagagcctttagatgataataaaacgtactgcgcggtatctccgcagcc

SEQ ID NO: 25581 - DNA, 873 bp, Homo sapiens
  SIMILAR (873)..(73): 991254mologous to Escherichia coli No definition line found,accession number U00006,Smith-Waterman Score=1343.
gcggcgtctgggtcatagggccggatgcgactcttgacccgtctgatcgggactaccggattggcaatattaatactcgtcccgtccttcatcttcatccggctgttccagcacactgtaagccaccgaacaaaacagcgagttcaggcgctgcatatctcccagtaagcctaaatgtagcgaactggtttcaatgctctgcacgttttgctgatgcaggcgatcgacgtgggcgtgggaatagcggcgattaagaatgcgaaaacgatgtttgctgcgccgcaaacgacgagcgctggtgacatcgccagagaaaaaccccgacattgccagctttaaattactgagcaattgctcatagagcgcatccagttccttcaacccatcaagcgaaaatgcccgccgtgctgccagtgatttgtcagcaatttcgctgcccatgcgctcgacgatatcggaggcctgttcaaggttgagcgacatttcgatgatctctgcccagcggcgcgactcttcctccgccagctcttcttttggcatccgcgccagatacagcttaatggcggtgtagagaacgttgatatcatctgccagcttacgcagctctttctcctgccgtggctcaccgtgcatcactttattcaacccttccatcatctgttccatggcgtcgccaatgcgcagggtttcgcgcgcggcgttcgccagagcaagcgtgggcgtatccagcgcgctgacatccagatgtttaggccgtagctgggtatccagttccggttcatcgcgaataatcgttttgcaaaaccgtgccatcgggtcaacaaatggcagcatgaccaggcaacgtacaaggttgtagaagacgtggaaata

SEQ ID NO: 25582 - DNA, 4187 bp, Homo sapiens
  SIMILAR (338)..(901): 901254mologous to Escherichia coli probable riboflavin synthase beta chain,accession number U82664,Smith-Waterman Score= 816.
gggaaccccagggtttttccagtcaaggcgttgtaaacggccggccagtccaaacttgcatgcctccaggtcgcctaaaaagattcggttgtctgaataatcaactgggtaacagcaaattacagccatcgggtggaagcggggccaacgctcgttggcgcattgctgcaggcgggtttagtcgatgagctgattggctatatcgcacctaaactattaggcagcgacgcccgcggattatgcacgctgccagggcttgagaaattagccgacgccccccaatttaaattcaaagagatacgtcatgtaggcccggatgtttgcctgcatttagtgggtgcatgatctcccggctcgaaagggaagcagcgcacgaaatattatgctaaaatccgcccccctgcggggccatactcgaacccgaaggaagaaaatgaacattattgaagctaacgttgctaccccggacgctcgcgtcgccatcaccatcgcgcgtttcaacaactttatcaatgacagcctgctggaaggtgcaattgacgcactgaaacgtatcggtcaggtaaaagatgaaaacattaccgttgtttgggtgcctggtgcctatgagctgccgctggcggcgggtgcactggctaaaaccggtaaatacgacgcggggattgcgctgggtacgggtattcggggtggcactgcccactttgaatatgtcgctggtggggcaagcaacgggctggcgcatgttggccaggacagcgaaaattccggttgcttttggggttctgaccactgaaagcattgacaagcgatcgaacgtgctggcaccaaagttggcaacaaaggtgcagaagctgcactgaccgcgcttgaaatgattaatgtattgaaagccatcaaggcctgaaattagtaaggggaaatccgggaaacctgctgctcgtcgccgcgctcgtgagtgtgccgtccaggcgctctactcctggcagttgtcccagagcgacatcgctgatgttgaataccagtgcctggctgaacaggatgtaaaagacgttgacgtcctgtacttccgtgagctgctggccggggtggcgactaataccgcatgacctcgacggactgatgaagccatacctgtcccgcctgctggaagaactgggacaggtagaaaaagcagtactgcgcattgcgctgtacgaactgtctaaacgtagcgatgtgccatacaaagtggccattaacgaagcgatcgaactggcgaaatcgttcggcgcagaagacagccataagttcgtcagcggcgtactcgataaagcagcacctgtgattcgccctaacaaaaagtgatatccaggccggtagattcacggaagaccgttccatgatcgccggccttttcttttttcctgctgaggcataacgtatggcatgtggcgagttctccctgattgcccgttattttgaccgtgtaagaagttctcgtcttgatgtcgaactgggcatcggcgacgattgcgcacttctcaatatccccgagaaacagaccctggcgatcagcactgatacgctggtggcgggtaaccatttcctccctgatatcgatcctgctgatctggcttataaagcactggcggtgaacctaagcgatctggcagcgatgggggccgatccggcctggctgacgctggcattaaccttaccggacgtagacgaagcgtggcttgagtccttcagcgacagtttgtttgatcttctcaattattacgatatgcaactcattggcggcgataccacgcgtgggccattatcaatcccgctgggtatccacgggcgctctggggcgaaaccgggtgactggatctatgtgaccggtacacgggcgatagcgccgccgggctggcgattttgcaaaaccgtttgcaggttccgatgctaaagatgcggactacttgatcaaacgtcatctccgtccatcccgcgtattttacaggggcaggcactgcgcgatctggcaaattcagccacgatctctctgacggtttgatttccgatctcgggcatatcgtgaaagcccgcgactgcggcgcacgtattgacctggcattgctgccgttttctgtcttatgtggagtcatggtactttgacagaacgctttgttgattgggggaaagcctagctgaagtgatggtgcgtgggaaaatagggggaacacccggggggatgtgagtggtgcctgggccaacgtgcgtcctctcgtgaagggccagattgcccggcgaattgttgccacggggcgctcccagccgcggtggtccgacaccggtaaagcgcgaccccggccacacgcgagaaatgtggtcacagggtaagtatggcccacctggaggtagggaaacatgctgagactgtagagaagcctcagctgggaagggctggggggcagggagcctgctggccttctctccacgcccacgccctgcagcagatataggtccccacggctggttcccaatccttctgccagcctcctcccggaggaactgggaggcacatcatttctagtgggctcaggcctctgtggggcctgggaatctggggccctgcggggacctgcagcctccgtagatgcactgggggcagctgctgtgctgagttgttggtccagctgctctgtcttgaggatcaagggcctcctggagataccaggcagaggtcttgggttgggagggcggtgctcagaacttccttgcgcactggtacagagcagtaatgccaccaccatgctggtgacctctttgtcgctcaggatctggtagccctcgcaccggctcgcgactctgaccgccgcaggcatttctccttccccgtggcgctctgtctggtgattggtgctaacctcggttcggtctgctggcatgctcaacaacagtgccgccaatgccgcagcccgccggtcgcgctgggtagtctgctgtttaagctggtgggtagcctgattatccgccgtttgtccatttgcttgaacaggcctccgatatcgtcgagcgctgggcagcgaaattgctgacaaatcactggcagcacggcgggcattttccttgatgggttgaaggaactggatgcgctctatgagcaattgctcagtatttaaagctggcaatgtcggtgttcttctcagcgctgtcgtttgcgtcgcagcaaacatcgttttcgcattcttaatcgccgctatcccacgcccaggggatcctctagatcgacctacagcagcaagctgcggccgtgcaagggcaaccagccacttatgaacaatcacaacgagtagatgagtgaaaattacttccatttgctgaaagtcagtccaccgcatgtctgcctctgtactgccgtcgattattgtcagaccagacgcccgaaccagcccgaacaacagcccggatgtacgccgccccatggacggtggcttgtgtctggctcgcggttcatccgtctttacaggacccaggctgatcgatcgttcttccggaagactttgacgaatgattcgcccggaaaccaccgtggaagccctcgccacgctgcgtccggctttgatccagtaaacggtatggtaacggcgggcacatcttctgcactttcgatggcgcagctgccatgctggtgatgagtgaaagccgcgcccatgaataggtcttaagccgcgcgctcgtgtgcgttcgatggcggtcgttggttggacccatcgattatgggttacggcccggttccggcctcgaaactggcgcgaaaaaagcggggctttcacgctgctgaattgatggaacgcaaagacgttcagtttggtctggcgacgatgtgtatcggctgggtcagggtattgcgacggtgtttgagcgggtttaaccacttgccgatgcggcgtgaacgccttatccggtctaccgatccggcaccaatgtaggctgataagacgcgccagcgtcgcatcaggcatcatgcaccaattgccggatgcggcgtaaacgccttatccggcctacggttcggactatttgtaggcacgataagacgcgacagcgtcgcatcaggcatcatgcaccaattgccggatgcggcgtaaacgccttatccggcctacggttcggactatttgtaggcacgtaagacgcgacagcgtcgcatcgggcat

SEQ ID NO: 25583 - DNA, 4548 bp, Homo sapiens; identical to SEQ ID NO: 10615
  SIMILAR (745)..(3783): 741254mologous to Homo sapiens myosin X,accession number AF234532,Smith-Waterman Score=3777.

SEQ ID NO: 25584 - DNA, 738 bp, Homo sapiens
  SIMILAR (1)..(516): 981254mologous to Escherichia coli transketolase,accession number D12473,Smith-Waterman Score=859.
gtggaagcggcggtgggctggaagctggcggttgagcgccacaacggaccgacggcactgatcctctcaaggcagaatctggcccaggtggaacgtacgccggatcaggttaaagagattgctcgtggcggttatgtgctgaaagacagcggcggtaagccagatattattctgattgccaccggttcagagatggaaattaccctgcaagcggcagagaaattagcaggagaaggtcgcaatgtacgcgtagtttccctgccctcgaccgatattttcgacgcccaggatgaggaatatcgggagtcggtgttgccttctaacgttgcggctcgcgtggcggtggaagcaggtattgccgattactggtacaagtatgttggtctgaaaggggcaattgtcgggatgacgggttacggggaatctgctccggcggataagctgttcccgttctttggctttaccgccgagaatattgtggcaaaagcgcataaggtgctgggagtgaaagcgtcttatccggcctacatgtcccgccattttgttaaacgggtgatccacaacgtgggcccagcgtctggcccatgccagttatcgcaggggggtccgaggcgtaagcaccagggaaaagctgaacgtcaaaggccaggcgctggatgcacaacggtaatcgcgccttcggtaggacagtcccgcactccccagtgcgctcatccagactcgaccgacaagttatga

SEQ ID NO: 25585 - DNA, 627 bp, Homo sapiens
  SIMILAR (456)..(1): 1001254mologous to Homo sapiens myosin X,accession number AF132022,Smith-Waterman Score=784.
ctccacatcaaacagcgtcgagccatagccaggccactccttgatcaaggccatgtacttggccatggcctgttcctggttcattccctgaaatttcctccacttgtcaatgatactggctcgagcagaggagacttcttccttaatccacatgtccagcatctgctcctcctcgaccttctgccggaccacggatcctgtccggaagctccgcctcagggtcccctctaggaagctcgtccgcctcttctccagccgttcacaaggggtgaaggttttggttgactggctgatgcgggccttgagtctctgcagggaataaacctcttcgagaggtgggatggcagcgtgcagagtataatccccctgcagatactggagtcgcagggcagcaagaacctggaggttttcttccggggctggatggtggccatggataaccgcttcgtgggcctgaaaggagacagtcaacagctttccggtcaacgcattttcaaacttggctaagacatcagctacgacggttcgactttcaatggctttgtcgacgtggccgttgtattcaaacaaagcaaacatgttcctgctgtcctccatggccaggcctcggatcagcttctccaccac

SEQ ID NO: 25586 - DNA, 642 bp, Homo sapiens
  SIMILAR (160)..(483): 801254mologous to Escherichia coli soluble lytic transglycosylase,accession number M69185,Smith-Waterman Score=449.
atggcgcgcgtgcgcgagttgatgtactggaatctcgataataccgcgcgtagcgagtgggccaatctggtgaagagcaagtcaaaaacagagcaggctcaactggcgcggtatgctttcaacaaccaatggtgggatcttagcgttcaggcaacgatcgccgggaagctgtgggatcatctggaagagcgattcccgctggcttacaacgatcttttcaaacgctacacccagcgggggccggagatggcgcgcgtgcgcgagttgatgtactggaatctcgataataccgcgcgtagcgagtgggccaatctggtgaagagcaagtcaaaaacagagcaggctcaactggcgcggtatgctttcaacaaccaatggtgggatcttagcgttcaggcaacgatcgccgggaagctgtgggatcatctggaagagcgattcccgctggcttacaacgatcttttcaaacgctacaccagcgggacaaaaacagcatatccactcagttccacatttccatataaaggccaaggcatttattctcaggataattgtttcagcatcgcaaccgcatcagactccggcatcgcaaactgcacccggtgccgggcagccacatccagcgcaaaaaccttcgtgtag

SEQ ID NO: 25587 - DNA, 1247 bp, Homo sapiens
  SIMILAR (625)..(1245): 981254mologous to Escherichia coli soluble lytic transglycosylase,accession number M69185,Smith-Waterman Score=1033.
atgccgagtttgcctctgcgcgagtcggggttggcggcgcctgaacgagcacacctgaacgagggaggagaaggggttcttacccctgacgcaggtgcgcctgattcgcgaacgcgcgattactactggaactggtcagaagatgaaggctggcagtcacagtttgatcaaaaagatctgatcgaaaatgaacaaactctggatctgaaagcggacgaaaccggcaaggtcagttttccggtagagtggggcgcttatcgtctggaagtcaaagcgccgaatgaagcggtcagtagtgttcgtttctgggctggctatagctggcaggacaacagcgacggtagcggcgcagtgcgacccgaccgtgtcacgctgaaactggataaagccagttatcgccctggcgacaccattaagttgcatatcgccgcgccaacggcggctaaaggttatgcgatggtcgagtccagtgaagggccgctgtggtggcaagagattgatgttcgggctcaagggctggatctgacgattccggtcgataaaacctggaatcgtcatgatctgtatttaagtacgctggtggtacgtcctggcgataaaatctcgctccgcgacgccaaaacgcgcgcgggtaacacaggcctggtaacagtgctggcagcgcagatgcctgccgattaccagactatcgcctcggcaatcatttcactggcgaacaaccctaatacggtactgaccttcgcgcgtacaactggcgcgaccgattttacccgtcaaatggcggcggtggcgtttgccagtgtggcgcggcaggatgctgagaatgcacggctgatgatcccatcgcttgcccaggcgcagcagcttaatgaagatcagattcaggacgtgcgcgatatcgtcgcctggcgtttgatgggcaacgatgtcaccgacgagcaggcgaaatggcgcgatgacgccattatgcgctcgcaatctacttcgcttattgaacgccgtgtacgaatggcgcttggcaccggcgatcgtcgcggcctgaatacctggctggcgcgtctgcctatggaagcgaaagagaaagatgaatggcgttactggcaggcggatttattgctggaacgcggacgtgaagctgaagcaaaagagattttgcatcaactcatgcaacagcgtgggttctacccgatggttgcagcacaacgcatcggcgaagagtatgagctgaagattgataaagcgccgct

SEQ ID NO: 25588 - DNA, 2379 bp, Homo sapiens
  SIMILAR (1840)..(2313): 1001254mologous to Escherichia coli K12 putative oxidoreductase,accession number AE000373,Smith-Waterman Score=806.
  misc_feature (1)...(2379): n = a,t,c or g
atggcagaggtagaggagaagaagcagcggatcttccgcaagttcacctaccgcggtgtggacctgggccagctgctggacatgtcctttgagcagctgaggcagctgtacggcgcgcgccagctgcggcggctgaaccacggcctgtggcggaatgctgaggctcaagccgcattcgctgctgaggcgcctatgctaggccaagaaggaggcgccgaccatagagaagcaggaagtggtgaagacgcacctgcgggatatgatcatccctcccaagatggtgggcagcagggtgggcgtctacaacggcaagaccttcaaccaggtggagatcaagctggagatgatcggccacgacctgggcgagttctccatcacctacaagcccagcgaggcaaaaaaccaatgaatcaaccgttactttcggtcaataacctgacccacctttacgcgccgggcaaaggctttagcgatgtctcttttgatttatggccgggggaagtgctgggcattgtcggggaatccggctccgggaagaccacgctgctgaagtcgatctccgcgcgcctgacgccgcagcagggggaaattcactacgagaaccgttcgctgtatgcaatgagcgaggccgaccgccgtcgcctgctgcgtaccgaatggggcgtggtgcatcagcatccactcgacggcctgcgccgccaggtgtcggcaggcggcaatatcggcgagcggctgatggcgaccggggcacgtcattacggcgatattcgtgccaccgcgcagaagtggctggaagaggtggagattcccgccaaccggatcgacgacctgccgaccacctttttncgcgcgacccatacggtgaagatgttctctattcccggttatagcagtcctgggcaattgctggatccggaaacgaatatcaacattggcaccagttacctgcaatatgtttatcagcagtttggcaataatcgtattttctcctcagcagcttataacgccggaccagggcgggtcgctaccgctatcgtcctgacgctctacatcatttatatggtcggttttttcgctaccagtggcgagctgacatatgaagtctggatcggtttcttcgcctctgcgttcaccaaagtgttcaccctgctggcgctgttttctatcttgatccatgcctggatcggcatgtggcaggtgttgaccgactacgttaaaccgctggctttgcgcctgatgctgcaactggtgattgtcgttgcactggtggtttacgtgatttatggattcgttgtggtgtggggtatgcgcgcggcgctgcaaatttcccagagcggccagacctgtgcgctgctctctaaagtcttcccgacccgttcccataccgtttctgcgcaaggcggcattaccgttgcgctgggtaatacccatgaagataactgggaatggcatatgtacgacaccgtgaaagggtcggactatatcgatgctggccggaagcgccaggaggaaggtgactggaacagcggagtcggggatccgtccgacgcaggcgatcgcaagcaccagcttaaagcggctcaattgcggccagaagccataaaacagcgacgcatagccaatcgcctgaaacggcgcactcagttcccgcggcatttgaaggggtttgtgaacaccctaaagcccattcatgggggctgctcagttgggaccaaatgccctcaaatggcctccctcccagagggcctgcatcacccagtaaaacttgtgttcctggggaaaccagggtgcctcctcacagacaggcccctgaagggtcccaacacagccaagcctgtggcggtggatcttaatgccagcgccacagcgataaccagctacagcctctatggcggcagtatgatcctgctgttcctcgcttcgacgctctatcacgccattcctcatcaacgggcaaaaatgtggctgaagaaatttgaccattgcgctatttacctgttgattgccggaacctacacgccgtttttgctggtggggctggattctccgttagcgcgcgggttgatgattgttatctggagcctggcattgctgggtattctgtttaaactgaccatcgcgcaccgattcaaaattttatctctggtgacctatctggcgatgggctggctgtcgctggtggtaatttatgaaatggcagttaagctcgcggcgggcagcgttaccttactggcggtaggcggcgtggtttattcgctcggggtgattttctacgtctgcaaacgcattccatacaaccatgccatctggcacacagttaccgccgagcacgaagattatcgaaatgctattttttatctatttgatttttatgattaa

SEQ ID NO: 25589 - DNA, 1260 bp, Homo sapiens
  SIMILAR (1)..(552): 991254mologous to Escherichia coli K12 IS5 transposase,accession number AE000234,Smith-Waterman Score=947.
atgactcaaggcaccttggtcgatgccaccatcattgaggcacccagctctaccaagaacaaagagcagcaacgcgatccggagatgcatcagaccaagaaaggcaatcagtggcactttggcatgaaggcccacattggtgtcgatgccaagagtggcctgacccacagcctggtcaccaccgcggccaacgagcatgacctcaatcagctgggtaatctgcttcatggagagaagcaatttgtctcagccgatgccggctaccaaggagcgccacagcgcgaggagctggccgaggtggatgtggactggctgatcgccgagcgtcccggcaaggtaaaaaccttgaagcagaatccgcgcaagaacaaaacggccatcaacatcgaatacatgaaagccagcatccgtgccagggtggagcacccgtttcgcatcatcaagcggcagttcggcttcgtgaaagccagatacaaggggctgctgaaaaacgataaccaactggcgatgttattcaccctggccaacctgtttcgggtggaccaaatgatacccgtctataccgacctgcttgttaactacacgtaccgcatcgcttttgaagccgccgggggtcaggacttcggtctgctggcagcaattgccacgctgatcttcctgctggtggcgattatgttcccgctgctgatggtcgtcgctatctcgctgcgtcagggaaactttgcgaccggcagcctgatcccggagcaaatctcctgggatcactggacactggcgttaggttttagcgttgaacaggctgatggtcgcattacgccaccgccattcccggtactgctgtggctgtggaactcggtaaaggtcgccgggatttccgcgattggcattgtggcgctctccaccacctgcgcctacgctgtcgcccgtatgcgcttcccaggcaaagcgacgctgctgaaaggaatgctgatttcccagatgtccccggcagcactctcactggtcgcgtcgtatgcgttgtttgatcgtctggcgcgcgtggtgtccatgccgtctaccgacgcatttgacaagcaggatgctgcttaccgtgaatccgtactgccgaaagcggttactgcacgcgttgctgtagaagcgggtattgctgactactggtacaagtatgttggcctgaacggtgctatcgtcgagctgctgtttgaagagttcggcttcactgttgataacgttgttgcgaaagcaaaagaactgctgtaa

SEQ ID NO: 25590 - DNA, 3067 bp, Homo sapiens
  SIMILAR (1426)..(809): 971254mologous to Escherichia coli transketolase,accession number D12473,Smith-Waterman Score=1028.
cactgcaaccagcatcattaacagacgcgaacgttcgacgctgacgcccagcgcacacgcggtatcatcgcccatttccagcaagcgcatccggcgtaccagtaaggcggcggcaatgagcatcaatataatgatgggtgcggaaggcgaggtttttgcccacgtcaggccgttgagcgatccggcattccacaaacctgctgttagcgccgtttctaaagacgctttcagcaacagccaggtattaaaggccaccagcatggcgcgaacgccgataccgataataatcaaccgaaaggtgtcgatgccgttgcgccaggcgagcagccagaccagcagcgaagtgacaatgccgcccaccattgctgacagcgcgatagccgtcaggtcctgaccaaacagcaccatcgccaccagcacgccgctccacgccccggtgttaaagcccattacgtcagggctgccgagcgggttacgcatcagcgactgaaaaatagcgccactgacgcccagtcgtgcgccaatcaacagcgccatcagcacgcgtggtaaacgccattcggtgaccaccatcgtcatactgcgcggcgcatcgcccatcagcgcggcgaatacctgcgaggtttccagcgtgacggcaccgctgcgtaatccccagataccagcagcaaacaggtgatgagtaatcggcgagagacgtaaatcatgcaccacctcgcgttttacgtcgcaagccgcaacgttagaaggcaacaccgactcccgatattcctcatcctgggcgtcgaaaatatcgctcgaggccaggggaaactacgcgtacattgcgaccttctcctgctaatttctctgccgcttgcagggtaatttccatctctgaaccggtggcaatcagaataatatctggcttaccgccgctgtctttcagcacataaccgccacgagcaatctctttaacctgatccggcgtacgttccacctgggccagattctgccttgagaggatcagtgccgtcggtccgttgtggcgctcaaccgccagcttccagcccaccgccgcttccacctgatcgcacggtcgccaggtgctgaaatttggcgttaagcgcaggctggccagttgctcaacagcctggtgcgtcggaccatcttcgcccaggccaattgagtcgtgggtataaaccataatctgccgcgctttcatcagtgccgccatccgcgcggcgttacgggcgtattcaacaaacatcaggaacgtcgcggtatacggcacaaagccgccgtggtgcgcgatgccgttggcgatacgggtcatgccaaattcacgcaccccgtagtgaatgtagttgcccgctggatcttccttcagcgaaacagaacctttccagatggtcaggttgctgggagctgctttattcggcgaaccaaagccaatcaccgtacggcagataatcagcgacggcttatctttcacgctttgcgcttcaaggatcgcttccttcaccgcctgcggatcgtgaccgtcgatttcatggatcacatgccagtgataggcttcaaaacgttttgccgtatcgtcggtaaaccagccttctgtttcaccgtcgatggaaataccgttgtgatcgtaaaaaccaatcagcttgcccagtcccagcgtgcctgccagcgaacagacttcgtgggaaataccttccatcaggcagccgtcgcccataaacacataggtgaagtgatcgacgatctcatggtctggctggttaaactgcgccgccagtgtacgctctgctatcgccagcccgacggcgttcgccaaaccttgtccaagcgggccggtggtggtttcaacgcctggcgtatagccaatctccgggtggcctggggttttcgaatgcaactgacggaagttcttcagttcttccagcggcaggtcgtaaccggtcagatgtagcaaactgtagagcagcatcgacgcgtgaccgttggaaagaataaagcggtcgcgatcataccaggttgggtcggtagggttatgtttaagaaaatcgttccacagcacttcggcaatatcagccatgcccatcggcgcgccgggatgaccagagttggctttttgtaccgcatccatactgagtgcgcgaatcgcattggcaaggtcttttcgggacatataacactccgtggctggtttatagtttggcggcaagaagatcttccagtttgcgttgatcaacggcgaacagacgaatgccactggcgaaactttttcctgcagctccttcagtaaattcggtgcgatagtcagtcgatcgcagccggttaaagcgaggatttgttcggtgcgacggaagctcgcgcccatcacaaatggttcatagtggtgttgcgatttacgcccgatttcgccggaagaccaagggttcctgtccaacgttaatcggggcagggtgagtcgaccccttgaaataccaccctttaatgtttgatgttctaacgttgacccgtaatccgggttgcggacagtgtctggtgggtagtttgactggggcggtctcctcctaaagagtaacggaggagcacgaaggttggctaatccgcccaagagttcatatcgacggcggtgtttggcacctcgatgtcggctcatcacatcctggggctgaagtaggtcccaagggtatggctgttcgccatttaaagtggtacgcgagctgggtttagaacgtcgtgagacagttcggtccctatctgccgtgggcgctggagaactgaggggggctgctcctgaccccatgccgaactcagaagtgaaacgccgtagcgccgatggtagtgtggggtctccccatgcgagagtagggaactgcgataaaaatgccctcgtacgctctgatttaggatgcgcaaaaaattcatcaggtgcagcttgctccactatttccccacgatccataaaaattacccggtcagcgacggttcgtgcaaaccccatctcatgtgttacacacaacattgtcatacccgactgcgccagcccaatcatcgtatccagcacctctttcaccat

SEQ ID NO: 25591 - DNA, 4275 bp, Homo sapiens
  SIMILAR (2157)..(1354): 981254mologous to Escherichia coli transketolase,accession number D12473,Smith-Waterman Score=1353.
atggtggcgatcttactcgccgggattatcggttatcgcgccctgcccgtttcggcgctgccggaagtggactatccgaccattcaggtggtcacgctctacccaggtgccagcccggatgtcatgacctctgccgttaccgcgccgctagaacgccagttcgggcagatgtctggcctgaaacagatgtcgtcgcaaagttccggcggtgcgtcagttatcactttgcagttccagctaacattaccgctcgatgtcgccgagcaggaagtgcaggccgcgattaacgctgcgaccaacttgttgccgagcgatctgcctaacccgccggtttacagcaaagtgaacccggcagatccgccgatcatgacgctcgccgtcacctcaaccgccatgccgatgacgcaagtggaagatatggtggaaacccgcgtcgcgcagaaaatctcgcagatttccggcgtcggcctggtgacgctttccggcggtcagcgtccggctgttcgcgtcaaacttaacgctcaggcgattgccgccctcggcctgaccagcgaaaccgtgcgcaccgccattaccggcgctaacgttaactcggcaaaaggtagcctcgacggcccttcccgtgcggtcacgctttccgcgaacgaccagatgccgctcggtaccaacgtgtactgctggcgtcgactgacgcccaccaacgcgaatatcctgtaccgccatcaggaacagattcgcccccggttctttcgccagttttacgcgcagacggtcgataatttgctgcgccgtttcgctgcgttcgtcgcgtggcttgagggtgataaacatcatcccgctgttcactcgcgaaccgcctgtaaagccggtgacattatccactgccggatcgtcacggataattttcatgaaatcctgcaacttaccgcgcatcgcctgaaacgaaatactctgatccgcctgaatcccgcccatcaacacgccagtgtcctgctccgggaagaaggttttcgggatcgagatatacagccagatattcagcgcaatggtgccaagcagcaccacgcccaccagacggcatccagccacacatcattggcgttaatgtcagagaaaccagcaacgatataccaatggcgacagaaagcgtcacggcaaattcgcgtaacagtcggcccggcaatccgcccatcaacagcagcggcaggaacaccgccaccaagcttggtagcagaggctgcaaaacgattgcaacctacacaagagaggcacattcattacaaccaaatggactgtgggggctccaatgagaagcctgtgccacaagttttatttctggcaggagaggctccagagcaccttatgcgcttttgccacaatattctcggcggtaaagccaaagaacgggaacagcttatccgccggagcagattccccgtaacccgtcatcccgacaattgcccctttcagaccaacatacttgtaccagtaatcggcaatacctgcttccaccgccacgcgagccgcaacgttagaaggcaacaccgactcccgatattcctcatcctgggcgtcgaaaatatcggtcgagggcagggaaactacgcgtacattgcgaccttctcctgctaatttctctgccgcttgcagggtaatttccatctctgaaccggtggcaatcagaataatatctggcttaccgccgctgtctttcagcacataaccgccacgagcaatctctttaacctgatccggcgtacgttccacctgggccagattctgccttgagaggatcagtgccgtcggtccgttgtggcgctcaaccgccagcttccagcccaccgccgcttccacctgatcgcacggtcgccaggtgctgaaatttggcgttaagcgcaggctggccagttgctcaacagcctggtgcgtcggaccatcttcgcccaggccaattgagtcgtgggtataaaccataatctgccgcgctttcatcagtgccgccatccgcgcggcgttacgggcgtattcaacaaacatcaggaacgtcgcggtatacggcacaaagccgccgtggtgcgcgatgccgttggcgatagcggtcatgccagattcacgcaccccgtagtgaatgtagtttgccgctggattatcgaccaggccgcgcacgaaggcacgctgcatcactaaaacaatcaccaccggagggataagcgttaacaacatcgccaccatcactgagttccattccgtggtgccttcgcctgtagcgatcatccctttgatccctgccacggtggtgccgagatccacatcggtaataatcaacaacggccacaaatactgattccagccgtagataaaggtgatcacaaacagcgccgccagattagttttggagagcggaaaaacgatgtcgcaaaagaagcgcattggcgatgcgccgtcgatccgcgcggcttccaccagctcatccggcagcgtcataaagaactggcggaacaggaaagtagcggtcgccgaggccatcagcggcagcgttaaaccggcgtagctgtcgagcatctgcaggttggcgatgacttccaccgtcgggaagatacgtacttcaaccggcagcatcagggtgataaaaatcatccagaagaagaggttacgtagcggaaaacgaaaccagacaatggcaaatgccgagagcatcgagacggtaattttgccgagcgtaatgctgaacgccatcacaaagctgttaagcaacatccgccagaacggcgcgctatacgtgcctaccccgttcaccccagatgttgtggatgtttccagcagatgtgtgcggggataagcgcatcggggcggatagacgccactggcaagccttttttgtaccaggcgttttcttcccatcgccaccccaatatgattcatcgcggcaataacagctaaatcagaacgatcaaagccaattccagaagatgtcggcaaattaaccgcataatgttgcgcccaactatgccattcatccgtaccggagtcgttgctccatgcctgtctgtcatggagcaacgtacagtgacacaggttaattaccgtgtcggttaaagcatgtctttgagcgtattccgggctacatactggcaggatttcttcatccatcagaaagtgatgagtgagttgcgctgacggcgcatcatcaaagtagatcgccaaatcgattccggcacgtagcagattgacgttgtcattaccagtgagcacggtgagcgaaatagaccggataccggcgtgtaccgtcacctggtggcgacactggcaaaattgttgccgctgggtctgtttgttgtgctggcgatgatgatgttcaaactggataccttcaagctcgacttcaccggacttgcacttggcgtacccgtttgggaacaggtgaaaaacaccatgctgatcaccctgtgggttttcattggtgtggaaggtgccgtggttgtttctgcgcgtgcgcgtaataaacgtgatgttggcaaagcgacactgctggcggttctctccgctctgggcgtttacttgctggtaacgctgctttcgggatcgatcaacgctgctacatccttgaatgattggtccatactgatggggtttggtaatgaacggacggtagcgaaggaggcggatggatgatgactgctgttcatgacttaggtcctcgtagacctggccatcgagcagttgtttacctgaagacgtttgtacataaggcaataatggcaggctcatttccccatccctcgttaccgcaagaatggtttcatcgttatcctgcaagctatattcttcagcccactgcaggaccttgcgagccttgaaccttttttcacactcggcgctttcaaatttatccatgccattgccgacccattctggctcatccatttccgcatcatcgtaaatgctatccagccattgccggtaagcatcagggaaaaataaggatgctccattaagctcctcaatatgttgctgcgtccgccacatgactctaacgttgctataaatatgctcatgtcgtccgtaaccctcgccatcaggcagcaaaatggtggcaacaggaatctcaaaaccagcgggacgatatttgcgatgatggcgatgtaaacggcccaatcgttggaaaagcaaatctgcaggacaatgctgagtaattaaccaatcaaaatcaacgtcgagtgattgttccacgaactgggttgcgacaagtatccgtccaacatttcgcttccccat

SEQ ID NO: 25592 - DNA, 8714 bp, Homo sapiens
  SIMILAR (1033)..(4251): 941254mologous to Homo sapiens myosin X,accession number AF234532,Smith-Waterman Score=5276.
atgcctgagcctcccacccactccatgggctcctgtgcggccggagcctccctgacgagcaccgccccctgctccacggcgcccagtcccatcgaccacctaagggctaaggaatgcgagcgcacggcgcaggactggcaggcagctccacctgcagccctggtgcgggatccactagctgctctggtgaggacgtggagaacctttatgtctagctcaaggattgtaaatacaccaatcggcaccctgtgtttagctcaaggtttccagtggttcagcgtgctgagtcaggtccacgcgtccacggaccaggagatccaggagatgcatgatgagcaggcaaacccacagaatgctgtgggcaccttggatgtggggctgattgattctgtgtgtgcctctgacagccctgatagacccaactcgtttgtgatcatcacggccaaccgggtgctgcactgcaacgccgacacgccggaggagatgcaccactggataaccctgctgcagaggtccaaaggggacaccagagtggagggccaggaattcatcgtgagaggatggttgcacaaagaggtgaagaacagtccaaagatgtcttcactgaaactgaagaaacggtggtttgtactcacccacattcctggattactacaagagttcagagaagacgcgctcaactggggacctgatgagaagatattcaaagagacagaactggtgaatgatatggacaagattaatggaaggatagagagggcagaagcatcaacttgcgagttaggacttcttagaattatccaggttgtcagcccctttcactcctctgtgcatttgtttacaaatgtgggtcctcaggtccggaaccgcattgctgcttgcgagagggctggaatgatggaatacagaagtgcttccctctctctgctgaatgcctcggtggctgaaggatatgtacgggaagaaaaggaaattgcagccgaaaagaaaaccaccaatggaaatccagatctaccccctcgtgattgtgatcgcaggatgccagaccagtttgaccaggcggttgtgctgaaccagctgcggtactcagggatgctggagactgtgagaatccgcaaagctgggtataaagtgctgatgaggaatctggctctgcctgaggacgtccgagggaagtgcacgagcctgctgcagctctatgatgcctccaacagcgagtggcagctggggaagaccaaggtctttcttcgagaatccttggaacagaaactggagaagcggagggaagaggaagtgagccacgcggccatggtgattcgggcccatgtcttgggcttcttagcacgaaaacaatacagaaaggtcctttattgtgtggtgataatacagaagaattacagagcattccttctgaggaggagatttttgcacctgaaaaaggcagccatagttttccagaagcaactcagaggtcagattgctcggagagtttacagacaattgctggcagagaaaagggagcaagaagaaaagaagaaacaggaagaggaagaaaagaagaaacgggaggaagaagaaagagaaagagagagagagcgaagagaagccgagctccgcgcccagcaggaagaagaaacgaggaagcagcaagaactcgaagccttgcagaagagccagaaggaagctgaactgacccgtgaactggagaaacagaaggaaaataagcaggtggaagagatcctccgtctggagaaagaaatcgaggacctgcagcgcatgaaggagcagcaggagctgtcgctgaccgaggcttccctgcagaagctgcaggagcggcgggaccaggagctccgcaggctggaggaggaagcgtgcagggcggcccaggagttcctcgagtccctcaatttcgacgagatcgacgagtgtgtccggaatatcgagcggtccctgtcggtgggaagcgaattttccagcgagctggctgagagcgcatgcgaggagaagcccaacttcacactttccaagcccagaccccctaaccgcaagaggcaggaggtcgatgagggcttcgaagccgacgacgacgccttcaaggactcccccaaccccagcgagcacggccactcagaccagcgaacaagtggcatccggaccagcgatgactcttcagaggaggacccatacatgaacgacacggtggtgcccaccagccccagtgcggacagcacggtgctgctcgccccatcagtgcaggactccgggagcctacacaactcctccagcggcgagtccacctactgcatgccccagaacgctggggacttgccctccccagacggcgactacgactacgaccaggatgactatgaggacggtgccatcacttccggcagcagcgtgaccttctccaactcctacggcagccagtggtcccccgactaccgctgctctgtggggacctacaacagctcgggtgcctaccggttcagctctgagggggcgcagtcctcgtttgaagatagtgaagaggactttgattccaggtttgatacagatgatgagctttcataccggcgtgactctgtgtacagctgtgtcactctgccgtatttccacagctttctgtacatgaaaggtggcctgatgaactcttggaaacgccgctggtgcgtcctcaaggatgaaaccttcttgtggttccgctccaagcaggaggccctcaagcaaggctggctccacaaaaaaggggggggctcctccacgctgtccaggagaaattggaagaagcgctggtttgtcctccgccagtccaagctgatgtactttgaaaacgacagcgaggagaagctcaagggcaccgtagaagtgcgaacggcaaaagagatcatagataacaccaccaaggagaatgggatcgacatcattatggccgataggactttccacctgattgcagagtccccagaagatgccagccagtggttcagcgtgctgagtcaggtccacgcgtccacggaccaggagatccaggagatgcatgatgagcaggcaaacccacagaatgctgtgggcaccttggatgtggggctgattgattctgtgtgtgcctctgacagccctgatagacccaactcgtttgtgatcatcacggccaaccgggtgctgcactgcaacgccgacacgccggaggagatgcaccactggataaccctgctgcagaggtccaaaggggacaccagagtggagggccaggaattcatcgtgagaggatggttgcacaaagaggtgaagaacagtccaaagatgtcttcacttgaaactgaagaaacggtggtttgtactcacccacaattccctggattactacaagagttcagagaagaaccgccgctcaaactgggggaccctggtcctccaacagcctctgctctggtcgtccccccagatgagaagatattcaaagagacaggctactggaacgtcaccgtgtacgggcgcaagcactgttaccggctctacaccaagctgctcaacgaggccacccggtggtccagtgccattcaaaacgtgactgacaccaaggccccgatcgacacccccacccagcagctgattcaagatatcaaggagaactgcctgaactcggatgtggtggaacagatttacaagcggaacccgatccttcgatacacccatcaccccttgcactccccgctcctgccccttccgtatggggacataaatctcaacttgctcaaagacaaaggctataccacccttcaggatgaggccatcaagatattcaattccctgcagcaactggagtccatgtctgacccaattccaataatccaggtcatcctacagacagggcatgacctgcgacctctgcgggacgagctgtactgccagcttatcaaacagaccaacaaagtgccccaccccggcagtgtgggcaacctgtacagctggcagatcctgacatgcctgagctgcaccttcctgccgagtcgagggattctcaagtatctcaagttccatctgaaaaggatacgggaacagtttccaggaaccgagatggaaaaatacgctctcttcacttacgaatctcttaagaaaaccaaatgccgagagtttgtgccttcccgagatgaaatagaagctctgatccacaggcaggaaatgacatccacggtctattgccatggcggcggctcctgcaagatcaccatcaactcccacaccacctgctggggaggtggtggagaagctgatccgaggcctgcccatggaggacagcaggaacatgtttgctttgtttgaatacaacggccacgtcgacaaagccattgaaagtcgaaccgtcgtagcgtgatgtcttagccaagtttgaaaagctggctgccacatccgaggttggggacctgccatggaaattctacttcaaactttactgcttcctggacacagacaacgtgccaaaagacagtgtggagtttgcatttatgtttgaacaggcccacgaagcggttatccatggccaccatccagccccggaagaaaacctccaggttcttgctgccctgcgactccagtatctgcagggggattatactctgcacgctgccatcccacctctcgaagaggtttattccctgcagagactcaaggcccgcatcagccagtcaaccaaaaccttcaccccttgtgaacggctggagaagaggcggacgagcttcctagaggggaccctgaggcggagcttccggacaggatccgtggtccggcagaaggtcgaggaggagcagatgctggacatgtggattaaggaagaagtctcctctgctcgagccagtatcattgacaagtggaggaaatttcagggaatgaaccaggaacaggccatggccaagtacatggccttgatcaaggagtggcctggctatggctcgacgctgtttgatgtggaggtgagaactggctgccatgtgttggggtgggctgggtgctggcatctgagaacatggatcacggccaagttcatgtggagagaagacaagatggagcattttgctctctcaacctctttttttcgagcccccaaaattgtaccattaacgcctcccttctcctcacagtttctcttctcctgtgtagtaaatgcatctgtaatattaggaatgaatgcaaaattaagatgtcatctattcttctacccttccttagggaagctatagatctaattttttaaacactgataaaaatctacatttaaaaaaatgttatagctgtatatacaaattagaaactttggatatacttgcattttactttgttttttctttacagccatctgtttgaaaggaagaatgtctatctcgtaatggaatttagccattggcatcaacccagtactgatttttgttttgttttaagtagaccgcttattgaaaagaaatcttactaattgtctagatgagagtttggcaaactggtctgtgggtcagatcttgcctgcctcctttttttctaaacaaagttttattggaacacagccaagctcattcctttagatatattccctggctgtttttgtacagagttgagtagttgtgacagagaccatgtgatccacaaagtctaaaaatctttactatgcagcccttaacagataagtgtgccagctcatcgtctagattagcttccattttttatgatcacagtaattcagcgtatatctgatgactttatattgaggctgtataaaattctaaatattataaattctagaatccgtgggtggcttttcattaggtgatgtttttgattggtttggttggttcaattatgcctgtttttaagtataaaaaaatcaggtgctttgtacaaagccataattccatttctccctgacaaggaatagataatagcagttaaactcttggcttcctgcaaaacgtgagctgtgaattagcatagaaagctactggcttggccgggcgcggtggctcatgcctgtaatcccagcgctttgggaggccaaggcgggcggatcatgaggtcaggagatcgagaccatcctggctaacacggtgaaaccccatctctgcaaaaaattagctgggcgtggtggcatgcacctgtaatcccagctactcgagaggctgagacaggagaatcgcttgaactcaggaggtggaggttgcagtgagccaggatcacgccactgcactccagcctgggcgacagagtgagactccgtcaaaaaaaaaaagaaaaaaagaaagctactggcttttgcatggaggatgcagagaatgtctggttattagggatataaactagagactcttttcagcgtctccaatttatagccctcctgcttgtccaggtttggatcagccctgtgttgttagccccttcatatggggtcttattttcttccaccaatctgtacaggaaagtctacagttaaactggtaaagtccctgttcccactctgcatatggaaggccattgctgctccttgtgaagaggagccagaactgctcagcatgcgtgatttggagaattttcctctgtgatcctagattttgtatttgaagactaaccatccgcaaagaggattggaggcagaactggagatattaatacaagagtagacttggcttgggttgcagggaagctttcttaagtcccccggccaagcatgtacgtttccaggccacttccacgtagctaatccaaacagctagtagaataatgctgagaagtggagagtcaaagcaagatgttagactctgccagttagtgaggttttcccaaaagcgtgagattaactagttagaaatcaagatagccagagaggtgccatttttcatatttcaggcccctccatgcatgcatgcacatcgaatatatttaatcttctgcacagaggacttcactcaaagcctgtcttatggtttagatgctttctgttgccaaccacttcatgacttaactcttctgttgactcttgcccaccagtgcaaggaaggtggcttccctcaggaactctggttgggtgtcagcgcggacgccgtctccgtctacaagcgtggagagggaagaccactggaagtcttccagtatgaacacatcctctcttttggggcacccctggcgaatacgtataagatcgtggtcgatgagagggagctgctctttgaaaccagtgaggtggtggatgtggccaagctcatgaaagcctacatcagcatgatcgtgaagaagcgctacagcacgacacgctccgccagcagccagggcagctccaggtgaaggcgggacagagcccacctgtctttgctacctgaacgcaccaccctctggcctaggctggctccagtgtgccatgcccagccaaaacaaacacagagctgcccaggctttctggaagcttctggtctgagggaggtgtctccgaggatccttttgcctgccgccttcattgatcctgtattaagctgtcaactttaacagtctgcacagtttccaaagctttactactcttagaggacacatgccttaaaaaaggaggggaggaaccacgctgccaccaaagcagccggaagtgccttaacttgtggaaccaacactaatcgaccgtaactgtgctactgaagggaactgcctttcccccttctgggggagacttaacagagcgtggaaggggggcattctctgtcaatgatgcactaacctcccaacctgatttccccgaatctgagggaaggtgagggagtgggaagggggatggagagctcgaggggacagtgtgtttgagctggagtgctgcgggcagcctttctcatggaatgacatgaatcaacttttttctttgtttcatcttttaagtgtacgtgcttgcctgttcgtgcatgtgttcataaactcaacaccttaatcatggtttcatgagcattaaaaagcaaagggaaaaaggatgtgtaatggtgtacacagtctgtatattttaataatgcagagctatagtctcaattgttactttataaggtggttttattaacaaacccaaatcctggattttcctgtctttgctgtattttgaaaaacacgtgttgactccattgttttacatgtagcaaagtctgccatctgtgtctgctgtattataaacagataagcagcctacaagataactgtatttataaaccactcttcaacagctggctccagtgctggttttagaacaagaatgaagtcattttggagtctttcatgtctaaaagatttaagttaaaaacaaagtgttacttggaaggttagcttctatcattctggatagattacagatataataaccatgttgactatgggggagagacgctgcattccagaaacgtcttaacacttgagtgaatcttcaaaggaccctgacattaaatgctgaggctttaatacacacatattttatcccaagtttataatggtggtctgaacaaggcacctgtaaataaatcagcatttatgaccagaagaaaaataatctggtcttggactttttatttttatatggaaaagttttaaggacttgggccaactaagtctacccacacgaaaaaagaaatttgccttgtccctttgtgtacaaccatgcaaaactgtttgttggctcacagaagttctgacaataaaagatactagct

SEQ ID NO: 25593 - DNA, 3061 bp, Homo sapiens
  SIMILAR (1839)..(2300): 831254mologous to Escherichia coli K12 soluble lytic murein transglycosylase,accession number AE000509,Smith-Waterman Score= 661.
atggcaggacttgggatgggagaggaagggattcctggtggagagcgctgggagcacaagcgcagggcacacatcgtgagcaatcacagaattacgcgtacgggcacacacccatacacgcacagtccatacccgcacaaagacaacgttcacacagcccgcagggagcacaagacacaggatttaggcacaatacgttccgtgggacacagttcagaacacacccagcatacaaccccagacaccgttccgccgctggtggttatagtatgccgcgtttgttaccgccccccgcacggggagacccgcgccgagtacacccggcaccgcgggcagaacaggaggaccaaattctgggtcggcatcaaggaggaaaagaacctggcgcagcaggaacgaactgaagagcaactggcaaacatcgcgcgcggtggttatgtgctgaaagactgcgccggtcagccggaactgattttcatcgctaccggttcagaagttgaactggctgttgctgcctacgaaaaactgactgccgaaggcgtgaaagcgcgcgtggtgtccatgccgtctaccgacgcatttgcgcaagaagtatgttgctttacagggaatccgtacggccgaaagcggttactgcacgcgttgctgtagaagcgggtattgctgactactggtacaagtatgttggcctgaacggtgctatcgtcggtatgaccaccttcggtgaatctgctccggcagagctgctgtttgaagagttcggcttcactgttgataacccactagcttcgcgcgcggttcggttgcgtttgccgttcaacaacgatcaggtggaagcggcggtgggctggaagctggcggttgagcgccacaacggaccgacggcactgatcctctcaaggcagaatctggcccaggtggaacgtacgccggatcaggttaaagagattgctcgtggcggttatgtgctgaaagacagcggcggtaagccagatattattctgattgccaccggttcagagatggaaattaccctgcaagcggcagagaaattagcaggagaaggtcgcaatgtacgcgtagtttccctgccctcgaccgatattttcgacgcccaggatgaggaatatcgggagtcggtgttgccttctaacgttgcggctcgcgtggcggtggaagcaggtattgccgattactggtacaagtatgttggtctgaaaggggcaattgtcgggatgacgggttacggggaatctgctccggcggataagctgttcccgttctttggctttaccgccgagaatattgtggcaaaagcgcataaggtgctgggagtgaaagccgggtcacatattcctcggaagaagtatgatgtgcccggcaagaagagcttttctcccgtgaaatatagcacaattgggagccccagtccagagagaccagtgagtataaccaccatacccaactcgtttgtgatcatcacggccaaccgggtgctgcactgcaacgccgacacgccggaggagatgcaccactggataaccctgctgcagaggtccaaaggggacaccagagtggagggccaggaattcatcgtggtggagaagctgatccgaggcctggccatggaggacagcaggaacatgtttgctttgtttgaatacaacggccacgtcgacaaagccattgaaagtcgaaccgtcgtagctgatgtcttagccaagtttgaaaaagagccagttggtaagcatttaccaacatatgatggccagatcgccatgggcttagaaagtacagcttctgtcaccaggaaacattcatcaccttcgtcattgcagaatgctctaagttgtgagactgctacttcgcttattgaacgccgtgtacgaatggcgcttggcaccggcgatcgtcgcggcctgaatacctggctggcgcgtctgcctatggaagcgaaagagaaagatgaatggcgttactggcaggcggatttattgctggaacgcggacgtgaagctgaagcaaaagagattttgcatcaactcatgcaacagcgtggtttctacccgatggttgcagcacaacgcatcggcgaagagtatgagctgaagattgataaagcgccgcagaatgttgacagcgccctgactcaggggccggagatggcgcgcgtgcgcgagttgatgtactggaatctcgataataccgcgcgtagcgagtgggccaattctgttgaagaacaaatcaaaaccagaccgggctcacctgccggggtatgcttccaccacccaatggtggattttgagcgttcaggcaacgattcgccggaaaccttggggatcatctgaaagagcgattcccgttggctaacaacgatctttcaaaacgctacacaagcggtaagaagatcccgcaaagctatgcgatggcgattgctcgtcagaagagcgcttggaatccgaaagtgaaatcaccggtaggggccagcggcttgatgcagattatgcctggtacagcgacccatacggtgaagatgttctctattcccggttatagcagtcctgggcaattgctggatccggaaacgaatatcaacattggcagccagctacctgcattatgtttatcagcagtttggcaataatcgtattttctcctcagcagcttataacgccggaccagggcgggtgcgaacctggcttggcaacagcgccgggcgtatcgacgcagtggcatttgtcgagagtattccattctccgagacgcgcggttatgtgaagaacgtgctggcttatgacgcttactaccgctatttcatgggggataaaccgacgttgatgagcgccacggaatggggacgtccttactgatccgcacgcttatgatatgctttggtactctttaacgagcacacccgggggaagggttttgcttcccccgctaacaatggcgacatattatggcccaacaatcaccctattcagcagcgatggcagaacagcgtcaccagcagtggttacaatttgtgtaccggcatagtaatgccagccaaaacgatcta

SEQ ID NO: 25594 - DNA, 1195 bp, Homo sapiens; identical to SEQ ID NO: 11059
  SIMILAR (1)..(780): 1001254mologous to Escherichia coli xylose isomerase,accession number K01996,Smith-Waterman Score=1361.

SEQ ID NO: 25595 - DNA, 2679 bp, Homo sapiens
  SIMILAR (1990)..(2676): 931254mologous to Escherichia coli O157:H7 putative ATP- binding protein of xylose transport system,accession number AE005583,Smith-Waterman Score=1038.
atggatttaatccgaggcgtcttgctccggctcctgctcctggcttccagcctcggacccggcgcggtgtcgctccgagcggccatccgaaaaccagcatctccttcccactattattctggggacttcttatatccctctcctggattggatcttctgtttcctgcagctttggtcctgcgtcatggttctgtccaagttttcgtgacagtcatcctccaacaccttcctgagaaaagatgtaaaggagaagattcaggctttagcgatgactggagggtcattcgctggaaagaatttcatcagttggaactaaatcatgccttgcttctctatattcatttattcttatcagcatataaacatgccagctctcctggttctgtgacatcaacgatgtctttcttggcctcctttgctggtgttggagttcagagcactcaaccccaaaatgtggcaccttggaaattgagaaaacagcataagcagaaagacctacacaatgctcacgccgctgctagacattcgattgtgatcagctgcactgtcagatccaaatcaaatgctagaggcgacgttgagacatgtgtgagtgctgggatgactcctatgcactatattgcaaggctggatcatcgaatcgcgtcgaatgccgtaccacggtggcgtccaggttgttctattccaaatacagcttgtgaagtatttagctcaatagtctatgcttacaagttattgaatagatgcacgccagagtacgcgcgtcttaccactgcccgcgcccgccagcaccagaaggttgctgcgtggcgcggccaccgcttcgcgctgtttgtcattaaggctgtcgagcaggtaagaaacgtccattggcaccgccgcgtaaaaataggttgggcggagaagcgcaacgccctccgccaaaaagctgggtatatatacagatttgctgattatatcagcgaggtcagagatgccaaccgggaaatttccagatgcggcagtaaacggctgtcccaggtttgcatcagatcgccattttccggtctgatccaacaagcctgcattccgctgcgaattgccccacccacgtcagtgggactagccggacctccgcggtttgcccggcgcgatgtcatttctcgcacggatgttacgtaccgcaacgatcgcctgtttcagccattcggtgtcggccagtgcggcttcatcaacctgagatgcatcgtactgcgggaacggctgcagcatgatggtgtcggcagtgataccgcaaagtactttcacacgctgccagatggtttcggtgatgaacggaatgatcggatgcgcgaggcgcagcagaccttccagtacagtcaccagcgtatggcgagtaccgcgcagttctgcttcggtgccaccgttcattaccggcttggtcagctcgagataccagtcacagaactggttccaggtgaactcatacagaatgcctgcggcgatatcgaagcggaagctgtccagcgcttcgcggtacgctttgatgatcgaaaatcccgtaccagaatggccgccgacttccagcggaccaaagatgaggaactactgacaaaagcgggcgcggatgaagaggcgttaagctggttaaccgaacaaagtcagaaagatacccgctccggtactgacaccaacgttcgtcagatggccgatcccacttcggcggctaaacatcaatatggggacactcggttgcggactcacgcgacaatcattcatggtgaaaaaatcgcctttaaaatcgcttttccccgtgccccacaggtcgcgcagcacctgcttcgacaccctggtgagagcagagcccgtgcttgtgtaagatcaaaggttgtaattgcactcacagtggcagcaggctctgaggtgcgttgcctaacatcacgtgcactagttctgcgggaacacacatcagacctacttgggttgggtggggggtgttgcaaactcagaagcctgaggagaaaaatggggtaccccggacctcgtgggcccgaacgaacggagaccattcagcgccttttgggtgtgtgccccgaacaaggggaaggaaaaatttatattgatggcaaacaggtagatattcgtaactgtcagcaagccatcgcccaggggattgcgatggtccccgaagacagaaagcgcgacggcatcgttccggtaatggcggttggtaaaaatattaccctcgccgcactcaataaatttaccggtggcattagccagcttgatgacgcggcagagcaaaaatgtattctggaatcaatccagcaactcaaagttaaaacgtcgtcccccgaccttgctattggacgtttgagcggcggcaatcagcaaaaagcgatcctcgctcgctgtctgttacttaacccgcgcattctcattcttgatgaacccaccaggggtatcgatattggcgcgaaatacgagatctacaaattaattaaccaactcgtccagcagggtattgccgttattgtcatctcttccgaattacctgaagtgctcggccttagcgatcgtgtactggtgatgcatgaagggaaactaaaagccaacctgataaatcataacctgactcaggagcaggtgatggaagccgcattgaggagcgaacatcatgtcgaaaagcaatccgtctga

SEQ ID NO: 25596 - DNA, 2583 bp, Homo sapiens
  SIMILAR (1677)..(1790): 261254mologous to Escherichia coli f772,accession number L10328,Smith-Waterman Score=41.
atgactgagagtttacctgaccaccctctcttccaacctactataagccctagtctggtaccacctcctttccgtctgggcttcttgcattctgggacagccaagtctgtgacttgcacgtactcccctgccctcaacaagatgttttgccaactggccaagacctgccctgtgcagctgtgggttgattccacacccccgcccggcacccgcgtccgcgccatggccatctacaagcagtcacagcacatgacggaggttgtgaggcgctgcccccaccatgagcgctgctcagatagcgatggtctggcccctcctcagcatcttatccgagtggaaggaaatttgcgtgtggagtatttggatgacagaaacacttttcgacatagtgtggtggtgccctatgagccgcctgaggttggctctgactgtaccaccatccactacaactacatgtgtaacagttcctgcatgggcggcatgaaccggaggcccatcctcaccatcatcacactggaagactccagtggtaatctactgggacggaacagctttgagccaaagaagaaaccactggatggagaatatttcacccttcagatccgtgggcgtgagcgcttcgagatgttccgagagctgaatgaggccttggaactcaaggatgcccaggctgggaaggagccaggggggagcagggctcactccagccacctgaagtccaaaaagggtcaggctagtgcaagggctatcagcgtttctattagtagacgtggagaaaatctccggcgagacgcgctccatgccacgagcaaacgcaaaattttctgccccttcgccaatcatcatcacatgcgggctttgctccatcaccagccgggcggcaagaaccggattacgcagatgactaacgcccgccaccgcaccggctttcagggtgttaccatccatcacacaggcgtccagttcatgggtttcatcacgcgtaaagacagcgccaattccggcgttaaacagtggacactcttccagcagacgcaccgcttccgtcaccacatccagcgcactttcgcccgcttccagcattttctgcccggtttcaacaatggcagacaacgcctcgatgtagcgagtgttttcatggaatttaccaccggattgatgtcgctcgacaccgcgcttaatgagatgctttctcgcgtcaccccactgaccgcccaggaaacgctgccactggtacagtgttttggtcgtattctggcgagcgatgtcgtttcgccgcttgatgttccggggtttgataactccgcaatggacggctacgcggtgcgtttagccgatattgcctccgggcaaccgctgcccgttgccggtaaatcctttgccggtcagccataccatggtgaatgggctgcgggtacctgcattcgtattatgaccggtgcgccggtgccggaaggctgcgaagcggtggtgatgcaggagcagactgaacaaatggacaatggcgtgcgttttactgctgaatgcgtagcgggcgaaatattcgccgtcgcggggaagatatctctgggggggcgggggtttccccgcgggaatcgcctgagtaacgcgaggtgccggaaatgggtcccgggggggccgcaaaccggggtaccaaaagggtttaaagcattgggtattgccggcccagatgcacggagcaaccttgctggatgctcagcaacgggtgttacgccctgccatttgtggaacgacgggcgctgtgcgcaagagtgcactttgctggaagcgcgagagcataaccattatgcgtacatctacaacgaactggtgtggaacgtgctcaaggacaccgttggtgaggaagaagctgtcttgtttgcccgctcggcctccgtcggtgcgcagaaattcccggtacactggggtggcgattgttacgctaactacgaatcaatggcggaaagcctgcgcggtggtttgtctattggcctttcaggttttggcttctggagccacgatatcggcggctttgaaaataccgctccggcgcacgtttacaaacgctggtgcgcgtttggtttgctctccagccatagccgtttacacggtagcaaatcttatcgtgtgccgtgggcctacgatgatgagtcctgtgatgtggtgcgcttcttcacgcaactgaaatgccgcatgatgccgtatctgtatcgtgaagctgcgcgtgcgaacgcgcggggtacgccgatgatgcgggccatgatgatggagttcccggacgatccggcttgtgattaccttgaccgtcaatacatgttaggcgacaacgtgatggttgcgccggtgttcactgaagcgggcgatgtgcagttctacctgccggaaggtcgctggacacacctgtggcacaacgatgaactcgacggtagtcgctggcataaacagcagcacggcttcctgagtctgcccgtttatgtgcgtgataacactctactgggcgctgggcaacaacgatcaacgtcccgattacgtgtggcacgaaggcacggcattccacctcttcaatctgcaagacgggcatga

SEQ ID NO: 25597 - DNA, 996 bp, Homo sapiens
  SIMILAR (585)..(310): 831254mologous to Escherichia coli a proline/betaine transporter,accession number M83089,Smith-Waterman Score=396.
atgttctgggtggtctaccagtgctatggtcccctctcccgcaccacccacaccactggcaatggcagcaaggaatctggggtgatggtgatggtgaaggatgctgctgatgaatttcaggcccagaatacagggccaaatattatatatgccccagctgcaattgaatatgcaggagctgaatgtgcagcactgcggatgaatgaaaatcgtaggaccgctaaatgggataacagcaaggtgatggaagagatcctcgcgctgcgtcacgaactggcgcaactgctgggctttgaaaactacgcctttaaatcccttgccactaaaatggcagaaaacccgcagcagtgcttggtcttcggagtaatgcaggttatgcgacaaataactcggcatataggtcagcaacatgtagtaagtcacgttggtggcaattaccagaccaatacatgtcaacaggctgcgccagtatttagtggcaatctctttaaacgagactttcgggccatcctgcaaaccttcacggtcgccctgttccagtttatcgacatgctgctggaacgccggagtcatgcacaagaaatgagtacagggaggaagattatgcagttacagaaattagtcaatatgtttggtggtgatctcacccgtcgttatgggcaaaaggtgcataagctgacgctgcacggcggttttagctgccctaaccgtgacggtaccatcgggcgtggtggctgcacattctgtaatgttgcctcgtttgccgatgaagcgcagcagcatcgttccattgccgagcaactggcgcaccagtcgaatttagttaaccgcgctaaacgctatctggcctactttcaggcgtataccagcacctttgcggaagttcagtgctgcgattctatgttcttgcccgtagtccagtaccctttcgtaaaagacgtccgtgtacatggaagattccagcgatacagccagaacaataaatctaggatgtaa

SEQ ID NO: 25598 - DNA, 968 bp, Homo sapiens
  SIMILAR (142)..(540): 971254mologous to Escherichia coli xylose isomerase,accession number K01996,Smith-Waterman Score=677.
tcacagcacagcacgtgggatgccgcctagaacagaggcagaaccctgtacccaggggcagtcactgttgctgatttgagttacgagctgggggttcaggcggcagtggccgtgtttcatctggggagcgctgggtacacaaaccacgcgacgctggcaggtcactctttccatcatgaaatagccaccggcattgcgcttggcctgttcggttctgtcgacgccaaccgtggcgatgcgcaactgggctgggacaccgaccagttcccgaacagtgtggaagagaatgcgctggtgatgtatgaaattctcaaagcaggcggtttcaccaccggtggtctgaacttcgatgccaaagtacgtcgtcaaagtactgataaatatgatctgttttacggtcatatcggcgcgatggatacgatggcactggcgctgaaaattgcagcgcgcatgattgaagatggcgagctggataaacgcatcgcgcagcgttattccggctggaatagcgaattgggccagcaaatccttgttggcaaaacagttttcaatctcaagcttgtcagtgtctgcaacaatttctccattaggtaaaacagtgtaaacaagcagatgagcactaggagcagagtctgattccactcgaaaggagaaggacaacacccctttcagtacctcaactagtaaggccttgactacagtgtccttctgcgcaagtggcgggacgtcagtcaactcattgtcacacacttcctgagaatgcatggcttctgcagtggctgtgaaattcacctttccgaacttggccgtgaacttctgcacagcagcaatggcggggccaaaggtagctttgacctccacactggctcggatccaggccggcagcttggccaggacagggggccgggcgtatcgctggtccaggagcactatgctggcaaaatccttctggtgcctgatggccctgc

SEQ ID NO: 25599 - DNA, 1008 bp, Homo sapiens
  SIMILAR (1)..(303): 911254mologous to Escherichia coli similar to M. tuberculosis MTCY277.09,accession number U82664,Smith-Waterman Score=444.
atgatggagcaagtgctcgatatcccttcccaggaagttatctcgaaagataacgccaacgttaccatcgacgccgtgtgctttattcaggtgattgacgcgccgcgcgcggcttatgaagtcagcaatctggagctggcgatcatcaacctgaccatgactaacatccgtaccgtgctgggttcaatggaacttgacgaaatgctctctcagcgcgacagcatcaactcacgcctgctgcgtattgtcgatgaagccaccaaccctctggcgctgaaaattgcagcgcgcatgattgaagatggcgagctggataaacgcatcgcgcagcgttattccggctggaatagcgaattgggccagcaaatcctgaaaggccaaatgtcactggcagatttagccaaatatgctcaggaacatcatttgtctccggtgcatcatcaggttgccgagtggatgcgggcgcgaaacggtcagcttttccgtttgcgcagcaaccacctcaccctgctcgttgagcaaaataacttttacgcccgaggtgccaagatctatcccgatatacatatcgatcgttccttaaaaaaatgcccgtcggatttatttgctgcaaatgcaagatgtggcatttgtcagcagtcggatgagcgctgtctacgttaccagccacgaagggaaagagggctttaccgaattgacattacgtaccctggaaagtcgtacaccactactgcgctgccatcgagattcgtctggtttgtaacaggcaaggcccagagcacccaggcgagcgccctatcctatattgattcgctcctctatcatcaccttgatctatatgggcaaagactaggccatcttgatgatggcactgattcttggaatcatgtgcctactctcaacggacaatgtactttggtcttgatacatgagtatgtggatactagaggtccggagatcaagaccatcctggtgatctcctggtggaacatcctggtgtttcactaa

SEQ ID NO: 25600 - DNA, 1179 bp, Homo sapiens
  SIMILAR (657)..(58): 981254mologous to Escherichia coli a proline/betaine transporter,accession number M83089,Smith-Waterman Score=963.
tcaggctgaaaatcttctctcaatccgtctatcggtacctatcgtaatgctcgacgatatttccttcgcttcctgtattatcttgacgcccgccggtgtcgcacctttcaacggacgatttgccgtctctttcatggttacgccggtgattaaaccaaccaccgccactaccatcaggtaataggcaggcatcatcagattctgcgagctttcgaccagccaggccgccagcgttggcgtcagaccggcaaccagcaccgaaatattaaatgccgccgccagcgcgctgtaacggatatgcgtcgggaacatcgctggcaaggtagaagccataacgcccgtaaagcagttaaggatcaccgccagcatcagtaacccggcaaaaatcaggccgatgacgttactgttaatcagaataaacgccgggatcgccaacacaaacagggcaacactaccaagtagcacaaacggacgacggccaaaacggtcactcagcaagcccatcaccggctggacaaacagcataccgatcataatggcgataataatcagcaccccgtggtcttcggagtaatgcaggttatgcgacaaataactcggcatataggtcagcaacatgtagtaagtcacgttggtggcaattaccagaccaatacaaacgtattgctgttgaattgctgccaatgcgtcagtgctggcggtggcaaaaaccagtggagcaagtacactttcctggcccagaacccactctgccagttcgtgtgcataagcggccagagtttcaattgagaggcagcgtgccacatcaacttcacgggctggtgcaatttgacggtaatgtgctacctggcggttggtcatttgagagcatgaaccggagagcactacgccgcgcccagcgagcggacgccctgctttgcgagcctggttaccgttttcttgcgcccactgccgggccaggccaatcgccagaccagaaccgcccgttaccagtggggcatcgcgcaaggcttctccctgaatttccagatggtgttcggtcagcgcatcaagcaccgcgtagcggtagccctcttgctgtaagcgagccagctcttgacgaacggcatccacaccttgttcgaaaacatgtgccgaaacgacgccgcagcgccctgtggattgcgatgttttcctcat

SEQ ID NO: 25601 - DNA, 2312 bp, Homo sapiens
  SIMILAR (3)..(626): 961254mologous to Escherichia coli O157:H7 putative ATP- binding protein of xylose transport system,accession number AE005583,Smith-Waterman Score=1039.
tacaacagcacggtatcgcctgtatttatatttcgcacaaactcaacgaagtcaaagcgatttccgatacgatttgcgttattcgcgacggacagcacattggtacgcgtgatgctgccggaatgagtgaagacgatattatcaccatgatggtcgggcgagagttaaccgcgctttaccctaatgaaccacataccaccggagatgaaatattacgtattgaacatctgacggcatggcatccggttaatcgtcatattaaacgagttaatgatgtctcgttttccctgaaacgtggcgaaatattgggtattgccggactcgttggtgccggacgtaccgagaccattcagtgcctgtttggtgtgtggcccggacaatgggaaggaaaaatttatattgatggcaaacaggtagatattcgtaactgtcagcaagccatcgcccaggggattgcgatggtccccgaagacagaaagcgcgacggcatcgttccggtaatggcggttggtaaaaatattaccctcgccgcactcaataaatttaccggtggcattagccagcttgatgacgcggcagagcaaaaatgtattttccagccaccacttctccagctccgcggcaaaggcctggcggtcacgttgtgaaaggctatctggtccgccggtctggatcccactggcacgtaaggtatccataaaatcgcgcatcgtcaggcgctcacgaatggtcgctggcgtgtaacgttcgccgcgcggattaagcgccgcagcgcctttctcgatggcttcagcagccaaaggtatatctgcggtgatcaccaaatcgcccgcttcacactgccggacaatttcgttatcggcaacgtcgaaacctgccgcgacgcgcagcgtacgaataaatcgcgatggcggcacgcgtaaactctggtttgctaccagtaccagcggcatctgcatacgttccgccgcgcgatacaaaatctctttaattacattgggacacgcgtcggcatccacccaaattgtcataaagtcatcctttgttgggtaatcctctattgtgtcgcgcttttgccttccggcatagttctgtttatgcttctttccctcagacaccgggcgatggtgtgttgcattaagttctgtgcctaccacacactgtccgtcgcgggtcatcataaatccggccatcgatcccagcgtttccgccagcgccgccgacgcgccgccatgtagtaaaccgaacggctgatgagtacgggtatcaaccggcatttcggcttccagcacatcatcgcccagacgggtatacacaattcccagatgcgccaccattgtgttatcgctggtggcgttcagttcgtcgagcgttaaatggcgtttccagatcatgcttatgcccccagcgttgagccgccatcgaccacaaatatcctgcttgaatgtcagcaagatggttcgcaagtgctgctgcgtgatgtcgctcgcgtcgaacttggggcggaagattattccaccgtggcacgctataacggcaaacctgctgccgggatcgccatcaaactggctgccggagcaaacgccctggataccggtggttattctcgggacgtttgcgatcttgtcggcggtcggtttcaccatcaacacgttgactatgttcgggatggtgctggcgatagggttactggtggatgacgccatcgtggtggtggagaacgtcgagcgtgtcattgcggaagataagcgccgaaggaagcgacgcataaatcgatggggcagatccaacgtgcgctggtcggtattgccgttgttctttccgcagtgtttatgccgatggccattgatagcgccttctgcgatatcacctaattgtgagcgggaaagctgggaagccacaccgctggtagctgaaatggcatcgcgtgcggcaacgatcgcataagaagctttcatttcagccagcgagtgacccaacgcgacgtggcccagttcatggcccagaacgccttcaatttcgttgtcattcatcatgtccatcaggccactgtagacacgaacacagccgttcgccatcgcccatgcgttgacgtcgctggtcatataaaccttatagttgaccggcgtgccattaatattgttacccaatgctttggcgatttttgccagacgtttaccgtacttgctggatttacttgcgacttgattgccgctgtccatttcggcacagccctgattggcaatcgcttttgcatcggcatcgcttaatgttgctgctttataggcatttaaaccggagctgatagccat

SEQ ID NO: 25602 - DNA, 6396 bp, Homo sapiens
  SIMILAR (4216)..(4758): 971254mologous to Escherichia coli K12 N-acetyl glucosamine-1 -phosphate uridyltransferase,accession number AE000450,Smith- Waterman Score=900.
atgaccatgttacagatagtcggcgcgctgatcctgctgatcgcaggatttgccattcttcgccttttgttcagagcattaatcagcacggcttctgcgctggcagggctcatattgctgtgtctgttcggcccggccttactggctggctatatcaccgaacgcataacccggttgttccatattcgctggctggcaggcgtatttctgacgattgccggaatgatcatcagcttcatgtggggacttgatggtaaacatatcgcgctggaggctcacacctttgactctgtgaaatttattctgaccaccgctctcgccggtggtctgctggctgttcccctgcagatcaaaaacattcagcagaacgggatcacaccagaagatatcagcaaggaaattaacgggtattactgctgtttttatactgcctttttccttatggcgtgttctgatcagaggcggctgagaggagcaatggataagagatacaaattcattcttgttggttttggggaagtctttgtattcaacctggaatccctggactctggaaagaaaatccacttgctcagaagatctcatgaagaggtcatggggtctgtgatgcgtacaggaaccattgataagggtatcctgccgtttattcaccatacccgcgggaatgaaattctctttattcctgcgctgtttattctgttttcacttggcggcgcggtatttggtatgggagaagaggccgtcgcctttgccattatcatcgcaccgctaatggtccggctgggctatgacagtattaccaccgtcctggtgacctatattgccacgcaaatcggttttgccagttcgtggatgaacccgttttgtgtggtcgttgctcaggggattgccggcgttccggtgctttctggctccgggttgcgcatcgtggtgtgggttatcgccactctgattggcctgatctttaccatggtgtacgcctcacgagtgaaaaagaatcctcttctgtcacgcgtgcatgagtccgaccgcttctttcgtgaaaagcaggctgatgttgaacaacgtccgtttacctttggtgactggctgaaattgcagccagttcttcacatgggtctggtgattggcatcatcggcgttggtttccgccttaacggcaatacgacagggtctgttccggatctgtgcatcggtgaaaccgaagctgaaaatgaagcgggcaaaactgaagaagtttgcgcacgtcagatcgacgcggtactgaaaactcagggtgctgcggcattcgaaggtgcggttatcgcttacgaacctgtatgggcaatcggtactggcaaatctgcaactccggctcaggcacaggctgttcacaaattcatccgtgaccacatcgctaaagttgacgctaacatcgctgaacaagtgatcattcagtacggcggctctgtaaacgcgtctaacgctgcagaactgtttgctcagccggatatcgacggcgcgctggttggtggtgcttctctgaaagctgacgccttcgcacatgatgccgatacgtggtttgggaatttcgtaaccgatcatctcctcgacttcacgtccggcacgttcaatcaggcggcgtgcttcatcaacttcatcgaggcttgtgaccatcggcaacagaatattcaggttgccccggcagttagcacgcagcatcgcccgcacctggatcaagaagatctccggctgatcgagcgtaatgcgaatcccacgccaacccaggcatggattctcttcgctgatcggcatgtaaggcagctgcttatctgctccgacatccagcgtacgaagacgcggatattcttgcagcagtaccgggttcgattggtcaagaattaccgcggtacgatccacgataagcggcctcgatgcagcccggagcttgaatatcgggccatcacgggcttccgcatagcgacaatcaggaatcgaaaaatgactaagcccatcgtttttagtggcgcacagccctcaggtgaattgaccattggtaactacatgggtgcgctgcgtcagtgggtaaacatgcaggatgactaccattgcatttactgtatcgttgaccaacacgcgatcaccgtgcgccaggatgcacagaagctgcgtaaagcgacgctggatacgctggccttgtatctggcttgtggtatcgatcctgagaaaagcaccatttttgttcagtcccacgtgccggaacatgcacagttaggctgggcactgaactgctatacctacttcggcgaactgagtcgcatgacgcagtttaaagataaatctgcgcgttatgccgagaacatcaacgctgttgtcggcgcctatgccggctaccaaggggcgccacagcgcgaggagctggccgaggtggatgtggactggctgatcgccgagcgccccggcaaggtaagaaccttgaaacagcatccacgcaagaacaaaacggccatcaacatcgaatacatgaaagccagcatccgggccagggtggagcacccatttcgcatcatcaagcgacagttcggcttcgtgaaagccagatacaaggggttgctgaaaaacgataaccaactggcgatgttattcacgctggccaacctgtttcgggcggaccaaatgatacaatcaccagaatgtaaagattacccgagcgtcattagcggttatttaggtaaaaactggggcatcctgttaggtgcgctctatttcgtaatgctggtgatttggatgttcgtctattccaccgccatcaccaacgatagtgcttcctacctgcataccttcggcgtgacggaagggttgctgtcagacagtcccttttatggtctggtactgatttgcattctggtggcgatctcctcacgcggcgagaaattgttattcaaaatttcgaccggcatggtgctgaccaagctgctggtggtcgcggcgctgggcgtgtcgatggtgggaatgtggcatctgtataacgtcggttcgctaccgccgctggggctgctggtgaaaaacgccattattacgctgccgtttaccctgacgtcgattctgtttatccagacgtcaaactcactttcagagcgcatccgctccagtgcgccagaaatattggcttcggaatcaatcaggaacaggccgctggaaaccaccttttcaccttccgccagaccagagcgtaatgcggtgacccttcgatgcctggaaaacagcaacggtgttcggtacacggatactgcctattttttagctcctcgtgcaagaaccctacaggcttgtctcgacgaggcgggcgataatctggctgcgcttcgtcatgcagttgagcagcaacagctgccgcaagtggcctggctggcggaacatctggcggcacaactggaagccatcgcgcgtgaagcctccgcctggtcattgcgcgagtgggacagtgcaccaccgaaaattgcccgctggcagcgtaaacgtattcagcatcaggattttgagcggcggctacgtgagatggttgccgaacgcagagcccgtctggcgcgggtgaccgatctcgtggaacagcaaacgctgcatcgtgaagtggaagcctatgaagcgcgcctggcacgctgccgccatgcgctggaaaaaatcgaaaacagcaatggagagaatatgtcactggaaaatgcccctgacgatgtcaaactggctgtcgatttgattgtgctgctggaggaaaatcagatccctgccagtaccgtgctgcgcgcgctggatattgtaaagcgtgattatgaaaagaaattaacgcgcgatgatgaggcggaaaacgtccagacgctctttttgcacgcgtgtcatgtacaggctctctacttccgcgatcacttatatcatgccggctcgtcccaggttgtaaagcgcaatggtggcaagggtctgctctttatcccacgggcagccgttttccggatcgcgcaggcgctgcataatagtgagcaaacggactcaggacaacagctggacgatgtccagcttgctcgctaccttttgtcgggtcaaaatcaacccaaatcagatcgcccatatcgggtacgtatcggcttaccattaccagacttccttatctttcggctctccccagtcgatattctcgtggaggttttcggcgggatgtctttgaccattcaacaagcagcccttcagatacaggcgatcaacaccggcattctgattgccaacggcgcagatatgaaacgctggctggcgaagctgaccaacaataatgctcagggcgaatactacatcaccgacattattgcgctggcgtatcaggaagggcgtgaaatcgtcgccgttcatccgcaacgtttaagcgaagtagaaggcgtgaataaccgcctgcaactctcccgtctggagcgtgtttatcagtccgaacaggctgaaaaactgctgttagcaggcgttatgctgcgcgatccagcgcgttttgatctgcgtggtacgctaactcacgggcgcgatgttgaaattgatactaacgttatcatcgagggcaacgtgactctcggtcatcgcgtgaaaattggcaccggttgcgtgattaaaaacagcgtgattggcgatgattgcgaaatcagtccgtataccgttgtggaagatgcgaatctggcagcggcctgtaccattggcccgtttgcccgtttgcgtcctggtgctgagttgctggaaggtaagtttattcacgttcatggaaccgtaatcgcgtgtttcatggtttgtcggcgtcatcgtcgcctttgcggcctacgccttattaaagaaacgtacaacagcagaaaaaacaggagagcaaaaaaccataggttaattagaacctttccacaacgttgcatcgccttcgacgcagaacaaaatggcggcactctgctggctaatggtggtttctttatcactaaggtcatgcagcgagaaggcaaaatcatccactggaatcgggaagtccagttctgcaccttgtttcaccggctgggtcaacaactggttagccggtttggcttcgaatttcacattggcaaccagttccggaatatcaatgtatttaggcgtcaagaccgcacgcagcacgttatcggagtttggcatcacttccagcgccacgcccttgaagtaaaacgtgcggtggtttcaacgaaacaagaacatcgcttccgcagggcgtacagagaccgcagacgtctgacgtccgacaagactgagtggtcgaagagtgctgatgccagaactcgcatatacgtaccgaggcgcaaggaacctagcgccttcgttacgtgtcgcgagaacacacgtcgcactaaacgcgacgtcctagacgacgtgagtgcgcgtcgtggggcggctacaactctacgggccgcaagaaccaagggtagacgcatggcaaggcacggtaactacgggctggcgcgtcattacgatccgtttatcgtcaacaccgtggtcggctttattgggccggagtatctctacaacgaccgccagattatccgtgctggcttagaagatcactttatgggcaagctgagcggcatctctatgggctgtgactgctgttataccaaccacgctgacgctgaccagaacctcaacgaaaacctgatgatcctgctcgccaccgcaggctgcaactacatcatggggatgccgctgggtgatgacatcatgctcaactaccagaccaccgcattccacgataccgccactgtgcgtcagttactcaacctgcgcccgtcaccggagtttgaacgctggctggaaagcatgggcattatggcaaacgaggcgcatgcacaaacaccagatacggcaacgaccgcgccttatctgctggctggagcccctactttcgatctctccatcagccagtttcgagaagactttaacagccagaatcccagcctgccactgaacgaatttcgtgccatcgacagcagtcccgacaaagccaatctcactcgtgctgcaagtaaaattaatgagaacttgtatgcttctacagcgctggagcgcggtaccttaaaaatcaaaagcattcaaatgacctggctacccatccaggggccagagcaaaaagccgcgaaagcgaaagctcaggaatacatggcagcggtgatccgcacactcaccccattaatgaccaaaacacaaagccagaaaaaactgcagtcgctactaacggcggggaaaaacaaacgttattacaccgagacagaaggtgcactgcgttatgttgtcgcggacaacggcgaaaaggggctgaccttcgctgttgaaccgattaagctggcgctatctgaatcgcttgaaggtttgaataaatga

SEQ ID NO: 25603 - DNA, 3496 bp, Homo sapiens
  SIMILAR (1635)..(1661): 1001254mologous to Escherichia coli xylG,accession number U00039,Smith-Waterman Score=48.
cacgattaccaatttgagacctgcggccccggggatctgtgagatggcgcaaggtttatcggccggcggtgaatataccggcgcgtcgatatttgttgcggaatactcccctgaccgtagacgtggctttatgggcagctggctggacttgaggtctattgccgagattgagctgggtgcgggcggggtggggttaatttcgaccattgtcggcgaagcgaacttcctcgattggggctggcgtattccgttctttatcgctctgccgttagggattatcgggctttacctgcgccatgcgctggaagatactccggcgttccagcagcatgtcgataaactggaacagggcgaccgtgaaggtttgcaggatggcccgaaagtctcgcttaaagagattgccactaaatactggcgcagcctgttgacatgtattggtctggtaattgccaccaacgtgacttactacatgttgctgacctatatgccgagttatttgtcgcataacctgcattactccgaagaccacggggcgctgattattatcgccattatgatcggtatgctgtttgtccagccggtgatgggcttgctgagtgaccgttttggccgtcgtccgtttgtgctacttggtagtgttgccctgtttgtgttggcgatcccggcgtttattctgattaacagtaacgtgatcggcctgaatttgttgccggcgatgttcccgacgcatatccgttacagcgcgctgctacttgaaatgaagaacattaccaaaaccttcggcagtgtgaaggcgattgataacgtctgcttgcggttgaatgctggcgaaatcgtctcactttgtggggaaaatgggtctggtaaatcaacgctgatgaaagtgctgtgtggtatttatccccatggctcctacgaaggcgaaattatttttgcgggagaagagattcaggcgagtcacatccgcgataccgaacgcaaaggtatcgccatcattcatcaggaattggccctggtgaaagaattgaccgtgctggaaaatatcttcctgggtaacgaaataacccacaatggcattatggattatgacctgatgacgctacgctgtcagaagctgctcgcacaggtcagtttatccatttcacctgatacccgcgttggcgatttagggcttgggcaacaacaactggttgaaattgccaaggcacttaataaacaggtgcgcttgttaattctcgatgaaccgacagcctcattaactgagcaggaaacgtcgattttactggatattattcgcgatctacaacagcacggtatcgcctgtatttatatttcgcacaaactcaacgaagtcaaagcgatttccgatacgatttgcgttattcgcgacggacagcacattggtactcctgatgctgcccgaatgagtgaagacgatattatcaccatgatggtcgggcgagagttaaccgcgctttaccctaatgaaccacataccaccggagatgaaatattacgtattgaacatctgacggcatggcatccggttaatcgtcatattaaacgagttaatgatgtctcgttttccctgaaacgtggcgaaatatggggtattgccggactcgttggtgcccggacgtaccgagaccattcaatgcctgacagaaagcgcgacggcatcgttccggtaatggcggttggtaaaaatattaccctcgccgcactcaataaatttaccggtggcattagccagcttgatgacgcggcagagcaaaaatgtattctggaatcaatccagcaactcaaagttaaaacgtcgtcccccgaccttgctattggacgtttgagcggcggcaatcagcaaaaagcgatcctcgctcgctgtctgttacttaacccgcgcattctcattcttgatgaacccaccaggggtatcgatattggcgcgaaatacgagatctacaaattaattaaccaactcgtccagcagggtattgccgttattgtcatctcttccgaattacctgaagtgctcggccttagcgatcgtgtactggtgatgcatgaagggaaactaaaagccaacctgataaatcataacctgactcaggagcaggtcttcgtgatgattgcagctatcatcgcaatcatgatggcaaacgtgagcaaaataagcaaaatcgcccgcggtcttatcgtgaaaaccgccctgctgctggaaaaactggaaggacagctcgctacgctgcgtcagcgttgtgccccggtgtcacagttcgccacgctaagtgctcgtttcgacaggcatctttttcagactcgtgcgacaacactacaggcttgtctcgacgaggcgggcgataatctggctgcgcttcgtcatgcagttgagcagcaacagctgccgcaagtggcctggctggcggaacatctggcggcacaactggaagccatcgcgcgtgaagcctccgcctggtcattgcgcgagtgggacagtgcaccaccgaaaattgcccgctggcagcgtaaacgtattcagcatcaggattttgagcggcggctacgtgagatggttgccgaacgcagagcccgtctggcgcgggtgaccgatctcgtggaacagcaaacgctgcatcgtgaagtggaagcctatgaagcgcgcctggcacgctgccgccatgcgctggaaaaaatcgaaaacagcaatggagagaatatgtcactggaaaatgcccctgacgatgtcaaactggctgtcgatttgattgtgctgctggaggaaaatcagatccctgccagtaccgtgctgcgcgcgctggatattgtaaagcgtgattatgacaagaaattaacgcgcgatgatgaggcggaaaaccttatcggcgcgatggatacgatggcactggcgctgaaaattgcagcgcgcatgattgaagatggcgagctggataaacgcatcgcgcagcgttattccggctggaatagcgaattgggccagcaaatcctgaaaggccaaatgtcactggcagatttagccaaatatgctcaggaacatcatttgtctccggtgcatcagagtggtcgccaggaacaactggaaaatctggacgttaaagcattgggtattgccggccaaatgcacggagcaaccttgctggatgctcaccaacgggtgttacgcccttataacgaacggaaatggaacccgagacgagaacgagacaggtcaaacgaacgggaacgacatggcaaacggtacggcgaccgcaaaggacaaggaaacgcgcgcatgattgaagatggcgagctggataaacgcatcgagcagccagaggggcggagggatagcgaagaggggcagcaaagccagaaaggccaaaagacaaaggcagaaatagccaaaaatgcgcaggaacaagataggactccggtgcatcagaaaggacggcaggaacagccggagaatccggaaaaccaagatcggggggacaaataa

SEQ ID NO: 25604 - DNA, 295 bp, Homo sapiens; identical to SEQ ID NO: 25061
  SIMILAR (273)..(4): 841254mologous to Escherichia coli NH3-dependent NAD synthetase,accession number M15328,Smith-Waterman Score=454.

SEQ ID NO: 25605 - DNA, 1080 bp, Homo sapiens; identical to SEQ ID NO: 25062
  SIMILAR (1)..(774): 991254mologous to Escherichia coli UDP-N- acetylmuramoylalanine-D-glutamate ligase,accession number D10483,Smith-Waterman Score=1322.

SEQ ID NO: 25606 - DNA, 1267 bp, Homo sapiens; identical to SEQ ID NO: 25063
  SIMILAR (104)..(901): 941254mologous to Escherichia coli RhsB core protein with unique extension,accession number U00039,Smith-Waterman Score=1343.

SEQ ID NO: 25607 - DNA, 939 bp, Homo sapiens; identical to SEQ ID NO: 25064
  SIMILAR (321)..(76): 971254mologous to Escherichia coli K12 putative 2-component sensor protein,accession number AE000384,Smith-Waterman Score=397.

SEQ ID NO: 25608 - DNA, 1764 bp, Homo sapiens; identical to SEQ ID NO: 25065
  SIMILAR (638)..(600): 761254mologous to Escherichia coli K12 Mg2+ transport ATPase, P-type 1,accession number AE000495,Smith-Waterman Score=48.

SEQ ID NO: 25609 - DNA, 1401 bp, Homo sapiens; identical to SEQ ID NO: 25066
  SIMILAR (1401)..(856): 1001254mologous to Escherichia coli phosphoacetyltransferase,accession number D17576,Smith-Waterman Score=905.

SEQ ID NO: 25610 - DNA, 1215 bp, Homo sapiens; identical to SEQ ID NO: 4903
  SIMILAR (849)..(292): 631254mologous to Escherichia coli No definition line found,accession number U00039,Smith-Waterman Score=452.

SEQ ID NO: 25611 - DNA, 4752 bp, Homo sapiens; identical to SEQ ID NO: 9224
  SIMILAR (3136)..(3885): 921254mologous to Escherichia coli No definition line found,accession number U00039,Smith-Waterman Score=1200.

SEQ ID NO: 25612 - DNA, 4653 bp, Homo sapiens; identical to SEQ ID NO: 25069
  SIMILAR (2304)..(1504): 891254mologous to Escherichia coli O157:H7 aspartokinase II and homoserine dehydrogenase II,accession number AE005625,Smith- Waterman Score=1162.

SEQ ID NO: 25613 - DNA, 720 bp, Homo sapiens; identical to SEQ ID NO: 9287
  SIMILAR (531)..(620): 931254mologous to Escherichia coli Glycolate oxidase subunit GlcD,accession number D90811,Smith-Waterman Score=141.

SEQ ID NO: 25614 - DNA, 912 bp, Homo sapiens; identical to SEQ ID NO: 25071
  SIMILAR (1)..(657): 991254mologous to Escherichia coli TldD protein,accession number D44451,Smith-Waterman Score=1138.

SEQ ID NO: 25615 - DNA, 1860 bp, Homo sapiens; identical to SEQ ID NO: 4900
  SIMILAR (616)..(1071): 961254mologous to Escherichia coli No definition line found,accession number U00039,Smith-Waterman Score=708.

SEQ ID NO: 25616 - DNA, 1180 bp, Homo sapiens; identical to SEQ ID NO: 25073
  SIMILAR (105)..(647): 981254mologous to Escherichia coli glucose-1-phosphate adenylyltransferase,accession number U18997,Smith-Waterman Score= 949.

SEQ ID NO: 25617 - DNA, 591 bp, Homo sapiens; identical to SEQ ID NO: 25074
  SIMILAR (91)..(387): 1001254mologous to Escherichia coli Phospho-N-Acetylmuramoyl- Pentapeptide-Transferas e,accession number D10483,Smith-Waterman Score=521.

SEQ ID NO: 25618 - DNA, 3390 bp, Homo sapiens; identical to SEQ ID NO: 4901
  SIMILAR (3390)..(2749): 981254mologous to Escherichia coli formylglycineamide ribonucleotide synthetase (EC 6.3.5.3),accession number M19501,Smith-Waterman Score=1123.

SEQ ID NO: 25619 - DNA, 4247 bp, Homo sapiens; identical to SEQ ID NO: 25076
  SIMILAR (3810)..(2944): 991254mologous to Escherichia coli Glycolate oxidase subunit GlcD,accession number D90811,Smith-Waterman Score=1457.

SEQ ID NO: 25620 - DNA, 4942 bp, Homo sapiens
  SIMILAR (964)..(1737): 941254mologous to Escherichia coli Phospho-N-Acetylmuramoyl- Pentapeptide-Transferas e,accession number D10483,Smith-Waterman Score=1257.
atggtcatcttttttggccgggaaaatctgcctgctttaaaccagaacgatgtgctggtgtacgggcatacccattgccagggccgaaaaggggggggattttcacttaccccgctcgggggtattccaaggggggatccccttaagcaagactactcgcgtatgcttatcgatcacgtcgaaaaaggcgcacgttgcaccgttgcttgtatgccagtaccgattgaagaagcctccgcatttggcgttatggcggttgatgagaacgataaaattatcgaattcgttgaaaaacctgctaacccgccgtcaatgccgaacgatccgagcaaatctctggcgagtatgggtatctacgtctttgacgccgactatctgtatgaactgctggaagaagacgatcgcgatgagaactccagccacgactttggcaaagatttgattcccaagatcaccgaagccggtctggcctatgcgcacccgttcccgctctcttgcgtacaatccgacccggatgccgagccgtactggcgcgatgtgggtacgctggaagcttactggaaagcgaacctcgatctggcctctgtggtgccggaactggatatgtacgatcgcaattggccaattcgcacctacaatgaatcattaccgccagcgaaattcgtgcaggatcgctccggtagccacgggatgacccttaactcactggtttccgggcgtgggccgacgcttgagtgtgacatcgaccgcgtgcgcgccatccgtaaaagtcggctggtggaagtggcagaagggcagcctgcgcagggcgatttcccagcctgcctggtcgccaatgaaaattatcaccatttccgcgtggtgctggtgcgtaccgatccggcaaccgagcgtttgattttaaccgccgcacaactggatgccctcaaatgccacgccggggatcgcgttcgtctggtgcgcctatggtgcgattcgccaggtgatgcgccagtgccagttgttgatgattatcgcaaagtggtgcgtaaagacaccaaagggttgatcgctcgttggaagtatttctggatgtcggtcattgcgctgggtgtcgccttcgccctgtaccttgccggcaaagacacgcccgcaacgcagctggtggtcccattctttaaagatgtgatgccgcagctggggctgttctacattctgctggcttacttcgtcattgtgggtactggcaacgcggtaaacctgaccgatggtctcgacggcctggcaattatgccgaccgtatttgtcgccggtggttttgcgctggtggcgtgggcgaccggcaatatgaactttgccagctacttgcatataccgtatctgcgacacgccggggaactggttattgtctgtaccgcgatagtcggggcaggactgggcttcctgtggtttaacacctatccggcgcaggtctttatgggcgatgtaggttcgctggcgttaggtggtgcgttaggcattatcgccgtactgctacgtcaggaattcctgctggtgattatggggggcgtgttcgtggtagaaacgctttctgtcatcctgcaggtcggctcctttaaactgcgcggacaacgtattttccgcatggcaccgattcatcaccactatgaactgaaaggctggccggaaccgcgcgtcattgtgcgtgtctggattatttcgctgatgctggttctgattggtctggcaacgctgaagggtaaaaatgtcgtcattatcggcctgggcctcaccgggctttcctgcgtggactttttcctcgctcgcggtgtgacgccgcgcgttatggatacgcgtatgacaccgcctggcctggataaattacccgaagccgtagaacgccacacgggcagtctgaatgatgaatggctgatggcggcagatctgattgtcgccagtcccggtattgcactggcgcatccatccttaagcgctgccgctgatgccggaatcgaaatcgttggcgatatcgagctgttctgtcgcgaagcacaagcaccgattgtggcgattaccggttctaagggcaaaagcacggtcaccacgctagtgggtgaaatggcgaaagcgccgggggttaacgttggtgtgggtggcaatattggcctgcctgcgttgatgctactggatgatgagtgtgaactgtacgtgctggaactgtcgagcttccagctggaaaccacctccagcttacaggcggtagcagcgaccattctgaacgtgactgaagatcatatggatcgctatccgtttggtttacaacagtatcgtgcagcaaaactgcgcatttacgaaaacgcgaaagttacgtgtaagcgcctgcaatacacgggcggttgtacttttccccaccgcgacactgccagcaatactgataatgtaaggaatgcgttgcccgttggtaccaagaaactgttccagaactgcctgacggcgcagattcgagcttatatagaagttcagcaaacaccaaagccggaagataaagtcaaagcggtgaccgagctgaatcaacatgcgccgctggcgatggtcggtgacggtattaacgacgcgccagcgatgaaagctgccgccatcgggattgcaatgggtagcggcacagacgtggcgctggaaaccgccgacgcagcattaacccataaccacctgcgcggcctggtgcaaatgattgaactggcacgcgccactcacgccaatatccgccagaacatcactattgcgctggggctgaaagggatcttcctcgtcaccacgctgttagggatgaccgggttgtggctggcagtgctggcagatacgggggcgacggtgctgggaccgaagcacgtaccctgtcccaatcgtcgtgatgaagagaacatgccgggttcccgccgcgaagtgaaaaacgcgcgggaagaaggcgtagagttcaaattcaacgtccagccgctgggtattgaagtgaacggtaacggcaaagtcagcggcgtaaaaatggtgcgtaccgaaatgggcgaaccggacgccaaaggccgtcgccgcgcggagatcgttgcaggttccgaacatatcgttccggcagatgcggtgatcatggcgtttggtttccgtccacacaacatggaatggctggcaaaacacagcgtcgagctggattcacaaggccgcatcatcgccccggaaggcagcgacaacgccttccagaccagcaacccgaaaatctttgctggcggcgatatcgtccgtggttccgatctggtggtgaccgctattgccgaaggtcagctggagcaacaaggttttaccggcgatacggcgacaagttatgccgatcgtctgacaatgtcgaccgacaacagtatttaccaacttctccccgatgcggtggtatttccgcgttcaaccgcagatgtggcgctgatcgcccgtcttgccgcgcaggaacgctattcatcgctgatctttaccccccgcggcggcggcaccggcactaacggtcaggcgctcaaccaggggattattgttgatatgtcccgccatatgaaccgcatcatcgaaattaaccctgaagagggctgcatgacagctgcctgcgtgaagccatcagtttctcagtcaatggcccctcgccaagggctcttcgaggatctcccgtcatcacagtgccgtttattggcgcttaaacacgttctcctgaacctactaagggaccgttacgatgaccgccagtcagcattattcaccacgacaaatcccgcgctggccgcagatagacgaatctcgctggaaggagaaactcgcgaaatcacaagttacttcccgatgcagtttgttcgctacagcctgctgatccacgcggctgcgggtatctcgctgatccacgccatcctgatccataggtatatggcattttgggtgaaaggatcgattaaagggatgatcgaagggaagacacccacgccgttatccagtttcaggtcgttgccaaccatcgaaatctgctgcatggtttcgataccggaaccaatcaacgttgcgcctttcaccggcttcgttactttaccgttttcaatcagatatgcttctgaagtggagaaaacgaatttgccggagaacctgctgtacgatgtgtcacaggtggcgatcccgtttgataacgtcgacgacgagcaaattcaaaagccgcagcgttggaatccggcggatctggggcgctttatgatcttcttcggaccgatcagctcgatcttcgatattttgacgttttgcctgatgtggtgggtattccatgccaacacgccggaaacgcaaacgctgttccagtcgggatggtttgtggtgggcttactgtcgcaaacgctgattgtgcatatgatccgcacccgccgtgtgccgtttattcagagctgtgcatcgtggccgttaatgatcatgaccgtgatcgtgatgattgtcgggatcgcattgccgttttcaccgctggccagttatctgcaattacaggcgctgccgttaagctatttcccgtggctggttgcgattctggcaggcgttttcgtggtggccaccgatcatgcagcagaagccattaccggattcttcactaaatatggtgacgtcggtacggacattaatccgctgtatcgtctcaacaaacgtcagggtaaacagttactggcggcattagcttgcccggaacacctttataagaaagcgccaacggccgatctgcgcagatgatcgcccttctctgccagatgaagtggcactcggcgtgacctatgacaatatcgacgactatctggaagggaaaaacgtacctcaacaggtcgccagaacaatagagaactggtatctgaaaaccgaacataaacgccgtccgcccattaccgttttcgatgatttctggaaaaagtaa

SEQ ID NO: 25621 - DNA, 1450 bp, Homo sapiens
  SIMILAR (1060)..(1314): 981254mologous to Escherichia coli flagellar protein,accession number M85240,Smith-Waterman Score=427.
atgtgccatgtgcttttggcgggacgtcaacgccgcacagctggtccagagcacgcgctgactcctcctgagtgtgggagcgctgctatagggcctgcagtgtacaagtgggcgcacgctacaggtgtgatgatccccgataggcctcgcagtccgcatgccggcgctgaggaacgccattggcatcacccgcagccagagttgatcagtcagcgtttaggatctttctcatcaggccctactaaatatatacatgaattccaatatctaactctgtcctacaatttaacctggagtgacttaaatgtcatcctaacttttatcctcccactagatgaatgggaaagagttttttctctggcccaatctcacactgacaactgtcggctccacaagccagacctccaggaaggcattagagaagttccccaagaggatccccaatggaactatcaggaaaattccccaggtatagctaggcgagattacatgatttcctgcctagttgaagggcttaaaaaggcagcttacaaagctattaattatgacaagcttaaagaaactacccaaggtacagacaaaaacccagcccagtccatggcttgtttggcagcaaccatgagacactttgcagccctagaccctgaagcgctggcgcctcatcgtgatgtgaatcacggcatcaagctcacctgcaagaccatacgatcatcaatagacatatcacgtgagatacgtgcaccacgggagtgccgatcgactgagatggcttcttggcatcctcctgctgatctgactgagtgccctgtagaatctgggtattcggttctgtctgggcgcacagattgccagtattcgcacacagttcggcgagcgtgcctgacgaccattgactctcggcccgctgtgcgacagctgctaaaaataagagaggtccagctacttagtctgttgcgtggatgcgtgcgctctcgaagaagtggaagcattaatgcgcaatattgccgatgcctggaaagagtcgttactctccccttctttgattcaggacccagtctgatgaaccatgcaccgcatttatatttcgcctggcaacaactcgtcgaaaaaagccagctcatgttacgcctggcaacggaagaacaatgggacgaactcatcgccagcgaaatggcgtatgtgaatgcggtgcaggagattgcacatttgactgaagaggttgacccgtccaccacgatgcaggagcagctccgcccgatgctgcgcctgattctcgacaacgaaagcaaggtaaagcaggtattacaaattcggcagggatggactggcgaaactggtcgagcaacttcgtcatttgtccaagaagcatcatctcgatactgactccaccagctcctcactcccgggagtgaggacgccgtactccccaataagaggcggtgaagaatag

SEQ ID NO: 25622 - DNA, 1668 bp, Homo sapiens; identical to SEQ ID NO: 25522
  SIMILAR (1)..(666): 911254mologous to Escherichia coli mannose permease subunit III-Man,accession number J02699,Smith-Waterman Score=1013.

SEQ ID NO: 25623 - DNA, 1764 bp, Homo sapiens
  SIMILAR (679)..(1149): 971254mologous to Escherichia coli similar to S. typhimurium fm1A,accession number U82664,Smith-Waterman Score=757.
cagccccgatccctaaccgcgcgatcgcgtgtctacctcgagcgaaccgatccatgtgattccgaccgggcccgatcgatccggtggagccgatcaccacccgtccctgccgtaccgttcgcaatcggtgcacatttgatacgatcgcatcggccgcaagcgggcgactacaatcgcgacatccccagtgatcctaccaaccaggcggtcggtaaaacgcaggcccagtttcaacgctggtatcgccgccagattgtttctagagtatcaaagcggctcgcgccattttttcacgagcggggggggcgctgtcaggcttccgtttcagctttatcgcgtaaagcgccttcttccaaaggtgagggcgctcttcgctgagactgaaagcttcatttttcgtccatgatggcgttgtaaatctggaactgacttatttccttgtctaaggattaagataatctaagaaatacctgacaatataaaaagaattttcagcctggtaatttaccgcttcaggtctatatttgtgttgaatatattttgcgcggaagtattcatctaacggggctctctattttttagaatagagtgcatattttcaattaagacattcttagaggataaaaaggaatttactactatcagtgtcttaaataaagtaatcggttatatacggatgtggagtcgataaatgagattgaaggaatatatatgaaattaagatttatttcgtctgcgctggctgccgcactattcgccgctacgggtagttatgctgccgttgtagatggcggtacaattcactttgaaggcgaactggtgaatgctgcctgttcagtgaatactgactcggcagaccaggttgtcacactcggtcaatatcgtaccgatattttcaatgctgttggtaatacctctgcattaattccattcaccattcagttgaacgactgcgatcctgttgttgccgctaatgctgccgttgcattttctggtcaggctgatgcaatcaatgataatttattggccattgcatccagtaccaatacaacaacagcaacgggtgtcggtattgaaatacttgataatacatccgcaattctcaaacctgatgggaatagcttctcaaccaaccgagaacttgatccccgggacctaacgttcttcatggattggccttccgagcccggtgtgtatctacggcgaatctccgcgttccgcgaccgatctgctttgacccggggagttcatatcaggcaaacactattgggtctggaagatgcgctgactgccagcctgatgcttaatgcgttgttaattgtgggcgcgctgctgggattagttctgacgcacctgctggcacatcgcaaatttttgctgggaagttttttgctgctggcggcaacgctggtagtcatggcctgtttgccttccggcagttcattaacgctgctgctttttgttctcttcagcaccaccatttcggcagtcagtaatctggtgggcattttgcctgcggaaagttttcctactgacattcgctcgctgggcgtcggttttgccactgccatgagtcgacttggcgcggcgcgtttaaagccgaaccggatgccggaatgctggcggaaaaagagtggcaggcggcggctcagggtaaaagcggaccggatatttcgctactgcgaagtttactcggtgctgatgaacaggccgctgccgcgctgctgttggcgcagagaaaaaacggtacgccgatgtctttaa

SEQ ID NO: 25624 - DNA, 507 bp, Homo sapiens
  SIMILAR (289)..(98): 301254mologous to Grapevine virus A putative RNA binding protein,accession number X75433,Smith-Waterman Score=64.
atgtacgcctcctgcagagcatatatttcccgcaccacagttcgctatcggaatcaggatgaccatgagctacaaattacacacgggaacaagattctatgtggaattgtgtgctgtcatagattaaagcagagtgctggcctggagtctcccctcgcactgctgaacctccctggacgaagtgcagacggggaagccttcgctcatctgggtcatctctcaggctttgtgagtgatgctgccagcaaatatctgccccgccctcctctccccaactctgcaaccggggttgctggtcctataggcctggtgctgtactacaggcttaacagcatggacacacgctcggggaacaagatgaagatctgccttcaatatcaccgttatgattacaaggctggactggccgtcagagaagcacaacaggaccagaacatccctcaggtccactatattgatgacgccatgtcaatcagacctggtgagcaggaagtggaagatatctga

SEQ ID NO: 25625 - DNA, 1764 bp, Homo sapiens
  SIMILAR (1744)..(1520): 371254mologous to Helicoverpa armigera nuclear polyhedrosis virus basic DNA-binding protein BDBP,accession number AF197913,Smith-Waterman Score=91.
atgctggcaggagttttcctgtcagagacccgaaatgacgccaactccgcgagggcgccacgctcgggcctatcccgacacttccaggaaattgcccgagggactgtcggtacaagtcgtcttacctttagcgacgaaaagatctgcgtaggtaccgagctgattgtaccgggttggggatctgaggtcgaagacatacagtctctctccatgtcaagttggaaacaggcccacagctctcagaggcacctgagtttaggccacaggaaatatgatcaactctgtactctggcagtttcacctgatattgagaatgggacccaaggttgtgatactgagggttcctgggcccaaggcgactctctggcacccaagaaggaatctgaaaagtggacgcggcttgcctatgcgcacccagttcgctatcggaatcaggatgacatgagctacaaattacacacgggaacaagattctatgtggaattgtgttgggtcttggggaccttcgaaatcgccgccgctctcacaatgcttgggtccagactgcgccacagcctctcgggagacgtgggccctcggacctttttagtgccggactccgggccgcaggcagtcccgcggcagcaggtcacagaacaaggctgctacgtggccacaattcatttacttatcctcaagaaatttaaccctgtttctttaatagatggtccattttcagaggaccatcaaagccttcacaatcgtaacctgagactaggtcttctggagatggtatcagagaaaaagtgccctaaacctcacagaaagagacaataccaagttcttctattacccacactgggtaaaacttcagggcttcgaaccttgggtccacatctcacaactcaaaggacctctccagactcctggaactacacacctgttggagactttaaggtatttgaccacagtctttctggagaatcctcaacagaacattcaggcaatgctgaactaggtgcttctgttagatggttagcagtgtcctacttctgccaagtttttggaaatggtgaaatagctaagcagcctgagaaggaaaacggagtggcaagagttcagcgatgctcaaatcaaccaacaacaagaggtgaggcaactattgcgggtattccaaaacaggatggtcatgaatacaccaaaaggtcactgaggatgcaccttcatgggcctgttaaccggctgtacttggaggcaactggagtgtcactccagaatgcatccatggcacttacggaaggtctcacttccggggtatcccaggatacatacagtatcctgcaccctcttgtgcaattactcatgacccccagggtcgtgtgtacccccttaccaggctccgtgtcctattcagctcctcagggcccagcacggaatgggccccgcgctgactcacccccactcgtggggcccggcgcgcgggggccgcatggctgccggcaggtgccccgaagccctcgtcgtttctatgcctgcaatctcgctctcctgctgggccaggaaggcggccgccggtcctcctccgccgcctccggggcaccgctctccgacgacgagaagaagcaaagtcatcagccattttccccgcgcctccgccggagcctccgctgcgtcggctctgcccgcgcctgccccgcgctgcgtccggcggccgcgacgcttcacccgagccgcggggagccggcgtcggcgctcgtgttctcccccatgtggtttccacgttaa

SEQ ID NO: 25626 - DNA, 1869 bp, Homo sapiens; identical to SEQ ID NO: 8245
  SIMILAR (520)..(1830): 261254mologous to Sus scrofa gastric mucin,accession number U10281,Smith-Waterman Score=167.

SEQ ID NO: 25627 - DNA, 900 bp, Homo sapiens; identical to SEQ ID NO: 15832
  SIMILAR (712)..(900): 981254mologous to Escherichia coli K12 putative alpha helical protein,accession number AE000169,Smith-Waterman Score=339.

SEQ ID NO: 25628 - DNA, 563 bp, Homo sapiens
  SIMILAR (231)..(160): 581254mologous to Homo sapiens Human secreted protein clone ch582_1 protein,accession number W99662,Smith-Waterman Score=63.
tcaaggttcagaaaactgcgctgggtgaatggaatcttgactgcatatgccccacttgcaatccgagcgtggagggtgggtcgaccccccacgggccacagggggcctagccccggggggcgcggcaacaacttcgcactggacagcagcggtacagatcttcgaccgctggaaacatgcgtttgatctacctggaatcttaagtgtggaccgaaagcattgaaaaccgacagtgtgtagggtagccaatagattgatggctgtggattgcattctggctagcgtgcgtcctaagtggggtaagccctgtgccctcagccggaagcgactcaccacacaattccacatagaatcttgttcccgtgtgtaatttgtagctcatggtcatcctgattccgatagcgaactctgtagacagggcatagctgaacaaaaggcacagtaacttctgcagacttaaacgtccctgtgtgacagctctgaagacacagtggttctcccagcacggcatttgagctctgagaacggacagactgctcctcaagtgggtccctgacccccat

SEQ ID NO: 25629 - DNA, 667 bp, Homo sapiens
  SIMILAR (17)..(103): 411254mologous to Hepatitis C virus type 3a non-structural protein (NS5),accession number X91420,Smith-Waterman Score=63.
atgcagatccacctgagaatcactggaatgctctggacccagctggaatgcttccggaacccagtcaggcttctactgccatcgtatagcgccgattttgccggagaaacgtctcgctcgtatggtcgagaagacctggggtcttggactgcgaagaaggacgggattcagaaggcaaaacttggggggtggtaccgggacgttggtagaatgcacgtccgagaactcaaacgccttccaagagcagctttcgcaaacaaagaaggggtcaaaggcgggaaggtcattaaagtcttaggcgctagatcaggcgggaacgtacggaaaggatgcaggcatcaagagttacgtggaatagttttccgcaagtaccggccgcaaagaagcccagttcgctatcggaatcaggatgaccatgagctacaaattacacacgggaacaagattctatgtggaattgtgtgcatcattattggcaaccaccaacttcggtttcaaggcttgtccacttaaattccgggtagcaagcaattttccagcgtccaaaattgacacagttaacagtccattgcggcaaagctccttggatagacactgtggcagtagggttgaacaaactacggttgatatcgggacaaatatcgaggaacaaggagggtgttggtga

SEQ ID NO: 25630 - DNA, 1092 bp, Homo sapiens
  SIMILAR (1086)..(577): 811254mologous to Escherichia coli K12 K+ efflux; NEM- activable K+/H+ antiporter,accession number AE000411,Smith-Waterman Score=678.
ctatcctgctgtgatgctgtgtggtttctcagcaaaaaatggaggagcagctgttaccaaggtgtgcaccagcgagccgttttcggctggcatctgtgtgtagctgctgccactaccgagcgttgagtcaccgtgctgctctgtcagcaggctgagctggaacatgtctttccttttataaaccttttctcccatttcaaaactgccctctgacaccactcctcgaaaccggcgaacagcctgaagatccgaacagctgaggacatgggttctttgcttttcaagacgactgaactttctcatctgttcgacttgggctatctttttccacacaattccacatagaatcttgttcccgtgtgtaatttgtagctcatggtcatcctgattccgatagcgaactggggcaccatctaacattgggctatttattatgaagtcaataccctcccccggctgcgccgtttgcattgttgtattatcgtctttacagcccacaatgctcggtctagtttcaagtccccggcggcaggccaatttagcgtcagtgggtaccacggcatttaagggtcctccgtcaaccagcttcatggtgtcttccggctcgttacaggtaatgacgatagactcagcggcctctgcacccgcagaacgtaaaagatcgacctgcgtggcgtcgccgtaataaactttgtagccgtatttacgcatcaggttaacggcgctgatatcccgctccagcacggtaatgcgcattttatttgccatcagcaaacgaccaatcacctgaccaaaacgcccgaagcccacgacaatgacctggggtttatcatcgttgacccacggtttttcgtcttcttcttccggtccgttaaactggcgggatagccatttatccaccagcttcatcagcaacggcgtggtcatcatggaaagcgtcaccgtcaccagcaacaacgccatctggtcgcccagcagcagcgtcgcggcggtgaacacttcccgcacgccagaagctgcaataaagcggaataccggacgcagtaaatagcgcccaccaatcagcatgccgacaaacgccagcaccttcat

SEQ ID NO: 25631 - DNA, 2516 bp, Homo sapiens
  SIMILAR (596)..(372): 891254mologous to Escherichia coli O157:H7 glutamate-1- semialdehyde aminotransferase (aminomutase),accession number AE005191,Smith-Waterman Score=341.
atgagggtaaacaccttcgtccagcatcatatggaagaaacgcttaaagcgttccacgtcacaggccatcacatcctgatagcacgtcacggactcggcgtcggtaaagaaaataccgaacatgccgccaacgtggttaacgaccagcggaattccggcttcttctgccgcttccagcagaccttctgccagacgtgttgtcagctcatccagcgtttcgtgaacgcccggctgcgcgacttcattcagacaggcgaaacccgctgccatcgcaatcgggttaccggaaagcgtacccgcctgatagaccggacccgtcggggccagcgcatccattacatcacgacgaccaccgaatgcgcctaccggcattccaccgccgatgattttgccgaggcagctagcgctacgcggaaaccggtcatcacttcatcgatgatcagcaacgcgccaaattcgtcgcacagcgcgcgcagacctggcaggaactctggcagcggcggaacacagttcatattgcctgccaccggctcgacgataatacaggcaatctcttgcgggtattgctcaaatgcggcgcgtacagaagccagatctcttataagttaccggttaaagtatatttggagaaatctgcggaaagcccgggagttgggttggctaaaaaaacaacacagacggagaagcaacagggacaacaaaaagcagagaggcaagaacaagaaagaggaggaccacggagcggagcagaacagacagggcgagcaacggaagagacgagcaacgcgcgaagaaaaggaacgagcagaaacaccattagtttgttgttcactagtcattggagaacagatgattgatgtcttagggccggagaaacgcagacggcgtaccacacaggaaaagatcgcaattgttcagcagagctttgaaccggggatgacggtctccctcgttgcccggcaacatggtgtagcagccagccagttatttctctggcgtaagcaataccaggaaggaagtcttactgctgtcgccgccggagaacaggttgttcctgcctctgaacttgctgccgccatgaagcagattaaagaactccagcgcctgctcggcaagaaaacgatggaaaatgaactcctcaaagaagccgttgaatatggacgggcaaaaaagtggatagcgcacgcgcccttattgcccggggatggggaacgaaccgatgactggatggatggccgccgcagtcgtcacactgatgatacggatgtgcttctccgtatacaccatgttatcggagagctgccaacgtatggttatcgtcgggtatgggcgctgcttcgcagacaggcagaacttgatggtatgcctgcgatcaatgccaaacgtgtttaccggatcatgcgccagaatgcgctgttgcttgagcgaaaacctgctgtaccgccatcgaaacgggcacatacaggcagagtggccgtgaaagaaagcaatcagcgatggtgctctgacgggttcgagttctgctgtgataacggagagagactgcgtgtcacgttcgcgctggactgctgtgatcgtgaggcactgcactgggcggtcactaccggcggcttcaacagtgaaacagtacaaagcttcgcatgctgcagacagactccagtcctggcaggccctctgaatacagcaggaacaaaaaatttctggcggaaaaggtgttactgggtggtaattctcttctacagcctctggtggttggctccatgtgtatctgtgtggcccgtgtctgatctggtgcactcctgtgtgagagaggtagtgtggaagggtggcaagagcgtgtcctttggagacagacccaggctcaaatgggtggactggggtcagcagccccagtctttcggctacatacttgatcctttcagcgaaggtacttttggtctgggctttgcggagaggcagtacgcccatgatactcagtactttcttccagtcttggcccagttcgctatcggaatcaggatgaccatgagctacaaattacacacgggaacaagattctatgtggaattgtgtgtgacactgatcccatcgacatcctgcacgttcatgacaatatgcactgtggtcccgcacccatcatgtgtcccgtacgccagtcgccacccccaaatggcttgcgcattggccagcaatacacggtcttaaccaccatggccattagcgtattcataaaaagttctcaagtgagcctcctcatcttacagtatgcaaaaacgaatgagcaccagaacaacaaacagaccatccaaacacaggaaccgcaaacacaaccaacaacgcaagacctacaagcacgacgagaagcaaacacaagagaaaaaccaaacaacaagacagaaaagaacacgaaaagacacaagaccaaccaagaccaacgagcgccaaacgcacaaccatcagcaccacaagaaaaacatacaataaccaaacgaccatcaacctcagaacacaaataa

SEQ ID NO: 25632 - DNA, 1253 bp, Homo sapiens
  SIMILAR (342)..(641): 341254mologous to Escherichia coli K12 orf, hypothetical protein,accession number AE000240,Smith-Waterman Score=101.
ttcgctatcggaatcaggatgaccatgagctacaaatacacacgggaacaagattctatgtggaattgtgtggatttcgtgtaaacccgccttggctagccaccgatgtaacgcatgccgcaatggcgttgcttaccttggtgaccacgggtttacatatagtgggggagtgggggaagcatgcgacaccacctgtaccttacagcatttgcagtaacccgcctaggcgtgccgcgtatattacggtttggcgcaaccgcccctgcacgcttggcgatcacttgttcagtattgcttaccctcgtgggctgcgttatgatatgggggggggaggggagggaaccgcgtgggcaaatgttaggcaagcactcgcacggaccaccggacgagcacaacattggaccaaggataacgccaaaagctcacgagaagcccggcaccccagacagaacaaaacgaaaactcacctaggtaaacctgttttacgttgggtagaccgagttttgatcaaagcaaatatgacagcatcgtctggaacccaatcattattatccggtaccgaaaccgtcgacccaggtagggcagaaagttctgataaaattttgaactataccaacaccgaaatgaaagaagcgatagcgcacataccagcaaagaagggctgcaattctatgaagtggttcctgttgcattagtggttgcggggacgcaaatggctacaggcctccgtaccatggatactcgcctctattttgaaggtgagctgattgatgcagcgcctaataaaccggttatcaaagtcgttcgtcagggcgaagagccggactggccaagcaaaggtgatgcgggggacggagagaaagtacccagttcgctatcggaatcaggatgaccatgagctacaaattcacacgggaacaagattctatgtggaattgtgtggtgagtcgcttccgctgaggacacagagaagttgttcggggccgttgggcagagtacgatgcaacgagattgagcggtctgttgagcgcttctttgagtggaacaccccccgagtttggaaaataaaaatagaagagaaaaaacaagcagccaggtgttgtggttggtgtagggaagacagattgcgaattgagggagcagcagcggtacacacgcaccagcccgttttggataagcggattgacaggcggagcaaagagagaacaagagttgaatatcgttggcccactccgagggaatacggaaaatag

SEQ ID NO: 25633 - DNA, 285 bp, Homo sapiens
  SIMILAR (140)..(229): 861254mologous to Escherichia coli 35 kDa protein,accession number M80458,Smith-Waterman Score=133.
gcgttacttttagaacagcaggacggcaaaactctcgcatcagtacagactctggacgaaagtcgcctgccggagggcgatgtcacggtcgatgttcactggtcgagcctgaactatgaaagatgcgctggcgattaccgcaatgattatcggtactgccggttttaccgccatgctgtgtgtgatggcgctggaagatgccggtgttcgcccgaagacggggagattgtcgtgacgggtccagtggtggcgcggcagtaccccgtggcgctgctgcataagttg

SEQ ID NO: 25634 - DNA, 434 bp, Homo sapiens
  SIMILAR (404)..(207): 551254mologous to Salmonella typhimurium phosphoribosylpyrophosphate synthetase (EC 2.7.6.1),accession number M19488,Smith-Waterman Score=130.
agcttcagcagctttacacagcgtaccgccagtgtgatcatatcatcgaccagtacgcagtcacgacttgcaacgtcaccgatcttagcgatagcgcgggcacgcacaagccgccgatgtccggagaaaccacaattgggttatccagattcagctgcgcatgtcttccagcaggatcgggctaccaaatacgttatcaaccggaactcgaagaaaccctgaatctgttcagcgtgcagatccactgtcagcacacgtcaacaccgacgctggagaggaagtctgcaaccactttcgcagtgattgtacacgagcggaacggacgcgacggtcctggcgcgcatagccaaagtagggataacagcggtgatacgacctgcggaagcacgacgcagggcatcaacataacgactaattccatcaggttgtcgtta

SEQ ID NO: 25635 - DNA, 473 bp, Homo sapiens
  SIMILAR (173)..(469): 761254mologous to Escherichia coli Hypothetical protein in pth-prsA intergenic region ,accession number D90756,Smith-Waterman Score=351.
tctgccatgttcgaacactaatcgaacccggctcaaagacccgctgcggcgggtttttttgtctgtaatatccatttgtatgacctatgcctccttcacctgccatttagttgacagatgatgcgctcacggatgaaacattattgtgaacaaaatattttcctcacatgtgatgcctttccgcgctctgatcgacgcttgctggaaagaaaaatatactgccgcacggtttacccgtgacctgattgccgggataaccgtcgggattattgctatcccgctggcgatggcgttggctattggtagtggtgtggcaccccagtacgggttatataccgcagctgttgcggggattgtcattgctctgacgggtgggtcacggctttatcgttttcggtcccaattgagcatttggggaaattctctattcccggtcggaccaggtttggactggggggactccgggttggggc

SEQ ID NO: 25636 - DNA, 809 bp, Homo sapiens
  SIMILAR (66)..(791): 951254mologous to Escherichia coli arginine decarboxylase,accession number M93362,Smith-Waterman Score=1231.
atcaaaaggtcccacggtccacgttttccccccccctcccccccaactgtgaatgcgctgtcacagcttcttatattatgtccgtaaggtcgtggggcgattacttctcccgttccaacagggcttacatgatgcatgccaccacctccccgctgtatgccatctgcgcatccaacgacgtggcggtgtcgatgatggacggcaacagcggcctgtcactgacacaggaagtgattgacgaagcggttgatttccgtcaggcgatggcgcggctatataaagagttcaccgctgacggtagctggttcttcaaaccgtggaacaaagaagtcgtcaccgacccacaaaccggcaaaacctatgactttgctgacgcaccaaccaaactgctgaccaccgttcaggactgctgggtaatgcatccgggcgaaagctggcacggcttcaaagatattccggataactggagtatgctcgacccgattaaaatcagcatccttgctccgggaatgggtgaagatggtgaactggaagaaaccggtgttccggcggcgctggtcactgcctggcttggtcgccacggcattgtacctacccgcaccactgacttccaaattatgttcctgttctctatgggcgtaacccgtgggaaatggggaactctggttaacaccctttgctccttcaaacgccactatgacgccaacacaccgctggcgcaggtgatgccggaacttgttgaacaatatcctgacacttacgcgaacatggggattcacgatctgggtgacccatgtttgcctggctga

SEQ ID NO: 25637 - DNA, 1509 bp, Homo sapiens
  SIMILAR (798)..(130): 941254mologous to Escherichia coli 35 kDa protein,accession number M80458,Smith-Waterman Score=1081.
ttatcggtatggaatacgggtctgcgtattcttgatgcgatgatgcatccggtgccgccgggtgtggcgggtgatctctatctcactggcattcaactggcgcagggctatctcggaccgcgtatcatttgcgcagcacttttgccagcactttgtcgccaacggtgtcaatgccccagcccagacttgtttttccagaggacgggattcggcgaactcatcacgagggagaacacggctagcacctaaacttttcagatattcatgggtactttcgcgaccggaaacggcaacgacctgataacccaacttatgcagcagcgccacggcggtactgccgacgccaccactggcacccgtcacgacaatctccccgtcctgcgggcgaacaccggcatcttccagcgccatcacacacagcatggcggtaaaaccggcagtaccgataatcattgctttacgcgcgtccagcccttgcggcatggcaaccagccagtcacctttcactcgcgcctgctccgccagcccaccccagtggttttcaccaacgccccagccagtgagtaacacctcctgaccggcatgaaaacgcggatcttcgctggtgcgtacagttccggcaaaatcgatcccaggaatcatcggaaaattacggatgatttttcccttaccggtaatcgccagcgcatctttatagttcaggctcgaccagtgaacatcgaccgtgacatcgccctccggcaggcgactttcgtccagagtctgtactgatgcgagagttatgccgtcctgctgttctgtgaccggctctgctgccctcacggaaaccacaaaacactctttcagtcctgacatgggcaggatgggagctgattcaggcccagcactcagcttcctctcagtccgtgattgcgcaatcagcgcagcattggcttcgcgcagctgttcaaccagtgcctctttttgaatatattgtgcaatcagtccggcgaataactgtaaaacctgttccgcgcgttcactccactggcgcttctcactgctggcggcgcaaagcgtgccatagaatgatccatccggtaagtgaattggcgtgctcagaaatgtggtgatgccaagattgcgtgccgcaatacagtcaccccaacggtcggggacttcgtcgctgaaaaagcagttttcatcaatggcgcgtttgcataacgagtaatcccacgagacggtaaaattctccgggatgtacattttctggctgttacgggcaaacataatatgctgcaggcgcgcttcgacatccactttggtcaggtaggttgattccatatcagtgaccatttccagcatctccagaagctgtcggaccagactttccagtgactgttctttggcaagggattgcgagacgcgggcggtttgctttgttcttctggcctctgtactgttcccggggttttcttctgctctgtagtcctttcggcccgcgtgtttttcatgtgtttgattgtgcat

SEQ ID NO: 25638 - DNA, 1650 bp, Homo sapiens
  SIMILAR (784)..(1509): 981254mologous to Escherichia coli alpha-galactosidase (AA 1- 451),accession number X04894,Smith-Waterman Score=1292.
atgattaaccgtctacagcacacagtatatactcataaatggaactcatatcgtaccgagcccgacagacgtcatacagccttgaggaatagtttctgcctggtgagattgaatgatagttctcattcacgaagcctggattctaagcagggacacacagaaattactttcgcagctacagagcatcccccctcccctgtatccttgcgcatccacgacgtggcgttcgatgatggacggcaaaccagccgggccccttgtttcaacctggaacaaccagggaagctggattgtacgaagcggttgatttccgactgctgggtaatgcatccgggcgaaagctggcacggcttcaaagatattccggataactggagtatgctcgacccgattaaaatcagcatccttgctccgggaatgggtgaagatggtgaactggaagaaaccggtgttccggcggcgctggtcactgcctggcttggtcgccacggcattgtacctacccgcaccactgacttccaaattatgttcctgttctctatgggcgtaacccgtgggaaatggggaactctggttaacaccctttgctccttcaaacgccactatgacgccaacacaccgctggcgcaggtgatgccggaacttgttgaacaatatcctgacacttacgcgaacatggggattcacgatctgggtgacaccatgtttgcctggctgaaagaaaactactctggcgcacggttgaacgaagcctattccgcctgccgtggcgaagtggctcatctggaacaaaccattgccgatacgttgggcccggtcggtactatgcgcgcgctacgtaccattccgcatctgtggcaaatttgcgaggacatgacggaagtctgccccgatgccaccatgctcaactatgttaacccaatggcgatgaatacctgggcgatgtatgcccgctatccgcatatcaaacaggtcgggctgtgccattcggtgcagggaacggcggaagagttggcgcgtgacctcaatatcgacccagctacgctgcgttaccgttgcgcaggtatcaaccatatggcgttttacctggagctggagcgcaaaaccgccgacggcagttatgtgaatctctacccggaactgctggcggcttatgaagcagggcaggcaccgaagccgaatattcatggcaatactcgctgccagaatattgtgcgctacgaaatgttcaaaaagctgggctatttcgtcacggaatcgtcagaacattttgctgagtacacaccgtggtttattaagccaggtcgtgaggatttgattgagcgttataaagtaccgctggatgagtacccgaaacgctgcgtcgagcagctggcgaactggcataaagagctggaggagtataaaaaagcctcccggattgatattaaaccgtcacgggaatatgccagcacaatcatgaacgctatctggactggcgagccgagtgtgatttacggcagcgtccggacatggatgaaattggaaatcatcattctcagtaaactatcgcaagaactaaaaacctacaccgcatattcagcagctgtcttgttccgcccatccaagccatatgtttttacccgtatgaaccttgataatttagtgtaa

SEQ ID NO: 25639 - DNA, 789 bp, Homo sapiens
  SIMILAR (503)..(459): 1001254mologous to Pasteurella multocida PrsA,accession number AE006059,Smith-Waterman Score=75.
atggtgatcccgatacccgaggtgaaactaaggtacggaaaccggaatatactcaatcaggcgacaaagcgtgccagacccatagaatcaaaaagatccccgacagcaaggtcgcaaccagcagtcctgccatccaaactgttgcgacacgggatagagaattaccacaaatgccgcagtcgaccggaaacgctaaagcgtgacccacccgtcagagcaatgacaatcccgcaacagctgcggtatataaaccgtactggggtgccacaccactaccaaagccaacgccatcgccagcgggatagcaataatcccgacggttatcccgcaatcagtgatttgatttcatcgctcagcgaatggtatcgcagacaacgacttcatcaattacagagttacgcaggttgtcgccgcgttgccagagaagatcgggtgagtcgcgtacgcaaatacacgttagcaccacgttctttcagagcttcagcagctttacacagcgtaccgcagtgtcgatcatatcatcgaccacagcttagcgatagcgcgggcaccacaacgccgccgatgtccggagaaaccacaattgggttatccagattcgctgcagcatgtcttccagcaggatcgggctaccaaatacgttatcaacggaacgtcgaagaaaccctgaatctgttcagcgtgcagatccactgtcacacacggtcacaccgacgctggagaggaagtctggaaccctttcgcagtattggtaccaagcggaaaggacgcaagggtctggggcgatag

SEQ ID NO: 25640 - DNA, 990 bp, Homo sapiens
  SIMILAR (148)..(354): 541254mologous to Escherichia coli arginine decarboxylase,accession number M93362,Smith-Waterman Score=166.
atgccaccacctccccgctgtatgcatctgcgcatccaacgacgtggcggtgtcgatgatggacggcaacagcgcctgtcactgacacaggaagtgattgacgaagcggttgatttccgtcagcgatggcgcggctatataaagagttcaccgctgacgggtgaagatggtgaactggaagaaaccggtgttccggcggcgctggtcctgcctggcttggtcgccacggcattgtacctacccgcaccactgacttcaaattatgttcctgttctctatgggcgtaacccgtgggaaatggggaatctggttaacaccctttgctccttcaaacgccactatgacgccaacacacgctggcgcaggacgcatcgcggcaaatcagttatcccgtatccgccaggaatcccgatgctgctgtctggtgaaacttcggcgataaaaacagtccgcaaggtgccaattttaacaccacggtcgcacctcgagcacggtgcaaatttgtacacgacggacgcaaacacgttgaaggtacaatttgaacacgacgcacgcccctacgtgcacggtgccagtttgtacagacggacacacctacgtgaacggtgccaaaatgaacaccacggacgcgacacgtgcacggggccaaaaagtacaccacgcacgcacccacgtgcacgggccaaaatgtacacgccggacgcacccacgggcacggtgacaataggtggcgacgggcgcacccacgtgcatgcggcaaatttgtacactacggacgccccacgcgcacggcgccaatttgtacaccaagaacccacctacgtgcacctgccaatttggctacgacgcacgcaccctggtggacggagaaaatttgacacgacgcacgcagccacgtgcacggtgccaatttgtacaccacgcaccacctacgtacgcggtgctaatttggacaccacggtggcaccctacgaccgtgtgcacagatag

SEQ ID NO: 25641 - DNA, 3069 bp, Homo sapiens; identical to SEQ ID NO: 13166
  SIMILAR (3045)..(2167): 961254mologous to Escherichia coli ADENYLOSUCCINATE SYNTHETASE,accession number A92595,Smith-Waterman Score=1485.

SEQ ID NO: 25642 - DNA, 1284 bp, Homo sapiens
  SIMILAR (693)..(4): 871254mologous to synthetic construct chloramphenicol acetyltransferase,accession number A02739,Smith-Waterman Score= 1074.
ttacgccccgccctgccactcatcgcagtactgttgtaattcattaagcattctgccgacatggaagccatcacaaacggcatgatgaacctgaatcgccagcggcatcagcaccttgtcgccttgcgtataatatttgcccatggtgaaaacgggggcgaagaagttgtccatattggccacgtttaaatcaaaactggtgaaactcacccagggattggctgagacgaaaaacatattctcaataaaccctttagggaaataggccaggttttcaccgtaacacgccacatcttgcgaatatatgtgtagaaactgccggaaatcgtcgtggtattcactccagagcgatgaaaacgtttcagtttgctcatggaaaacggtgtaacaagggtgaacactatcccatatcaccagctcaccgtctttcattgccatacggaactccggatgagcattcatcaggcgggcaagaatgtgaataaaggccggataaaacttgtgcttatttttctttacggtctttaaaaaggccgtaatatccagctgaacggtctggttataggtacattgagcaactgatgggggatccgcaccactgacttccaaattatgttcctgttctctatgggcgtaacccgtgggaaatggggaactctggttaacaccctttgctccttcaaacgccactatgacgccaacacaccgctggcgcaggtgatgccggaacttgttgaacaatatccgggcagatagttcaccggggtgagaaaaaagagcaacaactgatttaggcaatttggcggtgttgatacagcgggtaataatcttacgtgaaatattttccgcatcagccagcgcagaaatatttccagcaaattcattctgcaatcggcttgcataacgctgaccacgttcataagcacttgttgggcgataatcgttacccaatctggataatgcagccatctgctcatcatccagctcgccaaccagaacacgataatcactttcggtaagtgcagcagctttacgacggcgactcccatcggcaatttctatgacaccagatactcttcgaccgaacgccggtgtctgttgaccagtcagtagaaaagaagggatgagatcatccagtgcgtcctcagtaagcagctcctggtcacgttcattacctgaccatacccgagaggtcttctcaacactatcaccccggagcacttcaagagtaaacttcacatcccgaccacatacaggcaaagtaatggcattaccgcgagccat

SEQ ID NO: 25643 - DNA, 1329 bp, Homo sapiens
  SIMILAR (856)..(945): 961254mologous to Escherichia coli phospho-beta-D- galactosidase; alpha-subunit,accession number U18997,Smith-Waterman Score=150.
ctacagaagacgagaatcagtaggccgagtgaactgaagagatagactgagacctacaaacaggatccgacggttgaacaatccggatattaggtctacataaggacgggatctaattaagtagggttcgcccgaagagttgagtaccatcgacacaacgcgtttgttgccacgagcagcgaacagtgccgcttcgttcaccaggttcgccaggtcagcaccggagaaaccaggagtaccacgggcaatgattgccgcgtcgatatcgggtgccaatggtacgtcgctccatggtgatgacggaagcgcagaaagaatcgacggcgataaaccggcattcagcttccaggggcaccctgaagccagccctggtccacacgacgccgcgccgttgttcgaccactttatcgagttaattgagcagtaccgtaaaaccgctaagtaatcaggagtaaaagagccatgccaaaacgtacagatataaaaagtatcctgattctgggtgcgggcccgattgttatcggtcagcgtttgggctggcgcgacagtgatggagtcagactttgtggagttctcggaagccaggaaaatgtgtgtgaacttgatgaaaagggagaggaacggtggagcatatcgggtacatcgtctgagttcacccggtagaccacttatgccctggggagcacggatacgattgccacgagggattgcgggtacagtctgactgggccaacggactaaaacgatggatgccgtaagctcttcaaaggactctggaacccgtgggttttggaacgcaataacttttgtcacatgtttacatattcctctcccaaaatgcacactttcattatccgcgaagcgttcctcaacattacggtgaccaaagattcccccacccgctacagcgaagccggacaccctatcgccacttatcagttcccgcaaataatgcgcgtccagctgcggcagcgtgatctgcaagggggcttcgctgttcggcgcaacgtcgcgcagtttaatctgctgcgtcgcgagcgtttcaccttcggcgcgcacctctgcgtgcagggtgtagtcatcaagcgtggtaaaccacagtttattttcgactttcaactcgccgcgagtcagatcccgcgcgtggatttttaccggcgcgataacctgtttgtactctttcaggcccggtcccggcgtctgatcggaatagatcaaaccatcaaatggtttgataaggggaaatctgttttgtttggctctcattctctctctttgcctgctgccatccatgtaagatgtgacttgttcctgcttgccttctgccat

SEQ ID NO: 25644 - DNA, 798 bp, Homo sapiens
  SIMILAR (43)..(645): 691254mologous to Escherichia coli arginine decarboxylase,accession number M93362,Smith-Waterman Score=643.
atgagcgacgcagaagacggtgcaaggacgaccctggggtcgggtaacgccgttgagcgtctggcagatgctttaagccagcaaaatgttaccgtgattaaatccacctccttggatgatggttttgccattctctcttcaaacgaagccattgactgcctgatgttcagctatcaaatggaacatccggacgaacatcaaaacgtcagacaattgatcggtaagcttcatgagcgccaactaaacgtgccggtcttcctgttgggcgatcgggaaaaagccctcgccgcaatggatcgcgacctgctggagcttgtcgatggaattcgcctggatatttggaagataccgccgactttatcgccggagcgcgccgttgccgcgatgacccgctaccgccagcagctgttgccgccactgttcagcgcgctgatgaaatatagtgacatccgagtgaatattcctgggcagcgccaggccaccagggcggcgttggttttgaccaaaacacccgccggacgtttctaccatgactactaccgtttgttgcgtgtcgcttgggttcttcataagacggagtgtagattaatcaactttcctgagacacctatttttggcaactcatttagatatgacattgaagtgtcgaatgaatcaccggatgaagaagtcaaactacgacgtcatcatttagccagatgtatgaagaattttaagacggatatctatttcgtttccacgtttgaaccgtcgacaaaatcggtcgatttgctcacggttgaaacttttgctggtacg

SEQ ID NO: 25645 - DNA, 1788 bp, Homo sapiens
  SIMILAR (1788)..(1378): 951254mologous to Escherichia coli RF-3/Tos,accession number D17724,Smith-Waterman Score=665.
ttatgcgccgaagcggtcggcatagtgttggcagccagggcaccagtaaaacgggcgagatgacagcgtggttttctcaatgatgctgccacaacgttcgcacggttcgccatctcgatgaaaaaccttaaagcgaaacagcgccccatgatgtttattctcatccacctgcccccgcgtagcgtaggaaaatcgaggaatctccagtaacgcgtgtgcgagtgcatccagttgcgccgcattgagatctttcgctttatgatttccagtcaacccaacctgccagaggatctccacccgcaaataattgccaagcccagccagaaacgcttgatcgagcagtaatccagcaaactgacggttacgaaagcgcggcgacagggaagtagatacaaatcgtctaggttcttctcctgatgtggtcgcatacatacaatattggtcagtataggagctagaccctgtttctgcgtacaatggcatatcatctgtgtggttggtgtcgatcgtttgtacgataccatgaccggcgtggcaatggtactgaaagagtatccgaaaacggcggttaacgtgattggttataccgacagcacgggtggtcacgacctgaacatgcgtctctcccagcaacgtgcggattccgttgccagcgcgttgatcacccagggcgtggacgccagccgcatccgtactcagggccttggcccggctaacccaatcgccagcaacagcaccgcagaaggtaaggcgcaaaaccgccgtgtagaaattaccgtttctaagggcgactgtgtaatcccagtcggcatcgaacttttcgctgacccagtagacatggggattctcagtcggagtgccatgcccaagcttgatcagctcgcgcgccaccaggcccgcaacagttggtgacttgcaataaatgatcgttgcgtcgacacatgcgtgcgcgatttcccccagcgctttgagcttggctttgtcgtcattcgctttgatgccgaacgtcttaacatctagcgcgacgcgaatgctgttaacgaacggtcccgtcaggtaaaactgcctggagaccttaagcagtttgcttaacgcaatgttgagctcgatgactcgttcgtcttgatgatcaatgtccccgcttttcagttgtcggaacgtagatacaggtctctcaagcttcaccccttgtgtcggtaggccggtgtcatagtcgcgtacaactggcgaatagccatcttgtggacgtggacgaaacgcccccatccagcgcggccgtgcatctttacgccacggacgcagactccattggtaactgcggaacggatcgcgaattttgtccatgtaatccaataaggcgtcatgcattttgctgcgaacgtcaactgcaccaacgatcagatcgttgttggagattgaacggaacacctgctccgcgccctcttcggaaagctgtaccagccctttgagcagctgtttttgcttcaccggatctttcaggcggatacgacggaacagttctggtgcgaagttcggaataccggtgaacttcatcatctcaccatgggtaaaggtgtcgccgatctgaatggtgctgtggttgtgcaggccgaggatatcgcccggatacgcttcttcaacgtgcgaacggtcacccgccataaaggtcagcgcgtcggagatcaccacatctttcgcagtgcgcacctggcgcagtttcatgcctttttcatatttaccggacaccacacgcataaacgccacgcggtcgcggtgtttcgggtccat

SEQ ID NO: 25646 - DNA, 4977 bp, Homo sapiens; identical to SEQ ID NO: 22472
  SIMILAR (2283)..(2333): 941254mologous to Escherichia coli arginine decarboxylase,accession number M93362,Smith-Waterman Score=84.

SEQ ID NO: 25647 - DNA, 2001 bp, Homo sapiens
  SIMILAR (412)..(1272): 861254mologous to Escherichia coli 100 pct identical to sp:YI5B_ECOLI,accession number AP002527,Smith-Waterman Score=1254.
atgtcaaagccaaaatacccttttgaaaagcgccttgaagtcgtgaatcactacttcacaactgatgatggttacaggatcatctcggcacgttttggtgtcccccgaacccaggtcaggacatgggttgccctctatgaaaaacatggagaaaaaggtttaattcccaaacctaaaggcgttagtgctgatccagagttgcgtattaaggtcgtgaaagctgtgatcgagcagcacatgtcccttaatcaggctgctgctcactttatgcttgctggtagtggttctgtagccaggtggctgaaggtctatgaagagcgcggagaagctggtttacgcgcgctcaagattggcaccaaaagaaacattgcaatatcagttgatccagaaaaagcggcatcagcattggagctgtcaaaagaccgacgcattgaggatcttgaaaggcaagttcgatttcttgaaacgcggcttatgtatctaaaaaagctgaaagccttagctcatcccacgaaaaagctctcagcaagcctgacaagtatgcggacgttaaaaagcgtatttagtgagatttatcacgagaatagaggccgatacggataccgtagggtaacgctgtctcttcatcgagaagggaaacagattaaccataaagctgttcagcgcctgatgggaaccctctcacttaaagcagcgattaaggtcaagcgataccgctcttacagaggagaggtagggcaaaccgcccctaatgttctccaaagagatttcaaggctacgcggccaaacgagaagtgggttaccgatgttactgaatttgcagtcaatgggcgcaagctgtatttgtctccagtaatagatctcttcaacaacgaagttatttcttacagcctttcggaaagaccagtgatgaacatggttgagaatatgctcgatcaggcattcaaaaagcttaatcctcacgagcatcctgttctgcactctgaccagggatggcagtatcgtatgagaagatatcaaaatatccttaaagaacatggtattaaacaaagcatgtccagaaaaggcaattgtctggataatgctgtggtggagtgtttctttggaaccttaaagtcggagtgtttttatcttgatgagttcagtaatataagcgaactgaaggatgctgttacggaatatattgaatactacaacagcagaagaattagcctgaaattaaaaggtctgactccaattgaatatcggaatcagacctatatgcctcgtgttaactgtccactttttgatactctaaggattccggacatcggcggcgttgtgcgtgcccgcgctatcgctaagctgctgaacgataccgatatggcaatcatcgacaaacgtcgtccgcgtgcgaacgtttcacaggtgatgcatatcatcggtgacgttgcaggtcgtgactgcgtactggtcgatgatatgatcgacactggcggtacgctgtgtaaagctgctgaagctctgaaagaacgtggtgctaaacgtgtatttgcgtacgcgactcacccgatcttctctggcaacgcggcgaacaacctgcgtaactctgtaattgatgaagtcgttgtctgcgataccattccgctgagcgatgaaatcaaatcactgccgaacgtgcgtactctgaccctgtcagaaaaatatactgccgcacggtttacccgtgacctgattgccgggataaccgtcgggattattgctatcccgctggcgatggcgttggctattggtagtggtgtggcaccccagtacggtttatataccgcagctgttgcggggattgtcattgctctgacgggtgggtcacgctttagcgtttccggtccgactgcggcatttgtggtaattctctatcccgtgtcgcaacagtttggactggcaggactgctggttgcgaccttgctgctcggggatctttttgattctgatgggtctggcacgctttggtcgcctgattga

SEQ ID NO: 25648 - DNA, 3827 bp, Homo sapiens
  SIMILAR (1766)..(1029): 1001254mologous to Escherichia coli regulatory protein,accession number L43490,Smith-Waterman Score=1240.
cagatggtatagccaacacggttaggtccgtaacggttctggaacagacccagcaggcgacgttcgccaaagctcatgaatggcccgcaggtgacaaccatatcggcaaaccccggaatatatttcgcaatccgatcgtcaggatgcagtttgccttcgctcatcagcttttgcagggcgaagttcgtggcgtacattttggtgtttgaggccaggtcatacagcgtcccggtggtggctttgacaggctgttccatcaacacgctgccatcgtactttttcgccgctccccaggctttgcgatacacaatctgattatctttaatgatcagcaggtttacgctgggataaccgacatcaacttgctggctaatccagcgatccatctggttaagccgttcgacgttaaaccctgctttctctggcgagctttctgtcagaacagggtattttgcggcgctgacgctacaacaggctatcaggccgataaacaaaccgcccgccgcgccgcctaaacaggcggtaacaaacggcttcatgcggggcagggtgacaccgtaaatcagcggttcaccaacgcccagcaggccgggaataatcgccccgcgtacctgactgcgtagcgcactgtgcggtggcgcccgacagtagagtgccagcgccgcgcccacctggcccgcgcctgccatcgaacggatgggacataagctgttgaatacctggctgtccattaacgcgaggtaaaccggaattaaggcctgatgcaggccaataacacggcgatcaggaaaggccgttaaaaccgaaaacgaacctatatcgctgagattgattctgcaccctgcgcgtttattgtcggcttgccgaacatcaacgaggcgattgccgatctgaacggatcgctctttcccttcggctgggcaaaattgctgtggcgtttgaaagtcagcggtgtgcgaactgcgcgagtaccgctgatgggcgtgcgcgacgagtatcagttcagccgcatcggcccggtgattgcgcgccgagcgaatcaaatggtggccttccagctcgatatcgtggagattctttttcacggtccgcacatgatcgcgtgctgcgcgctgggcgacgtgcggcagccgctgcaacaccgcgttgtagatccgcgcatgctggcgatcgatctgctttttttgctgtggtcgatggtagagattatttacgctggcaaacactgaattaaacatcagatcggtcaatgattgcagcgtaaacaccagcacctgattgtgagaagcctgacaaatggcgagatggaaagcgtgatccaactgcgcatgttcgatcagcgaaatctctttgttgttctcactggcggcgagcattttttcataacagcgggttatcacaacaaaatcagcctgcgttcccagcgttgccgccagccttgccgattcgccctccagtaatgcgcgaacgtcgagcagatcgtacagcgttcgcggctgcgtactgaacagatggatcagcgggctggtgtcctgcacccgattaagccgtgcgacacgagaatcgcgaccctgcgccgtttcaataatcccgcgcccgcgcagcacggtcagcccttcacgcagtgcggagcgtgagaagccgagcttttcacacagtcgacgttccgagggaagcggctgaccgaccttcagtacgccgtcgataattaaccgttcgatactctctgcaaccacttcgcaaatagggcgacgttcatctttcattcccggacctcgtgcacagtggcttaaccccctggctgtacagagcggattttccacattaccgctggtgcccaaatacccccagcccaggccgagcgtaaaatcgaacggcccccaggctttgctggcaacaagatattccgcatcaaacagccccgtaccgccgatatcccgcgcaccaaccgccacttgcggcagccagtaactctcttcccacaaacgcagtttgagatcgaaggctttatctttatacgtttgatcgccagagaacgcttcgacgctgctgtactgccgggtgcgcacgtcggtgtagcgcagcgttgtttccagccacgggaagagttgcactgaagctgagtaataacggtactgatcgttatcgcgatagttcagactcaactccccttcccgtgccatacgcgcggtgggcgtttgtaataatcctacgccaccgaaatccgactgggcaaggggaaagatttggcagacagcgtctgccaaatctttgccgatgggaattctgcagacggtgtctgcggaattcccaatggtgttaattcgccagacattggcctggctggatgcgccataacaaatcatgcgaatgttgaacggttccagtacgccgaatacctctttgccaacgccgcaagcttttgacaggtcattgccaatgagcgcgaccagcgccagaccttcttccacctccacccgacacagtgcggaaagctccatcagcagagattgcgtcagcaacgtatcgccagtggaggttgaaccggtggtatcaagggttaatgccacgctcacttctgacgtggtgattaagtctaccgaaatattatgccgcgcgaggatgccgaaaacttccgcgaggaaaccgcgagaatgcagcatattcaggcagcgtaccacctgcgcgtgggtctttgctggatccgacaaagaccgggatatcgctgcgtactgcgggtagcaacgttgccggatgcagtacttttgcaccaaaagttgccatctctgccgcttagcaaacgcgatttcatcaatgcgttgtgccccggccaggcaaagatgttgtcgataatcatcgtcccgccaatcagttcgccgatatgcatccccacggcggtgatcatcggcagcgaggcattgcgcaggatgtggcgacgttcggtctgtttgtcgttcaggccgcgcagacgcgcccaggatgcatccgggcgaaagctggcacggcttcaaagatattccggataactggagtatgctcgacccgattaaaatcagcatccttgctccgggaatgggtgaagatggtgaactacccgcaccactgacttccaaattatgttcctgttctctatgggcgtaacccgtgggaaatggggaactctggttaacaccctttgctccttcaaacgccactatgacgccaacacaccgctggcgcaggtgatgccggaacttgttgaacaatatccagccttcgtcattaaccagtgaaaccagttgcccgttacgccagtaaccttctgccatactggcagcccgcagccacacttcattattaacgattttcacttcccgacccggcagcggcgaaccaacgtctgccaggccgtcggcttctttcgcacacaccgtggaggcaaactcggtcagaccatagccgcaaaagcaacgaatcccctgctcgcgcgcctgttccgtcaactcgaccgggatagccgcgccgccaagtaacaccgctttcagggaaacggaactacggttaaccagcaaacgccagagttgtgttggcaccagtgaagcgtgagtacagcctgccagcatttgctccaatggctgtttatcacgtaccgtcatccgcgcaccagcgtataaccagcgccacataattccctgaccggagacgtgaaacagcggtaaagagagcaaccaatcatcgtgatcgccaaacggaatcagcgataacacaccttgcgcactggcaagatgggcctgataagtatggacagcggctttcggcaaaccggtagaacccgaggtcaacgtcat

SEQ ID NO: 25649 - DNA, 1346 bp, Homo sapiens
  SIMILAR (1197)..(544): 951254mologous to Escherichia coli ORF_f729,accession number U36840,Smith-Waterman Score=1071.
gcctggctgccatgaacaggttagcagtttatcccgtcccgtctcgcttaaggcctgctgcaaacgtagtgattcgtcggcaggcacaacgtcatcgtcgaggccatgccacagcagtagaggtctgtcactaagttgttccaggtggtttgtcgcttcccactcgtggggtggcgagcggtaatccccagtgccgtcatcgcgcccatcgacgcgccaccgactgccagacgggtcatcaagcagccagttttcttcggctattgccgcacgtaaagtagtgaattcctgcatactttgtagcaagatttgccagaattgatttaaccgccgcgctgcgtcaccactaaaacggctaccgtgatcgggcgcatccggcatgatcacccgcaaaccagcctgcgccagcgcaacggcaaaatagctatacaccagactggatgaagtaaagccgtgataaaaaattacgcacggtaacggggtatctttttgcccgacaggataagcatgaagaacgggaatatctgccagctcgcgtgatttggaggtgcagagcaaaaagcgcagttttccagcattgaattggccggcagtgtattgctgcagtgccctcggtagcgcgccaaaatgcaagccaataccgtttctaagggcgactgtgtaatcccagtcggcatcgaactcttcgctgacccagtcgacatggggattctcagtcggagtgccatgcccaagcctgatcagctcgcgcgccaccaggcccgcaacagttggtgacttgcaataaatgatcgttgcgtcgacacatgcgtgcgcgatttcccccagcgctttgagcttggctttgtcgtcattcgctttgatgccgaacgtcttaacatctagcgcgactgtattgaagtcggtagaaacgaaagtatgcggatatccaagtttttcgagaccgcgaatgctgttaacgaacggtcccgtcaggtaaaactgcctggagaccttaagcagtttgcttaacgcaatgttgagctcgatgactcgttcgtcttgatgatcaatgtccccgcttttcagttgtcggaacgccaacttgtaaaactcgtcaatgacgaagagggcaatgttgacgatgtcctcacgctcgttcactcgcttctgaagtaacacataaaccggctgatcggaaaggcccacttgcgaactggggggtgaacccgatttcggcccccgaatcccttttcgatcggggacgggtttcccggtaaaaaccgcgtcggacaccccaacacaatcgtcatagccttatcgcagccatacgtcaaagcggctttgacccggctttcggccctccc

SEQ ID NO: 25650 - DNA, 4210 bp, Homo sapiens
  SIMILAR (2328)..(2387): 541254mologous to Escherichia coli arginine decarboxylase,accession number M93362,Smith-Waterman Score=43.
agccgtgcagccgactctagaggatcgtttcacgtttgttctgttcgtgggctacgactctaatctactaaccgagcctgaaacgccggggttcgaggatgacctggagaaagaaacagcggtgctgttcgaaaaattcgcggctgacctcatcgaggattcgccgtttgcgaatctttgcatccacgtattcatttatccagccccgagtcttgagcggttaacccaattagttgatgagaaggtgagagaggtcgtatgacagagatctatgaacaggcgaaacatagcctgcagggtgaggacttctggatcgttcaattatctgtttgcggctaacaagctgttgtctaaccctgtttcgtatgacttgggacgggacttgatcgtgcgagctctcgattcgcgcgagcggttttccgagcacaccacaattttgaaaaatatggggagaaaatcaggtttgttcccgtatctcaaaaaggagttcaccagcctgacaccggatgacctgagggtgcttgagctataccggacgccattctcggatggttatgttttccactcaatgcaggtccacatattcgatctgctcaagtctggtcaaaacgtggtgctgagtgcacctacaagcatgggcaaaagtgcaatcgtcgattcattgctcggcatgggaactttgaaacggcttgttctggttgttccaaccgtggctctttgccgacgaaacccgtcgccgactggaagagcgatttcgtgaccgatatcagatcatccaccacagttcccaagtgtgccattccgatcaggctgtttatgtgttaactcaggagcgagtgaacgagcgtgacgacatcgtcgacattgacctcttcgtcattgacgagttttacaagttggcgttccgacaactgaaaagcggggacattgatcatcaagacgaacgagtcatcgagctcaacattgcgttaagcaaactgcttaaggtctccaggcagttttacctgacgggaccgttcgttaacagcattcgcggtctcgaaaaacttggatatccgcatactttcgtttctaccgacttcaatacagtcgcgctagatgttaagacgtcggcatcaaagcgaatgacgacaaagccaagctcaaagcgctgggggaaatcgcgcacatgtgtcgacgccgatcatatcaaaaacggtattggcttgcattttggcgcgctaccgagggcactgcagcaatacactgccgaccaattcaatgctggaaaactgcgctttttgctctgcacctccacgatcattgaaggagtcaacactatcgctaagaacgttgtgatctacgacaaccgcgcggggtctacacgaacgatatctgccgacatcattaattcggtaatttgtggccttaatacgctgaagtcattcgacacaaggtgggcgttacttttagaacagcaggacggcaaaactctcgcatcagtacagactctggacgaaagtcgcctgccggagggcgatgtcacggtcgatgttcactggtcgagcctgaactataaagatgcgctggcgataccggccgtacgcggtggtgatattttcatcatccagtccacttgtgcccctactaacgacaacctgatggaattagtcgttatggttgatgccctgcgtcgtgcttccgcaggtcgtatcaccgctgttatcccctactttggctatgcgcgccaggaccgtcgcgtccgttccgctcgtgtaccaatcactgcgaaagtggttgcagacttcctctccagcgtcggtgttgaccgtgtgctgacagtggatctgcacgctgaacagattcagggtttcttcgacgttccggttgataacgtatttggtagcccgatcctgctggaagacatgctgcagctgaatctggataacccaattgtggtttctccggacatcggcggcgttgtgcgtgcccgcgctatcgctaagctgctgaacgataccgatatggcaatcatcgacaaacgtcgtccgcgtggcgaacgtttcacaggtcgtgactgcgtactggtcgatgatatgatcgacacttgcggtacgctgtgtaaagctgctgaagctctgaaagaacgtggtgctaaacgtgtatttgcgtacgcgactcacccgatcttctctggcaacgcggcgaacaacctgcgtaactctgtaattgatgaagtcgttgtctgcgataccattccgctgagcgatgaaatcaaatcactgccgaacatgatgcgctcacggatgaaacattattgtgaacaaaatattttcctcacatgtgatgcctttccgcgctctgatcgacgcttgctggaattcagcgcgctgatgaaatatagtgaacatccatgaatatttcctgggcagcgccaggccaccagggcggcgttggttttaccaaaacacccgccggacgtttctaccatgactactatggtgaaaatctgttccgcaccgacatgggcatcgaacgaacttccactgcggtttctttgcttgaccattctggcgcatttggccaaagcgaaaaatatgccgcacgcgtatttggtgccgatcgctcctggtcggtagtcgtcggtacttccggctctaaccgcaccatcatgcaggcttgcatgaccgataacgatgtcgtggtcgttgaccgtaactgccataaatccatcgaacaaggtttgatgctgacaggcgcgaaaccggtctatatggtgccaagccgcaaccgctacggcattatcgggccaatctatccgcaggaaatgcaacctgaaaccttgcagaagaaaatcagtgaaagcccgctgaccaaagacaaagccgggcaaaacccgtcttactgcgtggtgaccaactgcacctatgacggcgtgtgttataacgctaaagaagcgcaggatctgctggaaaaaacctccgatcgtctgcactttgacgaagcctggtacggctatgcacgtttcaacccgatctatgccgatcactatgccatgcgcggcgaacctggcgatcacaacggtcctaccgttttcgccacccactccacccacaaactgctgaatgcgctgtcacaggcttcttatattcatgtacgtgaaggtcgtggggcgattaacttctcccgcttcaaccaggcctacatgatgcatgccaccacctccccgctgtatgccatctgcgcatccaacgacgtggcggtgtcgatgatggacggcaacagcggcctgtcactgacacaggaagtgattgacgaagcggttgatttccgtcaggcgatggcgcggctatataaagagttcaccgctgacggtagctggttcttcaaaccgtggaacaaagaagtcgtcaccgacccacaaaccggcaaaacctatgactttgctgacgcaccaaccaaactgctgaccaccgttcaggactgctgggtaatgcatccgggcgaaagctggcacggcttcaaagatattccggataactggagtatgctcgacccgattaaaatcagcatccttgctccgggaatgggtgaagatggtgaactggaagaaaccggtgttccggcggcgctggtcactgcctggcttggtcgccacggcattgtacctacccgcaccactgacttccaaattatgttcctgttctctatgggcgtaacccgtgggaaatggggaagttgcgggggcgctcgctgcctgtcggccactgtcgagaatgctggaatggagccgcgcatttctttccacggttctgggacccgcctcgtgcgctacgccattcccccatccagaagtcctcggaccgatatttcggtattcggcatcgttctcgttcatcagctgctggcgctggcgagcggtgcgaagactgtccaaatgaaatttggtcaccacggcggcaaccatccggttaaagatgtggagaaaaacgtggtaatgatcaccgcccagaaccacggttttgcggtggacgaagcaacattacctgcaaacctgcgtgtcacgcataaatccctgttcgacggtacgttacagggcattcatcgcaccgataaaccggcattcagcttccaggggcaccctgaagccagcactggtccacacgacgccgcgccgttgttcgaccacgttatcgagttaattgagcagtaccgtaaaaccgctaagtaa

SEQ ID NO: 25651 - DNA, 896 bp, Homo sapiens
  SIMILAR (355)..(894): 1001254mologous to Escherichia coli f298,accession number L10328,Smith-Waterman Score=932.
atggagccagctgcaggagcttttttcagactccagtggttcctggaactccagcaagacagaccaacaatccgcttccctggaaaagggccatggagccagcagtctcactcagagggtcccactcccatggagcccagcaagcatgaccgggatgtgagacatggagtcaaaggagattattttggaactttaaagtttaatgactgtcctagtgcattttggacttgcatggggcctgtagccctttcattttggccaatttctcccatttggtataggggtatttatccaactcctgtacttccattgaatgtaggaaataacaatactgcagctggtcgtctgtgggatatgagcgccggtcagcttaaacgtggcgactatcagttgattgtgaaatacggtgaatttcttaacgaacagccggaactgaaacgcctggcagagcagctggggcgttctcgggaagccaaatcaataccgcgcaacgatgcgcagatggaaaccttccgcaccatggtgcgcgaaccggcgacggttcctgagcaggttgatggtctgcaacaaagcgatgatattttacgtctcctgccgccagaactggcgacactagggataacggaactggagtatgagttttaccgtcggctggtggaaaaacagttgctcacctatcgcctgcacggtgagtcgtggcgtgaaaaagtgatcgaacgtccggtggtacataaagattacgatgaacagccgcgcgggccgtttattgtctgtgtggatacttccggctcaatgggcggctttaatgaacagtgtgcgaaagcgttctgcctggccttgatgcgcattgctctcgcagaaaaccggcgctgctatattatgctattttccaccga

SEQ ID NO: 25652 - DNA, 721 bp, Homo sapiens
  SIMILAR (599)..(462): 1001254mologous to Escherichia coli asparagine synthetase A,accession number L10328,Smith-Waterman Score=251.
atgggttttatgcagccagagccagaaaacgaggagacatatcaggaagataatcagcggaacggggagtcccagcacatccaggttagcgaaatctgtaaacgccatcgggaatccaccaataccttcgtaccccgtcgctccagccataccggaaagcagcagagcgctttcggcaaacagatacagcgtgccaagcgtaatcaccagcgggacgctggcggcgataaattattacagcagagaagggacgctctcgcgaacagcagctggccatactccacactgaacctggccgatatgcggcagttgcagcagcagcatagtcaaacgagactggccgataccgccgccgatggtctgcggcatttcaccgcgcagcagcgcctgatgccactccagctccaggcgatcttcgtcaccggtcagcgccagttgatgcttcagcgtgtcggctatcatacacggatccccatggaggaaagctcaaacgcatcttccagtaccgggttccacaccagaatatcgccgttcagacccgcatggcccagctctgacggggtgctccagtcatcataatccggtgcgcgcacgtcgtgggatgaccatcgctcagcttgccgccaatcccgacaaggaataccgcgccagatctttcgctatcgcccgctcacgccctttggcatcaagatccggatacgagacagtaactcctggctgt

SEQ ID NO: 25653 - DNA, 1117 bp, Homo sapiens
  SIMILAR (124)..(555): 891254mologous to Escherichia coli f298,accession number L10328,Smith-Waterman Score=674.
atgctggaagcggcagtttgtctgtgcgtgttcgtgtcgtgctcactggctgaaggacgcgcgtgctgccgcgttgctgtaagcataccagtatctgtgcgggcaagaattcatttgctggagtctgaccacttggggcgttttcgggaacccaaatcaataccgcgcaaagatgcgcagatggacaccttccgcaccatggtgcgcgaaccggcgacgtttcttgaccaggttgatggtctgcaacaaagcgatgatattttacgtctcctgccgccagaactggcgacactagggataacggaactggagtatgagttttaccgtcggctggtggaaaaacagttgctcacctatcgcctgcacggtgagtcgtggcgtgaaaaagtgatcgaacgtccggtggtacataaagattacgatgaacagccgcgcgggccgtttattgtctgtgtggatacttccggctcaatgggcggctttaatgaacagtgtgcgaaagcgttctgcctggccttgatgctcattgctatcgcaaataagtggcgttgctactattatgttatcatctcaccgagatcgtccgttatgagctttcaggcccacaaggcatcgaacaagcaatccgttttttaagccagcagtttcgtggcggcaccgatcttgccagttgttttcgcgccattatggaacgcttgcaaagcagggaatggtttgatgccgatgcggtggtgatttctgattttatcgctcagcggttgcctgacgacgtgacgagtaaagtgaaagagctgcagcgggtacatcagcatcgctttcatgccgtggcgatgtcggcacacggcaaacccggcatcatgcgcattttcgatcatatctggcgctttgataccgggatgcgaagccgcctgctcagacgctggcggcgataaattattacagcagagaagggacgctctcgcgaacagcagctggccatactccacactgaacctggccgatatgcggcagttgcagcagcagcatagtcaaacgagactggccgataccgccgccgatggtcttgcgggatttcaccgcgcaacaacgcctgatgccactccagcttcaggcgatc

SEQ ID NO: 25654 - DNA, 1108 bp, Homo sapiens
  SIMILAR (221)..(946): 1001254mologous to Escherichia coli N-acetylneuraminate lyase,accession number D00067,Smith-Waterman Score=1243.
catacgccatcactgtgatgctgagctagcatctcaaggtaccagtgaagagcagaggacctggaagggtgctgagccagggatggagggctgggagcatctcaaagggtggaccctagcagtaagggaaggggcacctagagtaagtaagaacctcggccaatgcaaggccaaatggagactcccagagaagagtctaggagctccccagcagctaggcctttccgagcgtgaacaggtactggaaatcgtcgccgaagaggcgaaaggtaagattaaactcatcgcccacgtcggttgcgtcagcaccgccgaaagccaacaacttgcggcatcggctaaacgttatggcttcgatgccgtctccgccgtcacgccgttctactatcctttcagctttgaagaacactgcgatcactatcgggcaattattgattcggcggatggtttgccgatggtggtgtacaacattccagccctgagtggggtaaaactgaccctggatcagatcaacacacttgttacattgcctggcgtaggtgcgctgaaacagacctctggcgatctctatcagatggagcagatccgtcgtgaacatcctgatcttgtgctctataacggttacgacgaaatcttcgcctctggtctgctggcgggcgctgatggtggtatcggcagtacctacaacatcatgggctggcgctatcaggggatcgttaaggcgctgaaagaaggcgatatccagaccgcgcagaaactgcaaactgaatgcaataaagtcattgatttactgatcaaaacgggcgtattccgcggcctgaaaactgtcctccattatatggatgtcgtttctgtgccgctgtgccgcaaaccgtttggaccggtagatgaaaaatatctgccagaactgaaggcgctggcccagcaattgatgcaagaacgcgggttgagttgtttccctcgatcgcccttaccgggtgaggggaataaacgctctgtacctacatttcatacaaagcggttgggcttcccaccgggggacaccaagaggttctaccgagaatctgcggttgttcttccacggcaaggtggcattctcggcgcgtga

SEQ ID NO: 25655 - DNA, 750 bp, Homo sapiens
  SIMILAR (157)..(465): 1001254mologous to Escherichia coli K12 putative transcriptional regulator LYSR-type,accession number AE000403,Smith -Waterman Score=535.
atgctgaaagaatacgcaggtttgagcgtcaatctggttaccggaattccagcccccgacctgattgccgacggtctggatgtggtgatccgcgtcggcgcgttgcaggattccagcctgttttcccgccgtctgggcgcgatgccaatggtggtcgtgcggcccgacaatgaatttgaactgatcgcaccggaagggatctcgactcgcctgatcccacaaggaagatttgtgactaatgatccgatgacgctggtgcgctggctgacggcgggtgccgggatcgcctacgtgccgctgatgtgggtgatcaacgagatcaatcgtggggagctggagatcctgctgccgcgttaccagtcagatccacgcccggtttatgcgttatataccgaaaaagataagctgccgctgaaggtacaggtcgtgatcaactcgctgacggattattttgttgaggtcggggcgaggggaccgttcgtgcacgtagaaagattaattatccttctgaaaatagtgaaattattacgcagtaccgccaacagtcaggttatcgactttcaacgttggctggcccacgccaaccggcaaactttgcccttctttaccgcagacacccacgccgttatccagtttcaggtcgttgccaaccatcgaaatctgctgcatggtttcgataccggaaccaatcaacgttgcgcctttcaccggcttcgttactttaccgttttcaatcagatatgcttctga

SEQ ID NO: 25656 - DNA, 1742 bp, Homo sapiens
  SIMILAR (615)..(911): 931254mologous to Escherichia coli K12 putative transcriptional regulator LYSR-type,accession number AE000403,Smith -Waterman Score=480.
taaatcacttttaagtcagagtgaataatggaacgactaaaacgcatgtcggtgtttgccaaagtagttgaatttggctcttttaccgccgccgccagacagctacagatgagcgtttcgtccatcagtcagacggtatcaaaactggaagatgagttgcaggtaaagctgttaaaccgtagcacacgcagcattggcctgaccgaagccggtagaatttactaccagggctgccgtcgtatgcttcatgaagtgcaggatgttcaatgagcacctgtatgccttaaataacacccccatcgggacgttacgcattggctgttcttcaactatggcacaaaatgttctcgccgggctgacagccaaaatgctgaaagaatacccaggtttgagcgtcaatctggttaccggaattccagcccccgacctgattgccgacggtctggatgtggtgatccgcgtcggcgcgttgcaggattccagcctgttttcccgccgtctgggcgcgatgccaatggtggtgtgcgccgcgaaaagctatctcacacaatacggcataccggaaaaacccgccgatttgagtagtcattcatggcttgaatacagcgtgcggaccgacaatgaatttgaactgtatcgcaccggaagggatctcgactcgcctgatcccacaaggaagatttgtgactaatgatccgatgacgctggtgcgctggctgacggcgggtgccgggatcgcctacgtgccgctgatgtgggtgatcaacgagatcaatcgtggggagctggagatcctgctgccgcgttaccagtcagatccacgcccggtttatgcgttatataccgaaaaagataagctgccgctgaaggtacaggtcgtgatcaactcgctgacggattattttgttgagacacccacgccgctatccagtctcacgtcgttgccaaccatcgaaatctgctgcatggtctcgatacccggaaccaatcaacgtctgcgccctttcaccggcttcgccactcaccgtctccaatcagatctgcttctgcaagtcatgacgatatccagagggagattttcacgtagcgcaagattcaacggaccgacaccatcaggtagacgactcattcgcgtcattatttcgacagagagcggttcacggtcgagcaaccccagaacaacaggctgctttgaagaacactgcgatcactatcgggcaattattgattcggcggatggtttgccgatggtggtgtacaacattccagccctgagtggggtaaaactgaccctggatcagatcaacacacttgttacattgcctggcgtaggtgcgctgaaacagacctctggcgatctctatcagatggagcagatccgtcgtgaacatcctgatcttgtgctctataacggttacgacgaaatcttcgcctctggtctgctggcgggcgctgatggtggtatcggcagtacctacaacatcatgggctggcgctatcaggggatcgttaaggcgctgaaagaaggcgatatccagaccgcgcagaaactgcaaactgaatgcaataaagtcattgatttactgatcaaaacgggcgtattccgcggcctgaaaactgtcctccattatatggatgtcgtttctgtgccgctgtgccgcaaaccgtttggaccggtagatgaaaaatatctgccagaactgaaggcgctggcccagcagttgatgcaagagcgcgggtga

SEQ ID NO: 25657 - DNA, 1008 bp, Homo sapiens
  SIMILAR (70)..(600): 781254mologous to Escherichia coli nfrA,accession number L16945,Smith-Waterman Score=759.
atgatcatcggaaatattcataatcttcagccgtggctaccccaggagttacgccaggcgattgagcatatcaaagcacacgttacggcagacacgccacagggcagcctcaatcgaagcccgtccggctactggaagccgctgcgcgatcagatctttttcatcgccgtcgaacagcagttgccgctgaacggccaaaatggcgcatccgataccatgctgcgcgccagcgcctcattctttaatggcggcaaatacagcgacgaatggcacccgaacggttcaggctggtttgcccaaaacctgtacctcgatgcggcgcaatatatccgccaggatattcaggcgtggacggcagattatcgcgtcagctggcatcagaaggtagctaacggacagactattgagccttacgctcacgttcaggacaacggctatcgtgataaaggcactcagggcgcgcagcttggcggagtcggggtccgctggaatatctggaccggcgagacgcactacgacgcctggccgcacaaatcaataaaaatcatccagaagaagaggttacgtagcggaaaacgaaaccagacaatggcaaatgccgagagcatcgagacggtaattttgccgagcgtaatgctgaacgccatcacaaagctgttaagcaacatgccgcagatccgcgtgattgtggatgaagagctggagagcgtgtggaccgagtctcgctctgatagcgttgtcgatcccgttgccgcgattgaaaatgctgagatcgtgattgtcggcggcgggaatactttccagttgctgaaacagtgccgcgagcgcgggctgctggcaccaattactgacgtggttaaacgtggcgctctgtatattggctggagcgcaggcgctaaccttgcttgcccaactattcgtaccaccaacgatatgccgattgtcgatccgcaaggtttcgatgcgctaaatctgttcccgctgcaaatcaacccgcatgctcattaa

SEQ ID NO: 25658 - DNA, 2583 bp, Homo sapiens
  SIMILAR (1057)..(1833): 931254mologous to Escherichia coli B12-dependent homocysteine -N5-methyltetrahydrofolate transmethylase,accession number U00006,Smith-Waterman Score=1237.
atggagatggtcgccgcttccaaaatgcgtaaatcgcaggatcgcatggcggccagccgtccttatgcagaaaccatgcgcaaagtgattggtcaccttgcacacggtaatctggaatataagcacccttacctggaagaccgcgacgttaaacgcgtgggctacctggtggtgtcgaccgaccgtggtttgtgcggtggtttgaacattaacctgttcaaaaaactgctggcggaaatgaagacctggaccgacaaaggcgttcaatgcgacctcgcaatgatcggctcgaaaggcgtgtcgttcttcaactccgtgggcggcaatgttgttgcccaggtcaccggcatgggggataacccttccctgtccgaactgatcggtccggtaaaagtgatgttgcaggcctacgacgaaggccgtctggacaagctttacattgtcagcaacaaatttattaacaccatgtctcaggttccgaccatcagccagctgctgccgttaccggcatcagatgatgatgatctgaaacataaatcctgggattacctgtacgaacccgatccgaaggcgttgctggagcagtgcagctgcatgcttaggtcaccggcatgggggataaccagtacagatacaactcgagctcgtaccgacttggcatgtcccatctggcttcttttagatccctaccccaagcttatgggtaatgcgccaaaagcgctggcgtctgtcgataaacgtggtgtaccagtaaataccattctggtgtctgcactggtaacggcgttgtgcgtactgattaactaccttgccccagagtccgctttcggactgttaatggcgctggtggtatctgcactggtaatcaactgggcgatgattagcctggcgcatatgaaattccgtcgcgccaagcaggaacaaggcgtggtaactcgcttccctgctctgctttatccgctgggtaactggatctgcctgctgtttatggcggcggtactggtgattatgctgatgaccccaggaatggcgatttcggtatacctgatcccgcccttacaaaccaacaccttcaactccacgaccattgcgatggcggattaccagatggaatccctgtcggcggaaatcaactttgcggcggcgaaactggcgcgagcttgtgctgacgagtggaccgcgcgcacgccagagaaaccgcgctacgttgccggtgttctcggcccgaccaaccgcacggcgtctatttctccggacgtcaacgatccggcatttcgtaatatcacttttgacgggctggtggcggcttatcgagagtccaccaaagcgctggtggaaggtggcgcggatctgatcctgattgaaaccgttttcgacacccttaacgccaaagcggcggtatttgcggtgaaaacggagtttgaagcgctgggcgttgagctgccgattatgatctccggcaccatcaccgacgcctccgggcgcacgctctccgggcagaccaccgaagcattttacaactcattgcgccacgccgaagctctgacctttggcctgaactgtgcgctggggcccgatgaactgcgccagtacgtgcaggagctgtcacggattgcggaatgctacgtcaccgcgcacccgaacgccgggctacccaacgcctttggtgagtacgatctcgacgccgacacgatggcaaaacagatacgtgaatgggcgcaagcgggttttctcaatatcgtccgcggctgctgtggcaccacgccacaacatattgcggagatgagtcctggccgtaaaaggttaacgcgcgcagaatcgagctcggtaccctcgacgctgccgggtaaagcctggctggaacatgcactgccgctaattgctgaacagttgcaggtcgccgctcagcggtgtttattccctttcgctggcgtaacgcagacctgggatgattacacagcgaaaacggctgcggttctcgctccgctgggtgtttctgtcaccggtattcatagcgttgtcgatcccgttgccgcgattgaaaatgctgagatcgtgattgtcggcggggggaatactttccagttggctgaaacagtggccgcgaagcgcgggctggtggcaccaattactggacgtgggcggcaggggctaaacttggttggccaaatattcgtaccaacaacgatatgccgattgtcgatccgcaagggtttcgatggcgctaaatctgttcccgctggcaaatcaacccggcacttcaccaacgcgctggcggaagggcataaaggtgaaacccgtgagcagcggtattcgcgaactggtggtcgtcgcgcccgaactgacgattattggtctaccggaaggttactggatcacggaaaaacattaaccgtaaaaggtaattatgtctataatggtcatttacgcaccgtattagtgatgaaatcggacggagatagtagtatacttcgggttcctagctatgtgaaaaatgctggaggaagcggcgcggccacgctaaacgggatcgaactcataactgtgaatggcgatgaatctccagcagatgccttcagatga

SEQ ID NO: 25659 - DNA, 1117 bp, Homo sapiens
  SIMILAR (427)..(939): 971254mologous to Escherichia coli peptidase E,accession number U00006,Smith-Waterman Score=870.
ggcgcgaacctcctggatcttacatttagcgatgcgcagcaggacgctcagagcgctaaacggtcacgccagggccttcacagatgacgcgtacacccgcgaccagtccagctggtcctgcgcccgctcccctatagtggactcgcttgcgggcgggagaacattgcgctatgggcaaaatattctcttaaacgggccgatgagtcgggcagcataaattctcctgtaaaaaacggaatatcccgtacttttgggttgataaaaaatagtcatgagcgaactattagttatttccattggcttgaattcgttacctgctcaaatcactttccagaagcaatgtgcgacatcgtgagccatgtcagtaagtggttaaattcccagtggtagcatgcctcccgccatttctaactagccggagaagtaatggacctgcttttattgagtaactcgacgctgccgggtaaagcctggctggaacatgcactgccgctaattgctgaacagttgcagggtcgccgctcagcggtgtttatccctttcgctggcgtaacgcagacctgggatgattacacagcgaaaacggttgcggttctcgctccgctgggtatttctgtcaccggtattcatagcgttgtcgatcccgttgccgcgattgaaaatgctgagatcgtgattgtcggcggcgggaatactttccagttgctgaaacagtgccgcgagcgcgggctgctggcaccaattactgacgtggttaaacgtggcgctctgtatattggctggagcgcaggcgctaaccttgcttgcccaactattcgtaccaccaacgatatgccgattgtcgatccgcaaggtttcgatgcgctaaatctgttcccgctgcaaatcaacccgcacttcaccaacgcgctgccggaaggccataaaggtgatcctcgtttgtttcgttattcgcgaactgctggtcgtcgcgccagaactgacgattattggtctaccggaaggtaactggatcacagtgagtaaaggtcacgctacgctgggtggcccgaacaccacttatgtgtttaaggctggtgaagaagcggttccgctggaagctggtcaccgtttttaa

SEQ ID NO: 25660 - DNA, 370 bp, Homo sapiens
  SIMILAR (207)..(1): 981254mologous to Escherichia coli BETA-LACTAMASE PRECURSOR (EC 3.5.2.6) (CEPHALOSPORINASE),accession number D90872,Smith- Waterman Score=356.
atggatcacgccatcgcgggtattgccgttcaattccgtggcggcaatttgttgcggtttaaagcctttcagcagcgggttaaataccgtatgtgtcaggccgagcgggcgataaatcgactcttcaacatagcggtcaagcggctgaccggtaaccgactcgacgataaatccaagcagcatataatcgacatcgctgtagatatacccaagtggtcggatcacctgcatatcataagaaggaaacaccatgaccctacgcaagattctggcactcacctgcctgctgttgccgatgatggcttccgcacatcagttcgaaaccggtcagcgagtgccgccgattggcattaccgatcggggcgagttg

SEQ ID NO: 25661 - DNA, 1337 bp, Homo sapiens
  SIMILAR (1330)..(1229): 641254mologous to Escherichia coli put. DNA topoisomerase I (AA 1-864),accession number X04475,Smith-Waterman Score=90.
  misc_feature (1)...(1337): n = a,t,c or g
ctgaatatggaatcttcccgctgggcgcgggccaatcgacgtttaaaagcgatcaatacgctatcgctgacgctgattacccaatcctgcgcggtttctaccggcgtgtcaaaaaattcgcggaaagtatcagtgatcaattccgggaaggttgggttattaccacagacatgcaagtttcggatcgatgagatagctgtccatcgccgtgccgcatttcgggcaacgacgtttgcgcgcagcgcgntggtttcagcatcttcgccttccagcacgttcagcacttcgttttccggcaccaggttaatggtggttttgcaacgctctttcggcggcagcgcatagccagaacagccaaggaataccccggtgctcgctgtgcgaatccccattttgcgaccacaagtcgggcagtcaatgctggtcagaaccatctggttcgggcgcataccaccctcttccggatctttttcagctttatctaactgctgggtgaaatccgagaagaagtgatccagtacagctttccactctgcttcgtgatttgccacctggtcgaggctgttttccatctgcgcggtaaagtcgtagttcattaactcgcggaaattttcttcaaggcgatcggtgacgatttcgcccattttttccgcatagaaacgacgattttctactcgcacgtagccacgatcctgaatggtcgaaatgatcgacgcataggtagacggacgaccgataccgcgtttttccagctctttaaccagcgatgcttcactgaaacgggctggcggcttggtaaagtgctgggctggtgtaagttcaacgagcgtcagagcatcgcctttattaactgctggtaagatgcgatcttcatcgcctttacgcaacgcaggcatcacttttgtccagccatcaaaacgcaaaatacgaccgcgtgctttcaggcggaaatcgcccgcaccaacggtcagcgtcgtggagtcatatttcgctggggtcatctggcaggcaacgaactgacgccagattaactggtacagtttctgcgcatctgcttccatatccttcagcgattccgccatcacattgacgtcagaaggacgaatcgcttcgtgcgcttcctgtgagttttctttgctggcgtactgattcggactttccggcagatatttcttaccaaaattatcgctgatataaccgcgaaccatatttaccgcgtcctgactcaggttagtggagtcggtacgcatgtaagtgatatagcctgcttcatacaacgctgcgccatcatcatggtttttttcacaccaaatccaagacgggtgctggctcgtcat

SEQ ID NO: 25662 - DNA, 1710 bp, Homo sapiens; identical to SEQ ID NO: 10729
  SIMILAR (1)..(867): 951254mologous to Escherichia coli K12 putative 2-component sensor protein,accession number AE000485,Smith-Waterman Score=1408.

SEQ ID NO: 25663 - DNA, 649 bp, Homo sapiens
  SIMILAR (547)..(648): 851254mologous to Salmonella typhimurium putative carboxysome structural protein,accession number AF093749,Smith-Waterman Score= 151.
tgctggtgggcgaacgtcgggggttgggtcagtcagaaagcctctcctgctacgccgtttactcgccgcgtatggcgaccaccgttgaggccgatcgcacctgtatctctaacattcaccagggcggcacgccgccggttgaagccgcagccgtcattgtggatttggcgaaacgtatgctggagcagaaagcatccggcatcaacatgacccgataaggaggcatcatgccagctttagatttgattcgaccgtctgtcaccgctatgcgggtgattgcctccgttaacgccgattttgcgcgtgaactgaaattgccgccgcatattcgtagcctcggtctgatttctgccgactccgatgacgtcacctacattgccgctgatgaagcgaccaagcaggcgatggtggaagtggtgtatggccgctcgctatatgcgggcgctgcacacggcccgtcaccgactgccggtgaagtgctgattatgcttggtgggccaaacccggcggaagtgcgtgcaggtctggatgcgatgattgcgcatattgaaaatgggcgcagctttccagtgggctaatgacgcgcaagatacggcattcctggcacatgtagtttcgcgtaccggttcttatctctcatcaaccgccg

SEQ ID NO: 25664 - DNA, 561 bp, Homo sapiens
  SIMILAR (121)..(477): 851254mologous to Escherichia coli put. DNA topoisomerase I (AA 1-864),accession number X04475,Smith-Waterman Score=554.
atggaagggatgaaagagaagatgggaaattaccagaacgtgcgggctggtctctttgagtttggaggccaggaacatgcagacagcacccaggagttgcagatgggacttcggagtcgggaccccagccaagaaacggtccagcatgtctgtggtaataacccaacctgcgacggttacgagatcgaagagggcgaattccgcattaaaggttatgacggcccgatcgttgagtgtgaaaaatgtggctctgaaatgcacctgaaaatggggcgtttcggtaaatacatggcctgcaccaacgaagagtgtaaaaacacacgtaagattttacgtaacggcgaagtggcaccaccgaaagaagatccggtgccattacctgagctgccgtgcgaaaaatcagatgcttatttcgtgctgcgtgacggtgctgccgctcttttgcggccacccagctacccagcagcagagggcactgaaaggcagtgcaggttcactgtgccttttacctccgtcatccagagagacccagcaggctttgacaacagcctccagagctag

SEQ ID NO: 25665 - DNA, 2967 bp, Homo sapiens
  SIMILAR (774)..(1544): 991254mologous to Escherichia coli ETHANOLAMINE AMMONIA-LYASE LIGHT CHAIN (EC 4.3.1.7) (FRAGMENT),accession number D90873,Smith- Waterman Score=1297.
tcactggggaccaaagcagtttccatgcccaaaggtgtggctgtcgtcatcatcaacagtaacttcaaacgtacactggttggcagcgaatacaacacccgtcgtgaacagtgcgaaaccggtgcgcgtttcttccagcagccagccctgcgtgatgtcaccattgaagagttcaacgctgttgcgcatgaactggacccgatcgtggcaaaacgcgtgcgtcatatactgactgaaaacgcccgcaccgttgaagctgccagcgcgcatgaccggcggcggatttggcggctgtatcgtcgcgctgatcccggaagagctggtgcctgcggtacagcacgctgtcggtttgttgcatttcagagccacatttttcacactcaacgatcgggccgtcataacctttaatgcggaattcgccctcttcgatctcgtaaccgtcgcaggttgggttattaccacagacatgcaacttacgtttcggatcgatgagatagctgtccatcgccgtgccgcatttcgggcaacgacgttttgcgcgcacgttgcgtttcagcatcttcgccccggtgctcgctgtgcgcatccccattttgcgaccacaagtcgggcagtcaatgctggtcagaaccatctggttcgggcgcataccaccctgttccggatctttttcagcttgatctaactgctgggtgaaatccgagaagtagtgatccagtacagctttccactctgcttcgtgatttgccagctggttgagggtgttttccatcaccaactgtgcggcaccggtgacctcggaaagctgtgcgctggatttaggttccgctgaagcaaaagcgtggattggtgttgaaaatccgcatcgcgcagacgtattaacagaactgcgccgcagcaccgtggcccgcgtttgtaccggtcgtgccggtccgcgtccacgtacgcaggcgctgctgcgtttcctggccgatcactctcgttcgaaagataccgtactgaaagaagtgccggaagagtgggtgaaagcgcagggcttgctggaagtacgctctgaaattagcgacaaaaatctctacctgactcgcccggatatgggccgccgcctgtgtgcagaagctgttgaagcgctgaaagcgcagtgtgttgccaatccggacgtacaggtcgttatttctgatggcctgtcaactgatgcgatcaccgtgaactacgaagagatcctgccaccgctgatggcgggcctgaaacaggccgggctgaaagtcggtacaccattctttgttcgttatggtcgcgtgaagattgaagatcagatcggtgagatcctcggcgcgaaagtagtgatcctgctggtgggcgaacgtccggggttgggtcagtcagaaagcctctcctgctacgccgtttactcgccgcgtatggcgaccaccgttgaggccgatcgcacctgtatctataacattcaccagggcggcacgccgccggttgaagccgcagccgtcattgtggatttggcgaaacgtatgctggagcagaaagcatttcggcatcaacatgacccgataaggaagcatcatgccagctttagatttgattccaaccgactgtcaccgttttgcggtaccctatttaacccgctgctgaaaggctttaaaccgcaacaaattgccgccacggaattgaacggcaatacccgcgatggcgtgatccatttcccgaatatccgcacctccactctctggggtcaggtgcacgatgaaaaagccttttattcgatgggcggcgtttccgggcacgcaggtttgttttccaataccggcgatattgcggtgttaatgcaaacgatgctgaacggcgggggctatggtgatgtgcagctgttcaatgcggaaacggtgaagatgttcaccaccagctctaaggaagatgccacttttggcctcggctggcgcgtgaatggtaatgccaccatgacgccgacgtttggcacgctggcaagcccgcaaacctacggtcacactggctggaccggaacggtgaccgttatcgatccggtgaatcatatgacgattgtgatgttaagcaacaagccacattcgccggttgccgatccgcaaaagaatcccaatatgttcgaaagcggtcagttgccgattgcaacttatggttgggtagttgatcagatactggctatagcgcgacatgctgaaacagaagatccagtagatcagcgcggcgaaaacatacccttccgtcgacatacccaaccaggcgggatcaacggttgcctgctgaacgctactgaaaagatcgaacaacccgataatgatcaccaggctggtatctttgaagagtgcgatgatgccgaagttcgcccacaggttagcgggatcgtactgaatcgcaatttcactgaaggcagcgatgtgcaagcaggccagtccctgtaccagatcgatcccgcgacctatcaggcaaattatgacagcgcgaaaggcgaactggcgaaaagtgaagccgccgccgccatcgcgcatttgacggtaaaacgttacgttccgctcgtgggtacgaaatacatcagccagcaggagtacgaccaggccattgctgatgctcgtcaggccgatgccgccgtgattgccgcaaaagccacagtcgaaagcgctcgcatcaatcttgcttataccaaagtcactgcgccaattagcggacgtatcggcaaatcgactgtgaccgaaggcgctcttgtcactaatgggcaaacgactgaactggcgactgtccagcagctcgatcctatctacgttgatgtgacccaatccagcaacgattttatgaggctgaagcaatccgtagagcaaggaaatttgcataaggaaaacgccaccagcaacgtagagttggtcatggaaaacggtcaaacctatcccctgaaaggtacgctgcaattctccgatgtga

SEQ ID NO: 25666 - DNA, 3942 bp, Homo sapiens
  SIMILAR (2383)..(3603): 941254mologous to Escherichia coli PII Uridylyl- transferase,accession number Z21842,Smith-Waterman Score=2016.
atgcaggtggttaatccgccgggctatgacttaagccaggactcttcaatgctgattgacgcggttaaaaataagatcacggccggagaggtaaagcacgatatcaccgaaagtatgctggagctggcgacggatgtttgccgtgatatcaaccaggctgccgggcagttttcagcgatgcagaaagtcgtattgcaggcagccacagaccatcatctggaaatttgcggcggtggcacgcacccgtttcagaaatggcagcgtcaggaggtatgcgataacgaacgctatcaacgcacgctggaaaactttggttatctcattcagcaggcgaccgtttttggtcagcatgtccatgttggctgcgccagtggcgatgacgccatttatttgctgcacggcttgtcacgatttgtgccgcactttatcgccctttccgccgcgtcgccatatatgcagggaacggatacgcgttttggctcctcacgaccgaatatttttccggctttcctgataatggcccatgccgtgggtcctaactggcacactttgaagcccgtttcgtggttgggtacacccgatgatcacggcttaagattgtccgggcttaattacaaccgggcccgcccaagtggccgcccccccggggaaatcgatacccaccccaacactggccgggaccgagctgatctctcttatcacgagagtttacaacgcattgttaaaggcgatgtcgatgcggtgatctggaacgtggtggcggaaaacgaactgaccatgctgggattagaggcgacgccgctcacagacgatccgcgatttttacaggccaccgaagccgtggtcctgacgcgagtcgatgattacccaatgcaacaactgctgcgtgccgttgtagataaacacgccctgctcgcccatcaacaacgggtagcaggcgttattgataaggacatctgcaaaggcatgatgcaggtcgtcaacgtactggaaacagagtgccatctgccggtgcgcagtgagcaaggaacgatggcgatgacacatatggcgagtgcactgatgcgcagtcgccgtggtgaagaaatagagccgctggataacgagttgctggcagaactggcgcaatccagccactggcaagccgttgtgcaattgcatcagttaacccgtgtgaagaaggctatttgctggccaacctttatggattatggatggctgctaacgaagaggtttgaagctcccgacaaatccacgtcgcacaagctgaatattccaacaactgactcttcattcacgggacagaaacgatggcaacagaatgtttgtgccagtacagaaattgctggcagcagacgcatcgcccagccatcgacgccagccagactcaacaacaggaagaagcccatcggcgtccagatgctgtaccaggtcggaacggtatcaatgctgttatacacacgcaccatcatccagacaaagatgacgccaagaaccatcgtcactatcagccacagcgtacgcaatgccggtgacagctttttcagcattgccagcaaccagccgatgccggctacgggaaaaaagatcgaaccgctggcgatttcgttactgagtgctgaagcccctaaccggttgagcgagttaaaagcgcgcattggtgaaccaagatggagcatagaggcgataaagccaattcaatgggcgggcgcatatcggcgcgcaatggcacggcaggtgagtggggacacaatccgctaccgtggatggacgaagacgaactgcgttatcgcgaggaagtccctgactctagaggatcccccctcgggtcacggcaaactgcaatataccgacgaaggttttccgttccccatcgatgtgccgtttgtccccagcgataacccaaccggtgcctatcaacgtattttcaccctcagcgacggctggcagggtaaacagacgctgattaaatttgacggcgtcgaaacctattttgaagtctatgttaacggtcagtatgtgggtttcagcaagggcagtcgcctgaccgcagagtttgacatcagcgcgatggttaaaaccggcgacaacctgttgtgtgtgcgcgtgatgcagtgggcggactctacctacgtggaagaccaggatatgtggtggtcagcggggatcttccgcgatgtttatctggtcgcaggatatcgctattctacgcaaggtttttataacttatccgacagtgcctacagtcgaatgagtggttacaccgtcaagcctcctaccggagacaccaatgagcagacacaatttattgattattttaatctgttctacagtaagcgtggtcaggaacaaataagcatctctcagcagcttggaaattacgaacagtacgcaaacaccgctctccccaccctgcccggtcaaccgcaaaatccatgcgtctggccccgtgatgaattaaccgtcggtgggataaaagcccatatcgatactttccagcgttggctgggtgatgcctttgacaatgggatctctgcagaacagttgattgaggcgcgcaccgagtttatcgaccagctcctgcaacgattatggattgaagcgggattcagccagattgccgacctggcattggtcgccgtcggtggctacggtcgtggcgagctgcatccactttcagacgtcgatttactgattttaagccgtaaaaagctcccggacgatcaggcgcaaaaagtgggcgagctgttaacgctgctctgggatgtaaagctggaagtcggtcatagcgtgcgcacgcttgaagagtgcatgctggaagggttatcggatttaaccgtcgccaccaatttaatcgaatcccgcttattattggcgatgttgcgctgttcctcgaactgtcaaaaacatattttcagcgaaggattctggccttccgacaagttctacgcggcgaaagttgaagaacagaaccagcgccatcagcgttaccatggcaccagctacaaccttgaaccagacatcaaaagcagccctggcggcttgcgcgatatccacactctgcaatgggtggcccgccgtcattttggcgcaacatcgctggatgaaatggcggagcgggcggaattaaacgaatgtctgcatatattgtggcgtattcgctttgccctgcatctggtcgtcagccgttacgataatcgcctgttattcgatcgccagcttagcgtcgcccagcgtctgaattacagtggtgaaggtaacgaaccggtcgagcggatgatgaaggattacttccgcgttacacgccgcgtcagtgaactcaaccagatgctgctgcaactgttcgatgaagccatcctcgcccttcccgccgacgaaaaaccacgtccaatcgacgatgagtttcagctacgcggtacgctaatcgacctgcgtgatgaaacactatttatgcgccagccggaagccatcttgcgtatgttctacaccatggtgcacaacagtgcgatcaccggcatttactccaacacgctgcgccagttacgccatgcccgtcgccatctgcaacaaccgctgtgtaatattccggaaactggaccgctttgcaataagaatgacaatcaatccgacgaagataacgctatcgatgcgaccacgccggagcaaaggaattgccagcagggtggggccgttacggcggggcatgatgaactgatcgtagatcgcgaaggccaggagtgcggcgatgaaaagaaaatcgcgttcgatgtgactatgatcattttcgttctgctcaatgcgccgcagctgaccacacgcgttaccccgatgaccgtagcaacccatcgtcaggatttggttacggccatcttcaccctgtacggaggctttcagatgcattacggagctacattggatactccagactggcaacgactgtga

SEQ ID NO: 25667 - DNA, 1023 bp, Homo sapiens; identical to SEQ ID NO: 21318
  SIMILAR (160)..(444): 1001254mologous to Escherichia coli alternate gene name srlQ,accession number U29579,Smith-Waterman Score=478.

SEQ ID NO: 25668 - DNA, 4809 bp, Homo sapiens
  SIMILAR (976)..(1158): 1001254mologous to Escherichia coli L-rhamnose isomerase,accession number L19201,Smith-Waterman Score=323.
ttaaacgacatgcaaagtcaatcgcctgtgctggcgctgacagcggaaggcatgttgaatctggccgatcaaacctgcgacacccagttcgatattcgggtcgtgggtggctgaaccgggcacagcaactgattgattcctgaaagaacgcagtacgctggggttatgcaccggagcagtcattccgcctaagggctcgtcgtgcacttttcggaaacagactccgtaatatggcgaggatgacccgtgtgcactgcacgctctgaaattgtcaggcccctggctaagcgaggctcggtgggcaatcgtgtaaggcgccttccataggcggacggtccccccgcaagcattggacgccgtctgtcccgttgggctctcgctatacgccgagacgtccgattcgtccagattagttattcgagctcggtacctaacggcgaggagcagatggtggttatcacctaagttgaccggcctggcgcgcgtcctgattgggttgtggatcaggtattcgatctgttcgttaacctcgacgcgaccgacgagcagatggacttcccgatcgtttacgctcctgcgctgaactggtatcgcgggtctggaccacgaagatatggcggaagacatgacttcgccgacggtcaggctaataccgtcgatgccaataaatcctttgtacagaatatatttcatcaactgactatcctggactttaaaccatatctggcgattattttcccatgtaaaactcattggaacaggcctgggagctagcgaaacagcgtttcgcggcggtggggattgatgtcgaggaggcgctgcgccaacttgatcgtttacccgtttcaatgcactgctggcagggcgatgatgtttccggttttgaaaacccggaaggttcgctgaccggggggattcaggccacaggcaattatccgggcaaagcgcgtaatgccagtgagctacgtgccgatgctttcccatgccgacgacagcattcgccagttctggattgatcactgcaaagccagccgtcgcgtttcggcctattttggcgagcaactcggcacaccatcggtgatgaacatctggatcccggatggtatgaaagatatcaccgttgaccgtctcgccccgcgtcagcgtctgctggcagcacgttgctgccgttggtgccggggtcgcggcggtatcaacatttgcctgcgaaggcgaaacaaccgcattctgttgcggatcaacagctggtgctggcgcagttacggcaggtgtttgcgtgttggttgcggtagtatccacagacgctggcggcgtggacgttgtagccgggtctgtagttgtcgacgtatttaatggaacactctgcccctgctcgctattaaggaatgagttttttgtcagcatggtcagcgccgcaaagccaccaatcactgtcgccagcaccggcagcgtgatatgccacagataatcggtgattttctgataccacggcagcgaatcaaagttagcggaaaccaggccgcgtagagggaacaggtcgaaatagctgccgcccgcgaagaagacaatcagcaggatggcaaacaaaaaggccggaatggcgtagccgatgatgataaatgcgctactccagacgtcaaagcggctcccattataaacagctttgcgaatgcctaacggaatcgacacctggtggtatgacgtcaataaagcggccaaactgccgtccgccagcaaacagggaacacctaagttcgtatcgatccgattattgttgcccaggatggttcgctttctggtcctggtatggcatactgttttggttactatagccttgtagtatagtttgaagtcaggtagcgtgatgcctccagctttgttcttttggcttaggattgacttggcgatgcgggctctgttttggttccatatgaacttgaaagtagttttttccaattctgtgaagaaagtcattggtagcttgatggggatggcattgaatctataaattacttgggcagtgtgccatattcgcatatggaccagtagtgacacagaaacatctggctcgcctgacgggatgcgacgaattttcgccgccccataaagtacgcccacgactcgttcgcactggcccgtgccgtggagtagctcatctgggcgtaattccgggaaagccgccaggcgcttgatgcagtgtgggaagaggaacaggtgaagtttattgaagatatcaacttttccggaatgattcagggccgccgttcccgcagatggggcagaatagcccggcaaaccgatggtcggaatgccgccgtctggcgtgttgtgcaaggccaaaagcgacagaaggggcgacgccgtaacgctcatttttgactttgtcgcgtccggcatcgtgcgtttttttctctgacgtagtacgcgagaacgccaatcaagctgccgacaatcagcgataacgcatgcgaagccaaaattgttcgtcccgatacggatctggttttgctcgcggtggtacggttcgacgttgcggtctaaccagcgcaattcgaaataagggagccagtgttcattaatacggtaacggaaggtgttagtgatttcccaatgatgatctttcccgttgctactattaaagtcattcactcgcatgaagtaatgtggctcaaatgtataggaaaatttatcggtgattttaaaattccagtaggtgccaatttcataggtgtcattattatccagttccccgctcaaatctgttgaactatagttattatggttatagcgatttcgtactgtcagattaaaccatggtacaaatttatagttgacgtccagatacacatcgaacccaatacgctgtttggttcgcgaccaccggtgctgccggacgatgacgcgttgtgggatatattcgaacatggtatcttgagatggtcgggtccgggctttccccactttctggacttgtgcgctggatcttttgccgatggcgccgctacaggggggctcgggacgccctattgggtctcttatcgccccatgccgagtccgccggcccgttggtgttatcccggtgttccccttgggccccctggtttgtgcccgggggacccctctttgttgcccttgcagcaatgtggttgcattgggtgccccgtgggccggttgaaagtccccccgcttggaccgtgggtcgttgctggccgctgacattgcagaaacggtggtcagccacgtcgagggggcgcgttttgcgctggtggaacgcgtggctgaagaggtggcggagctgctgttagcacgcttcaactcgccgtgggtgcgtatcaaactcagcaagccaggcgcagtggcgcgggcggcgaatgttggcgtaatcattgagcgtggcaataatccacatccgggttgatgtgctgaagtcgcgtaagtcattcggctgccttcgcgttctacggagatatccagcaccgcttttgccgccaggcccagcggtgacgtcgctttgccggtcatcgccagcagcgcgatagatttatcttccagacgcggaataatcagatccagttccttcgcgccaccggagtaagagataaacagcatcacatcgcggctttcgatcatccccagatcgccgtgcagcgcttctgccggatggacaaaaaaagccggagtgccggtactggcaagcgttgcggcgattttcttaccaatgtggcccgatttgccaattcccgaaaccaccactttgccttcacagtgcaggatgatattggcggcgcgaacaaaatcatcgcccagacgttccggtaaacggcttgcttcctgcaactccagcattaacgtctgacgtcccgcgttcagtagtgcttcactcattgctctccgatgcaggttggcgacgtcggtttccagcatccgcgcgcaggcagcccagttgtgatgattttgtgccagtgcctgacgaatagtttcacgctggaacgcttctgtcgcttcacgcaggttttgcttaaccacgggcaccgccgccacttctggcgtcggcaacgtcacctcaggaaaagcaaaatgttgcgcctcaagaatcacttcatcgccgctgcgggtggctctcgccagaactaccgcccgatgaatagcatgttccagttcgcgcacgtttcccggaaactgtagtgttgcagtaaatttcgcgctccggcacttaatagccaccgctgggagagcccctgccgcaaaacggtagttgagcgttttgagccggaagcggtgattgtactgtttaccatcttcatactgcgccgccgatgcgctaaacgctaaaactacataattaccgatcgccaggctaacattgttaaatgccgcaccggtatcggtattgaaaatggtgtaataattgccgctatttgcagaagaaacggtaccagtaaaggtagtggtcattgtttcctgagtatcaaatacgcaatcttgcaggcgaatcgcctgttcagccaaatccggattaatctcgcgtttaatttctactcctaaaccgcgaaacgcttctgcctgcgccagcacatttccgcgccctgaagagagttttttcattgcctgccgataattatcctgcgctttgtcgagactttgaccactcgcggacatgtcatcgatgaacaatacggtgcaggtataattgtcttttgggtgagttttattgaacgcgtaaggccctgtgtcatcgttgtcgtatggtgttctgaataaccttttgcctaagcctgttcggccagacgaccaagttacacgaaacat

SEQ ID NO: 25669 - DNA, 2985 bp, Homo sapiens
  SIMILAR (1006)..(1701): 991254mologous to Escherichia coli glycine cleavage activator protein,accession number X73413,Smith-Waterman Score=1186.
atgaaggcgtttacctatgaacgagtgaataccccagccgaggcggcacttagcgctcagcgcgtacccggcgcaaaatttatcgcgggcgggaccaatctgctggacctgatgaagctggaaattgaaacgcccacccaccttatcgatattgaagtgaccgacgcgggtgggctgcgcatcggcgcactggtacggaacaccgacctggcggctcacgagcgcgtgcgtcgtgattacgcggtactctcccgcgccctgctcgctggcgcgtctggtcagttacgtaatcaggcaaccaccgcaggtaatctgctccagcgcacgcgctgcccctatttttacgacaccaatcagccctgcaataagcgcctgcccgggagcggctgcgcggcgcttgaaggctttagccgtcagcacgcggtggtaggcgtaagcgaagcctgcattgccacccatccgagcgatatggcggtcgcaatgcggttgctggatgcggtggtggaaaccatcacgccggagggaaagactcgcagtatcacactggctgatttttatcaccctccgggaaaaacgccgcacattgaaaccgccctgcttcccggtgagcttatcgttgcggtgacgttacctccaccgctcggcggaaaacatatctaccgtaaggtgcgcgatcgcgcctcctacgcctttgccctggtatcggtcgcggcgattattcagcctgacggcagcgggcgcggaaccttatggtttcctgttagtagtctgaacggagtacacagtatcgcgattggataccagctaaagacatcgcgtgtgtttcatagtgctcccctgtttgctgtgcctgagcctcttgtgaccaaaagctgcaaaggtaacgatggtcgcttgcctattgtgtcgctggaggcggtgcagagtgagtttatctcttctccgggatcgtggccgcaggcaatgcgccgtttgtgtgagcaacaacttgtcactcaccagagcgtggatatcgaagagatattttcgcaattaaccgaagcgacgcgtaaactccaggcccgtagcgccaagggggcgttgacggtcagtttactccccagtttcgccattcattggttggttccgcgactttccagctttaattcagcttatccgggaattgacgttcgaatccaggcggttgatcgtcaggaagataagctggcggatgatgttgatgtggcgatattttatggtcggggcaactggccggggctacgggtggaaaaactgtacgccgaatatttattgccggtgtgttcgccgctactgctgactggcgaaaaacccttgaagacaccggaagatctggctaaacatacgttattacatgatgcttcgcgccgtgactggcagacatatacccgacagttggggttaaatcatatcaacgttcagcaagggccaatttttagccatagcgccatggtgctgcaagcggctatccacgggcagggagtggcgctggcaaataacgtgatggcgcaatctgaaatcgaggccggacgtcttgtttgcccgtttaatgatgttctggtcagtaaaaatgctttttatctggtttgtcatgacagtcaggcagaactgggtaaaatagccgcctttcgccaatggatcctggcgaaagccgctgctgaacaagaaaaattccgctttcgggatcccatatcccagcaacctacccttgatgccaatctggaagaccttctgcctgttcgttggtacagccatcttcacattcgaaggcgtcggtatggtgagatagggagagacactggaactgttctggttgtcatagcagagagcacagcaaagctgagccatgagactacagcatgcagctgcatgcctcttccttttatcgcagtgcgcttgtctgtatgtgtgacagggaccgagcaaggagacaaaggaggcggcaaagcgaactctcgggcagttttgtttcctccttccctcctgcagcccgttcgcctcctctcctgcacacacacgtgcgcgcgcacacatatgcacacacgtgtgaatgcagggtattggccacaccagtttcttctgagctgcggagaccgcttcccgggaagctccgggccggactgggtttcagcggctgctgcagctgctaccaacgcggcctatgtgggactgggcgccggggtcgtggactcaggctcgcggcgtgtctgggagccgctaagggtttttggcaagcgccgcagcccttatgacacgcgagtggactcttccaacggcccttttggggggaaggcccgtgtaaaccccggaccccctatgaacctggtccccgagccaagcctggaggagggaattaaccccactgtaccgtacggactgggtcagcaccccttctccggcggcaaacacgacgcgatcgacgtcattggtcgcacgagccatgaggtcaccggtgccatcacgcagggtacatgcgttacgctcaagtcaaatttggatctagttaacgggtacgaggtagaactgtgtctgtgttgtcatgggtatgtctccgtgaataaaaaacgccagcggcgatggctggcgtatgaggtaataaagcgcgtttgggaaggtgaaatgttggtggtaaatgattcggagtcagcgggggaaggtgtcgcccagaatgcttcagtgattaatatcgtcgcctgctcctgtgtcattcctggtcgacatatccaggcatccagagcctcacgagcctgttcaggagtgattttcattgttcaaaaagcaagtccctgtgagacagtgaagatgacggctgtgcaccaagcctggagagccaccagactgacaggagcaacggaagataaattgacacgcggtagttcgctaaactgccgtgaagtgcggcaccccgtaggtcagacaaggcggtcacgccgcatccgacatccaacgcccgagccggttgcctga

SEQ ID NO: 25670 - DNA, 803 bp, Homo sapiens
  SIMILAR (240)..(764): 981254mologous to Escherichia coli K12 putative dehydrogenase,accession number AE000186,Smith-Waterman Score=919.
agaaaaatttgaaaccgcttgacctgattacaccatgacctgattacgccaagcttgaaaattggctgatgagcttaaacgctgagtatccagagcctgcagaagcacgccatgcttgagaaggcctgaaaactaagggggagaaagcgtctcccccttcatgtttaagtttttgtaaaaatgaatttgttatctcctccactgactacgctttaagccagagtcaatccggaggcgttatgcatcgacaatcctttttccttgtgccccttatttgtctttcttccgctctctgggcggctcctgcaacggtaaatgtcgaagtactgcaagacaaactcgaccatccctgggcactggcctttttacccgataatcacggtatgttaatcactctgcgcggcggcgagttgcgtcactggcaagcaggaaaaggattatctgcgccgctttccggagttccggacgtttgggcgcacgggcagggcggcctgctggacgtggtttaagcgcctgattttgctcagtctcgccgcatctggttaagttattccgaagttggcgatgatggcaaagccggaactgctgtgggttatggccgcttaagtgatgatctctcaaaagtgaccgacttccgcgccgtctttcgccagatgccaaaactgtctaccggcaaccattttggcgggcggctggtattcgacggtaaaggttatctttttattgctctgggagaaaacaatcagcgaccgacggcgcaggatcaccgggtgccgagctggtataaataatcggcgcatctc

SEQ ID NO: 25671 - DNA, 1320 bp, Homo sapiens
  SIMILAR (1002)..(484): 951254mologous to Escherichia coli alternate gene name srlQ,accession number U29579,Smith-Waterman Score=835.
cttcgctggcgggcacagtccggtgagcattttcatggtggtggatttaccgcagccgttcgaaccaagaaaaccaaaaatctccccgcgtggaatgcggaaattaacgtgatcaacggcaacgaaggaaccaaaacgcatggtcagatcgcgcgcttcgatggcaatctctgcgttttcaggttgatacggtgggatcactaccgcctgatgcgcctggcgttgcgcttgcggtaacagatttataaatgcttcttccagcgtagcctgttgcgtttgctgccgtagctcttcggcgctgccagttgccagcacttctccggcattcatcgctaccagccagtcgaagcgttcggcctcttccatataggcggtggcgaccagcacgctcatattgctctgccgctggcgaatactgtcgatcagatcccagaacctaggcgacataattgggggggagggcaagatgcatgcctgcaggtccagttttattgcgccggtgcatttgccgttttcatccaccaccggtgcggcagtgattttgcgcttcatcaggatctctttggcgtcgatggcgcgactttgcgattgcaacgtggtgccgccgaccgtcatcgcttcattgactggcgtggtgagtgcgccgccgccaaccagccagcgacgtaaatcgccgtcggtaaagacgccttgtacctgttgttgagcgtcacataccgccaccagccccagaccggtgcggctgagttccagcatcgcatccatcacgctggcggttaacgccacctgtgggatggcatcgtcacggcgcatcagatgatgcactttattcagcaagcgagcgcccagtgccccggctgggtgggagcgggcaaaatcttcttcattaaatccgcgcgcctgcatgaccgccatcgccagcgcgtcacccatcatcagggtattgacggtgctggaggtcggcgcaaagtgcatcgggcaaggctcgcgttccgactcgactgaattatcaccattcataaagatggtgccaccaaattcactgactactgcgctggctgttatccctccattttctttgtcagatacgcttccagaggtcttaatatcgctatcgcttatatataatactttgttttgactatcaacagaaataccataagatccatcaccactagtcatcacactggcattatttatatatccagttacaccgtcatccactttcacagcatggctttcgtcttcagtggttagatactctccattacttatcggattattatctttgatttcaatcggcgattcttcatcagtcat

SEQ ID NO: 25672 - DNA, 2163 bp, Homo sapiens; identical to SEQ ID NO: 21319
  SIMILAR (430)..(933): 821254mologous to Escherichia coli PTS SYSTEM, GLUCITOL/SORBITOL-SPECIFIC IIBC COMPONENT (EIIBC-GUT) (GLUCITOL/SORBITOL-PERMEASE IIBC COMPONENT) (PHOSPHOTRANSFERASE ENZYME II),accession number D90892,Smith-Waterman Score=724.

SEQ ID NO: 25673 - DNA, 2055 bp, Homo sapiens
  SIMILAR (1629)..(1198): 961254mologous to Escherichia coli glycerophosphate dehydrogenase,accession number M55989,Smith-Waterman Score=738.
ttacccctgacgcttatcttccgtattcgtctcgaaatcactggcgtcatggcgctcatgcaactgctcattcagcggtccgttggtgcggttaacaatacgcccacgtttcaccgccggacgttcgcctacttctttcgcccagcgttgtacatgcttataactgcccgcatcaagaaactcagcggcatcatacacaccacctaacaccacgttgccaaaccacggccaaatcgccatatccgcaatggtgtactcatcgcccgcaacaaacttatgctgcgccagttgcttatccagcacgtcgagcagataggctcggtaccgctcgtaatggacgcaatttcgctggtggaagcccatgaccatctgctgctgggtaaagtaggccgctatattgaagagccaattaaagctcgcgttattgagtgagttacgcccgaaaacgcgtgcgccaagcgaaaagcagaccggcaagccatcgaagaaagtactggctaaacgtgccgttccgaacagggtatgtcgctgctgcaaccgggtaaagcgccgctgcatatgccaacccaagcgcaggaagtgtatgacgttaccggtgcgggcgacacggtgattggcgtcctggcggcaacgctggcagcgggtaattcgctggaagaagcctgcttctttgccaatgcggcggctggcgtggtggtcggcaaactgggaacctccacggtttcgccgatcgagctggaaaatgctgtacgtggacgtgcagatacaggctttggcgtgatgaccgaagaggaactgaagctggccgtagcggcagcgcgtaaacgtggtgaaaaagtggtgatgaccaacggtgtctttgacatcctgcacgccgggcacgtctcttatctggcaaatgcccgcaagctgatggtcgcggctttcaccctgcgggaagtaaccgttgatcacggtgacattacccagcagtgaggggatttccgccataataatccgccgctgcgcctcttcgtcgtcaccgggaaagccgcgacgcacggcaatcggcgtctctttggtcagcagcgccacgccataatggcctttctgcccgtgataaaacacgttgtagccgagcttcgccacctcttcgagcggaaacatatcgtcatgaacttttgtctcctgcaggccaatcacatccggttggtgcttttcgacgatggcttcaagcgttcccgcattgccgagcagcagctcgctgttgctgccgtaagtgcgagcgtaatgacgcgccagcgattcagtcaggaacggatagcggcggcgcaggcgagcggcataatcgtcgcggtcgccttcaatggcgccacccggtagcacactctctttcgtccatgccgggccaataccctgataatacggcgttagtttttccagcgcatgttccgccagttttcggtaggtggtcagcttaccgccgaataccgacagcagcggtgctttgccattttcatcatgaatatcaagggtgtaatcacgggtaatagcctgcggcgagtcggactcatcatcacacagcggacgcacaccggagtaggtccagacgatatcgtcacggcttaactgctttttaaagtgcgtgttaattgccgccggtaaagcacatacccacgccatcaggatgctggttaccgttttacgctgtaacccaccgccgtccaccaccatcgtccctgcaactgcagacgagaggacgtgtgttgtggagacgggcatcccaatataactggcaagaccgatagacactgccgccgtcatttgtgccgccatgccttgcgcatacgtcatgccgcgcttaccaatcttctcaccgatggtcatcgctacacgacgccagccaatcatggtgccaatgccgagcgccagtgctaccgccatgatgatccacaccggagcgtactcaatggtgcttaacatatcgctgcgaagttttttcagcaggttctggtcttctttactgacgcctggcagtttcgctagcttcgcggaggtatcagagatgcacagcat

SEQ ID NO: 25674 - DNA, 1926 bp, Homo sapiens
  SIMILAR (151)..(705): 981254mologous to Escherichia coli adenylyl- transferase,accession number Z21844,Smith-Waterman Score=936.
atgctgtcgaagcggctccgacccgggatctctagagtcgaagcgtctatgctaacgagttgcgtgcgatgtgcgccgtttgttttccgtcgttacatcgatttcagcgtgattcagtcgctgcgcaacatgaaagggatgattgcccgtgaagtgttccagctcattcgcggcggacgcgaaccgtcgctgcaatcgcgctctttactgccaacgctcagcgccattgccgagctgcatctgctttctgaaaacgatgctgaacaattgcgagtggcgtatctgttcctgcggcgtctggaaaacctgctgcaaagcattaacgacgaacaaacccagacgcttccttctgatgagcttaatcgtgcgcggctggcgtgggcgatggactttgctgactggccgcaactgaccggggcgctgaccgcacatatgaccaatgtgcgccgggtgtttaatgaattgattggcgacgatgacagtgaaactcaggaagagtcgctgtcggaacagtggcgtgagctttggcaggatgcgttgcaggaagatgacactacgccagtgctggcgcatcttagcgaggatgatcgcaaacaggtgctaacgctgattgccgatttccgcaaagagctggataagcgcaccatcgggccgcgaggacgtcaggtgctcgaccatctgatgccgcatctgctaagtgatgtctcccttatcaaccggaccgaattcccgatgctaccgattagggttgcagattttcttcagaaccagctccgggaacccttcggtatagccaaaccaggagcgttcctgcatccagcgaggatcgcccttaattttactttctggtccggtaagcgaaatcagggtatgaccattttcatcaagaatggtaacccccatcggcaacgtacccgaaacgtaaggcaacgtaaagatatacggaatctgtgccaaaagtggacaaaatcttcgggccgggtaacgcctttgtcaccgaagcgacacgtcagtaatactgcaatatctgaatgcgtttgttcgcatgtacggcgcagatgccgtagaagccgccagtgcgaaatccggttcgccatgtttggcaaaagaagcgcgtacgctgttcgccagtgcattaatgtaatcgtggttatcggcgtaatcacgtataaacgatatccccggaatgctacgtttgcgcgccagaatgcgtgccagttcatcccataccgcaccgaccgtagaacaggagaattgcggataaagcggcagcaccacaatatgatctacatgctctgccaggagttcatctacggcgctttccagcctacaagttcagcgatctacattagccgcatccggcatgaacaaagcgcaggaacaagcgtcgcatcatgcctctttgacccacagctgcggaaaacgtactggtgcaaaacgcagggttatgatcatcagcccaacgacgcacagcgcatgaaatgcccagtccatcagctcaagaaatcctggggctccaaggacactccagccaaggctctgatgaggcagcggggcactggaggaggcccctggggggaagtggactcccgacctccgtgggcgttgccatgcctggtcagcctacgtggggcccaacgatccaccagtaacgggcccaacctcatttgcggcctaccttcatccagtcctttccctggctgccacagcttctcccctatggcgttgttaatcactaaaaaaggcatcaattgtgatatgtgtgaacccaatgcccccccccccggcccctctcaatgggagatcatatctacgagattaacaaacgataagtgtacccgaatgcgtagggcgctacgagacaccaacctgccagaagaatgggcctgtgacccagtcctggtcaacgagtctgctcaggttgag

SEQ ID NO: 25675 - DNA, 1547 bp, Homo sapiens
  SIMILAR (256)..(471): 1001254mologous to Escherichia coli ferrochelatase,accession number U82664,Smith-Waterman Score=374.
tggaaaaaatcctcggctaattcgaaagcgcgcacggacagtcccctcgccccctcggggagagggttagggtgaggggaacaggcccgcacaagcaaacttatcagcaatctcaggccggatattcattcggccttttacaaaaacctcaatctgcgctattcctttttctgatttgacctctcacagcaattagttcttcttcctcacttttccgctacaattatcaacaagttgaatcgataagaggcggtaatgcgtcagactaaaaccggtatcctgctggcaaacctgggtacgcccgatgcccccacacctgaagcggtaaaacgctatctgaaacaatttttaagcgacagacgcgtggttgatacctcacggttgttatggtggccattgctgcgcggcgtgattttgccgctgcgctcgccgcgtgtggcgaagctgtatgcctctgtctggatggaaggctggctcgccgctgatggtttacagccgccagcaacagcaggcgctggcacaacgtttaccggagatgcccgtagcgctgggaatgagctacggctcgccatcactggaaagcgccgtagatgaactcctggcagagcatgtagatcatattgtggtgctgccgctttatccgcaattctcctgttctacggtcggtgcggtatgggatgaactggcacgcattctggcgcgcaaacgtagcattccggggatatcgtttatacgtgattacgccgataaccacgattacattaatgcactggcgaacagcgtacgcgcttcttttgccaaacatggcgaaccggatctgctactgctctcttatcatggcattccccagcgttatgcagatgaaggcgattctctgcgcgaattgtacgcggtggcaaatcctaacccaggtccaggtatgggcgtgctgctggcgtacatgttctttggtcgtggtagcgctaaacagtctgcgggcggttccggcctggatggcttgctgcgacgaacaccacccattacccctggcggttatttttccgtattcgtctggaaatcactggggtcatggcgctcatgcaactgctcattcagcggtccgttggtcgggttaacaatacgcccacgtttcaccgccggacgttcgcctacttctttcgcccagcgttgtacatgcttataactgcccgcatcaagaaactcagcggcatcatacacaccacctaacaccacgttgccaaaccacggccaaatcgccatatccgcaatggtgtactcatcgcccgcaacaaacttatgctgcgccagttgcttatccagcacgtcgagcagacgtttggcttccatggtaaagcggttgatggcgtactcaatctttaccggtgcgtaatggtaaaagtgaccaaaaccaccgccgaggaacggtgccgcgccctgtaaccagaacagccagttcatcgtttcagtacgctttgccaaatcctgcggcaggaagtagccatgcttggccactaaataaggcagggtcagggcagtttcagtcacgc

SEQ ID NO: 25676 - DNA, 651 bp, Homo sapiens
  SIMILAR (1)..(312): 1001254mologous to Escherichia coli protein-N(pi)- phosphohistidine-sugar phosphotransferase,accession number U28377,Smith-Waterman Score=525.
atgattattcacttcctcggtgggatccacgaactgtatttcccgtatgtgctgatgaagccgctgaccattattgccatgattgcgggcggtatgtctggcacctggatgtttaacttactggacggtggtctggtggctggcccaagtccggggtctatctttgcttacctggcactgacgccgaaaggctcgttcctggcgacaattgccggtgttacggtaggtaccctggtgtcctttgctattacttcgctgatactgaagatggaaaaaacggtggaaacggagagcgaagatgagtttgctcaggttaagcgtatcgcctttgtttgcgatgcggggatgggctccagtgcgatgggcgcgaccaccttccgtaaacgcctggaaaaagcggggctggcaattgaagtaaaacattacgccatagaaaacgtgcctgcggatgcggatatcgtcgttactcatgccagtctggaagggcgcgtgaaacgtgtgacggataaaccactgatattgattaataactatattggacgatccaaaactcgacactttattaatcaataccgccggtccaagcattctgataagtcccaccactttgggagtcagaggcagaaggattgcttgaggccaggagtttga

SEQ ID NO: 25677 - DNA, 1650 bp, Homo sapiens; identical to SEQ ID NO: 13319
  SIMILAR (838)..(1353): 891254mologous to Drosophila melanogaster Sog,accession number U18774,Smith-Waterman Score=783.

SEQ ID NO: 25678 - DNA, 1509 bp, Homo sapiens; identical to SEQ ID NO: 25021
  SIMILAR (1048)..(1485): 981254mologous to Escherichia coli GALACTOSIDE TRANSPORT ATP- BINDING PROTEIN MGLA,accession number D90884,Smith-Waterman Score= 726.

SEQ ID NO: 25679 - DNA, 2383 bp, Homo sapiens
  SIMILAR (1488)..(1988): 1001254mologous to Escherichia coli protein-N(pi)- phosphohistidine-sugar phosphotransferase,accession number U28377,Smith-Waterman Score=835.
aaccgaatttgttgctgaatatggggtcaacccacggcctggcgatggtcttttccatgctgctggcggcgattatctggaacctgggaacgtggttcttcggtttaccggcctccagttcgcacaccttgattggtgcgattatcggcatcggtttaaccaacgcgctgttaaccggctcatcggtgatggatgcgttaaacctgcgtgaagtgaccaaaattttctcctcgctgattgtttcccctatcgtcggactgtcagttgttgcgctggataacgttaacttcacgctcaataaaggcgaagttcgtgcgctgttaggtaaaaacggcgcgggcaaatcgactctcattcgaatgcttaccggcagcgaacgcccggatagcggtttagtgaagatgagagcctgcattaataatcaacagattcgccaccataacaaatgcgtgattctggaactgctgtaccggctaaagcgcgccaataaatcaacgctggcccggctggcgcaaatttcgattccggcagtcagtaatattttgcaggaactggaaagcgaaaaacgggtggtgaatattgacgatgaaagccagacgcgcgggcatagtagcggtacatgggctgattgcgcccgaaggtgactggaccgctgtgccctgaacgtgaccgcccaacccagtattgagtgtcaggttgctaatgcttgtttaagtccgaaaggtgaatttgagtatttacagattgatgcaccgacgccgcaggcgctgctgtccgaaatcgaaaaatgctggcatcgccaccgtaatgtgtggccggaccataccatcaacctggcgttggcaatccacggtcaggttgatcctgtgaccggcgtgtcgcaaaccatgccgcaagcgccgtggacaacgccggtggaggtgaaatatctgctggaagagaagctcggcattcgggtgatggtcgataatgactgccagttacattattgtaagacagcaattctcaactggagccgaaaaatggcgctttcaagacaaaaatttaccttcgaaagacttcgcagattcaccttaccggaagggaaaaaacaaacttttctttgggatgcagatgtaacaaccctggcatgccgagcaactagcggagcaaaagcctttgtattccaaagcgtatatgcggggaaaacccttcgcatgactattggcaacattaacgactggaagattgatgatgcgagagccgaggcaagacggttacaaacattgatcgatacagggatagatccacgaattgctaaggctgtaaaaatcgcagaagcagaatccctgcaggcagaatcacgtaaaacaaaagtgactttctccgtcgcctgggaagactatcttcaagaattgagaaccggtatcagtgcaaaaactaaacgcccatattctactcgatacattgccgatcacattaacttgtccagtcgtggaggcgaaagtccgggcctgggactgctgctggcgtttaccttgtttggtaaagggatgagtaaacgttctgcgcccggggcgatgattattcacttcctcggtgggatccacgaactgtatttcccgtatgtgctgatgaagccgctgaccattattgccatgattgcgggcggtatgtctggcacctggatgtttaacttactggacggtggtctggtggctggcccaagtccggggtctatctttgcttacctggcactgacgccgaaaggctcgttcctggcgacaattgccggtgttacggtaggtaccctggtgtcctttgctattacttcgctgatactgaagatggaaaaaacggtggaaacggagagcgaagatgagtttgctcagtcagccaatgcggttaaggcgatgaaacaagagggtgcattctcgttaagcagggttaagcgtatcgcctttgtttgcgatgcggggatgggctccagtgcgatgggcgcgaccacggttccgtaaacgcctggaaaaagcggggctggcaattgaagtaaaacattacgccatagaaaacgtgcctgcggatgcggatatcgtcgttactcatgccagtctggaagggcgcgtgaaacgtgtgacggataaaccactatatggtccagctgttgtcttccagcctgggtgaaatcatgaccacgctgacagcacaacagattgcctgtgtttacgcctggctagcgcagttgttctcccgtgagctggacgatgaacaactgacgcaaatcgccagtgcgcagatggctgaatggttttcgttgctgaaaaacgaaccgccgctcactgcggcggtgaacgagctggaaaaccgtattgccacgctgacagtacgacgagcaagagattaa

SEQ ID NO: 25680 - DNA, 343 bp, Homo sapiens
  SIMILAR (113)..(340): 901254mologous to Escherichia coli No definition line found,accession number U00039,Smith-Waterman Score=342.
gaatactgccatgacaccttcaaattatcagcgtacccgctggctgacactcatcggtactatcattacccagtttgcgctggggtcggtttatacctggagcctgtttaatggcgcgctttccgccaagctggatgcgccgaattctgttgcgggcaaattacaggaacgttttggcgttaaacgcgtcaccatggcttccggcattttgctgggattaggcttcttcctgacagcgcattctgacaacctgatgatgctgtggttaagcgccggtgtgctggtgggactggcagatggcgcgggttatctgctgacgctctctaactgtgtgaagtggtaa

SEQ ID NO: 25681 - DNA, 1290 bp, Homo sapiens
  SIMILAR (474)..(4): 961254mologous to Escherichia coli No definition line found,accession number U00039,Smith-Waterman Score=805.
ttaaaatctggcgctaacccccatcgtatacagatagtcgctattattagtggtattttctgcctgagttagcgcggcataggcggcaatattttgattgagcaacatatcagcgcctacggtgacatccagccagttgccgttctggtttgtcgccgtcatccggctcaggcctgattgcgccttccagatattctcgccaaattgctggttatagctgatttgcgcccagggtcggagatcgccaagccgggagtcaacacgccagcctaaggtactcacgctggcatgccataacggatcggtcagcgtggtagtactgtctccaaactcgttatacatcgaggtggttgtgccatcgtaatgtaatgccgcgaccgggccggttgtaacctgtttatataaaggaaaattccagcccatactcatactgctggtcacatccacaagggtttcttcctgcatatagacttccggattgtaaatgcaccaatcagcatcccacgtcgatttcagacgctgacgctcacgctcgatattctcaagtttctcgttaaagcgcgcccaacgttcgtcatccaccaggcccagttcacgaccgatttcagtcaaacgcagatccgcattatcttcgcgtagcatcagacgatattctttggaaggcccgcgtgggaggaatggttttaccccaagagttaaaaaaccaacctgctctttctccctgatgggctgtgccagatgcggttgctccttctccccaaaggtctgggatctgattctcctcacttccctttctggacccaatttcttctttctcaagactttgcctaaaatttgctgttgccgggcgaaaccctcatgcttcagataccgcttgataccgctggcggatactcgactatggaacaacccatgctgcttcctatcggcgctgcgctcggagtggcgaatgagcaccccctgcagacgctgcattaagatgagcgtcagtcccgtgcgagcctcatagggcgcggtccgtttgctgccttccctcccgtcctccccatgtttccatgctgtctccgacaggctatagatcgccggctggctacaccgactccaaataccgctttcaggtaccacgacgccaaaacactcatataagcccatgttcttggcatatgattggcagagacaaacattaatgccctgttcgatgaagtggcgcacagcccaggcatccttatcaccatcaccactggcaaagccttggtaggccatgtcaaacaacgcaaagagattcctttt

SEQ ID NO: 25682 - DNA, 3969 bp, Homo sapiens; identical to SEQ ID NO: 1146
  SIMILAR (3633)..(3475): 701254mologous to Escherichia coli 37KD protein, similar to YI22-ECOLI,accession number D85613,Smith-Waterman Score=164.

SEQ ID NO: 25683 - DNA, 730 bp, Homo sapiens
  SIMILAR (730)..(482): 1001254mologous to Escherichia coli No definition line found,accession number U00039,Smith-Waterman Score=422.
cgccatcctgcgcggcttacttgatgccatcaacattctcaatccacacgccgaagtggatgtgatgagccgctatccggtcagttcttcctggctgctcaaccgcccggacgttcgtagaaaaaacagccttgcggcaaccggtttatcaatggcggggagggaatccagcaataatcgggtgtatggatgtgcagccagggtggaagttgagcaaagaaagccccagctgttcgcaacgctgcatttcatctataaaggcatcgcgcgatttttccagagcttcagtgaccggatgtccgaggttaatcagataactgtcgtggggaagaatttgcgccgatgtgtagtgatatttttcacaggcggctttgaattcatcgatctgacgcctgtgcaaaaaaaagcccctcgattgaggggctgggaatgggtgatcaacgggaggatgtatggttcagtgtgttcgacattttgtcttacccatactcatactgctggtcacatccacaggggtttcttccgccagattgacttccagtcccagcgccctttggctactttgaatacgttgcgacaaaatatcgttgtaatcaggttgatgatcactatcccaggtgtaacgctctgtggaaagtccgggttgcgtatcaacgatatattcttgttgccaggcgtaagctgtgttgagaaaaaaggcactgattaccacgctcgccagcaggcttag

SEQ ID NO: 25684 - DNA, 2379 bp, Homo sapiens
  SIMILAR (37)..(2): 1001254mologous to Homo sapiens p53 tumor antigen (aa 1- ?),accession number X02469,Smith-Waterman Score=65.
tcaggtggctggagtgagccctgctccccccgggctcattccagcctgggcatccttgagttccaaggcctcattcagctctcggaacatctcgaagcgctcacgcccacggatctgaagggtgaaatattctccatccagtggtttcttctttggctggggagaggagctggtgttgttgggcagtgctcgcttagtgctccctgggggcagctcgtggtgaggctcccctttcttgcggagattctcttcctctgtgcgccggtctctcccaggacaggcacaaacacgcacctcaaagctgttccgtcccagtagattaccactggagtcttccagtgtgatgatggtgaggatgggcctccggttcatgccgcccatgcaggaactgttacacatgtagttgtagtggatggtggtacagtcagagccaacctcaggcggctcatagggcaccaccacactatgtcgaaaagtgtttctgtcatccaaatactccacacgcaaatttccttccactcggataagatgctgaggaggggccagaccatcgctatctgagcagcgctcatggtgggggcagcgcctcacaacctccgtcatgtgctgtgactgcttgtagatggccatggcgcggacgcgggtgccgggcgggggtgtggaatcaacccacagctgcacagggcaggtcttggccagttggcaaaacatcttgttgagggcaggggagtacgtgcaagtcacagacttggggatttcgtgggcaacgcctgccgcaagatgccccagcgccaccagcttctctttgcgcttcatttcatcttgtagaagctggcgcgagcgcagatagcggcgataccagaagaatgacaatacgcttgccagcaagaccgtcgccagggcgaagaggataatcagggtattgcgcttttccccactctgggttgcaaccagatcactggcatcaacggcgataaaaatagcctgttgtgcatctgagcctggcagctttctccaactttggaagcccaggagcatggcccctgtccacagatgcacctggcacgaggcgtgcccagagggacagaggcagatgagttgcgtctcctccactggattgtgagggctcagaacactctgcatgtttccctctgagttcactcccaggaagacaaagtcctctgttttgtcaaagtggaagcaggaaagagggggagcaggccaacggtattccagtgcaacagaaaaacagcaagaggacagcccgtagaacagcattccaaaaaccacttgccagcatatccaggcggcgatcgggaaggttttagtgttgtacatcagcaggttcggcccccataggtaaggtgtgccgtaaactttgccgccaacattaaaccagtcgcctttaaccacgcgcggatcgagcgttttccagttgggaatcaatgcggtattaatcggctgcacgcgtttacccataatcaaacgcagcgaggcatcgccggatgccgtaaccagatcgtaaccccctttggtcatcagactgaccatttcatcggaagtcgcggcggttttcacattcaccgcgcagcctgtctctttttcgaactgcgttacccagtcgtattgtttatcagtttgtccgcgttcgatgtatcccggccaggcgataatatccagtcgcccttccggtttatctaaattggtaggcggttcggcggcgtgagcggtcattattgtcatgctgagcgcacacaggctgcggcagagtattccggtggtatgatgacgtccccaggtgtgctcgtcgccctccccgggtgcacctggttggaacttcacgcgataggccagcagggctttgacaacgtccacccgcccgtgcctgacggccagcatcagggccgtctgtcctgctgcagcctcaacctcacaccaggctccattctgtgtcttcgcgccttcctctcctctcttgttttcttgcgccgtgtcttgtgtctgtcgtttttctttttcttgtgtttttgttttgggtgcggttccttttgtgttccctgtctctcgttctcttttcccttcgccgccttcgtccctgctgttcgcctgctcatggttgcgcttgcgctcgtgcttttctcttcgttttcgtcgtgtttgtgtgcttttttgcgtttttctttcgttcttctttcgctcgttcttgcttctacttttttcctcgtccagataccagtcacccactgtatcatgaggggtgaccaggtagttgtctggtttagctgaactaaggagcaaattcgccacgagcgataaatggccaatggaccttggcccaaggggtggaaaaacggttaaccccaaaattttcttggccat

SEQ ID NO: 25685 - DNA, 495 bp, Homo sapiens
  SIMILAR (40)..(489): 351254mologous to Sphingomonas sp. LB126 FldA protein,accession number AJ277295,Smith-Waterman Score=283.
atgcccggtgacctgtatcgatatggcgatgcagtcagcattattccggctgaatatctgggaaaaacaggttatgaattaccggcggaactggatgccgacaaagcattattagcccgcattgaatctatccgtctacaagcgggtaaagcaatgggcttaggtgatgtcagtaatatggttatccctaaacctgtgcttatttctccagcgcagaaaggcggggcaattaatgtgcgttattttatgccgcattcttgccatcgcgcgctggcgataaccggtgctattgctatttccagtagttgtgcattggaaggcaccgtcacccgacaaatcgtcccttctgtaggatacggcaatatcaatattgaacaccccagtggtgcgctcgacgttcatttaagtaatgaaggtcaggatgccacgacgttacgcgcatctgttattcggacgaccagaaaaatattttccggtgaagtttatcttccctga

SEQ ID NO: 25686 - DNA, 4466 bp, Homo sapiens
  SIMILAR (2691)..(3128): 1001254mologous to Escherichia coli No definition line found,accession number U00039,Smith-Waterman Score=735.
atggaagaaaaactgttctcaagggacgatgatgatgtcaccaacaacacgcgtgtatacgccagcttcgcgacctgctttacgcagttcagtcattttatctacagttacgccacgggaatccgcaactactgcagacagcggccttcgacaaatacccgtgcgtctgccgctgctgatactacttcgccaaacagcgtgtcgtattcttcttgcgcagaagtcgcagttagttgctgcaacgcccgggataacgatgccaaatttaccgttatgttcaatcaactccctggtccatgtcgatttatctaccacaatcgccacgcgtggagtcaaatggtcagtctgatgaccaaagggggttacgatctggttacggcatccggcgatgcctcgctgcgtttgattatgggtaaacgcgtgcagccgattaataccgcattgattcccaactggaaaacgctcgatccgcgcgtggttaaaggcgactggtttaatgttggcggcaaagtttacggcacaccttaccaatgggggccgaacctgctgatgtacaacactaaaaccttcccgacgccgccggatagctggcaagtggtttttgttgagcaaaatctgccggacggcaagagcaataaaggccgcgttcaggcttatgatggccctatctatattgcggacgctgcgttgttcgttaaagccactcagccgcagttgggcatcagcgatccgtatcaactcaccgaagaacagtaccaggcggtgctgaaagtgctgcgcgctcaacacagtttgatccatcgctactggcatgacactaccgtgcaaatgagcgatttcaaaaacgagggtgtggttgcttccagtgcctggccctatcaggccaacgccctgaaagccgaaggccagcctgttgctaccgttttcccgaaggagggtgttaccggttgggctgataccaccatgctgcatagcgaagcgaaacatccggtttgcgcctacaaatggatgaactggtcattaacgccaaaagtgcagggcgatgtggcggcctggtttggctcgttaccggtagtgccggaagggtgtaaagccagtccgttattaggcgaaaaaggttgtgaaaccaacggttttaactatttcgacaaaatcgccttctggaaaacgcctatagcagaagggggcaagtttgttccctacagtcgctggacgcaggattacattgccattatgggcgtggagtttgacaacgtctcgcggttgtacggtgacgtgcgcgcagtagatggcgtcagtattgcgataaaagatggtgagttcttctctatgctggggccgtccggctccggcaaaaccacctgcctgcgcctgattgctggcttcgaacagctttccggcggggctatctctatctttggtaaacccgccagcaatctgccaccgtgggagcgggacgtgaatactgtctttcaggactacgcgctatttccgcatatgtcgattcttgacaatgtcgcctatgggctgatggtcaaaggcgtgaataaaaagcagcggcacgcaatggcgcaagaggcgctggagaaagtggcgttggggtttgtacatcaacgtaaaccgtcacaactttctggtggtcagcgccagcgggttgctatcgccagagcattggtgaatgaaccgcgcgtattgctgttggatgaaccgctcggcgcactggatctcaaattgcgtgagcagatgcagctggaactgaaaaaactgcaacagtctctcggtatcacttttatcttcgttacccacgatcagggcgaagcgttatcgatgtccgatcgtggtggcggttttcaataatggacgcattgagcaggtcgattccccgcgcgatctctatatgcgcccgcggcaagccggttgtgacggccaaatttaaacagggcactatgcccgaaccttcaaacaaggcgataatattgccgattcgcttcttccctggagtcgtgttaatgatcataaaaaaaagcggtggtcgctggcagctaagcctgctggcgagcgtggtaatcagtgccttttttctcaacacagcttacgcctggcaacaagaatatatcgttgatacgcaacccggactttccacagagcgttacacctgggatagtgatcatcaacctgattacaacgatattttgtcgcaacgtattcaaagtagccaaagggcgctgggactggaagtcaatctggcggaagaaacccctgtggatgtgaccagcagtatgagtatgggctggaattttcctttatatgaacaggttacaaccggcccggtcgcggcattacattacgatggcacaaccacctcgatgtataacgagtttggcgacagtactaccacgctgaccgatccgttatggcatgccagcgtgagtaccttaggctggcgtgttgactcccggcttggcgatctccgaccctgggcgcaaatcagctataaccagcaatttggcgagaatatctggaaggcgcaatcaggcctgagccggatgacggcgacaaaccagaacggcaactggctggatgtcaccgtaggcgctgatatgttgctcaatcaaaatattgccgcctatgccgcgctaactcaggcagaaaataccactaataatagcgactatctgtatacgatggggcgtacccgctggctgacactcatcggtactatcattacccagtttgcgctggggtcggtttatacctggagcctgtttaatggcgcgctttccgccaagctggatgcgccggtaagccaggtcgctttctctttcggcttgttaagtctggggctggcaatttcgtcttctgttgcgggcaaattacaggaacgttttggcgttaaacgcgtcaccatggcttccggcattttgctgggattaggcttcttcctgacagcgcattctgacaacctgatgatgctgtggttaagcgccggtgtgctggtgggactggcagatggcgcgggttatctgctgacgctctctaactgtgtgaagtggttcccggagcgtaaaggtctgatctccgcgttcgctatcggttcttatggtctgggtagcctgggtttcaaatttaatcgacacgcagctgctggaaacggtcggtctggaaaaaacctttgtgatttggggagcgattgcgctgttgatgattgttttcggcgcaacgttaatgaaagacgcaccaaaacaggaagtgaaaaccagcaatggtgtggtggagaaagattacacgctggcagagtcgatgcgtaaaccgcagtactggatgttagcggtaatgttcctgaccgcctgcatgagcggcctgtacgtgattggggtagcgaaagatatcgcccaaagtctggcacaccttgatgtggtttccgcagccaatgcagtcactgttatttccatcgccaacctttcaggtcgtctggtgctgggtattctgtctgacaaaatcgcccgtatccgtgttattaccattggtcaggtgatatcgctggtgggtatggcggccctgctgtttgcaccattgaatgcagtgacgttctttgcagcgattgcctgcgtggcatttaactttggcggcactattaccgtctttccgtcactgcatttgtggttcgattatcgcctcactgtttggcggcttctatgtgaccttctacgtgattttcgccctgctgattctgtcattggcgctttctacgacgattcgtcagccagagcagaaaatgttgcattttacttatctgactacctccgcactttttcctgccgggccgaaacggaactggatgccgacaaagcattattagcccgcattgaatctatccgtctacaagcgggatacggcaatatcaatattgaacaccccagtggtgcgctcgacgttcatttaagtaatgaagctccggcaggattaagcgaactggcgtgggtgctttttggtatttacctggcggccattgtggggctggttatcaagcctttcccggaacctgtcgtactgttaattgccgttgctgcctcaatggtggtggtcggtaacttatccgacggtgcgtttaaaaccaccgccgtattaagcggttactcttcaggtaccacctggctggtgttctcggcgtttaccttaagcgccgcatttgtgaccaccggtttaggtaaacgtattgcctatctgctgattggtaaaatcggtaacaccacgctgggtctgggttacgttacggtattcctcgatctggtactggctccggcaacaccgtctaacaccgcgcgtgcgggcggcattgtgttaccgatcatcaacagcgtggcggtggctttggggtccgaaccggaaaaaagtccgcgtcgtgtcggacattacctgatgatgtccgtttggtaccggtcggtccgcgatctgtgctgggctaa

SEQ ID NO: 25687 - DNA, 356 bp, Homo sapiens
  SIMILAR (2)..(199): 1001254mologous to Escherichia coli periplasmic phosphoanhydride phosphohydrolase,accession number M58708,Smith- Waterman Score=326.
cgggcatcggcaaacggcgtttcgcgaactggaacgggtgcttaattttccgcaatcaaacttgtgccttaaacgtgagaaacaggacgaaagctgttcattaacgcaggcattaccatcggaactcaaggtgagcgccgacaatgtctcattaaccggtgcggtaagcctcgcatcaatgctgacggagatatttctctggagctcaactggacgcttccgggtcagccggaataccacgccgccaggtggtgaaactggtggtttgaacgctggggtcggcttaagcgataccaggcaagtggattcagggttcgctgggtctgcagacttagatagtgattcctctgatggat

SEQ ID NO: 25688 - DNA, 2142 bp, Homo sapiens
  SIMILAR (1516)..(2139): 901254mologous to Escherichia coli phosphomannose isomerase,accession number M15380,Smith-Waterman Score=948.
atgtatgaaacactggaagaggtgctccgctcctctggcgatcccgccgatcagaaatatgttgagctgaaagcgcgtgcagaaaaagcgctggatgatgtgaaaaaacggaagctgtattgctggagacggcggcagatctgcgctttgcgccggataagtcgctcgccatatcccgggcaccaactcgagtgcatcgctagcttcgaccgcaacttcgaggccatgcaaaaggagatgtacgggcagtttgaaaacaccttcatgatgtacctgccgcgcctgtgcgaacactgcctcaatcccagctgcgtggcgacctgcccaagcggcgctatctacaaacgcgaagaagacggcattgtgctgattgatcaggataaatgccgtggctggcgtttgtgcataagcggttgtccgtacaaaaaaatctacttcaactggaaaagcggcaagtcagaaaaatgcatcttctgttacccacgaattgagtccggtcaaccgaccgtgtgctcagaaacctgcgtgggtcgcatccggtatctgggcgtgctgctttacgaactcaccgcccagcagttcttcccagtttggcccccagatcactttgtccatccgtttgccgtcaatcagttgaataaagagaaactggatcggtggttgaaagatggcatcaccacgccgggtggaaaactcccttcagaaagagagctgggagaactgctgggcattaaacgtatgacgctgcgccaggcgttgttgaacctcgaggcagaatccaaaatcttccgtaaggatcgtaaggggtggttcgtgacccagccgcgatttaattacagtccggagctgtcggcgagctttcagcgggccgcaattgagcaagggcgagagccttcctgggggtttaccgagaaaaaccgtaccagcgatattcccgagacgctcgcgccactgattgcagtgacgccatcaactgaactctatcgcatcaccggctggggggcgctggaaggacataaagagtttaaaatggataagaagcaagtaacggatttaaggtcggaactactcgattcacgttttggtgcgaagtctatttccactatcgcagaatcaaaacgttttccgctgcacgaaatgcgcgacgatgtcgcattccagattatcaatgacgaattatatcttgatggcaacgctcgtcagaacctggccactttctgccagacctgggacgacgaaaatgtccacaaattgatggatttatccattaacaaaaactggatcgacaaagaagaatatccgctatccgcagccatcgacctgcgttgccatcatggctgcacgggagatggcatccggaagcgccttagcagcctgaaaccgaagtttgtatcggtgacctatggcgcgaactccggcgagcgcgaccgtacgcacagcattattaaaggcattaaagatcgcactggtctggaagcggcaccgcatcttacttgcattgatgcgacgcccgacgagctgcgcaccattgcaatgaacctgccagctaagggcggaagtatgatcatgctggcgaaaggcaaccgcagccagcagggtgaaccgtggcaaacgattcgtttaatttctgaattttacccggaagacagcggtctgttctccccgctattgctgaatgtggtgaaattgaaccctggcgaagcgatgttcctgttcgctgaaacaccgcacgcttacctgcaaggcgtggcgctggaagtgatggcaaactccgataacgtgctgcgtgcgggtctgacgcctaaatacattgatattccggaactggttgccaatgtgaaattcgaagccaaaccggctaaccagttgttgacccagccggtgaaacaaggtgcagaactggacttcccgattccagtggatgattttgccttctcgctgcatgaccttagtgataaagaaaccaccattagccagcagagtgccgccattttgttctgcgtcgaaggcgatgcaacgttgtggaaaggttctcagcagttacagcttaaaccgggtgaatcagcgtttattgccgccaacgaatcaccggtgactgtcaaaggccacggccgtttagcgcgtgtttacaacaagctgtaa

SEQ ID NO: 25689 - DNA, 1737 bp, Homo sapiens
  SIMILAR (983)..(1366): 871254mologous to Escherichia coli periplasmic phosphoanhydride phosphohydrolase,accession number M58708,Smith- Waterman Score=589.
ggataattcgctttttaatccataaaaacctgcccaccaatgccaggtttttttttgccctgtcgtgagcgcacaccaaggcgaggttctcccttataagtctggggttacgtcaatagagagttttgtcacaattatctgcaaagtcatacgccgttaattgctttcttttttggcgtaagcgtaagatgcttcatctggtttaaaccaaaaggattaaacaatggcggagaatcaatcccccgtagaaaatgcaaaagagaaactggatcggtggttgaaagatggcatcaccacgccgggtggaaaactcccttcagaaagagagctgggagaactgctgggcattaaacgtatgacgctgcgccaggcgttgttgaacctcgaggcagaatccaaaatcttccgtaaggatcgtaaggggtggttcgtgacccagccgcgatttaattacagtccggagctgtcggcgagctttcagcgggccgcaattgagcaagggcgagagccttttctgggggtttaccgaggaaaacccgtacaggggattttccggggaccctcggcccttgatggcagtgacgccatcaactgaactctatcgcatcaccggctggggggcgctggaaggacatagggtggtttaattttccgcaatcaaacttgtgccttaaacgtgagaaacaggacgaaagctgttcattaacgcaggcattaccatcggaactcaaggtgagcgccgacaatgtctcattaaccggtgcggtaagcctcgcatcaatgctgacggagatatttctcctgcaacaagcacagggaatgccggagccggggtggggaaggatcaccgattcacaccagtggaacaccttgctaagtttgcataacgcgcaattttatttgctacaacgcacgccagaggttgcccgcagccgcgccaccccgttattagatttgatcaagacagcgttgacgccccatccaccgcaaaaacaggcgtatggtgggacctttaccacttccagtgcggtttatggccggacccgatactaatctggcaaatctgggcggcgcactgaagttcaactggacgcttccgggtcagccggataacacgccgccaggtggtgaactggtgtttgaacgctggcgtcggctaagcgataacagccagtggattcaggtttcgctggtcttccagactttacagcagatgcgtgataaaacgccgctgtcattaaatacgccgcccggagaggtgaaactgaccctggcaggatgtgaagagcgaaatgcgcagggcatgtgttcgttggcaggttttacgcaaatcgtgaatgaagcacgcataccggcgtgcagtttgtaatgcataaaaaagagcattcagttacctgaatgctctgaggctgatgacaaacgaagaactgtctaatgcgtagaccggaaaaggcgttcacgccgcatccggccactttcagttttactctttctcggagtaactataaccgtaatagttatagccgtaactgtaagcggtgctggcgcgtttaatcacaccattgaggatagcgcctttaatattgacgcctgcctgttccagacgctgcattgacaaactcacctctttggcggtgttcaagccaaaacgcgcaaccagcaggctggtgccaacagaacgccccacgaccgcggcatcactcaccgccagcatcggcggcgtatcgacaatcacca

SEQ ID NO: 25690 - DNA, 819 bp, Homo sapiens
  SIMILAR (804)..(10): 731254mologous to Escherichia coli sigma factor,accession number Z27094,Smith-Waterman Score=941.
tcactgtaggagttctaccgtccagtgaccgttatgcttacgcaccagcacatctggaatgacatactcaggttcgccagtctggatcgactgcccggggcgcggatcgagcgactggatcagattgacggcttctttcagcacatcttctttcagacgcgtgacgcgcattaaagtgcggaagtcgtgattggctaacagatcgagatgatcgctaatgatcagtctggcctcttccagccacggcgtggtcttatcgaattgggagagttggatcagcagacagtcacgcagatcttttgccgccacaccgaccggatcaaaccgttggatccgcttaaggacggcttcaacttcgtcgatgtcgatctcttcatcgcctatactttcgagaatatcttccagcgggacagtcagataaccggtttcatcaacggcatcgacgatagaggtagcaatagcgcggtcagtgtcggaaaacggtgtcagctcaacctgccacatcaggtaatcctgcaaggtctgcgtcgtttcgcccaccggtgaaatggtgtcccaactggcatcgagcggcagctcttccggcatctctttttgttcgagcgcgtcgccggtgtccagcgtttcactgtcttgcgtctcgcgggtgtcgatttcttcatgagtgtcgatttgctcaagcagcggattactctccagcgcctgctgtagctcctgctgaagttccagcgtcgacaactgcaacagacgaattgcctgttggagctgtggcgtcatcgccagttgttggctaagcctgagttgcaaaccttgcttcat

SEQ ID NO: 25691 - DNA, 676 bp, Homo sapiens
  SIMILAR (1)..(372): 1001254mologous to Escherichia coli K12 putative ATP-binding component of a transport system,accession number AE000399,Smith- Waterman Score=617.
gaagcctccattttccgtcgcctcagcgtttacgataacctgatggcggtactgcaaattcgtgacgacttgtctgctgaacaacgtgaagaccgcgcgaacgagctgatggaagagtttcacattgagcacctgcgtgacagcatggggcagtcactctccgggggtgaacgtcgccgtgtagaaattgcccgcgcactggctgcgaatccgaaatttattctgctcgacgaaccgtttgccggggttgacccgatctcggttatcgacattaaacgcatcattgagcacctgcgcgacagcggcctgggcgtgctgatcactgaccacaacgtgcgtgaaacactggcggtttgtgaacgcgcttatatccaggagagtacgattctgaacatgaagcaaggtttgcaactcaggcttagccaacaactggcgatgacgccacagctccaacaggcaattcgtctgttgcagttgtcgacgctggaacttcagcaggagctacagcaggcgctggagagtaatccgctgcttgagcaaatcgacactcatgaagaaatcgacacccgcgaaacgcaagacagtgaaacgctggacaccgccgacgcgctcgaacaaaaagagatgccggaagagctgccgctcgatgccagttgggacaccttttacaccgctg

SEQ ID NO: 25692 - DNA, 1452 bp, Homo sapiens
  SIMILAR (939)..(388): 971254mologous to Escherichia coli pot. PBP 1A,accession number X02164,Smith-Waterman Score=938.
tcattttaaaacatgaaatagtggcacatttagttgagcgtggcgttgaagtgattgataaaggaacctggtcgtcagagcgtactgattatccacattacgccagtcaagtcgcactggctgttgctggcggagaggttgatggcgggattttgatttgtggtactggcgtcggtattttcgatagcggcgaacaagtttgccggaattcgcgcgggcgtctggaaccaaccttatttccgcgcaacttttccgggcagcattacgacacccaaccggctgggtttttgggtcaagaagtgggtgggctccaaactggcaaaaaatgattgtggaatccctgggctgggcgcccaaataccaagggcgggcgttatttaacaacgccagcgccataacggcaccgttttgcggattgatcgacaccagcgccgagttcacttccggcacttgtgccagccaccatgcatcgccaacctgacgaacccagatttgctgacccgtttgcagaacatcggtcactttacgcggcgtcggtccttgctgagtatccgaacggtaaggacgcgcccagcgaacgccttccatactcaatgcgacggtcgacccgtccgccagcatcgccgtcgcttgctgaggattggcgctggtgactgcggcaggcagcagcggaccataggttggcagcgccttcagcgtatcggtaatcttgttgttatcccacgccgactcgcccactttccacagcacatttgccgggccgcgatagccgtggcgcatgtcgtagtccagcacgttattacgtaccgcctgctgcgcggcctgctgcactttgcgggtgatggtggtgtaaatgcgataaccgtcttcataggcactttcgccataacggttatacatctcctggcgcaccatttggctcagtacggcgcagagaaagcaatctgacccagctgtactacccgccgctgccgaagccatggtgcgcatgcggctaccaggccagacggcgtgaacttcatgtacgccaacggcatctgcggtacgaataatcgcagaaacgttatgaggtttgtggactttaatcacgtctggcatcacgcggattttgcgcatgatattcgccagatgcacacggtcacgagcggtcagacgaataaaggcgctgtagacgcgaccatctttctcttccgtattcaaactttgaatattcgaagtcgtggtgttaattgccgccgtcaggtttgccagcgcaccctgatgattgaacatctccaccttgatttcggtgatgaactcctgcgccgtctctttatcccattccacagccataaacttctctggctctttctggtagccacggatattacggcaggattcatggtggatcaccagacctttaccggggctgacgtgggcgataatcgggtcgccaggaataggcggcagcat

SEQ ID NO: 25693 - DNA, 2868 bp, Homo sapiens
  SIMILAR (307)..(1212): 991254mologous to Escherichia coli Anaerobic dimethyl sulfoxide reductase chain A precursor (EC 1.-.-.-) (DMSO reductase),accession number D90801,Smith-Waterman Score=1591.
atgaccgattttcgggagagcgacaccatgagtttatttgataaaaagcatctggtttcccccgccgatgccctgcctggacgtaacaccccgatgcccgtagccacgctgcatgcggtcaacggtcactcaatgaccaatgtacctgacggaatggagattgccatttttgcgatgggttgtttctggggtgtggagcgtctgttctggcagttacccggcgtttacagcaccgccgcacgtataccggcggctatacgccaaatccgacttatcgggaagtgtgctccggtgatacgggtcatgccgaagcggttgaaatatcccatgaagcgcgtcggcaagcgcggtgaaggtaaatttgaacggataagttgggacgaagccctggataccatcagtgataatcttcggcggatcctgaaagattacggcaatgaggctgtacatgtcctgtacggaacaggcgtagatggcggaaacatcaccaactcaaacgtcccgtaccgtctgatgaactcttgcggtggttttctcagtcgctatggcagctacagtaccgcacagatcagtgccgcaatgagttatatgttcggtgccaatgatggcaacagcccggatgatatcgccaatacgaaactggtcgttatgttcggaaataacccggcagaaacgcggatgagcggcggtggtgtcacttactacgtcgagcaagcccgcgaacgttcaaacgcacgcatgatcgtcatcgatccacgttataacgacactgctgccgggcgtgaagatgaatggctgcccattcgccctggcaccgatggcgcactggcctgtgcgattgcctgggtactgattactgaaaacatggtcgatcagccatttctcgacaaatattgtgttggttacgatgaaaaaacgctgcccgccaacgcaccacgtaacgcgcattataaagcctatattctgggcgaagggcctgacggcatagctaaaacgccggaatgggcagcaaaaatcaccagcatcccggcagaaaaaattatccagttggcacgagagatcggttcagcaaaacctgcttatatttgtcagggttgggggccacaacgacattccaacggcgagcaaacatcccgcgctattgccatgctttccgttctcaccggcaacgtcggcataaacggcggcaactcaggcgtacgcgaaggggcaacaggttcggcggttggggaagtcgttttcaatacttcaatgaccggttatcaagaaatcctcactgatccttcctattctcgtcaaatcgttactcttacttatccccatattggcaatgtcggcaccaatgacgccgatgaagaatcttctcaggtacatgcacaaggtctggtgattcgcgacctgccgctgattgccagcaacttccgtaataccgaagacctctcttcttacctgaaacgccataacatcgtggcgattgccgagtatcgatacccttttatggaaaagaaacacatttatctgttttgttctgcgggcatgtctacctctttactggtatcaaaaatgcgcgcacaggcagaaaaatatgaagttccggtcattattgaagcatttccggaaacactggctggtgaaaaaggtcagaatgccgatgtcgtgttattagggccgcagattgcttatatgttgcccgaaatccagcgtttgttacccaacaaaccggttgaagtaattgactcgctgctttatggcaaagtcgatggtattcgcctcgacgcctcaaccattgaaacacttaatggtctgaaaggtattggcggcaacgtatataacggaacattaggaataatgtctttaatggcaccgttctttattggcatggcgctggcagaagagcgtagagtcgatgcgctggcggctgggttgttatccgttgcagcatttatgaccgtcaccccatatagtgtcggtgaggcctatgcggttggtgcaaactggttaggtggggcgaatatcatctccgggattattattggcctggtggtggcagaaatgtttacctttggcttactggcgggctggcatctcgatatctggggaaagaatcggcggaggttactgcccgcctgggtacggttaaagcacgtgctgctgaacgcgagcaaacccgccaattgctggctggcagcgtgtgaaaccgatattaatgccagcaaaacccggcagcagctcaacgatgtcgcggggaaaatgaaaattattgaggcacggttaagcgcacttacaaataaccagacaaagtcattgaagcttaaaccggtcgcgttgccgaaagtggcaagccagcttcctgatgaactggggtactccttactggcccggcgggcagatttgcaggcggcgcactggtacgttgagtcatcgctaagcaccattgatgcggcaaaagcggcattttatcctgacatcaacctgatggccttcctgcaacaggatgcgttgcacttaagcgatctgttccgtcattccgcgcagcaaatgggcgttacggcaggcctgacgctacccattttcgatagtggtcgtcttaacgccaatctcgatatcgcaaaagccgaaagcaacttgtctatcgccagctacaacaaagcggtggttgaagcggtgaatgacgtggcgcgggcagccagtcaggttcagacactggcggagaaaaaccagcatcaggcgcaaattgagcgcgatgccttgcgtgtgtgcatccaccgccagttgggcgtgctcgctatgcacttgcacttgattttcatggtgactgattcgctccacatgggcattgaggataatatcgacgccctgatcgcgtaa

SEQ ID NO: 25694 - DNA, 618 bp, Homo sapiens
  SIMILAR (618)..(268): 921254mologous to Escherichia coli matches PS00017: ATP_GTP_A and PS00301: EFACTOR_GTP; similar to elongation factor G, TetM/TetO tetracycline-resistance proteins,accession number L19201,Smith-Waterman Score=558.
acgacccgcgaatgccggggaaaacgcagccttaaaataggccggatgcggcgtaaacgccttatccggcatacgattttattcggcctggctccccgtaggccggataagaacacatctattgttgttgttggtggtggtggtggttatgtaggcttgctgggcgaggatatcggcggcggtgatccagcgcagcgggatgcccggtgtgcgcgtatgcgggcggataaaaagctgctcgaaggcggtacgctgtcagcggcatgtctttgcaacatgtgtctggaacggacgtcaagtcacgtccggcgcaggaacgtggtcaacaatcgcctggtacagcggggtcatgtcttccgccatatcttcgtggtccagacccgcgataccgttcagcgcagaagcgtaaacgatcgggaagtccagctgctcgtcggtcgcgtcgaggttaacgaacagatcgaatacctgatccacaacccaatcaggacgcgcgccagggcggtcaactttgttgataacaacaatcggcttcaggccgtaagcaaacgcttttttggttacgaagcgcgtttgcggcatcgggccgtcaaatgcgtcaaccaccagcagcactga

SEQ ID NO: 25695 - DNA, 480 bp, Homo sapiens
  SIMILAR (109)..(396): 981254mologous to Escherichia coli BILE ACID-INDUCIBLE OPERON PROTEIN F,accession number D90868,Smith-Waterman Score=503.
atgctcaatgatgcgtttaatgtcgataaccgagatcgggtcaaccccggcaaacggttcgtcgagcagaataaatttcggattcgcagccaaaagggggacagagagatggcctggtttggcgctgacgttattaaaattgaacgtcccggcgttggtgacgtaacgcgtcaccagctgcgagatattcctgatatcgatgcgctttacttcaccatgcttaacagtaacaaacgttctattgagttaaataccaaaacagcggaaggcaaagaggtaatggaaaagctgatccgcgaagctgatatcttagtcgagaactttcatccaggggccattgatcacatgggcttcacctgggagcatattcaagaaatcaatccacgtctgatttttgcggtatttaccatcatgccgctggcggcagttaacgcaataacaatcctgctcaaacggaataaccgagagttattcatataa

SEQ ID NO: 25696 - DNA, 554 bp, Homo sapiens
  SIMILAR (1)..(552): 981254mologous to Escherichia coli K12 B12-dependent homocysteine-N5-methyltetrahydrofolate transmethylase, repressor of metE and metF,accession number AE000475,Smith-Waterman Score=924.
gtcaacgccgggcaactggcgatttacgactacctacccgctgaactgcgcgacgcggtggaagatgtgattcttaatcgtcgcgacgatggcaccgagcgtttactggagcttgccgagaaatatcgcggcagcaaaaccgacgacaccgccaacgcccagcaggcggagtggcgctcgtgggaagtgaataaacgtctggaatactcgctggtcaaaggcattaccgagtttatcgagcaggataccgaagaagcccgccagcaggctacgcgcccgattgaagtgattgaaggcccgttgatggacggcatgaatgtggtcggcgacctgtttggcgaagggaaaatgttcctgccacaggtggtcaaatcggcgcgcgtcatgaaacaggcggtggcctacctcgaaccgtttattgaagccagcaaagagcagggcaaaaccaacggcaagatggtgatcgccaccgtgaagggcgacgtccacgacatcggtaaaaatatcgttggtgtggtgctgcaatgtaacaactacgaaattgtcgatatcgg

SEQ ID NO: 25697 - DNA, 1140 bp, Homo sapiens
  SIMILAR (64)..(474): 911254mologous to Escherichia coli matches PS00017: ATP_GTP_A and PS00301: EFACTOR_GTP; similar to elongation factor G, TetM/TetO tetracycline-resistance proteins,accession number L19201,Smith-Waterman Score=623.
tcaacaaagttgaccgccctggcgcgcgtcctgattgggttgtggatcaggtattcgatctagttcgttaacctcgacgcgaccgacgagcagctggacttcccgatcgtttacgcttctgcgctgaacggtatcgcgggtctggaccacgaagatatggcggaagacatgaccccgctgtaccaggcgattgttgaccacgttcctgcgccggacgttgaccttgacggtccgttccagatgcagatttctcagctcgattacaacagctatgttggcgttatcggcattggccgcatcaagcgcggtaaagtgaagccgaaccagcaggtcactatcatcgatagcgaaggctaaacccgcaacgcgaaagtcggtaaagtgctgggccacctcggtctggaacgtatcgaaaccgatctggcggaagtctggcgatatcgctgcgatcacgggcttgacgaactggcggtaccagctgattttccgtttgtattctctcccctcccctcgcgaaacgccctggccaaccaaacggccaggagggagccctccgtcaatgggcctgctgccggcctcataccggatgagagtggtaccaaacatgtcgtggaccaatgccaagcagcctcccggacggtcacatcgggcacggacatgcatggtgagtcgaacgctcttgtacttggcccgtcgcttaatacctttggccagcgcaacgcgtgaccgcgtcggggtatcttttagcataatcatggtaggggcgggaaatacggcgcttccgccatagaacaaggcacccgaccggttggcgccatgggtaatgttgaagtccgcatgtccgcgtttggcaacttgacaccgcagttcccagccgggcatcgccgcggacatggcactagctttggccggtggtagagccatattgccttcccattggaatcggcccgggtatggggcccgccgccgcggcggcggcggcggggttgtagggggccgcggcggcccgggccgggcgtcgacgtgtccagtggcgtagcgcaccgcggtagtggtcggcttagtcataagctgaagttcagcctgcggcctcagaatcagccccgcgccagcagcgccattgaccgcgcgcttgcccat

SEQ ID NO: 25698 - DNA, 2292 bp, Homo sapiens
  SIMILAR (1168)..(1806): 991254mologous to Escherichia coli K12 orf, hypothetical protein,accession number AE000493,Smith-Waterman Score=1100.
ttagccacgactacgttgcacttccagccaccacttctccagctccgcggcaaaggcctggcggtcacgttgtgaaaggctatctggtccgccggtctggatcccactggcacgtaaggtatccataaaatcgcgcatcgtcaggcgctcacgaatggtcgctggcgtgtaacgttcgccgcgcggattaagcgccgcagcgcctttctcgatggcttcagcagccaaaggtatatctgcggtgatcaccaaatcgcccgcttcacactgccggacaatttcgttatcggcaacgtcgaaacctgccgcgacgcgcagcgtacgaataaatcgcgatggcggcacgcgtaaactctggtttgctaccagtaccagcggcatctgcatacgttccgccgcgcgatacaaaatctctttaattacattgggacacgcgtcggcatccacccaaattgtcataaagtcatcctttgttgggtaatcctctattgtgtcgcgcttttgccttccggcatagttctgtttatgcttctccgggttttttgaaatccgtggagacaaccgctctacgcaattgcgtccgatatccttcgggtgaacttgtgggacaaattttgccgacagggagcttccgcctttgatcaccgcttgctgaaagtgataatgcggccgcacgtttacccgtgacctgattgccgggataaccgtcgggattattgctatcccgctggcgatggcgttggctattggtagtgttgtggcaccccagtacggtttatataccgcagctgttgcggggattgtcattgctctgacgggtggttcacgctttagcgtttccggtccgactgcggcatttgtggtaattctcttccggccttgctggctggttgcgcggtgatggggattgttaacctgctcggcggacatgttgctaccatcggttcgcaattccactacgtcctggccgatggttctcagggtaacggtattccgcaactgctgccgcaactggtgctgggattctattcgcacactgctgcctgcagcattatcaatggcaggtaccgactgattagggtatatcacggggttgtttattgagcgaagcacataccttaagtgtcgaggctgtgggtgcacgatgcgcctcgtggcagtgtacgcaataacggccagtttgatggacaggtgcaggtgaccgatccgcaaggccgccgtaatcttggtggcaacgtcaatatccgtaacttcaaccttgcgatgataaaccccatctttacccgtggggaaaaagcagcggggatggtgagtgccaacttgcgtctgggtggtgatgtgcaaagcccgcagttgtttggtcagcttcaggttacgggtgtggatatcgatggcaactttatgccgtttgatatgcaaccgagccagcttgcggtcaactttaacggtatgcgctcgacgcttgccggtacagtacggacccagcagggtgaaatctacctgaacggtgatgccgactggagccaaattgaaaactggcgggcgcgggtaacggcgaaaggcagtaaagtgcggatcaccgtgccgccgatggtacgaatggatgtatcgccagatgttgtattcgaggctacaccaaacctgtttaccctcgatggtcgcgtggatgtcccttgggcgcgcatcgtggtgcacgatctgccggaaagcgcagtaggcgtctccagcgatgtggtgatgcttaacgataacctgcaaccggaagagccgaaaacggcgtcgattccgattaacagtaacctgatgtccggtaccgagtatggtgtagaactcgtagtgatgaggtaagtaatctacttttgtattcccgtcgtatggagccggcgttagcgcaaagcacagcttagccatcagggatgacgactctgcagccgcagctgcactggcggcgcaaaccggagagcgcaaagtaggacgtgacgatccttgcccgtgcggttctggtaacttatacaagcagtgccatggccgcctgcaataaaagctaactgttgaagtaaaaggcgcaggattctgcgcctttttgataggtttaagacaatgaagaagctgcaaattgcggtaggtattattcgcaacgagaacaatgaaatctttataacgcgtcgcgcagcagatgcgcacatggcgaataaactggagtttcccggcggtaaaattgaaatgggtgaaacgccggaacaggcggtggtgcgtgaacttcaggaagaagtcgggattaccccccaacat

SEQ ID NO: 25699 - DNA, 5298 bp, Homo sapiens; identical to SEQ ID NO: 22468
  SIMILAR (4482)..(3520): 991254mologous to Escherichia coli K12 putative 2-component regulator,accession number AE000418,Smith-Waterman Score=1648.

SEQ ID NO: 25700 - DNA, 1540 bp, Homo sapiens
  SIMILAR (1539)..(1078): 921254mologous to Escherichia coli 2-succinyl-6-hydroxy-2,4- cyclohexadiene- 1-carboxylate synthase (mendD),accession number M21787,Smith-Waterman Score=701.
tcacccacgcctattggtcccattggcgccactccgcgtcctaccggactgccccatccctgaggacacattcttaaccagcacggtaccttccgtaagtatgtcaccaggcacatcaaataatgccgacaaatggtcggtacccgtcggggcggcgaacaaggtaaagaagtgattgacggctacggtaaaccggcaacgttctaccagatgcaggacaacggtaaacccgttgaaggtcacgcttcccagatgcactacgaactggcaaaagattttgtcgttctgacgggtaatgcttatctgcagcaggtcgatagcaacattaagggcgataagatcacttacctggtgaaagagcagaaaatgcaggctttcagcgacaaaggcaagcgcgtaacaaccgttctggtgccgtcgcagcttgcaaaagcctataaaggccgtcgcgtggtagaagacgtcagcctgaccgtcaactccggggaaattgtcggtctgctggggccaaacggtgccggtaagaccaccactttctacatggttgtaggcattgtgccgcgcgatgcgggcaacatcattattgatgatgacgatatcagtctgctgcctctgcatgcacgcgcgcgccgcggtatcggctatctgccacaggaagcctccattttccgtcgcctcagcgtttacgataacctgatggcggtactgcaaattcgtgacgacttgtctgctgaacaacgtgaagaccgcgcgaacgagctgatggaagagtttcacattgagcacctgcgtgatgcctctctcggacatcgtctctgtcacacaagaggcggaagggtcgcggatagagggcagcggacggggggagaaaaacaagtgaagtcttgaataacacacggtgcccagattgttctttctttggcccacacactcgtttgcacgaaaccgtcgtttttccttcaaggggctttcatccacccgtgtttctccgacacgatgacccggaccgttgtgtgtatgactccgtttggcacgagagcgggtcgaatggtagaaaccagccaacgtgcgggatatcctgggtcgggcgcggcaatgaaatactgtgcgtgggtagagagcgaacattcccggctggcgaattgcctgattcgcgccgcagtcaattagctccggcgggcgatcggcggttaagagaatcagtttttctccggttaacccggcttcaatcagtgccggatagagatttgccaccgccgtgccggaggtcacaatcaccgccaccggctgcttgctgactttcgccagccccagcgccagatgccccaacccacgctcatcgaaatgggtgtggtgaatgaatgcggaattctccgccgccgctaacgttaacggtgtagaacgcgagcctggggcgatacagatgtgtctgacgccgtgacgcgttaatgcttccagaatgaccgccgcccagcgtcggttaaatgcgcttactgacatgagtttgtccggtatcaatattgcggctaagtataaggag

SEQ ID NO: 25701 - DNA, 2532 bp, Homo sapiens
  SIMILAR (2532)..(2122): 921254mologous to Escherichia coli put. 16S rRNA methyltransferase (ksgA) (AA 1-273),accession number X04711,Smith- Waterman Score=644.
ttaatgtggcagtcggttatctgctgcctgctggctggcttgctgatgtggatccccgactggtttggcgtgatgaatgtctggacgctgctcgttcccgccgcgctgttctttttcggtgccgggatgctgtttccgctggcgaccagcggcgcgatggagccgttccccttcctggcgggcacggctggcgcgctggtcggcggtctgcaaaacattggttccggcgtgctggcgtcgctctctttcgctaccaaacaggtcgcgcaaatcaagccagtgctcaatccacgccacagcgttgcgaccaatcggcaggcggcgctctttgctgcctttccccataacccacacttcaccagactccaggtcgaggtgtttaatatccagccccaccagctcagaaagacgcagacccgcgccgtacatcaggtcgcgtacagcgaggggatcattgatatcaatatccagcagccgattcatatcgtcgacgtcgatgtttttcggcagatgacgcggcgctttcggtgccgaaacacctttcgccgggttagctttgagttcgttctgggctgaccagccagtcaaaaaagctacgtagcgcagaaagccgtaacgccagacttgctgctcccagccgcgttcaatccaacgctccagaagctccggcaacatcagcgcaatttcatgaagtaactgcgttccttgcccttgttgatagtgactggcatcgcgactggtaaacagcacgacaccccaatcagcatcgcttcccagcatcgacatcgccaccgatcccaccgctttcgcttccggtagcaccaccagcagctctgccaggccgagatcgcgcgcccagcggtgaaagcgcatcagcatatcgtcgagactgctggcggcggtgagactgcgctgcaggtagagtaggcgataaaacaggccttcgttggcgatagcctgttccatcaacagcgccatgttctcttccagaacatgaatatgattacgtgcgcgggccatgtgccaactcgaccgacggggggatccactgtccaaatgtgaagagcggacagcgctgcacccatggtgagtaccaaagcggtgaagggtattttccatccaacgaagtttaactatgaatactaatgtgttcagaatacatcttccgtgaatggccgaaagccccggagagattaggtctcccgcagtccctgaatacgtcagctgaatctccttactgccgtatcccaacccgtataggccactgtaagatgtcaaagcaactgcaatttgttcctgtctcttgtctgtctgaggcaatgcctccgtgagagtacctatggacctgtgccagaggtctggcagtcttgacagtgctcggaacacggcgatgctctctgcctcttttaacgtccggtgcggtaacagcgcagcaaaatcactgcggtggtaacgcgccagcagtgcgccagggtagcgcatcataaatgtcgacagcagattcgtcagagtgaagaactgttcttcaacctggctgtgcccccaggtatcgctcaacatattgaaatccggcagacgaatcatcatcacgatcccgtgggtacctactttctcctgatcttccagtaacgttgctaactgattatcgaaaaagagtcggttattgaggccggttttcacgtcctgggcggcataagagcggatcagcgtatcaagacggctgtgttgttcgcgtgcgttctgaatttcacgaagcagcgtatccagcgcactgctggttctgggcggccattcatagatggttcccaacacattagagccacgctcaccgtttaagatacgagtagcccgggtttccagcaattcttgcccggcaagttgccgttgtaaccagcgtaccgccaggaagagcataacaatgatagagcggggatccacgggaatccgcccagggagatcggatgccagcacgagcgtcgttcccttaggatcccttggagaaatttcaggaaccggccggggacaagatcccgtacgcaggggtattcttccaggggtaaatcgttcattatcaggtgaagatggagcctcaatgtagacgctatgaacctgaatacacatctcctgcaagggcgcgttatccgccagatagttcgccatctggcaatattgcgcgacagagatattctccgctcgcatcgccgggtcgatccccattcccgttaacacctcgacgctaaacaggttgccgaggctgttacgaatggttttacgacgctggttaaaggcttcggtggtgatgcggctcaacacacgaacatctttaaccgggtgaggcatcgttgcatgaggaaccaggcgcacgacaaaaaaatccactgtgttttgtggtgtaaccgacgacggcggtacttccagtaccgggatcacattgcaatagtgtggcgccatgacgcttaatcgaccatacgctttgctgttcggtcctgcaaccagacgattcaccacctctttttgcaacataaagtgcat

SEQ ID NO: 25702 - DNA, 5738 bp, Homo sapiens
  SIMILAR (1537)..(2166): 971254mologous to Escherichia coli K12 putative ATP-binding component of a transport system,accession number AE000399,Smith- Waterman Score=1034.
atgaccgattttcgggagagcgacaccatgagtttatttgataaaaagcatctggtttcccccgccgatgccctgcctggacgtaacaccccgatgcccgtagccacgctgcatgcggtcaacggtcactcaatgaccaatgtacctgacggaatggagattgccatttttgcgatgggttgtttctggggtgtggagcgtctgttctggcagttacccggcgtttacagcaccgccgcaggctataccggcggctatacgccaaatccgacttatcgggaagtgtgctccggtgatacgggtcatgccgaagcggtacgcattgtttacgatccttccgtcatcagctatgagcagttgctacgcaagtaccgttgtgttgccgttgcattgttgggctacttcaaatgcaaaccgatcctgctcaacccgagttataaatccatgcaggatgacttggcatttattgcgcgatttcactttaaagacctcaagtttcggcgctttagtttgaaagcggaccaaaaatcccgcatctatgagcgtgttttatcaattgctggagtcaacagctggaaagataagcaacatcaaccccggcttgttgaacatttgctggtctgcgctgaaagctgggtggcaccccgcgcactctttgacgcagcaatcgagtacctggcccaccagaagatcgccattcctgcctatttggttgcgtttttggttcttggtcccttagtgttgtctctcatcccttcgcagatgttgccgtcgttaacgtggtcaagcatcacgtattcaatagttgttatcgtcgaagctggctatcagtaccattctcgactgcgaagattcggtcgcgtcgaggttaacgaacagatcgaatacctgatccacaacccaatcaggacgcgcgccagggcggtcaactttgttgataacaacaatcggcttcaggccccacggatattacggcaggattcatggtggatcaccagacctttaccggggctgacgtgggcgataatcgggtcgccaggaatcctgccacaggtggtcaaatcggcgcgcgtcatgaaacaggcggtggcctacctcgaaccgtttattgaagccagcaaagagcagggcaaaaccaacggcaagatggtgatcgccaccgtgaagggcgacgtccacgacatcggtaaaaatatcgttggtgtggtgctgcaatgtaacaactacgaaattgtcgatctcggcgttatggtgcctgcggaaaaaattctccgtaccgctaaagaagcgatgctgatttgggtgtcgttgctgtttaccagtcgcgatgccagtcattatcaacaagggcaaggaacgcagttatttcatgaaattgcgctgatgttgccggagcttctggagcgttggattgaacgcgtatgcccgatttacacacagatggtcagcagaaggcgatcatcaattttgccagcgaagccggctgcaatctgcagcgggatcttgggtgtcttccagggctacgaggaatataacgtcaactccggggaaattgtcggtctgctggggccaaacggtgccggtaagaccaccactttctacatggttgtaggcattgtgccgcgcgatgcgggcaacatcattattgatgatgacgatatcagtctgctgcctctgcatgcacgcgcgcgccgcggtatcggctatctgccacaggaagcctccattttccgtcgcctcagcgtttacgataacctgatggcggtactgcaaattcgtgacgacttgtctgctgaacaacgtgaagaccgcgcgaacgagctgatggaagagtttcacattgagcacctgcgtgacagcatggggcagtcactctccgggggtgaacgtcgccgtgtagaaattgcccgcgcactggctgcgaatccgaaatttattctgctcgacgaaccgtttgccggggttgacccgatctcggttatcgacattaaacgcatcattgagcacctgcgcgacagcggcctgggcgtgctgatcactgaccacaacgtgcgtgaaacactggcggtttgtgaacgcgcttatatcgtcagtcaggggcatttgatcgcccacggcacgcctacagaaatcttacaagacgaacaccaggagagtacgattctgaacatgaagcaaggtttgcaactcaggcttagccaacaactggcgatgacgccacagctccaacaggcaattcgtctgttgcagttgtcgacgctggaacttcagcaggagctacagcaggcgctggagagtaatccgctgcttgagcaaatcgacactcatgaagaaatcgacacccgcgaaacgcaagacagtgaaacgctggacaccgccgacgcgctcgaacaaaaagagatgccggaagagctgccgctcgatgccagttgggacaccatttacaccgctggtacaccatccggcaccagcggtgaatacattgacgacgagctgccggtctaccagggcgaaacgacgcaggccttgcacgaagtcatcagtgggcaggttcagctgacacgggcagcgaaaagcagcacgagctacagttgcggattcagggggagcctgtctccgggcagcttaatctggcaggaagttttgatcgcaaagaagaacgctggaaggggaactcttagcaatacccgcttccagacgccggttggcccgtggtcgctgacccgcgatattgcgctggattaccgcaataaggagcaaaaaatcagcatcgggccacactgctggcttaacccgaatgcggaactgtgcgtgccgcaaactatcgatgcgggggccgaagggcgtgcggtggtgaatctcaaccgcttcgacctcgccatgctgaaaccgtttatgccagaaaccactcaggccagcggtatcttcacgggtaaagcggacgttgcctgggacaccacgaaagaggggctgccgcagggcagtatcaccctttcggggcgtaacgtgcaggtaacgcaaaccgtcaactgatgcggcgctgcccgtggcgtttcagactctgaatctgacggcggaattgcgtaacaaccgtgccgaattgggctggaccatccgcctgaccaataacggccagtttgatggacaggtgcaggtgaccgatccgcaaggccgccgtaatcttggtggcaacgtcaatatccgtaacttcaaccttgcgatgataaaccccatctttacccgtggggaaaaagcagcggggatggtgagtgccaacttgcgtctgggtggtgatgtgcaaagcccgcagttgtttggtcagcttcaggttacgggtgtggatatcgatggcaactttatgccgtttgatatgcaaccgagccagcttgcggtcaactttaacggtatgcgctcgacgcttgccggtacagtacggacccagcagggtgaaatctacctgaacggtgatgccgactggagccaaattgaaaactggcgggcgcgggtaacggcgaaaggcattcacttcgtgtcaaagcttgcttggcgtcgcctggttcctcctttctcgttcgtttgtaattatcacatcccaggtcccactttcaggctcagtgtatataccttcccttccttgcctaatcgtgcactgccatgtgggtcacgccagcctggtggggcgtctagtaaacggccgtcccagtcgtctcgtgctcgttttcgtgttggtacggcagccggcacgcacgtttctcccgaaccaacaagtggtggtcgctgggtagcaggcttaggtaatcccgtataccacaccccttgcgcccatgtccgggtgctaccggtcgctccgtgtggtttccgcgggtccgcacgccgttcccccgcctttcgcacgggccacggcgcaccgggtcctcctacttaccctatgctggggtatcctcctctgggccgaaatcggcgctatcgatggtgtagtagtagcagccggagcatcagctcggttggcgtgcacgaggccggggctacttcagctatcgctttcacgccgtatatggataacctcgtcgcgctgccgtcgggtatactggctattattcagtcgtttgtcgtccggccacgtcgcgcccgtttagttctaatcaactgtaaccggtaccctatcaacagccgcttctccttcgcccccctgcattttcccaagtcccctcccccatttctcccactgttgcacgtactagcccaaatccagttgcacgtgacaccctatcgtggctacgcctggtcacaaactacttcccactcctcgctaactcactctccaggccacgcttcgcgcaacactaatgttactaagcccacgacaccactacgtgactatctgctcctggctgccacgctgccggctacggcacaagctctgtctactagactttgcgttccgttatcgcaacacatcgggattagtgtgtacccacttcgcccggactcgcccccgccgggtcagcgcagcagcatcaacgcaaatctatgcgttttcaccgccctgatcaggtccaaatctctcgttgaacaactctcggtacatcccccccgcggtcccctagccggcctagcggcattttcgcgatcttgcgttttttctgagggaactacatcgcctcccgtcctcaacatttaccaattggcgcctgacaggatcgttgacgcgtccccgaggttttaccaaggaatcgcaaattacatgaatgtattgaacgtaatggcaatccaaaataagaaccaggaggagcagcagcatgaacacatgaccgcgcaccggaacgtgtggtgtctgaccggaaaatcggcgctatacgatggcatgccccttatccgccctaatggccataaccaaagcaaaccaccgtatatcaatttctattgggccaagccccacacaagttatagttcaatttcaaaatcggcgctatacgatggcagtaagcccagtaatatgccccgaggagttcatgtacgcacacgaggcaaccattatgggaacgccgtccgtaaggcctggggtccccgagccctcggtagtccgtgcagcctgacccaccggaaggatgtagggtggaattctagagtaagaccacctcgttgggaagttgtcaataatagggtacagggacctccaggtcctcgaggtccacctcgtcgacgtcgtccgcattgttttggaatacacggatgtaggcgtgaagggcatgtgccagttggaccaggagtgctgcatgaaataacaacagtaggaacagcagggacaatcggtcaagtgctctgtgattcagtgcgcaacgttatccgggcaccgagcgcatactgcattcttaaccaatcgtgtgcgcagctcccccatcgcccccctctattcaaaccgtcgttccagatttatccgggcttcttggtagatgcccgagtctcaattcgaacggtccgcgccgctccgtaccgaactgccaatttggggcctgatgggccacggaatgtgcttcttaatagggaaagcgatgttgcatgccgccatgcacgcacagtgccgtggctgatacacggcgtgcgatttcgtcaaggccgcgccacaaggcgatcggcaaatatcctgcatccgacggcgttggtcatcgctcagccacggcaaacgttcactggcaagacgagcagtaaacagtcacgttggggagtccgtcgtagag

SEQ ID NO: 25703 - DNA, 852 bp, Homo sapiens
  SIMILAR (708)..(157): 921254mologous to Escherichia coli K12 putative acetyltransferase (EC 2.3.1.18),accession number AE000464,Smith- Waterman Score=888.
ttaaaggtttttgccccccgactttggttggttctggtaccggatttgatttttagggggaaataaaccaagactttcgggccgggaataaccgcttggcggagaattgaacccattcggggggcgagctaatacattgggcgtcacgcgcttcggcagagagaatacacttccggcaaacagcgtattgtgcggattctgattgccggtttctggtatggttgtgatcaattttagcccggcatattgctgaatgcgcacgcccattttttcactaagcgggatatgttcgtaccacgcctgttgcagctgcgcgcaccagtcgccgcgatgcagaatgtgatccaaagtggcgacgggcttaatcattaaaaaatggcgaatcggcatggtggttggcgtggtgatttctccctgattaacaaaccccagcttggcgaagaactccaccgcgtcttcacgggcgctacaggtcacgcgcttaacgcctttctgacgcgccaccgactccagggtcatggccattagcgtgcctaaccctttgtcctgcacgtcgggatgaacggccataaagcgaatggacgcttcattgtcggcattaatatacagtcgggctaccggcaccagattaccctgctcgtcgacgaccataaggtgatgcgccatcgcataccacgcgtcgcgtatcgaacctttaggctgatgcaaggtctgcaaccagaaagtgacggagccataattgaccaggcgaacctgcatatacgtagcgaagagttctgattgcgtgtaaattttttgtctgtcctgccactctgtggagaaggtgcctgtttctcctttgccttccgccat

SEQ ID NO: 25704 - DNA, 2798 bp, Homo sapiens
  SIMILAR (1569)..(2210): 881254mologous to Escherichia coli similar to,accession number D90888,Smith-Waterman Score=926.
atgtggctccgtattaatcgtacgcatgattcccgcgacagctggcttgcattgctgaatgaagcaggaatgaaaggtttccgcatgcggattaccctgatgctgggcagcttgccgatcagtcccaatttgctctccctgggcttggcgagcgatctcaatactgtcatcgacaacgtgctgcgtatttttccgttgctgttgtcgtggatccccttctggttgctgtacagcattgttcctaccatccgcgtacctaaccgcgacgcgattgtcggcgcgtttgtcgccgcactcctgttcgaagcaggaaagaaaggtttcgcgctttatatcaccatgttcccgtcatatcagctcatttatggtgtgctggcggtgatccccattctctttgtttgggtctactggacatggtgtatcgtcttgcttggcgcggaaattactgtcactctcggggaataccgcaaactaaaacaagcagctgaacaagaagaagacgacgaaccatgattgcattaattcaacgcgtaacccgtgccagcgtcaccgtggagggagaagtgacgggcgaaattggcgcgggacttttggtgttattgggtgtcgaaaaggatgacgacgaacagaaagcaaaccgtctgtgcgagcgtgtgctcggctaccggatctttagcgatgccgaaggcaagatgaatctcaacgtgcaccaggcggccggcagtgtgctggtggtttcccagtttaccctcgccgcagataccgaacgggggatgcgcccaagtttctccaaaggtatgagccagcttccagggttgtcacgggaaacaagagagagtatcgctatgtatcaccttcgggttccacaaacagaagaagaattagagcgttactatcagtttcgctgggaaatgttgcgtaagcccctgcatcaaccaaaaggttcggaacgcgacgcgtgggatgcgatggcgcatcaccagatggtcgtcgacgagcagggtaatctggtggcggtaggccgactgtatattaatgccgacaatgaagcgtccattcgctttatggccgttcatcccgacgtgcaggacaaagggttaggcacgctgatggcgatgaccctggagtcggtggcgccctatttttccgggtccgaaaccggaatgatgaccctcaaccgctatcgtctgcgacatatggcgaaacagggtaatcgctcggccaaacgcgtcgaaaaattgctgcgtaagccagaccgcctgataagcctggtgttaatcggcaataacctggtcaatattcttgcctccgcgctcggcactattgttgggatgcgtttgtacggcgatgcgggcgtggcaattgcgactggtgtgctgacttttgtcgtactggtatttgctgaggtattgccgaaaaccattgccgcgctgtacccggaaaaagtcgcttatccgagtagttttctgctggctccgctgcaaattttgatgatgccgctggtctggttgctgaatgctatcacccgtatgctgatgcgcatgatgggtatcaaaaccgatatcgtggatatgctgctgtcggtgctcgatctggaaaaaatgacgttgatgacatcatgttgccgcgcagtgaaattatcggtattgatatcaacgatgactggaaatcgattctgcgcactctcccactcacctcacggcgccatcgtgctctaccgtgattcgctggacgacgccatcagtatgctgcgagtacgtgaagcctggcgtttgatgtcggagaaaaaagagttcaccaaagaaaccatgctgcgcgccgcggacgagatctattttgtgccggaaggtacgccgctcagcacgcagttggtaaagtttcagcgcaacaaaaagaaagtcggcctggtcgtcaacgagtatggagacattcaggggctggtgacggttgaagatattctggaagagattgtcggcgatttcactacgtcgatgtcgccaacacttgccgaagaggtcacgccgcaaaacgacggttcggtgattatcgatggcaccgccaacgtgcgggaaatcaacaaagcctttaactggcatctaccggaagatgatgcccgcacggttaatggcgtcattcttgaggcactggaagagatccctgtcgcaggcacccgcgtgcgtattggcgagtacgatatcgatattctcgacaaattaagcttttgctttcgctacagtaaccatcgccgcacgaatcgtacgaccattcagcgtataacctttctgcataatgcccagtacgttacctggcgcaacgtcatcagattccaccattgcgatggcctgatgcacattcgggtccagtgggacgttagtttcggcgatcacttcaacgccaaacttacgcacaacatccagcatcgacttcagcgtcagctcaatgccttcaaccatcgcagacatatccgggttagctttatcagccacttccagcgcacgatccaggctatcaatcaccggcagcaattcgttgatgaatttctccagcgcgaatttgtgggctttttcaatatccagttcagtacgacgacgcaggttttccatttcggcttttacacgcaaaatgccgtcacgttcacgggtctgggcttcagccagctgagcttcgagattcgcaactttttcatcgcgcggatccacctgctcagcagaagcttctggctcaactgcctcaatctcttcgtgctgatccatgataatttcttccgggggcttgcccctcaggcttttgtcctctga

SEQ ID NO: 25705 - DNA, 611 bp, Homo sapiens
  SIMILAR (168)..(329): 741254mologous to Escherichia coli periplasmic putrescine binding protein,accession number M93239,Smith-Waterman Score=200.
ctaggcagacaggggaggacctgcaggcacgaatatgcacgtcgcggctgggtacagcagtaccacattggcgcgctgcgtaataacaacctgcgtcagttcaaactgctggggccggatgtaggctttgactccatcaacgacaatggcgtgaatgtctcgttctcgattccaaaagaaggggcgatggcgttctttgatgtattcgccatgctgtgcgcccggatgtagtagcgcatatttccgaccatgtgttctatgccaacgccaataaagcagccacgccgctggtgagtgcggaagtccgtgagaacccaggtatttatccgctgcggatgttcgtgcgaagctgttcactctgaaagtgcaggatccgaaaatcgaccgtgcaaatcctacgatggtcaacatgcggtggatgatgtcagcctgaccatctacagactctagagatccccggtaccggctcggttcggacctagctcgaatctggagctcactcataggtgggaattgaccaatgagaacacctggacacaggaaggggacctcacacactcgggcctgttgtggggttgggggaggggacgggatagcattaggagatatac

SEQ ID NO: 25706 - DNA, 3309 bp, Homo sapiens
  SIMILAR (2104)..(2742): 971254mologous to Escherichia coli acetohydro x 4 acid synthase,accession number X04890,Smith-Waterman Score=1089.
atggggttagatgcgattgagaatatgacatcaggtggactaatttatgccgtatctggtgtacctggattgattgctgcaaacagcattactaacagtgcttaccagttcggttatgatatggatgctattgttggcggagctcataatggggccgccgatgcaatgagacattgttacttgatgtgtcgaatgactaagacatttggatcaacaatagctgacgtgataggtaaaaacttagagcacaggcgatcacactattcaatgctgccgggcatgttcagggcggtgtgccagaacggtctggtctgcggcgagtcgtttggcgaggtgcgggtgccacacaagggggatgtggtgagtcaggttattgagggggcgtatgaagtgctggggatttttgagcgtgtggaagaaaagagggatgccatgcagtcgttgcttttaccgccacctgtgcagcaggcactggcaaaagcagcgcttacgtatcgctttggtgaggaccaccagccggttactgaatcgcagatactctccccacgccgctggcaggatgagagcaatgacctttggaccacctatcagcggattcaagaaaacctgattaagggcggactcagtgggcgtaatgctaaaggcggacgaactcatactcgtgccgcgagtggcctggtgatgttgattgccatcctggcgctggtttttgttcactacaatgcgaccggcgtctggaccttcaactatgaagagctgctgaatacgccaatgtccagtggtgtggaatacctgttaatgctgggcttcttcatcgccttcgcagtcaaaatgccggtggttccgctgcatggctggctgccggatgcgcactcccaggctccgaccgccggttccgttgacctcgcggggatcttgctgaaaactgccgcttacggtttgctgcgtttctccctgccgctgttcccgaacgcgtcggcagagttcgcgccaattgctatgtggctgggtgttatcggcatcttctacggtgcgtggatggccttcgcccagaccgatatcaaacgtctgatcgcctacacctcggtttcccacatgggcttcgtgctgattgctatctcaccggcagccagttggcctaccagggcgcggcctgttttgaataaggaaagagcatggacaaggaattaccgtggctggcggataacgcccaagctggaactgaaatataaaaaaggcaaaacgccgctcagtcatcgtcgctggccgggcgaaccagtgtccgttatcactggaagtctcatccagacattgggtgatgaattgctacaaaaagctgagaagaaaaaaaacattgtctggcgttatgagaatttttcactggagtggcagtccgccatcacgcaggccatcaacttgatcggcgaacacaaaccctcaatcccggcccggacaatggcggcgctagcctgtatcgcgcaaaatgacagccaacagttgctcgacgaaatcgtccaacaagaggggctggaatatgcgactgaggtggtgattgcacgccagtttattgcgcggtgttatgagagtgatcctctggtagtgacattgcagtatcaggacgaggattatggctatggttatcgctcagaaacctataacgaattcgatctccgactgcgtaagcatctctctctggcagaggaaagctgctggcagcgttgcgccgacaaactcattgccgcactaccaggaataaacaaagttcgccgcccttttattgcgctgatcctcccggaaaaaccagaaatagccaatgagttggcagttccggctttgcgtgaatttctcgctgccacaaaaatgcctgccacctgtacgctgaaagggctgggcgcagtagaagcagattatccgtactatctgggcatgctggggatgcacggcaccaaagcggcaaacttcgcggtgcaggagtgtgacctgctgatcgccgtgggcgcacgttttgatgaccgggtgaccggcaaactgaacaccttcgcgccacacgccagtgttatccatatggatatcgacccggcagaaatgaacaagctgcgtcaggcacatctgcgtgatgaacattcctggcgttacgaccatcccggtgacgctatctacgcgccgttgttgttaaaacaactgtcggatcgtaaacctgcggattgcgtcgtgaccacagatgtggggcagcaccagatgtgggctgcgcagcacatcgcccacactcgcccggaaaatttcatcacctccagcggtttaggtaccatgggttttggtttaccggcggcggttggcgcacaagtcgcgcgcccgaacgataccgttgtctgtatctccggtgacggctctttcatgatgaatgtgcaagagctgggcaccgtaaaacgcaagcagttaccgttgaaaatcgtcttactcgataaccaacggttagggatggttcgacaatggcagcaactgttttttcaggaacgatacagcgaaaccacccttactgataaccccgatttcctcatgttagccagcgccttcggcatccatggccaacacatcacccggaaagaccaggttgaagcggcactcgacaccatgctgaacagtgatgggccatacctgcttcatgtctcaatcgacgaacttgagaacgtctggccgctggtgccgcctggcgccagcaattataagaagcatcacaagttgaagcagacttttggcgtgaaaattatccccgacgttcacgacccaagtcaggcacagcccgttgctgatgtcgtgaatgtgattcagttgccggcgtttcttgctcgccagactgacctggttgaaacccatggcgaaaaccgcccgggacagatgggtaatatcgttgataaattcaaagaaggcggcaacgaaaaagtgattctttgcgatcgcggtgctaacttcggctatgacaacctggttgtcgatatgctgggcttcagcattatgaagaaagtgtctggtaactcgccggtgattttcgacgtgacccacgcactgcaatgccgcgatccgtttggcgcagcttccggtggtcgtcgtgctcaggtggctgagctggcacgagccggtatggcggtaggtctggcggggctgtttattgaagcgcatccggatccggaacatgcgaaatgtgatggtccatccgcgctgccgctggctaaactggaaccgttcctcaagcagatgaaagcgattgatgatctggtgaaaggtttcgaagaactggataccagcaagtaa

SEQ ID NO: 25707 - DNA, 2016 bp, Homo sapiens
  SIMILAR (97)..(807): 991254mologous to Escherichia coli K12 putative regulator,accession number AE000300,Smith-Waterman Score=1223.
atggcaacgagggccagtgtgactcccatgagcctcttctccgctggcacgtgcctcctgagtacctcttgtgtactcagtcctgtgggagatacagctgaggaaagctgctggcagcgttgcgccgacaaactcattgccgcactaccaggaataaacaaagttcgccgcccttttattgcgctgatcctcccggaaaaaccagaaatagccaatgagttggtaggccttgaatgcccgcgaactcattttcattctaaggagtggttaaaagttgttgctaatgaccccacagcggtgagaaaactcgaacactactggagccaggatatatttagcgatcgagaagccagctacatgtcgcatgaaaaccacttcggctacgcggcctgcgccgcccttttgcgcgaacaaggactggcagccattccgcgcctcgcgatgtatgcccataaagaagattgcggcagtctgctggtacaaattaaccatccgcaagtcatccgcaccttgctactggtggctgataaaaacaaacccagcctgcaacgtgtagctaaataccataaaaacttcccccatgcgacgctcgccgcactggcagaactgctggcgttaacagaaccaccagcccgccctggttatccaatcatcgaagacaaaaagctgcctgcacagcaaaaagcacgcgatgaatactggcgtacgctgttacaaacgctgatggcatcgcaggcacaactggcagcagaagtgatgccggggttaagtactcaaccccagtcagtgctgaagagttatttatcgggagtgcgccacggcacaggaggaacttcaccaatactgtcgcgccgggccatctcttggctgtaccgccagtacgacatgttcgcaaagtgtgccttcaatacaatcacaacgggcgaaacgaatactgctgcgggaataaaaacgcacatcgctcatcggcgtggtgtcctgcaccttcacgagagcagcgggattcatgacatcggcctgccccagtggcagctcttgctctgtctgatggtcgtcgtcatcgtcttgtattttagcctctggaaaggggtgaagacatcaggaaagttcggcccagaacaaggatttcaaaaagtgccccgcatatttgacttcagaaggactcaccccaagccgcggaagcagcgagagtggccaggacaagagcagggagccacatcctggaagggcgacagttccgggggcctgcgaggcgcgctgattgttagcggaattggctggttcgccgccaaaaatgacgcagaccgtcagcgtattgtccgtggcatgtttttcctctggctgttgatgggcgtcgggtttattgcctctgtcatgcacctgggatcgccactgcgggcgtttaactccctgaatcgaatcggagcttctggtctgagtaacgagattgctgccggttccatattttttgccgttggcggattatggtggctggtggcagtcatcggtaaaatgccgcaagcgttggggaaactctggttacttttcagcatggcgctcggcgtcattttcgtctggatgatgacctgcgtgtatcaaatcgacaccgtgccaacctggcataacggttacactacgctggctttcttcctgacggtgatggtgtggatccacggaggggggctgatggtgggtgcggcatcaacctacgatgggctggcccttgctgcccatgaaaacgtggtggtggtgaccattcaatatcgcctgggcatctggggattcttcagcaacgaagtgatcctgatgctgcactctactgcgttggcatttactgccacggtgccggatctgctgaaaatagcccgcgatattaacgccgccacgtatcaaccttttaccgccttcggcattgccgcggtgctctatttaatcatctcttatgtcctgatcagcctctttcgcagagcggaaaaacgctggttgcagcatgtgaaaccttcttcaacgcactga

SEQ ID NO: 25708 - DNA, 2376 bp, Homo sapiens; identical to SEQ ID NO: 8870
  SIMILAR (2049)..(1360): 941254mologous to Escherichia coli put. mal G protein (aa 1- 296),accession number X02871,Smith-Waterman Score=1099.

SEQ ID NO: 25709 - DNA, 1791 bp, Homo sapiens; identical to SEQ ID NO: 14957
  SIMILAR (1048)..(1728): 991254mologous to Escherichia coli rfaD protein,accession number M33577,Smith-Waterman Score=1193.

SEQ ID NO: 25710 - DNA, 3777 bp, Homo sapiens; identical to SEQ ID NO: 24810
  SIMILAR (2972)..(2892): 371254mologous to Escherichia coli rpoC,accession number V00339,Smith-Waterman Score=54.

SEQ ID NO: 25711 - DNA, 1275 bp, Homo sapiens
  SIMILAR (466)..(1272): 961254mologous to Escherichia coli K12 molybdate metabolism regulator, third fragment,accession number AE000300,Smith-Waterman Score=1339.
  misc_feature (1)...(1275): n = a,t,c or g
atgggcaaaagacatgaacggccacctcacattaaaagcaacaccagtgtcctcatcgtgaaactagacgcccgatcttatcctcgaagcaatgaatctcaacaggaactggtgctccgcaggatggcaggacgcggagacgtggtgctgtcaggctgcccacgcagacagcaagccatgcaggacaccacccacgtcagtacgcatagatccacgcacgcagacatcctaccgagcagaaggcacagacccatgcacgcagcgacgcgacgcatccagggacgcgcactgctgcctactcatcccacacaggtctgcaacgatagctctgggcaccgagtgatcagccaagaatatacacgtatggttactctcttcatggttcagagagcaaagaaaactgtggcctatcctctcgctagtgtactagcagataatgacggacaaggaccatgtttggcccgaagcaaaagcgatgatgaaacgcgggcgaacgatgcggttaaccgctacaaattgctgaaaaaagatgcgcgtaccatcgccgcccagcaggtagcaaggctggaatccgccatgtgcctgcgccgccgctggtcgctggaaaacttccagctcttcctggttgagcatccgctggttcgtcacttaacccgccgtctgatttggggcgtttatagcgccgaaaaccagctactggcttgctttcgcgtagcagaagataacagctccagcaccgctgacgatgatcttttcaccctgccggaaggcgatatctctatcggcactcctcacgttctggaaatatcaccaacggatgctgccgcctttggtcagctttttgccgactacgaactgctaccaccgttccgccagctcgaccgtaacagctacgccctgacagaagccgagcgcaatgcccagtgtaacgntgaccccgctgtggcaggcagaaaatgcccgagtggtcgggtcatggggctggcgaataaaggctggataaagggcgaaccacaggatggaggctggatcggatggatgatcaaacctttgggtcgctggtcgttaatcatggaaatcgatgaaggctttgcggtaggcatgtcgccagccgaactcagcgctgagcagctcttaagcaagctgtggctatgggaaggcaaagcagaaagatatggctgggggagtaattcaacacaggaagcgcagttctccgtaatcgatgccatcaccgccagcgagctaattaacgatattgaagccctgtttgaataa

SEQ ID NO: 25712 - DNA, 2430 bp, Homo sapiens
  SIMILAR (1276)..(2427): 1001254mologous to Escherichia coli 4-alpha-l- fucosyltransferase,accession number M87049,Smith-Waterman Score= 1996.
atgccgacaacaccatcgatggcattctggttcaactgccgtataccggcgggtattgataacgtcaaagtgctggaacgtattcatccggacaaagacgtggacggtttccatccttacaacgtcggtcgtctgtgccagcgcgcgccgcgtctgcgtccctgcaccccgcgcggtatcgtcacgctgcttgagcgttacaacattgataccttcggcctcaacgccgtggtgattggcgcatcgaatatcgttggccgcccgatgagcatggaactgctgctggcaggttgcaccactacagtgactcaccgcttcactaaaaatctgcgtcatcacgtagaaaatgccgatctattgatcgttgccgttggcaagccaggctttattcccggtgactggatcaaagaaggcgcaattgtgattgatgtcggcatcaaccgtctggaaaatggcaaagttgtgggcgacgtcgtgtttgaagacgcggctaaacgcgcctcatacattacgcctgttcccggcggcgttggcccgatgacggttgccacgctgattgaaacacgctacaggcaaggcaaaatgtttgacggctcctcgattggcggctggaaaggcattaacgagtccgacatggtgctgatgccagacgcatccaccgcagtgattgacccgttcttcgccgactccaccctgattatccgttgcgacatccttgaacctggcaccctgcaaggctatgaccgtgacccgcgctccattgcgaagcgcgccgaagattacctgcgttccactggcattgccgacaccgtactgttcgggccagaacctgaattcttcctgttcgatgacatccgtttcggatcatctatctccggttcccacgttgctatcgacgatatcgaaggcgcatggaactcctccacccaatacgaaggtggtaacaaaggtcaccgtccggcagtgaaaggcggttacttcccggttccaccggtagactcggctcaggatattcgttctgaaatgtgtctggtgatggaacagatgggtctggtggttgaagcccatcaccacgaagtagcgactgctggtcagaacgaagtggctacccgcttcaataccatgaccaaaaaagctgacgaaattcagatctacaaatatgttgtgcacaacgtagcgcaccgcttcggtaaaaccgcgacctttatgccaaaaccgatgttcggtgataacggctccggctctcctccttcccagccccagtcccagcctacgccgccagaaatcttgttgcaggcgttgctttctgcgggctgcttctacgcggtttactatgtcacctacaaaacccgcctacgcaaacgcgttgctgatgtaccgcgccgtccgctgtttaccatgaaccgcgtggagaccaatcttacgtgggtgatcctgatgggtatcgcgctggtaagcgtcggcatcttcttcatgcacaacggctttttgctgttccggcttaactcctacagtcagatcttttccagtgaagtctccggcgtggcgttaaaacgcttcttttactttttcatcccggcgatgctggtggtctactttctgcgccaggacagcaaagcgtggctgtttttcctcgtcagcacggtcgcctttggcttgctgacttatatgattgtcggcggcactcgcgccaatatcatcatcgcattcgctatcttcctgtttattggcattattcgcggctggatttcgttgtggatgctggcggcggcgggcgtgctggggattgttggcatgttctggctggcactaaaacgctatggaatgaatgtgagcggcgatgaagcgttctatacgtttctctatctcactcgcgacaccttctcgccgtgggagaatctggcgttgctgttgcagaactacgacaacatcgacttccagggcctggctccaattgtccgcgatttctatgtctttatcccttcctggctgtggccgggtcgcccgagtatggtgctgaactcagccaactactttacctgggaagtgctgaataaccactccggactggcgatctcgcctacgcttataggctcactggtggtgatgggcggcgcgttgttcatcccgctcggggcgatcgtggttggtctgatcatcaaatggttcgactggctgtatgagctgggcaaccgcgagcctaatcgctataaagctgcgatattgcacagtttctgctttggggcgatcttcaatatgatcgtgctggcgcgtgaagggctggattcgtttgtctcacgcgtggtcttttttatcgtggtcttcggcgcatgtctgatgatcgcaaaactgttgtactggctttttgaaagcgccggactcattcataaacgtacaaaatcatcgctccggacgcaggttgaaggataa

SEQ ID NO: 25713 - DNA, 888 bp, Homo sapiens
  SIMILAR (153)..(503): 891254mologous to Escherichia coli Uronate isomerase,accession number D13328,Smith-Waterman Score=535.
  misc_feature (1)...(888): n = a,t,c or g
cggattaatgggggcccccccaggggttttccctgtcccggcgtgtgaaagcacgggccaaggcccaagctggcaagccgacaagggtggcttctaagggatcctttggcggcccaagggctgtaaagtgtgggacccccagtggtattggcgtgaggttcggtgaaaagaacaaaccgggtccgggcagccttgtggcgagccgtctggctggcgaaaccttgagcgagcacgaagtggcgcagttcaaaactgcggtactggtgttccttggtgccgaatatgcacgtcgcggctgggtacagcagtaccacattggcgcgctgcgtaataacaacctgcgtcagttcaaactgctggggccggatgtaggctttgactccatcaacgaccgtccgatggcggaagagctgtctaagttgctgagcaagcagaatgaagaaaacctgctgccgaaaaccattctgtactgcctgaacccgcgcgataacgaagtgcntgggcaccatgatcggtaacttccagggcgaaggtatgccgggcaaaatgcagttcggttccggctggtggtttaacgatcagaaagacggtatggaacgtcagatgacccaactggcgcagctcggtctgctgagccgctttgtcggtatgctgactgacagccgtagcttcctgtcatacacccgtcacgaatacttccgccgcattctgtgccagatgatcggtcgctgggtggaagcgggcgaagcaccggcggacatcaacctgctgggcgagatggtgaaaaatatttgctttaacaatgcgcgtgacgggtacgtgctagcccaccgggctccagtccaattccttgcttgtgccactttgggcaagatgcagcctctctaa

SEQ ID NO: 25714 - DNA, 833 bp, Homo sapiens
  SIMILAR (649)..(338): 561254mologous to Escherichia coli cysT,accession number M32101,Smith-Waterman Score=260.
cagaagccagcggagccgacccaggttaccgtacggcatcagccgatcatcaccgtcagccagatggcgtgcagcatgtccggatcggccagattctgtaaaaccggcatcagcccctggctgaatgcctaccacacgccgaccaaagcgactttgcagagtgttaattgagaacagcagcagcagagatgccgcgaggatcaccgaagcaatcgcgctcgctgccgggtaatcaaactcctgtaagcgcacaaaaatcatcagcgacgtcacttccgtcttccacgcgatatttccggcgataaaaatcaccgcgccaaattcaccaagactacgggtaaacgacagcgccacgcccctcaccagcgccggagaaagctccggcagcaccactttgcagaaactctgccagcgcgttgcaccaagcgtttccgccgcttcttcatattccgggcctaacctcttccagcaccggctgcacggtacgcaccccaaacggaatgctggtaaaggccatagccaccgcaatccccagccatgtataggtgactttgatatcaaacttcgccagccattcaccgtaaaaaccctttacgtaaaagagaaaggccagcgttgaggcggcgacagggtgttgccagctcaaagggtaaatccatcagcgcatcaagcagcgtgcggcctgggaagcgatagcgggttaggatccacgccatcagcagaccgaaaacgccgttaaaaatcgatgccacaaacgccgacagcagcgttactttgtaggccgcgaccacctgcgggttggtgatcacctcccagtactgcgcccagctcat

SEQ ID NO: 25715 - DNA, 3051 bp, Homo sapiens; identical to SEQ ID NO: 14958
  SIMILAR (1462)..(2238): 991254mologous to Escherichia coli K12 putative regulator,accession number AE000300,Smith-Waterman Score=1346.

SEQ ID NO: 25716 - DNA, 4443 bp, Homo sapiens; identical to SEQ ID NO: 7419
  SIMILAR (2344)..(2877): 1001254mologous to Escherichia coli K12 putative general secretion pathway for protein export (GSP),accession number AE000379,Smith-Waterman Score=899.

SEQ ID NO: 25717 - DNA, 3708 bp, Homo sapiens
  SIMILAR (2548)..(3441): 891254mologous to Escherichia coli SPORE COAT POLYSACCHARIDE BIOSYNTHESIS PROTEIN SPSC,accession number D90856,Smith-Waterman Score=1319.
atggaagagtacggcggcgtggacgttcgcctgtatcgtattcctgacccgatggcatttttgcgccagcagaaaaacctgcatcgcattgtggtgcaaccgcaatatctgggcgacgggctgaacaatacgctaacctggctgtgggataactggtacggcaaatctcgccgcgtgatgcagcgtactttctcttctcagtcacggcagaatgtgactcaggcgttacccgaattacagctcggcaatgccattattaaaccttcccgttatgtacagaacaaccagttttccccgctgaaaaaatatcccctggtgaaacagttccgttatccactatggcaggctaaaccgttcgagccgcagcaagggagccggggactgtacctcgtcgaggcgatggttggtgggtatcgggcgacgacgggtggtgttgtttccgataccgtggcgcttagcaaagtgtccagcaaagagcttctggtgtggaccgcgggtaaaaaacaggtgaacgaacccggctccgagatctttggactgacggctttgcggattaccgcggaaaatcaggactgtgcatcgctgaccccggaaacttttttaccgcgtatccatgtcattaaaggtgtgaacatttccacggcgacagtttgccgtcagtgtgaagatgcaccgtgcgctaacgtctgcccgaatggtgctatcagccgtgataaagggtttgttcattgtgaagcacgaacgcttcatttgtttgcaaaaacctccgtggcggtcttaaagtacggctcgcaaaaaccgtcaagtagttcatcagagagcgtctcccagctgctgcaactggcgcgtgccggacagtcattttcttccggtaattatcaacatgtaaaactgctggaagatgtcattctcccctcgtatgacgaactcagtaccatgctcgaccagcgacagcaaaccctgctattgccagagagcgccgccgacatcaccgttcagggtgatgcaaccctgctgcggatgttattgcgaaacctggtagaaaacgcccatcgttacagcccgcaaggcagcaacattatgattaagctgcaagaagatgacggagcggtcatggcagttgaagatgaaggaccaggtattgatgagagtaaatgcggggagttgagtaaagcgtttgtacgtatggacagccgttatggcgggattggtctggggttaagtattgtcagccgcattacacagttgcatcacgggcagtttttcctgcaaaaccggcaagagacttccggcacgcgggcctgggttgttgctttgcaacgtctgattgctcaacttgatcctgtcggaactgcttttaatcgtctggtagaacaacagaaacagctcaatgaagcaaaagctaaggggatgctttctcctgacatgtatgaggagctttctggaaaacttcgtgctatgcggagtgagcttgaggttactcaatcacaattaagcaaaaccggaatgtcggcaaaacaaacggcttttgctatgcgcatgttgcctgcacaaatgacggatattgttgttgggttgtccactgcagggcggccattcagctatgcaggagacaagaatcgccagcttacccgttacagcgatacccgctggcatgaagattccgtgcgtaaccgctggttcagcgtgatggtggggccgtctgtgcgcgtgaatgaatggttcagcgcgtatgcgatggcgggtatggcttacagccgtgtgtcgactttctccggggattatctccgcgtaactgacaacaagggaagaactgtggacaatagttcatcaaagttgatcgctattcagattgctgttttgcgctttctcgcctctgctcagctgagaaagaggtttgcgcctgccatttaccgggtaaatcctgaatcgtacgggcagccaggaacaacgcgttactttcctgcgtcgatagccagcgttcaccaaacgcctgctgcgaaagtgtgttcagcaaaaggcgcgtatccgatgagtgaaaaggtggtgttcagtcaactgagccgtaaatttattgatgagaacgatgccacgcccgccgaggcgcagcaggtggtctattacagcctggcgattggtcaccaccttggggttatcgattgcctggaagcggcgctcacctgcccgtgggatgaatatctggcatggattgccactctggaggcaggcagtgaagcccgccgcaaaatggaaggcgtgccgaaatatggtgagatcgtcatcgacattaaccatgtgccgatgctggccaacgcattcgataaagcccgggcagcgcaaacttcgcagcagcaggaatggagtacaatgctgttaagtatgctgcatgatattcatcaggaaaacgccatctatttgatggaaaaagcgggtaaagtggaccatcccctgataagggtcgccctgcaagaagtagttaaccatcaccgcaggttcttcaaggttgccagtaaagttgctcaaaccgttacgcgccggttgcggaacataatcacgccaggcgacagcgaccggtcgaacaatatacggatttccttgttgggtgcaacgccggtaatggtggatgtcgaccgcgatacgctgatggtcacgcctgaagctatcgagtcagccattacgccacgcactaaagccatcattccggtgcattatgccggtgcgccagcagatattgacgccattcgcgccattggcgaacgttacggcatcgcagttatcgaagatgctgcccatgccgtcggtacgtattacaaagggcgacatattggcgcaaaaggtaccgctattttttcatttcatgccattaaaaatattacctgtgctgaaggtggcctgattgtaactgataatgaaaaccttgcccgccagctacggatgctgaaatttcacggtctgggtgtcgatgcctatgacagacaaacctggggccgtgcaccgcaggctgaagtcttaacaccgggctataagtacaatctgaccgatattaacgccgcgattgccctgacacagttagtcaaattagagcacctcaacacccgtcggcgcgaaattgcccagcaatatcagcaagcactggcagctctcccctttcagccattaagccttcccgcctgtgcgcacgttcacgcctggcatctgtttattattcgtgtcgatgaacaacgttgtggtatcagtcgcgatgcgttgatggaagcgttaaaagaaagaggcattggtaccggggtacattttcgcgccgctcacacacaaaaatattatcgcgagcgttttcccacgctgtcgttacccgaataccgaaatgggaatagcgaaccgcatctggttctttggcgctggttccccgatatgtactacccgccgatggccgaacatgttattcacaggccctttagacaacttgtgcaatatgttcatcatttcatatggttgtttaccatctgtatatgcccatcaggagttcacattttcgcagctatatccctttgtctaatgcgcatgtctgatgatcttactgcttcttccgcttcctcgctcactgactcgctgcgctcggtcgttcggctgcggcgagcggtatcagctcactcaaaggcggtaatacggttatccacagaatcaggggataacgcaggaaagaacatgtga

SEQ ID NO: 25718 - DNA, 1539 bp, Homo sapiens
  SIMILAR (153)..(485): 1001254mologous to Escherichia coli formate hydrogenlyase subunit 7,accession number U29579,Smith-Waterman Score=575.
gactacgccattgcgctgcttaagcacaacggcgacagccgcgcggaaaaccaccgcgaaagctttgagacttgcccggaatgtaagcgccagaaatgcctggtgccgtccgaccgtattgaactgactcgccatatgaaagaggccatctgatgagcaatttattaggcccccgtgacgccaacggcattccggtccccatgacggtggatgaatccatcgccagcatgaaggcgtcgttactgaaaaaaatcaaacgttctgcctatgtttaccgcgtggactgcggcggctgcaacggttgcgaaatcgaaattttcgccacgctttcgccgctgtttgatgcagaacgcttcggcattaaagtcgttccttcaccgcgtcatgcggatattttactgtttaccggcgcggtcacccgtgcaatgcgatcccctgcgctgcgtgcgtggcagtccgcgccggacccgaaaatttgtatctcactacggtgcctgcggtaacagtggcgggatcttccacgatctctactgcgtgtggggcggtacggataaaattgtccctgtggatgtttatatccctggctgcccgccaacgccctgccgccacgctgtacggctttgcaatggcgctcggcctgctggagcagaaaattcacgcccgtgggccgggtgaactggatgaacaaccggcggagatcctgcatggtgatatggtgcagccgctgcgcgtgaaagtggatcgcgaagcacgtcgcctggcgggttatcgttacggtcgtcaagatggcggatgattcctttacacagttagggcagggcgaagaacaggttgcacgctggctggaagcggaaaacgatccgcgtctgaacgagattgtcagccatctgaatcatgttgttgaagaggcgcgtatccgatgagtgaaaaggtggtgttcagtcaactgagccgtaaatttattgatgagaacgatgccacgcccgccgaggcgcagcaggtggtctattacagcctggcgattggtcaccaccttggggttatcgattgcctggaagcggcgctcacctgcccgtgggatgaatatctggcatggatcgccactctggaggcaggcagtgaagcccgccgaaaaatggaaggcgtgccgaaatatggtgagatcgtcatcgacattaaccatgtgccgatgctggccaacgcattcgataaagcgccgggcagctgcaaacttcgcagcagcaggaatggagtacaatgctgttaagtatgctgcatgatattcatcaggaaaacgccatctatttgatggtgaggagactgcgtgactgacgttttactctgtgttggcaatagcatgatgggcgatgatggcgcaggtccgctgctggcggaaaagtgcgccgccgccgcgaaaggtaactgggtggtgattgacggcggtagcgcaccggaaaacgacatcgtcgctatccgtgaactgcgcccgacacgactgctgattgtcgacgccacggatatggggctaaaccccggcga

SEQ ID NO: 25719 - DNA, 1953 bp, Homo sapiens
  SIMILAR (1862)..(1900): 921254mologous to Escherichia coli Protein ErfK/SrfK precursor,accession number D90837,Smith-Waterman Score=63.
atgaaaatttcccgcctcggagaagcgcctgattaccgcttctcgctggctaatgagcgtacttttctggcgtggatccgtactgcactaggatttctggcggcgggggttgggcttgatcaacttgcgccagatttcgccacgcccgtcattcgcgaactgctggcgttgttgttgtgtctgttttccggcgggttagcgatgtatggctacttgcgctggttacgcaatgaaaaagcgatgcgtctgaaagaggacctgccctacaccaacagcttattaatcattagcttaatattgatggtcgtggcggtgatcgttatgggactgcgggccatgctgatggcgatggagccgatatgggagagtgattttcatacgctctcatatggcttccggcctgagcgcagtgtccaccacgcgatccgcacggtgaaattacagctcacagactgtggtgaaacccggggacgctgggtgattgaaggcgacctgtccagttacttcgacaccgtacatcatcgactgctgatgaaggctgtacgccgcaggatcagtgacgcacgtttcatgactctgctgtggaaaaccatcaaggcgggacatatcgatgtcgaagataaacgggcggccagtgaaggtgtgccacagaacaaaattatatcgccgctattatcgaacatcatgctgaatgagttcgatcaatacctgcatgagcgatacctgagcgggaaagccagaaaagatcggtggtactggaataacagtatccaacgggccgaagtacggcggtcagagaatactggcagtggaaacccgcggtggcgtactgccgctatgccgatcaccgcccgtcgcccgacgctgcttcgtccgctgtggtgcgaaaatcgatggacgggaatggtcgagctggatcgctatctgaatgaacatggcgtacagggatcggcgctgggacgtccgtggctacctccaacggagtctggtgcgcttctcaatgttgtggcgctggccctcgtcgttcttgccattgtggtacaaatggcggtaaccatggtgctgcatggtcaggtcgaaagcattgatgttattcgttctatcttctttggtttgctgattacgccgtgggcggtctactttctatcggtggtcgtcgagcaactggaggagtcacgacaacgtctgtcacggctggtgcaaaaactggaggagatgcgcgagcgcgatttgagcctcaacgttcagttaaaagataatattgcccagctaaatcaggaaattgccgttcgtgaaaaagcggaagcagaactgcaggaaaccttcggccaactgaaaattgaaatcaaagagcgcgaagagacacaaattcataacccccatactagcctggcggatacttatccattacctccagagggtagccgtttagtggggcagtcgtttactgtaactgttcctgatcacaatacccagccgctggagacttttgccgcacaatacgggcaagggttaagtaacatgctggaagcgaacccgggcgctgatgtttttttgccgaagtctggctcgcaactcaccattccgcagcaactgattttgcccgacactgttcgtaaagggattgttgttaacgtcgctgagatgcgtctttattactacccaccagacagtaatactgtggaagtctttcctattggtatcggccaggctgggcgagaaaccccgcgtaactgggtgactaccgttgaacgtaaacaagaagctccaacctggacgccaacgccgaacactcggcgcgtatatgcgatacgaggggagagtttgcctgcatttgttcctgcggcacctataattccatggggtgtacgctatttatattggcaggttgtatgccattccatggttctcacaacagtctgtctgcaccgcaatagatattccagaagctaa

SEQ ID NO: 25720 - DNA, 1191 bp, Homo sapiens; identical to SEQ ID NO: 10699
  SIMILAR (681)..(827): 751254mologous to Escherichia coli K12 putative chaperonin,accession number AE000297,Smith-Waterman Score=180.

SEQ ID NO: 25721 - DNA, 1117 bp, Homo sapiens
  SIMILAR (639)..(7): 981254mologous to Escherichia coli No definition line found,accession number U00039,Smith-Waterman Score=1087.
ctaaagatccgagtagctcaccagcaggcacttggtttgctggtaatgctccagcatcatcttgtgggtttcgcgaccgatacctgattgtttgtagccaccaaacgccgcatgtgccgggtaagcgtgataacagttggtccacacgcgcccagcctgtatgccgcgccccatcttataggccagattaccgttgcggctccagacgcccgcgcccaggccatattgcgtatcgttcgccagctccagcgcttcttccatcgttttgaaggtggtcaccgccagcaccgggccaaaaatctcctcctggaacacccgcatattgttctgaccaaacagaatcgtcggttcgaggtagtagccgtctttcagttcaccttccagcagcttgcgccgcccgcctgtgagcacgtcagcgccctcttttttaccgatatcaatgtagttgaggatggtttccagttgcccgtgagaaacctgcgcgcccatttgcgtcacgctgtcgagcgggttaccgctacgaatgctttcgacacggcggatggcgcgttccataaagcgttcgtagatagattcctgcactaaagcacgactcggacaggtgccaacttcgccctgattaaagggcaacagtgcaaaccttcgtcatgtgccctttttcagcattgtactgtggcgcgccgtacggacaagccatgtggcagtagcggcagccgatacaaacatcttcatcaaccaccacaaagccatcttcacgcttatgcattgcgccgctggggcagacttttgtacatgcggggtcatcgcaatggttacaggagatggagagataataagcgaacacgttctggtgccagacgccattatcttcctgccagtcgccgccagcgtattcataaatacggcggaaactgacttccgggccaagatctttaaaatctttgcacgccagttcgcaggttttacagccagtacagcggtcttcgcaaaaacccgcaatgcggttatcagcatccaccgtttggtcattccagatagccgccgtatacaacacggcgtggttataaatttccgcaatggcagcacagtcggctttgcgggcaaaacggatggacat

SEQ ID NO: 25722 - DNA, 1191 bp, Homo sapiens
  SIMILAR (273)..(1): 951254mologous to Escherichia coli HipB protein,accession number D90782,Smith-Waterman Score=470.
atggatgagggaatgaaaatgtacggtttgctccccaccattacgatagatatgcgtgacgtctgcagcaaatcgaacgccttccccacaattaagggtctgccattccccatcaacgcacagatcaagttgtccatcaatgacgacgacatgttcgattacccccttctcatggggcgtcgattcgcttattgcaccagatgccatctgaatcgagaagtgttcaaagcagagttgtggatcataaggaaacagcgaagcgtagcggactgcggcggagaaataaatgttgaaaatggtacgttcaacccggtggcaattttccataatgtcgcgaccgtcggactggactcattacgctcaatctgccctaacattgctttagaaacgcccgtcgcttctgccagtcgcgaaagactccagccgcgctgctggcgtagttgtttaagtgtggtggataaaaagcgagcgagattttccatgcgactcctccggcaaaacggaagtttatcacttgtgcgttataacggacaaatgctacggtgcctgtacgctataacgcgcgttcccggtgggcatcttgccattgaaagtcaactggcaatgaagggaactgtgctggaaacgctggttatggatggtgatgagaacacggtgctggtaccaggcgatcgttacgcgcaaatgcgtaatgtctatttcatcccttccgcgctggcgctgaaaaactggctgaagaagtgtggttttgtagatatccgcattgcggatgtgagcgttaccaccacagaagagcagcgacgcaccgaatggatggttaccgaatcgctggccgatttcctcgacccacatgatccggctggccctcagagacccttggcagggcctgattttcaggaccacggccgcaagcaacctcctggccccctcctccccttcagctctgcaaaccagctccctgaccaaggagactttcagaactgccctctgatcctgcaatctgagaggaccacaattaaggacttacaaagcaaagcgcctgataaaaatatcgttattttcacccataatcattgcctgacatatattgctaaagataagcgtgacgcgacatttaaacctgattatctggtgcattatgatttgaatgtcgccacccgaaaaacgttacgtttgaaaggtcttctgtaa

SEQ ID NO: 25723 - DNA, 1788 bp, Homo sapiens; identical to SEQ ID NO: 24729
  SIMILAR (1)..(411): 951254mologous to Escherichia coli RF-3/Tos,accession number D17724,Smith-Waterman Score=665.

SEQ ID NO: 25724 - DNA, 504 bp, Homo sapiens
  SIMILAR (504)..(274): 1001254mologous to Escherichia coli Biotin sulfoxide reductase 2 (EC 1.-.-.-) (BDS reductase 2) (BSO reductase 2),accession number D90829,Smith-Waterman Score=408.
atggtaccgaagcccatcggactcgcgttttctatgtacttcgctgaccttacccttatggcgctcattccgttacgcgaaatagggatgaagtcacggcatgaaggactgtccggaacccggttattaggtatggaaccgttgtggaccagcgatctaccgcctaagcatatccgcattgcggatgtgagcgttaccaccacagaagagcagcgacgcaccgaatggatggttaccgaatcgctggccgatttcctcgacccacatgatccggccattttccagatctggccatgcaccttcatgcacgcataccacgccttttttgatcccgtcagtcaccaccgcgcctgtcaaaatctgaccacgtttgttccagacacgcaccagatcgccattcgcaataccaaagcgtgcagcatcttcggtgtgaatagtgattggttcacgatcggcgatcgcatattttttacgcagttccgcatagttaagctgactgtgtaa

SEQ ID NO: 25725 - DNA, 2373 bp, Homo sapiens
  SIMILAR (289)..(1299): 961254mologous to Escherichia coli K12 putative chaperonin,accession number AE000297,Smith-Waterman Score=1726.
atgaatatcagatttgcattggattcttcatcagtaacactggatgctagaaaacagtgggataatgccttcaaagttctgaagggtgtggtggcagcaggtgcctcttctgcatggccagggtcccccatcgctcacagctgtcagtgtgcacatgctcagacctgcaccattcctgtccagcccctgcagttaccacctggaatcttcagccaggacttggaggctgtgagggactcctttgaaggtcaaaagttcgaaggcgttcgaagccgagcaggctccctccaggggctggaaggcgcggtttatgatatcgaggagtttgtcgatagcgtcgccaagatttatcacacgccgccacccgccttaaaacaggacaaacttgcctttatggctgcgacagctgacgcgcagttgttgaattatgtcgcctggccgcaggcaacgcttcacggtggacgaggcggaaaagttatcggttttatgatgccaaaagtttctggtaaagaaccgattcatatgatctatagcccggcacatcgtcgccagagttaccctcattgtgcgtgggattttctactctatgttgcgcgcaatattgcttcatcttttgctacggttcacgagcacgggcacgtcgtgggtgacgtaaaccagaacagttttatggtaggtcgcgacagcaaagtggtactgattgatagcgactcctttcaaattaacgccaatggcacactgcatttatgcgaagtcggcgtgtcgcattttacgccgccagagctacaaaccttgccatcatttgtcggttttgaacgcacagaaaatcacgataattttggccttgcgttgctaatttttcacgtcttgtttggtgggcggcatccttattctggtgtgccgcttatctctgatgcgggtaatgcgctggagacggatattacccatttccgttatgcctacgcgtcagataatcagcgacgtggtttaaaaccgacgacacgttctattccgctatcgatgttaccgagtgatgttgaagccatgtttcagcaggcattcacggaaagtggcgtggcaaccggacgaccgacggctaaagcgtgggaagcggcactggactctctacgccaaaagttaaaaaaatgtaacgtatcagcaaagcatgtttaccccgctcatttgactgactgcccgtggtgtgcgctggataatcaaggtgttatctattttaatgaactcggcgaagaggtcattaccaccggcgggaaatttgtgctggcgaaagtctgggcgatggcagaaccgcgttatattattttggttcctgtgctggcggctatctggattattggcagtctgacaagcaaagcgtacaaagcagaagttcagcaacgccgtgaggcatttaatcgtgcgaaaatggactatgaccatttagtccgccagatccagcaggtaggcggcctggaaggttttatcgccaaacggacgatgctcgaaaaaatgaaggacgaaattctcgggttaccggaagaagagaaacgcgctctggcagcacttcatgacactgcaagggaacggcagaagcagaagtttctggagggattttttattgatgttgcctctattcccggcgttggccctgcgcgtaaagcggcgttacggtcttttggtattgaaacagccgcagatgttacccgtcgtggcgttaagcaagtgaaagggtttggcgaccatctgacccaggcggttatcgactggaaagcgagctgtgaacgccgttttgtgttcaggccgaatgaagcgataacgccagcagacagacaagcggtaatggcgaaaatgaccgccaaacgacatcggctggaatcggcgttgacagtcggcgcgacagagttgcagcgattccgccttcatgctccagcacggaccatgccgttgatggaaccgttaccgtgccagcccggcggtgacggagccaaagtcatcgccgcctgcaatcggaatgcccggcaactgttctgccagcgcttttttaatcagcggagaacgggcgctaccgccggtcagggccaatttttccggttagcgggcatcgcgtaccagatcgttaagcagacgaccgttggcactactgtagaaatcactctgcgcaggtacgtcgttgatggcaaccgcattccaccacggcaggatcggcagggcgatgcctttttcggtttcgccacccatacccagcagtggcatcaggtttttaaacgccagcgcgatatccagatcgttaccgccaatacggcaaccactgtgacccagcaggctggcttcacgatcgagacgcgaacgccactgcggccccatcagcagcaatga

SEQ ID NO: 25726 - DNA, 2577 bp, Homo sapiens
  SIMILAR (1602)..(1216): 991254mologous to Escherichia coli glutathione transferase,accession number D38497,Smith-Waterman Score=675.
atgattattctcttcctcatccgcacggttcggaccgacacccacgtagtggaagatactggccgcaaaggtagccgcaaagccaacagccgcgagcggtttccagatgcctttccagaatttcacggtttcgctgatttccgggttctccggcaagccatgatacagatttggcttgtcagcatggtgcagcacgtacatgacgtgtgtccacgtatccgggcgctacaacatgatctcagtgatgttatcggtcaggaacaaggaaagcgaggactggaaattaccgctgctggcgggcacaaccttttactgattgggccgccgggaacaggtaaaacaatgctcgccagccgtattaatggcctgttgccagatttaagcaatgaagaggcactccatattgcgccaggtaaaaaacagtggagttggggacacagtgaatttggccaggcgtgggataagagtctgaccgacaataacggcccgtatatcgaactgatgaccggtatttttgccgataaccagcccgattttacctggcttgatgcttacgaagagaagcgttttgagcagtatttcctgccttatcattctttgggcatggtgcaaaatgcctcccgcgatgcggtgataaaactccagcgtagtaagcgggggattgagtgggggctgtatgccatctctccgttgaacggataccgcctggcgatccgcgaaatcggtaaatgcaacgcgttacttgatgatgccgtggcactgatgcctgcgaccgccatccagggcgtgttgcacggtatcaatcctgaaaggctgaccattgagctctccgatgccgacggcaatattgtactgagttatcaggaacatcagccgcaagcgttgccgttaccggacgtcgccaaagcgccactggcagcacaagacattaccagtacagatgaagcctggtttatcggtcagcatctggagcaatatcatcacgccagccgttcaccgttcgattactacctgcgcggcgtggcgctggacccgctggatatcgctggcgatgaccagcaggatccgattgccgactccgcgcgggcgatcctcgacggtcacattgtgctgtctcgccgactggcggaagccgggcactatccggctatcgatattgaagcgtcgatcagccgcgcaatgacggcgttgatcagtgagcaacattacgcgcgaattcagtttcaccgcgtatgcccagcgcagaaccgtaaacagataggcatcagcaattgtaaatctttgcccgcagatccagtgctcatccttcagtgcctcgttcacatattgcagcttcttctccagctgcgcgcgaactgtcggtttgtactcttccggtgtatcagggcgaaacagaggtgtgaaacctttatgcagctcggtggcgatgtaattcagccattcgatggttttatagcgggaaatactgtttaccggtgccagcaactggcggtcggggacgctgtcggcaagatactgcataatcgctacgccttccgtcagcaaagtaccgtcatccagcagcaatgcaggcacctggcccttagggttaacggcaaagtgttggctgagctgcaagctagccagctggacgtcacatgtggtaccccgacacgcacagcctccctggcagctgctagcgtgaagcatctatggcagttgaaagatcaactggtcaatgaaggtgaactggtgctggaaacgctggttattgatggtgatgagaacacggtgctggtaccaggcgatcgttacgcgcaaatgcgtaatgtctatttcatcccttccgcgctggcgctgaaaaactggctgaagaagtgtggttttgtagatatccgcattgcggatgtgagcgttaccaccacagaagagcagcgacgcaccgaatggatggttaccgaatcgctggccgatttcctcgacccacatgatccgggtaaaacggtggaaggttatccggcacctaaacgcgcgctggctgatcaaacgccgttaacttcggtgcattgcccgtatatttttcgatatacaccaacgctgagttaccggcacaggcatttgccagctgcgagctggggatatccgccgttaacacgttcgcactgccgtttttacacaagccattttccagatctggccatgcaccttcatgcacgcataccacgccttttttgatcccgtcagtcaccaccgcgcctgtcaaaatctgaccacgtttgttccagacacgcaccagatcgccattcgcaataccaaagcgtgcagcatgctgttcagattttcgttcctgctggcggtgccgatgatgatgggcgcaacggcgctcgatctctactaaagctggggcttcctgacaagcggcgatatcccgatgtttgccgttgggttgatcaccgcttttgtggtggcgctgatagcgattaaaaccttcctgcaattgattaagcgcatttcgttgatcccgttcgccatttatcgctttattgtgccgcctgcggtgtatgtcgtgttcatttaattgaggaatagtgtcggatg

SEQ ID NO: 25727 - DNA, 4411 bp, Homo sapiens
  SIMILAR (2405)..(3010): 881254mologous to Escherichia coli K12 putative enzyme,accession number AE000280,Smith-Waterman Score=948.
ttacatgcggcccaagacaattcttcttcttccaatgtggctcagggaagccaaaagattggacaccccggcggtagcgcccgttctccgctgattaaaaaagcgctggcagaacagttgccgggcattccgattgcaggcggcgatgactttggctccgtcaccgccgggctggcacgcgtcgccatggtgcacattgtggcgcttatgagccccggtcccgatttcttttttgtctctcagaccgctggcagtcgttcccgtaaagaagcgatgatgggcgtgctgggcattaccttcgccggttgtcctgatgaagtgatgatcggcagggaatagcatctgcgccggacgcgcatttaccgtctgctcatgatgtgccagacattcgatgttcaaaccataccggtgcgcgagataatcctgacaggcgttatgccgcacgctaaccatcgcactaacttgcggtttaacggcaagtatgatcaacgtttccaggcggcggcgcaatgcatgcattacggattcatcgcatacatacagctgatacgcgttatcttccggcaccaccagcgaaccacgcggacctgccaccgtatgtatatatcccggatgcgcctgcatcaggcagccggtggctaccccaccgttgcgaataaagaaatcaatactcagttcatggcgtagttcgtcatacagcggcgtatagtcacgcgacggtgggcgtggtccttccggccagacgatgccctcttccgttaccgttggcggcacaaagtgagcgtcaggttgaggaaagaagagtttgctgtgatcgtcaaagccacgcgatgtaaaaccgtccagcgcctcgccgccgaggacaatgcgctgaaaaccggcgctgatgcgctcaacgcgttaccacagtcagttcacggaagcgcagatcattgcgaacgcgccagacccttgaattgatacgacttctagctcggtaccccgccacgatggcgagaatgccaatcgaaatccagaataacatgcccgcctggtgccagttgtgtttgatagccaacgccatcaacgcgccgtagcccagcatggtacgaaaccacgccagtgatgtgcgctccggctgcagtcctgggtcggcaatgcgtctggctttgcggctatccggcatacaacgccagtcccataacgatcaccgccacgaccatcaatattaagctaatgattaataagctgttggtgtagggcaggtcctctttcagacgcgtcgctttttcattgcgtaaccagcgcaagtagccatacatcgctaacccgccggaaaacagacacaacaacaacgccagcagttcgcgaatgacgggcgtggcgaaatctggcgcaagttgatcaagcccaacccccaacaaaagaaatcctagtgcagtacggatccacgccagaaaagtacgctcattagccagcgagaagcggtaatcaggcgcttctccgaggcgggaaattttcattgttgctcctttgcaatttcactaacgctctacctttagcggtttttttaagaatttcgtccgcccgtttcctgatatgcttttgccatccgctacaaggaggtcagatgggtatcatagctcaaaataaaatcagttcattgggcatgctgttcggtgccatcgctttaatgatggggattatccacttttcattcggccctttctccgcaccaccgccaacgtttgaaagcatcgtggcggacaaaacggctgaaattaaaagaggtcttctcgccggaataaaaggcgaaaaaattaccaccgtggagaaaaaagaggacgtagatgtcgataaaatcctcaatcaaagcggtatcgcactggccattgctgcgctactttgcgcatttattggcggtatgcgtaaggaaaatcgctggggcattcgcggcgcgctggtttttggcggcgggacgctggctttccataccttgctttttggtatcggcatcgggggcagcaatttggtggaattccttaactttttcttcctgaccgcgggttactgggttaagccaccctgataatggccggcgggtgaacaataagggggcattaatggcaaaaacttctggttttttctctccccctttaccccttgtgtcggccggtgtcatagtcgcgtacaactggcgaatagccatcttgtggacgtggacgaaacgcccccatccagcgcggccgtgcatctttacgccacggacgcagactccattggtaactgcggaacggatcgcgaattttgtccatgtaatccaataaggcgtcatgcattttgctgcgaacgtctgcaaaacggatatcatcgatcagggtatgcatttcatttgggtcattacggcgatcgtaaagtcatcactaacttttattctctgattgccaaaaatcatctttcacactggctcgaaacgctgcccgcgcagattgctaactggcagcgcgagcagcagcacgggttgtttaagcagtggtcaaatgcggtggagtttctacctgaaattaaaccgtatcgtcttgatttattgcatagcgttacggcagaaagcgaagagccactgagcgcagggcaaattaaacgcattgaaacgctgatgcgcaacctgatgccgtggcgcaaagggccgttctcactgtatggcgtcaacatcgataccgaatggcgttccgactggaaatgggatcgtgttctgccccatctttctgatttaaccggacgcaccattctggatgtcggctgcggcagcggttatcacatgtggcgcatgattggcgcaggcgcgcacctcgcggtggggatcgaccctacgcaactgtttctgtgccagtttgaagcggtgcgtaaactactgggtaatgatcagcgcgcgcatttgttaccgttagtattgaacaacttccggcactgaaagcctttgataccgtcttttcgatgggcgtgctttaccatcgccgttcaccgctggagcatctatggcagttgaaagatcaactggtcaatgaaggtgaactggtgctggaaacgctggttattgatggtgatgagaacacggtgctggtaccaggcgatcgttacgcgcaaatgcgtaatgtctatttcatcccttccgcgctggcgctgaaaaactggctgaagaagtgtggttttgtagatatccgcattgcggatgtgagcgttaccaccacagaagagcagcgacgcaccgaatggatggttaccgaatcgctggccgatttcctcgacccacatgatccggccattttccagatctggccatgcaccttcatgcacgcataccacgccttttttgatcccgtcagtcaccaccgcgcctgtcaaaatctgaccacgtttgttccagacacgcaccagatcgccattcgcaataccaaagcgtgcagcatcttcgtttcatttgcgcttcgtaccacgcattcgtgcgccatttcacattcgtctctagaggatcccccggcgattctgtttaagattgccgatcgaatggaacaaaacctcgagctgttagcgacagctggaaacctgggataacggcaaacccattcgcgaaaccagtgctgcggatgtaccgctggcgattgaccatttccgctatttcgcctcgtgtattcgggcgcaggaaggtgggatcagtgaagttgatagcgaaaccgtggcctatcatttccatgaaccgttaggcgtggtggggcagattatcccgtggaacttcccgctgctgatggcgagctggaaaatggctcccgcgctggcggcgggcaactgtgtggtgctgaaacccgcacgtcttaccccgctttctgtactgctgctaatggaaattgtcggtgatttactgccgccgggcgtggtgaacgtggtcaatggcgcaggtggggtaattggcgaatatctggcgacctcgaaacgcatcgccaaagtggcgtttaccggctcaacggaagtgggccaacaaattatgcaatacgcaacgcaaaacattattccggtgacgctggagttgggcggtaagtcgccaaatatcttctttgctgatgtgatggatgaagaagatgcctttttcgataaagcgctggaaggctttgcactgtttgcctttaaccagggcgaagtttgcacctgtccgagtcgtgctttagtgcaggaatctatctacgaacgctttatggaacgcgccatccgccgtgtcgaaagcattcgtagcggtaacccgctcgacagcgtgacgcaaatgggcgcgcaggtttctcacgggcaactggaaaccatcctcaactacattgatatcggtaaaaaagagggcgctgacgtgctcacaggcgggcggcgcaactgctggaaggtgaactga

SEQ ID NO: 25728 - DNA, 1788 bp, Homo sapiens; identical to SEQ ID NO: 24729
  SIMILAR (1)..(411): 951254mologous to Escherichia coli RF-3/Tos,accession number D17724,Smith-Waterman Score=665.

SEQ ID NO: 25729 - DNA, 3313 bp, Homo sapiens
  SIMILAR (275)..(1072): 901254mologous to Escherichia coli K12 putative transport protein,accession number AE000362,Smith-Waterman Score=1237.
atggccaaagatatcggccttgatcccgtgggaatgggctatgtgttctctgctttctcatgggcttatgttatcgggcagatccctggtggctggttgctggaccgttttggttcaaaacgcgtctacttctggtcgatctttatctggtcgatgtttaccttgctgcaaggcttcgtcgatatctttagtggattcggcattatcgttgccctgtattcggcgcttcctgtccagagtgagcgtgctaacgcgtatcttcaggagtacaacaatgagttctttaagtcaggctgcgagcagtgtggaaaaacgcacaaatgctcgttactggatagtggtgatgttgtttatcgtcacatccttcaactacggcgaccgcgctacgctctctatcgccggttcggaaatggccaaagatatcggccttgatcccgtgggaatgggctatgtgttctctgctttctcatgggcttatgttatcgggcagatccctggtggctggttgctggaccgttttggttcaaaacgcgtctacttctggtcgatctttatctggtcgatgtttaccttgctgcaaggcttcgtcgatatctttagtggattcggcattatcgttgccctgtttacgctgcgcttcctggtcgggcttgctgaagcgccatctttccccggcaacagtcgcattgttgcggcctggtttccggcgcaggaaaggggaacggcggtgtcgatttttaactccgctcaatacttcgcaacggtgatcttcgcgccgattatgggctggctgacgcatgaagtgggctggtcacacgtcttcttctttatgggcggtctggggattgtcatcagctttatctggttgaaagtcatccacgagccaaatcaacatccgggggtaaataagaaagagctggagtacatcgccgcgggtggtgcgctgatcaatatggatcagcaaaacaccaaagttaaagttgctcatcgaggcgatggaaagtcgctcgagtcgcccatgtcagtacccgttcaacatcctatgtatatcgatggacagtttgttacctggcgtggagacgcatggattgatgtggtaaaccctgctacagaggctgtcatttcccgcatacccgatggtcaggccgaggatgcccgtaaggcaatcgatgcagcagaacgtgcacaaccagaatgggaagcgttgcctgctattgaacgcgccagttggttgcgcaaaatctccgccgggatccgcgaacgcgccagtgaaatcagtgcgctgattgttgaagaagggggcaagatccagcagctggctgaagtcgaagtggcttttactgccgactatatcgattacatggcggagccaaacaacctggcgggcattgcgctggttaattcaacaaagcgttccggtgttatacgtcccgtcatcacgccactggaaaacagtaactgcatgcggttttccacaccggcactgctggcggcgctgtttgtttgcctgaaggcggcgaacgtgacgtccatacgtactgaaccgacctacacgctttatgcgacgttcgataacattggcggcctgaaagcgcgctctccggtcagtattggtggcgttgttgtgggtcgggtggcggatattacgctggacccgaaaacctatctgccgcgcgtaacgctggaaattgaacaacgttataaccacattccagataccagttcgctgagcattcgtacttccggcctgctgggggaacaatatctggcattaaacgtcggttttgaagacccggaactggggactgctatcctgaaggatggcgatacaattcaggacactaagtctgcgatggtgctggaagatctcattggtcagttcctttacggtagtaaaggcgatgacaataagaatagtggcgatgcgccagctgctgcgccagcaaaagcagagaacattcgtctgctgatcctcgatgtcgatggcgtactgtcagatggcctgatttatatgggcaataatggcgaagagctgaaagcgttcaatgttcgtgacggttatggcattcgttgtgcgctcacctctgatattgaagtcgctatcattaccgggcgaaaggctaaactggtagaagatcgttgtgccacattggggatcactcacttgtatcaggggcagtcaaacaaactgatcgcctttagcgatctgctggaaaaactggcgattgccccggaaaatgtggcttatgtcggcgatgatctcatcgactggccggtaatggaaaaagtgggtttaagcgtcgccgtggacgatgcgcatccactgttgggtaccgagatcgatgcgtatatcgaaaatgctgactatcagtataataaaaagcgtctgcgtgaaatcgaccgtcgcgtgcgctatctcactaaatgcctggaaaatctcaaaatcgtcgattactcccctcagcaggaaggcaaagtcttttttggcgcgtgggtggagattgaaaacgacgatggcgtgactcaccgtttccgtattgtcggctacgatgaaatttttggccgtaaagattacatctctatcgattccccgatggcccgcgcattgctgaaaaaagaagtcggcgatctggcggtggtgaatacccctgccggggaagcgagctggtatgttaatgctatcgagtacgtgaaacctcgcctgaatcaaacggttcgtctgctgcttgagcatgagatgggacaggtttggatcagcggcgaaatttctaatttcacgcaaccagcttccggtcactggtactttacactcaaagacgacaccgcccaggtacgctgcgcgatgttccgcaacagcaaccgccgggtgaccttccgcccacagcatgggcaacaagttttagttcgcgccaatattacgctctacgagccgcgcggcgactaccagataatcgttgagagtatgcagccggccggtgaagggctgctgcaacagaagtacgaacagctcaaagcgaagttgcaggctgaaggtttgttcgatcagcaatacaaaaaaccacttccctcccctgcgcattgcgttggtgtgatcacctcaaaaaccggtgctgcgctacatgatattttgcatgtgttaaaacgtcgcgatccttctctgccggtgatcatctaccctgccgccgttcagggcgatgacgcgccggggcaaattgttcgcgccattgaactggcgaatcagcgcaatgagtgcgacgtattgagaccatgcgtctggtgccgccgcgtacggtgccgaaggcgctgtcggtga

SEQ ID NO: 25730 - DNA, 3468 bp, Homo sapiens
  SIMILAR (2617)..(3210): 961254mologous to Escherichia coli GAD alpha protein,accession number M84024,Smith-Waterman Score=1061.
atgttgtttatcgtcacatccttcaactacggcgaccgcgctacgctctctatcgccggttcggaaatggccaaagatatcggccttgatcccgtgggaatgggctatgtgttctctgcttctcatgggcatcagcggatcgcctggctgggagggcaaagttcctcattaacccgtgcagaacggttcatcccctttgggcgccctacctggtgcccctttaatcttcggcccttcggtcccggccatcagccggccgggctcatgttcgccggagtggccgaccttggatacttcgggctattcggccccgcgctgctgtttaccgcgtatgcaggttcggaagccgtttttgcgcacgtattcggtgacgcacttggcgacgctgggcttcttatgagcctgctgtcaccctttgacgtggtgatatggatgacggatggctggccgctgtatgaatcccgcctgaagggaaagctgcacgtaatcagcaagcgatatacgcagcgaattgagcggcataacctgaatctgaggcagcacctggcacggctgggacggaagtcgctgtcgttctcaaaatcggtggagcagcatgacaaattggagtcattaccgggccaaatcgataaatcgctcgatgaagcctcactcagcctgcgcgccggttccctgcgtaccattacgcacatcctgctgccgctgctgcgcccggcgatcctctcggcgctgatttacagctttgtgcgcgccattaccaccgtcagcgccattgtgttcctcgtcacgccggatacccgcgtagcgacggcttacatcctcaaccgcgtggaagatggcgaatacggtgtagcgattgcctacggttccattctgatcgtggtgatgctggcgattattttcatctttgactggctgatcggtgaatcacttctgtccagattcgagaagactgtcgacgatcacagtcagagcagactgccagcagaaggaagcattctgagtcaagatatctctggagttaagcttttttctctattgaccccagcacggggctatgttcctattcgggccccttgccctttcttatgcgcgtcgtaccggttcttttgcgtagcccggcagcaaggtcttgatgcggcgctgattgatgcgccgttagcagtcgatgcacttacgcctcttagcgagttgctctctcatgtcggacaggcaccctgttcggtgcccgtggtcgacgaggaccaacagtatgtcggcatcatttcgaaaggaatgctgctgcgcgctttagatcgtgaggggggcgtgcgcgttccggttgattatatcctcaacggtttccaccccttgctgctgggtatgcccgcaccgctggcgattatcgttttcgctctcatcgcctgcagatttccggggtcgaatggtcggataaggcgttcacgccgcatccgacatttgcacaagatgcctgatgcgacgctgtccgcgtcttatcaggcctacagtgaacagaaccgcctacagtgtacagaaccccagggcggatatggcgttcacgccgcatccgacaacagggacaaacgccacgataaaaaaatggcactgaaggttaaatacccgactaaatcagtcaagggcgagtttgaggtgaaggaagacatgaaactgacatctaaagggcgctatgccgtgaccgcaatgcttgacggtgcgctcaactctgaagcgggcccgcatttcgagctgttccctcatctgtcgattatcgaaaacctgaccctggcgcaggtgaaagtgcttaaacgcgataaagcgccggctcgtgaaaaagccctgaaactgctggagcgtgtcgggctttctgctcacgccaataagtttccggcgcagctttccggcggtcagcagcagcgtgtggcaatcgctcgcgcgttgtgtatggatcctattgcgatgctgtttgacgaaccgacatcggcgctggatccggagatgatcaacgaagtactggacgtgatggtggaactggcgaacgaaggaatgaccatgatggtggtgacccacgaaatgggctttgcccgtaaagtggcgaatcgggtgatctttatggacgaggaacaccaacaggagcacaatgcacggcaatctgtagatgcgaccaggcatgagacgcttcgcagtgagtatatcgccctgtgctctaaagacttcctcgaaaaaccgagtgaagggtcgatcgtggtcaatggccagacgatcaatctggtgcgcgacaaagacggtcaactcaaagtcgccgataaaaatcaactgcgcttactgcgcacacgcctgacgatggtattccagcacttcaatctctggagccatatgacggtgctggaaaacgtcatggaagcgccgattcaggtgttgggcctgagcaagcaggaagcgcgcgagcgggcggtgaagtatctggcaaaagtcgggatagacgaacgtgcgcaggggaaatatccggtgcatctttccggcggtcagcaacagcgtgtttctatcgcgcgggcgctggcgatggaaccggaagttttactgtttgatgaacctacctcggcgctcgatcctgaactgacctgggacgacgaaaatgtccacaaattgatggatttatccattaacaaaaactggatcgacaaagaagaatatccgcaatccgcagccatcgacctgcgttgcgtaaatatggttgccgatctgtggcatgcgcctgcgccgaaaaatggtcaggccgttggcaccaacaccattggttcttccgaggcctgtatgctcggcgggatggcgatgaaatggcgttggcgcaagcgtatggaagctgcaggcaaaccaacggataaaccaaacctggtgtgcggtccggtacaaatctgctggcataaattcgcccgctactgggatgtggagctgcgtgagatccctatgcgccccggtcagttgtttatggacccgaaacgcatgattgaagcctgtgacgaaaacaccatcggcgtggtgccgactttcggcgtgacctacactggtaactatgagttcccacaaccgctgcacgatgcgctggataaattccaggccgataccggtatcgacatcgacatgcacatcgacgctgccagcggtggcttcctggcaccgtcgtcgcccggatatcgctgggactttcgcttgcgcttgtgtggggatcgtccggcaacgctgctgctggaatccgcagatatcgacagcaaagatgatttaaaaagcctgctgctggtagacagtgcgctgcgcattacagctttaggtgacactgtcacaatccaggcactttccggcaacggcgaagccctcctggcactactggataacgccctgcctgcgggtgtggaaagtgaacaatcaccaaactgccgtgtgctgcgcttccccccttccactgctggatga

SEQ ID NO: 25731 - DNA, 3129 bp, Homo sapiens; identical to SEQ ID NO: 17666
  SIMILAR (1)..(882): 1001254mologous to Escherichia coli K12 putative transport protein,accession number AE000114,Smith-Waterman Score=1550.

SEQ ID NO: 25732 - DNA, 1835 bp, Homo sapiens
  SIMILAR (784)..(831): 931254mologous to Escherichia coli GAD alpha protein,accession number M84024,Smith-Waterman Score=87.
atgagttctttaagtcaggctgcgagcagtgtggaaaaacgcacaaatgctcgttactggatagtggtgatgttgtttatcgtcacatccttcaactacggcgaccgcgctacgctctctatcgccggttcggaaatggccaaacatatcggccttgatcccgtgggaatgggctatgtgttctctgctttctcatgggcttatgttatcgggcagatccctggcttcgtcgatatctttagtggattcggcattatcgttgccctgtttacgctgcgcttcctggtcgggcttgctgaagcgccatctttccccggacaaagtcgcatagttggggactggtttccggcgcaggacaggggaacgggagtgtcgatttttactccgttcatacttcgcaagggtgatcttcggccgatttgggtggttatcttgatggcaggtcagctgcatgcgctaatgtcgactctagaggataccccattctctaacaaagcgggaatgcgcttgcgcagatggattaacgcggcggtaatgcggttaaacccactggcttgcctagcgaccagatccaaccaggttaattggttactcctgacaggtaacatcagtgtgtacccagtgggcagcagcgaaccaacacgccggcggtcaacacccatcaacagcactccacactttaataaaacaatcctgcccatcaatgcacgatattctcccaccctaccgtccagtgacgggacccggtggacaacacgtatagacgataaacccacagttggccataaattcgcccgctactgggatgtggagctgcgtgagatccctattgcggcccgggtcagttgtttagggacccgaaacgcatgattgaaggctgtgccgaaaacccccttcggcgtgggtgccgactttcggcgtgacctacgctggtaactatgagttcccccaaccgctgcccgatgcgctgaataaattccaggccgatcccggtatcgacatcgacatgcacatcgacgctgccagcggtggcttcctggcaccgttcgtcgccccggatatcgtctgggacttccgcctgccgcgtgtgaaatcgatcagtgcttcaggccataaattcggtctggctccgctgggctgcggctgggttatctggcgtgacgaagaagcgctcccgcaggaactggtgttcaacgttgactacctgggtggtcaaattggtacttttgccatcaacttctcccgcccggcgggtcaggtaattgcacagtactatgaattcctgcgcctcggtcgtgaaggctataccaaatcaacccaacctgccagaggatctccacccgcaaataattgccaagcccagccagaaacgcctgatcgagcagtaatccatccaactgacgggtacgaaagcgcggcgacaataatcgttctttcaccacctacggcgtcagattcggatccagcacatcgggaccaacgcgttgtaaaaacggatgcgtggtcagttgttccggggtcaacatctgaatatccgaggcgctataaagcagaatggttttgtcagccgtttgcagttttacccgcaatactcgcgtggtctgcggctctttggcggtatcaaccacgcgccagacgccgtaaagctgattatggctgtagagcgttaaattctttgaaaaatgagttaacaacgccttaccacgcgtttccacatgggtaacgtgttgaccattagtggtgaatggttaagggtccacatgaaaggacattccgtatcagtcttgatgtcaccagtattcgttttcttgatgaagacgaaatgcaacgtctga

SEQ ID NO: 25733 - DNA, 2388 bp, Homo sapiens; identical to SEQ ID NO: 25439
  SIMILAR (463)..(1008): 981254mologous to Escherichia coli NADPH-sulfite reductase hemoprotein component,accession number M23008,Smith-Waterman Score= 943.

SEQ ID NO: 25734 - DNA, 1770 bp, Homo sapiens; identical to SEQ ID NO: 24364
  SIMILAR (961)..(1497): 931254mologous to Escherichia coli K12 transketolase 1 isozyme,accession number AE000376,Smith-Waterman Score=878.

SEQ ID NO: 25735 - DNA, 2082 bp, Homo sapiens
  SIMILAR (112)..(990): 881254mologous to Escherichia coli xylR,accession number U00039,Smith-Waterman Score=1323.
atgaaactccaaaaaacaggtcactttaaaacgttcttccagagcttctaccagcccccagttttctacctgaatatgcggcatgtaatgaattttgccgctgtccgggtcaacaagccctggcaggatcaccgaaatcgcgatcagctcgcgcagtttgcgctggctcaccaatcgaaatggaaaattttcattgaagaagatttccgcgcccgcattgataaaatcaaggactggttaggagatggcgtcattgccgacttcgacgacaaacagatcgagcaagcgctggctgatgtcgacgtccccattgttggggttggcggctcgtatcaccttgcagaaagttacccacccgttcattacattgccaccgataactatgcgctggttgaaagcgcatttttgcatttaaaagagaaaggcgttaaccgctttgctttttatggtcttccggaatcaagcggcaaacgttgggccactgagcgcgaatatgcatttcgtcagcttgtcgccgaagaaaagtatcgcggagtggtttatcaggggttagaaaccgcgccagagaactggcaacacgcgcaaaatcggctggcagactggctacaaacgctaccaccgcaaaccgggattattgccgttactgacgcccgagcgcggcatattctgcaagtatgtgaacatctacatattcccgtaccggaaaaattatgcgtgattggcatcgataacgaagaactgacccgctatctgtcgcgtgtcgccctttcttcggtcgctcagggcgcgcggcaaatgggctatcaggcggcaaaactgttgcatcgattattagataaagaagaaatgccgctacagcgaattttggtcccaccagttcgcgtcattgaacggcgctcaacagattatcgctcgctgaccgatcccgccggtccgagcctactatttaacatcaaaaccaacatcaacaccagcgccagcgtcagccagaagatggcgaagatgcgcgcggttaagctgcctatcatgaagcagaaaccatcagatagccgcgaccacgcaagccataaaaaccgcttcggcgcggtgaatgagctgggcgtcttcgcgatgaccgaacaggggctgcgtgaagtcagcaacccttcggcaattttcttaagtcgcggcgatgaagtgacctccggtagctcagtgatggtggtatgggaaggaacgcgtccactgctggtggagattcaggcgctggtcgatcactcgatgatggcgaacccacgccgcgtggcagtggggctggaacaaaaccgtctggcaatcctgctggctgtgttgcaccgtcacggtggtctgcaaatggccgatcaggatgtgtttgtgaacgtggtcggcggcgtgaagaccgctgccgcggatctggtggtgtttggtgaagtcgggctggcaggggagatccgcccggtgcccagcggtcaggaacgaatctctgaagcggcgaaacacggttttcgccgggcgattgttccggcggctaacgtgccgaaaaaagcgccgaagggatggcctttcgacctcagccttaggggtcaactcacctgcccctatctggttactcagcagccgctgggtggtaaggcacagttcggtggtcagcgtttcggggagatggaagtgtgggcgctggaagcatacggcgcagcatacaccctgcaggaaatgctcaccgttaagtctgatgacgtgaacggtcgctttttgttcaaacgcttcatcaacgaatttttcacgcggcacggcggcaagtgcattcagcacctgctcatcctgaataccttgcgcacacctacaaccgctgccacatgtcggctggataaggcgttcacgccgcatccggcaatacaagtttactcagccagaaaaagctccagcagcgaatttaaaaacagcttgcccatgttgccggttatgctggcccacaatgcgcccatccgggaaggtcactttgccgtgtgcgccgcagccaataccgatgtagtcaccaaagcgccagtagttgagattgtgctggcactggggatcctctag

SEQ ID NO: 25736 - DNA, 1591 bp, Homo sapiens
  SIMILAR (421)..(1260): 981254mologous to Escherichia coli xylR,accession number U00039,Smith-Waterman Score=1404.
atggaggatggggcaagagccgcaacagcgccgcggagttccaacgctgccggttccctggggtacgagcacagcctcaagcagcctcaagccctaggaagcccccagttcaaagcacagggcgcattggagcctgggcacgatacagttcacaccacggctgcgatgcgccccgcgctccggcgggcggagcgcaccatgccgcagctggactccggcgggggcggcgcgggcggcggcgacgacctcggcgcgccggacgagctggtggccttccaggatgaaggcgaggagcaggacgacaagagccgcgacagcgccgccggtcccgagcgcgacctggccgagctcaagtcgtcgctcgtgaacgagtccgagggcgcggccggcggcgcagggatcccggggcgcatttttgcattaacagagaaaggcgttaaccgctttgctttttatggtcttccggaatcaagcggcaaacgttgggccactgagcgcgaatatgcatttcgtcagcttgtcgccgaagaaaagtatcgcggagtggtttatcaggggttagaaaccgcgccagagaactggcaacacgcgcaaaatcggctggcagactggctacaaacgctaccaccgcaaaccgggattattgccgttactgacgcccgagcgcggcatattctgcaagtatgtgaacatctacatattcccgtaccggaaaaattatgcgtgattggcatcgataacgaagaactgacccgctatctgtcgcgtgtcgccctttcttcggtcgctcagggcgcgcggcaaatgggctatcaggcggcaaaactgttgcatcgattattagataaagaagaaatgccgctacagcgaattttggtcccaccagttcgcgtcattgaacggcgctcaacagattatcgctcgctgaccgatcccgccgttattcaggccatgcattacattcgtaatcacgcctgtaaagggattaaagtggatcaggtactggatgcggtcgggatctcgcgctccaatcttgagaagcgttttaaagaagaggtgggtgaaaccatccatgccatgattcatgccgagaagctggagaaagcgcgcagtctgctgatttcaaccaccttgtcgatcaatgagatatcgcaaatgtgcggttatccatcgctgcaatatttctactctgtttttaaaaaagcatatgacacgacgccaaaagaggtattcgcgattgtaaatagcgaggtcatgttgtaggcgatgatgaggaattgtcggggtcaacaatcagggtaaacgctgcgtgggtttttcggatgcggcgtgaacgccttatccgacctacccgccaggcatgataaaacgcaccaacaacgcttcaggctcgtagctcaactgcctgagacaaagtaaaaagccttatccgactgacaagtcggataaggctcaaggaaatgcaattacatatgcgccgcgattaaccgttggttatcctggtacattgcgaacaggtaggtgttataactcttccctttggtcgagtagcccttcagcttgggaatcatcgctgtggcagccactttct

SEQ ID NO: 25737 - DNA, 1110 bp, Homo sapiens
  SIMILAR (536)..(574): 691254mologous to Escherichia coli hydrogenase isoenzyme hypD,accession number X54543,Smith-Waterman Score=40.
atgacctcgctgaaaaactccatgaaatgggatgaagaacgctttggcctggagtatgacctcgacatctatatgatcgtcgcggtggatttcttcaatatgggcgcaatggagaataaggggctgaatatctttaactccaaatatgtgctggcccgcaccgacaccgccaccgacaaagattacctcgatattgaacgcgttatcggccatgaatatttccataactggaccggtaaccgagtgacctgtcgcgactggttccagctcagcctgaaagaaggtttaaccgtcttccgcgatcaggagttcagctctgaccttggttcccgcgcagttaaccgcatcaataatgtacgcaccatgcgcggattgcagtttgcagaagacgccagcccgatggcgcacccgatccgcccggatatggtcattgagatgaacaacttctacaccctgaccgtttacgagaagggcgcggaagtgattggcatgaaccccccccttgtttggccaagaaaacttccaaaatgtaattctgacctgcgctctagaagatccaacccgcaaagtggttttgaaaccactatgccgaccaccgctatcactctgcaacaggcgaaagcgcgtgatgtgcagaatttttacttcttctgccagcacattacgcttatcccgacgttgcgcagtttgctggaacagccggataacggtatcgatgcgttcctcgcgccgggtcacgtcagtatggttatcggcaccgacgcctataattttatcgccagcgattttcatcgtccgctggtggttgctggattcgaaccccttgatctactacaaggcgtggtcatgctggtgcagcagaaaatagcggcccacagcaaggtagagaatcagtatcgtcgagtggtaccggatgccggtaacctgctggcgcaacaggcgattgccgatgtgttctgtgtcaacggcgacagcgaatggcgcggcttaggcgtgattgaatcttctggcgtgcacctgacgccggattatcaacgattcgatgccgaagcacatttccgcccggcaccgcagcaggtctgcgatgacccgcgcgcgcgttgtggtgag

SEQ ID NO: 25738 - DNA, 3396 bp, Homo sapiens
atgaacgacgcgcactttgtcaacaatctgacgttagcatcagaagtgggtgtttacgctcatataccacgtatacgccccggcaccggcgatatagttggcccctgccaaatcgcccgtggtctgggcattacccgcacgccacaaacgtttgtcgaacagattgtccacgccgccggtcagactgacattcttcgtcacatcccaggtcgcgctcaggccaacaatgctcatataagtgatgttattggtccacatcaccgtttcgctaaccgcgcctttatccccttctcccggcgaagaattttttcacgggtatcctgcttttctcccttttttttgcgcccccaaaacctgcccgtgcgaagtgatttgtttaaaaatcatatggttagagatatgaaacatactgtagaagtaatgatccccgaagcggagattaaagcgcgtatcgccgaactgggtcgtcagattactgagcgttacaaagacagcggcagcgatatggtgctggtgggtctgctgcgtggctcatttatgtttatggcggacctgtgccgtgaagttcaggtatctcatgaagtcgactttatgaccgcctccagctacggtagcggcatgtccaccacccgtgatgtgaaaatcctcaaagatctggatgaagatatccgtggcaaggacgtgctgattgttgaagatatcatcgactcggggaatacactgtcgaaagtgcgtgagatcttaagcctgcgcgaaccgaagtcgctggcgatttgtacgctgctggataaaccgtcccgtcgtgaagtgaacgtcccggtagaatttatcggtttctcgatcccggatgagtttgtggtgggttacggcattgattacgcacagcgttaccgtcatctgccgtatatcggcaaagtgattctgctggacgatttagtgggcaccgcgtggtgccacccctggttgtgtcttgttgcatgtcgagaactgtggtgtgccgctatgggagcaattcggccgcctattgggatgcgagatggagtggcgtctactggaattgactggagtgttgacaactgccgaatattgccgtgtccacttgagtggagctgcggtgaatctgcaagggatcttgggcggagaagcattggagtaacgggattaccttgtgaactggagacgagttgtagccgacatctaaaggcggacctgacgtcgtggtgtgtgggccggagaaacgcagacggcgtaccacaacaggaaaagatcgcaattgttcagcagagctttgaaccggggatgacggtctccctcgttgcccggcaacatggtgtagcagccagccagttatttctctggcgtaagcaataccaggaaggaagtcttactgctgtcgccgccggagaacaggttgttcctgcctctgaacttgctgccgccatgaagcagattaaagaactccagcgcctgctcggcaagaaaacgatggaaaatgaactcctcaaagaagccgttgaatatggacgggcaaaaaagtggatagcgcacgcgcccttattgcccggggatggggaacgaaccgatgactggatggatggccgccgcagtcgtcacactgatgatacggatgtgcttctccgtatacaccatgttatcggagagctgccaacgtatggttatcgtcgggtatgggcgctgcttcgcagacaggcagaacttgatggtatgcctgcgatcaatgccaaacgtgtttaccggatcatgcgccagaatgcgctgttgcttgagcgaaaacctgctgtaccgccatcgaaacgggcacatacaggcagagtggccgtgaaagaaagcaatcagcgatggtgctctgacgggttcgagttctgctgtgataacggagagagactgcgtgtcacgttcgcgctggactgctgtgatcgtgaggcactgcactgggcggtcactaccggcggcttcaacagtgaaacagtacaggacgtcatgctgggagcggtggaacgccgcttcggcaacgatcttccgtcgtctccagtggagtggctgacggataatggttcatgctaccgggctaatgaaacacgccagttcgcccggatgttgggacttgaaccgaagaacacggcggtgcggagtccggagagtaacggaatagcagagagcttcgtgaaaacgataaagcgtgactacatcagtatcatgcccaaccagacggcaagaaccttgcagaggcgttcgagcattataacgaatggcatccgcatagtgcgctgggttattggcgaacagtggatgcatgagggggcgatagccacaggaaccgtcattaatgataagggctggcaggtcgtcaagcccggtacagtggcaacggataccgttgttaataccggggcggaagggggaccggatgcagaaaacggtgataccgggcagtttgttcgcggggatgccgtacgcacaaccatcaataaaaacggaacttgctggctaatccagcgatccatctgtgccgttttgagcgagggtcgtagtggaagtaccgagcgtggccgtgcaaccgtaactagtatggtggacgagcaagttcgtgtctgtagaaagatccacgagcaacaagatttccatagattgaaagtccttgccgaagagatggcgctggcggtcaatcaggtgattcaggatgccgtcgggctgtgcgtggtacgtaacggccagatacaaccaatcgcggcgatatccagcgcggcgaaggtgcctgcccagccggtaaggccgaataccggcgtcccatcggcaatcattcccagacctaacttggcaaagctgtcaccaatcaggtacaaagccaacagcagacacaacaatcaacaattgcgggccaaagaccaggaaacccaacgcaaagagagaagccagatagatatcttcgttactggcatgttgatcacaccgagcgtgggaataatagggctgcgcgatgaggccacaggcaggcgacggtcccagtcagaagcagcccaaagaagtacgacaggcaccgttaaaaggttaaccgtaatcccgcttagaagtcgtctgaacggtattttcacggtgatcgagtcactatggatttgcagcgcccgatatgttccgctctcaaagcctgcaaggaaagctgccacgatcagtgcttgccgaagagatgtcattactgatgctggacagccgccgggtgatccaaagcattcagttgatgaaatcgctgggcggcgggtatcaggcaggtcccgtcgtcgagaaaaaataaaatgtctgccgcgtgatggctgtcacgcggtatttcgtttcgtcacgtcaaaactgacgacagcctgtttttcgtcagagttttga

SEQ ID NO: 25739 - DNA, 2616 bp, Homo sapiens
  SIMILAR (1681)..(2613): 991254mologous to Escherichia coli K12 putative oxidoreductase,accession number AE000227,Smith-Waterman Score=1611.
atgtggccggataaccgtatcgcccgtgacgcgcactatctttaccggtatgaccgtcacggcaggctgacagagaaaaccgacctcatcccggaaggggttatccgcacggatgatgagcggactcaccggtaccattacgacagtcagcaccggctggtgcactacacgcggacacaatatgaagagccgctggtcgaaagtcgctatctttacgacccgctgggccgcagggtggcaaaacgggtgtggcggcgtgaacgggacctgacgggctggatgtcgctgtcacggaaaccgcaagtgacctggtacggctgggacggcgaccggctgaccacgatacagaacgacaggagccgcatccagacgatttatcagccggggagcttcacgccactcatcagggtcgaaactgccaccgcagtccggcggcgaagacggtggcagtgggggattcccgccggcacggtgcagatgctcgaccggctggaaagtgaaatcctggctgaccgggtgagtgaggaaagccgccgctggctggcatcgtgcggcctgaccgtggagcagatgaaaaagaccagcatacatgcaagcatagtccgccacaagttactgaccgctgaacaagccctgaaattactgggtgagatgtttgtttatcacatgccatttaaccgcgcattggggatggaactggagcgttacgaaaaagagttcgcacagctggcctttaaaaatcagccaatgatggtgggcaactgggcgcaaagcattttgcacggcggggtcattgcgtcggcgctggatgtcgccgccggtctggtgtgcgtgggaagtaccttaacccgccacgaaaccatcagtgaagatgaactacgccagcggctatcgcggatggggaccattgatcttcgcgttgattatctgcgcccaggcaggggcgagcgttttactgctactagtagcctgttgcgtgcaggcaataaagtcgccgtcgcccgcgttgaattacacaatgaagaacagctttatattgccagtgccaccgccacctatatgtctaaatcaatgtttctcgccgttgcgacgatattaatatcgaaatcgtcgttgtcgaggttacgtcgccccagcacaatagtgtgcggaataccgatcagttccatatcagcaaacatcacgcccggacgctctttgcggtcatccagcagcacttcgaaaaccttgtgcacgcagttcgctgtacagtttctcagcaagctcttgtacgcggaaggatttgtgcatgttcatcggcagaatcgccacctggaacggcgcgatagcgtcaggccatacgatgcctcgttcgtcgtagttctgctcaatcgccgcagctaccacacgcgttaccccgataccgtagcaacccatcgtcaggatttggttacggccatcttcaccctgtacggaggctttcagtgcttcggagtacttggtacccagctggaagatgtgaccaacttcgataccacgtttgatcagcagcctaccctggccatccgggcttggatcgccagccaccacgttacggatatctgcaacttccggggtagcgacatcgcgatcccagttgatgccgaagtagtgtttaccatcgatgttagcaccagcagcgaaatcactcatcgccgcaacgtggatttgttccctgaccagcttaccgtgacccgttcacagaccttcaccgcttatgaacgcttgtcgacggccctgacggttgctcaggtttgcggcgtccagcggttatgtaactactattcggcgcgacttacgccgctccccgggcctgattccaccagggaaagtaatcatcggttggcacaaatcacgcaatatgcccgccaactggctagctcgccttctattatcgacaaccgatcgcgccagcatctgaatgacgtcggtcttactgcctgggactgtgtgatcattagccaaatcattggttttattggctttcaagcgcggacaattgcgacatttcaggcttatctcgggcatccggtacgctggttacccgggctggagatacaaaactacgccgacgcgtcactgtttgctgatgaatcattacgctggcgaagcagctatgaggtggaaaaactacctgaagagcacacaaaaagttcaactgcagaactttgccaactggccgaaatactctctctccaccctatttcactttcccttctcgaaaaggtgttaaacagcacacggggcaatacacagccggataatcagcttgcggcgttgttatgcgcgcgtataaatggcagtcctgcttgttttgccacctgtatggattcatcaaatgaatataaaaaaatcagcacccttatgcgcaagggcgaaaatgaaattaaccaatgggctgaccgtcattctgttgagcgcgctaccgttcaggcgatacaatggctgacccgagcacccgatcgctttagcgccgcccagttcagccctttactcgaacacgaaaaatcatcaacgcagattattaatctgctggtatggagcgggctgtgtggctggataaatcgcttaaaaatcgcgttgggtgagacatattaa

SEQ ID NO: 25740 - DNA, 3697 bp, Homo sapiens
  SIMILAR (478)..(1833): 971254mologous to Escherichia coli peptidase N,accession number M15273,Smith-Waterman Score=2343.
atgagttctttaagtcaggctgcgagcagtgtggaaaaacgcacaaatgctcgttactggatagtggtgatgttgtttatcgtcacatccttcaactacggcgaccgcgctacgctctctatcgccggttcggaaatggccaaagatatcggccttgatcccgtgggaatgggctatgtgttctctgctttctcatgggcttatgttatcgggcagatccctggtggcttggtgctggaccgttttggttcaaaacgcgtctacttctggtcgatctttatctggtcgatgtttaccttgctgcaaggcttcgtcgatatctttagtggattcggcattatcgttccttctgtttacgctgcgcttcctggtcgggcttgctgaagcgccatctttccccggcaacagtcgcattgttgcggcctggtttccggccaggaaaggaacggggatcattaatgaaactaagcccttttggcgaataccgcgctggaagggcttggtgggtcaggcgatgcgctttgcacccagtgtgaagccgaaggtttccgccatattacgtattatctcgaccgcccggacgtgctggcgcgttttaccaccaaaattattgccgataaaatcaaatatcccttcctgctttccaatggtaaccgcgttgcgcaaggcgaactggaaaacggacgccattgggtacagtggcaggacccgttcccgaaaccgtgctacctgtttgcgctggtggcaggcgactttgatgtactgcgcgatacctttaccacgcgttctggtcgcgaagtagcactggagctgtacgtcgatcgcggtaaccttgatcgcgcgccgtgggcgatgacctcgctgaaaaactccatgaaatgggatgaagaacgctttggcctggagtatgacctcgacatctatatgatcgtcgcggtggatttcttcaatatgggcgcaatggagaataaggggctgaatatctttaactccaaatatgtgctgggccgcaacgacaccgccaccgacaaagattacctcgatattgaacgcgttatcggccatgaatatttccataactggaccggtaaccgagtgacctgtcgcgactggttccagctcagcctgaaagaaggtttaaccgtcttccgcgatcaggagttcagctctgaccttggttcccgcgcagttaaccgcatcaataatgtacgcaccatgcgcggattgcagtttgcagaagacgccagcccgatggcgcacccgatccgcccggatatggtcattgagatgaacaacttctacaccctgaccgtttacgagaagggcgcggaagtgattcgcatgatccacaccctgcttggcgaagaaaacttccagaaagggatgcagctttatttcgagcgtcatgatggtagtgcagcgacctgtgacgactttgtgcaggcgatggaagatgcgtcgaatgtcgatctctcccatttccgccgttggtacagccagtccggtacaccgattgtgaccgtcatagacgactactatccggaaaccgagcagtacaccctgaccatcagccagcgcacgccagccacgccggatcaggcagaaaaacagccgctgcatattccgtttgccatcgaactgtatgataacgaaggcaaagtgatcccgttgcagaaaggcggtcatccggtgaattccgtgctgaacgtcactcaggcggaacagacctttgtctttgataatgtctacttccagccggtgcctgcgctgctgtgcgaattctctgcgccagtgaaactggaatataagtggagcgggctgaccatcgactttaacgatcctgtcgcctgcttgcaaacctgccttgcttgccgccgagtttggctgcacattttccagtacaggttcaatttgcggcccacgaggacgaatccccagcgaagataccggatcttctttatcaggctcaaacgcccagtgacctatcgaattggctgctatttcgccaaccaccggacgtacgccaggcacaccaataataaaaaccagccagtaggcaaagatagcaaaaatgaaatttgcaaccggacctgcggcaataatcgccgctcgaatcgaactgcatcgtgttttctgacggcgctggagcaggacacgcagggcctggacggctggtggctctgctcgctgcatgggcgccagggcatcgtgcctgggaaccgcctcaagatcttggtgggcatgtatgataagaagccagcagggcctggccccggccctcccgccaccccggcccagcctcagcctggcctccatgccccagcgcctccggcctcccagtacacgcccatgctccccaacacctaccagccccagccagacagcgtctacctggtgcccactcccagcaaggctcagcaaggcctctaccaagtcccgggtcccagccctcagttccagtctcccccagccaagcagacatccaccttctcgaagcagacaccccatcacccgtttcccagcccggccacagatctgtaccatgtgcccccaggggcctggaggccctttctcaagatatttaccaggtgccccctttttgccgggatggggcatgacatctaccaggtccccccgtccatggacacacgcctcttggggagggcaccaaagccccccggcaaaaggaccttcaccgcttatgaacgcttgtcgacggccctgacggttgctcaggtttgcggcgtccagcggttatgtaactactattcggcgcgacttacgccgctccccgggcctgattccaccagggaaagtaatcatcggttggcacaaatcacgcaatatgcccgccaactggctagctcgccttctattatcgacaaccgatcgcgccagcatctgaatgacgtcggtcttactgcctgggactgtgtgatcattagccaaatcattggttttattggctttcaggcgcggacaattgcgacatttcaggcttatctcgggcatccggtacgctggttacccgggctggagatacaaaactacgccgacgcgtcactgtttgctgatgaatcattacgctggcgaagcagctatgaggctgcaacttaccgtgatagcaaatacaaagctggcttccacttctgcgggggctaccacatcagcgaggactgggtggtcaccgctgcccaccaggggtcaggccacccagacggcagcttggggaaacctgggaggtcccgtaccctcactgtgcagttcagcgtctttggtgttagcgtggtagttggcgacaatctcttccatcagcacatctttctgattgctggaaagcagaccttcaacgtagctcattttcagcggttcagcgggattgaacgttacaaccagtcagtactgaacgcggtgcgtgacgttgccgtcaacggcacggcgtctgcaaacgctcaacgacgagcgagaaatgcaggctgaacgcgtggaagccacgcgctttacccagcgcgctgccgaggccgcctatcagcgcggcttaaccagccgcttacaggccaccgaagcccggttgccagtgcttgccgaagagatgtcattactgatgctggacagccgccgggtgatccaaagcattcagttgatgaaatcgctgggcggcgggtatcaggcatgtcccgtcgtcgagaaaaaataa

SEQ ID NO: 25741 - DNA, 2253 bp, Homo sapiens; identical to SEQ ID NO: 4008
  SIMILAR (1555)..(2166): 981254mologous to Cloning vector pZC320 SopB,accession number U26464,Smith-Waterman Score=997.

SEQ ID NO: 25742 - DNA, 3069 bp, Homo sapiens; identical to SEQ ID NO: 7110
  SIMILAR (2293)..(3036): 961254mologous to Cloning vector pZC320 SopB,accession number U26464,Smith-Waterman Score=1172.

SEQ ID NO: 25743 - DNA, 1980 bp, Homo sapiens
  SIMILAR (1791)..(1195): 951254mologous to Cloning vector pZC320 SopB,accession number U26464,Smith-Waterman Score=932.
  misc_feature (1)...(1980): n = a,t,c or g
ctaaaagactccgttgctcatgactatgatgtcatagttattgacagcgcgcctaacctgggtatcggcacgattaatgtcgtatgtgctgctgatgtgctgattgttcccacgcctgctgagttgtttgactacacctccgcactgcagtttttcgatatgcttcgtgatctgctcaagaacgttgatcttaaagggttcgagcctgatgtacgtattttgcttaccaaatacagcaatagtaatggctctcagtccccgtggatggaggagcaaattcgggatgcctgtggactctaaaggacccccctggcttttcaagttccttaagaatggcctcaattttctcttacactcagttggaacacgagacctgtccaggttaagcaccattttatcgcccttatacaatactgtcgctccaggagcaaactgatgtcgtgagcttaaactagttcttgatgcagatgacgttttaagcacagaagttaaaagagtgataacttcttcagcttcaaatatcaccccagcttttttctgctcatgaaggttagatgcctgctgcttaagtaattcctctttatctgtaaaggctttttgaagtgcatcacctgaccgggcagatagttcaccggggtgagaaaaaagagcaacaactgatttaggcaatttggcggtgttgatacagcgggtaataatcttacgtgaaatattttccgcatcagccagcgcagaaatatttccagcaaattcattcttgcatcggcttgcataacgctgaccacgttcataagcacttgtttggggcgatatcgttacccaatgtttgataaaccaaggaaaagattcatagcctttttcatcgccggcatcctcttcagggcgataaaaaaccacttccttccccgcgaaactcttcaatgcctgccgtatatccttactggcttccgcagaggtcaatccgaatatttcagcatatttagcaacatggatctcgcagataccgtcatgttcctgtagggtgccatcagattttctgatctggtcaacgaacagatacagcatacgtttttgatcccgggagagactatatgccgcctcagtgaggtcgtttgactggacgattcgcgggctattcttacgtttcttgtgattgataaccgctgtttccgcatgacagatccatgtgaagtgtgacaagtttttagattgcacagttttaagcacagaagttaaaagagtgataacttcttcagcttcaaatatcaccccagcttttttctgctcatgaaggttagatgcctgctgcttaagtaattcctctttatctgtaaaggctttttgaagtgcatcacctgaccgggcagatagttcaccggggtgagaaaaaagagcaacaactgatttaggcaatttggcggtgttgatacagcgggtaataatcttacgtgaaatattttccgcatcagccagcgcagaaatatttccagcaaattcattctgcaatcggcttgcataacgctgaccacgttcataagcacttgttgggcgataatcgttacccaatctggataatgcagccatctgctcatcatccagctcgccaaccagaacacgataatcactttcggtaagtgcagcagctntacgacggcgactcccatcggcaatttctatgacaccagatactcttcgaccgaacgccggtgtctgttgaccagtcagtagaaaagaaaggatgagatcatccagtgcgtcctcagtaagcagctcctggtcacgttcattacctttatgggcagcaaccccgatcaccggtggaaatacgtcttcagcacgtcgcaatcgcgtaccaaacacatcacgcatatgattaatttgttcaattgtataaccaacacgttgctcaacccgtcctcgaatttccatatccgggtgcggggggcggcctgctttctcggcatctctgatagccttcat

SEQ ID NO: 25744 - DNA, 4289 bp, Homo sapiens; identical to SEQ ID NO: 21816
  SIMILAR (3499)..(3534): 1001254mologous to Cloning vector pSacBII SacB,accession number U09128,Smith-Waterman Score=69.
  misc_feature (1)...(4289): n = a,t,c or g

SEQ ID NO: 25745 - DNA, 2224 bp, Homo sapiens
  SIMILAR (1037)..(1531): 921254mologous to Cloning vector pSacBII SacB,accession number U09128,Smith-Waterman Score=803.
ggattttgccgatttcggaaccaccatcaaacaggattttcgcctgctggggcaaaccagcgtggaccgcttgctgcaactctctcagggccaggcggtgaagggcaatcagctgttgcccgtctcactgccccagcacactatccctgacgttttcatctggatgctcagcaacaacaggagagtggcctatgcccgcatcgcctccaaagacctcctctattcccctgtcgccgggcagatgggcaaacactgcggcaagatcaaaactcacttcctcaaaatccctaaacagcagcaaaacgaaaaataccaagtgcctcaattcgatcaatcaacgattaaaaatattgagtctgcaaaaggacttgatgtgtggaacagctggccgctgcaaaacgctgacggaacagtagctgaatacaacggctatcacgttgtgtttgctcttgcgggaagcccgaaagacgctgatgacacatcaatctacatgttttatcaaaaggattttcgcctgctggggcaaaccagcgtggaccgcttgctgcaactctctcagggccaggcggtgaagggcaatcagctgttgcccgtctcactggtgaaaagaaaaaccaccctggcgcccaatacgcaaaccgcctctccccgcgcgttggccgattcattaatgcagctggcacgacaggtttcccgactggaaagcgggcaggattttgccgatttcggaaccaccatcaaacaggattttcgcctgctggggcaaaccagcgtggaccgcttgctgcaactctctcagggccaggcggtgaagggcaatcagctgttgcccgtctcactggtgaaaagaaaaaccaccctggcgcccaatacgcaaaccgcctctccccgcgcgttggccgattcattaatgcagctggcacgacaggtttcccgactggaaagcgggcagaaaaggttcggacgcccaccggttcggatcctggaaattccaactgcaaagagtgtccggtttcggcaacctttacttggggcgggaaaatccgttttatattccgctgactattcgggtaaccattacggcaaacaaagcctgccatcagggcaggtaaatgggtcaaattctgatgacacactcaaaatcaacggagtggaagatcacaaaacgattttggacggagacggaaaaacatatcagaacgttcagcagtttatcgatgaaggcaattatacatccggcgacaaccatacgctgagagaccctcactacgttgaagacaaaggccataaataccttgtattcgaagccaacacgggaacagaaaacggataccaaggcgaagaatctttatttaacaaagcgtactacggcggcggcacgaacttcttccgtaaagaaagccagaagcttcagcagagcgctaaaaaacgcgatgctgagttagcgaacggcgccctcggtatcatagagttaaataatgattacacattgaaaaaagtaatgaagccgctgatcacttcaaacacgatcagaaaatctgatggcaccctacaggaacatgacggtatctgcgagatccatgttgctaaatatgctgaaatattcggattgacctctgcggaagccagtaaggatatacggcaggcattgaagagtttcgcggggaaggaagtggttttttatcgccctgaagaggatgccggcgatgaaaaaggctatgaatcttttccttggtttatcaaacgtgcgcacagtccatccagagggctttacagtgtacatatcaacccatatctcattcccttctttatcgggttacagaaccggtttacgcagtttcggcttagtgaaacaaaagaaatcaccaatccgtatgccatgcgtttatacgaatccctgtgtcagtatcgtaagccggatggctcaggcatcgtctctctgaaaatcgactggatcatagagcgttaccagctgcctcaaagttaccagcgtatgcctgacttccgccgccgcttcctgcaggtctgtgttaatgagatcaacagcagaactccaatgcgcctctcatacaggatgggggtgagaggcaaagttatatttattaaccagtgcagaacaactagtaaggaaaatgaaaaacggattccaaatttaccctgtgtagcctttggatacccagtggtagcatcgcaattttccagaagtactttcatcgaattgtaa

SEQ ID NO: 25746 - DNA, 2640 bp, Homo sapiens
  SIMILAR (1)..(678): 981254mologous to Cloning vector pZC320 SopA,accession number U26464,Smith-Waterman Score=1163.
  misc_feature (1)...(2640): n = a,t,c or g
atggaaattcgaggacgggttgagcaacgtgttggttatacaattgaacaaattaatcatatgcgtgatgtgtttggtacgcgattgcgacgtgctgaagacgtatttccaccggtgatcggggttgctgcccataaaggtggcgtttacaaaacctcagtttctgttcatcttgctcaggatctggctctgaaggggctacgtgttttgctcgtggaaggtaacgacccccagggaacagcctcaatgtatcacggatgggtaccagatcttcatattcatgcagaagacactctcctgcctttctatcttggggaaaaggacgatgtcacttatgcaataaagcccacttgctggccggggcttgacattattccttcctgtctggctctgcaccgtattgaaactgagttaatgggcaaatttgatgaaggtaaactgcccaccgatccacacctgatgctccgactggccattgaaactgttgctcatgactatgatgtcatagttattgacagcgcgcctaacctgggtatcggcacgattaatgtcgtatgtgctgctgatgtgctgattgttcccacgcctgctgagttgtttgactacccctccgcactgcagttttttcatatgctttgtgatcttgtcaagaacgttgatcttaaagggttcgagcctggagaattggccccgctctatggctgctggggcctgcgcactggaatcgccgtggcctgcgcaccccaccatgccagtttgaacctccatggcctcaaccagattcggaatgtcaaaaagcagagtgtctatttgatgaatttgaggaaatcgggaactttgggccacccaggctctgtagatgagaccacctatgaaagactagcggaggaatcactggactctttagcagagttttttgaagaccttgcagacaagccatacacgtttgaggactatgatgtttcctttgggagtggtgtcttaactggtaaactgggtagagatctagcaacctacgtgatcaacaagcagacaccaaacaagcaaatctggttatcttctccatccagtggactcaagcgttatgactggactgagaaaaactgggtgtactcccacgattgcgtgtccctccatgatgtgctcgctgcagagctcactaaagccttaaaaaccaaactggacttgtcttccttggcctattctggaaaagagcttgatgcccagcccggctattatatgctacatgcacagtatatgcttcgtccaccactatcttcacccatgcagcatcgggccccggagaccggccccacctcccgaaactcggtactaaatgcggtcactccgcctgcgccgaccaccccccctagcccattgttcgactctagaggatcccccagacggaaaacatatcagaacgttcagcagtttatcgatgaaggcaattatacatccggcgacaaccatacgctgagagaccctcactacgttgaagacaaaggccataaataccttgtattcgaagccaacacgggaacagaaaacggataccaaggcgaagaatctttatttaacaaagcgtactacggcggcggcacgaacttcttccgtaaagaaagccagaagcttcagcagagcgctaaaaaacgcgatgctgagttagcgaacggcgccctcggtatcatagagttaaataatgattacacattgaaaaaagtaatgaagccgctgatcacttcaaacacggtaactgatgaaatcgagcgcgcgaatgttttcaaaatgaacggcaaatggtacttgttcactgattcacgcggttcaaaaatgacgatcgatgnaggatccccggnaaaaatccgtttattctacactgactattccggtaaacattacggcaaacaaagcctgacaacagcgcaggtaaatgtgtcaaaatctgatgacacactcaaaatcaacggagtggaagatcacaaaacgatttttgacggagacggaaaaacatatcagaacgttcagcagtttatcgatgaaggcaattatacatccggcgacaaccatacgctgagagaccctcactacgttgaagacaaaggccataaataccttgtattcgaagccaacacgggaacagaaaacggataccaaggcgaagaatctttatttaacaaagcgtactacggcggcggcacgaacttcttccgtaaagaaagccagaagcttcagcagagcgctaaaaaacgcgatgctgagttagcgaacggcgccctcggtatcatagagttaaataatgattacacattgaaaaaagtaatgaagccgctgatcacttcaaacacggctgccgccaaccaggagagcagccatgtgcagcagcaggcccttgctctggagcagcagttcttggagcgcacccaggcgctagaagcccagatagtggccctggagagaatgcgggcagctgaccagaccaccgcaaagcaagggatgtgcacacaggtgcatctgaccaacaccagccgccacgctggtagaccgtcaaaatgtcagttctgcagtactcggagacaaaggcatagactatcagatcctaaacaggatttaggaaacagacgattttcccctccaccttga

SEQ ID NO: 25747 - DNA, 3501 bp, Homo sapiens
  SIMILAR (3501)..(2845): 991254mologous to synthetic construct chloramphenicol acetyltransferase,accession number A02739,Smith-Waterman Score= 1192.
tcagcggaagataagccacaggagaattcccgaaccggtcaattggcagatgtgcacccccagcactgtggtggaattcggtagtgtgatgtctccagctttgttcttctggcttaagtttgacttggcgatgcaggctcttttttggttccatatgaactttaaagtagttttttccaattctgtgaagaaagtcattggtagcttgatggggatggcattgaatctgtaaattaccttgggctgtatggccattttcacgatattgattcttcctacccatgagcatggaatgttcttccatttgtttgtatcctcttttatttccttgagcagtggtttgtagttctccttgaagaggtccttcatatcccttgtaagttggattcctaggtattttattctctttgaagcaattgtgaatgggagttcactcatgatttggctctctgtttgtctgttgttggtgtataagaatgcttgtgatttttgtacattgattttgtatcctgagactttgctgaagttgcttatcagcttaaggagattttgggctgagacaatggggttttctacatacacaatcatgtcgtctgcaaacagggacaatttgacttcctcttttcctaattgaataccctttatttccttctcctgcctaattgccctggccagaacttccaacagtgaaatattttccgcatcagccagcgcagaaatatttccagcaaattcattctgcaatcggcttgcataacgctgaccacgttcataagcacttgttgggcgataatcgttacccaatctggataatgcagccatctgctcatcatccagctcgccaaccagaacacgataatcactttcggtaagtgcagcagctttacgacggcgactcccatcggcaatttctatgacaccagatactcttcgaccgaacgccggtgtctgttgaccagtcagtagaaaagaagggatgagatcatccagtgcgtcctcagtaagcagctcctggtcacgttcattacctgaccatacccgagaggtcttctcagcactatcacccccggagcaagggcaagtaatgggatacccgcgagccattactcctacgcgcgcaattaacgaatccaccatcggggcagctggtgtcgataacgaagtatcttcaaccggttgagtattgagcgtatgtttgggaataacaggcgcacgcttcattaatctatctcccagccgtgggttaatcagacgatcgacaattttctttgccagaagggttccaaataggaagaggcattctccaggcaccagttgaagagcgttgttcattggcctgccaccattaaaacatgttacatccgtagggaaggtgtgactaagactgggcagctgaagcagttgcttgttttccccaaaacagggaggaggaggggaagtgtaatgggttctagggggggccttgccaacattcttctttacttccccccccggttcacttatgggtatggtggaattcgcactccactcatgctgaatcgccagcggcatcagcaccttgtcgccttgcgtataatatttgcccatggtgaaaacgggggcgaagaagttgtccatattggccacgtttaaatcaaaactggtgaaactcacccagggattggctgagacgaaaaacatattctcaataaaccctttagggaaataggccaggttttcaccgtaacacgccacatcttgcgaatatatgtgtagaaactgccggaaatcgtcgtggtattcactccagagcgatgaaaacgtttcagtttgctcatggaaaacggtgtaacaagggtgaacactatcccatatcaccagctcaccgtctttcattgccatacggaactccggatgagcattcatcaggcgggcaagaatgtgaataaaggccggataaaacttgtgcttatttttctttacggtctttaaaaaggccgtaatatccagctgaacggtttgggaagcgcaaggggtcagggagttccctttccgagtcaaagaaaggggtgacggacggcacctggaaaatcgtgtcactcccacctgaatactgcacttttccgaccggcttaaaaaacggcgcaccacgagattatatcccgcacctggctggaagggtcctacgcccacggagtctcgctgattgctagcacagcagtctgagatcaaagccccgccctgccactcatcgcagtactgttgtaattcattaagcattctgccgacatggaagccatcacaaacggcatgatgaacctgaatcgccagcggcatcagcaccttgtcgccttgcgtataatatttgcccatggtgaaaacgggggcgaagaagttgtccatattggccacgtttaaatcaaaactggtgaaactcacccagggattggctgagacgaaaaacatattctcaataaaccctttagggaaataggccaggttttcaccgtaacacgccacatcttgcgaatatatgtgtagaaactgccggaaatcgtcgtggtattcactccagagcgatgaaaacgtttcagtttgctcatggaaaacggtgtaacacgggtgaacactatcccatatcaccagctcaccgtctttcattgccatacggaactccggatgagcattcatcaggcgggcaagaatgtgaataaaggccggataaaacttgtgcttatttttctttacggtctttaaacaggccgtaatatccagctgaacggtcattttcacccatgctgaacagttgctgagctggtgtggtgggtctgggacacttttggaaaatttatgaaaattcccaggcgccccgccctgccactcatcgcagtactgttgtaattcattaagcattctgccgacatggaagccatcacaaacggcatgatgaacctgaatcgccagcggcatcagcaccttgtcgccttgcgtataatatttgcccatggtgaaaacgggggcgaagaagttgtccatattggccacgtttaaatcaaaactggtgaaactcacccagggattggctgagacgaaaaacatattctcaataaaccctttagggaaataggccaggttttcaccgtaacacgccacatcttgcgaatatatgtgtagaaactgccggaaatcgtcgtggtattcactccagagcgatgaaaacgtttcagtttgctcatggaaaacggtgtaacaagggtgaacactatcccatatcaccagctcaccgtctttcattgccatacggaactccggatgagcattcatcaggcgggcaagaatgtgaataaaggccggataaaacttgtgcttatttttctttacggtctttaaacaggccgtaatatccagctgaacggtctggttataggtacattgagcaactgactgaaatgcctcaaaatgttctttacgatgccattgggatatatcaacggtggtatatgcagtgattttcttctccat

SEQ ID NO: 25748 - DNA, 2928 bp, Homo sapiens
  SIMILAR (1561)..(2277): 931254mologous to Cloning vector pZC320 SopA,accession number U26464,Smith-Waterman Score=1179.
atggggctggcactggatctggactccggactgctgggtaccctcatgcctctctgcctgagatgccacaggacccagaccaaacatgccgctgcatgccagggccagcatcctagggtccaggctgaggatgtcaccttcctctaccacccctgtgcccatccctggctgaagctccagcttgccctcctggcctatgcttgtatggctaacccttccctcacccctgacttcagcctcacgcaggatcgggcactggctctgagctttgctctgcggagctggcggtctccctggcacagagaggtagaaggccagccggtcagtgagctcatattggcactcaaccagcctttccgccagctcatggtgccccgcctgcctgtgaggagggggtatggctcagacctgcagcagcagccctcacccacacccccacccacccacactgcacccttcagccgaccctcacctggcatagtcaatgggtgtgcggccattaacatcaggggagccaggtctaaagaactccaaataaaaaagcagtttcaggatacctgcaaaatccaaaccagacagtacaaagcattaagaaatcacctgctggagactacaccaaagagtgagcacaaagctgttctgaaacggctcaaggaggaacagacccggaaattagctatcttggctgagcagtatgatcacagcattaatgaaatgctctccacacaagccgcctccttggagctgctaggtgtcccaggggcagccagggtgcagcttgtgggtggggaggtgcgctcacgcaatgcgtattcactgcacactctgctcctcttagcaactacactcgagcgtgcggacaggcaacctggagacatgtctgcgcctgctctccctgggttcttcgctagccaacacaacagcctagaggatccccctccacatcaaggaaatcctcagccctgggagtggcttccccagaaacagcagccccaagcctccgagagtcagtcggagaaaaggacacactcaggcgccctggacagggatgcccgtccgacctacaaggaacgcctcgtaaaccggggtcacaccgacaaatctgaagcgggtttgccaggggagtgtacccgtcttccccagcctgtgccacccggttcacaaggatttcaatttccgaccttaaaattcgctccaacgatctcatccaaacgctgcaaacagcggcataacaaactatggagatctcattcagatagtgacctctcagaccaccacgaacccatctgcaaacctgggctagaactcaacaagaaggatatcaccacctcagcagaccagattgctgaggtgaagaccatggagagtcacccacccatacctcctgtctttgtggaacatatggtcccacaagatgcaaatcagaaaggcctgtgtaccaaagaaagaatgatctgcttggagtttacttctagggaatttcatgctggacagattgaggatgaattaaacttaaatgacatcaatggatgctcatcagggtcgactctagaggatccccagtttaatgatgacagcccggaagcgaggaaaataacccggcgctggagaataggtgaagcagcggatttagttggggtttcttctcaggctatcagagatgccgagaaagcagggcgactaccgcacccggatatggaaattcgaggacgggttgagcaacgtgttggttatacaattgaacaaattaatcatatgcgtgatgtgtttggtacgcgattgcgacgtgctgaagacgtatttccaccggtgatcggggttgctgcccataaaggtggcgtttacaaaacctcagtttctgttcatcttgctcaggatctggctctgaaggggctacgtgttttgctcgtggaaggtaacgacccccagggaacagcctcaatgtatcacggatgggtaccagatcttcatattcatgcagaagacactctcctgcctttctatcttggggaaaaggacgatgtcacttatgcaataaagcccacttgctggccggggcttgacattattccttcctgtctggctctgcaccgtattgaaactgagttaatgggcaaatttgatgaaggtaaactgcccaccgatccacacctgatgctccgactggccattgaaactgttgctcatgactatgatgtcatagttattgacagcgcgcctaacctggaggatccccgcgtaggagtaatggctcgcggtaatgccattactttgcctgtatgtggtcgggatgtgaagtttactcttgaagtgctccggggtgatagtgttgagaagacctctcgggtatggtcaggtaatgaacgtgaccaggagctgcttactgaggacgcactggatgatctcatcccttcttttctactgactggtcaacagacaccggcgttcggtcgaagagtatctggtgtcatagaaattgccgatgggagtcgccgtcgtaaagctgctgcacttaccgaaagtgattatcgtgttctggttggcgagctggatgatgagcagatggctgcattatccagattgggtaacgattatcgcccaacaagtgcttatgaacgtggtcagcgttatgcaagccgattgcagaatgaatttgctggaaatatttctgcgctggctgatgcggaaaatatttcacgtaagattattacccgctgtatcaacaccgccaaattgcctaaatcagttgttgctcttttttctcaccccggtgaactatctgcccggtcaggtgatgcacttcaaaaagcctttacagataaagaggaattacttaagcagcaggcatctaaccttcatgagcagaaaaaagctggggtgatatttgaagctgaagaagttatcactcttttaacttctgtgctttaa

SEQ ID NO: 25749 - DNA, 2112 bp, Homo sapiens; identical to SEQ ID NO: 4012
  SIMILAR (763)..(1458): 991254mologous to Cloning vector pZC320 SopA,accession number U26464,Smith-Waterman Score=1213.
  misc_feature (1)...(2112): n = a,t,c or g

SEQ ID NO: 25750 - DNA, 3345 bp, Homo sapiens; identical to SEQ ID NO: 5209
  SIMILAR (2842)..(3342): 991254mologous to Cloning vector pZC320 SopB,accession number U26464,Smith-Waterman Score=816.
  misc_feature (1)...(3345): n = a,t,c or g

SEQ ID NO: 25751 - DNA, 2076 bp, Homo sapiens
  SIMILAR (949)..(1254): 871254mologous to Cloning vector pZC320 SopA,accession number U26464,Smith-Waterman Score=435.
ttaaagtaattcctctttatcggtaaaggctttttgaagggcatcacctgaccgggccagatagttcaacgggggtgagaaaaaaagagcaacacctgatttaggcaatttggcggtgttgatacagcgggtaataatcttacgtgaaatattttccgcatcagccagcgcagaaatatttccagcaaattcattctgcaatcggcttgcataacgctgaccacgttcataagcacttgttgggcgataatcgttacccaatctggataatgcagccatctgctcatcatccagctcgccaaccagaacacgataatcactttcggtaagtgcagcagctttacgacggcgactcccatcggcaatttctatgacaccagatactcttcgaccgaacgccggtgtgacattaatcgtgccgatacccaggttaggcgcgctgtcaataactatgacatcatagtcatgagcaacagtttcaatggccagtcggagcatcaggtgtggatcggtgggcagtttaccttcatcaaatttgcccattaactcagtttcaatacggtgcagagccagacaggaaggaataatgtcaagccccggccagcaagtgggctttattgcataagtgacatcgtccttttccccaagatagaaaggcaggagagtgtcttctgcatgaatatgaagatctggtacccatccgtgatacattgaggctgttccctgggggtcgttaccttccacgagcaaaacacgtagccccttcagagccagatcctgcaggaagcggcggcggaagtcaggcatacgctggtaactttgaggcagctggtaacgctctatgatccagtcgattttcagagagacgatgcctgagccatccggcttacgatactgacacagggattcgtataaacgcatggcatacggattggtgatttcttttgtttcactaagccgaaactgcgtaaaccggttctgatgctccgactggccattgaaactgttgctcatgactatgatgtcatagttattgacagcgcgcctaacctgggtatcggcacgattaatgtcgtatgtgctgctgatgtgctgattgttcccacgcctgctgagttgtttgactacacctccgcactgcagtttttcgatatgcttcgtgatctgctcaagaacgttgatcttaaagggttcgagcctgatgtacgtattttgcttaccaaatacagcaaggggagtttctcgaagttgccgcagggtggtcaaagtgttgattgggacccaggtccccacttcatcaaatttgcccattaactcagtttcaatacggtgcagagccagacaggaaggaataatgtcaagccccggccagcaagtgggctttattgcataagtgacatcgtccttttccccaagatagaaaggcaggagagtgtcttctgcatgaatatgaagatctggtacccatccgtgatacattgaggctgttccctgggggtcgttaccttccacgagcaaaacacgtagccccttcagagccagatcctgagcaagatgaacagaaactgaggttttgtaaacgccacctttatgggcagcaaccccgatcaccggtggaaatacgtcttcagcacgtcgcaatcgcgtaccaaacacatcacgcatatgattaatttgttcaattgtataaccaacacgttgctcaacccgtcctcgaatttccatatccgggtgcggtagtcgccctgctttctcggcatctctgatagcgacattaatcgtgccgatacccaggttaggcgcgctgtcaataactatgacatcatagtcatgagcaacagtttcaatggccagtcggagcatcaggtgtggatcggtgggcagtttaccttcatcaaatttgcccattaactcagtttcaatacggtgcagagccagacaggaaggaataatgtcaagccccggccagcaagtgggctttattgcataagtgacatcgtccttttccccaagatagaaaggcaggagagtgtcttctgcatgaatatgaagatctggtacccatccgtgatacat

SEQ ID NO: 25752 - DNA, 2313 bp, Homo sapiens
  SIMILAR (858)..(130): 971254mologous to Cloning vector pSacBII SacB,accession number U09128,Smith-Waterman Score=1261.
  misc_feature (1)...(2313): n = a,t,c or g
tcagaccgacgatacgagtgggaccgtggtcccagtctgattatcagaccgacgatacgagtgggaccgtggtcccagactaataatcagaccgacgatacgagtgggaccgtggtcccagatcatggcctttgtcttaacgtagtgagggtctctcagcgtatggttgtcgccggatgtataattgccttcatcgataaactgctgaacgttctgatatgtttttccgtctccgtcaaaaatcgttttgtgatcttccactccgttgattttgagtgtgtcatcagattttgacacatttacctgcgctgttgtcaggctttgtttgccgtaatgtttaccggaatagtcagtgtagaataaacggatttttccgtcagatgtaaaggttgcagaaccggaccattcttgcgtctgatctttcaggatcggatcgttggcgtcgaacttatcgctgtctttaaagacacggcccgcgtttttccagctgtcgattgagttgtcgccgaccttttgataaaacatgtagattgatgtgtcatcagcgtctttcgggcttcccgcaagagcaaacacaacgtgatagccgttgtattcagctactgttccgtcagcgttttgcagcggccagctgtcccacacatcaagtccttttgcagactcaatatttttaatcgttgattgatcgaattgaggcacttggtatttttcgttttgctgctgtttnaggatctgcagcatatcatggcgtgtaatatgagagacgccgtacgtttctttgtatgcttttttggtattttctttcgcgaaggcttgattcgctcctcctgccagaagtgcagtcgtaaaagtcagaacgcctttcgtgcatgcatccaggtctactgtagnagatcccctcatggcctttgtcttcacgtagtgagggtctctcagcgtatggttgtcgccgggtgtataattgccttcatcgataaactgctgaacgttctgatatgtttttccgtctccgtcaaaaatcgttttgtgatcttccactccgttgattttgagtgtgtcatcagattttgacacatttacctgcgctgttgtcaggctttgtttgccgtaatgtttaccggaatagtcagtgtagaataaacggatttttccgtcagatgtaaaggttgcagaaccggaccattcttgcgtctgatctttcaggatcggatcgttggcgtcgaacttatcgctgtctttaaagacacggcccgcgtttttccagctgtcgattgagttgtcgccgaccttttgataaaacatgtagattgatgtgtcatcagcgtctttcgggcttcccgcaagagcaaacacaacgtgatagccgttgtattcagctactgttccgtcagcgttttgcagcggccagctgtcccacacatcaagtccttttgcagactcaatatttttaatcgttgattgatcgaattgaggcacttggtatttttcgttttgctgctgtttagggatctgcagcatatcatggcgtgtaatatgagagacgccgtacgtttctttgtatgctttttggttattttctttcgcgaaggcttgagtcgctcctcgtatatgagtgtaggcagttaaaaacagccagatcacatcttgaatggttttctgtttagaattttcttccactagatactctaaatcatcattctcaagttcaaacttccacaaatcatcgatcgtcatttttgaaccgcgtgaatcagtgaacaagtaccatttgccgttcattttgaaaacattcgcgcgctcgatttcatcagttaccgtgtttgaagtgatcagcggcttcattacttttttcaatgtgtaatcattatttaactctatgataccgagggcgccgttcgctaactcagcatcgcgttttttagcgctctgctgaagcttctggctttctttacggaagaagttcgtgccgccgccgtagtacgctttgttaaataaagattcttcgccttggtatccgttttctgttcccgtgttggcttcgaatacaaggtatttatggcctttgtcttcaacgtagtgagggtctctcancgtatggttgtcgccggatgtataattgccttcatcgataaactgctgaacgttctgatatgtttttccgtctccgtcaaaaatcgttttgtgatcttccactccgttgattttgagtgtgtcatcagattttgacacatttacctgcgctgttgtcaggctttgtttgccgtaatgtttaccggaatagtcagtgtaaaataacggaattttccgagccat

SEQ ID NO: 25753 - DNA, 3810 bp, Homo sapiens
  SIMILAR (3450)..(3542): 351254mologous to Homo sapiens similarto human ZFY protein,accession number D86966,Smith-Waterman Score=48.
atgactgagtacaagatccaccagcgctggttcgccaagttgaagcgcaaggctgcggcaaagctgcgcgagatcgagcagagctggaagcacgagaaggcggtgcctggggaggtcgacactctgcgcaagctcagccccgaccgcttccagcgaaagcggcgattgagcggggctcaagcgccgggcccctcggtccctaccagggagcctgagggtgggaccctggcggcttggcaggagggagagactgagactgctcagcactcaggtttgggcctgatcaacagttttgcttctggagaagtgaccaccaacggggaggctgcccccgagaatggagaggacggagagcatggcttgctgacatacatctgtgacgccatggagctggggcctcagagagccctcaaagaggagagtggggccaagaagaaaaagaaagatggggagtgggattttcccgatttcggaaccaccatcaaacaggattttcgcctgctggggcaaaccagcgtggaccgcttgctgcaactctctcagggccaggcggtgaagggcaatcagctgttgcccgtctcactggtgaaaagaaaaaccaccctggcgcccaatacgcaaaccgcctctccccgcgcgttggccgattcattaatgcagctggcacgacaggtttcccgactggaaagcgggcacccttgccagcatccagccatgggggatatgaaaaccccagattttgatgaccttctggctgcctttgacatcccagaccccaccagccttgatgccaaggaggccatccagacacccaggacgcctcatgctcccaagcacagccgcccccagaggggaagtgtggaccaggcggaaggagaaacatgccgagggccacagtcaccaggcccagtcgaggccaagcaggaggccagcccgttccagtgccccaaggaggagcggccagggggagtgccgtgtatggatcagggtggctgtcctctagctggcctgagccaggaggtacccacgatgccttctcttcctggaactgggctgacagctagcccaaaggcggggccgtgtagcaccccgacttctcagcacgggagcacagccaccttcctgccctctgaggatcaggtcctgatgagttctgccccaacactgcacctggggctggggacccccactcagagtcacccaccagaaaccatggccaccagcagtgagggggcctgcgcccaggcaccagatgtggaggggcggaccccaggtccccggagctgtgaccctggcctcatagattccctgaagaactacctgcttctgctgctgaagctgtccagcacagagacaagtggagcagggggagagtcccaggtgggggcagccaccggaggtctggtgccctcagccactctgacacccactgtggaagtggctggaaggagacatgaacatgaacatcaaaaaaattgtaaaacaagccacagttctgacttttacgactgcattctggcaggaggagcgactcaagccttcgcgaaagaaaataaccaaaaagcatacaaagaaacgtacggcgtctctcatattacacgccatgatatgctgcagatccctaaacagcagcaaaacgaaaaataccaagtgcctcaattcgatcaatcaacgattaaaaatattgagtctgcaaaaggacttgatgtgtgggacagctggccgctgcaaaacgctgacggaacagtagctgaatacaacggctatcacgttgtgtttgctcttgcgggaagcccgaaagacgctgatgacacatcaatctacatgttttatcaaaaggtcggcgacaactcaatcgacagctggaaaaacgcgggccgtgtctttaaagacagcgataagttcgacgccaacgatccgatcctgaaagatcagacgcaagaatggtccggttctgcaaccttcacatctgacggaaaaatccgtttattctacactgactattccggtaaacattacggcaaacaaagcctgacaacagcgcaggtaaatgtgtcaaaatctgatgacacactcaaaatcaacggagtggaagatcacaaaactatttttgacggagacggaaaaacatatcagaacgttcagcagtttatcgatgaaggcaattatacgggggatcctctagaggcggaaacagcggttatcaatcacaagaaacgtaaaaatagcccgcgaatcgtccagtcaaacgacctcactgaggcggcatatagtctctcccgggatcaaaaacgtatgctgtatctgttcgttgaccagatcagaaaatctgatggcaccctacaggaacatgacggtatctgcgagatccatgttgctaaatatgctgaaatattcggattgacctctgcggaagccagtaaggatatacggcaggcattgaagagtttcgcggggaaggaagtggttttttatcgccctgaagaggatgccggcgatgaaaaaggctatgaatcttttccttggtttatcaaacgtgcgcacagtccatccagagggctttacagtgtacatatcaacccatatctcattcccttctttatcgggttacagaaccggtttacgcagtttcggcttagtgaaacaaaagaaatcaccaatccgtatgccatgcgtttatacgaatccctgtgtcagtatcgtaagccggatggctcaggcatcgtctctctgaaaatcgactggatcatagagcgttaccagctgcctcaaagttaccagcgtacgcctgacttccgccgccgcttcctgcaggtctgtgttaatgagatcaacggggcggttataggaatcccttgtgtcagtattcgaaagccggatggctcaggcatcgtctctattaaaatcgcctggatcatagagcgttaccagccgccccaaagttaccagcgtatgcctgacttccgccgccgcttcctgcagagtaggcctgcatgcatgcacgactggctctgtgcagaggccctggcatggagcatacagacagcatcttaccttgtgacgatgcaggtgaacctgacgtcgctgtcctcggacacagaccgggacttgagcgtggtctcaaatagcggctgggtctcctctggctccttagtgagattcaacaccattaagacatcatcaggggaaatcaaacggactgtcccaaggatcctgccagatcctgatgatccaaggagcgccattgcagaggcccccagcgagatgccagggcatgaggtgcctgtggaagagcactttcctgaggcaggcacaaattcagggagcccccagggggccaggaaaggggacgagagcatgacaaaggccagtgactcgtcatctcccagctgcagttctgggccccgggtcccaaagggggctgccccaggctcacagacaggcaagaagcaacagagcacagcactgcaggcatccaccctggcccctgccaacctcctgcccaaagccgtgcacttggccaacctgaacctcgtcccccacagtgttgctgcatcagtgacagccaagtcttcagtgcaaagacggagccagccacagcttacacaaatgtcggtgcccctggtccaccaggtgaaaaaggctgccccactgattgtagaggtcttcaacaaggtccttcacagctccaaccccgtgcccctctatgcgccaaatctcagcccgcctgcggacagcaggatccacgtgccggccagtgggtactgctgcctggagtgtggagacgcatttgcctcacccagagcctga

SEQ ID NO: 25754 - DNA, 2357 bp, Homo sapiens; identical to SEQ ID NO: 5211
  SIMILAR (252)..(1034): 861254mologous to Cloning vector pSacBII SacB,accession number U09128,Smith-Waterman Score=1208.

SEQ ID NO: 25755 - DNA, 2616 bp, Homo sapiens
  SIMILAR (1633)..(2601): 771254mologous to Cloning vector pZC320 SopA,accession number U26464,Smith-Waterman Score=1251.
  misc_feature (1)...(2616): n = a,t,c or g
atgcgtgggcaggttggggccccaggaaaggccagcagacagggggccactcagataggacaggccttatcccctgggcaagacggccatgctctgtccaggtctaacactacccaaaagctaaagccagctaaaggagcttggcaagccttggaggatgagcctccctggccatactccactacaacccttcctgaaccaaattctttgggctccatacaggctggcatccttcccctgccaccttcccaaccaactcttcctgctagcttaagtgtccatgggatcgtgggttgtgcaccagaattccagagggattttgccgatttcggaaccaccatcaaacaggattttcgcctgctggggcaaaccagcgtggaccgcttgctgcaactctctcagggccaggcgggattttgccgatttcggaaccaccatcaaacaggattttcgcctgctggggcaaaccagcgtggaccgcttgctgcaactctctcagggccaggcggtgaagggcaatcagctgttgcccgtctcactggtgaaaagaaaaaccaccctggcgcccaatacgcaaaccgcctctccccgcgcgttggccgattcattaatgccagctggcacgacaggtttcccgactggaaagcgggcagtgagcgcaacgcaattaatgaattcaagagagcagaaaaaataacagaagtgatcatcaagcctctgctcatgtcacatccaatgacattccatcaggcaatcaatgatgcagccaagcccatattgggaacagccaagcctgttcccaatatgaacagggctgggaaatatacaccacaaaatctagagaaagggccctgtatagaattcagattagttagaggcctagaagcaaagaaggatggtcatagcctgtccagaagaaaatcacctttgtcttacatgacaactgcttcggggaaagctattatagtttccttagccaattcaggattaattcactctgaaaagcagagaggtcacttccacttggactcttgttccaaactggaacaacactcaaccctatctcgggctattcttttgatttataagggattttgccgatttcggaaccaccatcaaacaggattttcgcctgctggggcaaaccagcgtggaccgcttgctgcaactctctcagggccaggcggtgaagggcaatcagctgttgcccgtctcactggtgaaaagaaaaaccaccctggcgcccaatacgcaaaccgcctctccccgcgcgttggccgattcattaatgcagctggcacgacaggtttcccgactggaaagcgggcaaaccggtttacgcagtttcggcttagtgaaacaaaagaaatcaccaatccgtatgccatgcgtttatacgaatccctgtgtcagtatcgtaagccggatggctcaggcatcgtctctctgaaaatcgactggatcatagagcgttaccagctgcctcaaagttaccagcgtatgcctgacttccgccgccgcttcctgcagggattttgccgatttcggaaccaccatcaaacaggattttcgcctgctggggcaaaccagcgtggaccgcttgctgcaactctctcagggccaggcggtgaagggcaatcagctgttgcccgtctcactggtgaaaagaaaaaccaccctggcgcccaatacgcaaaccgcctctccccgcgcgttggccgattcattaatgcagctggcacgacaggtttcccgactggaaagcgggcagtgagcgcaacgccaattaatgcctccgggcctgtgatatggttagctgtgtccccaccaaatctcaacttgaattgtatcttccagaatgcccacgtgttgtgggagggacccatggggaggggttacggtgttttgctcgtggaaggtaacgacccccagggaacagcctcaatgtatcacggatgggtaccagatcttcatattcatgcagaagacactctcctgcctttctatcttggggaaaaggacgatgtcacttatgcaataaagcccacttgctggccggggcttgacattattccttcctgtctggctctgcaccgtattgaaactgagttaatgggcaaatttgatgaaggtaaactgcccaccgatccacacctgatgctccgactggccattgaaactgttgctcatgactatgatgtcatagttattgacagcgcgcctaacctgggtatcggcacgattaatgtcgtatgtgctgctgatgtgctgattgttcccacgcctgctgagttgtttgactacacctccgcactgcagtttttcgatatgcttcgtgatctgctcaagaacgttgatcttaaagggttcgagcctgatgtacgtattttgcttaccaaatacagcaatagtaatggctctcagtccccgtggatggaggagcaaattcgggatgcctggggaagcatggttctaaaaaatgttgtacgtgaaacggatgaagttggtaaaggtcagatccggatgagaactgtttttgaacaggccattgatcaacgctcttcaactggtgcctggagaaatgctctttctatttgggaacggggttttctntag

SEQ ID NO: 25756 - DNA, 2499 bp, Homo sapiens; identical to SEQ ID NO: 4017
  SIMILAR (1816)..(2496): 971254mologous to Cloning vector pZC320 SopB,accession number U26464,Smith-Waterman Score=1087.

SEQ ID NO: 25757 - DNA, 3198 bp, Homo sapiens; identical to SEQ ID NO: 10652
  SIMILAR (1)..(1062): 961254mologous to Cloning vector pZC320 SopA,accession number U26464,Smith-Waterman Score=1749.
  misc_feature (1)...(3198): n = a,t,c or g

SEQ ID NO: 25758 - DNA, 5277 bp, Homo sapiens
  SIMILAR (3295)..(4938): 931254mologous to Homo sapiens putative p150,accession number U93563,Smith-Waterman Score=2703.
gttctttttagaacagtggctatgatggttccaaactatgcgcttatagcagaaatctccctctactcttacggatttttgaatgcaagacctctgtctgtgaaaatagtaatgacctataggctttgctcagagcagctctcatcgcaatttcattacgactatggaatgcgagcagtaaaagccgttttagtggctgctggcaatctaaaactaaaatacccaaatgaaaatgaagatatactttgtgacaatctaaaaacttgtcacacttcacatggatctgtcatggcggaaacagcggttatcaatcacaagaaacgtaaaaatagcccgcgaatcgtccagtcaaacgacctcactgaggcggcatatagtctctcccgggatcaaaaacgtatgctgtatctgttcgttgaccagatcagaaaatctgatggcaccctacaggaacatgacggtatctgcgagatccatgttgctaaatatgctgaaatattcggattgacctctgcggaagccagtaaggatatacggcaggcattgaagagtttcgcggggaaggaagtggttttttatcgccctgaagaggatgccggcgatgaaaaaggctatgaatcttttccttggtttatcaaacgtgcgcacagtccatccagagggctttacagtgtacatatcaacccatatctcattcccttctttatcgggttacagaaccggtttacgcagtttcggcttagtgaaacaaaagaaatcaccaatccgtatgccatgcgtttatacgaatccctgtgtcagtatcgaaagccggatggcttaagcatcgtctctctggaaaatcgactggatcatagagcggtaccagctgcctcaaagttaccagcgtatgccctgacttccgccgccgcttcctgcaggatgttcagaatgaaactcatggaaacacttaaccagtgcataaacgctggtcatgaaatgacgaaggctatcgccattgcacagtttaatgatgacagcccggaagcgaggaaaataacccggcgctggagaataggtgaagcagcggatttagttggggtttcttctcaggctatcagagatgccgagaaagcagggcgactaccgcacccggatatggaaattcgaggacgggttgagcaacgtgttggttatacaattgaacaaattaatcatatgcgtgatgtgtttggtacgcgattgcgacgtgctgaagacgtatttccaccggtgatcggggttgctgcccataaaggtggcgtttacaaaacctcagtttctgttcatcttgctcaggatctggctctgaaggggctacgtgttttgctcgtggaaggtaacgacccccagggaacagcctcaatgtatcacggatgggtaccagatcttcatattcatgcagaagacactctcctgcctttctatcttggggaaaaggacgatgtcacttatgcaataaagcccacttgctggccggggcttgacattattccttcctgtctggctctgcaccgtattgaaactgagttaatgggcaaatttgatgaaggtaaactgcccaccgatccacacctgatgctccgactggccattgaaactgttgctcatgactatgatgtcatagttattgacagcgcgcctaacctgggtatcggcacgattaatgtcgtatgtgctgctgatgtgctgattgttcccacgcctgctgagttgtttgactacacctccgcactgcagtttttcgatatgcttcgtgatctgctcaagaacgttgatcttaaagggttcgagcctgatgccaccgaaacgagcgatcagggtcggcaaagctgtggagatgaaatgggcaacaccttccacactgcgagtaaagctcgcaatccgggtggaggcctccacgtcctagcgcagtccagtcccgggcgcagggaggagagctggtcagccaagattccaagacaggtgtccacctcctccaacgaagcggaacacgccaccaggttcatgtggaggctcccaggcgcccgcgccgcgcttcgggtgatccggacggcggtggagaagctgagccgggctgaagcggggagccagacagcggcgggagcgatggagcgcgctgtagtgcgctgcgtaccttcggaacccaagctgagcctgtcattcgctttggctgatggtagccacaagaacatgcagcgcgaccagagcgagccgctgggtcgagtcctcagccgcatcgctaccaatgccctaaagggtcacgctaaggcggccgccgccaagaagagcaggaagagccggccgaatgctagcggcggtgcggcctgttcagggccggggcctgagccggctgtgttctgcgagcccgtggtgaagctgtactaccgggaagaggcagtggctgaggacgtgctcaacgtggatgcctggcaagacggcgcggtgctgcagatcggcgatgttaagtacaaggtggagcgcaacccgcccgccttcaccgaactgcagttgccgcgctacatcatggccgggttccctgtgtgccccaaactcagcctcgaatttggggatcccgccagctcccttttccgctggtataaggaagccaagcccggagcggcggagcccgaggtcggtgtcccctcgtcattgtctccctcctcaccttcttcttcttggactgagactgatgtggaggagcgtgtctacaccccgtccaatgccgacatcgggctaaggctcaagcttcactgcaccccaggcgatgggcagcgctttgggcacagccgggagttggaaagtgtgtgtgtggtagaggctgggcctggcacctgcacttttgaccaccggcatctctacacgaagaaggtgactgaggacgctctcatccgcactgtctcttacaacatcctggcagacacgtacgcgcagactgagttctcgcgaacggttctgtacccatactgtgccccctacgccctggagctcgactaccgccagaaccttatccagaaggaactcaccggctacaacgccgatgtcatctgtttcaggagcttggtacccgccctagaggccttcgggctcgagggggtgtttcgaatcaagcagcacgaaggcctggccactttctaccgaaagtctaagttcagccttcttagccagcatgacatttcattctacgaagccctcgagtccgacccacttcacaaagaactgctggagaaactagttttgtacccatcagcgcaggagaaggtgctccagagatcttctgttcttcagcatataaacagaaccaaagacaaaaaccatatgattatctcaatagatgcggaaaaggcctttgacaaaattcaacagtgcttcatgctaaaaactctcaataaattaggtattgatgggacgtatctcaaaataataagagctatctatgacaaacccacagccaatatcatactgaatgggcaaaaactggaagcattccctttgaaaactggcacaagacagggatgccctctttcaccactcctattcaacaaagtgttagaagttctggccagggcaatcaggcaggagaaggaaataaagggtattcagttaggaaaagaggaagtcaaattgtccctgtttgcagatgacatgattgtatatctagaaaaccccattgtctcagcccaaaatctccttaagctgataggtaacttcagcaaagtctcagaatacaaaatcaatgtgcaaaaatcacaagcattcttatacaccaataacagacaaacagagagccaaatcacgagtgaactcccattcacaattgcttcaaagagaataaaacacctaggaatccaacttacaagggacatgaaggacctcttcaaggagaactacaaaccactgctcaacaaaataaaagaggatacaaacaaatggaagaacattccatgctcatgggtaggaagaatcaatatcgtgaaaatggccatactgcccaaggtaatttatagattcaatgccatccccatcaagctaccaatgactttcttcacagaattggaaaaaactactttgaagttcatatggaaccaaaaaagagcctgcattgccaagtcaattctaagccaaaagaacaaagctggaggcatcacgctacctgacttcaaactgtactacaaggctacagtaaccaaaacagcatggtactggtaccaaaacagagatatagaccaatggaacagaacagaggcctcagaaataatgccgcatatctacaaccatctgatctttgacaaacctgagaaaaacaagcaatggggaaaggattccctatttaataaatggtgctgggaaaactggctagccatatgtagcaagctgaaactggatcccttccttacacctcatacaaaaactaattcaagatggattaaagacttaaatgttagacctaaaaccataaaaaccctagaagaaaacctaggcaataccattcaggacataggcatgggcaaggacttcaagcctaaaacaccaaaagcaatggcaacaaaagccaaaattgacaaatgggatctaattaaactaaagagcttctgcacagcaaaagaaactaccatcagagtgaacaggcaacctacagaatgggagaaaatttttgcaatctacccatctgacaaagggctagtatccagaatctacaatgaactcaaacaaatttacaagaaaaaaacaaacaaccccatcaaaaagtgggcaaaggacatgaacagacacttctcaaaagaagacatttttgcagccaaaagacacatgaaaaaatgctcatcatcactaatcatcaaagaaatgcaaatcaaaaccacaatgagataccatctcacaccagttagaatggcgatcattaaaaagtcaggaaacaacagtcaggcaccgtgtatgaaatctaacaatgcgctcatcgtcatcctcggcaccgtcaccctggatgctgtaggcataggcttggttatgccggtactgccgggcctcttgcgggatatcgtccattccgacagcatcgccagtcactatggcgtgctgctagcgctatatgcgttgatgcaatttctatgcgcacccgttctcggagcactgtccgaccgctttggccgccgcccagtcctgctcgcttcgctacttggagccactatcgactacgcgatcatggcgaccacacccgtcctgtggatctacccactagtcaattcaccatcttgttga

SEQ ID NO: 25759 - DNA, 1980 bp, Homo sapiens
  SIMILAR (742)..(1620): 991254mologous to Cloning vector pZC320 SopA,accession number U26464,Smith-Waterman Score=1524.
  misc_feature (1)...(1980): n = a,t,c or g
atggcggaaacagcggttatcaatcacaagaaacgtaaaaatagcccgcgaatcgtccagtcaaacgacctcactgaggcggcatatagtctctcccgggatcaaaaacgtatgctgtatctgttcgttgaccagatcagaaaatctgatggcaccctacaggaacatgacggtatctgcgagatccatgttgctaaatatgctgaaatattcggattgacctctgcggaagccagtaaggatatacggcaggcattgaagagtttcgcggggaaggaagtggttttttatcgccctgaagaggatgccggcgatgaaaaaggctatgaatcttttccttggtttatcaaacgtgcgcacagtccatccagagggctttacagtgtacatatcaacccatatctcattcccttctttatcgggttacagaaccgggttacgcagtttcgggttagtgaaacaaaagaaatcaccaatccgtatgccatgcgtttatacgaatccctgtgtcagtatcgtaagccggatggctcaggcatcgtctctctgaaaatcgactggatcatagagcgttaccagctgcctcanagttaccagcgtatgcctgacttccgccgccgcttcctgcaggtctgtgttaatgagatcaacagcagaactccaatgcgcctctcatacattgagaaaaagaaaggccgccagacgactcatatcgatgttcagattgaaactgatggaaaactcaaccagtgcataaacgctggtcatgaaatgacgaaggctatcgccattgcacagtttaatgatgacagcccggaagcgaggaaaataacccggcgctggagaataggtgaagcagcggatttagttggggtttcttctcaggctatcagagatgccgagaaagcagggcgactaccgcacccggatatggaaattcgaggacgggttgagcaacgtgttggttatacaattgaacaaattaatcatatgcgtgatgtgtttggtacgcgattgcgacgtgctgaagacgtatttccaccggtgatcggggttgctgcccataaaggtggcgtttacaaaacctcagtttctgttcatcttgctcaggatctggctctgaaggggctacgtgttttgctcgtggaaggtaacgacccccagggaacagcctcaatgtatcacggatgggtaccagatcttcatattcatgcagaagacactctcctgcctttctatcttggggaaaaggacgatgtcacttatgcaataaagcccacttgctggccggggcttgacattattccttcctgtctggctctgcaccgtattgaaactgagttaatgggcaaatttgatgaaggtaaactgcccaccgatccacacctgatgctccgactggccattgaaactgttgctcatgactatgatgtcatagttattgacagcgcgcctaacctgggtatcggcacgattaatgtcgtatgtgctgctgatgtgctgattgttcccacgcctgctgagttgtttgactacacctccgcactgcagtttttcgatatgcttcgtgatctgctcaagaacgttgatcttaaagggttcgagcctgatgtatttattcgcgataagctcatggagcggcgtaaccgtcgcacaggaaggacagagaaagcgcggatctgggaagtgacggacagaacggtcaggacctggattggggaggcggttgccgccgctgctgctgacggtgtgacgttctctgttccggtcacaccacatacgttccgccattcctatgcgatgcacatgctgtatgccggtataccgctgaaagttctgcaaagcctgatgggacataagtccatcagttcaacggaagtctacacgaaggtttttgcgctggatgtggctgcccggcaccgggtgcagtttgcgatgccggagtctgatgcggttgcgatgctgaaacaattatcctga

SEQ ID NO: 25760 - DNA, 2472 bp, Homo sapiens
  SIMILAR (1054)..(2469): 1001254mologous to Cloning vector pBACe3.6 levansucrase,accession number U80929,Smith-Waterman Score=2482.
atgaaactcatggaaacacttaaccagtgcataaacgctggtcatgaaatgacgaaggctatcgccattgcacagtttaatgatgacagcccggaagcgaggaaaataacccggcgctggagaataggtgaagcagcggatttagttggggtttcttctcaggctatcagagatgccgagaaagcagggcgactaccgcacccggatatggaaattcgaggacgggttgagcaacgtgttggttatacaattgaacaaattaatcatatgcgtgatgtgtttggtacgcgattgcgacgtgctgaagacgtatttccaccggtgatcggggttgctgcccataaaggtggcgtttacaaaacctcagtttctgttcatcttgctcaggatctggctctgaaggggctacgtgttttgctcgtggaaggtaacgacccccagggaacagcctcaatgtatcacggatgggtaccagatcttcatattcatgcagaagacactctcctgcctttctatcttggggaaaaggacgatgtcacttatgcaataaagcccacttgctggccggggcttgacattattccttcctgtctggctctgcaccgtattgaaactgagttaatgggcaaatttgatgaaggtaaactgcccaccgatccacacctgatgctccgactggccattgaaactgttgctcatgactatgatgtcatagttattgacagcgcgcctaacctgggtatcggcacgattaatgtcgtatgtgctgctgatgtgctgattgttcccacgcctgctgagttgtttgactacacctccgcactgcagtttttcgatatgcttcgtgatctgctcaagaacgttgatcttaaagggttcgagcctgattcaggaccctcagctgcaggtttgttggtgtttgctggaggtccactccaggccctgtgtgcctgggtatcagcagtggaggctgcagaacagtggatattgtcaattcgggaggatcgaaacggcagatcgcaaaaaacagtacatacagaaggagacatgaacatgaacatcaaaaaaattgtaaaacaagccacagttctgacttttacgactgcacttctggcaggaggagcgactcaagccttcgcgaaagaaaataaccaaaaagcatacaaagaaacgtacggcgtctctcatattacacgccatgatatgctgcagatccctaaacagcagcaaaacgaaaaataccaagtgcctcaattcgatcaatcaacgattaaaaatattgagtctgcaaaaggacttgatgtgtgggacagctggccgctgcaaaacgctgacggaacagtagctgaatacaacggctatcacgttgtgtttgctcttgcgggaagcccgaaagacgctgatgacacatcaatctacatgttttatcaaaaggtcggcgacaactcaatcgacagctggaaaaacgcgggccgtgtctttaaagacagcgataagttcgacgccaacgatccgatcctgaaagatcagacgcaagaatggtccggttctgcaacctttacatctgacggaaaaatccgtttattctacactgactattccggtaaacattacggcaaacaaagcctgacaacagcgcaggtaaatgtgtcaaaatctgatgacacactcaaaatcaacggagtggaagatcacaaaacgatttttgacggagacggaaaaacatatcagaacgttcagcagtttatcgatgaaggcaattatacatccggcgacaaccatacgctgagagaccctcactacgttgaagacaaaggccataaataccttgtattcgaagccaacacgggaacagaaaacggataccaaggcgaagaatctttatttaacaaagcgtactacggcggcggcacgaacttcttccgtaaagaaagccagaagcttcagcagagcgctaaaaaacgcgatgctgagttagcgaacggcgccctcggtatcatagagttaaataatgattacacattgaaaaaagtaatgaagccgctgatcacttcaaacacggtaactgatgaaatcgagcgcgcgaatgttttcaaaatgaacggcaaatggtacttgttcactgattcacgcggttcaaaaatgacgatcgatggtattaactcaaacgatatttacatgcttggttatgtatcaaactctttaaccggcccttacaagccgctgaacaaaacagggcttgtgctgcaaatgggtcttgatccaaacgatgtgacattcacttactctcacttcgcagtgccgcaagccaaaggcaacaatgtggttatcacaagctacatgacaaacagaggcttcttcgaggataaaaaggcaacatttgcgccaagcttcttaatgaacatcaaaggcaataaaacatccgttgtcaaaaacagcatcctggagcaaggacagctgacagtcaactaa

SEQ ID NO: 25761 - DNA, 1923 bp, Homo sapiens
  SIMILAR (1384)..(1920): 871254mologous to Cloning vector pZC320 SopA,accession number U26464,Smith-Waterman Score=781.
  misc_feature (1)...(1923): n = a,t,c or g
atgggggaaagggaagccagagaggaagaagaatcagactgcagccaggcaggcctcagcagcggcttggagagcatcccagtgtatcagcacccacctcacctggattttgccgatttcggaaccaccatcaaacaggattttcgcctgctggggcaaaccagcgtggaccgcttgctgcaactctctcagggccaggcggtgaagggcaatcagctgttgcccgtctcactggtgaaaagaaaaaccaccctggcgcccaatacgcaaaccgcctctccccgcgcgttggccgattcattaatgcagctggcacgacaggtttcccgactggaaagcgggcaggattttgccgatttcggaaccaccatcaaacaggattttcgcctgctggggcaaaccagcgtggaccgcttgctgcaactctctcagggccaggcggtgaagggcaatcagctgttgcccgtctcactggtgaaaagaaaaaccaccctggcgcccaatacgcaaaccgcctctccccgcgcgttggccgattcattaatgcagctggcacgacaggtttcccgactggaaagcgggcaggattttgccgatttcggaaccaccatcaaacaggattttcgcctgctggggcaaaccagcgtggaccgcttgctgcaactctctcagggccaggcggtgaagggcaatcagctgttgcccgtctcactggaaacagctatgaccatgattacgaattcgagctcggtacccacagttgaagatgccagaattgctgtgaccatcgtggccataattaaacgtttcatacttacctcattctttaacagttttagaagacgcctgccatcatattgggatctggctctgaaggggctacgtgttttgctcgtggaaggtaacgacccccagggaacagcctcaatgtatcacggatgggtaccagatcttcatattcatgcagaagacactctcctgcctttctatcttggggaaaaggacgatgtcacttatgcaataaagcccacttgctggccggggcttgacattattccttcctgtctggctctgcaccgtattgaaactgagttaatgggcaaatttgatgaaggtaaactgcccaccgatccacacctgatgctccgactggccattgaaactgttgctcatgactatgatgtcatagttattgacagcgcgcctaacctgggtatcggcacgattaatgtcgtatgtgctgctgatgtgctgattgttcccacgcctgctgagttgtttgactacacctccgcactgcagtttttcgatatgcttcgtgatctgctcaagaacgttgatcttaaagggttcgagcctgataggcccttttcctgctcttctttctggggaaaaaggaggatgttcacttatgcaataaagcccccctggctggccgggggcttgacattattcccttctggtcgggtctggcccggtattgaaactgagttaatgggcaaatttgatgaaggtaactgccccaccgatccacacctgatgctccgactggccattgaaactgttgctcatgactatgatgtcatagttattgacagcgcgcctaacctgggtatcggcacgattaatgtcgtatgtgctgctgatgtgctgattgttcccacgcctgctgagttgtttgactacacctccgcactgcagtttttcgatatgcttcgtgatctgctcaagaacgttgatcttaaagggttcgagcctgatgtacgtattttgcttaccaaatacagcaatagtaatggctctcagtccccgtggatggaggagcaaattcgggatgcctggggaagcatggttctaaaaaatgttgtacgtgaaacggatgaagttggtaaaggtcagatccggatgagaactgtnttttga

SEQ ID NO: 25762 - DNA, 2262 bp, Homo sapiens; identical to SEQ ID NO: 4935
  SIMILAR (1)..(405): 1001254mologous to Cloning vector pZC320 SopA,accession number U26464,Smith-Waterman Score=691.

SEQ ID NO: 25763 - DNA, 1962 bp, Homo sapiens; identical to SEQ ID NO: 4019
  SIMILAR (1)..(681): 961254mologous to Cloning vector pZC320 SopB,accession number U26464,Smith-Waterman Score=1097.

SEQ ID NO: 25764 - DNA, 2421 bp, Homo sapiens; identical to SEQ ID NO: 5218
  SIMILAR (1597)..(2319): 981254mologous to Cloning vector pBACe3.6 levansucrase,accession number U80929,Smith-Waterman Score=1250.

SEQ ID NO: 25765 - DNA, 1919 bp, Homo sapiens; identical to SEQ ID NO: 4303
  SIMILAR (558)..(1496): 981254mologous to Cloning vector pSacBII SacB,accession number U09128,Smith-Waterman Score=1628.

SEQ ID NO: 25766 - DNA, 2169 bp, Homo sapiens; identical to SEQ ID NO: 4021
  SIMILAR (529)..(1248): 961254mologous to Cloning vector pZC320 SopB,accession number U26464,Smith-Waterman Score=1171.
  misc_feature (1)...(2169): n = a,t,c or g

SEQ ID NO: 25767 - DNA, 5100 bp, Homo sapiens
  SIMILAR (1894)..(2610): 941254mologous to Leishmania major probable levansucrase precursor,accession number AL160371,Smith-Waterman Score=1184.
atgcaacttgtatggaagctgacgcacacaacagaagctcagccttgcctttctgaactgatcagaaaatctgatggcaccctacaggaacatgacggtatctgcgagatccatgttgctaaatatgctgaaatattcggattgacctctgcggaagccagtaaggatatacggcaggcattgaagagtttcgcggggaaggaagtggttttttatcgccctgaagaggatgccggcgatgaaaaaggctatgaatcttttccttggtttatcaaacgtgcgcacagtccatccagagggctttacagtgtacatatcaacccatatctcattcccttctttatcgggttacagaaccggtttacgcagtttcggcttagtgaaacaaaagaaatcaccaatccgtatgccatgcgtttatacgaatccctgtgtcagtatcgtaagccggatggctcaggcatcgtctctctgaaaatcgactggatcatagagcgttaccagctgcctcaaagttaccagcgtatgcctgacttccgccgccgcttcctgcaggtctgtgttaatgagatcaacagcagaactccaatgcgcctctcatacattgagaaaaagaaaggccgccagacgactcatatcgtattttccttccgcgatatcacttccatgacgacaggaagtaccttgtactttggcagcctgaaagagtgcttgctgagtgtgctaaaagctcaatttatgttgctttttcctttttgcattgcttcagtgcaagctgtattttatgaaggttcggtggcattttccaaagtagaaaggattttgccgatttcggaaccccccatcaaacaggattttcgcctgttgggccaaaccagcgtggaccgcttgctgcaactctctcagggccaggcggtgaagggcaatcagctgttgcccgtctcactggtgaaaagaaaaaccaccctggcgcccaatacgcaaaccgcctctccccgcgcgttggccgattcattaatgcagctggcacgacaggtttcccgactggaaagcgggcaggattttgccgatttcggaaccaccatcaaacaggattttcgcctgctggggcaaaccagcgtggaccgcttgctgcaactctctcagggccaggcggtgaagggcaatcagctgttgcccgtctcactgaccgttcagctggatattacggcctttttaaagaccgtaaagaaaaataagcacaagttttatccggcctttattcacattcttgcccgcctgatgaatgctcatccggagttccgtatggcaatgaaagacggtgagctggtgatatgggatagtgttcacccttgttacaccgttttccatgagcaaactgaaacgttttcatcgctctggagtgaataccacgacgatttccggcagtttctacacatatattcgcaagatgtggcgtgttacggtgaaaacctggcctatttccctaaagggtttattgagaatatgtttttcgtctcagccaatccctgggtgagtttcaccagttttgatttaaacgtggccaatatggacaacttcttcgcccccgttttcaccatgggcaaatattatacgcaaggcgacaaggtgctgatgccgctggcgattcaggttcatcatgccgtttgtgatggcttccatgtcggcagaatgcttaatgaattacaacagtactgcgatgagtggcagggcggggcggattttgccgatttcggaaccaccatcaaacaggattttcgcctgctggggcaaaccagcgtggaccgcttgctgcaactctctcagggccaggcggtgaagggcaatcagctgttgcccgtctcactggccgttccagtacttccagaggaagacatgaacatgaacatcaaaaaaaattgtaaaacaagccccagttctgacttttacgactgcactctggcaggaggagcgattcaagccttcgcgaaagaaaataaccacaaagcatacaaagaaacgtacggcgtctctcatattacacgccatgatatgctgcagatccctaaacagcagcaaaacgaaaaataccaagtgcctcaattcgatcaatcaacgattaaaaatattgagtctgcaaaaggacttgatgtgtgggacagctggccgctgcaaaacgctgacggaacagtagctgaatacaacggctatcacgttgtgtttgctcttgcgggaagcccgaaagacgctgatgacacatcaatctacatgttttatcaaaaggtcggcgacaactcaatcgacagctggaaaaacgcgggccgtgtctttaaagacagcgataagttcgacgccaacgatccgatcctgaaagatcagacgcaagaatggtccggttctgcaacctttacatctgacggaaaaatccgtttattctacactgactattccggtaaacattacggcaaacaaagcctgacaacagcgcaggtaaatgtgtcaaaatctgatgacacactcaaaatcaacggagtggaagatcacaaaacgatttttgacggagacggaaaaacatatcagaacgttcagcagtttatcgatgaaggcaatgaggggattttgccgatttcggaaccacccatcaaacaggattttcgcctgctggggcaaaccagcgtggaccgcttgctgcaactctctcagggccaggcggtgaagggcaatcagctgttgcccgtctcactggtgaaaagaaaaaccaccctggcgcccaatacgcaaaccgcctctccccgcgcgttggccgattcattaatgcagctggcacgacaggtttcccgactggaaagcgggcaggattttgccgatttcggaaccaccatcaaacaggattttcgcctgctggggcaaaccagcgtggaccgcttgctgcaactctctcagggccaggcggtgaagggcaatcagctgttgcccgtctcactggtgaaaagaaaaaccaccctggcgcccaatacgcaaaccgcctctccccgcgcgttggccgattcattaatgcagctggcacgacaggtttcccgactggaaagcgggcaggattttgccgatttcggaaccaccatcaaacaggattttcgcctgctggggcaaaccagcgtggaccgcttgctgcaactctctcagggccaggcggtgaagggcaatcagctgttgcccgtctcactgaaaccttatgcttgtcaaattccaggatgtaccaaacgctacacagacccaagttccctaagaaagcatgtgaaggcacattcttccaaagagcaacaagcaaggaaaaaggatcacaactcctcgccagcaagggaacacaactggacggcaaatgagtttgatgaattgacagaagtaggcttcagaagggattttgccgatttcggaaccaccatcaaacaggattttcgcctgctggggcaaaccagcgtggaccgcttgctgcaactctctcagggccaggcggtgaagggcaatcagctgttgcccgtctcactggtgaaaagaaaaaccaccctggcgcccaatacgcaaaccgcctctccccgcgcgttggccgattcattaatgcagctggcacgacaggtttcccgactggaaagcgggcaggattttgccgatttcggaaccaccatcaaacaggattttcgcctgctggggcaaaccagcgtggaccgcttgctgcaactctctcagggccaggcggtgaagggcaatcagctgttgcccgtctcactggtgaaaagaaaaaccaccctggcgcccaatacgcaaaccgcctctccccgcgcgttggccgattcattaatgcagctggcacgacaggtttcccgactggaaagcgggcaggattttgccgatttcggaaccaccatcaaacaggattttcgcctgctggggcaaaccagcgtggaccgcttgctgcaactctctcagggccaggcggtgaagggcaatcagctgttgcccgtctcactggtgaaaagaaaaaccaccctggcgcccaatacgcaaaccgcctctccccgcgcgttggccgattcattaatgcagctggcacgacaggtttcccgactggaaagcgggcaggattttgccgatttcggaaccaccatcaaacaggattttcgcctgctggggcaaaccagcgtggaccgcttgctgcaactctctcagggccaggcggtgaagggcaatcagctgttgcccgtctcactggtgaaaagaaaaaccaccctggcgcccaatacgcaaaccgcctctccccgcgcgttggccgattcattaatgcagctggcacgacaggtttcccgactggaaagcgggcaggattttgccgatttcggaaccaccatcaaacaggattttcgcctgctggggcaaaccagcgtggaccgcttgctgcaactctctcagggccaggcggtgaagggcaatcagctgttgcccgtctcactggtgaaaagaaaaaccaccctggcgcccaatacgcaaaccgcctctccccgcgcgttggccgattcattaatgcagctggcacgacaggtttcccgactggaaagcgggcaggattttgccgatttcggaaccaccatcaaacaggattttcgcctgctggggcaaaccagcgtggaccgcttgctgcaactctctcagggccaggcggtgaagggcaatcagctgttgcccgtctcactggtgaaaagaaaaaccaccctggcgcccaatacgcaaaccgcctctccccgcgcgttggccgattcattaatgcagctggcacgacaggtttcccgactggaaagcgggcaggattttgccgatttcggaaccaccatcaaacaggattttcgcctgctggggcaaaccagcgtggaccgcttgctgcaactctctcagggccaggcggtgaagggcaatcagctgttgcccgtctcactggtgaaaagaaaaaccaccctggcgcccaatacgcaaaccgcctctccccgcgcgttggccgattcattaatgcagctggcacgacaggtttcccgactggaaagcgggcagtga

SEQ ID NO: 25768 - DNA, 2305 bp, Homo sapiens
  SIMILAR (698)..(1399): 941254mologous to Cloning vector pSacBII SacB,accession number U09128,Smith-Waterman Score=1178.
  misc_feature (1)...(2305): n = a,t,c or g
agttagagctgaagaagctggcaacctggaaaaagctaacgcacacaaaggaaaaaaaaaaaagagagaagaaggggtagaagaaggaggaggaggagaaggaagaggaagagagaaaggaagaagaggagaagaagaggagctattctcctatgccactgccctggtgacggggcacatggccgaagggagcgcagcgtccgggccagggaccaagccccgcggcgtccggcccgcgcccttcgccgaccgggcgccccctgaccgtcaccacgaaagcagcgcaggagacaaagcccgggactcgggttcagagtccccggcgcagcgcaaagcccgcgccttcccgccagcccgccgccgcgctccgccgggcagccgagggctccgcacgccgcgcctctggcccgcgctgccccggccgcagccgccgggaacatcctccgcctcctcccgctcctcccctcgcgctctgcgcccgccgccgccggcaccgccgacctccccgcgccgctggcgccggccagcgcagaaatatttccagcaaattcattctgcaatcggcttgcataacgctgaccacgttcataagcacttgttgggcgataatcgttacccaatctggataatgcagccatctgctcatcatccagctcgccaaccagaacacgataatcactttcggaaggagcgactcaaggccttcgcgaaagaaaaatacccacataagcatacaaagaaacggtcgggcgtttttcatattacacgccatgatatgctgcagatccctaaacagcagcaaaacgaaaaataccaagtgcctcaattcgatcaatcaacgattaaaaatattgagtctgcaaaagnacttgatgtgtgggacagctggccgctgcaaaacgctgacggaacagtagctgaatacaacggctatcacgttgtgtttgctcttgcgggaagcccgaaagacgctgatgacacatcaatctacatgttttatcaaaaggtcggcgacaactcaatcgacagctggaaaaacgcgggccgtgtctttaaagacagcgataagttcgacgccaacgatccgatcctgaaagatcagacgcaagaatggtccggttctgcaacctttacatctgacggaaaaatccgtttattctacactgactattccggtaaacattacggcaaacaaagcctgacaacagcgcaggtaaatgtgtcaaaatctgatgacacactcaaaatcaacggagtggaagatcacaaaacgatttttgacggagacggaaaaacatatcagaacgttcagcagtttatcgatgaaggcaattatacatccggcgacaaccatacgctgagagaccctcactacgttgaagacaaaggccataaataccggggtcctttagagtccccatcgacgcatcaagccgagtttaaccctacttcttgtgtttcgtccttgggcacccttcaaggctttcccgcccccgcttggctcgctctcgcgcaccctgtgcaccctttgaaacacaagagcgggggaagcaaccggttaagcgctgctatttggggcataaaaaggaagccggccagagtttgccctggcacaggcatccatgcctccagccaaattcaaggtgagtggaggacagagtgtgctgtagggcccaaggccaaggccaaggccacggcagggtggaggcgtgggaacaatcagcacatcagcagcacatacgacattaatcgtgccgatacccaggttaggcgcgctgtcaataactatgacatcatagtcatgagcaacagtttcaatggccagtcggagcatcagacctatgagtccatagttattgacagcgcgcctaacctgggtatcggcacgattaatgtcgtatgtgctgctgatgtgctgattgttcccacgcctgctgagttgtttgactacacctccgcactgcagtttttcgatatgcttcgtgatctgctcaagaacgttgatcttaaagggttcgagcctgatgtacgtattttgcttaccaaatacagcaatagtaatggctctcagtccccgtggatggaggagcaaattcgggatgcctggggaagcatggttctaaaaaatgttgtacgtgaaacggatgaagttggtaaaggtcagatccggatgagaactgtttttgaacaggccattgatcaacgctcttcaactggtgcctggagaaatgctctttctatttgggaacctgtctgcaatgaaattttcgatcgtctgattaaaccacgctgggagattagataa

SEQ ID NO: 25769 - DNA, 2106 bp, Homo sapiens
  SIMILAR (913)..(1500): 941254mologous to unidentified cloning vector 29kD protein essential for the replication of mini F plasmid,accession number AB015619,Smith-Waterman Score=968.
atgaacatgaacatcaaaaaaattgtaaaacaagccacagttctgacttttacgactgcacttctggcaggaggagcgactcaagccttcgcgaaagaaaataaccaaaaagcatacaaagaaacgtacggcgtctctcatattacacgccatgatatgctgcagatccctaaacagcagcaaaacgaaaaataccaagtgcctcaattcgatcaatcaacgattaaaaatattgagtctgcaaaaggacttgatgtgtgggacagctggccgctgcaaaacgctgacggaacagtagctgaatacaacggctatcacgttgtgtttgctcttgcgggaagcccgaaagacgctcatgacacatcaatctacatgttttatcaaaagatccgtatggcaatgaaagacggtgagctggtgatatcggatagtgttcacccttgttacacggttttccatgagcgaactgaaacgttttcatcgctctggagtgcatccctcgacgatttgcggcagtttctacacatatattcgcaagatgtggcgtgttgcggtgaaaacctggcgtatttccataaagggtttattgagaatatgttcgtggtctcagccaatccctggaccgttcagctggatattacggcctttttaaagaccgtaaagaaaaataagcacaagttttatccggcctttattcacattcttgcccgcctgatgaatgctcatccggagttccgtatggcaatgaaagacgggtttattgagaatatgtttttcgtctcagccaatccctgggtgagtttcaccagttttgatttaaacgtggccaatatggacaacttcttcgcccccgttttcaccatgggcaaatattatacgcaaggcgacaaggtgttgatgccgctggcgactcaggaacatgacggtatctgcgagatccatgttgctaaatatgctgaaatattcggattgacctctgcggaagccagtaaggatatacggcaggcattgaagagtttcgcggggaaggaagtggttttttatcgccctgaagaggatgccggcgatgaaaaaggctatgaatcttttccttggtttatcaaacgtgcgcacagtccatccagagggctttacagtgtacatatcaacccatatctcattcccttctttatcgggttacagaaccggtttacgcagtttcggcttagtgaaacaaaagaaatcaccaatccgtatgccatgcgtttatacgaatccctgtgtcagtatcgtaagccggatggctcaggcatcgtctctctgacaatcgactggatcatagagcgttaccagctgcctcaaagttaccagcgtatgcctgacttccgccgccgcttcctgcaggtctgtgttaatgagatcaacagcagaactccaatgcgcctctcatacattgagaaaaagaaagtccgccagacgactcatatcgctttgcagaactttcagcggtataccggcatacagcatgtgcatcgcataggaatggcggaacatgcccttctggttggcgagctggatgatgagcagatggctgcattatccagattgggtaacgattatcgcccaacaagtgcttatgaacgtggtcagcgttatgcaagccgattgcagaatgaatttgctggaaatatttctgcgctggctgatgcggaaaatatttcacgtaagattattacccgctgtatcaacaccgccaaattgcctaaatcagttgttgctcttttttctcaccccggtgaactatctgcccggtcaggtgatgcacttcaaaaagcctttacagataaagaggaattacttaagcagcaggcatctaaccttcatgagcagaaaaaagctggggtgatatttgaagctgaagaagttatcactcttttaacttctgtgcttaaaacgtcatctgcatcaagaactagtttaagctcacgacatcagtttgctcctggagcgacagtattgtataagggcgataaaatggtgcttaacctggacaggtctcgtgttccaactgagtgtatagagaaaattgaggccattcttaaggaacttgaaaagccagcaccctga

SEQ ID NO: 25770 - DNA, 2127 bp, Homo sapiens
  SIMILAR (1081)..(1836): 981254mologous to Cloning vector pBACe3.6 levansucrase,accession number U80929,Smith-Waterman Score=1318.
atgaacatgaacatcaaaaaaattgtaaaacaagccacagttctgacttttacgactgcacttctggcaggaggagcgactcaagccttcgcgaaagaaaataaccaaaaagcaaacaaagaaacgtacggcgtctctcatattacacgccatgatatgctgcagatccctaaacagcagcaaaacgaaaaataccaagtgcctcaattcgatcaatcaacgattaaaaatattgagtctgcaaaaggacttgatgtgtgggacagctggccgctgcaaaacgctgacggaacagtagctgaatacaacggctatcacgttgtgtttgctcttgcgggaagcccgaaagacgctgatgacacatcaatctacatgtttttcaaaaggggggcgatctttagagtccacaaacacgctgtcaacccgatgtcacctaaatgtcgacggccaggcggccgccaggcctacccactagtcaattgggaggatcgaaacggcagatcgcaaaaaacagtacatacagaaggagacatgaacatgaacatcaaaaaaattgtaaaacaagccacagttctgacttttacgactgcacttctggcaggaggagcgactcaagccttcgcgaaagaaaataaccaaaaagcatacaaagaaacatccctaaacagcagcaaaacgaaaaataccaagtgcctcaattcgatcaatcaacgattaaaaatattgagtctgcaaaaggacattgatgtgtgggacagctggccgctgcaaaacgctgacggaacagtagctgaatacaacggctatcacgttgtgtctgctcttgcgggaagcccgaaagacgctgatgacacatcaatctacatgttttatcaaaaggtcggcgacaactcaatcgacagctggaaaaacgcgggccgtgtctttaaagacagcgataagttcgacgccaacgatccgatcctgaaagatcagacgcaagaatggtccggttctgcaacctttacatctgacggaaggcgttctttagagtccaccaccacggctgcaagaccgatttggcggaaagacgttgggggggatcagacgcaagaatggtccggttctgcaccctttacatctgacggaaaaatccgtttattttacactgactattccggtaaacattacggcaaacaaagcctgacaacagcgcaggtaaatgtgtcaaaatctgatgacacactcaaaatcaacggagtggaagatcacaaaacgatttttgacggagacggaaaaacatatcagaacgttcagcagtttatcgatgaaggcaattatacatccggcgacaaccatacgctgagagaccctcactacgttgaagacaaaggccataaataccttgtattcgaagccaacacgggaacagaaaacggataccaaggcgaagaatctttatttaacaaagcgtactacggcggcggcacgaacttcttccgtaaagaaagccagaagcttcagcagagcgctaaaaaacgcgatgctgagttagcgaacggcgccctcggtatcatagagttaaataatgattacacattgaaaaaagtaatgaagccgctgatcacttcaaacacggtaactgatgaaatcgagcgcgcgaatgttttcaaaatgaacggcaaatggtacttgttcactgattcacgcggttcaaaaatgacgatcgatggtattaactcaaacgatatttacatgcttggttatgtatcaaactctttaaccggcccttacaagccgctgaacacaacagggcttgtgctgcaaatgggtcttgatccaaacgatgtgacatgggcgtctttagagccccacgaaagctttcaatgggttcgtggtctggctagctcaggagtgaagctgcagacctctgtggtgttacagctcataaaggcaatgtggacccaaagagtgagcagcagcaaggtttattgcaaagagcaaatgaacaatgcttccacaatgtcgaaaagaacctcagctggttgccactgctggcaagggcagcctgcttttattctcttatctggccccacccacatcctgctgattggtccattttacagagagctgattggtccgttttga

SEQ ID NO: 25771 - DNA, 3990 bp, Homo sapiens
  SIMILAR (3178)..(3891): 961254mologous to Cloning vector pBACe3.6 levansucrase,accession number U80929,Smith-Waterman Score=1208.
atgattttgaaaccgaaagatggaaatatagaagaagttaatagtttaagaaagcaaagagcaggttcttcatcttcaaaaatgaacagtttgggattttgccgatttcggaaccaccatcaaacaggattttcgcctgctggggcaaaccagcgtggaccgcttgctgcaactctctcagggccaggcggtgaagggcaatcagctgttgcccgtctcactggtgaaaagaaaaaccaccctggcgcccaatacgcaaaccgcctctccccgcgcgttggccgattcattaatgcagctggcacgacaggtttcccgactggaaagcgggcagtgagcgcaacgcaattaatggattttgccgatttcggaaccaccatcaaacaggattttcgcctgctggggcaaaccagcgtggaccgcttgctgcaactctctcagggccaggcgtggaagattcccaaaacgatttttgacggagacggaaaaacatatcagaacgttcagcagtttatcgatgaaggcaattatacatccggcgacacccatacgctgagagaccctcactacgttgaagacaaaggccataaataccttgtattcgaagccaacacgggaacagaaaacggataccaaggcgaagaatctttatttaacaaagcgtactacggcggcggcacgaacttcttccgtaaagaaagccagaagcttcagcagagcgctaaaaaacgcgatgctgagttagcgaacggcgccctcggtatcatagagttaaataatgattacacattgaaaaaagtaatgaagccgctgatcacttcaaacacggtaactgatgaaatcgagcgcgcgaatgttttcaaaatgaacggcaaatggtacttgttcactgattcacgcggttcaaaaatgacgatcgatgatacttcgttatcgacaccagctgccccgatggtggattcgttaattgcgcgcgtaggagtaatggctcgcggtaatgccattactttgcctgtatgtggtcgggatgtgaagtttactcttgaagtgctccggggtgatagtgttgagaagacctctcgggtatggtcaggtaatgaacgtgaccaggagctgcttactgaggacgcactggatgatctcatcccttcttttctactgactggtcaacagacaccggcgttcggtcgaagagtatctggtgtcatagaaattgccgatgggagtcgccgtcgtaaagctgctgcacttaccgaaagtgattatcgtgttctggttaggaaacttttctttcttgttcattgttcagaacttagtactatcctagttggcaatataccagccatggtacctaatctccttatactccctttacattgttatgatattgttcacccaaagcgtagtgaagtaatatctccttcataccggatattatatcaccatgagaaagaagatgttggttgtcttatagatgttaacattttagacttgaacggcttgcagccagttctacagagccaatccatttcattggtacaacagtctgaattctcattggaagttacacagtaccaagagagagaacctgtattagtaagagcttcgccatcctgttctgtggatgtaacagaacgggcaggaagctctttacaatctcctttgctttctgctgatcttaccacagctcagacaccttcagaatttttagccttgactgaagattctgtgtctgaaatggatgcattttctaaaagtggaagcatggcatcccactgtgacaactttggccacaatgattctacctctcagatgtccctcaattctgctgctgttacaaagacaacaacagaacttacgggaactgttccctgtgcaattatgtctcctgggaaatataggttagagggtcaatgtagcactgaatctaattcattaccggaaacctctgctgctaatcagaaggaagtgttattacaaattgctgaactacctgctacaagtgtgagccactcagagagtaacctaccagcagatagtgaaagagaagaaaatatagggttacaaaatgctgcctgcagctggggaaggggtgacacaagcacccctgtggtcacccccactgggactatgctgggtcagacccgaagccagaatagcactgggtcttttccaaggcctgctatagccactacctatctctatgtttgctcaaggtccagggctctacaatcagcagaactggaaaaaactactttaaagttcatatggagccaaaaaagagcctgcatcgtcaagtcaatcctaagccaaaagaacaaagctggaggcatcacactacctgacttcaaactatactacaaggctacagtaaccaaaacagcatgggattttgccgatttcggaaccaccatcaaacaggattttcgcctgctggggcaaaccagcgtggaccgcttgctgcaactctctcagggccaggcggtgaagggcaatcagctgttgcccgtctcactggtgaaaagaaaaaccaccctggcgcccaatacgcaaaccgcctctccccgcgcgttggccgattcattaatgcagctggcacgacaggtttcccgactggaaagcgggcaggcgataaaaaaccattcccttccccggaaaactcttcaatgcctgccgtatatcctcactggcttccgcagaggtcaatccgaatatttcagcatacttagcaacaaggctctagcagataccgtcatgttcctggattttgccgatttcggaaccaccatcaaacaggattttcgcctgctggggcaaaccagcgtggaccgcttgctgcaactctctcagggccaggcggtgaagggcaatcagctgttgcccgtctcactggtgaaaagaaaaaccaccctggcgcccaatacgcaaaccgcctctccccgcgcgttggccgattcattaatgcagctggcacgacaggtttcccgactggaaagcgggcaatccccacaatcaggactgaaacatgcattctcccagctgctgtgttttgactactatctgctctcaactaaatccctcttcacgacttggcctcagctctcagcccttactgccttgtccactgtgggtcacaaccccttctccgagcagtctgcactccttgatcaatatggagatcagacgcaagaatggtccggttctgcaacctttacatctgacggaaaaatccgtttattctacactgactattccggtaaacattacggcaaacaaagcctgacaacagcgcaggtaaatgtgtcaaaatctgatgacacactcaaaatcaacggagtggaagatcacaaaacgatttttgacggagacggaaaaacatatcagaacgttcagcagtttatcgatgaaggcaattatacatccggcgacaaccatacgctgagagaccctcactacgttgaagacaaaggccataaataccttgtattcgaagccaacacgggaacagaaaacggataccaaggcgaagaatctttatttaacaaagcgtactacggcggcggcacgaacttcttccgtaaagaaagccagaagcttcagcagagcgctaaaaaacgcgatgctgagttagcgaacggcgccctcggtatcatagagttaaataatgattacacattgaaaaaagtaatgaagccgctgatcacttcaaacacggtaactgatgaaatcgagcgcgcgaatgttttcaaaatgaacggcaaatggtacttgttcactgattcacgcggttcaaaaatgacgatcgatggtattaactcaaacgatatttacatgcttggttatgtatcaaactctttaacgtgttatcctctaccgtcacccgggattctgcacgcagtccttttttttattatacatgtggtagatccaaccaatggaatattatccagcaataaaaggaataaagtactgaaacaggctacaacatga

SEQ ID NO: 25772 - DNA, 2238 bp, Homo sapiens
  SIMILAR (4)..(699): 991254mologous to Cloning vector pBACe3.6 levansucrase,accession number U80929,Smith-Waterman Score=1220.
  misc_feature (1)...(2238): n = a,t,c or g
atgtccggttctgcaacctttacatctgacggaaaaatccgtttattctacactgactattccggtaaacattacggcaaacaaagcctgacaacagcgcaggtaaatgtgtcaaaatctgatgacacactcaaaatcaacggagtggaagatcacaaaacgatttttgacggagacggaaaaacatatcagaacgttcagcagtttatcgatgaaggcaattatacatccggcgacaaccatacgctgagagacccntactacgttgaagacaaaggccataaataccttgtattcgaagccaacacgggaacagaaaacggataccaaggcgaagaatctttatttaacaaagcgtactacggcggcggcacgaacttcttccgtaaagaaagccagaagcttcagcagagcgctaaaaaacgcgatgctgagttagcgaacggcgccctcggtatcatagagttaaataatgattacacattgaaaaaagtaatgaagccgctgatcacttcaaacacggtaactgatgaaatcgagcgcgcgaatgttttcaaaatgaacggcaaatggtacttgttcactgattcacgcggttcaaaaatgacgatcgatggtattaactcaaacgatatttacatgcttggttatgtatcaaactctttaaccggcccttacaagccgctgaacaaaacaggggatcctctagagtcgacctgcaggcatgcaagcttggtgggattttgccgatttcggaaccaccatcaaacaggattttcgcctgctggggcaaaccagcgtggaccgcttgctgcaactctctcagggccaggcggtgaagggcaatcagctgttgcccgtctcactggtgaaaagaaaaaccaccctggcgcccaatacgcaaaccgcctctccccgcgcgttggccgattcattaatgcagctggcacgacaggtttcccgactggaaagcgggcagtgagcgcaacgcaattaatggattttgccgatttcggaaccaccatcaaacaggattttcgcctgctggggcaaaccagcgtggaccgcttgctgcaactctctcagggccaggcggtgaagggcaatcagctgttgcccgtctcactggtgaaaagaaaaaccaccctggcgcccaatacgcaaaccgcctctccccgcgcgttggccgattcattaatgcagctggcacgacaggtttcccgactggaaagcgggcagatttttgccgatttcgcaaccaccatcaaacagatttttcgcctgctggggcaaaccagcgtggaccgcttgctgcaactctctcagggccaggcggaaacagctatgaccatgattacgaattcgagctcggtacccccatcggatggccaacgaagcgtgcgtcgatgccgtgcttggcatagatcgggggttccatcgggaacaggcacagcaccaggcccagaccgaggggctcacgtaatgcacggtcggcacgccgcgctgcttcagccagcgttcgatgcccaggttgaagtcgggcgcgtcgatgccgatgaacacgtccggctgccattccagtgcacgctggcgaaacgcggaacgcagtttcagcaggcgtggcagacgtttcagcagtttatcgatgaaggcaattatacatccggcgacaaccatacgctgagagaccctcactacgttgaagacaaaggccataaataccttgtattcgaagccaacacgggaacagaaaacggataccaaggcgaagaatctttatttaacaaagcgtactacggcggcggcacgaacttcttccgtaaagaaagccagaagcttcagcagagcgctaaaaaacgcgatgctgagttagcgaacggcgccctcggtatcatagagttaaataatgattacacattgaaaaaagtaatgaagccgctgatcacttcaaacacggtaactgatgaaatcgagcgcgcgaatgttttcaaaatgaacggcaaatggtacttgttcactgattcacgcggttcaaaaatgacgatcgatggtattaactcaaacgatatttacatgcttggttatgtatcaaactctttaaccggcccttacaagccgctgaacaaaacagggcttgtgctgcaaatgggtcttgatccaaacgatgtgacattcacttactctcacttcgcagtgccgcaaccaaaggcaacaatgtggttatcacaagctacatga

SEQ ID NO: 25773 - DNA, 1953 bp, Homo sapiens
  SIMILAR (1170)..(1193): 1001254mologous to Cloning vector pSacBII SacB,accession number U09128,Smith-Waterman Score=42.
atgaacatgaacatcaaaaaaattgtaaaacaagccacagttctgacttttacgactgcacttctggcaggaggagcgactcaagccttcgcgaaagaaaataaccaaaaagcatacaaagaaacgtacggcgtctctcatattacacgccatgatatgctgcagatccctaaacagcagcaaaacgaaaaataccaagtgcctcaattcgatcaatcaacgattaaaaatattgagtctgcaaaaggacttgatgtgtgggacagctggccgctgcaaaacgctgacggaacagtagctgaatacaacggctatcacgttgtgtttgctcttgcgggaagcccgaaagacgctgatgacacatcaatctacatgttttatcaaaaggtcggcgacaactcaatcgacagctggaaaaacgcgggccgtgtctttaaagacagcgataagttcgacgccaacgatccgatcctgaaagatcagacgcaagaatggtccggttctgcaacctttacatctgacggaaaaatccgtttattctacacgggatccctaaacagcagcaaaacggaaaaataccaagtgcctcatatcgatcaatcaacgattaaaaatattgagtctgcaaaaggacttgatgtgtgggacagctggccgctgcaaaacgctgacggaacagtagctgaatacaacggctatcacgttgtgtttgctcttgcgggaagcccgaaagacgctgatgacacatcaatctacatgttttatcaaaaggtcggcgacaactcaatcgacagctggaaaaacgcgggccgtgtctttaaagacagcgataagttcgacgccaacgatccgatcctgaaagatcagacgcaagaatggtccggttctgcaacctttacatctgacggaaaaatccgtttattctacactgactattccggtaaacattacggcaaacaaagcctgacaacagcgcaggtaaatgtgtcaaaatctgatgacacactcaaaatcaacggagtggaagatcacaaaacgatttttgacggagacggaaaaacatatcagaacgttcagcagtttatcgatgaaggcaattatacatccggcgacaaccatacgctgagagaccctcactacgttgaagacaaaggccataaataccttgattcgaagccaacacgggaacagaagagcacccccaaccgcaaggagcggcccaggactcagagcttcaccagcgccttcgccgaacggcgcgagtgcatccccaacgtacccgccgacaccaaactctccaaaatcaagaccctgcgcctggccaccagctacatcgcctacctcatggacctgctggccaaggacgaccagaatggcgaggcggaggccttcaaggcagagatcaagaagaccgacgtgaaagaggagaagaggaagaaggagctggcaagtaaatgcctggatttggagcaattaggagcctcagtggaacccacgggaaacctgagaactaagataaccaaggagaagcctaggcacacagggccacctgaagtcgtagtccctggctgctgccctcacagatcgagagcctacaaatccgacaaatatgcccacactttgacagtaaccgcctcccagcacgccccaccaccgccaacacacatggaggggtttgaacttttccaccttccggacctctgcagtccgtcgcaggacgcccaaaccacaggccggacacagatgaagccagaccacagcccccgccccagccaccgcgtgccgcaagccaaaggcaacaatgtggttatcacaagctacatgacaaacagaggcttcttcgaggataaaaaggcaacatttgcgccaagcttcttaatgaacatcaaaggcaataaaacatccgttgtcaaaaacagcatcctggagcaaggacagctgacagtcaactaa

SEQ ID NO: 25774 - DNA, 2451 bp, Homo sapiens; identical to SEQ ID NO: 4026
  SIMILAR (481)..(1143): 921254mologous to Cloning vector pZC320 SopB,accession number U26464,Smith-Waterman Score=1016.

SEQ ID NO: 25775 - DNA, 2952 bp, Homo sapiens
  SIMILAR (1321)..(1992): 981254mologous to Cloning vector pSacBII SacB,accession number U09128,Smith-Waterman Score=1183.
  misc_feature (1)...(2952): n = a,t,c or g
atggtctctcaggtcacttgctcaggggaaactaagcaccatgccaggaggacacccaagcattcccatggaaagatccacatggaaaggaaccaaggtgcctcaacctgtattcagcaccagtttgccagccatgaaagacaagtgttccaaaaggctttggggaaacttaaacccaacacgccatttgccgcgacgtcttcaatgggtttggaaacagaggaacaggagcccagcatcatcgggaagctgaaggtcgctggcatgctggcagtaggcaaagaagtcaacctggtcctactgctcaaaaacctgagcagggatacgaagacagtgacagtgaacatgacagcctggaccatcatctacaacggcacgcttgtacatgaagtgtggaaggactctgccacaatgtccctggaccctgaggaaggagaccataaccatgatgctcccatttccggcagctacacatctccagccggagggaatttccatgtctggaatgagagctggtttgcccggcaggacctaggcccctcttacaatggctggcaggttctggatgccaccccccaggaggagagtgaaggtacgctcaattgggtgggtgtgttccggtgcggcccagcctcagtcaccgccatccgcgagggtgatgtgcacctggctcacgatggccccttcgtgttttgcggggctctgaccaggaaagaacagtgttccaaaaggctttggggaaaactaaacccacacgccatttgccgcgacgtcttcaatgggtttggaaacagaggaacaggagcccacatcatcgggaagctgaaagtcgctggcatgctgcactttatctgttcgggcaatacgatgcccattgtacttgttgactggtctgatattcgtgagcaaaaacgacttatggtattgcgagcttcagtcgcactacacggtcgttctgttactctttatgagaaagcgttcccgctttcagagcaatgttcaaagaaagctcatgaccaatttctagccgaccttgcgagcattctaccgagtaacaccacaccgctcattgtcagtgatgctggctttaaagtgccatggtataaatccgttgagaagctgggttggtactggttaagtcgacgaatgcagattgaagaagcctttcgagacttgaaaagtcctgccttcggactaggccttcggccttggccgaccgagcgctcaaagcggtttgtttcctgctggttaatcggcctgagccttcacttacatgttgggcttgcggcgttcttggtcagaaacaagnagaaacccccgattaaaaatattgagtctgcaaaaggacttgatgtgtgggacagctggccgctgcaaaacgctgacggaacagtagctgaatacaacggctatcacgttgtgtttgctcttgcgggaagcccgaaagacgctgatgacacatcaatctacatgttttatcaaaaggtcggcgacaactcaatcgacagctggaaaaacgcgggccgtgtctttaaagacagcgataagttcgacgccaacgatccgatcctgaaagatcagacgcaagaatggtccggttctgcaacctttacatctgacggaaaaatccgtttattctacactgactattccggtaaacattacggcaaacaaagcctgacaacagcgcaggtaaatgtgtcaaaatctgatgacacactcaaaatcaacggagtggaagatcacaaaacgatttttgacggagacggaaaaacatatcagaacgttcagcagtttatcgatgaaggcaattatacatccggcgacaaccatacgctgagagaccctcactacgttgaagacaaaggccataaataccttgtattcgaagccaacacgggaacagaaaacggataccaaggcgaagaatctttatttaacaaagcgtactacggcggcggcacgaacttcttccnagaatccccagctctaggagtccagagtatcaactggcagaaggccttcaaccgacaagcgcatcacacagacaagttctccagccaggagctcatcttgcggagaggccaaaacttccaggtcttaatgatcatgaacaaaggccttggctctaacgaaagactggagttcattgtctccacagggccttacccctcagagtcggccatgacgaaggctgtgtttccactctccaatggcagtagtggtggctggagtgcggtgcttcangccagcaatggcaatactctgactatcagcatctccagtcctgccagcgcacccataggacgtcaggcaccgtgtatgaaatctaacaatgcgctcatcgtcatcctcggcaccgtcaccctggatgctgtaggcataggcttggttatgccggtactgccgggcctcttgcgggatatcgtccattccgacagcatcgccagtcactatggcgtgctgctagcgctatatgcgttgatgcaatttctatgcgcacccgttctcggagcactgtccgaccgctttggccgccgcccagtcctgctcgcttcgctacttggagccactatcgactacgcgatcatggcgaccacacccgtcctgtggatctacccactaaaccggtttacgcagtttcggcttagtgaaacaaaagaaatcaccaatccgtatgccatgcgtttatacgaatccctgtgtcagtatcgtaagccggatggctcaggcatcgtctctctgaaaatcgactggatcatagagcgttaccagctgcctcaaagttaccagcgtatgcctgacttccgccgccgcttcctgcaggtctgtgttaatgagatcaacagcagaactccaatgcgcctctcatacattgagaaaaagaaaggccgccagacgactcatatcgtattttccttccgcgatatcacttccatgacgacaggatag

SEQ ID NO: 25776 - DNA, 2233 bp, Homo sapiens
  SIMILAR (1639)..(1764): 921254mologous to Cloning vector pSacBII SacB,accession number U09128,Smith-Waterman Score=213.
  misc_feature (1)...(2233): n = a,t,c or g
ggattttgccgatttcggaaccaccatcaaacaggattttcgcctgctggggcaaaccagcgtggaccgcttgctgcaactctctcagggccaggcggtgaagggcaatcagctgttgcccgtctcactggtgaaaagaaaaaccaccctggcgcccaatacgcaaaccgcctctccccgcgcgttggccgattcattaatgcagctggcacgacaggtttcccgactggaaagcgggcaccggaaagacgctgatgacacatcaatctacatgttttatcaaaaggtcggcgacaactcaatcgacagctggaaaaacgcgggccgtgtctttaaagacagcgataagttcgacgccaacgatccgatcctgaaagatcagacgcaagaatggtccggttctgcaacctttacatctgacggaaaaatccgtttattctacactgactattccggtaaacattacggcaaacaaagcctgacaacagcgcaggtaaatgtgtcaaaatctgatgacacactcaaaatcaacggagtggaagatcacaaaacgatttttgacggagacggaaaaacatatcagaacgttcagcagtttatcgatgaaggcaattatacatccggcgacaaccatacgctgagagaccctcactacgttgaagacaaaggccataaataccttgtattcgaagccaacacgggaacagaaaacggataccaaggcgaagaatctttatttaacaaagcgtactacggcggcggcacgaacttcttccgtaaagaaagccagaagcttcagcagagcgctaaaaaacgcgatgctgagttagcgaacggcgccctcggtatcatagagttaaataatgattacacattgaaaaaagtaatgaagccgctgatcacttcaaacgcggtcggcgacaactcaatcgacagctggaaaaacgcgggccgtgtctttaaagacagcgataagttcgacgccaacgatccgatcctgaaagatcagacgcaagaatggtccggttctgcaacctttacatctgacggaaaaatccgtttattctacactgactattccggtaaacattacggcaaacaaagcctgacaacagcgcaggtaaatgtgtcaaaatctgatgacacactcaaaatcaacggagtggaagatcacaaaacgatttttgacggagacggaaaaacatatcagaacgttcagcagtttatcgatgaaggcaattatacatccggcgacaaccatacgctgagagaccctcactacgttgaagacaaaggccataaataccttgtattcgaagccaacacgggaacagaaaaaaaataccaaggcgaagaatctttatttaacaaagcgtactacggcggcggcacgaacttcttccgtaaagaaagccagaagcttcagcagagcgctaaaaaacgcgatgctgagttagcgaacggcgccctcggtgtgatctccattcctttgtacatccctcacacgctgttcgaatgggattttggaaaggaaatctgtgtattttggctcactactgactatctgttatgtacagcatctgtatataacattgtcctcatcagctatgatcgatacctgtcagtctcaaatgctatcctaaacagcagcaaagcgaaaaataccaagtgcctcaattcgatcaatcaacgattaaaaatattgagtctgcaaaaggacttgatgtgtggaacagctggccgctgcaaaccgctgacggaaccagtagctgaatacancggctatcacgttgtgtttgctcttgcgggaagcccgaaagacgctgatgacacatcaatctacatgttttatcaaaaggtcggcgacaactcaatcgacagctggaaaaacgcgggccgtgtctttaaagacagcgataagttcgacgccaacgatccgatcctgaaagatcagacgcaagaatggtccggttctgcaacctttacatctgacggaaaaatccgtttattctacactgactattccggtaaacattacggcaaacaaagcctgacaacagcgcaggtaaatgtgtcacaaaatagaaacacactcaaaatcaacggagtggaagatcacaaaacgatttttgacggagacggaaaaacatatcagaacgttcagcagtttatcgatgaaggcaattatacatccggcgacaaccatacgctgagagaccctcactacgtttag

SEQ ID NO: 25777 - DNA, 2823 bp, Homo sapiens
  SIMILAR (1)..(591): 1001254mologous to Cloning vector pZC320 SopA,accession number U26464,Smith-Waterman Score=1035.
  misc_feature (1)...(2823): n = a,t,c or g
atgacgaaggctatcgccattgcacagtttaatgatgacagcccggaagcgaggaaaataacccggcgctggagaataggtgaagcagcggatttagttggggtttcttctcaggctatcagagatgccgagaaagcagggcgactaccgcacccggatatggaaattcgaggacgggttgagcaacgtgttggttatacaattgaacaaattaatcatatgcgtgatgtgtttggtacgcgattgcgacgtgctgaagacgtatttccaccggtgatcggggttgctgcccataaaggtggcgtttacaaaacctcagtttctgttcatcttgctcaggatctggctctgaaggggctacgtgttttgctcgtggaaggtaacgacccccagggaacagcctcaatgtatcacggatgggtaccagatcttcatattcatgcagaagacactctcctgcctttctatcttggggaaaaggacgatgtcacttatgcaataaagcccacttgctggccggggcttgacattattccttcctgtctggctctgcaccgtattgaaactgagttaatgggcaaatttgatgaagaatttgagagtgaggttcttctcacatcgtggctcaggacccagctgagagaggctcatttgtgtatgattcatgatcacacagcaagggaagaacagacaccggcgttcggtcgaagagtatctggtgtcatagaaattgccgatgggagtcgccgtcgtaaagctgctgcacttaccgaaagtgattatcgtgttctggttggcgagctggatgatgagcagatggctgcattatccagattgggtaacgattatcgcccaacaagtgcttatgaacgtggtcagcgttatgcaagccgattgcagaatgaatttgctggaaatatttctgcgctggctgatgcggaaaatatttcacgtaagattattacccgctgtatcaacaccgccaaattgcctaaatcagttgttgctcttttttctcaccccggtgaactatctgcccggtcaggtgatgcacttcaaaaagcctttacagataaagaggaattacttaagcagcaggcatctaaccttcatgagcagaaaaaagctggggtgatatttgaagctgaagaagttatcactcttttaacttctgtgcttaaaacgtcatctgcatcaagaactagtttaagctcacgacatcagtttgctcctggagcgacagtattgtataagggcgataaaatggtgcttaacctggacagaagtaggactaatgaatcctatgttaagaatgaggaaactgtggctttgggaaggtgtcagatgaaaaaggcagatcggnaatgtgacaatctaaaaacttgtcacacttcacatggatctgtcatggcggaaacagcggttatcaatcacaagaaacgtaaaaatagcccgcgaatcgtccagtcaaacgacctcactgaggcggcatatagtctctcccgggatcaaaaacgtatgctgtatctgttcgttgaccagatcagaaaatctgatggcaccctacaggaacatgacggtatctgcgagatccatgttgctaaatatgctgaaatattcggattgacctctgcggaagccagtaaggatatacggcaggcattgaagagtttcgcggggaaggaagtggttttttatcgccctgaagaggatgccggcgatgaaaaaggctatgaatcttttccttggtttatcaaacgtgcgcacagtccatccagagggctttacagtgtacatatcaacccatatctcattcccttctttatcgggttacagaaccggtttacgcagtttcggcttagtgaaacaaaagaaatcaccaatccgtatgccatgcaatccccctacactgactattccggtaaacattacggcaaacaaagcctgacaacagcgcaggtaaatgtgtcaaaatctgatgacacactcaaaatcaacggagtggaagatcacaaaacgatttttgacggagacggaaaaacatatcagaacgttcagcagtttatcgatgaaggcaattatacatccggcgacaaccatacgctgagagaccctcactacgttgaagacaaaggccataaataccttgtattcgaagccaacacgggaacagaaaacggataccaaggcgaagaatctttatttaacaaagcgtactacggcggcggcacgaacttcttccgtaaagaaagccagaagcttcagcagagcgctaaaaaacgcgatgctgagttagcgaacggcgccctcggtatcatagagttaaataatgattacacattgaaaaaagtaatgaagccgctgatcacttcaaacacggtaactgatgaaatcgagcgcgcgaatgttttcaaaatgaacggcaaatggtacttgttcactgattcacgcggttcaaaaatgacgatcgatgcgggtatcagtcacaagaaacgaaaaaatagcccgcgaatcgtccagtcaaacgacctcactgaggcggcatatagtctctcccgggatcaaaaacgtatgctgtatctgttcgttgaccagatcagaaaatctgatggcaccctacaggaacatgacggtatctgcgagatccatgttgctaaatatgctgaaatattcggnaatacctctgcggaagccagtaaggatatacggcaggcattgaagagtttcgcggggaaggaagtggttttttatcgccctgaagaggatgccggcgatgaaaaaggctatgaatcttttccttggtttatcaaacgtctgtgttaa

SEQ ID NO: 25778 - DNA, 1938 bp, Homo sapiens
  SIMILAR (802)..(1269): 921254mologous to Cloning vector pSacBII SacB,accession number U09128,Smith-Waterman Score=759.
atgggtttgctcttggggaaagcccgaaaaaacggtgaagacacatcgatttacatgtttaagcaaaaggtaaatgtgtcaaaatctgatgacacactcaaaatcaacggagtggaagatcacaaaacgatttttgacggagacggaaaaacatatcagaacgttcagcagtttatcgatgaaggcaattatacatccggcgacaaccatacgctgagagaccctcactacgttgaagacaaaggccataaataccttgtattcgaagccaacacgggaacagaaaacggataccaaggcgaagaatctttatttaacaaagcgtactacggcggcggcacgaacttcttccgtaaagaaagccagaagcttcagcagagcgctaaaaaacgcgatgctgagttagcgaacggcgccctcggatgctgcatcataccctgtattcatggattggtgcagagacttatagaaacagctctcaccaaaacctttaattctcccccaccttactcagataaactcctacttttagaaaaccaagcagaacagcagagtcaagacatgttaaagagtttgaagaggaagaattatgaaaatcaagagggggaagtagtaggaaacattgagttcctcttcaaagatccattgtcctctattttcaaagcctatcttccttgcctccttgcccctagttatggatgcagcagactgaagaaattcagacatcccgcaacctgcgattatcgcaaggtcaaggcaaagtccggtaatggggattcttctagagtccgcaaagacgagggaggagcgactcaagccttcgcgaaagaaaataaccaaaaagcatacaaagaaacgtacggcgtctctcatattacacgccatgatatgctgcagatccctaaacagcagcaaaacgaaaaataccaagtgcctcaattcgatcaatcaacgattaaaaatattgagtctgcaaaaggacttgatgtgtgggacagctggccgctgcaaaacgctgacggaacagtagctgaatacaacggctatcacgttgtgtttgctcttgcgggaagcccgaaagacgctgatgacacatcaatctacatgttttatcaaaaggtcggcgacaactcaatcgacagctggaaaaacgcgggccgtgtctttaaagacagcgataagttcgacgccaacgatccgatcctgaaagatcagacgcaagaatgtattgacagcgcgcctaacctgggtatcggcacgattaatgtcgtatgtgctgctgatgtgctgattgttcccacgcctgctgagttgtttgactacacctccgcactgcagtttttcgatatgcttcgtgatctgctcaagaacgttgatcttaaagggttcgagcctgatgtacgtattttgcttaccaaatacagcaatagtaatggctctcagtccccgtggatggaggagcaaattcgggatgcctggggaagcatggttctaaaaaatgttgtacgtgaaacggatgaagttggtaaagctgccccgatggtggattcgttaattgcgcgcgtaggagtaatggctcgcggtaatgccattactttgcctgtatgtggtcgggatgtgaagtttactcttgaagtgctccggggtgatagtgttgagaagacctctcgggaactgaaccggagccaagagatcggcgtgaagcccttgtcctgcggctcggcccagatctggcagcacggcaccagcctcatgaactacctgcgcatgggtaaggaaatgggccctacccggtgtgagaataaatctggacactcagcaatgtgggcagaaaggatcctcacatactgcagcaaccaggtaactctgtgcacagaccaagacagccactactgccccagatccttcccttactcacgttgttcctcctccttatga

SEQ ID NO: 25779 - DNA, 2262 bp, Homo sapiens
  SIMILAR (1120)..(1728): 931254mologous to unidentified cloning vector 29kD protein essential for the replication of mini F plasmid,accession number AB015619,Smith-Waterman Score=971.
  misc_feature (1)...(2262): n = a,t,c or g
atgaaatctaacaatgcgctcatcgtcatcctcggcaccgtcaccctggatgctgtaggcataggcttggttatgccggtactgccgggcctcttgcgggatatcgtccattccgacagcatcgccagtcactatggcgtgctgctagcgctatatgcgttgatgcaatttctatgcgcacccgttctcggagcactgtccgaccgctttggccgccgcccagtcctgctcgcttcgctacttggagccactatcgactacgcgatcatggcgaccacacccgtcctgtggatctacccactaaacgtggactccaacgtcaaagggcgaaaaaccgtctatcagggcgatggcccactacgtgaaccatcacccaaatcaagttttttggggtcgaggtgccgtaaagcactaaatcggaaccctaaaggagcccccgatttagagcttgacggggaaagccggcgaacgttgcgagaaaggaagggaagaaagcgaaaggagcgggcgctagggcgctggcaagnccagcaacacagaaatccacagaaaggaaaacaatggagctacaagagtaccttcaagtttaaatctgagagtgatattcatttggcagaacatcataaacaggtgttatatgatgggaaacttgcaagtagcattgcctttacatataatgctaaggccactgatgctcagctctgcctggaatcatcaccaaaagagaatgcatcaatttttgtgcattccccacatgctctaatgcttcagatcttgacagaacaagtatgtactcaggtcgtacacaaaccacatccagagccagattctacagtgaaaattcagaatccaagtgagcaaatggcagttctttactgtattgtgctggttggtggagaatttgacttggagatgaactttattatccaggatgctgagagtataacatgtatgacagagcttttggagcactgtgatgtaacatgtcaagcagaaatatggagcatgtttacagccattctacgaaaaagtgttcggaatttacagactagcacagaagttgggctaattgaacaatgtgacaatctaaaaacttgtcacacttcacatggatctgtcatggcggaaacagcggttatcaatcacaagaaacgtaaaaatagcccgcgaatcgtccagtcaaacgacctcactgaggcggcatatagtctctcccgggatcaaaaacgtatgctgtatctgttcgttgaccagatcagaaaatctgatggcaccctacaggaacatgacggtatctgcgagatccatgttgctaaatatgctgaaatattcggattgacctctgcggaagccagtaaggatatacggcaggcattgaagagtttcgcggggaaggaagtggttttttatcgccctgaagaggatgccggcgatgaaaaaggctatgaatcttttccttggtttatcaaacgtgcgcacagtccatccagagggctttacagtgtacatatcaacccatatctcattcccttctttatcgggttacagaaccggtttacgcagtttcggcttagtgaaacaaaagaaatcaccaatccgtatgccatgcgtttatacgaatccctgtgtcagtatcgtaagccggatggctcaggcatcgtctctctgaaatcgactggatctagagcgttccagctgcctcaaagtaccagcttaatgggcaaatttgatgaaggtaaactgcccaccgatccacacctgatgctccgactggccattgaaactgttgctcatgactatgatgtcatagttattgacagcgcgcctaacctgggtatcggcacgattaatgtcgtatgtgctgctgatgtgctgattgttcccacgcctgctgagttgtttgactacacctccgcactgcagtttttcgatatgcttcgtgatctgctcaagaacgttgatcttaaagggttcgagcctgatgtacgtattttgcttaccaaatacagcaatagtaatggctctcagtccccgtggatggaggagcaaattcgggatgcctggggaagcatggttctaaaaaatgttgtacgtgaaacggatgaagttggtaaaggtcagatccggatgagaactgtttttgaacaggccattgatcaacgctcttcaactggtgcctggagaaatgctctttctatttgggaacctgtctgcaatgaaattttcgatcgtctgattaaaccacgctgggagattagataa

SEQ ID NO: 25780 - DNA, 2103 bp, Homo sapiens
  SIMILAR (546)..(602): 591254mologous to Shigella dysenteriae RepE,accession number AF239690,Smith-Waterman Score=46.
atgctgtatctgttcgttgaccagatcagaaaatctgatggcaccctacaggaacatgacggtatctgcgagatccatgttgctaaatatgctgaaatattcggattgacctctgcggaagccagtaaggatatacggcaggcattgaagagtttcgcggggaaggaagtggttttttatcgccctgaagaggatgccggcgatgaaaaaggctatgaatcttttccttggtttatcaaacgtgcgcacagtccatccagagggctttacagtgtacatatcaacccatatctcattcccttctttatcgggttacagaaccggtttacgcagtttcggcttagtgaaacaaaagaaatcaccaatccgtatgccatgcgtttatacgaatccctgtgtcagtatcgtaagccggatggctcaggcatcgtctctctgaaaatcgactggatcatagagcgttaccagctgcctcaaagttaccagcgtatgcctgacttccgccgccgctttctggcagtctgtgttaatgagatcaacagcagaactccaatgcgcctctcatacattgagaaaaagaaggccggcagaccactcatatcgacccccataagcacaagttttatccggcctttattacattcttgcccgcctgatgaatgctcatccggagttccgtatggcaatgaaagacgtgaataccacgacgatttccggcagtttctacacatatattcgcaagatgtggcgtgttacggtgaaaacctggcctatttccctaaagggtttattgagaatatgtttttcgtctcagccaatccctgggtgagtttcaccagttttgatttaaacgtggccaatatggacaacttcttcgcccccgttttcaccatgggcaaatattatacgcaaggcgacaaggtgctgatgccgctggcgattcaggacgatgtcacttatgcaataaagcccacttgctggccggggcttgacattattccttcctgtctggctctgcaccgtattgaaactgagttaatgggcaaatttgatgaaggtaaactgcccaccgatccacacctgatgctccgactggccattgaaactgttgctcatgactatgatgtcatagttattgacagcgcgcctaacctgggtatcggcacgattaatgtcgtatgtgctgctgatgtgctgattgttcccacgcctgctgagttgtttgactacacctccgcactgcagtttttcgatatgcttcgtgatctgctcaagaacgttgatcttaaagggttcgagcctgatgtacgtattttgcttaccaaatacagcaatagtaatggctctcagtccccgtggatggaggagcaaattcgggatgcctggggaagcatggttctaaaaaatgttgtacgtgaaacggatgaagttggtaaaggtcagatccggatgagaactgtttttgaacagccattgatcaacgctcttcaactgatcagaaaatctgatggcaccctacaggaacatgacggtatctgcgagatccatgttgctaaatatgctgaaatattcggattgacctctgcggaagccagtaaggatatacggcaggcattgaagagtttcgcggggaaggaagtggttttttatcgccctgaagaggatgccggcgatgaaaaaggctatgaatcttttccttggtttatcaaacgtgcgcacagtccatccagagggctttacagtgtacatatcaacccatatctcattcccttctttatcgggttacagaaccggtttacgcagtttcggcttagtgaaacaaaagaaatcaccaatccgtatgccatgcgtttatacgaatccctgtgtcagtatcgtaagccggatggctcaggcatcgtctctctgaaaatcgactggatcatagagcgttaccagctgcctcaaagttaccagcgtatgcctgacttccgccgccgcttcctgcaggtctgtgttaatgagatcaacagcagaactccaatgcgcctctcatacattgagaaaaagaaggccgccagacgactcatatcgtattttccttccgcgatatcacttccatga

SEQ ID NO: 25781 - DNA, 8849 bp, Homo sapiens
  SIMILAR (3456)..(2500): 911254mologous to Cloning vector pZC320 SopA,accession number U26464,Smith-Waterman Score=1508.
tcaacaagatggtgaattgactagtgggtagatccacaggacgggtgtggtcgccatgatcgcgtagtcgatagtggctccaagtagcgaagcgagcaggactgggcggcggccaaagcggtcggacagtgctccgagaacgggtgcgcatagaaattgcatcaacgcatatagcgctagcagcacgccatagtgactggcgatgctgtcggaatggacgatatcccgcaagaggcccggcagtaccggcataaccaagcctatgcctacagcatccagggtgacggtgccgaggatgacgatgagcgcattgttagatttcatacacggtgcctgactgtccaggttaagcaccattttatcgcccttatacaatactgtcgctccaggagcaaactgatgtcgtgagcttaaactagttcttgatgcagatgacgttttaagcacagaagttaaaagagtgataacttcttcagcttcaaatatcaccccagcttttttctgctcatgaaggttagatgcctgctgcttaagtaattcctctttatctgtaaaggctttttgaagtgcatcacctgaccgggcagatagttcaccggggtgagaaaaaagagcaacaactgatttaggcaatttggcggtgttgatacagcgggtaataatcttacgtgaaatattttccgcatcagccagcgcagaaatatttccagcaaattcattctgcaatcggcttgcataacgctgaccacgttcataagcacttgttgggcgataatcgttacccaatctggataatgcagccatctgctcatcatccagctcgccaaccagaacacgataatcactttcggtaagtgcagcagctttacgacggcgactcccatcggcaatttctatgacaccagatactcttcgaccgaacgccggtgtctgttgaccagtcagtagaaaagaagggatgagatcatccagtgcgtcctcagtaagcagctcctggtcacgttcattacctgaccatacccgagaggtcttctcaacactatcaccccggagcacttcaagagtaaacttcacatcccgaccacatacaggcaaagtaatggcattaccgcgagccattactcctacgcgcgcaattaacgaatccaccatcggggcagctggtgtcgataacgaagtatcagttgaagagcgttgatcaatggcctgttcaaaaacagttctcatccggatctgacttttaccaacttcatccgtttcacgtacaacattttttagaaccatgcttccccaggcatcccgaatttgctcctccatccacggggactgagagccattactattgctgtatttggtaagcaaaatacgtacatcaggctcgaaccctttaagatcaacgttcttgagcagatcacgaagcatatcgaaaaactgcagtgcggaggtgtagtcaaacaactcagcaggcgtgggaacaatcagcacatcagcagcacatacgacattaatcgtgccgatacccaggttaggcgcgctgtcaataactatgacatcatagtcatgagcaacagtttcaatggccagtcggagcatcaggtgtggatcggtgggcagtttaccttcatcaaatttgcccattaactcagtttcaatacggtgcagagccagacaggaaggaataatgtcaagccccggccagcaagtgggctttattgcataagtgacatcgtccttttccccaagatagaaaggcaggagagtgtcttctgcatgaatatgaagatctggtacccatccgtgatacattgaggctgttccctgggggtcgttaccttccacgagcaaaacacgtagccccttcagagccagatccaacaatgcgagtgggaccatggtcccagtgttataatcagactggcgataagagtgggtctgtggtcccagtctgaagatcagaccgacgaggcgagtgggaccgtggtcgcagtctgaggaggaggtgggtagaccagatgcccggaagaagcccttccaccagctgtactgtacattggtttctccagacaggaggagtttttgtgcaattgtcaaatgccaggaattgtaagataaatatttatagagaggggatctcctagagtagaactgcgaggtcagcaacgccacggccgttctgtccgtcacttcccagatccgcgctttctctgtccttcctgtgcgacggttacgccgctccatgagcttatcgcgaataaatacctgcaaggaagtgtggaagtcataagaggctgagtcgctgaccttccccttgaagtccagacttgctcttcgaccgaacgccggtgtctgttgaccagtcagtagaaaagaagggatgagatcatccagtgcgtcctcagtaagcagctcctggtcacgttcattacctgaccatacccgagaggtcttctcaacactatcaccccggagcacttcaagagtaaacttcacatcccgaccacatacaggcaaagtaatggcattaccgcgagccattactcctacgcgcgcaattaacgaatccaccatcggggcagctggtgtcgataacgaagtatctttaccaacttcatccgtttcacgtacaacattttttagaaccatgcttccccaggcatcccgaatttgctcctccatccacggggactgagagccattactattgctgtatttggtaagcaaaatacgtacatcaggctcgaaccctttaagatcaacgttcttgagcagatcacgaagcatatcgaaaaactgcagtgcggaggtgtagtcaaacaactcagcaggcgtgggaacaatcagcacatcagcagcacatacgacattaatcgtgccgatacccaggttaggcgcgctgtcaataactatgacatcatagtcatgagcaacagtttcaatggccagtcggagcatcaggtgtggatcggtgggcagtttaccttcatcaaatttgcccattaactcagtttcaatacggtgcagagccagacaggaaggaataatgtcaagccccggccagcaagtgggctttattgcataagtgacatcgtccttttccccaagatagaaaggcaggagagtgtcttctgcatgaatatgaagatctggtacccatccgtgatacattgaggctgttccctgggggtcgttaccttccacgagcaaaacacgtagccccttcagagccagatcctgagcaagatgaacagaaactgaggttttgtaaacgccacctttatgggcagcaaccccgatcaccggtggaaatacgtcttcagcacgtcgcaatcgcgtaccaaacacatcacgcatatgattaatttgttcaattgtataaccaacacgttgctcaacccgtcctcgaatttccatatccgggtgcggtagtcgccctgctttctcggcatctctgatagcgatatgagtcgtctggcggcctttctttttctcaatgtatgagaggcgcattggagttctgctgttgatctcattaacacagacctgcaggaagcggcggcggaagtcaggcatacgctggtaactttgaggcagctggtaacgctctatgatccagtcgattttcagagagacgatgcctgagccatccggcttacgatactgacacagggattcgtataaacgcatggcatacggattggtgatttcttttgtttcactaagccgaaactgcgtaaaccggttctgtaacccgataaagaagggaatgagatatgggttgatatgtacactgtaaagccctctggatggactgtgcgcacgtttgataaaccaaggaaaagattcatagcctttttcatcgccggcatcctcttcagggcgataaaaaaccacttccttccccgagaaactcttcaatgcatgctgtatatccatactggcttccgcagaggtcaatccgaatatttcagcatatttagcaacatggatctcgcagataccgtcatgttcctgtagggtgccatcagattttctgatctggtcaacgaacagatacagcatacgtttttgatcccgggagagactatatgccgcctcagtgaggtcgtttgactggacgattcgcgggctatttttacgtttcatgtgattgataaccgctgtttccgccatgacagatccatgtgaagtgtgacaagtttttagattgtcacactgcaggaagcggcggcggaagtcaggcatacgctggtaactttgaggcagctggtaacgctctatgatccagtcgattttcagagagacgatgcctgagccatccggcttacgatactgacacagggattcgtataaacgcatggcatacggattggtgatttcttttgtttcactaagccgaaagaattcgagctcggtacccatccggatctgacctttaccaacttcatccgtttcacgtacaacattttttagaaccatgcttccccaggcatcccgaatttgctcctccatccacggggactgagagccattactattgctgtatttggtaagcaaaatacgtacatcaggctcgaaccctttaagatcaacgttcttgagcagatcacgaagcatatcgaaaaactgaatcgccagcggcatcagcaccttgtcgccttgcgtataatatttgcccatggtgaaaacgggggcgaagaagttgtccatattggccacgtttaaatcaaaactggtgaaactcacccagggattggctgagacgaaaaacatattctcaataaaccctttagggaaataggccaggttttcaccgtaacacgccacatcttgcgaatatatgtgtagaaactgccggaaatcgtcgtggtattcactccagagcgatgaaaacgtttcagtttgctcatggaaaacggtgtaacaagggtgaacactatcccatatcaccagctcaccgtctttcattgccatacggaactccggatgagcattcatcaggcgggcaagaatgtgaataaaggccggataaaacttgtgcttattttctttacggtaccattctggataatgcagccattggctcatcatccagctcgccaaccagacccgataatcacttccgtaagtgcagcagtttacgacggcgactcccatcggcatttttatgacaccagatatcttcgaccgaaccccggtgtctttaccaacttcatccgtttcacgtacaacattttttagaaccatgcttccccaggcatcccgaatttgctcctccatccacggggactgagagccattactattgctgtatttggtaagcaaaatacgtacatcaggctcgaaccctttaagatcaacgttcttgagcagatcacgaagcatatcgaaaaactgaatcgccagcggcatcagcaccttgtcgccttgcgtataatatttgcccatggtgaaaacgggggcgaagaagttgtccatattggccacgtttaaatcaaaactggtgaaactcacccagggattggctgagacgaaaaacatattctcaataaacccgtctttcattgccatacggaactccggatgagcattcatcaggcgggcaagaatgtgaataaaggccggataaaacttgtgcttatttttctttacggtctttaaaaaggccgtaatatccagctgaacggtcccagcttttttctgctcatgaaggttagatgcctgctgcttaagtaattcctctttatctgtaaaggctttttgaagtgcatcacctgaccgggcagatagttcaccggggtgagaaaaaagagcaacaactgatttaggcaatttggcggtgttgatacagcgggtaataatcttacgtgaaatattttccgcatcagccagcgcagaaatatttccagcaaattcattctgcaatcggcttgcataacgctgaccacgttcataagcacttgttgggcgataatcgttacccaatctggataatgcagccatctgctcatcatccagctcgccaaccagaacacgataatcactttcggtaagtgcagcagctttacgacggcgactcccatcggcaatttctatgacaccagatactcttcgaccgaacgccggtgtctgttgaccagtcagtagaaaagaagggatgagatcatccagtgcgtcctcagtaagcagctcctggtcacgttcattacctgaccatacccgagaggtcttctcaacactatcaccccggagcacttcaagagtaaacttcacatcccgaccacatacaggcaaagtaatggcattaccgcgagccattactcctggattggggaggcggttgccgccgctgctgctgacggtgtgacgttctctgttccggtcacaccacatacgttccgccattcctatgcgatgcacatgctgtatgccggtataccgctgaaagttctgcaaagccagtgagacgggcaacagctgtttgcccttcaccgcctggccctgagagagttgcagcaagcggtccacgctggtttgccccagcaggcgaaaatcctgtttgatggttggtccgaaatcggcaaaatccctgtccaggttaagcaccattttatcgcccttatacaatactgtcgctccaggagcaaactgatgtcgtgagcttaaactagttcttgatgcagatgacgttttaagcacagaagttaaaagagtgataacttcttcagcttcaaatatcaccccagcttttttctgctcatgaaggttagatgcctgctgcttaagtaattcctctttatctgtaaaggctttttgaagtgcatcacctgaccgggcagatagttcaccggggtgagaaaaaagagcaacaactgatttaggcaatttggcggtgttgatacagcgggtaataatcttacgtgaaatattttccgcatcagccagcgcagaaatatttccagcaaattcattctgcaatcggcttgcataacgctgaccacgttcataagcacttgttgggcgataatcgttacccaatctggataatgcagccatctgctcatcatccagctcgccaaccagaacacgataatcacccccggtaagtgcagcagctccctgttttggtacagcttccacttgcagcactgctcacagatgccgattcgctcacattggaaaggtcctattccaactccaagatccttcttttctgaaaagcctgccctgcttctctttggccagcctgttttgactggcggctggggctcccctaaactgacgtaaaggctgaaaaccggcccgcgtgaatagtgaacagtccatttgccgttcattttgaaaacattcgcgcgctcgatttcatcagttaccgtgtttgaagtgatcagcggcttcattacttttttcaatgtgtaatcattatttaactctatgataccgagggcgccgttcgctaactcagcatcgcgttttttagcgctctgctgaagcttctggctttctttacggaagaagttcgtgccgccgccgtagtacgctttgttaaataaagattcttcgccttggtatccgttttctgttcccgtgttggcttcgaataccaggtatttatggcctttgtcttcaacgtagtgagggtctctcagcgtctggttgtcgccggatgtctgattgccttcgtcggtggactgctgagcgttgtgatgtgttgttccgcgtccgtcgagaggctgtttgcggatcttgcgcttcgttgattttgcgggggtgatgtgttcgctggccgctttagcgggcctggggttttgggctaagggatgaaaacggtcttctgtggaggatccacgacgagaatcgcttgaatcgggtgtggtcgccatgatcgcgtagtcgatagtggctccaagtagcgaagcgagcaggactgggcggcggccaaagcggtcggacagtgctccgagaacgggtgcgcatagaaattgcatcaacgcatatagcgctagcagcacgccatagtgactggcgatgctgtcggaatggacgatatcccgcaagaggcccggcagtaccggcataaccaagcctatgcctacagcatccagggtgacggtgccgaggatgacgatgagcgcattgttagatttcatacacggtgcctgacgtcgacagcgacacacttgcatcggatgcagcccggttaacgtgccggcacggcctgggtaaccaggtattttgtccacataaccgtgcgcaaaatgttgtggataagcaggacacagcagcaatccacagcaggcatacaaccgcacaccgaagttacttcgttttccgctcactggctttgctctcactcggccgctttgctgttcctgataccttgcgtggctattattgttatatggcccctccgtcaatccttgggtgcgccgtcgcatgcttttatcgggtcggccgtgggcggtgacgttattctgctcgtataccaccgactgctggtccggtgcccagtacgttgtgttggctccacttagccgctgttttggccagaaggtctgctttggtatccaagtcatgagaatgaacggttgagcaatggaaagccctaaatgctgtctgtatttgggaataatgatttgtatttcattcctgggtgttgtaatttcaccggtgctggtcagtgcatacggggtaaaacagggggctcccatttccccaggcctataaggcctgtcaggggagtgcttcgaggtgagtgttacagctcttaaggcggctcgtctggagttgttcgttcctcccggtgggctcctggtcccgctgacttcaggagtggagccgcagatcttcat

SEQ ID NO: 25782 - DNA, 16091 bp, Homo sapiens
  SIMILAR (304)..(1047): 991254mologous to Cloning vector pBACe3.6 levansucrase,accession number U80929,Smith-Waterman Score=1333.
atgcccacaaattcttgggcatttcggcagtccttctccatccaccggaaggttcctgaagatggagagactcgggaggaaacgcttctgcaggagtcagcatcgaaggaggcttactatctggggaagatcttggagatgcagaacgagctgaaacagagccgggctgtggtcagtaatgtacaggcagcttacgagaggctcaccgcagtcgtgcaggatctgaaggaggcccacaatttctggacttttttacgaattgcaacttctggcaaggaagaagcgaactcaagcctttcgcgaaaagaaaataaccaaaaagcatacaaagaaacgtacggcgtctctcatattacacgccatgatatgctgcagatccctaaacagcagcaaaacgaaaaataccaagtgcctcaattcgatcaatcaacgattaaaaatattgagtctgcaaaaggacttgatgtgtgggacagctggccgctgcaaaacgctgacggaacagtagctgaatacaacggctatcacgttgtgtttgctcttgcgggaagcccgaaagacgctgatgacacatcaatctacatgttttatcaaaaggtcggcgacaactcaatcgacagctggaaaaacgcgggccgtgtctttaaagacagcgataagttcgacgccaacgatccgatcctgaaagatcagacgcaagaatggtccggttctgcaacctttacatctgacggaaaaatccgtttattctacactgactattccggtaaacattacggcaaacaaagcctgacaacagcgcaggtaaatgtgtcaaaatctgatgacacactcaaaatcaacggagtggaagatcacaaaacgatttttgacggagacggaaaaacatatcagaacgttcagcagtttatcgatgaaggcaattatacatccggcgacaaccatacgctgagagaccctcactacgttgaagacaaaggccataaataccttgtattcgaagccaacacgggaacagaaaacggataccaaggcgaagaaactttggctatcagagatgccgagaaagcagggcgactaccgcacccggatatggaaattcgaggacgggttgagcaacgtgttggttatacaattgaacaaattaatcatatgcgtgatgtgtttggtacgcgattgcgacgtgctgaagacgtatttccaccggtgatcggggttgctgcccataaaggtggcgtttacaaaacctcagtttctgttcatcttgctcaggatctggctctgaaggggctacgtgttttgctcgtggaaggtaacgacccccagggaacagcctcaatgtatcacggatgggtaccagatcttcatattcatgcagaagacactctcctgcctttctatcttggggaaaaggacgatgtcacttatgcaataaagcccacttgctggccggggcttgacattattccttcctgtctggctctgcaccgtattgaaactgagttaatgggcaaatttgatgaaggtaaactgcccaccgatccacacctgatgctccgactggccattgaaactgttgctcatgactatgatgtcatagttattgacagcgcgcctaacctgggtatcggcacgattaatgtcgtatgtgctgctgatgtgctgattgttcccacgcctgctgagttgtttgactacacctccgcactgcagtttttcgatatgcttcgtgatctgctcaagaacgttgatcttaaagggttcgagcctgatgctgaaacaagccagggagctctgggcacactggcaaatgtagtgacctcccttgccaacctaagtgaatctttgaacaacggtgacacttcagaaatccagccagaggaccagtctgcaagtgagataactcgggcatttgataccttagctaaagcacttaataccacagacagctcctcttctccaagcttggcagatgggatagacaccagtggaggagggagcatccacgtcatcagcagagaccagtcgacacccatcattgaggttgaaggccccctcctttcagacacacacgtcacatttaagtcaattcggaaggatcggaaccggcagatcgcaaaaaaccagtacatacagaggaagccatgaacatgaccatcaaaaaaattgtaaaacaagccacagttctgactttaacgactgcacttctggcagaaggagcgactcaagctttcgcgaaagaaaataaccaaaaagcatacaaagaaacgtacggcgtctctcatattacacgccatgatatgctgcagatccctaaacagcagcaaaacgaaaaataccaagtgcctcaattcgatcaatcaacgattaaaaatattgagtctgcaaaaggacttgatgtgtgggacagctggccgctgcaaaacgctgacggaacagtagctgaatacaacggctatcacgttgtgtttgctcttgcgggaagcccgaaagacgctgatgacacatcaatctacatgttttatcaaaaggtcggcgacaactcaatcgacagctggaaaaacgcgggccgtgtctttaaagacagcgataagttcgacgccaacgatccgatcctgaaagatcagacgcaagaatggtccggttctgcaacctttacatctgacggaaaaatccgtttattctacactgactattccggtaaacattacggcaaacaaagcctgacaacagcgcaggtaaatgtgtcaaaatctgatgacacactcaaaaatcaacggagtggaggatcacaaaccgatcttggacggaggcggaaaaacatatcagaacgttcagcagtttatcgagaaaggcaattatacatccggcgacaaccatacgctgagagaccctcactacgttgaagacaaaggccataaatacctggtattcgaagccaacacgggaacagaaaacggataccaaggcgaagaatctttatttaacaaagcgtactacggcggcggcacgaaccttcttccgtaaagaaagccagaagcttcagcagagcgctaaaaaacgcgatgctgagttagcgaacggcgccctcggtatcatagagttaaataatgattacacattgaaaaaagtaatgaagccgctgatcacttcaaacacggtaactgatgaaatcgagcgcgcgaatgttttcaaaatgaacggcaaatggtacttgttcactgattcacgcggttcaaaaatgacgatcgatggtattaactcaaacgatatttacatgcttggttatgtatcaaactctttaaccggcccttacaagccgctgaacaaaacagggcttgtgctgcaaatgggtcttgatccaaccgatgtgacattcacttactctcacttcgcagtgccgcaagccaaaggggggtcctttagagtccccaaacagggatttagtctgacgtgttttctttttaatatgctgtttcgtacccgttgtcttctaaccaacataggagagacctccattcagattccgattcacacggcaacgcttttgtccaggaccccatgcttggttgtcaggaggcttacttctgaacagatggcagattctgcgtcccaagggcgcttccccccattcggcaaatataaggctggaaaccccatgcgcgtttgttccatcaaaaattggccaccagatgccatagcgcatccccattattttctcatatttgaaatacgcaatagtaaggttctcagtcccgtgggaggaggagcaaattcggaaggccgggacaagcatggttctaaaaattgttgtcgtgaaacggatgaagttgatacttcgttatcgacaccagctgccccgatggtggattcgttaattgcgcgcgtaggagtaatggctcgcggtaatgccattactttgcctgtatgtggtcgggatgtgaagtttactcttgaagtgctccggggtgatagtgttgagaagacctctcgggtatggtcaggtaatgaacgtgaccaggagctgcttactgaggacgcactggatgatctcatcccttcttttctactgactggtcaacagacaccggcgttcggtcgaagagtatctggtgtcatagaaattgccgatgggagtcgccgtcgtaaagctgctgcacttaccgaaagtgattatcgtgttctggttggcgagctggatgatgagcagatggctgcattatccagattgggtaacgattatcgcccaacaagtgcttatgaacgtggtcagcgttatgcaagccgattgcagaatgaatttgctggaaatattctgcgctggctgatgcggaaaatatttcacagctcgtgcagcacgggcctgcgtcagaattatccacgccctctccttgtccacctaccgggcggcggcctggtgcagcccacaggcccagctgcggactccttgcgcgcgttagttgctacacatacggaacactcgcgcccatcgttccgcggcgggggaacggggtgtgacaatctaaaaacttgtcacacttcacatggatctgtcatggcggaaacagcggttatcaatcacaagaaacgtaaaaatagcccgcgaatcgtccagtcaaacgacctcactgaggcggcatatagtctctcccgggatcaaaaacgtatgctgtatctgttcgttgaccagatcagaaaatctgatggcaccctacaggaacatgacggtatctgcgagatccatgttgctaaatatgctgaaatattcggattgacctctgcggaagccagtaaggatatacggcaggcattgaagagtttcgcggggaaggaagtggttttttatcgccctgaagaggatgccggcgatgaaaaaggctatgaatcttttccttggtttatcaaacgtgcgcacagtccatccagagggctttacagtgtacatatcaacccatatctcattcccttctttatcgggttacagaaccggtttacgcagtttcggcttagtgaaacaaaagaaatcaccaatccgtatgccatgcgtttatacgaatccctgtgtcagtatcgtaagccggatggctcaggcatcgtctctctgaaaatcgactggatcatagagcgttaccagctgcctcaaagttaccagcgtatgcctgacttccgccgccgcttcctgcaggtctgtgttaatgagatcaacagcagaactccaatgcgcctctcatacattgagaaaaagaaaggccgccagacgactcatatcgatctggctctgaaggggctacgtgttttgctcgtggaaggtaacgacccccagggaacagcctcaatgtatcacggatgggtaccagatcttcatattcatgcagaagacactctcctgcctttctatcttggggaaaaggacgatgtcacttatgcaataaagcccacttgctggccggggcttgacattattccttcctgtctggctctgcaccgtattgaaactgagttaatgggcaaatttgatgaaggtaaactgcccaccgatccacacctgatgctccgactggccattgaaactgttgctcatgactatgatgtcatagttattgacagcgcgcctaacctgggtatcggcacgattaatgtcgtatgtgctgctgatgtgctgattgttcccacgcctgctgagttgtttgactacacctccgcactgcagtttttcgatatgcttcgtgatctgctcaagaacgttgatcttaaagggttcgagcctgatgtacgtattttgcttaccaaatacagcaatagtaatggctctcagtccccgtggatggaggagcaaattcgggatgcctggggaagcatggttctaaaaaatgttgtacgtgaaacggatgaagttggtaaagctgccccgatggtggattcgttaattgcgcgcgtaggagtaatggctcgcggtaatgccattactttgcctgtatgtggtcgggatgtgaagtttactcttgaagtgctccggggtgatagtgttgagaagacctctcgggtatggtcaggtaatgaacgtgaccaggagctgcttactgaggacgcactggatgatctcatcccttcttttctactgactggtcaacagacaccggcgttcggtcgaagagtatctggtgtcatagaaattgccgatgggagtcgccgtcgtaaagctgctgcacttaccgaaagtgattatcgtgttctggttggcgagctggatgatgagcagatggctgcattatccagattgggtaacgattatcgcccaacaagtgcttatgaacgtggtcagcgttatgcaagccgattgcagaatgaatttgctggaaatatttctgcgctggctgatgcggaaaatatttcacgtaagattattacccgctgtatcaacaccgccaaattgcctaaatcagttgttgctcttttttctcaccccggtgaactatctgcccggtcaggtgatgcacttcaaaaagcctttaggggatcctctagagtcgacctgcaggcatgcaagctgtcaccgtcgcaaaagacatcttgcatggttgcccggagtaggctccttttctccgttactgccggacctcttacgggatatcgtccaccctgtacagcatctccagttactatggcgcggctcgtgagcgctatatgcgttgggtcaaatttaatgggcacccgtccatcggagcacctctcgggaacagctgtcgccgcgcgccccgtcagcctgacaacagcgcagggaaatgtgtcaaaatctgatgacacactcaatatcaacggagtggaagatcacaaaacgatttttgacggagacggaaaaacatatcagaacgttcagcagtttaccgatgaaggcaattatacatccggcgacaaccatacgctgagagaccctcactacgttgaagacaaaggccataaataccttgtattcgaatccaacacgggaacagaaaacggataccaaggcgaagaatctttatttaacaaagcgtactacggcgtcggcacgaacttcttccgtaaagaaagccagaagattcatcagagcgctaaaaaacgcgatgctgatttagcgaacggcgccctcggtgatcatgagagtttaataatgattccacgattgaaacactgtaaagtcggcgacaactcaatcgacagctggaaaaacgcgggccgtgtctttaaagacagcgataagttcgacgccaacgatccgatcctgaaagatcagacgcaagaatggtccggttctgcaacctttacatctgacggaaaaatccgtttattctacactgactattccggtaaacattacggcaaacaaagcctgacaacagcgcaggtaaatgtgtcaaaatctgatgacacactcaaaatcaacggagtggaagatcacaaaacgatttttgacggagacggaaaaacatatcagaacgttcagcagtttatcgatgaaggcaattatacatccggcgacaaccatacgctgagagaccctcactacgttgaagacaaaggccataaataccttgtattcgaagccaacacgggaacagaaaacggataccaaggcgaagaatctttatttaacaaagcgtactacggcggcggcacgaacttcttccgtaaagaaagccagaagcttcagcagagcgctaaaaaacgcgatgctgagttagcgaacggggatcctctagagtcgacctgcaggcatgcagtggactcttgttccaaactggaacaacactcaaccctatctcgggctattcttttgatttataagggattttgccgatttcggaaccaccatcaaacaggattttcgcctgctggggcaaaccagcgtggaccgcttgctgcaactctctcagggccaggcggtgaagggcaatcagctgttgcccgtctcactggtgaaaagaaaaaccaccctggcgcccaatacgcaaaccgcctctccccgcgcgttggccgattcattaatgcagctggcacgacaggtttcccgactggaaagcgggcaatgattgcaataaacagggatcctctagagtcgacctgcaggcatgcaagcatgttaacgaggaaaagcacgttaatacgtgctcgtcaaaagcaacccataggtaacgcccctgtagcacgggacattaaagcgacggccggggattttgccgatttcggaaccaccatcaaacaggattttcgcctgctggggcaaaccagcgtggaccgcttgctgcaactctctcagggccaggcgcccctgaacagcaagcagcctgacttaagctggttgcatcatgatggatcaaatgatgagattttaagaggggatcctctagagtcgaccttaaaaaccacgcagggacccccccccgtgttgaagaaaaacgatttccccgggcccaagggactcaagaagtttgtgggcccaaagcaccctttccggaaaaatccaagggagctccccggccccaaaatattgtgtttatgtgcccccatctcacggcctataattgggcccatccctaaacagcagcaaaacgaaaaataccaagtgcctcaattcgatcaatcaacgattaaaaatattgagtctgcaaaaggacttgatgtgtgggacagctggccgctgcaaaacgctgacggaacagtagctgaatacaacggctatcacgttgtgtttgctcttgcgggaagcccgaaagacgctgatgacacatcaatctacatgttttatcaaaaggtcggcgacaactcaatcgacagctggaaaaacgcgggccgtgtctttaaagacagcgataagttcgacgccaacgatccgatcctgaaagatcagacgcaagaatggtccggttctgcaacctttacatctgacggaaaaatccgtttattctacactgactattccggtaaacattacggcaaacaaagcctgacaacagcgcagacaaaggccataaataccttgtattcgaagccaacacgggaacagaaaacggataccaaggcgaagaatctttatttaacaaagcgtactacggcggcggcacgaacttcttccgtaaagaaagccagaagcttcagcagagcgggggatcctctagagtcgacctgcaggcatgcaagattttcatgccttggaaaatcaaacaagcaggagggattttgccgatttcggaaccaccatcaaacaggattttcgcctgctggggcaaaccagcgtggaccgcttgctgcaactctctcagggccaggcggtgaagggcaatcagctgttgcccgtctcactggtgaaaagaaaaaccaccctggcgcccaatacgcaaaccgcctctccccgcgcgttggccgattcattaaaggcagctggcccgaccaggtttccccgactggaaagcgggccagtgagcgcaacgcaaataatttcttgtcatttgaaatgctgacggagctggtccacagaggcagcgtgtatgacgccccggaattctcagtgcactttgtatgtggtggcctggctgcctgtatggccaccctcactgtgcaccccgtggatgttctgcgcacccgctttgcagctcagggtgagcccaagtcccactgtggtgaagctgtgatcttatcacatggctgcaggaaggggccagtctctccttggcagttcatcccgtacaccaagcccaaaggcctgagcttttccccaggcgcctttgtcatgagtcagtggttttttggcaaaatccccagagccaaggcagaagaaatgcttagcaaacagcggcacgatggggcctttcttatccgagagagtgagagcgctcctggggacttctccctctctgtcaataagtatttcctgctgcagttgcctggaatcctgtctctgactgatccaaattgtgaagccgttggtcagaagcagagcactggccccttccagcccaccatgccacaacccttagggcagaaggacccaacccagtacgggtctgtggcctgtaagaagctgggccccacagcagaagatgatggcgggcgagcaagcattaccgcctcctgtcagatcagcggcggcactagattctcacaggagcacgaaccctacgtgaactgcgtacgcgagggatctaggttccacgctccttatgagaatctaatacctgatgatctgagatgtcagaaccaaaacacaaagccatcccgtaaattgcccaagatcgcaatgcccgatctgtctgtgacagagctaggattccaagcaggcaggtctcgcctagagccagtattctttacaatacttcagatgtctctcattccacatccagaaggagctccgtcagcatttcaaatgacaagaactgcaagagtaagtgaagaagtcaccgacagcccaaaggatgagggtgaggaccaaatactccccaaatacatcacccgtgacccggctggggcccagcaacccaagtcctacgttgaagacaaaggccataaataccttgtattcgaagccaacacgggaacagaaaacggataccaaggcgaaaaatctttatttaacaaagcgtactacggcggcggcacgaacttcttccgtaaagaaagccagaagcttcagcagagcgctaaaaaacgcgatgctgagttagcgaacggcgccctcggtatcatagagttaaataatgattacacattgaaaaaagtaatgaagccgctgatcacttcaaacacggtaactgatgaaatcgagcgcgcgaatgttttcaaaatgaacggcaaatggtacttgttcactgattcacgcggttcaaaaatgacgatcgatggtattaactcaaacgatatttacatgcttggttatgtatcaaactctttaaccggcccttacaagccgctgaacaaaacagggcttgtgctgcaaatgggtcttgatccaaacgatgtgacattcacttactctcacttcgcagtgccgcaagccaaaggcaacaatgtggttatcacaagctacatgacaaacagaggcttcttcgaggataaaaaggcaacatttgcgccaagcttcttaatgaacatcaaaggcaataaaacatccgttgtcaaaaacagcatcctggagcaaggacagctgacagtcgggggccaaccccttcgcccagtgaaaaaccgcggcccgttcttttaaagacagcgataagttcgacgcccaacgatccgatcctgaaagatcagacgcaagaatggtccggttctgcaacctttacctctgagggaaaaatccgtttattctacactgactattccggtaaacattccggcaaacaaagcttgacaacagcgcaggtaaatgtgtcaaaatctgatgacacactcaaaatcaacggagtggaagatcacaaaacgatttttgacggagacggaaaaacatatcagaacgttcagcagtttatcgatgaaggcaattatacatccggcgacaaccatacgctgagagaccctcactacgttgaagacaaaggccataaataccttgtattcgaagccaacacgggaacagaaaacggataccaaggcgaagaatctttatttaacaaagcgtactacggcggcggcacgaacttcttccgtaaagaaagccagaagcttcagcagagcgctaaaaaacgcgatgctgagttagcgaacggcgccctcggtatcatagagttaaataatgattacacattgaaaaaagtaatgaagccgctgatcacttcaaacacggtaactgatgaaatcgagcgcgcgaatgttttcaaaatgaacggcaaatgcagtggcagtgtggacgtgtgtggactgtggcaaggtgctagccagcgccggggtgccagcctccatgcaggcatttgcagcagctgggtggcagcatggctggaggagggcagggggtccctgcaaggaatagaattgggcactcatgggggcagtctgctgttctccatgcttagttttgggcaggcagcagtgtcggcggcaggggctggtggtctcattgctgccagtgctcctatgacagtggtggtttactctagaggatccccgatcctgaaagatcagacgcaagaatggtccggttctgcaacctttacatctgacggaaaaatccgtttattctacactgactattccggtaaacattacggcaaacaaagcctgacaacagcgcaggtaaatgtgtcaaaatctgatgacacactcaaaatcaacggagtggaagatcacaaaacgatttttgacggagacggaaaaacatatcagaacgttcagcagtttatcgatgaaggcaattatacatccggcgacaaccatacgctgagagaccctcactacgttgaagacaaaggccataaataccttgtattcgaagccaacacgggaacagaaaacggataccaaggcgaagaatctttatttaacaaagcgtactacggcggcggcacgaacttcttccgtaaagaaagccagaagcttcagcagagcgctaaaaaacgcgatgctgagttagcgaacggcgccctcggtatcatagagttaaataatgattacacattgaaaaaagtaatgaagccgctgatcacttcaaacacggtaactgatgaaatcgagcgcgcgaatgttttcaaaatgaacggcaaatggtacttgttcactgattcacgcggttcaaaaatgacgatcgatgggtgtggtgtggacggtgtgtcccaggaacagggtgtggtgtggacggtgtgtcccacgaacagggtgtggtgtggacggtgtgtcccacgaacagggtgtggtgtggacggtgtgtcccacgaacaggaaagtggcagctttaccaagccgatgcagaaaaatttgctgcaaaattttgcgctgggcgatcgaaaaatatttcacgtaagattattacccgctgaatcaacaccgccaaattgcttaaatcagttgttgctctttatcgtcaccccggtgaactatctgcccggtcaggctttgcagaactttcagcggtataccggcatacagcatgtgcatcgcataggaatggcggaacgtatgtggtgtgaccggaacagagaacgtcacaccgtcagcagcagcggcggcaaccgcctccccaatccaggtcctgaccgttctattcatcatggaaggctgcagtacaagtttgactgtggaagtggccctggaattgtctctgttcagagcattcaggtcaatgatgggcagtggcacgcagtggccctggaagtgaatggaaactatgctcgcttggttctagaccaagttcatactgcatcgggcacagccccagggactctgaaaaccctgaacctggataactatgtgtttttggtggccacatccgtcagcagggaacaaggcatggaagaagtcctcaagttgaacgttcagcagtttatcgatgaaggcaattatacatccggcgacaaccatacgctgagagaccctcactacgttgaagacaaaggccataaataccttgtattcgaagccaacacgggaacagaaaacggataccaaggcgaagaatctttatttaacaaagcgtactacggcggcggcacgaacttcttccgtaaagaaagccagaagcttcagcagagcgctaaaaaacgcgatgctgagttagcgaacggcgccctcggtatcatagagttaaataatgattacacattgaaaaaagtaatgaagccgctgatcacttcaaacacggtaactgatgaaatcgagcgcgcgaatgttttcaaaatgaacggcaaatggtacttgttcactgattcacgcggttcaaaaatgacgatcgatggtattaactcaaacgatatttacatgcttggttatgtatcaaactctttaaccggcccttacaagccgctgaacaaaacagggcttgtgctgcaaatgggtcttgatccaaacgatgtgacattcacttactctcacttcgcagtgccgcaagccaaaggcaacaatgtgatccctaaacagcagcaaaacgaaaaataccgagtgcctcaattcgatcaatcaacgattaaaaatattgagtctgcaaaaggacttgatgtgtgggacagctggccgctgcaaaacgctgacggaacagtagctgaatacaacggctatcacgttgtgtttgctcttgcgggaagcccgaaagacgctgatgacacatcaatctacatgttttatcaaaaggtcggcgacaactcaatcgacagctggaaaaacgcgggccgtgtctttaaagacagcgataagttcgacgccaacgatccgatcctgaaagatcagacgcaagaatggtccggttctgcaacctttacatctgacggaaaaatccgtttattctacactgactattccggtaaacattacggcaaacaaagcctgacaacagcgcaggtaaatgtgtcaaaatctgatgacacactcaaaatcaacggagtggaagatcacaaaacgatttttgacggagacggaaaaacatatcagaacgttcagcagtttatcgatgaaggcaattatacatccggcgacaaccatacgctgagagaccctcactacgttgaagacaaaggccataaataccttgtattacgaagccacagcacgggaaacagagaaacggataccaaggcgaagaatctttatttaacaaagcgtactacggcggcggcacgaacttcttccgtaaagaaagccagaagcttcagcagagcgctaaaaaacgcgatgctgagttagcgaacggcgccctcggtatcatagagttaaataatgattacacattgaaaaaagtaatgaagccgctgatcacttcaaacacggtaactgatgaaatcgagcgcgcgaatgttttcaaaatgaacggcaaatggtacttgttcactgattcacgcggttcaaaaatgacgatcgatggtattaactcaaacgatatttacatgcttggttctgatgaatcccctaatgattttggtaatcgtcacctccacaaagagcgactcgctgtataccgttggcatgctagctttatctgttcgggcaatacgatgcccattgtacttgttgactggtctgatattcgtgagcaaaaacgacttatggtattgcgagcttcagtcgcactacacggtcgttctgttactctttatgagaaagcgttcccgctttcagagcaatgttcaaagaaagctcatgaccaatttctagccgaccttgcgagcattctaccgagtaacaccacaccgctcattgtcagtgatgctggctttaaagtgccatggtataaatccgttgagaagctgggttggtactggttaagtcgagtaagaggaaaagtacaatatgcagacctaggagcggaaaactggaaacctatcagcaacttacatgatatgtcatctagtcactcaaagactttaggctataagaggctgactaaaagcaatccaatctcatgccaaattctattgtataaatctcgctctaaaggccgaaaaaatcagcgctcgacacggactcattgtcaccacccgtcacctaaaatctactcagcgtcggcaaaggagccatgggttctagcaactaacttacctgttgaaattcgaacacccaaacaacttgttaatatctattcgaagcgaatgcagattgaagaaaccttccgagacttgaaaagtcctgcctacggactaggcctacgccatagccgaacgagcagctcagagcgttttgatatcatgctgctaatcgccctgatgcttcaactaacatgttggcttgcgggcgttcatgctcagaaacaagtgccgcaagccaaaggcaacaatgtggttatcacaagctacatgacaaacagaggcttcttcgaggataaaaaggcaacatttgcgccaagcttcttaatgaacatcaaaggcaataaaacatccgttgtcaaaaacagcatcctggagcaaggacagctgacagtcaactaa

SEQ ID NO: 25783 - DNA, 390 bp, Homo sapiens
  SIMILAR (270)..(10): 741254mologous to synthetic construct InsB peptide,accession number Z37515,Smith-Waterman Score=317.
ttatgccgcgtcaattcgctgcgtatatcgcttgctgattacgtgcagctttcccttcaggcgggattcatacagcggccagccatccgtcatccatatcaccacgtcaaagggtgacagcaggctcataagacgccccagcgtcgccatagtgcgttcaccgaatacgtgcgcaacaaccgtcttccggagaatggccgggtactcctctgagacaaaacttccagaggaacgatcaggcagcaacatctgctgttcaccaatatctgctgttctgcagcctccactgctgatacccaggcaaacagggtctgcgttggatctccggcaaactccaacagacctgcagctaagggtcctgactctgaaggtcgggctgtccgcggtcat

SEQ ID NO: 25784 - DNA, 1213 bp, Homo sapiens; identical to SEQ ID NO: 18207
  SIMILAR (1213)..(605): 991254mologous to Escherichia coli HyfG,accession number M63654,Smith-Waterman Score=1032.

SEQ ID NO: 25785 - DNA, 491 bp, Homo sapiens
  SIMILAR (491)..(3): 1001254mologous to Escherichia coli DNA polymerase I,accession number J01663,Smith-Waterman Score=831.
cagttttcgccactccccacttccaccagcaacggcacatccagacgggtacagttttccatcagttgatgaatctgcttcgcgacggcatcaacatcatctttatgaacttcaaataccagttcatcgtgtacctgcatgatcatacgtacacgcggttgctcagcctgtaaccacgcatcaacggcaatcatcgcccgtttgataatgtcggcggcggttccctgcattggcgcgttaatggctgcacgttcagccgctgcacgacgagcaccattgctggatttgatatccggcagatacagacggcgtccgtccagcgtttcaacgtagccctgctctttcgcctgagcacgggtgcgttccatatactccagcacgccagggtagcgttcgaagtaaaggtccatgtacttctgcgcttctttacgtggaatgttcaattgccgcgccagaccgaaagcactcatgccataaatcagaccaaagtt

SEQ ID NO: 25786 - DNA, 1195 bp, Homo sapiens
  SIMILAR (368)..(1039): 1001254mologous to Escherichia coli Pectinase gene transcriptional regulator,accession number D90795,Smith-Waterman Score=1148.
ttcagcgcgcgcctggttgattggtttgcccatttcgcgggtgatcatttgcgccatttcttcgctacgagcgcgcagagccttaccgatatcacgcagtttttcagcacgataatctatatttgtctcgcgccagtcgcgaaagcctcgtgccgccagctgaagtgcgttttcgatatcgtcagcgccagcccacggcagcacagaaagttgttcacccgtggcaggatttatcgaaattgcatgagttgccggagtaatggtcatcggggtatctcctttatgagtcatggtatgaagatacgcagatttactcttgctttaaaatgaataatattaagccacttattcacgaatcgagaatgctatggatctgacccaactggagatgttcaacgcggttgccgaagctggcagcataacccaggctgcagcaaaagtgcatcgcgtgccgtcgaatctcactacccgtctgcgccagctggaaacagaactgggggttgatctgtttattcgcgagaatcagcgtttacgtctctctcctgccgggcataactttttacgctatagccaacaaattctcgcgttagtggatgaagcgcggagcgttgtcgctggcgatgagccgcaaggtttattttctcttggttcgctggaaagcaccgctgcagtgcgcattccagccacgctggcggaattcaaccgtcgttatcccaaaattcagttttcactttccaccggcccttccggcactatgctggatggtgtactggagggaaaactgaatgcggcgtttattgatggacccattaaccatactgccatcgacgggataccggtataccgcgaggaactgatgatcgtcacgccacaaggatatgcgccagtaacccgtgccagtcaggttaatggcagtaacatttatgccttccgcgccaattgttcgtatcgtcgccacttcgagagctggtttcatgctgacggtgccgctccgggaactatccatgagatggagtcttatcacggaatgttggcctgtcccaccagtcagtcaagcagccgatctgccctcaaggagtttgaactccatggtggctgcataaattcatcaaaccatgaagatgaagaatacacaagcacatcaggtcttttccttaaagaagttgagctggggctaaaagagctccatgactga

SEQ ID NO: 25787 - DNA, 978 bp, Homo sapiens
  SIMILAR (454)..(969): 991254mologous to Escherichia coli K12 regulator of melibiose operon,accession number AE000484,Smith-Waterman Score=870.
atggggctagaagctactgacggggtggtgcgtaacggcaaaagcaccgccggacatcagcgctatctctgctctcactgccgtaaaacatggcaactgcagttcacttacaccgcttctcaacccgcagtagctgcatatgggcaaaagttacgcggttctgaatacctgaacaatacctcctggcagcagatcaaacagtgggctcagcaggcaaaaggggaagatccacagggttacagggcggaatttattcgcctgattgaactggcggatggacaaggcccaggccactgccaggactcttacagggacatccctacgcagaggcatcctacatcagaggactggcccttctcccttccctcttaccactgtggaagcctgggacccaacaggcttgaaatgagagctgaagagattgaatttgatgactgtgagatagagaaagatcaacttagcccgtttgaagtgcgccgctggcagcaggaattaaacagtccgaacgagcaaattcgccagctcgccattgatgaaattggcctgatgctcaagcgatttagcctctctggctgggaaccgattctggtcaataaaacctcgcgcacacacaaaaacagcgtctcgcgccatgcgcaattttatgttagccagatgctgggctttattgccgaaaactatgatcaggcgctgaccatcaacgatgtggctgagcacgtcaaacttaacgccaactatgcaatggggatattccagcgggtcatgcaattgacgatgaaacagtacattaccgcgatgcgcatcaaccacgttcgcgcgttactgagcgataccgataaaagtattctcgatattgccctgacgggaggctttcgttcaagtagtcgtttttacagcacgttcggcaaatatgtcggcatgtcgccgcaacaataccgcaaacttagccaacagcgccgccagacgttttcccgctaa

SEQ ID NO: 25788 - DNA, 1158 bp, Homo sapiens
  SIMILAR (669)..(220): 991254mologous to Escherichia coli K12 putative periplasmic binding transport protein,accession number AE000405,Smith-Waterman Score=792.
ttaagcatcatatggttggtccaacaaagagatgtgtccaaaatcttgggctttatttaggccactttctttatattgctgtgacttctgttggctacacctttctagcacatcgcagttcagaccagccacattccagtcactcaggaggcacacgtggccaatagctgccacattgaagttcagctctgatgtcagggggtgaatgaactgaacatcccttttgggcggtgcgtactgaataccgccgttattccagagattattttgcccacgtttaattttcagcgggctttctgaacctacgttacgctcaaaaatttccgagtagttacccacctgtttgatgatgttataggcccatttattatccagcttcagatccttgccgtaatcgccttctttacccagcagatgtgccatatcaggcgttgctggattagccgctttttcatcgacgttctgggaattgatgcccatctcttcagcattcagcatggcgaaaagcgtccagcgtacaatcgagaaccattcatcatcgccacgacgaactaccggaccaagcggttcttttgagataacttccggtaagacaatccattcagctgggttgcttaatttgatgcgcagggcatacagttgtgattgatccgaggccagcgtatcgcagccccgacatagccccacgggttgagaagcggtgtaagtgaactgcagttgccatgttttacggcagtgagagcagagatagcgctgatgtccggcggtgcttttgccgttacgcaccaccccgtcagtagcttcggtatctggtttatgacagtccagacaggcggcatccgggttacgctgctgggtaacttgcgtagcgatcatcagatgccgtggctgaaatccaccaccagtatgttcaggtaaatcaaactcgtgcagcgtatcgcaggctgcggcgatatcatcggcatgataattcggttttttgccagccacgcataataatgtggccatacgggttgccgatggttccccatccccgggcaataagggcgcgtgcgctatccacttttttgcccgtccatattcaacggcttctttgaggagttcattttccatcgttttcttgccgagcaggcgctggagttctttaatctgcttcat

SEQ ID NO: 25789 - DNA, 2025 bp, Homo sapiens
  SIMILAR (1267)..(2022): 981254mologous to Escherichia coli K12 putative general secretion pathway for protein export (GSP) (TYPE II TRAFFIC WARDEN ATPASE),accession number AE000409,Smith-Waterman Score=1218.
atgctgagcatggaagatgtgctggagatcctgcgcatcaaactcgtcggcgtgatcccagaggatcaatcagtattgcgcgcctctaaccagggtgaaccggtcattctcgacattaacgccgatgcgggtaaagcctacgcagataccgtagaacgtctgttgggagaagaacgtcctttccgcttcattgaagaagagaagaaaggcttcctcaaacgcttaaaccagcaccgctgcgtgaatgttgcgcgaggccagaatagcaatgatgaagaagccgaggatacccagaagtacgctgtgagaagtcagattaccgatgctcaccagcgtttccgggttagcgacaatcacacctgcgtttttcagccccatcatgccaatgaacagaccgataccgctggtaatacccacacgcagactcaccggaatgttggctatcatccagtagcgaacgcggaaaatcaagattgcgcccatcccgacctgccacggcaagcccatcgcctgtacaacgacaaaagcgaagaacgcattcaggcccatagcgggtgccagtgcaactggcagctaaaatttccccaaatcatcatccctgctgtgctggccatcggttattatgtctgggataataggttctgccaggttatctgtggtatcagactgccgccaccccaagcatcgaacgctggtaataaactcgcgtccttcaacgtggggcaggatgtgccggtgctatccgggtcacagaccacttcaggggataacgtctttaataccgtcgaacgcaaaacggtggggacaaaactcaaagttactccgcaggtcaatgaaggcgacgcggtgttgctcgaaatagagcaggaagtctccagcgttgactcttcctctaactcgacgctcggcccgacgtttaatacccgtactattcaaaacgccgtgctggtcaaaaccggtgaaacggtggtcctgggcggattgctggatgatttttctaaagagcaagtgtcaaaggttcctctgcttggcgatattcctttagtggggcaactcttccgctatacctccaccgagcgcgctaaacgcaacctgatggtatttatccgtccgacgattatccgtgacgatgatgtttatcgctcactgtcaaaagagaaatacacccgttaccgtcaggagcaacaacagcggatcgacgggaaatcaaaagcgctggttggctcggaagattggccggtgctggatgagcacacgttcaacagtcacgcccctgcgccatcgtcacgttgggcgctggcacaacgaattggttatctctattcagagggcgagattatttatctcgccgatacgccattcgagcggttactcgatattcaacgtcaggttggccagtgccagaccatgaccagcttgtcacaggctgattttgaagctcggctggaagcggtattccatcagaataccggtgagtcgcaacagattgcgcaggatatcgatcaatccgtcgatcttctctcgctttcggaagagatgcccgcaaatgaagatctcctgaatgaagattcagcggcaccggttatccgcttgatcaatgcgattttgagtgaggccatcaaagaaaccgcctctgatatccacattgaaacctatgaaaaaacaatgtcgatccgttttcgcatcgacggcgttttgcggacaattttacagccaaacaaaaaactggcggcactgcttatctcccgaattaaggtcatggctcgtcttgatatcgccgaaaaacgtattccacaggatggaagaattagtttgcgtatcgggcgacgtaacatagatgtccgcgtatccacactgccgtccatctatggtgaacgcgccgtactccgcctgctggataaaaacagcctccagctttcattgaacaacctggggatgacggcagcggataagcaggatttagaaaatctcattcagcttccgcacggtattatcctggtgacagggccgacaggctccgggtaa

SEQ ID NO: 25790 - DNA, 834 bp, Homo sapiens
  SIMILAR (291)..(163): 1001254mologous to synthetic construct insA,accession number M27083,Smith-Waterman Score=245.
ttatgtaggagtgaaattttgctttgcaaggttagagtaagaacctgtatatttatccaatattcgtgtcctccatgcttgattcagggcaaaataaagagtcttgttggtgagtccattctgctctgagtaagtaagcactggtccctggtccacttggtcgggttgagaagcggtgtaagtgaactgcagttgccatgttttacggcagtgagagcagagatagcgctgatgtccggcggtgcttttgccgttacgcaccaccccgtcagtagctgaacaggagggacagattgccgggtaagggctaggttttactcccccctcaacggcgcctactgtcttaacagggtccactttgctaaacaccgagttggaaaagcagcttcctctctttcccaatctctgatggtgctgcttccaggtgtaacttctacctgccctctgccttaagggtcccctgcccccagcggcgggggagccgggcctacgggctaaaggacggtgttgtaagaagctggacgagcccggttccagaaaccaaacagcagttgttatcatgccttttaaatcacgcgtagaggtttcagtttcttcctctgcaggcccgtaaatatttgccttcgggtttctgtgttttctgccgttgccaggagctccgatcctcagttctggaggctggaagtccgagatcagggtgctggtatggtcaggttctggtgagggctgtcttccaagttgcagacagatgccttcctgttgtggccttacatgggataaagatgggaggaagctctctgggatctcttttataagggtatgaatcccattcat

SEQ ID NO: 25791 - DNA, 1427 bp, Homo sapiens
  SIMILAR (1427)..(1089): 991254mologous to Escherichia coli MITOCHONDRIAL TRIFUNCTONAL ENZYME BETA SUBUNIT PRECURSOR (CONTAINS: 3-KETOACYL-COA THIOLASE (EC 2.3.1.16) (ACETYL-COA ACYLTRANSFERASE) (BETA- KETOTHIOLASE)),accession number D90864,Smith-Waterman Score=573.
tcaattcgctgcgtatatcgctgctttacgtgcagctttcccttcaggcgggattcatacagcggccagccatccgtcatccatatcaccacgtcaaagggtgacagcaggctcataagacgccccagcgtcgccatagtgcgttcaccgaatacgtgcgcaacaaccgtcttccggagcctgtcatacgcgtaaaacagccagcgctggcgcgatttagccccgacgtatccccactgttcgtccatttccgcgcagacgatgacgtcactgcccggctgtatgcgcgaggttaccgactgcggcctcgttccgttcacgcagccaaatccattaactccataaaggttggccagcaaatagccttcttcacacgggttaacttccagtgcgaattccttcaacaacacctgatgcaattgcacaacggcttgccagtggctggattgcgccagttctgccagcaactcgttatccagcggctctatttcttcaccacggcgactgggcatcagggcaatcgccaaaagggtcatcgccatcggtccttgctcactgcgcaccggcagatggcactctgtttccagtacgttgacgaccggcatcatgcctttgcagatgtccttatcaataacgcctgctacccgttgttgatgggcgagcagggcgtgtttatctacaacggcacgcagcagttgttgcattgggtaatcatcgactcgcgtcaggaccacggcttcggtggcctgtaaaaatcgcggatcgtctgtgagcggcgtcgcctctaatcccagcatggtcagttcgttttccgccaccacgttccagatcaccgcatcgacatcgcctttaacaatgagttgtaatgacatgcttatgtctgcgccagcaatgaagttgtccggtttagcggagacaaacaccacgcctcgcaactctttgttttcacggagttgcttaataatggcgcgcacctgcgaggcaaactccgccttcagggtattcattttctcacccggtacgtcgatggtgataacggcaatgttgtccagacgaacattaagggtaaacgctgatgtcatttccattattccgccggcagcacaggcggtaactaaaccaaatccaccgccgcgacggcgaagttcatgcaatgtctgggtaatcatccgcgcgccggtcgccgcgaagggatgcccgtaagcaatcgaaccgccaagcacgttaaatttgctatcgtccacttcgccagtggcatgtgcacgccccagtgcttcacgagcaaaacgttcactacccagcaactgaatattcgccagcgtctgagctgcaaaggcttcgtgcatatcgatcaatgtcagatcgctcatcgtcaaaccggcacgctccagcgccagcggtgttgaccaggctggaccgagcaacat

SEQ ID NO: 25792 - DNA, 2685 bp, Homo sapiens
  SIMILAR (1321)..(1752): 1001254mologous to Escherichia coli alternate name ygiM; ORF_o206,accession number U28379,Smith-Waterman Score=731.
atgcgtggagaagttctattagctggtgtgccgcgccatgttgctgagcgtgaaatcgctacactggcggggagtttttccctgcatgaacagaatattcataacctgccgcgcgaccaggggccgggtaataccgtctcgcttgaagtcgaaagtgaaaatatcaccgaacgcttttttgtcgtcggtgaaaagcgcgtcagtgccgaggtggttgcggcacagttggtgaaagaggtgaaacgctacctggcaagcacggcggcggtgggggaatatcttgctgaccaactggtgctaccgatggcgctggcgggcgcgggggaatttacggtcgcccatccctcatgccatctgctgaccaatatcgcggtggtggagcgtttcttgccggtgcggtttagtttgatagaaacagatggcgtaacgcggcaattgctgggcgtgtcgtaccgcatcctggcgatgggccacgccgagtttctgatacagattgcggatatgcgtaatgatggtgggtggcgcgacttccagttctccgggaatttggtcatggatgaaccaaatagatcagcccagacctacataaagttggtcaagtcgagactcggtaccaccaaacgatataaccataaggacgattgcccacggtgtaggtggatagcggcaatgatcgacaacccgccaagaatcaggaaaccgacaaaatcggccagcgtatggcatgccactgcaaccagtgccagcccggagagacagatgagcacgacggtaataatgagcgcccgtttcatctcttgctgggtaatgacccctttttgcatgccgcgtagcggcccaatgcgattcgttcacctgccatgccgcttccgcgatgcgtttaataccggagtcggtaaactcgatcagctcggtccgtcgatgagcacgcgaatccgacaacgcttcaccacattatgcccgatgactttgtcaagcagctccaccgagtttgagaacgtcagcgactgccgtcccagccgtgccaggagctgcctcagattcaggttatgccgctcaattcgctgcgtatatcgacttgctgattacgtgcagcgttcccttcaggcgggattcatacagcggccagccatccgtcatccatatcaccacgtcaaaggtgcgttcaccgaatacgtgcgcaacaaccgtcttccggagactgtcatacgcgtattacagccagcgctggcgcgatttagccccgacatagccccactgttcagtccatttccgctgcacgacgatgacgtcactgcccggctgtatgcgccgagcctgatgccaaaattacgcctgatcggattaactttactcgcacttagcgcgactgccgtctcacacgctgaagaaacgcgctatgtttccgacgaactgaatacctgggtccgcagcggtccgggagatcattatcgcctcgtgggcacggttaacgccggcgaggaagtgaccttattacaaactgacgccaacaccaattatgcccaggtgaaagacagctctggccgtaccgcctggatcccgttgaaacaacttagcactgagccaagcctgcgctcccgtgtgccagatctggaaaatcaggtcaaaaccctgaccgataaactcaccaatatcgataacacctggaatcagcgcaccgcagaaatgcagcaaaaagtggcgcagagcgacagcgtgatcaacgggttaaaagaagaaaatcagaaactggcgcgtgtacgtgaaatctggaaaatttgcagggtagttgtgagggatttttcgcgtaggagcggggaaatgaccgccagtcttgccgctgacgtcggctacgcgcgcgttaaaagtcatcgcgttggaacagtttggcccagatttttccgggcacgttcctttggttgtgtgcaacgttgggaaggccgcaaccggcaggtttgcgttgatttgccgttccatgtcgtacatcgtttggaagtattgaaaccgtttcgcaccccgggcgcgatacttaaagcgcttgagcgtatcgggtacaagtcgatagccacaggccacggctggcgcacaacgttcagcaccgcacttaacgaatcaggcagatactcgccggattggattgagatccaactagcccacgtcccgaagggaataaggggcgtttataaccaggctgcctacctgaagcaacggcgagcaatgatgcaggattacgccgacgctattgattcaatattggcagatccagagttcgaaaataggatcaacacaaataaaagcccccggaatgctgcaacatgccgggggcggtatgagaaacaagctaaaggagaatttctcatgtctgatatgctagcagtagaacaagaaacaaacaatgatgttcgtcaatttttaaacaaaattaacgagttacggaataaagcacccaaaaacgaagagattgtgcgcgcgtgtgcgagtggcctcttctaccgcatccggcagtttggtgccgtcgatagagaagaatttaatgccattatcgtagaacgggttatgcgatgcagatatcacaattccggcctctgcgcggaaggtacgcgtcagataagccacacgtatgacatgatacacatcgatctcggtacccggcttttgctatgcgcatgttgcctgcacaaatga

SEQ ID NO: 25793 - DNA, 876 bp, Homo sapiens
  SIMILAR (459)..(4): 1001254mologous to Escherichia coli glycyl-tRNA synthetase beta subunit,accession number J01622,Smith-Waterman Score=740.
ttattgcaacagcgaaatatccgcaacgcgcaggaacagttcgcgcagtttctccagcatggtcagacggttgatacgcaattctttgtcatcaaccatgaccatcactttatcgaagaaagcatcaaccggttcacgcagctcagccagttcgaccagcgcatcctggtaacgaccttccgtaaagtacggctccagcttgtcacgtagcaccacaacctgcatcgccagtttaatttcttccggctctttcagggtagaggcattcacgcggtcgctcagcacttcgtcagatttcgccagaatgttagatacacgtttgttcgccgccgccagtgcagcagctgcatccagggtacggaaatgcgataccgctttcatacgggcatcgaaatcagccggacgagtcggacgacgcgccagtaccgcctggatggtgtcaacggtataaccttcatcaaaaatcaacagcgcattgtggcggttacacaattcacgcagaccttgtaaaaacgcgttgctggctggcaccacaccgccttccccctggtccaggcaggtagtagcagtagcatccggtgtgtacccggcctgacagtggcagcggaaggagccaaggctgttgatgcactccccatgagcacacaggtgagcaagcatacggcattcatctacatctgaattagctgatatcaggagggagacattcctcttactgctgctgatgggattgctaaacttggacgatgataacttggagtttccagaactcaacttctttacagcatgagggccttggaaggtctgcgtgttgtggtggagctttgcaaaaaccttatttcgagcatccaggagcttcatggctcttaactgcat

SEQ ID NO: 25794 - DNA, 1350 bp, Homo sapiens
  SIMILAR (1)..(639): 991254mologous to Homo sapiens p53 tumor antigen (aa 1- ?),accession number X02469,Smith-Waterman Score=1139.
atggccatctacaagcagtcacagcacatgacggaggttgtgaggcgctgcccccaccatgagcgctgctcagatagcgatggtctggcccctcctcagcatcttatccgagtggaaggaaatttgcgtgtggagtatttggatgacagaaacacttttcgacatagtgtggtggtgccctatgagccgcctgaggttggctctgactgtaccaccatccactacaactacatgtgtaacagttcctgcatgggcggcatgaaccggaggcccatcctcaccatcatcacactggaagactccagtggtaatctactgggacggaacagctttgaggtgcgtgtttgtgcctgtcctgggagagaccggcgcacagaggaagagaatctccgcaagaaaggggagcctcaccacgagctgcccccagggagcactaagcgagcactgcccaacaacaccagctcctctccccagccaaagaagaaaccactggatggagaatatttcacccttcagatccgtgggcgtgagcgcttcgagatgttccgacagctgaatgagcccttggaactcaaggatgcccaggctgggaaggagccaggggggagcagggctcactccagccacctgaagtccaaaaacgtgtatgatggtgtttttgaggtgctccagtggcttctgtttctatcagctgtccctcctgttcagctactgacggggtggtgcgtaacggcaaaagcaccgccggacatcagcgctatctctgctctcactgccgtaaaacatggcaactgcagttcacttacaccgcttctcaacccgccgggcagtgacgtcatcgtctgcgcggaaatggacgaacagtggggctatgtcggggataaatcgcgccagcgctggctgttttacgcgtatgacagtctccggaagacggttgttgcgcacgtattcggtgaacgcactatggcgacgctggggcgtcttatgaaattaaagcaggacttacttaaccatctctttttcaatcaactggatcaggatatggatcactttaatgtgaatctcctgaatgcggtcggcataaccaaagtgcggtacgcgaatttcgatatccgccgtgccagccattttgccgccgtctttaccggtcagggtgatcactttcattcccttctcacgcgccgctgcgatcgctttgatcacgtttgcagagttaccggaggtggagatccccagcagtacatcgccttcgcgacctaccgcttcaacgtagcgggagaaaatatcattgaaaccgaaatcattaccgacgcaggaaatatgactaacgtcagaaatagcaatcgccgg

SEQ ID NO: 25795 - DNA, 3226 bp, Homo sapiens
  SIMILAR (1958)..(2482): 901254mologous to Escherichia coli K12 putative oxidoreductase,accession number AE000256,Smith-Waterman Score=817.
ttattgcaacagcgaaatatccgcaacgcgcaggaacagttcgcgcagtttctccagcatggtcagacggttgatacgcaattctttgtcatcaaccatgaccatcactttatcgaagaaagcatcaaacggttcacgcagctcaggccagtcgaacagcggcatctggtaaagaccttccgtaaaggtagaggcattcacgcggtcgctcagcacttcgtcagatttcgccagaatgttagatacacgtttgttcgccgccgccagtgcagcagctgcatccagggtacggaaatgcgataccgctttcatacgggcatcgaaatcagccggacgagtcggacgacgcgccagtaccgcctggatggtgtcaacggtataaccttcgtcctgataccaggcgcggaagcgaccgagcataaagtcgataacatcatcaactacgttggcattagtcagcttatcgccatacagacgcaccgcttcttcggtcagcgtttgcagatcaaggttgagttcttctggggacctctagagtggacatgcagcagcagctcgcccgccccccgagccgttatataccgaaggcaaatcaccgaatcgggagaatctctgcgtgcattgattggcgcgggagcaagcgatatgccgcagattagtccggtggcattaccgcaagtccaggccggcattccggtcactctctcttatgatttgctcgcaagacgcccggatctgcaagccatgccgctgctactgacggggtggtgccgtaacggcaaaagcaccgccggacatcagcgctatctctgctctcactgccgtaaaacatggcaactgcagttcacttacaccgcttctcaacccgccgggcagtgacgtcatcgtctgcgcggaaatggacgaacagtggggctatgtcggggctaaatcgcgccagcgctggctgttttacgcgtatgacagtctccggaagacggttgttgcgcacgtattcggtgaacgcactatggcgacgctggggcgtcttatgagcctgctgtcaccctttgacgtggtgatatggatgacggatggctggccgctgtatgaatcccgcctgaagggaaagctgcactcaaatgaaggcgacgcggtgttgctcgaaatagagcaggaagtctccagcgttgactcttcctttaactcgacgctcggcccgacgtttaatacccgtactattcaaaacgccgtgctggtcaaaaccggtgaaacggtggtcctgggcggattgctggatgatttttctaaagagcaagtgtcaaaggttcctctgcttggcgatattcctttagtggggcaactcttccgctatacctccaccgagcgcgctaaacgcaacctgatggtatttatccgtccgacgattatccgtgacgatgatgtttatcgctcactgtcaaaagagaaatacacccgttaccgtcaggagcaacaacagcggatcgacgggaaatcaaaagcgctggttggctcggaagatttgccggtgctggatgaaaacacgttcaacagtcacgcccctgcgccatcgtcacgttgggcgctggcacaacgaattggggtctctagagtggacatgcagcagcatgttcgccgccccccggtaaatttgtcaccaaaaagggagaatgtcatagcgggatatctgtcgaactctgtagcaaggaagcaacggcacatccagacgggtacagttttccatcagttgatgaatctgcttcgcgacggcatcaacatcatctttatgaacttcaaataccagttcatcgtgtacctgcattttcttctgagccctaaatgggtcatgtataacagaaaatgtgttaatggcatgctgttaattgcctcagttccggcgacctggatgctgtcgcgataccgttcatcccatcgttggatagcaaaggagataccgatgggtaaaacccagcccttgccaatattattacttggcgaggtcgtcgcatcggcctcgccctcgccatggcatttcattatccaaaagcaaccggtgattgtcagctatcggacacactatccagccattgatggactgattaatgcaggtgcgcagtgtattcaggctgatttttcgaccaccgacggtgtgatggcgtttgccgatgaactactaaaaagcacccatggtctgcgtgctattttgcatcacgccagtgcgtggatggcggaaaaaccgggtgcgccactggccgacgtactggcttgcatgatgcagatccacgttaataccccatacctgctcaaccatgcgctggaaagattactgcgtgggcacggacacgccgccagcgatatcattcactttaccgattatgtggtggagcgcggtagcgacaaacatattgcgtatgctgcaagcaaagcggcactggataatatgacccgctcgtttgcccgcaagctggcaccggaagtgaaacgacagacggcgacgcgcgcgggtcaccgcggtataaaccagctctcgcgttactaccggcgtgcgttggctcggcaaaatcaacgccgcatggtcgaactccgatccctgcgatttatgtaccgtcatcgcccacgtagtttcgtgctctggcaagcgactcggttgcacagacttaatattgccgtccggcatcgcaaaccagacgcgcgtcccctgcccgcgatccagcgcaataccgatatcgccattaaacaacccaagcgcgctgtcattacgggcaatcatcaccggtcgaccttcgtaccaacgagactggcgcagacgggtagtgagattcgacggcacgcgatgcacttttgctgcagcctgggttatgctgccagcttcggcaaccgcgttgaacatctccagttgggagataccccgatgaccattactccggcaactcatgcaatttcgataaatcctgccacgggtgaacaactttctgtgctgccgtgggctggcgctgacgatatcgaaaacgcacttcagctggcggcagcaggctttcgcgactggcgcgagacaaatatagattatcgtgctgaaaaactgcgtgatatcggtaaggctctgcgcgctcgtagcgaagaaatggcgcaaatgatcacccgcgaaatgggcaaaccaatcaaccaggcgcgcgctgaagtggcgaaatcggcgaatttgtgtgactggtatgcagaatcactttga

SEQ ID NO: 25796 - DNA, 543 bp, Homo sapiens
  SIMILAR (515)..(541): 881254mologous to Escherichia coli 'ampD signalling protein',accession number D26562,Smith-Waterman Score=43.
attcagctgtatgccagcctgctattacaggtgtttttctttgccgcgaatatttacggttggtatgcgtggtcgcgacaaaccagtcagaacgaggcggagttgaaaattcgctggtgcacagtgccgacgacactcagttggttgcggaacaggggtggctggttggcgcgcgccgcgttccctcaccacattacgattgccgcccggatgacgaaacacccaccctgctggtggtgcacaatattagcctgccgccaggcgagtttggcggtccgtggatcgacgcattattcactggaactattgatccgcaggcacatcctttctttgctgagatcgcccatttgcgcgtctccgctcactgtttgattcgccgtgatggtgaaatagtccagtatgttcctttcgataaacgtgcatggcatgcgggagtctctcagtatcaggggcgcgaacgctgcaatgatttttctattgggattgagcttgaaggcacccgatacgctggcgatatgccgatgcacagtatcaacagcttgg

SEQ ID NO: 25797 - DNA, 2346 bp, Homo sapiens; identical to SEQ ID NO: 24687
  SIMILAR (1)..(291): 1001254mologous to Escherichia coli K12 putative aldolase,accession number AE000464,Smith-Waterman Score=481.

SEQ ID NO: 25798 - DNA, 1018 bp, Homo sapiens
  SIMILAR (19)..(282): 711254mologous to Escherichia coli phosphomannose isomerase,accession number M15380,Smith-Waterman Score=299.
atggattcttatgtcgatcaactgcaagcgcagggcggaagtatgatcatgctggcgaaaggcaaccgcagccagcagggtgaaccgtggcaaacgattcgtttaatttctgaattttacccggaagacagcggtctgttctccccgctattgctgaatgtggtgaaattgaaccctggcgaagcgatgttcttgtttcgttgaaaccaccgcacgttttacttcaagggcgtggcgctggaagtgatgccaaactccgataacgtgctgcgtgcgggtcttgacgcctaaatacattgatattccggaactggttgccaatgtgaaattcgaagccaaaccggctaaccagttgttgacccagccggtgaaacaaggtgcagaactggacttcccgattccagtggatgattttgccttctcgctgcatgaccttagtgataaagaaaccaccattagccagcagagtgccgccattttgttctgcgtcgaaggcgatgcaacgttgtggaaaggttctcagcagttacagcttaaaccgggtgaatcagcgtttattgccgccaacgaatcaccggcgttttatatttcgccaaattacctctcgcacctgtttcaaaaaacgggggccattggttttaacgaatacctgaatcacacgcgactggagcacgctaagacgttattgaaaggctatgacctgaaggcacaacttttccagggtaccgagatgatgtgtatcagtcaatattaccgtccccgccatgtggcaaatggaaggtcacggcaaactgcaatataccgacgaaggttttcgccaacatcgcccgtaacggatcgagcagctcctggctgtgcagcggatattacgctctacgagccgcgcggcgactaccagataatcgttgagagtatctggaagtcgggcgcaatccagagagcttttatcgctaaatcagggggatttgctgtggtaatgccggatgccattctgaagcatccggcatgggagatttaa

SEQ ID NO: 25799 - DNA, 583 bp, Homo sapiens
  SIMILAR (467)..(3): 891254mologous to Escherichia coli K12 putative PTS system enzyme IIC component,accession number AE000501,Smith-Waterman Score =668.
tcctgagcatcgatattgcgtcccttcatgaaagggattttttcatagatagcatcaagtagaacgaaaagcggtactgaactggaaccgtagccttgcggtatcgaaataccttccagcccgacgatgttctgtacccgttttgccgtccagtcggccatttttaacgatagcgccgcatggcagattgcccccagcacaccataaatcaggctaccggtcataagctggaccaccgtacccgtaatggcgtagtgccagtaattgtaaatatcgacgttcatcgttttggtcagacgggtgaccagcatggcgacattgagaagaaaaataactgggataatcatggcgccaatggctgtcgcataaccaacgccggaggcagggccctgcggccaacgttcaaaggacatggcagggccttaggcccgaaaccgctccaattccatcacttttggatagggggactgaggctgtcgatcgccatgacgatcaccagtcccataccgacaaaaccaatcccccccgttacccctgccttaatcgcatgcagacaggggatgcggaagataaggccaatcac

SEQ ID NO: 25800 - DNA, 2667 bp, Homo sapiens
  SIMILAR (2014)..(2610): 991254mologous to Escherichia coli sigma factor,accession number Z27094,Smith-Waterman Score=1003.
atgatcgtgattggccttatcttccgcatcccctggctgcaggcgattaaggcaggggtaacggttgggattggttttgtcggtatgggactggtgatcgtcatggcgatcgacagcctcagtccccctatcaaagtgatgattgagcgtttcggcctagccctgcatgtctttgacgttggcgcaggccctgcctccggcgttggttatgcgacagccattggcgccatgattatccccagttatttttcttctcaatgtcgccatgctggtcacccgtctgacaaaacgatgaacgtcgatatttacaaatactggcactacgccattaacgaaggcggcattgcctggggcgatatgcgcaactgcctcaaccagctgataacggaaccgagcgtcgcctccgcgatgtttgaataccgttttggtggcaatggcgaactttccggtcataatctcggaaacttgatgttaaaggcgctggatcaccttagcgtgcggcctctggaagccatcaatttaattcgtaatctgctgaaagtggatacgcatttgattccaatgtcagagcatcctgttgatctgatggcgattgacgatcaggggcatgaagtttacggcgaggtcaatatcgaccagttaactacgccgattcaagagttattgttaacgcctaatgtacccgcaacgcgtgaggcggttcacgctatcaatgaagcggatctcatcattattgggcctggcagtttttataccagcctgatgccaattctgcttgctgaaggaaatcgccccaggcattacgccgcacgccagcgccgatggtttatatcggcaatctggggccggtctgttctccccgctattgctgaatgtggtgaaattgaaccctggcgaacgatgttcctgttcgctgaaacaccgcacgcttacctgcaagctgtggcgctggaagtgatggcaaactccgataacgtgctgcgtgcgggtctgacgcctaaatacattgatattccggaactggttgccaatgtgaatttcgaagccaaaccggctaaccagttgttgacccagccggtgaaacaaggtgcagaactggacttcccgattcctgtggatgattttgccttctcgctgcatgaccttagtgataaagaaaccaccattagccagcagagtgccgccattttgttctgcgtcgaaggcgatgcaacgttgtggaaaggttctcagcagttacagcttaaaccgggtgaatcagcgtttattgccgccaacgaatcaccggtgactgtcaaaggccacggccgtttagcgcgtgtttacaacaagctcgatatccggatagcaatcaatcagtgctcgcgtaaccgccgcaagctgttgatactgcgcatcggtatacgccagcgtatcggtgccttcaagctcaatcccaatagaaaaatcattgcagcgttcgcgcccctgatactgagagactcccgcatgccatgcacgtttatcgaaaggaacatactggactatttcaccatcacggcgaatcaaacaagtagcatgtttctaccttatgattcgttagctatctggagttttaacatgccgcctcgccgctataaccctgacacccgacgtgacgagctgctggaacgcattaatctcgatatccccggcgcggtggcccatgcgctgcgggaagatttaggcggaacagtcgatgccatcaatgatattacggcaaaacttttaccggaaaattctcgctctcatgccacggtgatcacccgcgagaatggcgtcttttgcggcaaacgctgggttgaagaggtgtttattcaactggcaggcgacgatgtcaccataatatggcatgtggatgacggcgatgtcatcaatgccaatcaatccttgttcgaacttgaaggcccatcccgcgtgctgttaacgggcgaacgcactgcgcttaattttgtgcaaaccctttcaggagttgccagtaagatgtgctggtgccgtaagcataacggtcactggacggtagaactctacagtgacagcattccgcgtctgcaaatcaaccagcactacgcctcgatgtgcaataacgcgcgcaacgatggtgacagccagtttatccgcagcaatctgcaggatgccaaatggttgatcaagagtctggaaagccgtaacgatacgctactgcgcgtgagtcgctgtatcgttgaacagcagcaagccttctttgagcaaggtgaagaatatatgaaaccgatggtactggccgatatcgcccaggctgtcgaaatgcatgaatcgacgatatctcgcgtgaccacgcaaaaatacctgcatagtccacgaggcatttttgaactgaagtattttttttccagtcacgtcaataccgagggcggcggcgaagcttcctccacggcgattcgtgcgctggtgaagaaattaatcgcggcggaaaacccagcgaaaccgttgagcgacagcaagttaacctctttgctgtcggaacaaggtatcatggtggcacgccgcactgttgcgaagtaccgagagtctttatccattccgccgtcaaaccaacgtaaacaactcgtttgacccaaccgataaggaagacactatgcagctcaacattaccggaaataacgtcga

SEQ ID NO: 25801 - DNA, 1146 bp, Homo sapiens
  SIMILAR (724)..(1143): 901254mologous to Escherichia coli coding sequence uvrD protein,accession number X00225,Smith-Waterman Score=684.
atgctgttctgtcatcaggcgactgatattgcctgcaaattcatcatcctgaatcagcgacaaatgggcgctgaagatagttttgtttcgccgtcaccgtcacgcaattgctgggtcagcgtacccacgccgacgccgcttgccagcacattgccgtacagtaaatccgggttaaggcggcttaatgaacgcggcagcggatgcgccgtcagttctgcctgcataaaagttgctgcatctgcaaaatgtcgcggcaatcggcaatcgaaaagacatggtgaaccgtgccgtcggtccaacaccgttaccagtcaaaagtctgacctgaacacgacaattgagtttgttagtccgaatgacgttgtaagcattcgtgagaaagcgaagaagcagtctcgcgtgaaagccgctctggagctggctgagcagcgtgaaaagccaacctggctggaagttgatgctggcaagatggaagagtttctaaaaccgcgcctggttgatatcgagcaagtgagttcgacgcacgccaaggtgacccttgagcctttagagcgtggctttggccatactctgggtaacgcactgcgccgtattctgctctcatcgatgccgggttgcgcggtgaccgaggttgagattgatggtgtactacatgagtacagcaccaaagaaggcgttcaggaagatatcctggaaatcctgctcaacctgaaagggctggcggatttcaagatcctcgacagtgaagacccagtacgcctgattaagcgtctgataaaagccatgaacctcgacgagaagcagtggccgccgcggcaggcaatgtggtacatcaacagccagaaagatgaaggcctgcgtccgcatcatattcaaagctacggtaatccggtggagcaagacctggtgtatcaggcgtatcaggaagcgtgtgaccgcgcgggcctggtggacttcgccgagcatgatgtgcgcgctcacgagttgtggcttaacaagccgcatatcctgcaacactaccgcgaacgttttaccaatatcctggtggacgaattccaggataccaacaacattcagtacgcgtggaatcgcctgctggcgggcgacaccggcaaagtgatgatgatcggtgatgacgaccagtaa

SEQ ID NO: 25802 - DNA, 1788 bp, Homo sapiens
  SIMILAR (1)..(846): 961254mologous to Escherichia coli hexose phosphate transport protein UhpT,accession number M17102,Smith-Waterman Score=1416.
  misc_feature (1)...(1788): n = a,t,c or g
atgctggctttcttaaaccaggttcgcaagccgaccctggaccttccgctcgaagtgcggcgcaaaatgtggttcaaaccgttcatgcaatcctacctggtggtctttatcggctacctgacgatgtacctgattcgcaagaactttaacatcgcgcagaacgatatgatttcganctacgggttgagcatgacgcagctggggatgatcggcctgggtttctccatcacttatggcgtgggtaaaacgctggtttcctactacgccgacggcaaaaacaccaaacaattcctgccgttcatgctgatcctctctgctatttgtatgctgggcttcagtgccagtatgggcagcggctcggttagcctgttcctgatgattgccttctacgccttaagcggctttttccagagtaccggcggttcgtgcagttactccaccatcaccaaatggacgccgcgtcgtaaacgcgggacattcctcggtttctggaatatttctcacaaccttggcggtgcaggcgcagcaggtgtggcgctgttcggggcaaattacctgttcgatggccatgtcatcggcatgtttatcttcccgtcgattatcgcgctgattgtcggttttatcggcctgcgttacggcagcgactccccggaatcttatggcctcggcaaagctgaagaactgttcggcgaggagatcagcgaagaggacaaagagacagaatctaccgatatgaccaagtggcagatctttgttgagtatgtgctgaaaaacaaagtgatctggctgctgtgcttcgccaacattttcctctatatgtacgtaggtaccgagctcgattctactccccttccaaatctaggagcaaagcagaatgtccacatgaaagaatccaatcgtgtgatacaccaccctgcagataatatactgccaagctatgattatccagtgcaagtctggttaacaagaaagattctgggccgatttcccccactcggcatacaggatgccgccacaaaccagatacagtgcgtcgccgtgtacgtcgctcatcgcgataagcgcaaacgttccggtctgcaaaaacagcgtgacgccggcaacgatacaaccccaacgagccgatatgacgttttctgggagaaattgttgtttaacgaccgcctggcgcagtcgctggcaatcaacgatcagaacgccattactgaaacgaccgaacagttaatcaacgaaccgctcgaccatcgcggtgaagtggtgctggttggtgcaggtccgggcgatgccgggctgctgacactgaaaggactgcaacaaattcagcaggcagatgtggtggtctacgaccgtctggtttctgacgatattatgaatctggtacgccgcgatgcggaccgtgttttcgtcggcaaacgcgcgggataccactgcgtaccccaggaagagattaaccagatcctgctgcgggaagcgcaaaaaggcaaacgcgtggtgcggctgaaaggtggcgatccgtttatttttggccgtggtggcgaagagctggaaacactgtgcaacgcgggtattccgttctcggtggttccgggtattaccgcagcttctggttgctctgcctattcgggtattccactcacgcatcgcgattatgcccagagcgtacgctctaattaccggacacttaaaccccggtggcgagctggactgggaaaacctggcggcagaaaaacagacgctggtgttctatatggggttgaatcaggccgcgactattgggtaccgagctaa

SEQ ID NO: 25803 - DNA, 2976 bp, Homo sapiens; identical to SEQ ID NO: 23994
  SIMILAR (1441)..(2100): 961254mologous to Escherichia coli PHOSPHOENOLPYRUVATE- PROTEIN PHOSPHOTRANSFERASE PTSA (EC 2.7.3.9) (PHOSPHOTRANSFERASE SYSTEM, ENZYME I) (ENZYME I-ANI),accession number D90868,Smith- Waterman Score=1052.

SEQ ID NO: 25804 - DNA, 1951 bp, Homo sapiens; identical to SEQ ID NO: 24619
  SIMILAR (1201)..(1860): 961254mologous to Escherichia coli hexose phosphate transport protein UhpT,accession number M17102,Smith-Waterman Score=1072.

SEQ ID NO: 25805 - DNA, 1817 bp, Homo sapiens
  SIMILAR (1817)..(1299): 1001254mologous to Escherichia coli ETHANOLAMINE UTILIZATION PROTEIN EUTE,accession number D90874,Smith-Waterman Score=846.
tcataagttgaattcctgcagaaggatacatatagcttgcacagcttcaatggactgttcaaaagtaacagtgcctattccacgactttttccatctttatcttcaagaatgtctgctcggaccaccacaccagccatactaaatacttccttcagtttcttccagccaactttataatccagatttgctacaaatactgtgcttccaagtcttccagcctgtaatgcatggataatctcatttgggatgttgggattatttaggatactgggtgggatagtaatcattcctgggccacctggtcccatacccatcccaccagtcgtagccatcaccttttgcattgctctcctggcatgttcaccatcaggatcccgtccgaggtgaacggtgaaagggcgcaagtttatacgggaacgccggcgcagataagcgcagtgccagtcatttttaagggcaaaaatcctgtatctcgggacggtggcatttgtgccccctgagggcgcgtcggagccgccctggggtcttcgggggctgctgccagcaccttgtctctttttccagacgtcggcgctggaagccggcgggccgggtgcagcgtccaggaagtggcgcaggcgcggcgggtcttccagggactgtgtgggcgggcagtgggttcgcagatgctgtgccaggtcacggacgctgggaaaactgagggcagcagccagggctggagcaagggatttgttccccggtccccgatggacccaaccaaccaggtgtccgtagggaaaccaggcgctgaggaactcggtgaaggaattaggccaaatggtgccgaacttcgggagaaggcaacgctgatatgtaggtgaagcgacttgctcgtggagtttcaggccatacaggcacagcagacgcaggtcgagaatgttttcgccaatcgccgctttatctttgttaggggtaaattctgctgcctgacgttgcagggcgccgagatcgtcgctcaccagttgcaggtcagccatcgggttatcgacgcgcgcgttggcatctacagccaggcattgcgctttcagcgcctcgcgcagggcaatcgcttcacgagcgtagccgaccaatacgcggagaatcgaagttaacgttggtcagggttgagaaaaaggcacgtggcgcgaagtgttcaacatcgtgggttgatgatgccgtattcacgcgcttttaccgcccaggcagaaagcccttgcagcgccgcgatgagtaaatccagaagttttcggcccacctgcgccacatcgcctggtgagcaggtaatcgcccgctgggagacttttttcgccgccggatgcggggcaaaaatgacgctgttgcccgcggcaatcaggctgatggcgttgttaattacggtagccgccgggttagtggaaggcgtcaccgaagccaccacgccccagggtgcgttttcaattagggtcaggccgttgtcgccagtcagcacttgcggagagaggcactcaacgcctggtgtgccgcgcgcctgagcgacgttttttgcaaatttatcttcaacgcgccccatgccggtttcactgacggcaagttccgctaaatctctggcgtgtttttcgcctgcttcacgaatggcagcaatggctaactggcgcattgccacgctttttaacccttgctgggcgactttggctgccgcaacggcgtcatccagggacgcgaaaacgcccatctcatgaacggcggcggacggcgtgtcactgctttgcattttcagcagtaccgctttcaccacctgttcaatatcctgttgattcat

SEQ ID NO: 25806 - DNA, 2414 bp, Homo sapiens
  SIMILAR (1158)..(1277): 1001254mologous to Escherichia coli hexose phosphate transport protein UhpT,accession number M17102,Smith-Waterman Score =199.
atgccggtaattaaagtacgtgaaaacgagccgttcgacgtagctctgcgtcgcttcaagcgttcctgcgaaaaagcaggtgttctggcggaagttcgtcgtcgtgagttctatgaaaaaccgactaccgaacgcagccgttatgatctggtggatcgcaacaacaatatcgttctggaatatcgcaaaaaagaactggttcgcctgaccctgacagaccccgtgacagggaagtcaggagaagtgaaatcactggtttcgtcgctacaaaccaaatatgccctgaaaggctataacgtcgaagccaccgcactggaagctgccggtggcaaagtggtcacaacgggtaaagatattctggttcgcaagccgaccctggaccttccgctcgaagtgcggcgcaaaatgtggttcaaaccgttcatgcaatcctacctggtggtctttatcggctacctgacgatgtacctgattcgcaagaactttaacatcgcgcagaacgatatgatttcgacctacgggttgagcatgacgcagctggggatgatcggcctgggtttctccatcacttatggcgtgggtaaaacgctggtttcctactacgccgacggcaaaaacaccaaacaattcctgccgttcatgctgatcctctctgctatttgtatgctgggcttcagtgccagtatgggcagcggctcggttagcctgttcctgatgattgccttctacgccttaagcggctttttccagcagtacctggcggttcgtgcagttactccacccatcaccacaatggacgccgcgtcgtaaacgcgggacattcctcggtttctggaatatttctcacaaccttggcggtgcaggcgcagcaggtgtggcgctgttcggggcaaattacctgttcgatggccatgtcatcggcatgtttatcttcccgtcgattatcgcgctgattgtcggttttatcggcctgcgttacggcagcgactccccggaatcttatggcctcggcaaagctgaagaactgttcggcgaggagatcagcgaagaggacaaagagacagaatctaccgatatgaccaagtggcagatctttgttgagtatgtgctgaaaaacaaagtgatctggctgctgtgcttcgccaacattttcctcctatgtggtacgtattggtatcgaccagtggtcaaccgtatacgcgttccaggaactgaaactctctaaagcggtggcgattcagggctttacgctgtttgaagctggtgcgctggtcggaaacggctgctcatacgcgcaggggatgtgtggtaaaacggcggaaacttctgaccttcaggatttactcatcgcggcgctgcaagggctttctgcctgggcggtaaaagcgcgtgaatacggcatcatcaaccacgatgttgacagcttcgcgccacgtgcctttttctcaaccctgaccaacgttaacttcgattctccgcgtattgtcggctacgctcgtgaagcgattgccctgcgcgaggcgctgaaagcgcaatgcctggctgtagatgccaacgcgcgcgtcgataacccgatggctgacctgcaactggtgagcgacgatctcggcgagctgcaacgtcaggcagcagaatttacccctaacaaagataaagcggcgattggcgaaaacattctcggcctgcgtctgctgtgcctgtatggcctgaaagtgttcaatggaagagaagaccaactagactcttgttatcacgggaataggcagctgcgcggcagcctgcgcctgttgtttttggcgtttatccgccagcgtctgcgcgacctgataataaccgctcaccgcgtcattcgggttaatcgccagcacgccgcactgggcgtcaagcactgcaggttgcccggcataacgggcaatcgcatccagcggcaagccactcagtaccgggatcgccgaggcacgggccagaatcagtgtatgcgaggtgatatgcagcaactgttcgctgatatcgcgaatgtcgctaacacgttcgcgcagataatcgctggcagaggcagaaagtttggcgcaaacctgctccatattgctgatgatcgccgcccccagcccctgatgctgttctgtcatcaggcgacggatattgcctgcaaattcatcatcctgaatcagcgacaaatgggcgctgaggatagttttgctttcgccgtcacgctcacgcaattgctggttcagttgctcggcaagcgttgccaggctgtgctccagccggatggacagtgtacgctcgacagcgacccggatgacatgaaggacttcatggagaacgtgctgcgctatctatccgacgatagatggaagccgacgcgaaagccacgcatgaccgtaggcaccaaacacgtggatactgtctag

SEQ ID NO: 25807 - DNA, 3738 bp, Homo sapiens; identical to SEQ ID NO: 21508
  SIMILAR (2347)..(2895): 981254mologous to Escherichia coli Biotin sulfoxide reductase 2 (EC 1.-.-.-) (BDS reductase 2) (BSO reductase 2),accession number D90829,Smith-Waterman Score=981.

SEQ ID NO: 25808 - DNA, 4119 bp, Homo sapiens
  SIMILAR (597)..(16): 981254mologous to Escherichia coli K12 putative invasion protein,accession number AE000369,Smith-Waterman Score=978.
ttactgcgatgaggaaaaagtttttttagcgtcgatcaactcaatgtataaagtgttcactgcattattctggtttattcttcctgtaacgaaataatctggcttgaatctgctcaagaatgaattttgagatatgtgatcattaccaaaatttgtcgcagccatcggataggtatagagaccatcgatttttttatttgaaatgatttgcactaattcctgattaagtattaatggatccagtgtattcaatgaagtagtgaaagggaatatagctatggaatagtctgaagtattatcttcattaattttagttttgaaaacctgcccgctgaaacgataacctttccggtagattgtttctatgcaacgatcatagccaattttttcaaaaatgcagcgcaaagaatagatacatcttgtcagggactcgtcactaacaataatatttttccatactgattcgatgatcatatctttcagtacaacatgaccagcggattcaagtaatactattaatacacctaactctttctgtggaatataaacttgctcatttccttgagtaagaattccatcttccgtgagcgttaatcccagacacgaaggtgaaaaatcgacgcgacgatcagtcgcgtggtcaacgtatatcactcgcccccgcctaaaccttttttctcccagttcttctttaaagttgtcacgcgtgatcagtaccacgtcggtaacttcggtaaattttggcggttcaacgtcttttgctacccagttgtaaagcatttcgctggatttatagccatgtacgtccgggcttggcagcagggaaccgtagaagccggttgcctgtgctttagacagttcgctcaccgcatccacaccgttaatgccaatgccgatgatatcggccgctttaaagccctgaccttccgtcgcgcgtacgccgcccagcacggtgctgtcgttcataccgacgatcagccaatgtttaactgataaatttgtttttccgggaatccggccgctttcagagattgttcgaggtctggcgtacatcatttcagacggtaaacggtcggtatcgaagatgaaagcttctttgcccttggttacgccaactggttcggtctgcctgcgccaatctggctcaccgtcgcgtgtctgattatctttggtttgctgctgaataaaaccactgtctgatgcttttttctgcgcagcgtcgtactgcagcggaccgtcgatcatcaggtcaggacgtttttcctgcgccagacgagttgcttcgcgaactttttctacgtcgctacctgcaccagaagtaccggtggagtaggagagcatagcaacgcgcggttcgataccgaaggccgcagcggaatcagcggactgaatcgcgatttctgccagcgtaaacgtaaacctgttccggcagcagcatgaagaacacggaagataccagggagctgcccggccaacatcaccgacgaagatcagcggacggatataggcgctggtgagattgtttttgcggatcacgtcacgacaagcttccatcagctcatcaatgctctgcgaaaccgggaagcgatagattttggcggagtcatgcagacgctgcatatgctcacgatggcggaatacaaccggtcctttgtgcgagtcgtagcaacggatgccttcaaaaaccgaagtgccataccattgtttcaggtagatgcccgttgcagcagatcggttcgcagcgtttttccttccggcgatgcagcaaacgtcgcatcgttcagttgcgcttgcgacaacgcagggtcggcgcagcatcgcacgcttttgctgggcaagcagttcttcaactgtcgtaacgcttttcacttcaaccggaatagccgccagactgcgctcaagtcgggcatctcctgggtgacgtttcagttgatcctcaagcaacagccgcgcccggtcatcatgaccaaaatggcgataggcttccgcaaggtataaagtcagcggaatattatccggcacctgctggtgtatatattcaaattcgcggatggcggttgcttcgtcgttatttttctgtgccttcagcgctttatcgagacggggataaataacaaaatgggataatcgctcagccccagctcttctgcgctggtccgaatattgtctgcgagtgcgctggtactccaataaagacgtcagcagtaaaccagaccatccgatgacgcgattaaggttattctccttcattttcggactccagttgcgcaacctgctttgagtaatagtgattgcatcgaaacttgtaattcgcgttgaattgtcaggacgcgatccaacgtttcctggctgataacgccttcggtgaccaaaacttgccgagcggcagagaactgcgttcatggcgcaataacacacgttaattgctgaacgattaatatgaccgagcgtggtcagtatttcggcgaacaggaactgatgcggcacatattgccgccagatttcaccggcctgctgttccgtgagccactgatgctgaaccgcattgtacaacattgcccgcggatcgtgaccgcgtcggcgtgcataccagtgacgtaaccctgtgacaatttgtccccgcagaacaatgacgtaacgcactttgcgtccgactttacgcgtcagggccgccagcgaaaccgggtcaataccatcttcactgccgacaattaactcgtcattttccagacgcagcggcagtaccgcattggtcagcagaatcagcttatcttccagcacaaagcgcgcttccagcgcctcgccgatgtcagataaaacctgttgaaactcaaggtaattatcatgatcgatggcggtttccagactggaatcgtagtaatccataatctgaacccgttcatcggtcaccacaacggtgacatcgtgggtaaaatctgtgccgaaaccggtaagagtgtacgtgaagtcgttctggaacgcggtctgttgactgaagcggaacttgacgatattttctccgtacagaatctgatgcaggtaggtgacccagccggccgcatcacagggaaagcagccctgtttttctcctcttgcttgcttcttctctcctcctcttcttcctcctcctcctcctcctcctcctcctcctcctcctcctctcttccttctcttcctgcctccttcttcttctttttggctgcagattcgatcagctataataacgtgatacaggggcacgtaataccataatacttccgctcgcttcgtccttccgcgaaatactatgatgaactgccaacggaagggaatgagcacggtcaggcgttccgcgatgtggaactggaaaaagaattgctgatcgaagcgcaaaatcttggtctgggtgcgcagtttggtggtaaatacttcgctcacgacatccgcgtgattcgcctgccacgtcacggcgcatcctgcccggtcggtatgggcgtctcctgctccgcgtaacattaaagcgaaaatcaaccgcgaaggtccttgccttccatcatgtttgtgaggcttccccagccacatggaactgtaagtccaattaagcccctgagttcccagtgctggaaagtgacagacacaaggtgcttcaaagattgcaaacgctattccaaaactgcctccatgattcttcaccctactcgtcagcatatgcatttcctgaatgcgagcactacgatgcgaaggaatgcggatctccacatcctgtggccctaacaaacctgcaagttcgccgccgtcatagccggtcaatgccacaatggtcatatcacgcgtaacggcggcttcaactgctttaacaatatcgcggctgttgccacgggtggaaatggctaacaatacatctcccgcatgacccagcgcccgcacctgttttgcatacacttcatcatgtaagcgatcgttggcaatcgccgttaagacaacattatcagtatttagtgcaatggcaggtaagctggccgctccgtttcgaaacggttgatcatgctggcagcaaaaatgctgtgcattggcagcggaagttccattaccacaacagaggattttgttgccattgagcagagactgaaccagcgtcat

SEQ ID NO: 25809 - DNA, 747 bp, Homo sapiens
  SIMILAR (1)..(357): 981254mologous to Escherichia coli BaeR,accession number D14054,Smith-Waterman Score=602.
atgaccgagttaccaatcgacgaaaacacaccgcgtattttgatcgtggaagatgaaccgaagctggggcagttgctcattgattatctgcgtgctgcgagctatgcgccgacgcttatcagccacggcgatcaggtactgccgtatgtgcgccagacaccaccggatctgatcctgttagatctgatgctccctggcaccgatggcctgacgctgtgccgggaaattcgtcgtttttctgacattccgatcgtgatggtgacggcaaaaatcgaagagatcgatcgcctgctggggctggagattggcgcagatgattatatctgtaagccgtacagcccacgggaagtggcttcatggcgcggtaaaatgcttgacctgacgcctgcggaatctcgtctgctgaaaacgctctctcacgaaccaggaaaagtgttctcccgcgagcaatggctcaatcatctttatgacgagtaccgcgtagtaaccgaccggaccatcgacaggcatttaaaaacctgggccgcagctgcaattctcgagccggaggtcattgatcgagcgcgggtcctcctggctactgagtactgccatcgtatagcgccgatgttacggaagatagcagaagtattatttacacagtatacggcggcgaacacaggggaacctgcagaaataattaagggccaaacgagcggaatttggcacgtgaggatacccttacaagtaaaaaacaacgggctatga

SEQ ID NO: 25810 - DNA, 1157 bp, Homo sapiens
  SIMILAR (1)..(369): 911254mologous to Escherichia coli BaeS,accession number D14054,Smith-Waterman Score=605.
atgaagttctggcgacccggtattaccggcaaactgtttctggcgattttcgccacctgcattgtcttgctgatcagtatgcactgggcggtgcgtatcagttttgagcgtggctttattgattacatcaagcatggtaatgaacagcgattacaactgttaagtgatgcgcttggcgagcagtatgcgcagcatggcaactggcgcttcctgcgcaacaatgatcgctttgtctttcagatcctgcgttcatttgaacacgataattcggaagataaacccggcccgggtatgccaccgcacggctggcgtacccagttttggggtggttgattcaaaccaacaaagtgttggtttggtccgcgagccgccgatttccacctgacggtacacggcgacccattttggtcaacggtgcgaaagttggcgcggtgatcgcctcccccgttgagcggttaacgcgcaatactgatatcaatttcgataaacaacagcggcaaaccagctggttgattgtcgccctggcaccgttactcgcggcacttgccacttttctgctggcgcgcggtttactggcaccggtaaaacgacttgtcgatggcacgcacaaactggcggcgggcgatttcactacccgcgtaacgcccaccagtgaagatgacctgggcaaactggcgcaagacttcacccagcttgccagcacactggagaaaaaccagcaaatgcggcgcgattttatggccgatatttctcacgaactgcgtacgccattagcggtgctgcgcggtgaactggaagccattcaggatggcgtgcgtaaattcacgccggagacggtggcgtctttacaggcggaggtcggtacaaagaacaaattggttgacgatctccatcagttgtcgatgtctgatgaaggcgctctcgcctatcaaaaagcaccggtagatttgatcccactgctggaagtggcgggcggcgcatttcgcgaacgattcgccagtcgtggcctgaaactgcaattttccctgccagacagtattaccgtattggcgatcgcgaccgttaatgcagtattcatacttgcccaaccaaaggccacccctggaatccggtttgaaacgggaaaccgggccaaaaacacgctgccgggaatctga

SEQ ID NO: 25811 - DNA, 2709 bp, Homo sapiens
  SIMILAR (1)..(1074): 1001254mologous to Escherichia coli Bacteriophage n4 adsorption inner membrane protein NfrB,accession number D90699,Smith-Waterman Score=1832.
atgctggtgatgatccagcttttgctgttgctggcgtatgaaagtttgtggcccgatgcctggcatttcctttctattttcagcggcagcgcatggttaatgaccctgctgtggctaaactttggtttgatggttaaccgcatcgtgcagcgggtgattttcgttactggctactacggcctgacgcaggggctgctttccgtcctgcgtcttttctggggcaacctgattaacttcatggccaactggcgcgcgctaaaacaggtacttcaacacggcgatccacgtcgcgtggcgtgggataaaacaacgcatgacttccccagcgtgactggcgatacccgctcgttgcgcccgttaggtcaaattctgctggaaaatcaggtcatcactgaagaacaactcgatacagcactgcgtaatcgcgtcgaaggtctacgcctgggcggttcaatgctgatgcaggggctgattagcgccgagcagctggcacaggcgctggcagagcaaaacggcgtggcgtgggaatccatcgatgcctggcagatcccttcctcgctgattgccgaaatgccggcctccgtggcgctgcattatgcggtactgccgctgcgtctggaaaatgacgagttaattgtcggcagtgaagatggtattgacccggtttcgctggcggccctgacgcgtaaagtcggacgcaaagtgcgttacgtcattgttctgcggggacaaattgtcacagggttacgtcactggtatgcacgccgacgcggtcacgatccgcgggcaatgttgtacaatgcggttcagcatcagtggctcacggaacagcaggccggtgaaatctggcggcaatatgtgccgcatcagttcctgttcgccgaaatactgaccacgctcggtcatattaatcgttcagcaattaacgtgttgttattgcgccatgaacgcagttctctgccgctcggcaagtttttggtcaccgaaggcgttatcagccaggaaacgttggatcgcgtcctgacaattcaacgcgaattacaagtttcgatgcaatcactattactcaaagcagtgcgggccacagtagtggtccgctgcacttcatattcgactgtacatcatagagcacatagcgaattcatcgccgcccaggcggtatcattgatgtatttgaaattatcgccatcaagaaatagtaacgccgacgtttttcgggcatcggaattgttcatcaacgtgttgatgccgctacgaaacgctgcgcggttagccagcccggttaatgggtcatgtagcgcgcagactgttgaagtcgagagcgaagcggtgaaactcagcgatacgttcttccgaaactcgtcgggaaaaattgcggttggaacgcacatcatgtacgacatcggtgatatttttcagcgcttctaccaggccattgtgcaaatggcggcgctgccagtgtttcagttgctgcagggccatcggcaaaacatggtggaagtcatcgagccgttttaccccaaggctggtaatggccggcgaccttatccgctggaaaccatgctacgcattcactgcatgcagcattggtacaacctgagcgatggcgcgatggaagatgctctgtacgaaatcgcctccatgcctctgtttgcccgcgccttgccggactgcaccaccatcatgaatttccgccacctgctggagcagcatcaactggcccgccaattgttcaagaccatcaatcgctggctggccgaagcaggcgtcatgatgactcaaggcaccttggtcgatgccaccatcattgaggcacccagctcgaccaagaacaaagagcagcaacgcgatccggagatgcatcagaccaagaaaggcaatcagtggcactttggcatgaaggcccacattgggccggagaaacgcagacggcgtaccacacaggaaaagatcgcaattgttcagcagagctttgaaccggggatgacggtctccctcgttgcccggcaacatggtgtagcagccagccagttatttctctggcgtaagcaataccaggaaggaagtcttactgctgtcgccgccggagaacagttgcacgtcattctcagacgaaccgatgactggatggatggccgccgcagtcgtcacactgatgatacggatgtgcttctccgtatacaccatgttatcggagagctgccaacgtatggttatcgtcgggtatgggcgctgcttcgcagacaggcagaacttgatggtatgcctgcgatcaatgccaaacgtgtttaccggatcatgcgccagaatgcgctgttgcttgagcgaaaacctgctgtaccgccatcgaaacgggcacatacaggcagagtggccgtgaaagaaagcaatcagcgatggtgctctgacgggttcgagttctgctgtgataacggagagagactgcgtgtcacgttcgcgctggactgctgtgatcgtgaggcactgcactgggcggtcactaccggcggcttcaacagtgaaacagtacaggacgtcatgctgggagcggtggaacgccgcttcggcaacgatcttccgtcgtctccagtggagtggctgacggataatggttcatgctaccgggctaatgaaacacgccagttcgcccggatgtcgggacttgaaccgaagaccaggcggtgcggagtccggagagtaacggaatag

SEQ ID NO: 25812 - DNA, 1065 bp, Homo sapiens
  SIMILAR (996)..(739): 901254mologous to Klebsiella pneumoniae homology to yedG gene, D90833,accession number AJ009980,Smith-Waterman Score=434.
atgcaagccaatggtatcgttctacccattaccgtgtttcctttgttcctctatggtttttactccgctgttacccgcggggggcctaaaatgaacgaaggggggttcttgttgtgttggaatgtggatcgttcctttaaaattggacaaagtaaagcttttggaaagttcgtccctggaaaggtacgaacccccaaattggcccttgtgaccaatgccaccccttacaatccacctctttatctaccacaatctttgtgtttcaaatatcccaacgctgtatggcgccaaattggcacaccgaatgattgtgcctcaattgaatcttctgtgcgccctgtgaaaaccgccccattttgtttgagggtgtccgaatgcacatatagggacaaagagtcattgcatatcaactgcaacaacactgcgatgcaaactgcgctgcccaacgtgattgattatgtgacagatctcttctcctacgactactcaatctctcgacatgagagcagaagaacatccgggcacccgcaaagggccaaacagacgggaacccacacgaaatattgccccggacgcatgatcaggccccggggttacaccagccaattcagcgcaccaatccctgcgagtgttcgcctgcccacactgaccagaaggtcactgtcgggttacgtaattttggcacatctaaagcatgactgcttttcggggggagactgctgcagcatgccggaaatatgcttctggcgacagtaccagtgggcggcggtcatgaatatctaccagaccttgatctgccgcagcagtgacgatcaaaaatccttcggcttcgtcaccacgctcaaatggtgtgctacctatcgcggccataaaaataggttgtccatcagcacgatagataaaaaaaggctgttttttgtcgccttcttttttccactcaaaccagccatcggcaaaacagattgcccgaccatgttgccagagcggtttaaacatacgactggttgccgcagtttctacgcgggcgttaatcagcggcggtttataccaccagggatcctctag

SEQ ID NO: 25813 - DNA, 858 bp, Homo sapiens
  SIMILAR (31)..(657): 991254mologous to Escherichia coli K12 putative capsule anchoring protein,accession number AE000156,Smith-Waterman Score= 1089.
atggacgctggcggcaacgtgcctccaaatccgccagtgctgattggcggttgtaccggcagcggtaaaacgctgttagtgcagcaacagccgaacggtgttgatctggaagggttggcgcgtcatcgcggttcggcgtttggtcgcacgttacaaccacaacttagccaggcgagttttgaaaacctgctggctgccgaaatgctaaaaaccgacgcccgtcagaatttgcgcctgtgggtgctggaagacgaaagccggatgatcggttcgaatcacctgccggaatgcctgcgcgagcgaatgactcaggcggcgattgcggtggtagaagatccgtttgagatccgtcttgagcgcctgaacgaagagtatttcttgcgtatgcatcatgattttacccacgcgtacggcgacgaacagggctggcaggagtattgcgaatacctgcatcacggactttcggcgattaagcgtcggctggggctacagcgctataacgaactggctgcaaggctggatgcagcactgacaacgcaactcaccaccggcagcaccgacggtcatctggcctggctggtgccgttacttgaagaatattacgacccgatgtatcgctatcagcttgagaaaaaagcggaaaaagttgtctttcgcgaggtaactctcatgcttcatactgccaatcccgtcatcaaacacaaagccggtttgctcaatctggctgaagaactcagcaacgtatcaaaagcctgtaaaatcatgggcgtttcgcgtgatacgttttatcgttaccgcgaactggtcgctgaaggcggtgtggatgcgcagattattcgtagtcgccgcgctccgtaa

SEQ ID NO: 25814 - DNA, 2412 bp, Homo sapiens; identical to SEQ ID NO: 15734
  SIMILAR (1026)..(1091): 721254mologous to Escherichia coli O157:H7 putative L-serine deaminase,accession number AE005540,Smith-Waterman Score=80.

SEQ ID NO: 25815 - DNA, 1257 bp, Homo sapiens
  SIMILAR (1)..(702): 1001254mologous to Escherichia coli Phospho-N-Acetylmuramoyl- Pentapeptide-Transferas e,accession number D10483,Smith-Waterman Score=1203.
atgggcgggattatgatcctgacggcgattgtgatctccgtactgctgtgggcttacccgtccaatccgtacgtctggtgcgtgttggtggtgctggtaggttacggtgttattggctttgttgatgattatcgcaaagtggtgcgtaaagacaccaaagggttgatcgctcgttggaagtatttctggatgtcggtcattgcgctgggtgtcgccttcgccctgtaccttgccggcaaagacacgcccgcaacgcagctggtggtcccattctttaaagatgtgatgccgcagctggggctgttctacattctgctggcttacttcgtcattgtgggtactggcaacgcggtaaacctgaccgatggtctcgacggcctggcaattatgccgaccgtatttgtcgccggtggttttgcgctggtggcgtgggcgaccggcaatatgaactttgccagctacttgcatataccgtatctgcgacacgccggggaactggttattgtctgtaccgcgatagtcggggcaggactgggcttcctgtggtttaacacctatccggcgcaggtctttatgggcgatgtaggttcgctggcgttaggtggtgcgttaggcattatcgccgtactgctacgtcaggaattcctgctggtgattatggggggcgtgttcgtggtagaaacgctttctgtcatcctgcagtcgctccataaacttccatctaagccaacacagagtaacacaaggccaacgtctccagatgtcaatgggagaagatctgtggtaacaattggggcgatgcaccttcgcaactctaagtggaacatcatcagagatgtccctaagaaagcaggattggagctgaaaccttcatttggagaaggagagctccaggcagaggaaagagctgctgcaaaggttctggggttggaacaagttggtttgcttgaggaacagaagaaacgcatgtggccagcgcagagtgaggccggggagatgagagatgagatgggagagcccgaggagcgggatacatacccggataaaatccccggcgaggatgatcacttaaacgaacgatttcgaaccgcctttgacgtcgttaacgtacacagcgacggactccgcgccacctgcggccataaagatccaggtggtaacgccgaggaacgcccagttgaagttcgggatcatcgcgtcaacggtgatggcgtcagcaggctgtacgccgccaaccagcgccgtacctgccagtaa

SEQ ID NO: 25816 - DNA, 1184 bp, Homo sapiens
  SIMILAR (25)..(375): 961254mologous to Escherichia coli Hypothetical protein 126: PIR:Q3ECTC,accession number D10483,Smith-Waterman Score=581.
atggacttcgctgaaacggagctcgagttcatcaaattctggggagatatcatcaccaacaagctgaacgaggcgctcgcagcacaaggcgataatgtggtgattaatctggcgtcagatgagtattttaaatcggtgaagccgaagaaattgaatgccgagattatcaagccggtgttcctcgatgagaagaacggcaaatttaagatcatcagcttctacgctaagaaagcacgcggtctgatgagtcgtttcattattgaaaatcggctgaccaaaccagagcaactgactggttttaatagcgaaggttacttctttgatgaagattcctccagcaatggcgaactggtgtttaaacgctacgagcagcgcgctgaatgccggattgttacccggcatttgtcatttagcggtgatgtttgcctggaccatgaccgccgtgatgatcatgaggagctttcttatggtggcgcggcggtggcggcggtccttgttatcgaaccgaacaaactggcctttgacggcagcggttatctggcctgggaaggtctgatctgcatgcaggaaatcggcaaatgcaccgaagaacatcaggcgattgtgcgtaagtggctggaagagcgcaaactggatgagtttccggttgggccctttcccggggaaaaaaccaaccgggggttggttgcgaagcaggcgcccgtcgacacgcccgagaagcgcgcatcggtgatgagcgacaccgtcttgccccacgagatatgctttagcgcggagcgcgacaaaacggtgcgcctgacctttgccgacagtgcgccaggtgtcagtgacgatcagctacaaaaattgtttgaacgtttttatcgcaccgaaggttcccgcaaccgtgccagcggcggttccgggctggggctggcgatttgcctgaacattgttgaagcacataatggtcgcattattgctgcccattcgccttttggcggggtaagcattacagtagagttaccgctggaacgggatttacagagagaagtatgaccgagttaccaatcgacgaaaacacaccgcgtattttgatcgtggaagatgaaccgaacctggggcagttgctcattgattatctgcgtgctgcgagctatgcgccgacgcttatcagccacggcgatcactttagagccctatag

SEQ ID NO: 25817 - DNA, 2546 bp, Homo sapiens
  SIMILAR (1)..(891): 931254mologous to Escherichia coli Sensor kinase CitA,accession number D90702,Smith-Waterman Score=1393.
  misc_feature (1)...(2546): n = a,t,c or g
atggcaatgaatcaggcgaaaattattgcctccaatgacagtgtcatctctgcggtgaaaacgcgtgactacaaacggctggcgaccatcgctaacaaattacaaagagataccgattttgattatgtggtgattggggaccggcactcgatccgcctttaccatcctaatccggagaaaatgttcaccaaacagggcgcgctggagaaaggggagagctacttcattaccgggaaagggtcaatggggatggcgatgcgcgccaaaacgccaatctttgatgacgatggaaaagtcatcggcgtggtgtcgattggctacctggtgagtaaaatcgatagctggcgggctgagtttttattaccgatggcaggtgtgtttgtcgtgctgttagggattctgatgttgctgtcgtggttcctggccgcgcatatccgtcggcagatgatgggcatggagccaaagcaaatcgcacgcgtggtccgtcagcaagaggcgctgtttagttcggtttatgaagggctgattgcggtggatccgcatggttacattaccgccatcaatcgtaacgcaagaaagatgctggggctgagttcccccggacggcaatggttgggtaaacccattgttgaagtggtcaggcccgccgatttctttaccgaacagattgatgaaaaacgtcaggatgtggtggcgaactttaacggtctgagcgttattgccaaccgggaagctattcgttcaggtgatgatttgctgggggccattatcagctttcgtagtaaagacgaaatttccaccctcaatgcgcaactgacgcaaataaaacaatacgttggagagccttcgtacattgcgacacgagcatctcaattgatgtcgacgctcaattttccccacaactcgcggccgccgaaaagtcctggccctggcgtgggcggtcactgcattgctgttgatccgtggtttatcgtggcacagaacccccagcaggcgcggcttatccgtaccgcgcgcgaagtgaacgatcacaaaccgttctgggttatcgatcaggtgaaagcggcggtggctgattgcctggcggctaccgataaacgcgccagtgaactgaaaatcgcctgctttggtctggcgtttaaaccgaatattgatgacctgcgcgaaagcccggcgatggaaatcgctgaactgatcgcccagtggcatagcggcgaaactctggttgttgagcctaacatccaccagttgccgaaaaaactgaccgggctttgtactctggcgcagcttgacgaggcgctggcaacggcagacgtgctggtgatgctggtcgatcatagtcagttcaaagttatcaatggcgacaatgtccatcagcagagtctggcgctgatgagaaaaattctgataacaggtggtgccgggtttattggctcggcgctggtgcgttatatcatcaacgaaacgagcgacgcggtggtagtggtcgataagctgacctacgccgaacctgatggtaccgatttcaagtacttactggaaacagcctgcgctacactgacagcgtcggcagcctgcaatctctgccgggcagcgcgacaaaacggttcccgcaaccgtgccagcggcggttccgggctggggctggcgatttgcctgaacattgttgaagcacataatggtcgcattattgctgcccattcgccttttggcgggcattacagtagagttaccgctggaacgggatttacagagagaagtatgaccgagttaccaatcgacgaaaacacaccgcgtattttgatcgtggaagatgaaccgaagctggggcagttgctcattgattatctgcgtgctgcgagctatgcgccgacgcttatcagccacggcgatcaggtactgccgtatgtgcgccagacaccaccggatctgatcctgttagatctgatgctccctggcaccgatggcctgacgctgtgccgggaaattcgtcgtttttctgacattccgatcgtgatggtgacggcaaaaatcgaagagatcgatcgcctgctggggctggagattggcgcagatgattatatctgtaagccgtacagcccacgggaagtggtagcgcgcgtcaaacccattttgcgccgttgcaaaccgcagcgcgagttgcagcaacaggatgctgaaagcccgttgattatcgacgaaggtcgttttcaggcttcatggcgcggtaaaatgcttgacctgacgcctgcggaatttcgtctgctgaaaacgctctctcacgaaccaggaaaagtgttctcccgcgagcaattgctcaatcatctttatgacgactaccgcgtagtaaccgaccgcaccatcgacagccacattaaaaacctgcgccgcaagctggaatcttttgacgccgaccagtcatttatccgcgccgtttctggagtcgccccccgntgggaagccgacgcctgacgcatggtttaaaggngnnnngtctgggtgacaccagcatatgtgcgattancgccgatgtacagtgtaccgac

SEQ ID NO: 25818 - DNA, 5356 bp, Homo sapiens
  SIMILAR (1429)..(2832): 991254mologous to Escherichia coli 79-kDa multifunctional protein,accession number M74164,Smith-Waterman Score=2400.
atggactggctggctaaatattggtggattctggtgattgtctttttggtaggcgtcctgctgaacgtgattaaagatctcaagcgcgtcgaccataagaaatttctcgccaacaagccggagcttcccccgcatcgtgatttcaacgataagtgggacgatgacgacgactggccgaaaaaggatcaaccgaagaagccaggtaatctgtcttttacatcatttcaatcacatcatcatcgccaggcttaccgccacttagaataccgacagtatgcgcgtgtgcacctgcgcttgcagcagtgccggacaggtccggcaacttccgactccggtatagaagttaaccagaatatagctgtcgccagagcgggtgacattgtaagcgccagattcggcattccatggaacgccaccatccgcatcggcatatgtatccgttgcccttctggcaaaagcagccacatgcgcggcgccaccataaacatcaccttgattggtaagcagcaggaaaaagaagctaatggtctggacccggaagtgctggcggagattaaccgcgaacgcgaggccttcctggcagcacagcagggaagtacttcaacggagttgtttaccaccattgaaggcaactacgctgatgctgtgcgcctgctgacgactgctcatagcgtaccgtttgacggtaaagcgacgctgtttgttgctgaacgcacacttcaggaaggtatgagtcccgaacgcgcctggtcgccgtggatagcggagctggatatctatcgtcaggattgtgcgcatgtggatattatctctccagggacgtttgaaaaaattgggccgattattcgcgcaacgctaaacaggttataccccatgtcatcactgaatattaaacagggaagtgacgctcattttcccgattatcctctggcgtcgcccagtaataatgaaattgatttacttaatctaatctcagttttatggcgggccaaaaaaacggtcatggcggtcgtttttgcgtttgcctgcgcaggcttgctgatctctttcatcctgccgcaaaaatggaccagcgcggcggttgtcacgcctccagaacctgttcagtggcaagagttggagaaatcattcactaagcttcgtgtgctggatctggatatcaaaattgatcgtacagaagcatttaacctgtttatcaagaagtttcagtcggttagcttgctggaagagtacctgcgttcatcaccttatgtgatggaccaattaaaagaggcgaaaatcgacgaactggatttgcatcgcgcaattgtcgcattgagcgaaaaaatgaaagcggttgatgacagtgccagtaagaaaaaagatgaaccgtcactgtatacctcctggacgctaagttttaccgcgccaaccagtgaagaggcgcagaccgttttgagcgggatgttcgcacaaacagcggggaaacattatccggcccccatcaccgcagtaaaaaccattgaagctgcggcccgttttggtcgtgaagaagccttaaacctggaaaacaaaagttttgtcccgctggcgcataccaacgaagcccgcgcactggtcggcattttccttaacgatcaatatgtaaaaggcaaagcgaagaaactcaccaaagacgttgaaaccccgaaacaggccgcggtgctgggtgcaggcattatgggcggcggcatcgcttaccagtctgcgtggaaaggcgtgccggttgtcatgaaagatatcaacgacaagtcgttaaccctcggcatgaccgaagccgcgaaactgctgaacaagcagcttgagcgcggcaagatcgatggtctgaaactggctggcgtgatctccacaatccacccaacgctcgactacgccggatttgaccgcgtggatattgtggtagaagcggttgttgaaaacccgaaagtgaaaaaagccgtactggcagaaaccgaacaaaaagtacgccaggataccgtgctggcgtctaacacttcaaccattcctatcagcgaactggccaacgcgctggaacgcccggaaaacttctgcgggatgcacttctttaacccggtccaccgaatgccgttggtagaaattattcgcggcgagaaaagctccgacgaaaccatcgcgaaagttgtcgcctgggcgagcaagatgggcaagacgccgattgtggttaacgactgccccggcttctttgttaaccgcgtgctgttcccgtatttcgccggtttcagccagctgctgcgcgacggcgcggatttccgcaagatcgacaaagtgatggaaaaacagtttggctggccgatgggcccggcatatctgctggacgttgtgggcattgataccgcgcatcacgctcaggctgtcatggcagcaggcttcccgcagcggatgcagaaagattaccgcgatgccatcgacgcgctgtttgatgccaaccgctttggtcagaagaacggcctcggtttctggcgttataaagaagacagcaaaggtaagccgaagaaagaagaagacgccgccgttgaagacctgctggcagaagtgagccagccgaagcgcgatttcagcgaagaagagattatcgcccgcatgatgatcccgatggtcaacgaagtggtgcgctgtctggaggaaggcattatcgccactccggcggaagcggatatggcgctggtctacggcctgggcttccctccgttccacggcggcgcgttccgctggctggacaccctcggtagcgcaaaatacctcgatatggcacagcaatatcagcacctcggcccgctgtatgaagtgccggaagtcggtgtggcggtgggcctgcacggcgccagtgtgcagcagcaaaaatcattctgtccttctgttagtatctactcacagccgatcccgggcctgcagcaactctgcgccgctccccccccccccggcttagtgcaccgaacggcaatctccgagggggtcggaatgcctttacacgtcgtcaatttaccgccgaaaagatttgcgcgtaaacgcctggagcccaaatgggtacggataacttggcagttcgctgatatgcaagatatcggtaagacgccgctcaccgcctgccgttgccagcaagttttcagcaatgttacgcgccgacatcagcgcccgcagcatcggcataacgccacgtttgcgccagatttgccgataaccatcgaactcttcgactaccacatcccacgcatcgtttcgatatccagcgcgttcagccccatcattgacgttgccagcgcactacgcagggtgttctcacgttcgggcgtcatcaccgcctgcaacaaccaaagcatttcctgcgcttccagagtttcaaaaacactgtcgcggttcgaaagtgtagtgggcgtgaacttcgctacgcgccttcatataagtgaagatatccgcaccccggaatgcatatattgcctgcttcgggtcgccattagcaacaatgcggttcccgctgatggtgccagataccgcgaaaaatcggtactgctgggggaccgggtggccccgagcggcggcgagcggtgcaagagggggaacggaggggcccgtaaaggggggcgcgctagaggaggagcccctagggatccgaagggagcagcaagggcgaaggccaatgcatggccatggacggagccaagagagtgttccttgattgctggcgaatatcgccatcgaattgcagcgtgggattggtcaccaggatcgttttcagcgcctgatcaccacgctacgtcaggtgctggagtgcgatgcgtctgcgttgctacgttacgattcgcggcagtttattccgcttgccatcgacggtctggcaaaggatgtactcggtagacgctttgcgctggaagggcatccacggctggaagcgattgcccgcgccggggatgtggtgcgctttcccgcagacagcgaattgcccgatccctatgacggtttgattcctgggcaggagagtctgaaggttcacgcctgcgttggtctgccattgtttgccgggcaaaacctgatcggcgcactgacgctcgacgggatgcagcccgatcagttcgatgttttcagcgacgaagagctacggctgattgctgcgctggcggcgggagcgttaagcaatgcgttgctgattgaacaactggaaagccagaatatgctgccaggcgatgccacgccgtttgaagcggtgaaacagacgcagatgattggcttgtcccctggcatgacgcaactgaaaaaagagattgagattgtggcggcgtccgatctcaacgtcctgatcagcggtgagactggaaccggtaaggagctggtggcgaaagcgattcatgaagcctcgccacgggcggccaagctgctgagggtgttgcagtatggcgatattcagcgcgttggcgatgaccgttgtttgcgggtcgatgtgcgcgtgctggcggcgactaaccgcgatttacgcgaagaggtgctggcgggcgattgccgcgaccgatttgtttcatcgcctgagcgtgtttccactttcggtgccgccgctgctgccgttgaggcgttgcgtgaccatctcaatacgctgggcggcgagcaccatgaccccgtgcagttgctgaatatttactacgaaacgccggataactggctgcgtgggcacgatatgggcttacgtattcgtggcgaaaacggtcgctatgagatgaccatgaaagttgcaggaagagtgacaggcggcttacatcagcgcccggaatataacgtggcgttgagcgaaccgacgctcgacctggcgcagttaccgacggaagtctggccgaacggcgaattgcccgccgatctcgcctcccgcgtgcagccgctgttcagcaccgatttttatcgcgaaaaatggctggtggcggtcgatggtagccaaattgaaatcgccctcgaccagggggaagtgaaagcgggtgaatttgctgaacctatctgtgagctggaactggaactgcttagcggcgacacgcgcgcggtgctgaaactggcgaaccaactggtatcgcaaaccggattacgccagggcagcctgagcaaagcggcgcgtggctatcatctggcgcagggcaatccggcgcgtgaaatcaaaccgaccaccattttgcatgttgcggcaaaagccgatgtggaacaggggctggaagcggcgctcgagctggcgttagcgcaatggcagtatcatgaagaactgtgggtacgcggcaacgatgcggcgaaagaacaggtgctgcagccattagcggccagccaggaggctggaccaacgcatatgtga

SEQ ID NO: 25819 - DNA, 3000 bp, Homo sapiens
  SIMILAR (1578)..(1604): 1001254mologous to Escherichia coli nfrA,accession number L16945,Smith-Waterman Score=41.
cgaaagcgatgtacaacaactggcggctgagtccggtgacgaccgcagcgtggtgattggcgtcggtggcggtgcactgctcgacaccgcgaaagccctcgcccgccgtctcggtctgccgtttgttgccgttccgacgatcgccgccacctgcgccgcctggacaccgctctccgtctggtataatgatgccggacaggcgctgcattatgagattttcgacgacgccaattttatggtgctggtggaaccggagattatcctcaatgcaccgcaacaatatctgctggcggggatcggtgacacgctggcgaaatggtatgaagcggtggtgctggctccgcaaccagaaacgttgccgctaaccgtgcgactggggatcaataatgcgcaagccattcgcgacgtcttgttaaacagtagcgaacaggcgctgagcgatcagcaaaatcaacagttaacgcaatcattttgcgatgtggtggatgctattattgctggtggtgggatggttggtggtctgggcgatcgttttacgcgtgtggcggcagctcatgccgtgcataacggtctgaccgtgctgccgcaaaccgagaagtttctccacggcaccaaagtcgcctacggaattctggtgcaaagcgccttgctgggtcaggatgatgtgctggcgcaattaactggagcgtatcagcgttttcatctgccgactacactggcggagctggaagtggatatcaataatcaggcggagatcgacaaagtgattgcccacaccctgcgtccggtggagtccattcattacctgccagtcacgctgacaccagatacgttgcgtgcagcgttcaaaaaactaatacagggcctgattagcgccgagcagctcgcacaggcgctggcagagcaaaacggcgtggcgtgggaatccatcgatgcctggcagatcccttcctcgctgattgccgaaatgccggcctccgtggcgctgcattatgcggtactgccgctgcgtctggaaaatgacgagttaattgtcggcagtgaagatggtattgacccggtttcgctggcggccctgacgcgtaaagtcggacgcaaagtgcgttacgtcattgttctgcggggacaaattgtcacagggttacgtcactggtatgcacgccgacgcggtcacgatccgcgggcaatgttgtacaatgcggttcagcatcagtggctcacggatacagcaggcacggtgaaatctggcggcaatatgtgccgcatcagttcctgttcgccgaaataatgaccacgctcggtcatattaatcgttcagcaattaacgtgttgttattgcgccatgaacgcagttctctgccgctcggcaagtttttggtcaccgaaggcgttatcagccaggaaacgttggatcgcgtcctgacaattcaacgcgaattacaagtttcgatgcaatcactattactcaaagcaggtttaaacacagaacaggttgcgcaactggagtccgaaaatgaaggagaataaccttaatcgcgtcatcggatggtctggtttactgctgacgtctttattggagtaccagcgcactcgcagacaatattcggcaccagcgcagaagagctggggctgagcgattatcgccattttgttatttatccccgtctcgataaagcgctgaaggcacagaaaaataacgacgaagcaaccgccatccgcgaatttgaatatatacaccagcaggtgccggataatattccgctgactttataccttgcggaagcctatcgccattttggtcatgatgaccgggcgcggctgttgcttgaggatcaactgaaacgtcacccaggagatgcccgacttgagcgcagtctggcggctattccggttgaagtgaaaagcgttacgacagttgaagaactgcttgcccagcaaaaagcgtgcgatgctgcgccgaccctgcgttgtcgcagtgaagtcgggcagaatgccctgcggctggcacagttacctgtcgccagagcgcaactgaacgatgcgacgtttgctgcatcgccggaaggaaaaacgctgcgaaccgatctgctgcaacgggcaatctacctgaaacaatggtcccaggcagatacgctatacaatgaagcacgccagcagaacacattaagcgcggcagaacgccgtcagtggtttgacgtgcttcttgccgggcagctggacgatcggatcctggcactgcaatcacaggggatcttcaccgatcctcagtcatatattacttacgcgaccgcgctggcttatcgtggcgaaaaagcacgcctccagcattatctcattgaaaataagccactatttaccacggacgcacaagagaaaagttggctctatctgttatctaaatacagcgctaaccccgttcaggcgttggcgaattatacggtacagtttgccgagaaccgccagtatgtcgttggcgcgaagctaccggtgctgttaaaagaaggtcagtacgacgcagcgcaaaaactgctcgccaccctccccgccaatgaaatgcttgaggagcgttatgctgtcagcgtggcgacccgtaacaaggctgaagctctgcgtctggcacgattgctgtatcagcaagaaccggcaaatcttacccgcctggatcaactaacctggcaactgatgcagaacgagcagtcacgcgaagctgccgatttattgctgcaacgctatcctttccagggcgatgcgcgtgtcagccagactttaatggcgcgactggcgtctctgctggaaagtcatccttacctggcaacgccggcgaaggtggcgattttatcgaaatctggttggaccaagttgcgtgggccatttcttgtagagacaggatttcggcatgttggcaaggatggtctcgatccccatgaccgtcgtgatcctacccgaccatcgagacgcttctccaatacgtgcctgggcgccttgactatgacagtgtag

SEQ ID NO: 25820 - DNA, 3137 bp, Homo sapiens
  SIMILAR (287)..(610): 961254mologous to Escherichia coli K12 putative capsule anchoring protein,accession number AE000156,Smith-Waterman Score= 538.
atggtctgcgttgctacgttacgattcgcggcagtttattccgcttgccatcacggtctggcaaaggatgtactcggtagacgctttgcgctggaagggcaccacggctggaagcgattgcccgcgccggggatgtggaggtctgaaggttcacgcctgcgttggtctgccattgtttgccgggcaaaactgatcggcgcactgacgctcgacgggatgcagcccgatcagttcgatgtttcagcgacgaagagctaccgcctgattgctgcgctggcggccgggagcgctggcgctgggacataaactggtggcgggtgaaattcgtcagcagcgcatggacgcctggcgggcagcgtgcctgcaaaatccgcaaggtattctctgctgcgcccgtggcggtcagcgctcacatattgtgcaaagctggttgcatgcagcggggattgattatccgctggtggaaggcggttataaggcactgcgccagaccgcgattcaggcgactattgaactggcacaaaaaccgatagtgctgattggcggttgtaccggcagcggtaaaacgctgttagtgcagcaacaggcgaacggtgtgatctggaagggttggcgcgtcatcgcggttcggcgtttggtcgcactgaagatgaactgggcaaactggcgcaaacttcaaccagctcgccagcacactggagagaaaccagcaaatgcggcggattcttatgcccgatatttctcacgaacatgcgtacgccattaccggtctgcgcgacagtattaccgtatttggcgatcgcgaccgtttaatgcagttatcaataacttactggaaaacagcctgcgctacactgacatcgtcggcagctgcaaatctctgccgggcagcgcgacaaaacggttcccgcaaccgtgccagcggcggttccggctggggctggcgatttgcctgaacattgttgaagcacataatggtcgcatattgctgcccattcgccttttggcgggcattacagtagagttacgctggaacgggatttacagagagaagtatgaccgagttaccaatcgacaaaacacaccgcgtattttgatcgtggaagatgaaccgaagctggggcattgctcattgattatctgcgtgctgcgagctatgcgccgacgcttatcaccacggcgatcaggtactgccgtatgtgcgccagacaccaccggatctgtcctgttagatctgatgctccctggcaccgatggcctgacgctgtgccggaaattcgtcgtttttctgacattccgatccgcgagttgcagcaacaggatgctgaaacccgttgatatcgacgaaggtcgttttcaggcttcatggcgcggatttaaacgacaaaggcaccaccatcattctcaccacacactacctggaagaagcagaaatgctgtgccgcaatatcggcattattcaacacggtgagctggtggaaaatacctcgatgaaggcgctgctggcgaagctgaaatcggaaacctttattctcgatctcgcaccgaaaagcccgttaccgaagctcgatggctatcagtatcgactggtcgataccgcgacgctggaagttgaagtgctgcctatatgcattcatcgtaccggggctgatcatgatgtcggtgatcaccaatgcctacgcaacgttgcgtcatcattttttggtgccaagttccagcgtaatattgaaagctgctggtagcgccggttccgactcacgtcattattgccggatatgtggcggtggcgtggcgcgtggtgcattcgtgggtattcgttgcctaacgctggtgctcacggcggtgttgttctcccttgcgggtttgctgaagggcaatgcatccggcatcataatcagtcatacgtgcacgatggttggtggcctagcagcggtgcagcataacatcatgcctggactggttgtgcgtagttcgtttcatgtaggtgagagtatcgttaagcgtgccggagtacagcaaccacagcggaataatggaatctgcatatgcaacaaccagcgccacagtcggatgcgtggagattcgttgcgtctggcgactgcagcagtccaggtactggctgaaatgccgggctaccgcgtgctggtggtgggcgatatggcggaactgggcgctgaaagcgaagcctgccatgtcaggtgggtcgaggcggcaaaagctgctggtattgaccgcgtgcttaaggtggtgcgtaacgacggtcctgaatcacacttcagcaagcgcggtacgccgaccatgggcgggattatgatcctgacggcgattgtgatctccgtactgctgtgggcttacccgtccaatccgtacgtctggtgcgtgttggtgtgctggttaccggtgttacttggctttgttgatgcttactcgcacgtggtgcgtacagacaccaaagggttgatcgctcgttggaagtatttcggatgtcggtcattgcgctgggtgtcgccttcgacctgtaccttgccggaacgacacgcccgcaacgcagctggtggtcccattctttcaacatgtgagccgcagctggggctgttctacattctgctggcttacttcgtcattgtggtactggcaacgcgcaacttcagcgcaccaattcctgcgagttgttcgccttcccatactgaccagaatgtcactgtcgggttacgtaatttttgcacatctaaagcatgactgctttcggggggagactgctgcagcatgccggaaatatgcacttcaccggtgttgacatccaccagccggcgctaccagattcagccttgttaaaggccaccgcattgttcagttccgataaaccagcgcctgcaggcgttcatcaatactcagcgccaggttgtcgcagcctggctgtcagtagaagaaatatcttcaattacgcgaccatagggtctttacgcacaatgcgctcacccggctgcccgcgttacgtcactggtatgcacgccgacgcggtcacgatcccgggcaatgttgtacaatgcggttcagcatcagtggctcacggaacagcgcccggtgaaatctggcggcaatatgtgccgcatcagttcctgttcgccaaatactga

SEQ ID NO: 25821 - DNA, 954 bp, Homo sapiens
  SIMILAR (265)..(942): 961254mologous to Escherichia coli Bacteriophage n4 adsorption inner membrane protein NfrB,accession number D90699,Smith-Waterman Score=1151.
  misc_feature (1)...(954): n = a,t,c or g
atgctgcgtcgggcgctaagcaacctgctttcgaacgccgtgcgttatacgccaaccggagagacaattgtagtgcgctgtcagacggtcgatcacctggtgcaagttatcgtcgaaaaccccggtacgcccattgcgcccgagcacttaccgcgattgtttgaccgtttctatcgcgttgacccctcccgccagcgaaaaggtgaaggtagcggtattggcctggcgatagtgaaatcgattgttgtcgcgcataaaggcacggttgcgcgcaagttgagtgttaatcgccgtaaccggcgaatgagttaccgcgaactgtataaaccagatgaaaacccgttagcgattatggttccgccgtggaatgaaacgggcgtcatcggcaatatggccgagctggcggcgacaacgctcgactacgaaaactatcatatctttgttggcacntaccccaacgaccccgatactcagcgtgatgttgacgaagtgtgcgctcgcttcccgaatgtgcataaggtagtctgcgcgcgtcctggccccaccagcaaagccgactgtctgaacaacgtgctggacgccatcacccaatttgagcgtagcgccaatttcgcttttgctggttttattctgcatgacgccgaagatgtgatttcaccgatggaattgcgtctgttcaactatctggtcgagcgtaaagatctgattcagatcccggtgtatccgttcgaacgcgaatggacgcacttcaccagcatgacttacattgatgagttttcagagctgcatggcaaagatgttccggtgcgtgaagccctcgccggacaagtgcccagcgcaggcgtcggcacctgtttcagccgccgcgccgtgaccgcactgttagctgacggtgacggtattgctttcgacgtgcagagtcttactgaagattacgacattgcttccgcctga

SEQ ID NO: 25822 - DNA, 1129 bp, Homo sapiens
  SIMILAR (1129)..(563): 1001254mologous to Escherichia coli Sel-1 protein,accession number D90704,Smith-Waterman Score=1028.
catggccgcatatggttccgggattttcgcccagacatacatcgaagccttcggcatttcaaccatccagcccgcttcatgcagccctgttaaccaatacatcacggcggcgtttgtactgttcggcaatgtcgcgcacgcactgttgatcgccctccagcgccgcaatcgccgccacctgcaacggcgtaaaggtgccgtaatcgtgatagcttttaatacgagccagggcgctgaccagcgttttgttgccaaccataaagccgatacgccagcccgccatgttgtagcttttcgacagcgtaaagaactcgactgccacatcgcgtgcacccggtacctgcataattgacggcgctttccagccatcgtagacgatatcggcataggccaggtcatggaccaccagcacatcgtagcgtttcgccagcgccactactttttcgaagaactccagttccacgcattgcgcggttgggtttgacgggaagccgaggatcatcatcttcggtttcggataactttcacgaatggctcgctccagttcgttgaagaaatcgacacgaatttcctgactgacatctctggttccggatgactgaactttacgatacaggtcgagagcctgtcggagatcgacaggtcttccttctccgtagtgatacataatggccaggttataccaggcagtggcgtcattgcattcagcggctttcgtaaaccattcaaaggcagcctgataatctttctcaacgccttgtccgtgtttatacatataaccgatgttgacgtaagcgccgacgctcccctgagcggcagccttcagataccagtacatcgcttgcttatagtcctggtccaccccttcgccagcgttataatcccatgcaatttgaaactgggcgtgccgattaccctgctgtgcgcttttcaaataccagaatgcggcgagtgtcttgttttgagcaacgccttttccgtcttcataaagatcggccagattgttttgcgcgtcactatggccttgtaatgcagcttgtttgtaccagaaaaatgccagcgcatagtcttttgcgactccgttgccatttctgtacatccacccaagattattttgcgcataagacat

SEQ ID NO: 25823 - DNA, 1020 bp, Homo sapiens
  SIMILAR (124)..(774): 891254mologous to Escherichia coli enzyme II-fru,accession number M23196,Smith-Waterman Score=983.
tcagacatccgcaaactgcgaattatcgcaggtccagcaagtccgtaatgcgtctgattccaagatatctcggagaaaccacttaaggggttcggcattgaaggctaaaactggtttctcaaagtgtcgccggtgaaattccgattcctcgtgtccactggctgcctcttcatcacgagttacttcctgatcggtaaaccagttgctggcattctcgaagggctgactcactggctgcagaccatggggactgcgaatgcggttctgctgggggcgatcctcggtggcatgatgtgtactgacatgggcggtccggtaaacaaagcagcgtacgcattcggtgtgggtctgctgagtactcaaacctatggcccgatggcggcgattatggcggcaggtatggtgccaccgctggcaatgggtctggcaacaatggtggcgcgtcgcaaattcgacaaagcgcagcaggaaggtggcaaagccgctctggtattgggactgtgcttcatttcggaaggtgcaattccgtttgctgctcgtgatccgatgcgtgtgctgccgtgctgtatcgtgggtggggcgctgactggcgcaatctcaatggcgattggtgcgaaactgatggcaccgcacggtggtctgtttgttctgctgatccctggcgctattacgccggtattgggttacctggtagcaattattgccggtacgctggtggcgggtttggcctatgccttcctgaaacgtccggaaggggacgcaataacgaacgccccgtaataaaagggcggttaaaggctttaaatttcctgccctgtagcattggaaaaaacgccaaaaaatgatcggctcttagaaattactctcgcgacgcaaacccgtgttatcctttgggaaaaaagagacacgcgactctaaccgctctgtgttttgcgatactcgccatacgcagcgctcgggctgttatggtagacaatcagcccctcgaccagagaagaacgacacgctccgttaagatac

SEQ ID NO: 25824 - DNA, 1239 bp, Homo sapiens
  SIMILAR (1239)..(796): 981254mologous to Escherichia coli Bacteriophage n4 adsorption inner membrane protein NfrB,accession number D90699,Smith-Waterman Score=785.
ctaaattacacataagaagccgcccccttcttggaggtctgctctgcttccggcggcaggcgtgttttcacgcaggtacatgcctgcattgtgcgagtaacactgggcttcgtaaagaatgagggctgaggcaacggaaacattcagcgactgcaccatgccgatcatcggaatgatgatgtcctgatccgccagggccaatgcttcctgcgtgatgcccgttttctcctgtcccatcaaaatgcaggtcgggcgagtgtaatcaatttcgcggaaatcgacagcgttatcagaaagatgggttgccagaatctgcatgccctggcctttgagatgagcgacggcatcgccaatggtgcggtgtgttttcacctgtacccagctgttactacccgccgctgccgaagccatggtgcgcatgcggctaccaggccagacggcgtgaacttcatgtacgccaacggcatctgcggtacgaataatcgcagaaacgttatgaggtttgtggaccagtgaagatgaactgggtgcccccgtcccgctgaaatcgttgctgtcgtgctttccactcagcactctgaagagatcgaccagaaatcgctgcaagaagcggtaatggaagagatcatcaagccaattctgcccgctgaatggctgacttctgccaccaaattcttcatcaacccgaccggtcgtttcgttatcggtggcccaatgggtgactgcggtctgactggtcgtaaaattatcgttgatacctacggcggcatggcgcgtcacggtggcggtgcattctattctttcggcgtcatgcagaataaaaccagcaaaagcgaaattggcgctacgctcaaattgggtgatggcgtccagcacgttgttcagacagtcggctttgctggtggggccaggacgcgcgcagactaccttatgcacattcgggaagcgagcgcacacttcgtcaacatcacgctgagtatcggggtcgttggggtaggtgccaacaaagatatgatagttttcgtagtcgagcgtggtcgccgccagctcggccatattgccgatgacgcccgtttcattccacgccggaaccataatcgctaacggtttttcatctggtttatacagttcgcggtaactcattcgcgggtagcggcgataaacactcaacttgcgtttaatgcggcgtacccagtagacgacatcaataaaaaaatcgtccagcccgctgatgaacat

SEQ ID NO: 25825 - DNA, 714 bp, Homo sapiens
  SIMILAR (147)..(10): 1001254mologous to Escherichia coli CusS,accession number AF245661,Smith-Waterman Score=230.
atgtctctaacgcgcatccgacgttaccgcaaccgtgcctttatgcgcgacaacaatcgatttcactatcgccaggccaataccgctaccttcaccttttcgctggcgggaggggtcaacgcgatagaaacggtcaaacaatcgcggtcagggttcctgcgtctgcttctgggtctgtctggtctgcatgtcggcgcgatctcgacctggattcgtgtctctgtatgtccagaggccagcgtgttgggggtgtccagcctcccggaggagtactatgccttgacaccttcgtttcaccgccccaaagctggcctggggctccagccggcagcgcgctccgctcggcatttcccgaagagccagatcgcggccggcgccagcgccaccgtccggtccacccgccagcccgcacagccgcgccgccgccgagcgtttcgtgagcggcgctccgaggatcaggaatggggcttcgggcgctgggcgcgctccgaacccggcgcacgtaagagcctgggagcgcccgagccgcccggctgcccggagccccatcgcctaggaccgggagatgctggaaatgcaaccgcctgttccccgaggagccgctgccccggggaccacctggcactgtgcgcacctggtcagcagcccccggagaagacggcgcccccaacgcccgacccgcgtggccgtggcagcgccacgcgagccctctag

SEQ ID NO: 25826 - DNA, 2856 bp, Homo sapiens
  SIMILAR (2802)..(2137): 891254mologous to Escherichia coli Bacteriophage n4 adsorption inner membrane protein NfrB,accession number D90699,Smith-Waterman Score=1050.
ctatatttgggggcaaaatccccatatctttatcctggactctagaagttgacatgatacactcgatctcggtacccgatttacatgagcacatttcaggcgtccggcaatgggcagcagctgcagatcgcgcggatcgtcattcaaaacatcaccggttagttttagcacgcttcggcgcagcgtgatgagctgcgcccgcgcttcgttaggatcgttttgtttactgatccatagcgattcattgctggaaaaggtgtggttatcgggcgcgtgtgggctatgaaacccgcgcgtcgcacgctgtagttccatatcgaggccacattcaccttcggttgttaacgccacgccaaccatattcccggcataggaaatggaaaacgaaggcaaatttttatcactgaaaaccggtttacctttcggcagggtgacgatttccggcaattcgccaatgccatacagcatgaacatcagttctgcgagtaaacctctggacgccagaaaacggctttgacgatgagggggaatgtttcgggcttcttgatgacactgggaggggagacgaacagaaatcagatgtccttccgttaaaatccctcgggcaaagtgagtcgccatttttcgctccatgcttaatggtccattatgaatacaagagtaatcatttactggaagccgtcgttcgcggtggtgcggacgttgtgcgtctgccgaaaaccgataccgctcaggatgttgcttccgagcgtttgatcggtatcgccctcggtgcagaagactatgtgcgcaacctgcgtacagaacgctccccggaaggaactgaactgctgttcgcacgctgttccattttgcaggccgcgcgctctgcgggtaaaactctgccgaggctgccagtttgaaggtgccgccctcttgcagataacgactcaggtcggcaagcgaagtgagtttatttttctctgccacatcctgacgcacggcgatagtccaggtgttatttgcaggcgcgggcgtcagccagattaacttgttgtgctccgaatcgagctttttgactttctcgtaaccttgctgcgcgtttttccacgctgcatcgttttcatctttaaagaagaaagcgccattgccggtatattccggatagatatccagttcaccggaagtaatcgccccgcgcaccacaggagtcgttccgagttgcactttattcaccgtcggtacgccgtggctttccagcacctgcaaaatgatattgccgagtagcgcaccttcggtatcgatttttgaaccgactttaacgggggaagccgcctgtagcggcaggctcacggctgccaacataaccagtgaacggcagctttcataataggcctgaatctccatcatgcgagtgcgatgacgctggtaacgacgccaggcatgtacgccattgtaaatggcgctacccagcatcgtcagtagcagcaatgtggtgctgagatagcgccacaggccggaacgatccgggatcggatgaaggccaatatgctgcgtaccattggcgtcagtgaagatttttgtgacgataccctcggcgttaaacggcgtatgcatcagcatttgtgccagtttctggaaagcgttccactgttcttgcggcgggtagtcgtaaagtgatgccgaaggccagggctgatcaacaaaatcgctgccttcgtcgctgacaatcaggaatccgccgggggccggactgtttagtgattgtgccgctcgcgccgtttcatgcgtgataaacggcgcggtggaggttgccaccaggttatccagcgattccgcactcaccgggcgtaataacacattcacgccatcgagcttcccggcgttggcgcgttttaccagcgcgtcccagtctttactgttgccgagattgaccagcgcatttttcagtcgcacacagtcatcatggcttcggcagcggcgggtagtaacagctgggtacaggtgaaaacacaccgcaccattggcgatgccgtcgctcatctcaaaggccagggcatgcagattctggcaacccatctttctgataacgctgtcgatttccgcgaaattgattacactcgcccgacctgcattttgatgggacaggagaaaacgggcatcacgcaggaagcattggccctggcggatcaggacatcatcattccgatgatcggcatggtgcagtcgctgaatgtttccaatgtaagtcatgctggtgaagtgcgtccattcgcgttcgaacggatacaccgggatctgaatcagatctttacgctcgaccagatagttgaacagacgcaattccatcggtgaaatcacatcttcggcgtcatgcagaataaaaccagcaaaagcgaaattggcgctacgctcaaattgggtgatggcgtccagcacgttgttcagacagtcggctttgctggtggggccaggacgcgcgcagactaccttatgcacattcgggaagcgagcgcacacttcgtcaacatcacgctgagtatcggggtcgttggggtaggtgccaacaaagatatgatagttttcgtagtcgagcgtggtcgccgccagctcggccatattgccgatgacgcccgtttcattccacgccggaaccataatcgctaacggtttttcatctggtttatacagttcgcggtaactcattcgcgggtagcggcgataaacactcaacttgcgtttaatgcggcgtacccagtagacgacatcaataaaaaaatcgtccagcccgctgatgaacatgatgaccgctaacgttatcgcgtttgtcgttaaacgatcgtcatcttgaaaagccgggacaccacgagtccgcat

SEQ ID NO: 25827 - DNA, 753 bp, Homo sapiens
  SIMILAR (304)..(747): 971254mologous to Escherichia coli enzyme II-fru,accession number M23196,Smith-Waterman Score=729.
atgtggaggaagccagtctttatggagaaacacaaagatgactcagggagcatccgggaagcgggaagtccgctcagttgtagagttcttctcgttcatcgttcttatcgttctacagtcgcgcagttcgttcagcagcagtcagtcgtcagctctcttcagttttgttcgtcatcgtctcctcgtgccagagttctcgtgcttagttctcgtcgtctgcgcgtcgacgtcttcgctctgtctctcagcgacccgtcgtctgttctttctcttcatgtgttcttctcgcagcgtcttgtgctcgttcagcgtacagcgtacgcattcggtgtgggtctgctgagtactcaaacctatggcccgatggcggcgattatggcggcaggtatggtgccaccgctggcaatgggtctggcaacaatggtggcgcgtcgcaaattcgacaaagcgcagcaggaaggtggcaaagccgctctggtattgggactgtgcttcatttcggaaggtgcaattccgtttgctgctcgtgatccgatgcgtgtgctgccgtgctgtatcgtgggtggggcgctgactggcgcaatctcaatggcgattggtgcgaaactgatggcaccgcacggtggtctgtttgttctgctgatccctggcgctattacgccggtattgggttacctggtagcaattattgccggtacgctggtggcgggtttggcctatgccttcctgaaacgtccggaagtggaccagtag

SEQ ID NO: 25828 - DNA, 1068 bp, Homo sapiens
  SIMILAR (334)..(1035): 1001254mologous to Escherichia coli tRNA nucleotidyltransferase,accession number M12788,Smith-Waterman Score =1236.
atgaaggttttagagaagaggaacaatgcttcctctgagcctgaagaaaagaatgaaataagggctgcaagggaacatgcaggtttcacactacaggagcttgtctgtcttggtgcaagtgggagaaaagtacaaggtgaagcagcaaatgctgaggaagaagttgcagcaggtgaactggataatatagctaagataacaaatgaaggtagctacactgaacaacagattttcaatgaagggtacatgtggctttccacattaatgaaaataaaagaaaataaaatatcctgttcctgggccacacaatctcatttccagggctcaatagatgcgggtgaactggaacacctgacgcctgaacgggtatggaaagagacggaaagcgccctcaccacccgcaatccacaggtgttcttccaggtactgcgcgattgcggcgcactgcgcgttttattcccggaaattgacgcactgtttggcgttccggcccctgccaagtggcatccggaaatcgatacgggtattcataccttaatgacgctctcaatggcggcgatgctgagtccgcaggtcgatgtccgtttcgcaactttatgccacgatctcggtaaagggctgacgccgccagaactctggccgcgtcatcatggtcatggcccggcgggtgttaagttagtggaacaactatgccagcgtctgcgcgtgccaaatgaaattcgcgatttagccagactggtggctgagtttcacgatctcatccacaccttcccaatgctgaacccaaaaaccatcgtcaaattatttgattccatcgatgcctggcgtaaaccgcagcgtgtcgagcaactggcgctgaccagcgaggctgacgtgcgcggcagaaccggttttgaatcagcggactacccgcaaggccgctggttgcgcgaagcctgggaagtggcgcagtcagtgccgacaaaagccgtcgttgaagcgggatttaaaggtgtggagattcgcgaggagctgacccgacggcggattgcggcgggactgcgaggcatgccaactgccattcaatga

SEQ ID NO: 25829 - DNA, 2691 bp, Homo sapiens; identical to SEQ ID NO: 24290
  SIMILAR (700)..(1479): 901254mologous to Escherichia coli K12 putative EC 2.1 enzymes,accession number AE000230,Smith-Waterman Score=1255.

SEQ ID NO: 25830 - DNA, 2823 bp, Homo sapiens
  SIMILAR (1686)..(871): 1001254mologous to Escherichia coli DcuC protein,accession number X99112,Smith-Waterman Score=1328.
ttagttgactgtcagctgtccttgctccaggatgctgtttttgacaacggatgttttattgcctttgatgttcattaagaagcttggcgcaaatgttgcctttttatcctcgaagaagcctctgtttgtcatgtagcttgtgataaccacattgttgcctttggcttgcggcactgcgaagtgagagtaagtgaatgtcacatcgtttggatcaagacccatttgcagcacaagccctgttttgttcagcggcttgtaagggccggttaaagagtttgatacataaccaagcatgtaaatatcgtttgagttaataccatcgatcgtcatttttgaaccgcgtgaatcagtgaacaagtaccatttgccgttcattttgaaaacattcgcgcgctcgatttcatcagttaccgtgtttgaagtgatcagcggcttcattacttttttcaatgtgtaatcattatttaactctatgataccgagggcgccgttcgctaactcagcatcgcgttttttagcgctctgctgaagcttctggctttctttacggaagaagttcgtgccgccgccgtagtacgctttgttaaataaagattcttcgccttggtatccgttttctgttcccgtgttggcttccaatacaaggtatttatggcctttgtcttcacgtagtgagggtctctccacgtatggttgtcgccggatgtataatttccgcggtccctcttccagctcaccgtctttcattgccatacggaactccggatgagcattcatcaggcgggcaagaatgtgaataaaggccggataaaacttgtgcttatttttctttacggtctttaaaaaggccgtaatatccagctgaacggtcatcagctctgtagcaacgataacaatcaccaaaccaacaagcaccggtaccgaggtgcgttttacgacttcaaacggcgagatcttcgccatcccggcaaccgcaacgactacgccagaaacgggcgaaagggtacggccaaggtttgacgcctgcagcatcgggatagtcaaatacgccgggttaatgccggaagagtgcgccagtttcgggatcatctcaacaaacgcataaaacggcgcattgcctgaaccggtcgtgactgccgccagcattgtcagaatcaccaataccagcatcaggatgatactcgccgaaccaaacgaggtagcgatagaaatcagactttgaataaagccgatggtgctaagcccctgagcgaataccccagcggcaaccagcagcatcaccacgttagcaaacgcatctgccatcccgcgataagccacttccagaccagagaaaactttctgggtattaaagctgcggaggaactccagaatggaggcaatcagcatacaaatcaccagaatagtgatgatgtgtaattgcggaccccatttaccgtcaaaaatcagtacaccgatgatcggcgtgaacggcaaaatggcataaaacgcaggagcagtggtggtgatttcactgacatctaacatttcatgagagatgtgctcttttttatccagataacgttgccagaagaagtgggcgatcgccatgccgataattgcagcaattgagataggcagcgtcgttttgaaggcgaagtcaatcagcgacatttcggaagcttgcgccgccagcaccacatccccatcaacgcccattttaatggcatggtgatggcagtacgtcacgatgcggatcgcgtttgtggattccagttccatccggaatccattctcaccacccagggcgctcgcctgctggaacaaacgctggcccgaacgagatcgccggggcagcaaccgcgtctctggaaaacgcagcgccgttcccgcgccccgattatcctgttgctgatatcggcggtactggcggtgaccggcagcaacagtattaatatttctaccgccagtgcgtttgtcgccgggcgccctgtgctctaaagcgctgcggtcacgctggcagatttgatcaagctcatcaatgatataccgtagattcgggctgatttcctggacttctttataaccctgacccacaccatcagcgacgaccgttttacgctgacgcggatatttaaacttaacgctcttggcgaaaaactcgcctttgtctttctggaaatagattttcagaatatcgttgttggcttcctgccggaggctgtaacgatcaatttcttcaggattggtaatacccagacttttcagattgtcgtacatagcgttactcgatgactcatcgtcattgtgctctaaagcgagcaggaagcccgccgccgctgccattaatccagcaatcggcaggcaggtccagaagcccaagccgtaatagtgattgagcagcgcaaaagtgtaagcgccgatggcgtaaaaaccgccgtaccccagcaccagcagaccagaaagaccaacaaccacgttcagcccgagaccgaggataatgtagatcatggtcagggtggcaatatccaccgtcccgcgtgaaaccataaacggccacgccaccgcaagcaccaacagcgccacgaggaacagtttctgcttcaccgtggagccatcaatggcgggcagaataaacttcggtccggaaacgcttttcaaccctttctggaaagccggtcgcaaaagctggaagaaaaagaccaccgccgtgccgataaacacccactgccaacggacatccgaagccgtgtcgaccaccagtttggtgccatccagctccagttgcacgcccataaagacgcccgccagcacaaagaacatcgcggcagagagcagcgccat

SEQ ID NO: 25831 - DNA, 1449 bp, Homo sapiens
  SIMILAR (1)..(729): 991254mologous to Escherichia coli enzyme II-fru,accession number M23196,Smith-Waterman Score=1208.
atggatctggcgaaatttgctggtaaaccgatgtatcgtacctctaccggtctggcgctgaagaaaaccgcgcaggaactggataaagcggttgctgaagcaacgccgtatgaaccggcgggcaaagctcaaacggcgaccactgaaagtaagaaagagagtgcaggcgcataccgtcacttgctgacgggcgtttcttacatgctgccgatggtcgttgcaggtggtctgtgtatcgcgctttcttttgcttttggtatcgaagcgtttaaagagccgggtacgttggctgcggcgctgatgcagattggtggtggttcagcctttgcgctgatggtgccggtactggcaggttatattgccttttccattgccgatcgtccgggcctcactccgggtctgattggcggtatgctggcggtcagcaccggttctggcttcattggtggtattattgcgggcttcctggctggttacattgcgaagttaatcagtacgcaattgaaactgccacagagtatggaggcgctgaaaccgatcctgatcattccgctaatttccagtctggtggtcggtctggcgatgatctacctgatcggtaaaccagttgctggcattctcgaagggctgactcactggctgcagaccatggggactgcgaatgcggttctgctgggggcgatcctcggtggcatgatgtgtactgacatgggcggcccggtaaacaagccgcgtacgcatccggtgtgggtgcgcacgcggggcaggcgctgtacctgccagctgtttgcgcaggctggctacgtcggtttcggtagtcaccatcgccatatgctcgcgcttttgcgtcacgctaatcttctcaacgccttgcggcaggttattcaccagaatccggttggcacgatcgaccgcttcacgagagtcacgctgaatttctggcgcgtcaaagcccgcgttatacttcagggcgggctgctgtggttttctgggggtccactctggaccctcatcacctcagtctctcctgcccctggaggtatcaccagtgaaggctgcgaaacagcaaagatggcggcctgttccttcctctgggagcaccagtccaaggaggaggtgtctggagacccctgttgggaggtcttgcccagtcaggagaaacagaatcagggactgcttaaagaagcagtctggctgccctttggcagaacacacgcacccgtggtgggcccccccacgcccgctagcccttcctcaaccagccgcgcccttgagaaacggagcagcaacggaagctccggccacaggggctcactcaagcacagatacccgaattccctctgcgctgcaggtttggaaagcccccttggattcctggctggggacaatgatgacctggaccctggccagaagagccctggccctccagcaaggcagcacctgctctga

SEQ ID NO: 25832 - DNA, 2025 bp, Homo sapiens
  SIMILAR (1210)..(2007): 961254mologous to Escherichia coli formylglycineamide ribonucleotide synthetase (EC 6.3.5.3),accession number M19501,Smith-Waterman Score=1354.
atgcgtggagaattttatcagcagttaaccaacgatctggaaaccgcacgggcggaagggttgtttaaagaagagcgcattattacgtctgcgcagcaagcagatatcactgtggctgatggaagccacgtcattaacttttgtgccaacaactatctcgggctggcgaatcatcctgatctgattgcggcggcaaaggcgggaatggattctcacggtttcggcatggcttcggacagccataaagagcttgaacaaaaactggcggccttcctggggatggaagatgcgattctctactcttcctgctttgatgctaacggtggcctgtttgaaacgcttctgggtgcggaagacgccattatctccgacgcactgaaccacgcgtctattattgatggtgtgcgtctgtgcaaagctaaacgctatcgctatgccaacaaagatatgcaggagctggaacaccatctgatcgtctttatcgtactgttggcggtacataaaggtcacgcgccgatccgcagcgtcagccgtcaaatccagaatattacctcgaaagatctcgacgttcgcctcgacccgcagaccgtgcccattgagctggaacagctggtactgtcgttcaaccatatgatcgagcgtattgaggatgtctttacccgccagtccaatttctcagcggatatcgctcacgaaattcgcacaccaattacgaatctcataacgcaaaccgaaatcgccctcagccagtcgcgcagccagaaggagctggaagatgtgctctactctaatctcgaagagctgacgcgaatggcgaaaatggtcagcgatatgctgtttctcgctcaggccgataacaaccagctaatccccgaaaagaaaatgctcaacctggcggatgaagtcggcaaagtgttcgattttttcgaggcgttagcggaagatcgcggcgtggagttgcggtttgttggcgacaagtgtcaggtcgcgggcgatccgctgatgctgcgtcgggcgctaagcaacctgctttcgaacgccctgcgttatacgccaaccggagagacaattgtagtgcgctgtcagacggtcgatcacctggtgcaagttatcgtcgaaaaccccggtacgcccattgcgcccgagcacttaccgcgattgtttgaccgtttctatcgcgttgacccctcccgccagcgaaaaggtgaagcggcgaccggttccggcggtgaaatccgcgatgaaggtgccaccgggcgcggcgcaaagccgaaagcgggtctggttggtttctccgtttccaacctgcgaattcctggcttcgaacagccgtgggaagaagatttcggtaagcctgagcgcattgtcaccgcgctggacatcatgaccgaaggcccgctgggcggcgcggcgtttaacaacgaatttggtcgtccggcactgaacggctacttccgtacttatgaagaaaaagtgaacagccacaacggcgaagagctgcgcggttatcacaaaccgatcatgctggcgggcgggatcggcaacattcgcgccgatcacgtacaaaaaggcgagatcaacgtcggtgcgaagctggtcgttctcggcggcccggcaatgaacatcggtcttggcggtggtgcagcgtcttctatggcgtctggtcagtctgatgccgacctcgactttgcttccgtacagcgcgacaacccggagatggagcgtcgctgccaggaagtgatcgaccgttgctggcagcttggtgatgccaacccaatcctgtttatccacgacgttggcgctggcggtctttctaacgccatgccggaactggtgagcgacggcgggcgcggcggtaaatttgaactgcgcgagattctaagcgacgaaccgggcatgagcccgctggaaatctggtgtaacgaatcccaggaacgctacgtgctggcggttgctgccgatcattaccgctgtatgacgaaactgtgtacgcgtgagcgcgcacccctacgcggggattggtga

SEQ ID NO: 25833 - DNA, 3555 bp, Homo sapiens
  SIMILAR (1773)..(1874): 731254mologous to Escherichia coli No definition line found,accession number U00039,Smith-Waterman Score=130.
atgaacgacgtttccttcatgatttctggagatgcaatgaagattattacttgctataagtgcgtgcctgatgaacaggatattgcggtcaataatgctgatggttcattagacttcagcaaagccgatgccaaaataagccaatacgatctcaacgctattgaagcggcttgccagctaaagcacaggcagcagaggcgcagttccgtcgcggggatccctgatgctgcttcggcgctaaacaccggctttcgaccccctgcgttatacgccacccggagagacaattgtagtgcgctgtcagacggtcgatcacctggtgcaagttatcgtcgaaaaccccgcgggctggacgatttttttattgatgtcgtctactgggtacgccgcattaaacgcaagttgagtgtttatcgccgctacccgcgaatgagttaccgcgaactgtataaaccagatgaaaaaccgttagcgattatggttccggcgtggaatgaaacgggcgtcatcggcaatatggccgagctggcggcgaccacgctcgactacgaaaactatcatatctttgttggcacctaccccaacgaccccgatactcagcgtgatgttgacgaagtgtgcgctcgcttcccgaatgtgcataaggtagtctgcgcgcgtcctggccccaccagcaaagccgactgtctgaacaacgtgctggacgccatcacccaatttgagcgtagcgccaatttcgcttttgctggttttattctgcatgacgccgaagatgtgatttcaccgatggaattgcgtctgttcaactatctggtcgagcgtaaagatctgattcagatcccggtgtatccgttcgaacgcgaatggacgcacttcaccagcatgacttacattgatgagttttcagagctgcatggcaaagatgttccggtgcgtgaagccctcgccggacaagtgcccagcgccagggtcggacctgtttcagccgcgcgccgtgaaccggctgtagctgaggatattttgatatcttctcatacgatactgccatccctggtcagagtgcagaacaggatgctcgtgaggattaagctttttgaatgcctgatcgagcatattctcaaccatgttcatcactggtctttccgaaaggctgtaagaaataacttcgttgttgaagagatctattactggagacaaatacagcttgcgcccattgactgcaaattcagtaacatcggtaacccacttctcgtttggccgcgtagccttgaaatctctttggagaacattaggggcggtttgccctacctctcctctgtaagagcggtatcgcttgaccttaatcgctgctttaagatcatctcggcacgttttggtgtcccccgaacccaggtcaggacatgggttgccctctatgaaaaacatggagaaaaaggtttaattcccaaacctaaaggcgttagtgctgatccagagttgcgtattaaggtcgtgaaagctgtgatcgagcagcacatgtcccttaatcaggctgctgctcactttatgcttgctggtagtggttctgtagccaggtggctgaaggtctatgaagagcgcggagaagctggtttacgcgcgctcaagattggcaccaaaagaaacattgcaatatcagttgatccagaaaaagcggcatcagcattggagctgtcaaaagaccgacgcattgaggatcttgaaaggcaagttcgatttcttgaaacgcggcttatgtatctaaaaaagctgaaagccttagctcatcccacgaaaaattcaatcatccgttcgggcaactggcgtttatcgcgaccacgctggttgggctgtacccgattgctcgatcaggcattacggttgatcaaatccggcagctacttcgccattgaaaccttaatgagcgtagccgctattggtgcactgtttattggcgcaacggctgaagctgcgatggtgttgctgctgtttttgattggtgaacgactggaaggctgggccgccagccgcgcgcgtcagggcgttagcgcgttaatggcgctgaaaccagaaaccgccacgcgcctgcgtaagggtgagcgggaagaggtggcgattaacagcctgcgccctggcgatgtgattgaagtcgccgcaggtgggcgtttgcctgccgacggtaaactgctctcaccgtttgccagttttgatgaaagcgccctgaccggcgaatccattccggtggagcgcgcaacgggcgataaagtccctgctggtgccaccagcgtagaccgtctggtgacgttggaagtgctgtcagaaccgggagccagcgccattgaccggattctgaaactgatcgaagaagccgaagagcgtcgcgctcccattgagcggtttatcgaccgtttcagccgtatctatacgcccgcgattatggccgtcgctctgctggtgacgctggtgccaccgctgctgtttgccgccagctggcaggagtggatttataaagggctgacgctgctgctgattggctgcccgtgtgcgttagttatctcaacgcctgcggcgattacctccgggctggcggcggcagcgcgtcgtggggcgttgattaaaggcggagcggcgctggaacagctgggtcgtgttactcaggtggcgtttgataaaaccggtacgctgaccgtcggtaaaccgcgcgttaccgcgattcatccggcaacgggtattagtgaatctgaactgctgacactggcggcggcggtcgagcaaggcgcgacgcatccactggcgcaagccatcgtacgcgaagcacaggttgctgaactcgccattcccaccgccgaatcacagcgggcgctggtcgggtctggcattgaagcgcaggttaacggtgagcgcgtagtgatttgcgctgcacggaacatcccgctgatggcattgtggatacagacgggtcacaaaggcaacggcttccggatcgtccgcgttaacgtggaaaatcggggcctgaaccatcttaccgatatcagtacagtacggcgtagaacgggcatccagcggattagaggtggtgaaaccaacctggttgttgataacgatacgtaccgtaccgccaacttcataaccacgcgctttcgacatgttcagggtttcctgaaccacgccctgcccggtcactgcggcgtcaccgtggatggtgattggcagcactttgttgctgctcggctcatcaagtctgtccagacgggcacgaacagaaccgataactaccgggcttacaatctcaaggtgagacgggttaaacgccagcgccaggtgcaccaggccgccatcggtctggaagtcagacgagaagcccatgtggtatttcacgtcacccgtgccgaggtgttctttatgtttaccggcgaactcgtcgaacaagtcttgcggttttttacccagcacgttcaccagcacgttcagacgaccacggtgcgccatcccgagaaccacttcgcgggtgccgctgttgccagcgtggcggatcatctctttaagcatcgggattaa

SEQ ID NO: 25834 - DNA, 826 bp, Homo sapiens
  SIMILAR (709)..(680): 801254mologous to synthetic construct thiogalactoside acetyltransferase,accession number U90436,Smith-Waterman Score=42.
tagctgcagcagcagttggcgcaactgagatccagctgcgcgttgtcagtcagggggatggtaagggcctcattgaacggggcgttggccagagccatcagctgctgtcgagtttgttcgctgacactggcgttatcttcactctcttccagctgtattttccggatgcgtactgtccatcgtccagccagataaaagcgctgccgattcgctgatcgtcctggcgaccctggccgacaaggaacgccagccgccacgacgtttggtggaatgtcttttgtgacgatactacccgcgccaataccagaattatccccgatggtgacgcctggattaataaccacatgacttccgatccagacgttattgccaatcgttatcggaaaagagtacatctcgccgttttttctcaattcatggtgtacagggtgtcccgtaacggaaagagtaacgttgggtgcaatcagtacgttatcaccgattgttaccgtgtagtcatcgacaatggttaaattgaaatttgcataaaaattgcggcctatatggatgttggaaccgtaagagaaatagacaggcggttctacccaggcgttttcccctaccgtggcaaacatttctttaatcaggctttctcttttttcaacttctgatggatgcgagtgattaaacctcatacatttaacgttttcccacgaagcttttttgttggttagtttttgaatttttgggtccggggtagggggtgataaaggttgggtaacggccgtcatcaccgcccccctcgcccctcttttgtttcccatgttgacatgcgccgctgttcgac

SEQ ID NO: 25835 - DNA, 4128 bp, Homo sapiens
  SIMILAR (2818)..(3618): 951254mologous to Escherichia coli enzyme II-fru,accession number M23196,Smith-Waterman Score=1256.
atgaccgacaagcaccagcagcaccgatatgttgcggccccagggccgtttgttggcgacaagtgtcaggtcgcgggcgatccgctgatgctgcgtcgggcgctaagcaacctgctttcgaacgccctgcgttatacgccaaccggagagacaattgtagtgcgctgtcagacggtcgatcacctggtgcaagttatcgtcgaaaaccccggtacgcccattgcgcccgagcacttaccgcgattgtttgaccgtttctatcgcgttgacccctcccgccagcgaaaaggtgaaggtagcggtattggcctggcgatagtgaaatcgattgttgtcgcgcataaaggcacggttgcggtaacgtcggatgcgcgggggacaagcgggctggacgatttttttattgatgtcgtctactgggtacgccgcattaaacgcaagttgagtgtttatcgccgcataccgcgaatgagttaccgcgaactgtataaaccagatgaacaaccgttagcgattatggttccggcgtggaatgaacgggcgtcatcggcaatatggcgagctggggggaccacgctcgatacgaaatttctttttgtgggcctaccaggacccatactcgggagttgcaaggtgccgttcgagttcttggaggtggcgtgtcccccgagcgggggtccggtgggccccccatggcggcgaccatgtcgtggcgcagctgctgccatttgtgcctccccggcggcgattattctcgcaccgacttcaggggatgtggtgctggcggcgcaagcttccgaaatgtcgctgattgacttcgccttcaaaacgacgctgcctatctcaattgctgcaattatcggcatggcgatcgcccacttcttctggcaacgttatctggataaaaaagagcacatctctcatgaaatgttagatgtcagtgaaatcaccaccactgctcctgcgttttatgccattttgccgttcacgccgatcatcggtgtactgatttttgacggtaaatggggtccgcaattacacatcatcactattctggtgatttgtatgctgattgcctccattctggagttcctccgcagctttaatacccagaaagttttctctggtctggaagtggcttatcgcgggatggcagatgcgtttgctaacgtggtgatgctgctggttgccgctggggtattcgctcaggggcttagcaccatcggctttattcaaagtctgatttctatcgctacctcgtttggttcggcgagtatcatcctgatgctggtattggtgattctgacaatgctggcggcagtcacgaccggttcaggcaatgcgccgttttatgcgtttgttgagatgatcccgaaactggcgcactcttccggcattaacccggcgtatttgactatcccgatgctgcaggcgttcaacccttgggcgtacccttttcgcccggttcctggcgtaaaccgttgccgggttgcccgggaatgggggaagaatttccgccgtttgaaagtccgtaaaaggcacccccggaaccgggggtgggagggtcggggaaagtatccgttgtcatgtctgtcactcgcgacggaccatgaattcactatttgtcgaagacgcaacaacaggtgcaattatgtcattgataaatatcccacgcgcattaatactccccttaatcgtagacggattatctgcaaagcgaacatgcgtatcaccatagtcgccaaagccaatccccggcgagacacaaaccttcgcttcgttaaggagcttcttgcaaattccagcgatcccatggccgcatatggttccgggattttcgcccagacatacatcgaagccttcggcatttcaaccatccagcccgcttcatgcagccctttaaccaatacatcacggcggcgtttgtactgttcggcaatgtcgcggcacgcactgttgatcgccctccagcgccgcaatcgccgccacctgcaacggcgtaaaggtgccctatcaaaaatcgaaaatttggcggtaatgtcaacgccgaacgtatcgctttactggcgatgtaccacgatggcctcagaagtgctcaccggcgatgctgccctgactccggtgaaatacttcaattcgcaaatcgctcaggagtacaaggctattgaaaaaatcgctcagcaaaaactggtcgatatggttccggaagagctgcgggatatctttgcgccgttaattgacgagcatgcatatagcgatgaagacccactcgctggtggaaacaggcagatgcactgtggccgcaatttttatgcaaatttcaatttaaccattgtcgatgactacacggtaacaatcggtgataacgtactgattgcacccaacgttactctttccgttacgggacaccctgtacaccatgaattgagaaaaaacggcgagatgtactcttttccgataacgattggcaataacgtctggatcggaagtcatgtggttattaatccaggcgtcaccatcggggataattctgttattggcgcgggtagtatcgtcacaaaagacattccaccaaacgtcgtggcggctggcgttccttgtcgggttattcgcgaaataaacgaccgggataagcactattatttcaaagattataaagttgaatccgtcatcaatgccagtaaggaaccgctgtactgcgctgctggcacctatctctatatagatatatcgggtaaccaggctatcaggtctggcgtataccgccgcttaatcagaccgtatattagacaccctgcgtccacgcgcgggtgtataccacgcgaaccggagtggttgttcttggtgattgtggcggcagatatcgaagtggatctggcgaaatttgctggtaaaccgatgtatcgtacctctaccggtctggcgctgaagaaaaccgcgcaggaactggataaagcggttgctgaagcaacgccgtatgaaccggcgggcaaagctcaaacggcgaccactgaaagtaagaaagagagtgcaggcgcataccgtcacttgctgacgggcgtttcttacatgctgccgatggtcgttgcaggtggtctgtgtatcgcgctttcttttgctttgggtatcgaagcgtttaaagagccgggtacgttggctgcggcgctgatgcagattggtggtggttcagcctttgcgctgatggtgccggtactggcaggttatattgccttttccattgccgatcgtccgggcctcactccgggtctgattggcggtatgctggcggtcagcaccggttctggcttcattggtggtattattgcgggcttcctggctggttacattgcgaagttaatcagtacgcaattgaaactgccacagagtatggaggcgctgaaaccgatcctgatcattccgctaatttccagtctggtggtcggtctggcgatgatctacctgatcggtaaaccagttgctggcattctcgaagggctgactcactggctgcagaccatggggactgcgaatgcggttctgctgggggcgatcctcggtggcatgatgtgtactgacatgggcggtccggtaaacaaagcagcggtacgcatttcggtatggtgccaccgctggcaatgggtctggcaacaatggtggcgcgtcgcaaattcgacaaagcgcagcaggaaggtggcaaagccgctctggtattgggactgtgcttcatttcggaaggtgcaattccgtttgctgctcgtgatccgatgcgtgtgctgccgtgctgtatcagaagtgtgcacagaatccaagtacgtgagttcctgcctgctctttggcttggcaattcggcgatccccccccttcggggttgccgtggcagacacccggggccacattggcagaaaagtacaaggtgaagcagcaaatgctgaggaagaagttgcagcaggtgaactggataatatagctaagataacaaatgtagtggtgggcgctttgagagggcgaaagcgtgtggtgttggaaagcgtgtgggtggagaatgccgtgccttgcgtagttgtgggtggccccaactgtggtgaggccccttgcgtggtgtgccgtgtgttgggtgttgtgggctaa

SEQ ID NO: 25836 - DNA, 387 bp, Homo sapiens
  SIMILAR (385)..(179): 521254mologous to Escherichia coli peptidase E,accession number U00006,Smith-Waterman Score=156.
tgggagatatgcagcgcctgaactcgctgttttgttggtggcttacagtgtgctggaacagccggatgaagatgaaggacgggacagtattaatattgtgaatccttccggtagaccaataatcgtcagttctggcgcgacgccagcagttcgcgaatacgctgctcacgggtttcacctttatggccttcggcagcgcgttggtgaagtgcgggttgatttgcagcgggaacagatttacgcatcgaaaccttgcggatcgacaatcggcatatcgttggtggtacgatagttgggcaagcaaggttagcgcctgcgctccagccaatatacagagcccacgtttaaccacgtcagtaattggtgccagcagcccgcgctcgcggc

SEQ ID NO: 25837 - DNA, 181 bp, Homo sapiens
  SIMILAR (22)..(69): 1001254mologous to Escherichia coli No definition line found,accession number U00006,Smith-Waterman Score=88.
cagcgctcgtcgtttgcgtccagcaaacatcgttttcgcattcttaatcgccgctattcccacgcccactcgatcgctgggagatatgcagcgcctgaactcgctgttttgttggtggcttacagtgtgctggaacagccggatgaagatgaaggacgggacagtattaatattgtgaatc

SEQ ID NO: 25838 - DNA, 2784 bp, Homo sapiens
  SIMILAR (1339)..(2748): 971254mologous to Escherichia coli K12 putative regulator,accession number AE000300,Smith-Waterman Score=2411.
atggaataccagggggagctgaacacgtgggctcacacgctacagagggagacccgtgtgatgctatgtgtcccatgcactgaaaagatgaatgcttgtgctgggtcactgagaaactcctctggcacagcaaaatcgcagattcggaattggaggcgagtgggtgctaagaaactgagcagcagcagggaaactcagactcagggagtggaggggcttgggggtgatgattatcttttaggttacctgcttttgcttacttctgtatgtaggccaagccaatttactccggcctcccgaaatgctagtggcactccagtgtttgtgtttggcccgcaactgtggcgcttccatggctggctccgttgccgcggagggggtgatgagaccgttatccgacttgttttccgtgctgtgaaagttcacctccatgacgttgcaacattatctgacgtggctctcctgaagcggctgcggaatgccgccgactggtttggcatacttgccgcacaaacacttgctgtacgcgccgcagttacgggttgtacaagcggaaagagattgcgtcttgtcgatggaacagcaatcagtgcgcccgggggcggcagcgctgaatggcgactacatatgggatatgatcctcatacctgtcagttcactgattttgagctaaccgacagcagagacgctgaacggctggaccgatttgcgcaaacggcagacgagatacgcattgctgaccggggattcggttcgcgtcccgaatgtatccgctcacttgcttttggagaagctgattatatcgtccgggttcactggcgaggattgcgctggttaactgcagaaggaatgcgctttgacatgatgggttttctgcgcgggctggattgcggaaaaacacctgactacccaaagggacctaacacagaccctcacataccacaaccaggcaccgagcccaaggtggccttaccaggtaaactactcatggcacagcccaaggtcaatactaaatcaactgccattggttggctcctggtggtgtatggtttgcctggggaggtggttcgcatcgattatggtaaaaccgtgtacaccctggggtctggtcttggtttgggccaagacaagcctaatgctttaaatgtgtttggacgttcttcgtccacgaaattacgtaaagcgaagagcccgtttgtcccaatttgcgaagtattctggggccaaggaactaacactaagctgtgcctgtggtggaaattggaagcccaagattacgagaagattgcccccaagtctgtgtccgcagcggcagtttgttcatcagctgtaactggacgaactcattttcattctaaggagtggttaaaagttgttgctaatgaccccacagcggtgagaaaactcgaacactactggagccaggatatatttagcgatcgagaagccagctacatgtcgcatgaaaaccacttcggctacgcggcctgcgccgcccttttgcgcgaacaaggactggcagccattccgcgcctcgcgatgtatgcccataaagaagattgcggcagtctgctggtacaaattaaccatccgcaagtcatccgcaccttgctactggtggctgataaaaacaaacccagcctgcaacgtgtagctaaataccataaaaacttcccccatgcgacgctcgccgcactggcagaactgctggcgttaacagaaccaccagcccgccctggttatccaatcatcgaagacaaaaagctgcctgcacagcaaaaagcacgcgatgaatactggcgtacgctgttacaaacgctgatggcatcgcagccacaactggcagcagaagtgatgccgtggttaagtactcaaccccagtcagtgctgaagagttatttatcggcaccgcccaaaccggttattgatggcaccgataacagcaatctgccagaaatcctcgtttcaccaccgtggcgtagtaagaaaaaaatgacagctccacgtcttgatttggcaccgctcgaattaactccgcaagtttactggcaaccaggcgaacaagagaggcttgccgccactgagcctgcccgttatttcagcacggaatctcttgcgcaacgcatggaacaaaaaagtggacgagttgtattacaggaactgggttttggggatgatgtatggctgtttctgaattatatactccccggaaaactggatgctgcacgcaattcactctttgttcagtggcattactaccaggggcgggttgaagagatcctgaatggctggaactccccggaagcacaattagcagaacaggcgctccgcagcggtcacatagaagcgttaattaacatatgggaaaatgacaactactcacattatcgtccggaaaagagtgtctggaacctgtatttattggcacagttgccgcgtgagatggctttgaccttctggctgcgtatcaatgagaaaaagcatctgttcgcgggtgaggactattttctcagtatcctcggattggatgcgctaccaggtctgctgttggctttttcacatcgtccaaaagaaacatttccgttaattttaaattttggcgcaacagaactggcgctgcctgttgcccacgtctggcgacgtttcgcggcgcagcgtgatctggctcgccagtggattttacaatggccggacatacggctagtgcacttatccctcttgtcttaccaacccagcgataatagcgagggtccgggtttttattctttactgacaggagcttga

SEQ ID NO: 25839 - DNA, 2554 bp, Homo sapiens
  SIMILAR (886)..(1419): 991254mologous to Escherichia coli RhsB core protein with unique extension,accession number U00039,Smith-Waterman Score=933.
atgcgctcggacccggatacttcagttaatgaaattgagacgaaactttctgccctactgggtagtgagaccactggtgaaatcctttttgacctcttgtgcgctaacggtccagagtggaaccgcttcgttacgctggaaatgaaatatggccggatcatgctggatacggccaaaattattgatgagcaggacgttccgacacatatcctgagcaaactgacttttactttacgtaatcatcctgaaggagtggtgatgaaaaattttgaagttctgcagccactacagaactccctttccggtctaccgctatgggtatctgaacgtatattgcagcagataaatcagttaacccactacgagccagtgatcggcatcatgggtaaaactggggcgggaaagagtagcctttgcaatgccctgtttgccggtgaagtatcgccggtcagcgatgtagcggcctgtacacgtgatcctttacgctttcgcctgcagattggagaacactttatgaccatcgtggatctgcccggcgtgggcgaaagtggcgttcgcgataccgagtatgctgcgctgtaccgcgaacaacttccccggctcgacctgattctgtggctgattaaggctgatgatcgggcactggcgactgatgagcatttttaccgtcaggtgattggcgaagcataccggcataagatgctgtttgttatcagccagtcagacaaagctgaacccaccagcggtggaaatatcctttccacagagcagaaacaaaatatcagccgcaaaatctgcctgctgcatgagctattccagcccgtgcatccggtgtgtgccgtgtcggttcgcctgcacccggtagtagcgctactgcaacaattccgcacggatgatgagcggactcaccggtaccattacgacagtcagcaccggctggtcgactacacgcggacacaatatgaagagccgctggtcgaaagtcgctatctttacgacccgctgggccgcagggtggcaaaacgggtgtggcggcgtgaacgggacctgacgggctggatgtcgctgtcacggaaaccgcaagtgacctggtacggctgggacggcgaccggctgaccacgatacagaacgacaggagccgcatccagacgatttatcagccggggagcttcacgccactcatcagggtcgaaactgccaccggtgagctggcgaaaacgcagcgccgcagcctggcggatgcccttcagcagtccggcggcgaagacggtggcagtgtggtgttcccgccggtgctggtgcagatgctcgaccggctggaaagtgaaatcctggctgaccgggtgagtgaggaaagccgccgctggctggcatcgtgcggcctgaccgtggagcagatgcaaaaccagatggacccgcacggaagggacaacagcgtggtaccagaatacgatgaatggggtaacctgctgaatgaagagaacccgcatcagctgcagcagcttatccgcctgccggggcagcagtatgatgaggagtccggcctgtattacaaccgccaccgctattatgacccgctgcaggggcgatatatcactcaggatccgattgggctgaaagggggatggaatttttatcagtatccgttgaatccgatctcagacatcgaccccctgggtttatctatgtgggaggttgccagacagatgaacgctatcgcgagtaaattgccggaaggttttcatattggaattaattttagcgcttcgcatattatttcgccgacgtttgtcgacgagtgtttaaatttccgtgacagttttacccgccgcgatttaaaccttgttctggaagtcaccgagcgtgacctattgaatgttgatgaaagtctggttcagcggttgaacatactgcatgaaaatggttttgtcatcgcactggatgatttcggtactggctactcagggctttcttatcttcatgacctgcatattgattatatcaaaattgatcacagtttcgttggccgcgtaaacgcagacccagaatcaacccgaattctggattgtgtattggatctggcgcgtaaactttcgatcagtatcgtcgctgaaggtgtcgaaacgaaagaacaacttgactatctgaaccaaaattatatcacatttcagcagggttattatttctataaacctgttacatacatcgacctggtcaaaattatcctttctaaaccgaagaaaggcattattgcgcaaatagttgtcaaccctggtgttatcacggttgtttttatatatcaccgaaataatcctcattttggcgcttctgaggggggcaacaaggggattgatatcgcaggcagcaaaggacaggcaattatcgcgaccgcagatggccgcgttgtttatgctggtaacgcgctgcgcggctacggtaatctgattatcatcaaacataatgatgattacctgagtgcctacgcccataacgacacaatgctggtccgggaacaacaagaagttaaggcggggcaaaaaatagcgaccatgg

SEQ ID NO: 25840 - DNA, 1952 bp, Homo sapiens
  SIMILAR (499)..(1086): 921254mologous to Escherichia coli K12 2-oxo-3- deoxygalactonate 6-phosphate aldolase and galactonate dehydratase,accession number AE000446,Smith-Waterman Score=939.
atgtactggtatctgaaggctgccgctcaggggagcgtcagcgcttacgtcaacatcggttatatgtataaacacggacaaggcgttgagaaagattatcaggctgcctttgaatggtttacgaaagccgctgaatgcaatgacgccactgcctggtataacctggccattatgtatcactacggagaaggaagacctgtcgatctccgacaggctctcgacctgtatcgtaaagttcagtcatccggaaccagagatcgtcagcacttccggtgtgtagatcgggagatggaagtgacatttctcgcagaccagatttcccagcccgaccacttctccgctgtgataaaccccatgatgattgaggtcctggaaaacttcgcgccattcaagctgcgttttatcggtgatgtctgccagctcctgccacaagctttctttaatcacccgcataaagacgctgtcagattcttctttcaggctctcttcatagcgcatgcctacagttgggttggcggcgatcgtccggcggatgttatcgacggcattaaaacgctacgcgaaatcggcttcgataccttcaaactgaacggttgtgaagaactggggctaattgataactcccgcgcggtagatgcggcggttaacaccgtggcacaaattcgtgaagcttttggcaatcagattgagtttggtcttgatttccacggtcgcgtcagcgcgccgatggcgaaagtgctgattaaagaactggagccgtatcgcccgctgtttattgaggagccggtgctggcggaacaagccgaatactacccgaaactggcggcacaaacgcatattccactggcggcgggtgaacgcatgttctcacgcttcgattttaaacgcgtgctggagggaagtggtatttcgattctgcaaccggatctctcccacgcgggcggtattaccgaatgctacaaaatcgccggaatggcagaagcctatgacgtgacccttgcgccgcactgtccgctcggaccgattgcactggccggttggctgcatatcactttgttttctaataacccgaccttcaagaacaaagtatgggaattcattacaaaagcacaattagcagaacaggcgctccgcagcggtcacatagaagcgttaattaacatatgggaaaatgacaactactcacattatcgtccggaaaagagtgtctggaacctgtatttattggcacagttgccgcgtgagatggctttgaccttctggctgcgtatcaatgagaaaaagcatctgttcgcgggtgaggactattttctcagtatcctcggattggatgcgctaccaggtctgctgttggctttttcacatcgtccaaaagaaacatttccgttaattttaaattttggcgcaacagaactggcgctgcctgttgcccacgtctggcgacgtttcgcggcgcagcgtgatctggctcgccagtggattttacaatggctggaacatacggctagtgcacttatccctcttgtctttaccaaacccagcgataatagcgaagccgcattacttgccctgcgtttactgtacgaacagggacatggcgaattgctacaaaccgtggcaaaccgctggcagcgtacagatgtccaatggacatttacccggcacgcatttaaaaccgggcgtctggcactggaaagtttaggtctggggccgtatgaagcgcgagaacgtgccgatgtgttccgccgctttaatattcagatggtggaagagatggcaatggttgagaacgacaccaaagcccgcgcggcggtctataaacgcaccagcgcgatgttaagtgagatcattaccgaggaccgcgatctatcgtcattatttaacgccagcagcgggatgtgtatcttgcttttatcaaatctcaatatggattttcatggagaaaacaacaa

SEQ ID NO: 25841 - DNA, 1428 bp, Homo sapiens
  SIMILAR (853)..(1428): 901254mologous to Escherichia coli rpoC,accession number V00339,Smith-Waterman Score=869.
ttaaatactggcaatactctcacgcaaaatccgcagcaccgtctcttcaccgctgcgattcgggttaatgcgaatcgcacaatgttctgattgtggattcgcctggcgaaacgttccggaaaggcgataaaagagcggcgggatttcatatttcgactctgcacccaccgggtaaggcaaggcaccgcgcttttgcgcctcttccagcactctggcggcaatcggctgatgaaactcgacaatcaacaccttcgactgcgcattagcaatcaccgcgcttttcacttccggcaccgcaccaccgttaagcaaagccagcaaacgttcagatatccctggctgtatcgcgtgcgtcactgggggcaaaaaccgaaaacggataatttccacggccttttggcccgtatatttgggaacagccggagtaaaacgtggggggaaaataggtgagaacatagtgtgctggaacagccggatgaagatgaaggacgggacgagtattaatattgtgaatcctgtaggcctgataagacgcgtcaagcgtcgcatcaggcatgtgatccagttaccttccggtagaccaataatcgtcagttctggcgcgacgaccagcagttcgcgaatacgctgctcacgggtttcacctttatggccttccggcagcgcgttggtgaagtgcgggttgatttgcagcgggaacagatttagcgcatcgaaaccttgcggatcgacaatcggcatatcgttggtggtacgaatagttgggcaagcaaggttagcgcctgcgctccagccaatatacagagcgccacgtttaaccacgtcagtaattggtgccagcagcccgcgctcgcggcactggaagtgactatccgtactcggacccagcatcaagctcagcagcgtgaagtcggtttgaactccagcggtaaactggttatcacttcccgtaatactgaactgaaactgatcgacgaattcggtcgtactaaagaaagctacaaagtaccttacggtgcggtactggcgaaaggcgatggcgaacaggttgctggcggcgaaaccgttgcaaactgggacccgcacaccatgccggttatcaccgaagtaagcggttttgtacgctttactgacatgatcgacggccagaccattacgcgtcagaccgacgaactgaccggtctgtcttcgctggtggttctggattccgcagaacgtaccgcaggtggtaaagatctgcgtccggcactgaaaatcgttgatgctcagggtaacgacgttctgatcccaggtaccgatatgccagcgcagtacttcctgccgggtaaagcgattgttcagctggaagatggcgtacagatcagctctggtgacaccctggcgcgtattccgcaggaatccggcggtaccaaggacatcaccggtggt

SEQ ID NO: 25842 - DNA, 3129 bp, Homo sapiens
  SIMILAR (2432)..(2725): 911254mologous to Escherichia coli No definition line found,accession number U00006,Smith-Waterman Score=441.
agttatttcgggataattaaaaccaccgtataacccaggggtgtcaatatttggccaaaaacccctccttcaaagatccggggtttctgcacccaacatttaacgcgtatggcagagagagacttaaggtttttgttttttcccgtgggtcagagtttctttcttaattagttaacccagatatctccccgccaacaaaggggctaaagcaattttattgtcacaagcatttctccaagccgggtactgggttttccaataagaatgaccagcagggtgatcagcataaatgcaatggaaaatatgatatagagagtgaaataatccagattattactattgttcatgctactaatggcaatcctgtcaaaactttcaaacaattatagcaaccaaaataatgaacaatagtaacaagaggcaacgagctaattagctgtctataattacgccgcactatggccttactgatcaattttcactcaaccacaaccttcaccttcggtttagaaaggataattttgaccaggtcgatgtatgtaacaggtttatagaaataataaccctgctgaaatgtgatataattttggttcagatagtcaagttgttctttcgtttcgacaccttcagcgacgatactgatcgaaagtttacgcgccagatccaatacacaatccagaattcgggttgattctgggtctgcgtttacgcggccaacgaaactgtgatcaattttgatataatcaatatgcaggtcatgaagataagaaagccctgagtagccagtaccgaaatcatccagtgcgatgacaaaaccattttcatgcagtatgttcaaccgctgaaccagactttcatcaacattcaatggctcacgctcggtgacttccagaacaaggtttaaatcgcggcgggtaaaactgtcacggaaatttaaacactcgtcgacaaacgtcggcgaaataatatgcgaagcgctaaaattaattccaatatgaaaaccttccggcaatttactcgcgatagcgttcatctgtctggcaacctgattcatcagggctgccagcggatttgccacggtttgtagcaattcgccatgtccctgttcgtacagtaaacgcagggcaagtaatgcggcttcgctattatcgctgggtttggtaaagacaagagggataagtgcactagccgtatgttccggccattgtaaaatccactggcgagccagatcacgctgcgccgcgaaacgtcgccagacgtgggcaacaggcagcgccagttctgttgcgccaaaatttaaaattaacggaaatgtttcttttggacgatgtgaaaaagccaacagcagacctggtagcgcatccaatccgaggatactgagaaaatagtcctcacccgcgaacagatgctttttctcattgatacgcagccagaaggtcaaagccatctcacgcggcaactgtgccaataaatacaggttccagacactcttttccggacgataatgtgagtagttgtcattttcccatatgttaattaacgcttctatgtgaccgctgcggagcgcctgttctgctaattgtgcttccggggagttccagccattcaggggggatcctctagagtggacttcacgagtagaaatcaatatcgctattggcaacgccatgatgatggcgtcttcgcgaccgtccgtggtggggtagtaattgcggcgaatcgtcgcctcgttaaagcctaaactttcgtacagggcaatggcggcagcgtttgaagcacggacttccagccatagtgtcgccacgccgcgtttttccagttcgtcgatcagatgttccagcagcgcccttcccaatccctgacgctgatagtcaggatcgaccgcaatattgaacaatgtagcttcatccagcaccacttgcgtaatcgcaaacgccgccattttgccgttttgcgttaactgaaagttgagataacgctcgccctggttgctggcaaacgttttttcactccacggaaaggcgtgggcgcgttgttcaatgtggtaagccgccggtaaatcagtcgtttcgagggaagaaatcgtgttcatatgtgcaaatttgttgccataacgcggcgcgtgccgttgggtttgcccgtaaatcggtgagcgccggtgatgccacctgagcgccttccagtgatagcggttcgtcagtacccaaccgccaactgttgcagtgactgccttgcggcagcatcgcgattttttctggcgtcagttgcagcacctgaacagaccgatgcggacacgcgtagatcacgtgtagcagtaggaaggcggaagacgcgctccaatagcgcaaaccagcctcgtccccggcgcgattggcgcgagttgcagttaatggacagactggctcgagtcgcacaagctcgcgccagtttcgccgcgcgcgaaaccctgcgcattggcgacgccatggaacagatgatggaagggttgaataaagtgatgcacggtgagccacggcaggagaaagagctgcgtaagctggcagatgatatcaacgttctctacaccgccattaagctgtatctggcgcggatgccaaaagaagagctggcggaggaagagtcgcgccgctgggcagagatcatcgaaatgtcgctcaaccttgaacaggcctccgatatcgtcgagcgcatgggccggggaattggtggacaaatcctgggcagcacggcgggcattttcgcttgatgggttgaaggaactggatgcgctctatgagcaattgctcagtaatttaaagctggcaatgtcggtgttcttctcgggcgatgtcaccagcgctcgtcgtctgcgtcgcagcaaacatcgttttcgcattcttaatcgccgctattcccacgcccacgtcgatcgcctgcatcagcaaaacgtgcagagcattgaaaccagttcgctacatttaggcttactgggagatatgcagcgcctgaactcgctgttttgttcggtggcttacagtgtgctggaacagccggatgaagatgaaggacgggacgagtattaatattgtgaatcctgtaggcctgataagacgcgtcaagcgtcgcatcaggcactatgaacaagatgcc

SEQ ID NO: 25843 - DNA, 1068 bp, Homo sapiens
  SIMILAR (728)..(684): 931254mologous to Escherichia coli K12 putative regulator,accession number AE000300,Smith-Waterman Score=66.
ctactcctccacttggtctttatggacccgttccttccccgggttctcggcgattggttcttcccgcgcgggcccgtcgccccgtcccgccctctggtaacgcccctcctcctcgccctgccccttctcgatgaaaactgtctcttcgcctcgggatctttcctcgcccttcgttgtttcctcgccccacaccttctccttccacgccggcaccagcttcttagccggcaccttcttgagtctcaccttcccctcgtaccgcgacaccttcttgccccacttcttactcttccttcccatgccattaacacctgcctgctctataccccgactctctgcaccgcccggacttcgcccttcagtttcggctcccctttccctctctggcaagtccacgacttttccctcttttcctctctccaagtccaagaatctcaccttttccctgcctttcccttttggcttcctttccgtgccatcattaccggtttggccgtgcccgaaaaataactcttcagcactgactggggttaagtacttaaccacggcatcacttctgctgccagttgtggctgcgatcccatcagcgttgtaacagcgtacgccagtattcatcgcgtgctttttgctgtgcaggcagctttttgtcttcgatgattggataaccagggcgggctggtggttatcgcgaggcgcggaatggctgccagtccttgttcgcgcaaaaggcggccaggccgcgtagccgaagtggttttcatgcgacatgtagctggcttctcgatcgctaaatatatcacggctccagtagtattcgagttttctcaccgctgtggggtcattagcaacaacttttgacctgcaggcatgccgaatctctttgcccggctcgttaacactgcgggcacatagccaaagcccgcgcaaccccgtttggttaacgcctaagcgcacgccgaccatacccggctgctttgccaccagctcacggatgtgtatccccgctgcgggtgtcagcgttaagccttgccaggcgaaatcttgtgggttaaaggttcctgaatgcat

SEQ ID NO: 25844 - DNA, 663 bp, Homo sapiens; identical to SEQ ID NO: 10835
  SIMILAR (137)..(661): 971254mologous to Escherichia coli DNA polymerase III beta- subunit,accession number L10328,Smith-Waterman Score=871.

SEQ ID NO: 25845 - DNA, 1080 bp, Homo sapiens; identical to SEQ ID NO: 10836
  SIMILAR (496)..(1068): 941254mologous to Escherichia coli DNA polymerase III beta- subunit,accession number L10328,Smith-Waterman Score=930.

SEQ ID NO: 25846 - DNA, 1326 bp, Homo sapiens
  SIMILAR (1071)..(1169): 931254mologous to Salmonella typhimurium DNA polymerase III beta clamp subunit,accession number AF034747,Smith-Waterman Score= 146.
atgcattcaggaacctttaacccacaagatttcggctggcaaggcttaacgctgacacccgcagcggcgatacacatccgtgagctggaaattcttgatgagtacggcatcccaaatgcctggcaaggggaaaccaacttctggggcagtaccgccgtcagtatcgatcgtctggcggcgtataaagacgttgatgtgctctgttttgatcacgacaacagcaaagacatggatgcgctaatggcaacgccgctgtggcaggccatgccgtttgtccgcgccggacgctttcagcgcgtacctgcagtctggttttatggtgcgacgctctcggcaatgcactttgtgcgcgttctggataacgccatcggagtgattgtcgctacggcgctcacctggatgaacttctcgcaggcgctgccgcgtagccagtgggcgcaggctgcctggtcgccggatattgacgtcatcgagcagatgatttttcactacagcttgttgccgcgtctggcgatttcgctgctggtgggcgcgggtctggggctggacgttcgctattacttaaatggtatgctgtttgaaaccgaaggtgaagaactgcgcaccgtggcaaccgacggccaccgtctggcggtctgttcaatgccaattggtcaatctttgccaagccattcggtgatcgtaccgcgtaaaggcgtgattgaactgatgcgtatgctcgacggcggcgacaatccgctgcgcgtacagattggcagcaacaacattcgcgcccacgttggcgactttatcttccacctcaaaactggtggatggtcgcttcccggattatcgccgcgttctgccgaagaacccggacaaacatctggaagctggctgcgatctgctcaagcaggcgtttgctcgcgcggcgattctctctaacgagaaattccgcggcgtacgtctttatgtcagcgaaaaccagctgaaaatcaccgccaacaacccggaacaggaagaagcggaagagatcctcgacgttacctatagcggtgcggagatggaaatcggcttcaacgtcagttatggtgctggatgttctgaacgcgctgaaatgcgaaaacgtccgcatgatgctgaccgattcggtttccagcgtgcagattgaagatgcggccagccagagcggcggcttatgttgtcatgccaatgagactggaaggttctccaccgcttggtaatcccgaattccaaaagatatcatcgccctgtgctctgtatatcgccctgtgctctaaagccaggcaccacacaggacgatatctcggactatgtggcctctaa

SEQ ID NO: 25847 - DNA, 1520 bp, Homo sapiens
  SIMILAR (1170)..(658): 951254mologous to Escherichia coli 28 kd protein,accession number M13608,Smith-Waterman Score=839.
ctgcttgcgagctttatccagcaccggcaagcctcgctcaaagacctcgacggcaaaaccttcctgctgcaacatgtagaccagcgtgtcggctatcccttgctcatcttccactaaccagaccgtttcccgttgcataaatcgcctcgcctggtgatagacgctggcgcgagtgagtttcccggcggtaaacacgccgatcgccccttacttacgaccaatctcatcaataccggtataacgcgacatcacgggaccatagcgcctcaccttcacgcactttttccagaatcaccgcaggcaacggcaaagtagccgaacgcgcctcgccgcgctggctggcgttttcaatcaccacccaactgaaagtgctgtcaccatcgatgccagcttcaatcgccacccaaaaatcagcctctggaagtaaacggcgggcattggctacccgatttcgtgcgccagcgcgcgtttcctcactgccaaagggctgttccggtacaccgttctcgacggcaacggatgcaatatggcaggatccttcgccgaagatctcgtgaaatgccttgcagaatggtcgcgaacgcaacgacgtgcgacgtagtgtcctgcgcatcttcccatacgctatccatcagttgctggcgggaccagacgcggcccggtgacttgagtgaacgttttcaacactataaactcataccgagtcagcgctaatggcgtgtcaaaccagctgatctgcgccgcgggttcattcaattcaaaatgtccaatacggatgacgggagacggcgtcgagaacttcttcacccgacgcagtaaggtgcgcaccctggcgcacacttcgcggggtgaaaacggtttagccacgtagtcgtcagcaccaatttccagcccaagcaggcgatcgacctcttcacttcgggccgtcaggaacagtacaggtaacgccggatggagcgccagtaactggcggcacaattcaaagccgctaatatccggcagaccaacatcgagaatcatgacgtcgggtacctgcttgcgagctttatccagcaccggcaagcctcgctcaaagacctcgacggcaaaaccttcctgctgcaacatgtagaccagcgtgtcggctatcccttgctcatcttccactaaccagaccgtttcccgttgcataaatcgcctctgttattgccgccacggcatgacaggaaccgcgctaatcgcgtttttcggcgaaccttctacaactttgtcggagtaagccagataagcgagcgcgttgcgtttggcatcataaaagcgcacgacctgtaacgacttaaagaccagggacgtgcgttttttgaatactacctcgccctgagctttgccgtttttaatacgatccgacagttcaatcggcccgacttgctgacaagaaatggccgcatcggaggtatcttccgccagacccaatccccctttaataccaccgggtttcgcccggctcacataacaggtgacatttttcacatcgggatcat

SEQ ID NO: 25848 - DNA, 2502 bp, Homo sapiens
  SIMILAR (1664)..(1747): 531254mologous to Escherichia coli O157:H7 ethanolamine utilization; homolog of Salmonella gene,accession number AE005474,Smith-Waterman Score=73.
  misc_feature (1)...(2502): n = a,t,c or g
atgaggtaccagcccttcaaagaactagggagaaagctgctccaagcagagaacacagggtctggtggttttcgtcaccaggtgatatcctgcaaacctgagattggggccttccaccagctatgtgacatctatctaagttataattatccccacttgccagacagggaaactgagactgaggccaataaagccttttgccaagatcacccaacaaagccaaaatcctgcccatctgtacgcatctgcatggggatagaagcttttgatgaatatccatatgtgtttctcaggagcaaggaaaatagtacaggggaccctgccaatcaatggcagcctccttatccactgactgtggcggccaacaccaatccgatggagttgcatttgaaaggacccgtgccataccccgtctggtttacgggcatcatgatccttcccccatcagccttgaagcccatgagttcagggaccatgctttgtgtccctccaggggcctgcagagaggaaaatggcaaagcgcagactacaccttgtctcagaaagagcaaggatgccctgcagtggaatagcacttaccagtgcattctgggacaaaaggaaaaaggcagggaggagaaagcagatggtggccataatatcaataatggccattccctgagggcctgcgatgagctagccatggttctaggccccagaggtactgtgctgattctaaaggtagatacagacaaccaaccaagtaaacacataggaaataaactcaagaatgatatatgctgttcagagcatgaaacaggatggtcctgcattgtccacatcttccaggactattgggggaccaatgctgagcacttggtcctgaaagattttcactgcagtggacagcctctcatcctcaaggaggctaagcctggtttttccacaaaacagcagatgagcttccagcagcaaaagaacacaagcccaatgcacatgaacttaaaacaacatcgcacatttactatctgctggctaaggcaagtcacacagccaaggtcagaggtaccacaacaattcaatatggaaaggatatcttgtctccatggtgctttcgataacaacatcatttgtgccgacgaaaaggtactgattgttgttgatagcgtagccgatgaactgatgcgtctgatggaaggccagcacgcggtgaaactgaccgcagaacaggcgcagcagctgcaaccggtgttgctgaaaaatatcgacgagcgcggaaaaggcaccgtcagccgtgactgggttggtcgcgacgcaggcaaaatcgcggcggcaatcggccttaaagttccgcaagaaacgcgcctgctgtttgtgganaccaccgcagaacatccgtttgccgtgactgaactgatgatgccggtgttgcccgtcgtgcgcgtcgccaacgtggcggatgccattgcgctagcggtgaaactggaaggcggttgccaccacacggcggcaatgcactcgcgcaacatcgaaaacatgaaccagatggcgaatgctattgataccagcattttcgttaagaacggaccgtgcattgccgggctggggctgggcggggaaggctggaccaccatgaccatcaccacgccaaccggtgaaggggtaaccagcgcgcgagtaacagatggcgcacgacgaacaatggcttaccccaacgttctgcaaacggcggcaacgctgtgtaaccagaacgccccccgcgacggatctccgctgtggctgggggtggatctgggcacctgcgatgtggtgtcgatggttgtcgaccgcgacggtcagccagtggcggtatgcctcgactgggccgatgtggttcgcgacggcatcgtctgggatttcttcggcgctgtcaccattgttcgtcgccatttcgacacgctcgagcagcaattcggtcgtcgttttagccatgcggcgacttcatttcctccaggtacggacccgcgtatttccatcaacgtgctggaatctgccggactggaagtgagccatgtgctggatgagccaaccgcagttgcggatttgctgcaactggacaacgccggtgtagtggatatcggcggcggcactaccggcattgccattgtgaaaaagggcaaggtgacgtactcggcggatgaagccaccggcggacatcacatctttttgactttcgccggaaatcgccgtatttcgctggaagaggcggagcagtacaagcgcggtcacggtgaagagatttggcctgcggtgaaaccggtgtacgaaaaaatggcggacattgtcgcccggcatattgaagggcagggcattactgatttatggctggcgggcggctcttgtatgcaaccgggcgtggcggaactgtttcgcaaacaattcccggcgttacaggtgcatttaccgcagcacagtttgtttatgaccccgctggcgatcgccagtagtgggcgagagaaagcggaggggctatatgcaaaatga

SEQ ID NO: 25849 - DNA, 1518 bp, Homo sapiens
  SIMILAR (1476)..(796): 711254mologous to Escherichia coli K12 putative ATP-binding component of a transport system, fragment 1,accession number AE000424,Smith-Waterman Score=799.
ttagttcatgccgagacgaatcaggtccagtggtgccagtttcttttcacaaccttcaacaactacggtttttccgcgccggatttgctcagcggtcagaccttcagtatcaatcgacaggatcttgccagtgtgaccggtgccgctaaccataacacggctgccagtgggggatactggtttgattgcagcatcaacgccagactgaatctggtcgccagctttcaggcctttaggggccaggatgtaacggcgttcaccgtctttgtacagaaccagcgcgatgttcgcggaacggttcggatcgtactcaagacgttcaacaactgccgggataccgtctttgttgcgtttgaagtcaacaatacggtaagcctgcttgtggccaccaccgatatgacgagtggtgataatactattccttgtccttcccggaaaactttcatgaatgttggtacccaaaatggagcccatttcctcttgtaaacatctaacaaatacagcagcggcaacaccacgacaaatatcaacatcaatacctgaaaacttaccgtcagcatcggcataagagaacccaggtaatccatcactgatcccggcgccaaagcttgcatgcctgcagccgcgtaacctggcaaaatcggttacggttgagtaataaatggatgccccgacatagataataacttcagaatgagtattctccactcgagggagcatccagggaagtgggaaaggtgcagcacccgccggatgcggcaaaatacccatcgggatgccataaatcatttcgagggtttcgccgcgcataatttccgcaggcgttccctgagcaatcatttcaccgccgcgcagggcgaccagataatcacagtagcgtgccgccatattgatatcgtgcaacacggcaatgaccgtcaggccacgctcctgacttaaacggtgcaccagcgacagcacatcaacctggtgggcgatatccagcgccgaggtcggttcgtcgagcaacagacaacggctatcctgcgggggatcctctagagtggaggagcacagcccaagtttttgtttcatcccgcagaagagtttccctgccgaacgatcggaaaacggtgctaacccggtgctggtcagcagctcattgattcgcacttcccgctccgctttgtcgtgaccgaacaggcgagcgaaaaaatcgacgttttcatacaccgacaaggtgtggtagaggtttttgcccagcccctgcggcatccaggcgatgcgcgggcagacgtcgcggcgatgcttcgggtcgcgcatatcgccgcccagcaccatcacattgccctgttcaatgacgcgggcaccggaaatcaacgacaacaagctcgacttcccgacgccgtccgggccaatcagcccgaccatacagcgggccggaatatcgagagtgatattgttcagcgcaacggtttttccataatgatggctcacgcccgccagttgtgcgacaggcgggacgggcccagttcccat

SEQ ID NO: 25850 - DNA, 1257 bp, Homo sapiens
  SIMILAR (334)..(987): 901254mologous to Escherichia coli ribosomal protein L2 (rplB) (aa 1-273),accession number X02613,Smith-Waterman Score=990.
gccaccaagatactcagccgtttgaaggctttgaattctccccgcgttcaaaatctccccggccgacacaaacggcccgcactaattcccaatggactccgatccgcacttccgccctcttcacacgtgacacactcccaacaggaaggtgcccatttgtccccggcaactctgaacgttcccacagtctcgcgagcggctcaaaagcccgtcacatctccacaaaactccctaacccgcgagacccgtcccgtgtctctcgcggcaaaacctcgtcattacaccccctgcccggtcgctctcgcaacccgcaacgcgccatttgacacccccgtcaaacgtctcccacttcacccgctctcctttcggttggcggcgctgatggttaaccctgagctgcacaagggcaaaccttttgctccgttgctggaaaaaaacagcaaatccggtggtcgtaacaacaatggccgtatcaccactcgtcatatcggtggtggccacaagcaggcttaccgtattgttgacttcaaacgcaacaaagacggtatcccggcagttgttgaacgtcttgagtacgatccgaaccgttccgcgaacatcgcgctggttctgtacaaagacggtgaacgccgttacatcctggcccctaaaggcctgaaagctggcgaccagattcagtctggcgttgatgctgcaatcaaaccaggtaacaccctgccgatgcgcaacatcccggttggttctactgttcataacgtagaaatgaaaccaggtaaaggcggtcagctggcacgttccgctggtacttacgttcagatcgttgctcgtgatggtgcttatgtcaccctgcgtctgcgttctggtgaaatgcgtaaagtagaagcagactgccgtgcaactctgggcgaagttggcaatgctgagcatatgctgcgcgttctgggtaaagcaggcagcaaactggatatttcggtcaactggcaaggggcggcaatggcgtattccttcgatgaagtgattgttgacagtaatggcaagaaactggacatgcgctttggcggtaatttaacggcagcagaagagaagaaaacgggttgcctggtgtgtctggatagctgcccggtcggcatcgtcagcaatgcaacatacacttatggtgcggttgaaaaacgtggtgaagttaaattcaaaggcaatgcctcagttctcccggcggataacacgctggcaacggttacctttaaaatcgccgaataa

SEQ ID NO: 25851 - DNA, 835 bp, Homo sapiens
  SIMILAR (546)..(4): 801254mologous to Escherichia coli ribosomal protein L2 (rplB) (aa 1-273),accession number X02613,Smith-Waterman Score=711.
ctacttccccagtagttcacgccagtcgcttttctttaccatttcaccagaacccagactcaggtgaccataagcaccatcacgagcaacgatctgaacgtaagtactagcggaacgtgccagctgaccgcctttacctggtttcatttctacgttatgaacagtagaaccaaccgggatgttgcgcatcgccagggtgttacctggtttgattgcagcatcaacgccagactgaatctggtcgccagctttcaggcctttaggggccaggatgtaacggcgttcaccgtctttgtacagaaccagcgcgatgttcgcggaacggttcggatcgtactcaagacgttcaacaactgccgggataccgtctttgttgcgtttgaagtcaacaatacggtaagcctgcttgtggccaccaccgatatgacgagtggtgatacggccattgttgttacgaccaccggatttgtcagcgccgccaacgaagtccagattctggccttctttcagggtgacgtaagcttttttccagtcgctacgacgaccgatacgctgtccgtgacgtttaactttccctttaactaccagggtgttaacgacttcgacttcgacttcaaacagtttctgcacagcagctttgatttctgctttggtcgcgtctttagcaactttgagtacgatggtgttggatttttccatcgcagtagacgctttttcagaaacgtgcggggcacgcagcaccttcagcagacgttcttcacgaatcatgccagcatttccttaacttgcttaacaggcttggccgtcattacgactttggcgaaggcgaaccttc

SEQ ID NO: 25852 - DNA, 2257 bp, Homo sapiens
  SIMILAR (1175)..(1972): 921254mologous to Mus musculus putative transcription factor Zfp319,accession number AF288403,Smith-Waterman Score=1379.
atgagggagtcaccaactcgtgatgacagcaagaacactgtgaacaccacaatccgcattcgcattcacaacagttataccgagcaactacagatcgtcaccaactcgtattgcacaaaacaatggcacgtgcaccacactgcaaaaccatacgcccacatacagcgaccagcaacaccagacgcccaactgaccaagatgcaggaggaagaggaagtggaaccagagccagagatggaggcggaggtggaaccagaaccgaatcctgaggaggccgagacagagtccgagtccatgaaccagcgcgatgttcgcggaacggttcggatcgtactcaagacgttcaacaactgccgggataccgtctttgttgcgtttgaagtcaacaatacggtaagcctgcttgtggccaccaccgatatgacgagtggtgatacggccattgttgttacgaccaccggatttgctgtttttttccagcaacggagcaaaagcgccgccaacgaagtccagattctggccttctttcagggtgacgtaagcttttttccagtcgctacgacgaccgatacgctgtccgtgacgtttaactttccctttaactaccagggtgttaacgacttcgacttcgacttcaaacagtttctgcacagcagctttgatttctgctttggtcgcgtctttagcaactttgagtatttgcacggagccagagcacacgcctgcattccaccgtcagcttgtattggcgaagtcttagagacatccagctttgacatccgtgtctctgtctatcgttcctcctgtgtgtgtgtgagacttagggagagctctaccggagatagatattttggaggcctcagcttgcagatgatgcgtaaagccacaggactgactgatatcacctcggataccccaggcaacacagatgaccagaggtggcacccggaacacgggctcactcagaggatgcaaaaagagcaggagctggtaaaggagcctgaaggagctgccagggatggggatggagaagcagaagcatggggtgaggtgaaagccaagagtagtggctgtgttgggaccagagcctctagccacctgttccgctgcaacgtgtgcgagttgcatttcaaggagtcgtcggagctgctgcagcacccgtgcacgccaagtggggagcggcccttccgctgcggcgagtgccagaaggccttcaagcggccctcgggacctgcggcagcatgagcgcacacacagcgccgagcggcccttcaagtgcgacctgtgccccatgggcttcaagcagcagtacgcactgatgcgccaccggcgcacacacaagaccgaggagcccttcaaatgcggcctatgtgagaagggctttgggcagcccagccacctgctctaccaccagcacgtgcacaccctcgagactctcttcaagtgccccgtgtgccagaaaggctttgaccaatctgccgagctgctgcggcacaagtgcctgcccggcgcggccgagcggcccttcaagtgccctgtgtgcaacaaggcctacaagcgcgcgtcggccctgcagaagcaccagctggcccactgtgcggcggcagagaagcccctgcgctgcacgctttgcgaacgccgcttcttctcctcttccgagttcgtgcagcaccgctgcgatccggcccgcgagaagccactcaagtgcccagactgcgagaaacgcttcaagtacgcgtcagacctgcagcggcaccggcgggtacacacaggcgagaagccctacaagtgccccaactgcgacaaggccttcaagcagcgggagcatctcaacaagcaccagggcgtgcacgcccgcgagcagcagttcaagtgtgtatggtgcggggagcgcttcctagacgtggccttgttgcaggagcacagcgcgcagcacagtgccgccgccgcggcagcggagggcgcctaccagcaaactctgcatcacccacgaagacaacagcaacagtactggcagctgctgtgtgccaggaacaatgttaagctctgtatgcacatcttattcagccctcacaaccaccccatgagggaggtaggactgctgggcccaccaccccaggccttcagctcatccctgctctgcaccgacactggcatcttcgtgtctgcccccagcagcactggggaggggagttactcaagggatggcccgaggggaatgcatatatttcagcggtccaggctattacaattatga

SEQ ID NO: 25853 - DNA, 603 bp, Homo sapiens; identical to SEQ ID NO: 9278
  SIMILAR (113)..(553): 811254mologous to Escherichia coli Mannose-1-phosphate guanylyltransferase (GDP) (EC 2.7.7.22) (GDP- Mannose pyrophosphorylase) (GMP),accession number D90843,Smith-Waterman Score=601.
  misc_feature (1)...(603): n = a,t,c or g

SEQ ID NO: 25854 - DNA, 554 bp, Homo sapiens
  SIMILAR (545)..(3): 941254mologous to Escherichia coli outer membrane protein,accession number K00541,Smith-Waterman Score=925.
gcaccaccgataccgaaaccttcgtaatcataagtgatagaaccgccgacgccgtcgccgttttgacgcagtgcgtcacgaccgttgttagttacgccactagtaaagccttcaccagatgggttgccgtttttaccctggtactgaacagcaaagttcaggccgtcaaccagaccgaagaagtcagtgttacggtaggtcgcgaagccgttaccacgctgctgcatgaagttgtcagaaccgtaggtgtcaccaccgaattctggcagtacgtcggtccaggaagttacgtcataaacaacgccgtagttacgaccgtagtccaaagaacccacatcctggaatttcagacctgcgaatgccacacgggtccaggagttgttttcgttttcagcgctgctgccctggatctgatattcccactggccgtaaccggtcagctggtcacgaacctgagtttaacctttgaagccaacacgcatgtaggtctggtcgccatgtacatctttgttgccagagaaatactgcaagcacgctactttaccgcacataat

SEQ ID NO: 25855 - DNA, 2124 bp, Homo sapiens
  SIMILAR (1614)..(880): 981254mologous to Escherichia coli shl protein,accession number M35034,Smith-Waterman Score=1255.
ttaccccaagtgggtgtcctccccgaaattatccgagaggttcacaaaaccccgagctttttttataacccgtgggggatttttttctcccaggggggggggcgagaatatttggagaaaaggagtgggtctttttcccataatggggcctggggaaccacgggtggttttttcaatctgagcgataaaatagagcggcgtgccatccgtgtggcgcaccagtgagacggcaagcaacgcccagacaacatcgccattgcggttgtagtagcgtttttccattgaataggtgtttatttcaccgcttatcagcttttcaacctgttggagatctttattgagatcctccggccaggtcagttgctgaaaggtgagtccgcgcactcttcctgactgtacccgagaaactggcagagcgctttgttggtttgcagccattgtccctcggtgcccactaacgccataccgatagcggaatattccatcgcgttccgaaagtgggtttcgctttcggaaatgtgtttgcgttccgcacgaaaggcatacatcaccatggtcatgatgttggcgggcagcaggatcagcaaaaacggtagccacggcatatggctcatcaggtacgtacgcggcgtagcaagcagggagggatccgcggccatcatcagcgacaccatcatcaccgtggtaaggaagatcaaaaaggcttccattcgtggcagacgcacggcgctccacatcaacagcacaataatgaaagtaaaaggccacggcagatacagcatcgaaagccagcttaacgtcagtgtgatggcccccgagtgcgcatcgggcgtttcgcccgggcgggggtgtgcccccccctccagttaggggcctccccacgccgcggcgatagagattacgtttaatgcgcgttaaaccaggttttggcttacgcggttcgtccaggcttgccaggacaatctccagcacacgctctgcgacatcgcggtgacgttgagccactgccagcaccggacactgtaagaagtcgagcagttcgttatcgccaaaggtggcaattgccaggtcagaaggcagtttgccgtcgcgacgcagcgtgacatccatcactccttgcaacaacgcaaacgacgttgtgaacagcgcctgcggcatcggatgcgtttccagccatttttcgaataactgggcagccgcctcccgctcatagctgttggcatacaggaaatgcacttcgcgcggatcatctttccaggcagtacggaaaccttgttcacgcaggaagctgacagaaagctccggtagcgcaccaagataaagcaccgtctcggcgggaaacttacgtaactcttccgccagcatttcggcatcatcctgatcggcaccaaccacgctggtgaagtgttcacgatcgagggcgcggtccagcgcgacaatcgggaacgggtcgttagcccagcgttgataaaaaggatgctcaggaggcaacgacgtcgaaacaataatggcatcaacctgacgctgtaaaaggtgctcaatgcaccgcatttcgttgtctggctgatcttctgagcaggcaatcagcagttgataacccccgttgcgcgcccggatatgtctgcgatggttgaaggcattgagctgacgctgaagtcgatgctggatgttgtgcgtaagtttggcgttgaagtgatcgccgaaactaacgtcccactggacccgaatgtgcatcaggccatcgcaatggtggaatctgatgacgttgcgccaggtaacgtactgggcattatgcagaagggttatacgctgaatggtcgtacgattcgtgcggcgatggttactgtagcgaaagccaaagcttaatttctgctttcgtaataattcacggccctgcttaatcatattgtcctgtacgtcgagaatatcgatatcgtactcgccaatacgcacgcgggtgcctgcgacagggatctcttccagtgcctcaagaatgacgccattaaccgtgcgggcatcatcttccggtagatgccagttaaaggctttgttgatttcccgcacgttggcggtgccatcgataatcaccgaaccgtcgttttgcggcgttatgaccgacttcat

SEQ ID NO: 25856 - DNA, 1419 bp, Homo sapiens; identical to SEQ ID NO: 24709
  SIMILAR (592)..(1416): 931254mologous to Homo sapiens putative p150,accession number U93574,Smith-Waterman Score=1299.

SEQ ID NO: 25857 - DNA, 3342 bp, Homo sapiens
  SIMILAR (3342)..(2647): 801254mologous to Escherichia coli O157:H7 evolved beta-D- galactosidase, alpha subunit; cryptic gene,accession number AE005537,Smith-Waterman Score=986.
atggtggaaggatgggttaccagcgcctgggcgaagaaacatcacccgcgctggtaccgtgaggtccgcaagccacggaaaaggttcgcggcacggaagcaaaagccgcccatcagcgctggcgcacaacgtaccgggtccgcaccggcttttgaagcaaatagcaggggcttcagaaaccgcttcaatattgagcgccacgataatctgatttgccactttgcaggtttgaccatcgccgttaccgcccacgagggtgatatttttaccgagcagttcaaacagcggtttaacacgttcaaataccgcttcatcaccgccaaccataatcgacaacgtcccttcacgcgcaccgatttcaccgccggagactggcgcatcgagataatcgccgcccagttcattcacctgacgagcgaaacgcttagtttcaatcggggaaatggagctcatatcaacaatggttttgcccttcagcgaggctttggtacaaccattttcaccgaacagaacttcttcaacctgagccatcacactgacgtaagctggctttcgatgctgtatctgccgtggccttttacctttcattattgtgctgttgatgtgaagcgccgtgcgtctgccacgaatgaagcttttttgatcttccttaccccggtgatgatggtgtcgctgatgatggccgcggatccttccctgcttgctacgccgcgtacgtacctgatgagccatatgccgtggctaccgtttttgctgatcctgctgcccgccaacatcatgaccatggtgatgtatgcctttcgtgcggaacgcaaacacatttccgaaagcgaaacccactttcggaacgcgatggaatattccgctatcgtggacgatgtaacaagcgccttcttcatcctggtgcggttcacacgcttcgctcggttgccagatagcggtaacccgctcatcggcaggtgtcacgatatgtgctttgacttcaaagaagtctttcgccacgaagttttcaatctcttcatcgcggcgcaccaccagcccaagcacgggcgtctgcacgcgtcccacggaaagtacgccctgataaccggcattgcgaccgagaatggtatacgcacgggtcatattgatgccgtacagccagtcggcacgcgctcgcgccagcgcagaaacgcacagcggtacaaactcactgttggaacgaagacggtcgatcgcccgctcaaccgcctgcgggttcaggtcgtttatcaagcaacgctgtacctgctggcgcttttccggtgccagttgcagatagtccagcacttcatccaccagcaattgcccttcacgatccgggccagtaacgtgcgctggcgcggaatgaattttacagatgttgccacgcaaatgaccaacaagtcgggtttgctggaaattactcaactgcagggcaaacttaacggtggacaggtttcactgccgggcacgctggacgcgacatcaataaatccgcggataaacttccagccacggctggaaaacgttgagattggtaccattctgaaggcgtttaactatccgatttcgttgaccggaaaaatgtcactggctggtgatttctccggtgctgacatagatgccgacgcattccgccacaactggcaaggacaggcacatgtcgaaatgaccgacacgcgcatggaagggatgaacttccagcagatgatcagcaaacgctggggcatcattgtgaagctggaaaagctggcgaacgccaccatgcgcgacagagtgggtaaaggtgattacgacattgcgattggcaactggagtccggattttgccgacccgtatatgtttatgaattactggtttgagtcagacaaaaaaggtctgccgggtaaccgctcgttctatgaaaacagtgaggtcgataagttactgcgcaatgcgcttgcgaccaccgaccagacgcagcgtacccgggactaccagcaggcacagaaaatcgtcattgatgacgctgcttatgtgtacctgttccagaaaaactaccaactggcgatgaacaaagaggtgaaaggctttgtgttcaatcccatgctggaacagataatatccgtcatcgcatttggcgcgctgctcgcgtcgtctatgcaatcattcctggttgtgagagcggacaccgtatcgccgcatacaagcgcgggagaagttgcgtgtagccgcattcatactcccttgacttataacgaaattctacggaaagcttttgggctggattacgaactggcgaaacagtttgcgatttacctcggcgtaaaactgaaagtgaccgtgcggcagaatatcagccagctgtttgacgaccttgataatggtaacgccgacctgctggcggcaggacttgtctataacagtgagcgggtaaaaaattatcagcctggccctacctattattccgtgtcacaacaactggtttataaagtgggtcagtatcgcccacgtacgctgggcaacctgacggcggagcaactcaccgttgcaccgggtcatgtggtggttaacgatctccagaccctgaaagaaacaaaattcccggaattaagctggaaggtagacgacaaaaaaggctctgcggaattaatggaagatgtcatcgaaggaaaactcgattacaccattgctgattctgtcgccatcagcctgtttcagcgcgttcacccggagctcgccgtagcgctcgatatcaccgatgaacaaccggtgacttggtttagcccgagttggagccgaggccaagcagtggtgatcgaggttcagggtgatgtcatcactgcgctgcagctcgttacagtgctgggcagcgtggatgttttcctgggtatagtgccaggcgctgaagttaattgggcgctgcggaaccaccagcagaccgttaccgtggcggttagtcagtgccgtccagcggacatgctgacggttaccgttgttctgcgggaagggatagttctcgaacatggcatcgacggtgctgcgccagatatcgatgatgttagcctgctggctgtcggcgtagttttcgcccggtccacgaccgtaatacgccacctgatcgtattcgccgttaattcccatggtgaaaccgatgcacggaatgatgtgcggatagtcgccgtaacgctcgccggaaagcgccacgttaacctggccatcggcagcgatgcgccagatgtaggtgcagcgcatcccgaagtcaaacaccggcggggcaataactgtgcggctgatgatcagcacttcaccatcgctctgttctacggcaaagtcgcgcagatgttcctgcagatcgtttaa

SEQ ID NO: 25858 - DNA, 2712 bp, Homo sapiens; identical to SEQ ID NO: 22527
  SIMILAR (1666)..(2220): 951254mologous to Escherichia coli K12 low-affinity phosphate transport,accession number AE000381,Smith-Waterman Score=903.

SEQ ID NO: 25859 - DNA, 2280 bp, Homo sapiens
  SIMILAR (112)..(732): 991254mologous to unidentified cloning vector 29kD protein essential for the replication of mini F plasmid,accession number AB015619,Smith-Waterman Score=1079.
atggacgatatcccgcaagaggcccggcagtaccggcataaccaagcctatgcctacagcatccagggtgacggtgccgaggatgacgatgagcgcattgttagatttcatacacgcgttatcaatcacaagaaacgtaaaaatagcccgcgaatcgtccagtcaaacgacctcactgaggcggcatatagtctctcccgggatcaaaaacgtatgctgtatctgttcgttgaccagatcagaaaatctgatggcaccctacaggaacatgacggtatctgcgagatccatgttgctaaatatgctgaaatattcggattgacctctgcggaagccagtaaggatatacggcaggcattgaagagtttcgcggggaaggaagtggttttttatcgccctgaagaggatgccggcgatgaaaaaggctatgaatcttttccttggtttatcaaacgtgcgcacagtccatccagagggctttacagtgtacatatcaacccatatctcattcccttctttatcgggttacagaaccggtttacgcagtttcggcttagtgaaacaaaagaaatcaccaatccgtatgccatgcgtttatacgaatccctgtgtcagtatcgtaagccggatggctcaggcatcgtctctctgaaaatcgactggatcatagagcgttaccagctgcctcaaagttaccagcgtatgcctgacttccgccgccgcttcctgcagcacatatttgttcttcgggagcgccctgaaaccgtgttaatagatctcattcagaggacaaaggatgcagtaagagagctggacaatctgcagtatcgaaagatgaagaaactccttttccaggaggcacataatggaccagcagtagaagcacaggaagaagaagaggaatatggctggaatctggaccgagcctatgactatgtgaaagaaagacgaacggtaaccaagcccaacccaagcttcatgagacaactggaagagtatcaggggatcttgctggcaagacccaagagaactgcttacatttatggctccgtgtatcggcgttgtggttatgcagaccacaaggtagaaataaaacaccctggctgggcatccatcagcaggggtgtgctggtgtgtgacgagtgctgcagcgtgcaccggagcctgggacgccacatctccattgtcaagcaccttcgccacagcgcctggcctcccacgctgctgcaggcagagtgtgctgagcatgagggcgtttccccctcacccacatacacccccatctggaatctgcagcttccaaggggcagcacccccctaggcagagctctgctggtagcaggcgcagcaaacgctgctgaagtttacaacaaagacggcaacaaattagatctgtacggtaaagtagacggcctgcactatttctctgacaacaaagatgtagatggcgaccagacctacatgcgtcttggcttcaaaggtgaaactcaggttactgaccagctgaccggttacggccagtgggaatatcagatccagggcaacagcgctgaaaacgaaaacaactcctggacccgtgtggcattcgcaggtctgaaattccaggatgtgggttctttcgactacggtcgtaactacggcgttgtttatgacgtaacttcctggaccgacgtactgccagaattcggtggtgacacctacggttctgacaacttcatgcagcagcgtggtaacggcttcgcgacctaccgtaacactgacttcttcggtctggttgacggcctgaactttgctgttcagtaccagggtttcggtatcggtggtgcgatctccagctccaaacgtactgatgctcagaacaccgctgcttacatcggtaacggcgaccgtgctgaaacctacactggtggtctgaaatacgacgctaacaacatctacctggctgctcagtacacccagacctacaacgcaactcgcgtaggttccctgggttgggcgaacaaagcacagaacttcgaagctgttgctcagtaccagttcgacttcggtctgcgtccgtccctggcttacctgcagtctaaaggtaaaaacctgggtcgtggctacgacgacgaagatatcctgaaatatgttgatgttggtgctacctactacttcaacaaaaacatgtccacctacgttgactacaaaatcaacctgctggacgacaaccagttcactcgtgacgctggcatcaacactgataacatcgtagctctgggtctggtttaccagttctaa

SEQ ID NO: 25860 - DNA, 1848 bp, Homo sapiens
  SIMILAR (1)..(423): 981254mologous to Escherichia coli Mannose-1-phosphate guanylyltransferase (GDP) (EC 2.7.7.22) (GDP- Mannose pyrophosphorylase) (GMP),accession number D90843,Smith-Waterman Score=705.
atgctgcaaaccaccatctgccgcctgaacggcgtggagtgcgaaagcccggtggtgatttgcaatgagcagcaccgctttattgtcgcggaacagctgcgtcaactgaacaaacttaccgagaacattattctcgaaccggcagggcgaaacacggcacctgccattgcgctggcggcgctggcggcaaaacgtcatagcccggagagcgacccgttaatgctggtattggcggcggatcatgtgattgccgatgaagacgcgttccgtgccgccgtgcgtaatgccatgccatatgccgaagcgggcaagctggtgaccttcggcattgtgccggatctaccagaaaccggttatggctatattcgtcgcggtgaagtgtctgcgggtgagcaggatatggtggcctttgaagtgggcaaaaggagtcgaccaacgccagcgtacaagccaaactccgggtccgccccgacccaccacggccccggcccgccctcgcccgccggccccaaacaacacgacatccacaaacttacgcccgccaccccaccagacacctacggaatccacgcggctaaccaccgggtgtcgacgaacgtgcgtgaaattgacgagtgcctgaacgaccaccatgctctgttcacgattcgacaaattgcctttgacatcttcggcggtgacttcaatcggccaggtgttatcggtttctggcgtactggtgaaccgaacgatattgttgttgcgatccaccagatcataacggctgcctgcaaggctacgccgtgcagcgacttcattcgggtcaagctgtttctgcattgcgctgccaggttgccaggtaaaatcgacggcaaaacgggtgtcattttcgccctgtttaccctggcgttgctccgcgctgaaggtcatcagcgggaagggggtataggccaattcatcgccataaatactggtcatagaccagtttaccgccaaggtgcggccagcggggtagccagctttctgcgcgtacatcccagccaattggcgggcgtgcttcataatcgttgtccagttcagaacaagaagcagaagcagaagcagaagcaagaagaagaagaagaagaagaagaagaagaagaagaagaagaagaagaggaagaggaagaggaagaggaagaggaagaagaggaagaaggagaaggggaacgggaagggggagaaggggaacgggaaggggaagaaggggaacatgaccggtttagtacacataagccccaggcaaaagatgaaacgatgaagtacatacgatctaagcctgacaaccgaatcccggagagacactatatcgcaggtagaccacgagaactcgtatcaactcaccgctatgtgtcagcccgatattacgaagcaacaacgtacaaggacaatgatgctccaaggacaaagacgaagagaatgaagaagaagaagaagaagaagaagaagaagagcaagaagaacaagaagacccaaaccaggagatacattacggtcgacattgaggccgccagcacggcgtgtaccgcaaacagcaacggtgaaatgaacaggaaggtaaattccagcggttcggtaattcccaccagcatggcggttaaggttgcgggaatcagcaagcccgccacttttacccgattttccggtgcggcagtgaagtacatcgctaaagaaatgcccacggcaccaaagatttttgagttaccgtgcagggcaaaaccgccttccgggaacaacgatttcagcggctcggcgctcaaactgaactcttgcagatgtgcgcccagtacatctgaatgccgccttcaacagctgccggaccaaagataa

SEQ ID NO: 25861 - DNA, 647 bp, Homo sapiens
  SIMILAR (108)..(55): 451254mologous to Homo sapiens Human secreted protein, SEQ ID NO: 4506,accession number G00425,Smith-Waterman Score=50.
gtcgacaccaggttactagtcccacatatcgtaggcatggttctaacctacataacaacagcaacccaatcctacacgtgaccaattacaattggccattctccacaatattagaggtatacgcaaaatatatggttaaattcaaagcgccacaagagaagctggttaggggcatacgacaacagccgctggcgaacccataccggacaaaattttataccccacattacatcacactgggtgtgttttgtcttgtggttacatggatcagagcaccccagtggacgctcttatacccttttctgacggtcgacaatccaatccattcggacaattacatggccacgtttatggacagggcagctggcagaacaagcccggccacaacaaagctttacacaagattaccacctagcatttttccctactctcgcatggggaaccccacactaccatcggcgctacggcgtttcacttctgagttcggcatgggtcagatagggaccgaactgtctcacgacgttctaacccagctcgcgtaccactttaaatggcgaacagccatacccttgggactacttcagccccaggatgtgatgagccgacatcgaggtgccaaacaccgcgtcgatatgaactcttgggcg

SEQ ID NO: 25862 - DNA, 2317 bp, Homo sapiens
  SIMILAR (1486)..(1962): 931254mologous to Escherichia coli K12 putative ARAC-type regulatory protein,accession number AE000274,Smith-Waterman Score= 756.
atggcgcggcgtgcagcgctggcgcgtgcgattgcgctggagccggatctcatcatgtttgatgaaccttttgttgggcaagatcccatcaccatgggcgtactggtgaagctgatttctgagctgaacagcgcgctgggcgtgacttgtgtggtggtttctcacgatgtgccggaagtgttaagtattgcggatcacgcctggatcctggcggacaaaaaaattgtcgctcatggcagtgcccaggcgttgcaggcgaatcctgatccgcgcgtacgtcagtttctggttagtgcgtgggcgtcgtggggtggcgctcgggactcgccgcggccgagtgagatcaatctgctccttaacgcacgtgtccttttggccagagcgtcggtgaccccgcttggtgtggcggcggtctgccgctatcgatatcgccactgcagcttaaggctaccgtggaactttcggcgaattctcaggttctccgctgtggacccgtggaggaaccagtgggccacagtgattgcagagcggcgcggcttatccggcctacgggtaggtatatccggctttggtggaggcgcgctccaaatccaggttgaacaaaacatacacaaaaaatatagatctccgtcacatttttgcgttatacaggaagctcgccactgtgaaggaggtactgctatgacgtcactctctcgtccgcgcgtggagtttatctccaccattttgcagaccgtactcaatcttggtgatcatcaacctgattacaacgatattttgtcgcaacgtattcaaagtagccaaagggcgctgggactggaagtcaatctggcggaagaaaatgaactgacgatggactctcttaccgaaagcctggaatgggccgatgtggtggtgattggtcccgttaaaataggaaagcagccacacgttaatgcaatcaaaaatggctttattcgcttaatgaatatggctatccgcatttggtttagtactttccgtctgaaagacgacgttgttatttcatctgtgataacggcgcttgaacttggttatcgcgcaattgataccgcacaaatctatgataacgaagccgcagtagaaccgatggcggctgcttatgttcagccttctcgtcgcccgaccgatggtcgctacggcgaaaagggcccaacagctgcagtcacccgggtagaccgatcatcccagggcaccacacgggtacacgcacaccacgcggagttgcggcgcccaacagtacggccgcgaaacgcgcccaaaaacaccggctcgctttccggcaatttactggctgatttcgtacgcggaaatcctgaagaaagttttccgcccgacgtcgtggctggcattcatatgcatcgacgtatcgacgtattgactgacaatctgccggaagtccgcgaagcacgggagtggtttcgtagtgaaacgcgccgcgttgcgcctattacgctggatgtcatcgcagtgacaatgccgacaacatgttgcacattgaaaatatcgcccttatgccgggaattaattttaaccctggcaaacaggacgacgactcagcgtgctgagccaatgacccgcagattaattcaggtcctgtttgatgaactccctcagcagccacaacaacagctgcacctgcccgtttcttctcatcctaaaatccgcacgatggtggagatgatggcgaaagggcctgtcgagtggggggcattggggcaatgggctggcttttttgcgatgagtgaacgcaatcttgcccgactgatagtaaaagagacggggttgagttttcgccagtggcgtcagcagttacagctgattatggcgcttcagggattagtgaaaggcgatactgtacagaaagttgctcatacgctggggtatgattcaacaacggccatttattactatgttaagaaagcctgggaaaacggcaggtaccagcttataccatcggcgctacggcgtttcacttctgagttcggcatggggtcaggtgggaccaccgcgctactgccgccaggcaaattctgttttatcagaccgcttctgcgttctgatttaatctgtatcaggctgaaaatcttctctcatccgccaaaacagcttcggcgttgtaaggttaagcctcacggttcattagtaccgagtcaaacggaagaacgacactcgcacggacaccacgccaaggatcgtcgatcaagtggctgtgtacgaaccccggtagcccgacatgccctaccggacatggtggaccaccgtagacacatcgcaggccacccggaaaggcaccacg

SEQ ID NO: 25863 - DNA, 2168 bp, Homo sapiens
  SIMILAR (807)..(1898): 991254mologous to Escherichia coli putative glycosyl transferase,accession number U38473,Smith-Waterman Score=1860.
ggctctttcgccttttccagcgcgcgcacctttctttcggcatcacaagccaattggaaaccagtggagtcaatggtgtaaccgtcacgctcagcttggtacagctcacgttttacggtaacgttagtgagatcatcagacatcaatgtcaacttacacggcacggcaatcacccgctgccactgacggcaatccagggtatcgccctctttagtgacaatcaggctgcctatcgcttccgggctgaccagcgcacgttgcggccctttggtctgccagtagcccgccagccagtccggcgcgggggttttcacgacattgttatagttttcgacttcggcacagcccgccagcaacaagagcgcgcctgcaattgcgagttttttcatcattcgtcctgcatgagaagaaaagaggattgtggcattaaagccctgatgtcgccagcctttcaagaggctacattcatgtcatggcagcaattcaaacacgcctggttgattaaattctgggcccccatccctgcggtcatcgcggcgggtattctctctacttactattttggcattactggcaccttttgggctgtcacgggtgaatttacccgttggggcggccagctcctgcaactgttcggcgtccatgctgaagagtggggttactttaaaattatccatctggaaggatcgccattaacccgcatcgacgggatgatgatcctcggtatgtttggcggctgctttgccgcagcgctgtgggccaacaatgtagcggtaccgacatggtgtaatggctgcggcacaagtcatgaggtgcgggtcattaccgcaccgccttactacccgcaatggcaggtgggcgagaactattccgcctggcgctacaaacgagaagagggggccgccacggtgtggcgctgcccgctgtatgtgccaaaacagccgagcaccctgaaacgcctgttgcatctgggcagttttgccgtcagcagtttctttccgctgatggcgcaacgtcgctggaagccggatcgcattattggcgtggtgccaacgctgttttgcgcgccgggaatgcgcctgctggcgaaactctctggtgcgcgtaccgtgctgcatattcaggattacgaagtggacgccatgctggggctgggccttgccggaaaaggcaaaggcggcaaagtggcacagctggcaacggcgttcgaacgtagcggactgcataacgtcgataacgtctccacgatttcgcgttcgatgatgaataaagccatcgaaaaaggcgtggcggcggaaaacgtcatcttcttccccaactggtcggaaattgcccgttttcagcatgttgcagatgccgatgttgatgcccttcgtaaccagcttgacctgccggataacaaaaaaatcattctttactccggcaatattggtgaaaagcaggggctggaaaacgttattgaagctgccgatcgtctgggcgatgaaccggtgaattttgccattgtcggccagggcggcggcaaagcgcggctggaaaaaatggcgcagcagcgtggactgcgcaacatgcaatttttcccgctgcaatcgtatgacgctttacccgcactgctgaagatgggcgattgccatctggtggtgcaaaaacgcggcgcggcagatgccgtattgccgtcgaaactgaccaatattctggcagtaggcggtaacgcggtgattactgctgaagcctacacagaactggggcagctttgcgaaacctttccgggcattgcggtttgcgttgaaccggaatcggtcgaggcgctggtggcggggatccgtcaggcgctcctgctgcccaaacacaacacggtggcacgtgaatatgccgaacgcacgctcgataaagagaactcgaaactctatccagttgtgatggcaggtggctccggtagccgcttatggccgctttcccgcgtactttatcccaagcagtttttatgcctgaaaggcgatctcaccatgctgcaaaccaccatctgccgcctgaacggcggtcaggctcggcgtcggtgccgataccatactgacgtgacccggcgcgaggaacgcatcgataccgttatccggctgttccagcaaactgcgcaacgtcgggataagcgtaatgtgctggcagaagaa

SEQ ID NO: 25864 - DNA, 2544 bp, Homo sapiens
  SIMILAR (179)..(763): 911254mologous to Escherichia coli Nodulation protein V (EC 2.7.3.-),accession number D90844,Smith-Waterman Score=889.
atggtggcgttttatcgccatgccgggcgcatgtggccgggaattgcgctgagctgttcgctgggaaatatcgccgcatccatcctgcttttttccaccagctcgctgaacatgacctggacgaccatcaatattgttgaagccgtggtcggggcagtgctgctacgtagattgctggccgtggtataaccccttgcaaaatctggctgactggctgcgtctggcactcggcagcgccattgttccgcctctgttggggggtgttctggttgtcctgctgacgcccggagacgatcctctcagggcatttttgatatgggtactgtcagaatccatcggcgctctggcactggtgccgctgggattgttatttaaaccacactatctgctgcgccatcgcaacccacggttgctttttgagtcgctgctcacgttagccatcacactgacgttaagctggctttcgatgctgtatctgccgtggccttttactttcattattgtgctgttgatgtggagcgccgtgcgtctgccacgaatggaagcctttttgatcttccttaccacggtgatgatggtgtcgctgatgatggccgcggatccctccctgcttgctacgccgcgtacgtacctgatgagccatatgccgtggctacctgtttttgctgatccatcgtagcccgccaacatcatggtaccatggtgatgtatgcctttcgtgcgggaagcgaaacacatttccgaaagcgaaacccactttcggtaacgcgatggaatattccgctgatcggttatggcctgttagtgggcaccgagggacaatggctgcaaaccaacaaagcgctctgccagtttctcgggtacagtcaggaagagctgcgcggactcacctttcagcaactgacctggccggaggatctcaataaagatctccaacaggttgaaaagctgataagcggtgaaataaacacctatgcctactcgtgcctggggctttgtgctgccttctatgtcggtccgctactctgttgttcttcggggccgccgtggatcattccccggattatgcctgatgaagcgcaacccttgccggatagtgccttgccgcgcgtcgccccactggcatggaaaacgggcaccagctatggctatcgtgacgcctgggcgattggggttaacgctcgctatgtcattgggatctggactggcagaccggacggcacgcccgttgttggtcagtttggctttgccagtgccgtaccattgttgaatcaggtcaataatatcttactgtcgcgcagtgcgaatctgccggaagacccgcgcccgaactcagtcactcgtggcgttatctgctggccgggcggacagtctttgccggaaggtgacggtaactgtcgccgccgcctggcaacctggctgctggacgggagtcagccgccaactctattactgccggagcaggaaggcattaatggcattcgtttccccatctggctggatgaaaatggcaaacgtgttgccgctgattgcccgcaagcgcgacaagaaatgataaatgtctggccgctaccgctggaacactggctgcccgcatcagaacgtcgcgctgtgcgcttaccaccggcctcgacaagttgcccgccatacggtcacgatgcccagctcccgctgcagctgacaggcgttcgcgatggcgcgattattactagcttcgtcgttagtcttgttgtatctcgctgctgcatcgtgcggagcccaaacaaggaccgagtaaaagggaacctccaaaatgcgctccaaagaacgaacagcggaggtgtgcaaaataaaaccgtaaagtatgaacagcggctcaacttgaataaaactcgctgggaacaatttaatgcctccataaaaggtaaaccgggaaacgtgcccggttcaatttctgcaaatagcgataacagccgtcaagtttctctcagcaccgacggtggttttgtattgcatagcggtggactgactttcagtaatgatagttttagcgactccgatacactggcggtagttcaggctccaggtgctcaaggagcgcgaataaattatggcaacagtactatcgatcgatggggttatggtgtcaccagcgctctttctccttatcatgaaaaccgtatcgcgctggatatcaacgatcttgagaacgatgttgaattaaaaagtaccagtgcagtagctgtaccgcgtcagggttcagtcgtctttgctgattttgaaaccgtgcaagggcaatcagccattatgaacatcacacgaagtgatggtaaaaatattccatttgctgcagatatttatgatgagcaaggcaatgtcattggtaatgttggacagggtggacaagcatttgttcgtggtattgagcagcagggaaatatcagcattaaatggctcgaacaaagtaaacccgtaagttgtcttgcgcattatcaacaaagcccagaagcagaaaaaatagcacaatctattattctgaatggaattcggtgtcagattcagtaa

SEQ ID NO: 25865 - DNA, 2339 bp, Homo sapiens
  SIMILAR (113)..(859): 1001254mologous to Escherichia coli Mannose-1-phosphate guanylyltransferase (GDP) (EC 2.7.7.22) (GDP- Mannose pyrophosphorylase) (GMP),accession number D90843,Smith-Waterman Score=1282.
  misc_feature (1)...(2339): n = a,t,c or g
gtcaggcgctcntgctgcccaaacacaacacggtggcacgtgaatatgccgaacgcacgctcgataaagagaacgtgttacgtcaatttataaatgatattcggggataattatggcgcagtcgaaactctatccagttgtgatggcaggtggctccggtagccgcttatggccgctttcccgcgtactttatcccaagcagtttttatgcctgaaaggcgatctcaccatgctgcaaaccaccatctgccgcctgaacggcgtggagtgcgaaagcccggtggtgatttgcaatgagcagcaccgctttattgtcgcggaacagctgcgtcaactgaacaaacttaccgagaacattattctcgaaccggcagggcgaaacacggcacctgccattgcgctggcggcgctggcggcaaaacgtcatagcccggagagcgacccgttaatgctggtattggcggcggatcatgtgattgccgatgaagacgcgttccgtgccgccgtgcgtaatgccatgccatatgccgaagcgggcaagctggtgaccttcggcattgtgccggatctaccagaaaccggttatggctatattcgtcgcggtgaagtgtctgcgggtgagcaggatatggtggcctttgaagtggcgcagtttgtcgaaaaaccgaatctggaaaccgctcaggcctatgtggcaagcggcgaatattactggaacagcggtatgttcctgttccgcgccggacgctatctcgaagaactgaaaaaatatcgcccggatatcctcgatgcctgtgaaaaagcgatgagcgccgtcgatccggatctcaattttattcgcgtggatgaagaagcgttctcgcctgtccggaagagtccggggattacgcggccatgggacgtacgggagatgctgttgtgccattgtccctcggtgcccactaacgccataccgatagcggaatattccatcgcgttccgaaagtgggtttcgctttcggaaatgtgtttgcgttccgcacgaaaggcatacatcaccatggtcatgatgttggcgggcagcaggatcagcaaaaacggtagccacggcatatggctcatcaggtacgtacgcggcgtagcaagcagggagggatccgcggccatcatcagcgacaccatcatcaccgtggtaaggaagatcaaaaaggcttccattcgtggcagacgcacggcgctccacatcaacagcacaataatgaaagtaaaaggccacggcagatacagcatcgaaagccagcttaacgtcagtgtgatggctaacttccctactctcgcatggggagaccccacactaccatcggcgctacggcgtttcacttctgagttcggcatggggtcaggtgggaccaccgcgctactgccgccagacaaatgctttgtctaatctgccgaactttaacctaaaaagtggtgctgatacccagagtcgaactggggacctcacccttaccaagggtgcgctctaccaactgagccatatcagcacgctaaatttgatgcctggcagttccctactctcgcatggggagaccccacactaccatcggcgctacggcgtttcacttctgagttcggcatgggaattcggtggtgacacctacggttctgacaacttcatgcagcagcgtggtaacggcttcgcgacctaccgtaacactgacttcttcggtctggttgacggcctgaactttgctgttcagtaccagggtaaaaacggcaacccatctggtgaaggctttactagtggcgtaactaacaacggtcgtgacgcactgcgtcaaaacggcgacggcgtcggcggttctatcacttatgattacgaaggtttcggtatcggtggtgcgatctccagctccaaacgtactgatgctcagaacaccgctgcttacatcggtaacggcgaccgtgctgaaacctacactggtggtctgaaatacgacgctaacaacatctacctggctgctcagtacacccagacctacaacgcaactcgcgtaggttccctgggttgggcgaacaaagcacagaacttcgaagctgttgctcagtaccagttcgacttcggtctgcgtccgtccctggcttacctgcagtctaaaggtaaaaacctgggtcgtggctacgacgacgaagatatcctgaaatatgttgatgttggtgctacctactacttcaacaaaaacatgtccacctacgttgactacaaaatcaacctgctggacgacaaccagttcactcgtgacgctggcatcaacactgataacatcgtagctctgggtctggtttaccagttctaa

SEQ ID NO: 25866 - DNA, 469 bp, Homo sapiens
  SIMILAR (3)..(314): 1001254mologous to Escherichia coli pdxA,accession number M68521,Smith-Waterman Score=545.
cgctgcgcgatatcgcagacgctatcacccctgcacttttgcacgaagtgattgctattttgcatcacgatttgcggaccaaatttggtattgccgaaccgcgcattctggtctgcgggctgaatccgcacgcgggcgaaggcggtcatatgggtacggaagagatagacaccattattccggtgctcaatgagctgcgggcgcaggggatgaaactcaacgggccgctgcctgccgataccctgtttcagccgaaatatcttgataacgccgacgccgtgctggcgatgtaccacgatcagggtcttcccgtgcacggcaccgcgcttgaactggcgggacgtggcaaagccgatgtcggcagttttattacggcgcttaatctcgccatcaaaatgattgttaacacccaatgaataatcgagtccaccagggccacttagcccgtaaacgcttcgggcaaaacttt

SEQ ID NO: 25867 - DNA, 720 bp, Homo sapiens
  SIMILAR (619)..(666): 1001254mologous to Escherichia coli pdxA,accession number M68521,Smith-Waterman Score=83.
atggagcagaataagtttgctgcaccaagatctgtgtccaggaaaggtaaggtgactcacgatgcggttcaggcaagtaggtgctccaaatgcctgcatttctgcctgaaggtgatcatagagggccttgctacaccacaatctcatgggagcatggccacaagtgccagcagctgcagagatggttcccgcttagccagaccccaaatagctgctatatcaccagcattttttcacctccacggaggaagagtggaaaggacaaagagcagtgatgacccctcacaaccatcagtcagaatactgccacttggccccaccaaggtgcaaaggcgtcaaaccacaattttttttaaagctgagcacattgtcttcctgaataagatagaggtttctttgcatgctgttttgggaagatggcagatttttcttacaggcctatctaagggttccaggaaaagggagccatcaactgaaaatcaagttgcattatcatttgagtttgatggcctgaagccgaatatcttgataacgccgacgccgtgctggcgatgtaccacgatcagggcttcccgtgctaaaataccagggcttcgggcgcggtgtgaacattacgcgggcctgccctttattcgcacatcagtggaccacggcaccgcgcttgaatggcggacgtgcaagccgatggtaccagactcgattgtatcctgtatactgtaa

SEQ ID NO: 25868 - DNA, 621 bp, Homo sapiens
  SIMILAR (606)..(298): 1001254mologous to Escherichia coli sn-glycerol-3-phosphate acyltransferase,accession number K00127,Smith-Waterman Score=534.
ttagatggctgtgtgcagttcactctcaccacgacgttcaccagctttcctactgacttcacggacgtttggacacaccacctggttttcggcgtaaatccctgacggggactgatacacggaactgcattgacggaccatgtgggtaaaacggaaactattcttccgactaaatacgcaaatatctacagcattaatactagcaaagacaggtttctcacgaaacctgcgtttgctgaagtcgtgctcttccttcatccacgagagcttcaaacctgttcgtttttcctcagtcagaacatgctggttaaggtaggtcatcaacggcattggttcaccgaagttgacgtaaccctgaccgagattacgcagcttgcttaaaccgcgcagcatctgcggcaggctctctttctctttcgtcgcgccgcgcagttctttggcgtaagtacccacttccatgacgtgctcataaccgatatagatcggaatcagcgtaatcggacgcgtgccgccacgcagcatcgcctgaatggtcatcgacagcgtaccagttttcggatccagcaaacgccccgtacgggaacgaccgccttccacgaagtactcggtgatgttgatcat

SEQ ID NO: 25869 - DNA, 5631 bp, Homo sapiens
  SIMILAR (4590)..(4540): 941254mologous to Escherichia coli hydrogenase-2 large subunit,accession number U09177,Smith-Waterman Score=93.
atgcaaaaagaatatgcttactggatggacgggttgaaaacctgcaagccggacaacaggaaaaacgcgttgtcaaacttcggatggtacccttctcaaccgctactgggacgatcgcgatacgccacgacagagtcatgggtggaagatattgccaccgccaaaagcaatccgaatcgcctgccactgaaatttaccgcgacctgcgctctgccgctgcgtctggctggatttcagctcgcgctggatggacaacccgcagcagttaaataccttagcaccaccagcatcgtaccggtcgatctgaacagcctgatgtttaaaatgaaaaaatcctcgcccgcgccagcaaagctgccggagataacgcgatggaaaccagtacgaaacgctggcaaatgcccgtcaaaaagggatcgaaaaaacctgtggaacgatcaacaaggctggtatgccgattacgacctgaaaagcataaacgcgtcggcacactctgcgtcgggcgatccacacgctccatcgtcataccatcgtactcaatggtgtaccgtcacgctcaacctcgtacagctcacgttttacggtaacgttagtggatcatcagacatcaatgtcaacttacccggcacggcaatcacccgctgcactgacggcaatccaggttcgcgtgaagcggttaatatggacgagcgcaaaatcgactttagcctgatctccacgaacgcgcaccgcgcaacgtcgcttcagttgggttgtatattcctggcggcccgccccgctcttctcaacggtattaatgctggcgactccggcgagtatgcgggctgtaaaaaagtggtgctgtgctcaccgccgccgattgccgatggatcctttatgcggcgcagctgtgcggtgtgcaggacgtgtttaacgtcgcggcgcacaggccattgccgcactggcgtttggtacggaatctgtgccaaagtggacaaaatcttcgggccgggtaacgcctttgtcaccgaagcgaacgtcagatttagcgcagtgcgtgggatctccaaccagtacggcccggagcacctgatcattcagacccgcaaccccgtgaactggtcgatagcatcaccagcgccggttcggtatttcttgggactggtcaccggaatcggcagcgtttcgtttcacttcctgaccaccgaaaatcaatacttctttgtggcccttcagcattatactgcgctggtggtcacctgccccatggtgttctgcatgtttttactgtgttgcgaaaacgcttcgatacaacgcgaatcgcaatcgaaacaatcgggccagcacaatcaaaatgatcgacagttgccaactgtaatagaacatcagatgaacaggccgatgatcgacgcaccttcacgcacaacagtaatcagtcgccggaagaagaagaagcaacctgttcggaatcgtagattgaacgtggcaacccgcgacggacatttacagggatggctttatcgaaggataatgaaggatgaaactgccggaaggcgattaaacgccatcggcagcaaatcaaataattacttcgccggaatttctttcagcagttcatcagcagtgtccagtaatgacctacgctttcgatgtgaacttgctcatcggagagcgctgataggtttcacgtaccagtgcatcaccggagaattagcgtccgctgcaagccaggatatggaccgagctcaacattttggaccagtacagcatcagttttccgccactactgctcggaaccggattgccgcaatacccttgatcatcgtacttacgctacgattcaccgtcgctggccattcagcatggcgaaaagcgtccagcgtacatcgagaaccattcatcatcgccacgacgaactaccggaccaagcggttttttgagataacttccggctggaaggcggagatgctatccattagaggccattgtcacccggatgcttttgacgaaagtgaaactgagccggaggatgaagatgtcgatgagccaacacctgaaaatcatgaagaaaaaatgatgaggacgttaaccgtaattgaatcctgttccgggtgctggttgaataagtttctacacgcgacacgggcacagtggtgtttcgttcataatcggcgagaaaatgccggaaacgccctggcggttaacttcaacgccaacgaggattttgttgtaacactgtactggagtcagccatgctcgcgcctgctagctacaccagcggcggttggcgtaccgtatactcataggtccagccattctgacgggcggcgtagtgaaaaccggcactttaaccagtttatccgtggcggcatcgccttcgccacgcctccggtgccagaaatgttcgatgccatttgctggacgctccctgctctggcgaaggcgtggtgcgtaaagatcccgagcgctaaaaaactggtcaccagaaagcaatcaggaaatcgcagctacacacgggagcttatcgacagcgcctttcatgcattacgtcctggtgcgttatgtcccgctggtgcgtcacgaagcattgcgcctcaggttcgactgcccgcgagcgtggaacttgacgatctgctacaggcggcggcattgggttacttaatgccgtcgaacgctatgacgccctacaaggacggcatttacaacttacgcagtgcagcgtatccgtggcgctatgctggagaacttcgcagccgtgactgggtgccgcgcagcccagctcttctcctacgatggtggcgcgaagagcacggcgatagcatcgaactggttactgatgatcatagcgagaaaacccgctacaacaactactggacagtaatctgcgccagcggtgatggaagccatcgaaacgttgccggagcgcgaaaaactggtattaacctctattaccaggaagagctgaatctcaaagagattggcgcggtgctgagttcgcgacggcaaaaagtgaataaaatcgagatttcccgcctggacacgctgcttgatgaaaatgctggcaacggaacaaaaatcatgggcggcattgtgccgattttgcgaagcatcgcgcatggggcgcgactacgacatgacgcagattttcacggtacattagtggaagccgatcctttccacgccgtgacgctcgttgccaatacgacacccaaccgttgcaagccctcgaagcgccggtcgaaccatggttttgacaagccgcagagagcaataaccgccacggaaggaaatgcgagtgatttcaccgtcccggcacaaccgatccgccaaaaagaggcgtaccaatgtcgatatagtccccgcgcggacaatcacttcgtcaatgactgccaacgggagttgttgtactgtgggcgcaacaacatgcccagagctttaccaaagtcctgcccggccccaccagcaggggatgcggattcggaaaacgcgcgacgaaatcgaccaagcgttgatgaccgtcagtaccgcggcgtaacgcacaggcagcgaggcggaagcgccagcacgcccccaccagatccgtttcatcaatcgggatcgcaccggcaaattgcgcagcggcagttgtacgccctcaagccagattgtgcgccagagagcgaaagggtatgcgcgcccgcgccaatcaccgtggcgcgccggtttgcgccggaaactgtacgttcatctcacgcaggcgcggatggtctgcagcgcagttgccagcagcgggccaatatcggcaaaacagaacggggcgacgatcaacgttacgagggcgagaaaatttgccataaccagatgccaccaaactgcgtttgcaaaacagcctgcaaatgtttggcgaaaatacatctgtccatcccgttcccatcaacccgcctgaacggcgagcattgcagtggcactgatcaaactccagacggcagcgtctgttgtaaacgcagaaaacgcttcgccagcaagcgacgaatcgtcaaggggccagccaggcaccgtacattgcgaagccaaaaaccagcatcagcgagtgaaatggataaatcgcagcgcgatccagcatccctacgtgtaccgcacaggccatgcacgggtcaaaggagtgaatggtacgaccacttccagcggtttattcggatcggcaaccggtgtacccaccagcgctgctctgagagagcataccgcgcggcgcttcgaggaagccaacactttgaattcacccgttgccggaatgttcggcttcacaaaggtggtgtgacgcctttggcgatattggtgatcagtgcactgtattggttttgcaggattcctgcaattcacagcagtgaacggaagctgccgtttttactgtcggtcgggaatccggcacgctcaggtagttcaccgcacctttaccgcgtgtcagccattcgggtagaacgcggcaataactgcggtatcaaccttataaacctgctcacaaagtcgctcagtttgtcgatgaaagacttgatgtacatcaggcgctcaggtagtgcgctacgcaatcaggttcacttccggcggcagtttcatcgccggatgaccccagtggatactgggtgccttgtaccctatcccgaaattggatccgctcgaatcattggcaaggccacaaattgtgttgttaaacacctggcgcgagctggctacagcgtgaccgttttgaaatgctgctggtcaccgccgatgaagcctggcatacagccgtccgctggtggattttggtatgcgccagccgattcagtttcaccgcgtatcccagcgcagaaccgtaaacagataggcatcagcaattgtaaatctttgccgcagatcccagtgctcaatccttcagtgcctcgttcacatattgcagttcttctccagctgcgcgcgaactgtcggtttgtactcttccggtgtatagggcgaaacagagcgggaaatactgtttaccggtgccagaactggcggtcggggacgctgtcggcaagatactgcataatcgctacgcttccgtcagcaaagtaccgtcatccagcagcaatgcaggcacctgcccctagggttaacggcaaagtaatcgtcaccgttttcgagacgttttttcataaatccacactgacgaggccgtggtcgcggcctgctaccgttcaagactggagctttcacgcggcaattgcggcgggcgtcccgattattcccgtgtgcgtcttacaacttcgaataagattaatcttaatcgactgcacaacggtctgtgaggtcgaaatgctgccgccaatgacgtcactactacgtttacgatcactttcgcgatacttcgctgtgaacctggaagctcacttcgtgttcgccagtggtacgcgaacgccgttcggcagacgaacttcgctcttagccacttcaacgccagcgcagttacagcgtcagcgatgtcgcgagtaccgatggaaccgaacagttaccttcgtcgccagctttagacgcgatggtaacagtttccagtgcattgttttctcagcgcgagcattagcagctgccagaacttcagccagtttagctccagttcagcgcgacgagcttcgaagaattcaatgtttttcttggtag

SEQ ID NO: 25870 - DNA, 1857 bp, Homo sapiens
  SIMILAR (1213)..(1548): 441254mologous to Escherichia coli CHAPERONE PROTEIN PMFD PRECURSOR,accession number D90864,Smith-Waterman Score=201.
atgtggtggaacgctggcgcgagcgtgcgatggttgtctgaacggcgaatttgccgcgcgatcacaggtccggtgcataaaggcgttattaacgacgctggcattcctttaccggtcataccgagtttttcgaagagcgttcgcaggcgaaaaaggtgtgatgatgctggcgaccgaagaacttcgcgtggcgctggcaacgacgctttaccgctgcgcgatatcgcagacgctatcacccctgcacttttgcacaaccgaaatatcttgataacgccgacgccgtgctggcgatgtacccgatcagggtcttcccgtgctaaaataccagggcttcgggcgcggtgtgacattacgctgggcctgccctttattcgcacatcagtgggacacgggcagcccttgaactggcgggacgtggccaaccgatgttggcagttttatacgcccttattctgccatcaaatgattgtaaaaccaatgcataatcgaatccccagggcaacttatcgcggggcagtaaaatccgccattggtttaggctgctgctgtctgaaggcatcggcgacacgctgcgcgtatcgctggcggcgatccggtcgaagagatcaaagtcggtttcgatattttgaaatcgctggtatccgttcgcgagggatcaacttcatcgcctgcccgacctgttcgcgcaggaatttgatgttatcggtacggttaacgcgctggagcaacgcctggagatatcatcactccgatggacgtttcgattatcggctgcgtggtgaatgcccaggtgaggcgctggtttctacactcggcgtcaccggcggcaacaaaaaagcggcctctatgaagatgggtgcgcaaagaccgtctggacaacaagatatgatcgaccagctggaagcacgcattcgtgcgaaagccagtcagcggacgaagcgcgtcgaattgacgttcagcaggttgaaaaataataacgtggaaaagcaggatacggcgttattcgcgctgtaccagcgaagattgcgctgcgtaagaaaagtcaggcgctacgtcatggcggctgtcagtgctggatgcggcggcggtgtttgtgccgtcagtgcttacatgccgctcaacagattgcccaacgcgcaggaggccaacaatgaatacaccagcttcgaaaactgcattaagtgcaccgtctgcaccaccgcctgccgcgtgacgctgcgtaataacgatccgaaactcccttatctggtcaaagctggattgaagatgaaaagggtaacaagatcacctcgccgttactgtgctgccgccagtgcaacgcatcgattcaatgatgaacgggcaggtaaagtgcagggaatgccggatatcaacaaattgccagccgatcgtgaaacatgttctactttaacgtgcgcgagatcccgccaaaatcaaacaaacccataccctgcaaatcgcgctgcaaacgcgtatcaagttgttctggcgaccaaggcgctggaaaaggtcagtatgaaaagtccgtggcagcacaaggtgagctcacccgcagcggtcaggcatttaccgtcaataacccaacgccgtacacgtgattatcagcaacgccagtgcgcagaaaaacggatgccgctgttcttccagtgcaatggcaacagctgccaggtggatgagagcagagccgcaaagctgaatgacggggggagttatgagtcaaaagttgtagtgggcgcaggctgctggttacaactttatgctgggcagcgagaaattcctcttaccaactggaacgagtacgagtttgaccgtgacgctacctatgcgcgggtaatggcggtaaagaagggctga

SEQ ID NO: 25871 - DNA, 2088 bp, Homo sapiens
  SIMILAR (1168)..(1734): 821254mologous to Escherichia coli K12 putative cellulose synthase,accession number AE000430,Smith-Waterman Score=784.
atgggcattgtggcatctgcatctgtacaggctgcagaaatatataataaagacggtaataaactggatgtctatggcaaagttaaagccatgcattatatgagtgataacgccagtaaagatggcgaccagagttatatccgttttggtttcaaaggcgaaacacaaattaacgatcaactgactggttatggtcgttgggaagcagagtttgccgcctggaccgatatgttcccggaatttggtggcgattcctcggcgcagaccgacaactttatgaccaaacgcgccagcggtctggcgacgtatcggaaaacgacttcttcggcgtatcgatggcctgaacttaacctgcaatatcacagatgcacatctgcggcgcgcgccatgctgctctccgggcgaccggtgatgcagattaacgagaggacagcagtgcgccgacagatgactgtgtatctgcgcgtagagcggatccacgagatagatccgttagtatctttgtcacacagcatgagtgtgatccccatagatgtggagcggccaatcgccgccgccccctgcacccccgggctctggcgaacaaaaacgccgctgcgcgtgccctcgacttatcccttacggctaccgggtcgggcgcgagtagtgtgtcatcgcacatttcgacttcatctttgcaaggactgggttttcatgttttctgggctgttaatcattctggttccactgattgtgggttacctcattccgcttcgccaacaagctgcgttaaaagttattaatcagctattaagctggatggtttaccttattctcttttttatgggtatcagtctggcgtttctcgataaccctcggccatatcttgccgacagcgtccccgaccgccagttgctggcaccggtaaacagtatttcccgctataaaaccatcgaatggctgaattacatcgccaccgagctgcataaaggtttcacacctctgtttcgccctgatacaccggaagagtacaaaccgacagttcgcgcgcactcggagaagaagctgcaatatgtgaacgaggcactgaaggatgagcactggatctgcgggcaaagatttacaattgctgatgcctatctgtttacggttctgcgctgggcatacgcggtgaaactgaatctggaagggttagagcacattgcagcatttatgcaacgtatggctgaacgtccggaagtacaagacgcgctgtcagcggaaggcttaaaaggatcccgtcatttgagtgccggggcgcggcggttgatcctcggtatcatcgtcaccttctcgctgattctggcgttaatctgcgttactcagccgtttaacccgctggcgcagtttatcttcctgatgctgctgtggggggtagcgctgatcgtacggcggatgccggggcgcttctcggcgctaatgttgattgtgctgtcgctgaccgtttcttgccgttatatctggtggcgttacacctctacgctgaactgggacgatccggtcagcctggtgtgcgggcttattctgctcttcgctgaaacgtacgcgtggattgtgctggtgctcggctacttccaggtagtatggccgctgaatcgtcagccggtgccattgccgaaagatatgtcgctgtggccgtcggtggatatctttgtcccgacttacaacgaagatctcaacgtgacgccagatgaactgaaacaagtactggacgttgccgcagcattaaaagcactgcgtgctgaaaacatctcaaccaaagtctttaatagtggattaggtatttccgtattccgcgacaactccacccgtacccgcttctcttatgcttccgcgcttaacctgctcggccttgcacaacaagatctcgacgaaggcaaatcacaaatcgctcacggcgaaaccgtgcgtgaaaccgccaatatgatctccttctgcgccgacgctattggtattcgcgacgatatgtatctgggcgcaggcaacgcctatatgcgtgaagttggcgctgcacttgatgacggttacaagcaggcgtccggctttagtgaacctgcaatgcgatattga

SEQ ID NO: 25872 - DNA, 3024 bp, Homo sapiens; identical to SEQ ID NO: 24866
  SIMILAR (534)..(4): 1001254mologous to Escherichia coli calcium/proton antiporter,accession number L28709,Smith-Waterman Score=890.

SEQ ID NO: 25873 - DNA, 1443 bp, Homo sapiens
  SIMILAR (819)..(325): 1001254mologous to Escherichia coli PnuC protein ,accession number D90714,Smith-Waterman Score=846.
ttattcccgccagaatacaatcggcaatgtcggacacaggagacccaatgctccggacactggtgtcgcttcagattctgcgtagcgcgtggcgactgtagaaagatagcgtgaatgaataacttgaaggtgcaccggtatcgctggaaatcgctgaacctgaagcctcgtatgggccgggaaatcccggaagtccgcaatgtgcaccaggtacatgcatggatggtaggcgagaagccggtgaagacgttgcatgtgcaggtgatcccgccacacgatcacgatgccttgttggatcagatccaacactacctgatggatcagtgcgctgttgatccacatccggctgccgttgagcgcaataaaggtcaggatgatgtactccagagacatggcgtaaacgccctgaagtgcaaaaataacgacgctaatcacgttaataatcacccacaacagccagttttccacatacttacgcgtcatcagaatcattgccacgatagataacaccatcatgcatgaatcccagaacgggaaagcgtccggttgcagttcaggcatcacaacctgtaatcctaatgcttgcatgatcatgactgccacgcgggtcaaaaatgcaaacaccggattgataaataccgtcatcagaccaatcgaaacaacgcaaaccgccaaccagctgagtgccttcggcaatggcaaccagcgaattttcaactccgcctcgttctgactggtttgtcgcgaccacgcataccaaccgtaaatattcgcggcaaagaaaaacacctgtaatagcaggctggcatacagctgaatgccagtttctgggtggtcgtcacacagattgtcatccttgacgccgtcttctcgttggatgcggtaattactgcagtagggatggttaaccatctgccggtgatgatggcggcggtagtgattgcgatggcggttatgttgctggcatccaaaccgctgacgcgattcgttaaccagcaccccacggtggtggtgctctgtctgagcttcctgtatgccgcgattggcttctcgatcatcatcgaagtgtttaaccagattgcgcgtcgcaactttattcgccaccagtcgactttgccgctgcgagcgcgtactgccgatgccatcctgcgtttgatgggcgggaaacgtcaggccaatgttcagcacgatgccgataacccgatgccgatgccgatcccggaaggtgcatttgccgaagaagaacgttacatgattaacggcgtactgacgctggcgtcgcgttctagtctgttcccggtatgtcgcggtgaactggatgaaatcatcggtattgtacgtgctaaagaactgctggtggcgagtcacatctgtaaggctagtctgctgcagtctactcgtggctatgtctgctgatgcttgtgcttgatgcagttggcccat

SEQ ID NO: 25874 - DNA, 4120 bp, Homo sapiens
  SIMILAR (4116)..(3142): 921254mologous to Escherichia coli sn-glycerol-3-phosphate acyltransferase,accession number K00127,Smith-Waterman Score=1581.
  misc_feature (1)...(4120): n = a,t,c or g
tcacgcgcaggtcgattttgtcgggtccgggcaaaaaaacggattttgctcgacatgcgaccagtctttgatatccagcggaatgtcgcccatctgggtcaggcagccacggatttcaataccaaatttctcggcgagatattttttggcaatagctcctgccgccacgcgcatggcggtttcgcgggcggaagaacgtccaccgccgcgataatcgcgcagaccgtatttttgttcgtaggtgtaatcggcatggcctggacggaaaacgtccttaatcgcactgtaatcctgagagcgctggtcagtgttttcgatcaacaagccaatgctggtgccggtagtaacgccttcaaaaacaccggagagaattttgacctgatccggctcgcggcgctgggtggtatagcgcgatgtcccagggcgacgacggtcgaggtcatgttgcaggtccgcttccgtcagcggaatgccatcgccgccgttatcaaactccagccaggtgaacggaacatccggatattgttccataagatgtaccatgctgttgccgacttcacaaatcaacacgccatcatcagcaaggtaatctgccgcgttaccgagaatgcgacgcgtcagtttcaggccgtcagtgccagatgccaggcccagttccggctcgtggcggtattcgtttggcaggtcggacatatcttccgcatcgacatacggcgggttagtgacaatcaggtcgtactgcactttcggcaagtcgcggaacagatcggaacgaatcggaatgacgttgtggatcagaccgtgttcttcgatgttctgttcagcaaccgccagcgcgtctggagagatatccaccgcgtcgacttctgcatccgggaaggcataagcacaggcaatggcgatgcagccgcgtttcgcttttttcagctggtcggtcgcgctggcctttgcaaggtcaaggtccttatgtgctcgttctgcggaagcaaggccgtcagcaatttctttttgacgtttttcgatggctgccattaatggcggccatacgtacttcatgcagaacagaacgaacaggacaaacgcgatggctacgcgacagcgaacatcacgtacagacccagacctacagcgatcatcgggatagcatccaccagacccataacgataaagaacggcatacatgttaccgaacagtcgcaaaccgagtgaaactggtttggacagcaggcttaccccttcaaggattaagttgacaggaatgaacgcccagtgattgaacggctgcagcgtcaactctttcgtgaagccgccgatgcctttcattttgatgctgtagaacagaatcaggataaatacgcccagtgccatagacagcgttacgttcacgtccgcagacggaaccacacgcagtgcaggcagacccagtacatgttcagcaatgtacggcagcaggtcgataggcagtaaatccatcaggttcatcaggaatacccagacgaagatcgtcagggccagcggagcaatcagcttgcttttgccatggtacatgtctttcacgctaccattaacaaagccgatcaccagctcaatcgcggtctgaaacttacctggcacaccgctggtcgcctttttggacgctacggaataaaaccaggaacaacagacccagcaccaccgagaagaacatggagtcaatattgattgtccagaaggtggctggggggttttgtggatccaccagacgagaatgtacgcaggtccagaatcacccagtttcgcagcaacctgcggcattgtctggttaagaatgcgtgcgccctgagaaccacccactaccagcacacgaaccggaccttcacgtccagccaaacgttgctgcggcaacggcagcgccaacacatcggtacgcaccgggttacccactacttccgcattagggaaagcacctggaaacgcctgcatcactttggtggcaatcttcgccagccatttattggttaagcccgcaataccgttttgttcatgaagtacaaccggaatgcctaacgaccacgcggccagaccacctggacctgacacgtagcctcccataccgagcaccacgtcaggtttgtacgctttcataatcgcccgcgcctgacgccaggcgttgaagatacgcagcggggcagctatcagtgcttttataccttttccacgcagaccagagatacgaatgaaatcaatttcgatgccatgttttggcactaagtccgcttccatacggtcggcagtccccagccagcgaacttgccaaccaaacgcctgcgctttctccagacgcgtttcataatcaatacgcaacagcatcatgatggctgtcgacataatcagtaagctcgaaccaccgtaactgatcagcggcaatgtcagacctttggtcggtaacatccccgccgccgcgcctacgttaaccagcgcctggaagctaaaccagatgccaatagaacaggcgagaaaaccggaaaaacggtggtcaatttctaatgctttacggccaatcgacatcgcgcgaaaagcgacgaagaataccattaaaagtgccagcaccacaccgacataccccagttcttcgccgataatggcgaaaataaagtcagtgtgcgcttccggcagatactccagtttttgtaccgagttacctaaaccttgcccccaaagttcgccgcgaccaaacgccatcagcgattgcgttaactgatagccgctgccaaagggatcttcccacgggttccagaatgcggtaacacggcggatacggtacggttcggcgagtatcagcaacacaaccgctgaaatgcccataccgataatggcaatgaactgccacaatttcgctcccgccaggaacaacatcgccagcgtagtcacaaacaacaccaccaccgtaccaaggtctggctgtgccagcagtaacactgccaacaccagaatcacgcccatcggtttcaggagccgggtgatatgcaactcatcatcttgcagggtaatcagcccctgacgttgcatctcatttgccagcgcatcaatacgtcccggcaactcgtcgcgatcccagcgcagganacagtcccgtttcagcattgggtaaagcacattgacgtgctccatcaatacgtcgcgggagatgtagcgatgggtagagtccgtggagtagggcacgttgcgcatcagatccaggtagcagttgagttgctcggttaactgctcgcgggtgagtgagcgctgacgtgatgccagtagcgcagtacagcacaggttcatggcgtttgccgcgcctgcgttgttaatgcgtaccatcagatcggcagcaatattattgaccgtcggcgttaaccatgccggacgcaccgcttcgatgggatcgatagattcacgccagtcaggtacatgctggttaaggtaggtcatcaacggcattggttcaccgaagttgacgtaaccctgaccgagattacgcagcttgcttaaaccgcgcagcatctgcggcaggctctctttctctttcgtcgcgccgcgcagttctttggcgtaagtacccacttccatgacgtgctcataaccgatatagatcggaatcagcgtaatcggacgcgtgccgccacgcagcatcgccagttttcggatccagcaaacgcccgtacgggaacgaccgccttccacgaagtactcgacggaataaccacggctgaacagttcgccgagatactcccggaaaacggtggaataaagtttattgcctttaaacgtacggcgaataaagaacgcccccagacggcggaaaatcggcccggcaggccagaaattcaggttgatcccggcggcgatatgcggcggcaccagcccctggtgatacagcacgtaagaaagcagcaggtagtccatgtgactgcggtggcaaggcacatataccagctcatgaccgtcgtgggccagctggcgaacgcgctcagcgttatggacgttgatgccctggtaaagtcggttccaggtgaagcccagaatacactcagtcaggcgaatcatctcgtaagagaaattcgccgcaatctcttccatcagtgcaatcgcgttctgtgcg

SEQ ID NO: 25875 - DNA, 2853 bp, Homo sapiens
  SIMILAR (1856)..(2143): 851254mologous to Escherichia coli pdxA,accession number M68521,Smith-Waterman Score=416.
  misc_feature (1)...(2853): n = a,t,c or g
tcaccgcgtatgcccagcgcagaaccgtaaacagatagcatcagcaattgtaaatctttgcccgcagatccagtgctcatccttcaggcctcgttcacatattgcagcttcttctccagctgcgcgcgaactgtcgtttgtactcttccggtgtatcagggcgaaacagaggtgtgaaacctttagcagctcggtggcgatgtaattcagccattcgatggttttatagcgggaatactgtttaccggtgccagcaactggcggtcggggacgttgcttaaacccgcgcagcatctgcggcaggctctctttctctttcgtgcgccgcgcagttcctttggcgtaagtacccacttccatgacgtgctcaaaccgatatagatcggaatcagcgtaactcggaacggtgccgccacgcacatcgcctgaatggtcatcgacagcgtaccagttttcggatccagcaaagctccgtacgggaacgaccgcctccgggatcggcatcggcatcgggttatcggcatcgtgctgaacattggctgacgtttcccgcccatcaaacgcaggatggcatcggcagtacgcgctgcagcggcaaagtcgactggtggcgaataaagttgcgacgcgcaatctgttaaacacttcgatgatgatcgagaagccaatcgcggcatacaggtaactttcggaatgtggaaaccgaaaccttctctgagctcgttgtggtggtttcggttttttttggtggttgccagggccattgctttgtgttttggactccttaggcttggctgctatagtctgcttatttcgccgtaatgctgttaggcgtgccggatatcttcgtcgagtcaaatcgttccggtgaaatgccgtatcgccgctgtgtaggtcacgcccaggggcatattcgtccctcttatgcgagctgattcccttgattctggggttcacccgttcattgcgccactgtttgacgttatatgagcgnctctgccgcaggaagtcgaatccctggcgcagcaggtgggtaaccaaaacacgccagcactgagctgaacctgagccacatcctgatcccgcgtcgccgatcatgactgacgaacaggcccgtgtgaaactggaacagattgctgctgatatcaagagtggtaaaacgacttttgctgccgcagcgaaagagttctctcaggatccaggctctgctaaccagggcggcgatctcggctgggctacaccagatattttcgatccggccttccgtgacgccctgactcgcctgaacaaaggtcaaatgagtgcaccggttcactcttcattcggctggcatttaatcgaactgctggatacccgtaatgtcgataaaaccgacgctgcgcagaaagatcgtgcataccgcatgctgattaaccgtaagttctcggaagaagcagggggctggatgcaggaacaacgtgccagcgcctacgttaaaatcctgagcaactaatggttaaaacccaacgtgttgtgatcactcccggcgagcccgccgggattggcccggacttagttgtccagcttgcacagcgtgagtggccggtcgaactggttgtttgtgccgatgccactctccttaccaaccgggcagcgatgctcggtttgccgctcaccctccgcccttattcccccaactcccctgcacaaccgcaaactgcgggcacattaacgctacttcctgtcgcgctacgtgcacctgtcactgcggggcagttagcggttgaaaatgggcattatgtggtggaaacgctggcgcgagcgtgcgatggttgtctgaacggcgaatttgccgcgctgatcacaggtccgggggcataaaggcgttattaacgacgctggcattccttttaccggtcataccgagtttttcgaagagcgttcgcaggcgaaaaaggtggtgatgatgctggcgaccgaagaacttcgcgtggggctggcaacgacgcatttaccggtgcgcgatatcgcagacgctatcacccctgcacttttgcacgaagggattgctattttgcatcacgatttgcggaccaaatttggtattggcgaaccgcgcattctggtctgggggcctgaatccgcacgcgggcgaagggcgggcctatgggtacggaagagatagacaccattattccggtgctcaatgagctgcgggcgcaggggatgaaactcaacgggccgctgcctgccgataccctgtttcagccgaaatatcttgataacgccgacgccgtgcggccgatgtaccacgatcagggtcttcccgtgctaaaataccagggcttcgggcgcggtgtgaacattacgctgggcctgccctttattcgcacatcagtggaccgcggcaccgcgcttgaactggcgggacgtggcaaaagccgatgtcggcagttttattacggcgcttaatctcgccatcaaaatgattgttaacacccaatgaataatcgagtccaccagggccacttagcccgtaaacgcttcgggcaaaactttctcaacgatcagttcgtgatcgacagtattgtgtctgccattaacccgcaaaagggccaggcgatggtcgaaatcgggcccggtctgggcggcattgaccgaaccggtcggcgaacgtctggaccagctgacggtcatcgaacttggaccgcgatctggcggcacgtctgcaacgcatccattcggtagggatcactgaagccatgtcccgactgtgccttctgtgtcgcgacacaagggtggtcatccactggtagtggccgaaagcacggctttgagaatagcgatgggcacagatgctgtgtaccggatgcg

SEQ ID NO: 25876 - DNA, 3432 bp, Homo sapiens
  SIMILAR (928)..(1959): 901254mologous to synthetic construct alkaline phosphatase,accession number A05517,Smith-Waterman Score=1592.
atgcgtttaatccgcatttctacaaccatcatcattcataaaagccgctgcgcggcttttttacgggaaaaatctatgtccgtttacaccactgcccaactgctggcggtcaatgagaagaaattcaaattcgatccgcttttcctgcgtatctttttccgcgaaacctatcccttcagtacagagaaggtttacctgtcgcaaattcctggcctggtcaatatggcgctttacgtctcgccgattgtctccggcaaagtgatccgctcccgtggcggcagcacgtctgaattcacgccgggttatgtgaagccgaaacacgaagttaacccactgatgactctccgccgcctgccggatgaggatccgcagaatctctctgacccggtctatcgccgtcgccgcattatccttcagaacatgaaggatgaagagctggcgattgctcaggtcgaagagaaacaggctgtttcggcggtgctcagcggtaaatacaccatgaccggggaagcgttcgagcctgttgaagtcgatatgggccgcagcgctggtaacaacattgtccaggccggtggggcggcagggtcaacccgcgacaaagaaacgtatgacccgaccgatgacattgaagcatacgcgctcaacgctagcggtgtggtcaacatcattgtgttcgatccgaaaggctgggcgctgttccgttccttcaaggctgttgagaagaagctggatacgcgtcgtggttctaactctgagctggaaactgccgtgaaagacctgggtatggctgtttcatacaaggggatgtttggcgatgtggcaatcgtggtgtactccggccagtacgtcgaaaacgacgtcaacaaagaattatctgccggacctgacaatggtgctggggaataccaggctcgtggcctgcgtacctatgtctgcattcgtgatgctgatgcccagcgcgaaggtatcatgctcgacacgctacccgcatactggggcgtcggcgatccgcgcgcgatccaccatagtatttctgcacccggcggtgctccccgtttaacgggtgatcagactgccgctctgcgtgattctctaagcgataaacctgcaaaaaatattattttgctgattggcgatgggatgggggactcggaaattactgccgcacgtaattatgccgaaggtgcgggcggcttttttaaaggtatagatgccttaccgcttaccgggcaatacactcactatgcgctgaataaaaaaaccggcaaaccggactacgtcaccgactcggctgcatcagcaaccgcctggtcaaccggtgtcaaaacctataacggcgcgctgggcgtcgatattcacgaaaaagatcacccaacgattctggaaatggcaaaagccgcaggtctggcgaccggtaacgtttctaccgcagagttgcaggatgccacgcccgctgcgctggtggcacatgtgacctcgcgcaaatgctacggtccgagcgcgaccagtgaaaaatgtccgggtaacgctctggaaaaaggcggaaaaggatcgattaccgaacagctgcttaacgctcgtgccgacgttacgcttggcggcggcgcaaaaacctttgctgaaacggcaaccgctggtgaatggcagggaaaaacgctgcgtgaacaggcacaggcgcgtggttatcagttggtgagcgatgctgcctcactgaattcggtgacggaagcgaatcagcaaaaacccctgcttggcctgtttgctgacggcaatatgccagtgcgctggctaggaccgaaagcaacgtaccatggcaatatcgataagcccgcagtcacctgtacgccaaatccgcaacgtaatgacagtgtaccaaccctggcgcagatgaccgacaaagccattgaattgttgagtaaaaatgagaaaggctttttcctgcaagttgaagggggatcctctagagtgacctcagcagagacaacccccgggaaaccccgggaggaaaaaggggggaacctcaacaaaggggcccttccgggccaaattagacagacgggggatgggcacacaacagacaagggtaatgacgaaggagcccagctccggggcgagtatatgaccgcctttgaagatgagcacggcacttacatcatgaactcgaaagatctgcgcgccatcgcccatgtagaacgcctgaccaaaatgggcgtgcattcgatgaaaatcgaaggtcgtaccaaatctttctactattgtgcacgcaccgcacaggtttaccgcaaagctatcgatgacgccgctgcgggaaaaccgttcgataccagcctgctggaaactctggaaggtctggcgcatcgtggctataccgaaggtttcctgcgtcgtcatactcacgacgattatcagaactacgaatacggttattcagtttctgaccgccagcagttagttggtgagttaaccggtgagcgcaagggggacctcgcggcggtagcggtgaaaaataaattctccgttggcgacagccttgagctgatgacgccgcaaggcaacattaattttacccttgagcacatggaaaacgccaaaggcgaagctatgccgatagcaccaggcgatggttatactgtgtggctcccggtcccgcaggatcttgagctcaattacgcgctgctgatgcgtaatttctccggggaaaccacgcgtaatccccacgatgcaatgaagattattacttgctataagtgcgtgcctgatgaacaggatattgcggtcaataatgctgatggttcattagacttcagcaaagccgatgccaaaataagccaatacgatctcaacgctattgaagcggcttgccagctaaagcaacaggcagcagaggcgcaggtgacagccttaagtgtgggcggtaaagccctgaccaacgccaaagggcgtaaagatgtgctatcgcgcggcccggatgaactgattgtggtgattgatgaccagttcgagcaggcactgccgcaacaaacggcgagcgcactggctgcagccgcccagaaagcaggctttgatctgatcctctgtggcgatggttcttccgacctttatgcccagcaggttggtctgctggtgggcgaaatcctcaatattccggcagttaacggcgtcagcaaaattatctccctgacggcagataccctcaccgttgagcgcgaactggaagatgaaaccgaaaccttaagcattccgctgcctgcggttgttgctgtttccactgatatcaactccccacaaattccttcgatgaaagccattctcggcgcggcgaaaaagcccgtccaggtatggtcggcggcggatattggttttaacgcagagcagcctgtcagaacaacagttgccgcgccgaaacagcgcgaacgtcagcgcatgtggtag

SEQ ID NO: 25877 - DNA, 2537 bp, Homo sapiens
  SIMILAR (1737)..(1874): 841254mologous to Escherichia coli fixB,accession number X71977,Smith-Waterman Score=189.
atgtccacacgaaagccaaacaagacaacacgaatgtgcatgcagctgccctgcctgtttaaggtcgacctctacgacggactcccccctttctacgttttgcgcctaaccctattggggtacggttacttctatttgatgcacacatttctaccgctcctacgggtcacacactgggtgactaccactactgctgtgactacgacactctctggacgcgacttacacacgacgacacacacgatccactggttggcgccagtctggaattggcgaaatgggcgccttggatggcgggtattatttctacccgttaacggcttcttgttgccgggtattatcaacgaccggcattattggttggcagctcttcaagttaccaaattcttggctacttggattggcccggcattaagtttaaaggcccaaggcccccggaacagccccggccgaaaacaaccccggtctggaacggcggcccccttggaactgggggctattggtcctatgcttcccccggggcaattcccggatttttacacggaaccaaagccttggttggaaccggtccttcccgtggggaaaccttggccattggttgtcccacgaagcggtttctccaacgccgatggccggaggccactatttgtgggccgttatccccgtggggttccaataggagatccaaccccccaggaaaacaccggcacttcggcgtggaaaaacggtcactccaaccaccacccaccaacacacaacacccacctgccagcatgcaaagttgcccatgcattgtttatgtctgactctcaacaggcatcccaccctcctcagctgtcactcatctgccagtggcacaagtccagccgtcgtgcccaaacagcctaccgtgtgcatctgtgcacattgcagtgcagtgccttgccttgccagcacagtgttagctataatctacacttcaacacagtgtgcatatctacccccatgggactgcgacacactgtgttcccatatcaccactcccctcgtacctaccagcccctcaggccgcggcccgtcgccatgggcgactggcccggtaggcccacccatccacaaccggaatgtgctaggcctgcgcctgcagaccccgacggacgagctggtggagcactcaccgtcgaggcatcctgttgtgtttccactgatatcaactccccacaaattccttcgatgaaagccatttcggcgcggcgaacaagcccgtccaggtatggtcggcggcggatatgggtcaaacgcagaggcagcctggtcagaacaacaggttgccgcgccgaaacgcgcgaacgtcagcgcatcgtgattgaaggcgacgtggaagaacagatcccgcatttgctgaaaatcttcgcaaagtcatttaattacagggatgctagaacacgttttcgtcaagtctggcgataccccttctcgtctccggaactgatgaacggtgcgcaggctttagctaatcaaatcaacaccttgtcctcaatgatgccgacggcgcacaggcaatccagctcggcgctaatatgtctggaaattaaacggcaaaccggacgatcggatgatcgaagattagccggtgtcatggctgacactattcgccagcacggcgcagacggcctgggctgctgccaaacacccgtcgcggcaaattactggcggcaaaactggccagacgcgtcacgcactggcgaaacgcacacgtggagtggcaggctccggctgtggcgattacccgcacggcaacccaggcgcgccagagcaacagcgtcgatctcgacaaagcccgtctggtggtcagcgtcggtcgcggtattactgatagccaaactctgagactatattacattcgactcccgccgagcttaatgggaatgcgcctgacggtatttcttctaccaatttgtgggttccaccgcgttggtcccccaacactgctatccgtattagcaacgaaccgaaaccgtaacgccaaggttttcgcacataaaaatgcccctaagtttagatcgcacacggcaagcgaacaatggaaatcaagtatcgcccacaacaagggcgtgcacccaagagtcacaagccacacgcacgcaaggcattcactcatggagacagatatcccccacaacatacattcagggcacgcctctccagcggacattacccgccacagggcccaagttttcaacagtgtcccaaaaatggcgtcaccaatcggggatagggtcccaacgttacacacacaacacaattccccagccaacacaggcaaggcccagtcgttgctgacttgtggccctgctgctgagtcttgttgccggctgattccccggcagatggtatccctagtatttcgattgaaagcccgactcctcctgataactactgaattgcccaaagggttggtgcccgttgccacgattagcggtactggaaattttggaaacacacagtctgcaaacccgtaccgaccctcggaaaacacggacctatccctttcctaa

SEQ ID NO: 25878 - DNA, 1293 bp, Homo sapiens; identical to SEQ ID NO: 24362
  SIMILAR (1050)..(535): 991254mologous to Escherichia coli cyclopropane fatty acid synthase,accession number M98330,Smith-Waterman Score=922.

SEQ ID NO: 25879 - DNA, 1281 bp, Homo sapiens; identical to SEQ ID NO: 17662
  SIMILAR (922)..(1275): 941254mologous to Escherichia coli similar to,accession number D90883,Smith-Waterman Score=565.

SEQ ID NO: 25880 - DNA, 1835 bp, Homo sapiens
  SIMILAR (783)..(941): 981254mologous to Escherichia coli K12 putative GTP-binding protein,accession number AE000219,Smith-Waterman Score=264.
atgcagtggttcctcaaagtccgggagctggaaggttttcccggcaacggattctttgcttggccacaggaatgtttccgccgaaaaagggcgggaaaacatgtggcccctttttctgggaccgttgacgaatctgtagatgccacccgttgtcaggataaaggcggctgccagtgcggcgataaatgcctgacccacgcgctgtggcgtgatttgagcgaccgtctcaccggttttctcaacaacattactttaggcgaactggttaataaccaggaagtgctggatgtgtctggtcgtcagcatactcacgacgcgccacgcacccgcacacaagacgcgatcgacgctgaagaagcggtagatatcgcccgtaatcagattgccgatctggtcggcgctgatccgcgtgaaatcgtctttacctctggtgcaaccgaatctgacaacctggcgatcaaaggtgcagccaacttttatcagaaaaaaggcaagcacatcatcaccagcaaaaccgaacacaaagcgcgtaacggcattatcgaactgaaagacttgaagcagcgatgcgtaagaaacatctcgtgtccatcatgccgtaaatacgaaatcgggtgtgcagatatgaggtatgggaaatgtcgtgtcgggattatatacgtgatgaccagaggtgagagagaaacacgaacacatgcgaagtggtaccgaatcgtaaacgagcgtacgcttcccacgacatggaattgtcgatatcgccggtcggtaaaggcgcatcgaaaggcgaagttaacccggctgacgatattgaagttatcaacaccgaactggcgctggcagacctcgacacctgcgaacgtgcgattcatcgcgtacagaagaaagccaaaggtggcgataaagacgcgaaagctgagctggcggtcctggaaaaatgcctggccccagttggaaaatgcaggtatgctgcgcgcgctggatttaagcgctgaagagaaagcggctattcgttacctgagcttcctgacgctgaaaccaacaatgtacatcgccaacgtcaacgaagacggttttgaaaacaacccatatcttgaccaggtgcgtgaaatcgcggcgaaagaaggttctgttgtggttccggtttgtgctgctgttgaagcagacattgccgaactggacgacgaagaacgtgacgagtttatgcaggagcttgggctggaagagccgggcctgaaccgtgtgatccgtgccggttataaactgctgaacctgcaaacttacttcaccgctggggtgaaagaagtgcgtgcatggaccattccggttggagcaaccgcgccgcaggcagcgggcaaaatccatactgattttgaaaaaggctttatccgtgcacaaaccatctcgtttgaagatttcatcacttacaaaggtgaacaaggcgcgaaagaagcaggcaaaatgcgtgcagaaggtaaagattacatcgtgaaagatggcgatgtgatgaacttccttttcaacgtctaattaatttattgtctcatgaggtttcgctaaatctcatgaagagcgcaaaagtatataaaatccacgcaattgcgtggatttttcatttcgccgagtcgtaatcattcttgtaccatcatacacttttgtgcttattgcctatagtgaaccgcgagaataattaaagacataagtgttcagatggcggatatgtcattagcagtgatataacgcaaccctttgtatcactacacatcagccacctacgcagttggtcgtaattcatccaccggcgccgagctagatttcgtaatcagcggaggtacgtg

SEQ ID NO: 25881 - DNA, 1605 bp, Homo sapiens
  SIMILAR (1149)..(574): 981254mologous to Escherichia coli K12 putative oxidoreductase,accession number AE000373,Smith-Waterman Score=961.
ctagaggatcccctcgcagccggttaaggcgaggatttgttcggtgcgacggaagctcgcgcccatcacaatggtttcatagtggtgttgcttatagtagtcgtagatattgcgcaccgatttaacgcccggatcttcttccaccacatacgggtccatcggcttgcgtgcctgataccagtcataaatacgcccgacaaacggcgaaatcagaaaaacgcctgcttccgcacaggcccgtgcctgtgcaaaagaaaacagcagcgtcaggttgcagttaataccttctttttccagctcttctgccgcgcgaattccttcccaggtcgaagccagcttgatcagaatgcgtgatttctcaacgccttgttgctgatacaagtccaccagatggcgcgccttctcaatactcttttctttatcaaaagagaggcgtgcatcaacttctgttgacacgcgaccgggtacgattttgaggatttcagcaccgaaattgaccggcagtttgtcacacgctgcgaccacctgttggtcctgggtcttgccattttttttaccccaggcgatagcatcgttaccgccgagcacgaagccgtgccagatggcatggttgtatggaatgcgtttgcagacgtagaaaatcaccccgagcgaataaaccacgccgcctaccgccagtaaggtaacgctgcccgccgcgagcttaactgccatttcataaattaccaccagcgacagccagcccatcgccagataggtcaccagagataaaattttgaatcggtgcgcgatggtcagtttaaacagaatacccagcaatgccaggctccagataacaatcatcaacccgcgcgctaacggagaatccagccccaccagcaaaaacggcgtgtaggttccggcaatcaacaggtaaatagcgcaatggtcaaatttcttcagccacatttttgcccgttgatgaggaatggcgtgatagagcgtcgaagcgaggaacagcaagatcatactgccgccatagaggctgtagctggttatcgctgtggcgctggcattaagatccaccggctgaaccagtagcaacaccagcccaacgataccaaacaccaacccaatgccgtgactgacgctgttggctatttcctctgcggtgagctcctttctgaggcgctctagaggatccccgaaattgaccgtctgagcgatgttgacacgactcccgtcgttgttaacggcgttgttttcgcgctggggtataatggtaacctgacggcgcttgatctgcgcagtggtcagattatgtggaaacgcgaactgggttcggtgaatgatttcatcgtcgacggcaatcgcatctatctggtcgatcaaaatgaccgggtgatggcgttgaccattgatggcggcgttacgctgtggacacaaagcgatctgctgcatcgcctgctgacttctccggtgctgtataatggcaacctggtggtcggtgacagtgaaggttatctgcactggattaacgtcgaagatggtcgtttcgttgcccagcaaaaagttgatagttccggtttccagactgaaccggttgccgctgacggcaaactgcat

SEQ ID NO: 25882 - DNA, 2253 bp, Homo sapiens
  SIMILAR (67)..(573): 981254mologous to Escherichia coli dihydroxy acid,accession number X04890,Smith-Waterman Score=863.
atggacaatcatattgccctggacttcctgctggccagtgagtgtgggagtgtctacgtctacgccaccactcatggtcgtaatatggcgggtgctcgtgcgttgtggcgcgccaccggaatgaccgacgccgatttcggtaagccgattatcgcggttgtgaactcgttcacccaatttgtaccgggtcacgtccatctgcgcgatctcggtaaactggtcgccgaacaaattgaagcggctggcggcgttgccaaagagttcaacaccattgcggtggatgatgggattgccatgggccacggggggatgctttattcactgccatctcgcgaactgatcgctgattccgttgagtatatggtcaacgcccactgcgccgacgccatggtctgcatctctaactgcgacaaaatcaccccggggatgctgatggcttccctgcgcctgaatattccggtgatctttgtttccggcggcccgatggaggccgggaaaaccaaactttccgatcagatcatcaagctcgatctggttgatgcgatgatccagggcgcagacccgaaaattaacattatcaatcacggggaagacgttgcccaaatcgatgctttcgttgcaaaaaccaggctggatcgcgttaaagacaaagattatatcaatgtcaatctcacctacgaacttgataagttaacaaaagggaatcagcaactcggtagtgaagcagcttgccgacaccctgagttagcaaacgatgaagttgctctgcaagaagtgaatgctgcattgttcaaagagtatttaccgttattacaaaaaagtgagccgaccattaaacaaccggtaagatggaagaacgcactcggcgaactaaatgccaatctggatatcagtattgccgacccagccaaatcttcatcatccacaaacaaagatatcaaatcgctcaattttgatgtgaagttaccgcttaatgtcgtcacagaaaccgcaaaacagcttaatttatctgaaggaatggatgcggaaaaagcgcaaaagcaggctgataaacaaatcagcgggatgatgacattaggtcagatgtttcagttaatcacgattgacaacaataccgcctcgctgcagctgcgttatacaccggttttgaaaagtggagtgggtttgctgatgtttttcttgcgtgaaacgggagccttcaacgaaattgacaatggtggtgggatgcaggacctgcaggcgatgaaggactccttctgcagcgccacagcgataaccagctacagcctctatggcggcagtatgatcctgctgttcctcgcttcgacgctctatcacgccattcctcatcaacgggcaaaaatgtggctgaagaaatttgaccattgcgctatttacctgttgattgccggaacctacacgccgtttttgctggtggggctggattctccgttagcgcgcgggttgatgattgttatctggagcctggcattgctgggtattctgtttaaactgaccatcgcgcaccgattcaaaattttatctctggtgacctatctggcgatgggctggctgtcgctggtggtaatttatgaaatggcagttaagctcgcggcgggcagcgttaccttactggcgtgtgtgccagctttctggcgatctatttgtatctacttggagcaatattccagatttgaatgcgccctacgtaaacatttatcactgacggaagagtctctctggcaaaaatgtgaccaaaaacttattgccgcaattccacatattccagaatggcggcaaccattaattgctttgttattacccgaaaaaccagaaattgcacatgaaattgcccagcgtctactggggcaaaaaaaattaccctcgcttgagtggttaaaaatagtggcgactgatgagcacattcttgcctcattagaaaaatatcacgaaccatatgccatttttgatgattactattgtggtgcgatatggtcagccaccgtattacaggagcaaggtgttgcagccctgccccgatttgctccctatgccgcaagtgactactgcgccgatgtgttgcgtcatatcaatcatccgttcgcattgacactgcttatacgtgtagccgggcaaactaaacgctgtcacgatcggatgacgaaagccattgctgcgttcccacatgcagcaatggcggcactgacggaattcttgggcaaaaagaagagaacagttggcgcattatgctaa

SEQ ID NO: 25883 - DNA, 1944 bp, Homo sapiens; identical to SEQ ID NO: 24343
  SIMILAR (1165)..(1941): 921254mologous to Escherichia coli K12 putative frv operon regulatory protein,accession number AE000465,Smith-Waterman Score= 1208.

SEQ ID NO: 25884 - DNA, 1491 bp, Homo sapiens
  SIMILAR (16)..(561): 851254mologous to Salmonella typhimurium putative isomerase,accession number AF220438,Smith-Waterman Score=900.
atggacccatcccgcgtggaagctttcttgattgttaaggacgtcactcacgacaaaaaatggctggatcgcgcgattcgcgtggcttccgtgattatccacgacgtcgccagaaataatcattatcgcgttaacgaacacttcgatacccagtggaatccgctgccggattacaacaaagataacccggcgcatcgcttccgcgcgttcggaggtacaccaggccactggatcgaatggggccgtttaatgctgcacatccatgctgccctggaagcccgttgcgaacaaccaccagcatggctgctagaagatgccaaaggtctgtttaacgccaccgtgcgcgatgcctgggcacccgatggcgcggacgggattgtttataccgttgactgggaaggaaaaccggtggtccgcgaacgtgtacgttggcctatcgtcgaagcaatgggtacggcctacgcgctctacaccgtcactggcgatcgccagtatgaaacctggtatcaaacatggtgggagtactgcattaagtacctgatggactatgaaattggttcactggagcgcaaaccatcatcaataaaaccgatggaagggaatatcatgcgaattggcataccaagagaacggttaaccaatgaaacccgtgttgcagcaacgccaaaaacagtggaacagctgctgaaactgggttttaccgtcgcggtagagagcggcgcgggtcaactggcaagttttgacgataaagcgtttgtgcaagcgggcgctgaaattgtagaagggaatagcgtctggcagtcagagatcattctgaaggtcaatgcgccgttagatgacctgcaggcatgctggctcccgcgcgcgtttcgggtctttcataaacccggcatcgcttttcagcgactcaagcgcagcacgtccatagcgaccgctctgctcgagcatgtagatagttacctgaagaatattggcgcgtttgtggtggtcactcgttcgccgttgacgcgctttaaaaatatgagcgatggcatcaatgacctggtgaccgagctaagcgggaataaaccgcttgagagcgcgcgtcaggtgttcccactgacggggcgttatgcgcgccagtttgccctcgcaccgtctggcgctggtggcgacgccgcacataccattcacccgctggcggggcagggggtaaatctcggctttatggatgctgcagagctgattgccgaactgaaacggttgcatcgtcaggggaaagacatcgggcagtacatttatctgcgtcgctatgagcgtagccgcaagcacagtgcggcgttgatgctggctggtatgcagggattccgcgatctgttttccggtaccaatccggcgaaaaaactgctgcgtgatattggtttgaaactggccgacacgcttcctggcgttaagccgcaacttatccgccaggcaatgggattaaacgatttgcctgaatggctgcgttaa

SEQ ID NO: 25885 - DNA, 1919 bp, Homo sapiens
  SIMILAR (1005)..(343): 941254mologous to Escherichia coli K12 putative flagellin structural protein,accession number AE000144,Smith-Waterman Score= 1100.
atgaacaaagcgcactttgttagcaatctcggggcaactaaatgttgccccctttcgtttttaccctaccgctggcgtcgggtcatcgcctttgtagtcgcgttttacttccgtcacctcatcgaccttctcgttgtgcagatgcacttcaagctggttaaaggcaatgttgatgtcgttttcacggcacagctgatcgatagtacggttcagctcatcgacagtacgactacggtcacgcagttcacgcacatacagacgcagctcatgatccaacgtgctggcaccaaatgccgtaaagaagacttccggcattgtgtaggtatcctagaacctgaatggtacccgattatcgttgttagagtcgtcgtagacgtaagccagtttgaagtacggagtcagagcctgatcttcgctgtaggtgaaggtataacctgcatctacacccagttcataacgcatgctgtcgtaagactgaccgtcaactttcatgtcgttgctcagctgtcatcaccagactggaacagaccagaaacgctgcccgtaaggagtcacgtaaccagcatcacccagtttgaagtcgtaaccggctttcaaaccgaagccccaagcgtcggagttggtgctaccgtcaacgtaagtaccgttgctcatggttgcagacaggtcgttgttgaagtgagagtagctcaagctaccatcaacaaagacgttgttcgcgaagtgagcagaagagtagatgtaggcagtctggctgtcttgatccacctgaccagaacggtcattcatgtcacctttagcgaagcctgcagccgcaccgacgatccacttagcgttgttaccgtcaattttggtatcaacaccgaccatgatgccgttaacatcctgatcatagttgatggtgccgttgtcgccgttgaagttaccaccgaagtagcttacccatgcgccgccgttatcagccaggccatgacgagagttggtcagacgagtaccaacggtgtctggacgatatcgtcagtgaatgcatttcagataagaacaggggcagcgagatcactggcccccccctggtcattaaccgagaaggtcttttgcggaacgacgatggaacgcatgcgggctgctttagaggcgatcatgccatttaccgaatcttccagcgctacgcaggcaccttacttaccctgtggccgggaatgcggcttggctgtaaggcagtttttcggccgaggcgagggcatcgaaactgtcgcgtacctatttcgaataattcgggtcgtcagaacaagagttctctccatcggcggtttctccaggactcgaatttcatcaacgccagtgaaaatagcgactcttcgccaaaacagatcggattgtcacgctgccatgattgctgacacatatcgtcaagtgaccccaacagacccattttcccggcacccattttcacgtgtcttgcgtggtcttttctttatcatctttaaagatacgaaagcgcacaacggcatcggcatgatcggcggcgtcaaccgccgcgccgattatttgaatctgctggaaaaagtatttggcgatcgtgtttccagcccgcaatggcaggctacgttgaaagcgatcgttccgtcttatggacgcaagctgaacggtgatgtagcggcaacagaacgcgagttgcagtacaccagcgaagtggtggggttgaactacgacaagccgcaggcagcagataacaaccggcagcacaaagtccgcgcggcgcgttctcgacgccaaaaccgaccagatcgcgggtcccaaattgcagattcaactgctggcgcgcggtgtcgatttcaaactcccacagcgggcgacggcgcaggccgcgacggcctttcaaatttaaaccgggaccaactttgtccaaggccacagaa

SEQ ID NO: 25886 - DNA, 3222 bp, Homo sapiens
  SIMILAR (1)..(774): 901254mologous to Escherichia coli ATP-dependent helicase HrpA homolog,accession number D90780,Smith-Waterman Score=1183.
atggagctggggcgcgggattaaaggactgatcggccatacccagccgcgtcgtctggcggcaagaacagtggcgaaccgtattgcggaagagctgaaaacggagccgggcggttgcatcggttacaaagtgcgtttcagcgatcacgtaagtgataacacgatggtcaagctgatgaccgacggtatcctgctggcggagatccagcaagaccgcctgctgatgcagtacgacactatcattattgacgaagcgcacgaacgcagcctgaatatcgattttttgctcggctatttgaaagagttgctgccgcggcgtcctgacctaaaaatcattatcacttccgcgactatcgacccggaacgcttttcgcgccactttaataatgcgccgattattgaagtctccggtcggacctatccggtggaagtgcgctatcgcccgattgttgaagaagccgatgacaccgagcgcgatcagttgcaggcgatttttgacgccgtagacgaactgagtcaggaaagccatggcgacattctgatctttatgagcggcgagcgggaaatccgcgataccgccgatgcgctgaacaagctgaacttacgccataccgaaatcttgccgctttatgcgcggctttcgaacagcgaacaaaatagggtattccagtcgcacagcggacggcgcagtcagatattactggcgggaaatctggcgcaggcccgaatgatgatcgagcgttttaagccggggctaatcttgctcgataactatcttcctgacggtagagggattaatttactgcatgaactggtgcaggcgcattatcccggcgacgtggtgtttaccactgcagccagcgatatggaaacggtgtctgaagccgtacgttgtggtgtatttgattatctcattaagcccattgcctatgaacggctggggcaaacgctaacccgtttccgccagcgtaaacatatgctggaaagtattgatagcgccagccagaagcaaattgactgcagatgtttaatcggaaaaactttccaaagggccggccccataaagctgctgacggcgtactgcgtggtgcttccggtggtcactgcgataccgcgattgcctctgcgctttccatcatcgtcggcgccgctggtacgcggtcgtattccgactctggtggataacgtactgacctgcatcaccccaggctccagtgtcgatattctggtcacagaccacggtatcgcagtaacccggcacgtccggtaccgagatcgattgtatcatgtcatatccactggttgcgccgctgttggccataatcatcgccaggatagcggcaatgataagaataatgcctcccgaggcatcactgctaaagaatcgatgcagatgtttcactttttatttctctttcagagatcccctttcgcggctatgcataaagagctgattgttgccagttcctactctaaaaactttggcctgtacaacgagcgtgttggcgcttgtactctggttgctgccgacagtgaaaccgttgatcgcgcattcagccaaatgaaagcggcgattcgcgctaactactctaacccaccatcacacggcgcttctgttgttgccaccatcctgagcaacgatgcgttacgtgcgatttgggaacaagagctgactgatatgcgccagcgtattcagcgtatgcgtcagttgttcgtcaatacgctgcatgaaaaaggcgcaaaccgcgacttcagctttatcatcaaacagaacggcatgttctccttcagtggcctgacaaaagaacaagtgctgcgtctgcgcgaagagtttggcgtatatgcggttgcttctggtcgcgtaaatgtggccgggatgacaccagataacatggctccgctgtgcgaagcgattgtggcagtgctcccgcaatggcaggctacgttgaaagcgatcgttccgtcttatggacgcaagctgaacggtgatgtagcggcaacagaacgcgagttgcagtacaccagcgaagtgctggggttgaactacgacaagccgcaggcagcagatagtacgccgaaaccgcagttgaaaccgcaacccgttcaaaaagaagtggcggatattgcgttgtaatgatacgccacatccggcatggtatgccggatgtggcgtatgggggtggagcacttcacagcggtgtaggcctgataagacgcgccagcgtcgcatcaggcaaccggctcggacgttggatgtcggatgcggcgtaaccgccttatccaaccacacaaaactagaatgtgactttctggtgacacggaacaccgaagattcttcacatttgaaacctaaagtctgtgccagtctatatccggtggctttgattccctccttcttatttgcatagtggttatgcgaccatgtggttgctgctctcttccggtcagccaggatttcactttccagccggtcgagcatctgcaccagcaccggcgggaacaccacactgccaccgtcttcgccgccggactgctgaagggcatccgccaggctgcggcgctgcgttttcgccagctcaccggtggcagtttcgaccctgatgagtggcgtgaagctccccggctgataaatcgtctggatgcggctcctgtcgttctgtatcgtggtcagccggtcgccgtcccagccgtaccaggtcaatgctccagatctggcatcatcccaagtctgcaataatcccatagggtcaatttgttgtagtggatttaaaggatactgatataaattccatccccctttcaaccccatcgggtcctgagtaatataccgcccctgcaacggatcgtagtaccggtgacggttatagtacagccctgattcctcatcatgctgctgccctggcagacggtacggctgatacacatgatgcgggttctcctcattaagctggttgccccattcatcatattccgcgctccacgccgtattgccgtcttcgctgataagcgccagcggcagtccccggtggtcgcagtgataaagatgagcgcgtgttgtcatatccggcgtccaccgtgtctggccagttgctccaccgtcagcccgcactgcgcaagccacgccccggctcttcacgtggcatccaccgccgcgctcgtgcgccgcgcatttcgttcctccagcctgtacagcagccgcaccagcttcagaccgggtagacat

SEQ ID NO: 25887 - DNA, 2005 bp, Homo sapiens
  SIMILAR (1094)..(1951): 901254mologous to Escherichia coli RNA polymerase beta subunit,accession number U76222,Smith-Waterman Score=1316.
atgattgaaatagaatcacgcgagctggcagatattcccgttcttcatgcttatcctgtcgggcaaaaagataccccgttaccgtgcgtaattttttatcacggctttacttcatccagtctggtgtatagctattttgccgttgcgctggcgcaggctggtttgcgggtgatcatgccggatgcgcccgatcacggtagccgttttagtggtgacgcagcgcggcggttaaatcaattctggcaaatcttgctacaaagtatgcaggaattcactactttacgtgcggcaatagccgaagaaaactggctgcttgatgaccgtctggcagtcggtggcgcgtcgatgggcgcgatgacggcactggggattaccgctcgccaccccacggttactctacagatccttcccattctgacggttaccgtcgcgttgttgaccctggatcgctatctgggcacccatttctttaccaacgatatgggtggcaacatgatgatgtacatcaacctgatttgggcctggggccacccggaagtttacatcctgatcctgcctgttttcggtgtgttctccgaaattgcggcaaccttctcgcgtaaacgtctgtttggttatacctcgctggtatgggcaaccgtctgtatcaccgtgctgtcgttcatcgtttggctgcaccacttctttacgatgggtgcgggcgcgaacgtaaacgccttctttggtatcaccacaatgattatcgccatcccgaccggggtgaagatcttcaactggctgttcaccatgtatcagggccgcatcgtgttccattctgcgatgctgtggaccatcggttttatcgtcaccttctcgggggggcgggatgactggcgtgctgctggccgtaccgggcgcggacttcgttctgcataacagcctgttcctgattgcgcacttccataacgtgatcatcggcggcgtggtcttcggctgcttcgcagggatgacctactggtggcctaaagcgttcggtttcaaactgaacgaaacctggggtaaacgcgcgttctggttctggatcatcggcttcttcgttgcctttatgccactgtttgcgctgggcttcatgggcatgacccgtcgtttgagccagcggattgacccggaggttccacccccatggctgttgaggatcctgacttccgcagcagtgaaagagttcttcggttccagccagctgtctcagtttatggaccagaacaacccgctgtctgagattacgcacaaacgtcgtatctccgcactcggcccaggcggtctgacccgtgaacgtgcaggcttcgaagttcgagacgtacacccgactcactacggtcgcgtctgtccaatcgaaacccctgaaggtccgaacatcggtctgatcaactctctgtccgtgtacgcacagactaacgaatacggcttccttgagactccgtatcgtaaagtgaccgacggtgttgtaactgacgaaattcactacctgtctgctatcgaagaaggcaactacgttatcgcccaggcgaactccaacttggatgaagaaggccacttcgtagaagacctggtaacttgccgtagcaaaggcgaatccagcttgttcagccgcgaccaggttgactacatggacgtatccacccagcaggtggtatccgtcggtgcgtccctgatcccgttcctggaacacgatgacgccaaccgtgcattgatgggtgcgaacatgcaacgtcaggccgttccgactctgcgcgctgataagccgctggttggtactggtatggaacgtgctgttgccgttgactccggtgtaactgcggtagctaaacgtggtggtgtcgttcagtacgtggatgcttcccgtatcgttatcaaagttaacgaagacgagatgtatccgggtgaagcaggtatcgacatctacaacctgaccaattcacccgttctaccagaaccctggtttaccaatgccgggttgtccgggtga

SEQ ID NO: 25888 - DNA, 3549 bp, Homo sapiens
  SIMILAR (1345)..(2805): 441254mologous to Mus musculus MRP5,accession number AB019003,Smith-Waterman Score=1065.
atggtgggtgaaggaccctaccttatctcagatctggaccagcgaggccggcggagatcctttgcagaaagatatgaccccagcctgaagaccatgatcccagtgcgaccctgtgcaaggttagcacccaacccggtggatgatgccgggctactctccttcgccacattttcctggctcacgccggtgatggtgaaaggctaccggcaaaggctgaccgtagacaccctgcccccattgtcgacatatgactcatctgacaccaatgccaaaagatttcgagtcctttgggatgaagaggtagcaagggtgggtcctgagaaggcctctctgagccacgtggtgtggaaattccagaggacacgcgtgttgatggacatcgtggccaacatcctgtgcatcatcatggcagccatagggccgacagttctcattcaccaaatcctccagcagactgagaggacctctgggaaagtctgggttggcattggactgtgcatagccctttttgccaccgagtttaccaaagtcttcttttgggcccttgcctgggccatcaactaccgcacggccatccggttgaaggtggcgctctccaccttggtttttgaaaacctagtgtccttcaagacattgacccacatctctgttggcgaggtgctcaatatactgtcaagtgatagctattctttgtttgaagctgccttgttttgtcctttgccagccaccatcccgatcctaatggtcttttgtgcggcgtacgcctttttcattctggggcccacagctctcatcgggatatcagtgtatgtcatattcatacccgtccagatgtttatggccaagctcaattcagctttccgaaggtcagcaattttggtgacagacaagcgagttcagacaatgaatgagtttctgacctgcatcaggctgatcaaaatgtatgcctgggagaaatcttttaccaacactatccaagatataagaaggagggaaagaaaattactggaaaaagctggatttgtccaaagtggaaactctgccctggcccccatcgtgtccaccatagccatcgtgctgacattatcctgccacatcctcctgagacgcaaactcaccgcacccgtggcatttagtgtgattgccatgtttaatgtaatgaagttttccattgcaatcttgcccttctccatcaaagcaatggctgaagcgaatgtctctctaaggagaatgaagaaaattctcatagataaaagccccccatcttacatcacccaaccagaagacccagatactgtcttgcttttagcaaatgccaccttgacatgggagcatgaagccagcaggaaaagtaccccaaagaaattgcagaaccagaaaaggcatttatgcaagaaacagaggtcagaggcatacagtgagaggagtccaccagccaagggagccactggcccagaggagcaaagtgacagcctcaaatcggttctgcacagcataagctttgtggtgagaaaggggaagatcttgggaatatgtgggaatgtgggaagtggaaagagctccctccttgcagctctcctaggacagatgcagctgcagaaaggggtggtggcagtcaatggaactttggcctacgtttcacagcaggcatggatctttcatggaaatgtgagagaaaacatactctttggagaaaagtatgatcaccaaaggtatcagcacacagtccgcgtctgtggcctccagaaggacctgagcaacctcccctatggagacctgactgagattggggagcggggcctcaacctctctggggggcagaggcagaggattagcctggcccgcgctgtctactccgaccgtcagctctacctgctggacgaccccctgtcggccgtggacgcccacgtggggaagcacgtctttgaggagtgcattaagaagacgctcaggggaaagacagtcgtcctggtgacccaccagctacagttcttagagtcttgtgatgaagttattttattagaagatggagagatttgtgaaaagggaacccacaaggagttaatggaggagagagggcgctatgcaaaactgattcacaacctgcgaggattgcagttcaaggatcctgaacacctttacaatgcagcaatggtggaagccttcaaggagagccctgctgagagagaggaagatgctggtataatcgttttggctccaggaaatgagaaagatgaaggaaaagaatctgaaacaggctcagaatttgtagacacaaaagggtacctcctttctctcttcactgtgttcctcttcctcctgatgattggcagcgctgccttcagcaactggtggctgggtctctggttggacaagggctcacggatgacctgtgggccccagggcaacaggaccatgtgtgaggtcggcgcggtgctggcagacatcggtcagcatgtgtaccagtgggtgtacactgcaagcatggtgttcatgctggtgtttggcgtcaccaaaggcttcgtcttcaccaagaccacactgatggcatcctcctctctgcatgacacggtgtttgataagatcttaaagagcccaatgagtttctttgacacgactcccactggcaggctaatgaaccgtttttccaaggatatggacgagctggatgtgaggctgccgtttcacgcagagaactttctgcagcagttttttatggtggtgtttattctcgtgatcttggctgctgtgtttcctgctgtccttttagtcgtggccagccttgctgtaggcttcttcattctgttacggtctagtgcccaaagggcaaaggaggagctggggacgctcgcccaggaagctcagctcaccagagcccgtccttcccacgatgcccaccacttcgtggccgcggatggtcaggttgatgccgtgaagcacgacgtgcttccccacgtgggcgtccacggccgacagggggtcgtccagcaggtagagctgacggtcggagtagacagcgcgggccaggctaatcctctgcctctgccccccagagaggttccagggatagggctgctccaagagagagccctgggctggcatggggaccgtacctccagctgcctggatgtagtggtggtagaccctccaactcaaggagccttcttccatctcctcctgctgtgtgagctgatgctccggcactgggtcaggctggcgtccagcttccaggccactgcccggattggcttggagacagaggcacagttcacggctgtagagaggatactgcagtacatgaagcagactgagaggacctctgggaaagtctgggttggcattggactgtgcatagccctttttgccaccgagtttaccaaagtcttcttttgggcccttgcctgggccatcaactaccgcacggccatccggttgaaggtggcgctctccaccttggtttttgaaaacctagtgtccttcaagacattgacccacatctctgttggcgagtcaagccagaacctcactgacttctgcatgcgcttttga

SEQ ID NO: 25889 - DNA, 3672 bp, Homo sapiens
  SIMILAR (1664)..(1987): 841254mologous to Escherichia coli yojH,accession number U00008,Smith-Waterman Score=461.
acatataaagccacaacgggttcgtaaactgttatcccattacatgattatgaggcaacgccatgcatccacgttttcaaaccgcttttgcccaacttgcggataacttgcaatctgcactggaacctattatggcagacaagtacttccccgctttgttgtccggggatcaagtatcatcgctgaagagcgcaacggggctggacgaaaacgcgctggcattcgcactacttccgctggcgacggcctgtgcgcgtacgacattgtcgaattttaatgttggcgcaattgcgcgcggtgtgagcggaacctggtatttcggtgccaatatggaatttattggtgcggcaatgcagcaaaccgttcatgccgaacaaagcgcgatcatcctcgcctggttgagtggtgaaaaagcgcttgcaaccatcaacggtagagagtcgacttgctgtctgcagtcgatgttcactttagatagacactctggtatgtttctggtgtcaaaatcctttccaagtcagttctttaccaacgatatgggtggcaacatgatgatgtacatcaacctgatttgggcctggggccacccggaagtttacatcctgatcctgcctgttttcggtgtgttctccgaaattgcggcaaccttctcgcgtaaacgtctgtttggttatacctcgctggtatgggcaaccgtctgtatcaccgtgctgtcgttcatcgtttggctgcaccacttctttacgatgggtgcgggcgcgaacgtaaacgccttctttggtatcaccacaatgattatcgccatcccgaccggggtgaagatcttcaactggctgttcaccatgtatcagggccgcatcgtgttccattctgcgatgctgtggaccatcggttttatcgtcaccttctcggtgggcgggatgactggcgtgctgctggccgtaccgggcgcggacttcgttctgcataacagcctgttcctgattgcgcacttccataacgtgatcatcggcggcgtggtcttcggctgcttcgcagggatgacctactggtggcctaaagcgttcggtttcaaactgaacgaaacctggggtaaacgcgcgttctggttctggatcatcggcttcttcgttgcctttatgccactgtatgcgctggggcttcatggggcatgaaccccgtcgtttgtagccagcagattgacccgcagttccacaccatgctgatgatttgcgccagcgaggaagcgcagcggatgcagcaggcaagtgaagacgaatttaatcgcgcgttaaatatcgcttttgataatcgcctgggcttatgcaaggttgagagcgcgcgtcaggtgttcccactgacggggcgttatgcgcgccagtttgcctcgcaccgtctggcgctggtgggcgacgccgcacataccattcacccgctggcggggcagggggtaaatctcggctttatggatgctgcagagctgattgccgaactgaaacggttgcatcgtcaggggaaagacatcgggcagtacatttatctgcgtcgctatgagcgtagccgcaagcacagtgcggcgttgatgctggctgactcctttgtacgaacaacacacgctttgcggcgctcgcatggtggatttccacggctggatgatgccgctgcattacggttcgcaaatcgacgaacatcatgcgagcgtaatgacgataacacctgtagccgttccctgtatgccgatctgaaaaatggcactgcacagaacattcgtgccaaatttgtctttatcggcgcgggcggtgcggcgctgaagctgttacaggaatcggggattccggaagcgaaagactacgccggtttcccggtgggcggacagttccttgtttcggaaaacccggacgtggttaatcaccatctggcgaaggtttacggtaaagcatccgttggcgcaccaccgatgtcggttccgcatatcgatacccgcgttcctggacggtaaacgcgtagtgctgtttgggccatttgccaccttctcaaccaaattcctcaaaaacggttcattgtgggatctaatgagttccaccaccacctctaacgtgatgccgatgatgcacgtcgggctggataatttcgatctggtgaaatatctggtgagtcaggtgatgttgagtgaagaggatcgttttgaagcgttgaaagagtactatccgcaggcgaaaaaagaggactggcgtttgtggcaagcggggcagcgcgtgcagattatcaagcgtgatgccgagaaaggtggcgtactgcgtctgggtactgaagtcgtcagtgaccagcaaggaaccattgccgcgctcctgggggcatcgccaggggcgtcaaccgccgcgccgattatgttgaatctgctggaaaaagtatttggcgatcgtgtttccagcccgcaatggcaggctacgttgaaagcgatcgttccgtcttatggacgcaagctgaacggtgatgtagcggcaacagaacgcgagcgaaagacgcttcacgttatcttcaacgatctccgacctgaacaatgtgaagcaggtaaatccccttcgcgtgtgcagcttcagacatggacgaacggcggcatgttaaatgcgccgcttagcctgcgtctgacattggtggaaaaactggcgtcgatgctggatcccggtcatctggcactgacgcagatcgcgcagcatctggcgctgctgcaaaaaatggatcaccgccagcactctgctttcccggagctcccccagcaaattgccgccttgtatgagtggttttcagcccgttgtcgctggaaggaaaaggcgttaacgcaacgaggcctactggtgcaggcaggtgatcagagcgagcaaatttttacccgctggcgtgctggggcgtataacgcctggtcgttgcctgggcgctgttttatcgttctggaggagttgcgctggggggcatttggcgatgcctgccgtctgggaagcccgcaagcggtggcgttgttgctgggtgatttgctcgagaaagcgacacaacatctggcagagagtatcaatgcggcaccgaccacgcgtcactattaccatcagtggtttgcctcttcgaccgttccgacgggcggggagcatgctgattttttaagttggctgggaaagtggaccacggcagataaacaacccgtttgctggtcagtgacccaacgctggcaaactgtcgcgctggggatcgccacgactctgttcagcgcagcgtctggcgggggcaatgctcgaggaaatcttctctgtaaatttggcatttcgagtcctttgggatgaagaggtagcaagggtgggtcctgagaaggcctctctgagccacgtggtgtggaaattccagaggacacgcgtgttgatggacatcgtggcccccatcctgtgcatcatcatggcagccatagggccgccagtggaatttagagccccggttaaagcagccgaaggtgtggatgccagaaatcgaaaaatcggttcacatggagtccgtaagtgcaataaaaagagaggaaaagagatattggacagaatgaagcatataaagtacaaaatgtttcgaggtgatgacacgttgtccttgcatcttagtgaaatcggaggatatatcagaccgtatcaataa

SEQ ID NO: 25890 - DNA, 975 bp, Homo sapiens
  SIMILAR (759)..(364): 1001254mologous to Escherichia coli K12 putative chaperonin,accession number AE000297,Smith-Waterman Score=673.
ctaagtggaaaaacagaggataatgacagacaatttgcaggtattggggtaccgagctagcgcaccgatgcgatgctggagaaagtgaaattcttccgtccgcattttacttaacatgcgacgcagacgatgacaccctggtttctttacttgatccgtaccgccgacaataagctttataccgggatcaccacggatgtcgaacgccgctatcagcagcaccaaagcggcaaaggggcgaaagcactgaccggcggtagcgcccgttctccgctgattaaaaaagcgctggcagaacagttgccgggcattccgattgcaggcggcgatgactttggctccgtcaccgccgggctggcacggtaacggttccatcaacggcatggtccgtgctggagcatgaaggcggaatcgctgcaactctgtcgcgccgactgtcaacgccgattccagccgatgtcgtttggcggtcattttcgccattaccgcttgtctgtctgctggcgttatcgcttcattcggcctgaacacaaaacggcgttcacagctcgctttccagtcgataaccgcctgggtcagatggtcgccaaaccctttcacttgcttaacgccacgacgggtaacatctgcggctgtttcaataccaaaagaccgtaacgccgctttacgcgcagggccaacgccgggaatagaggcaacatcaataaaaaatccctccagaaacttctgcttctgccgttcccttgcagtgtcatgaagtgttggcgcattcccacggatgacaccatcagattgatttagagctgaagactgtgggccatagagcagacaaggacgataaagggtaagatggaaaacgcaccaagacgctggcagggagatcagagaaggtgcagcatgttctaaggaaggggccaaggagggagggcaatatcgaaagccaagagggaaccagccaggcaggtggacagtcat

SEQ ID NO: 25891 - DNA, 489 bp, Homo sapiens
  SIMILAR (67)..(243): 1001254mologous to Escherichia coli transketolase,accession number D12473,Smith-Waterman Score=315.
acgcttaaaccgggacaaccgtcgcccggccaacatagccttctccgtccccccttcgcagtaacacttgaagcgcaaagcgtgaaagataagccgtcgctgattatctgccgtacggtgattggctttggttcgccgaataaagcaggtaaggaagaggcgcacggcgcaccactgggggaagaagaagtggcgctggcacggcaaaaactgggctggcaccatccgccatttgagatcccaggcgtgataaatctctttagggatctcaaatggcggatggttttccgcgccattatcgacgccatcctgtacgccattgtaaatggcgctacccagcatcgtcagtagcagcaatgtggtgctgagatagcgccacaggccggaacgatccgggatcggatgaaggccaatactatcgtttgttccagccaatgtcagcgccctggcggcatggaatgcacaatatgccgcgctgtaacggcaaag

SEQ ID NO: 25892 - DNA, 909 bp, Homo sapiens
  SIMILAR (118)..(678): 971254mologous to Escherichia coli transketolase,accession number D12473,Smith-Waterman Score=961.
atgtttacatcagtggcgcaagccaatgctgcaggttatcgaacaaattcgtcgcgctcgtccacactgctgatgtgcacggctctcattatacactacgagccaatgttacctatcccgatggacccagatcccgagatttatcacgcctgggatgcccgtgaaaaaggcgaaaaagcgcagcagagctggaatgagaagtttgccgcctataaaaaggctcatccgcaactggcagaagagtttacccgacggatgagcggtggtttaccgaaggactgggagaaaacgactcagaaatatatcaatgagttacaggcaaatccggcgaaaatcgctacccgtaaggcttcgcaaaatacgcttaacgcttacgggccgatgctgcctgagttgctcggcggttcggcggatctggctcccagcaacctgaccatctggaaaggttctgtttcgctgaaggaagatccagcgggcaactacattcactacggggtgcgtgaatttggcatgaccgctatcgccaacggcatcgcgcaccacggcggctttgtgccgtataccgcgacgttcctgatgtttgttgaatacgcccgtaacgccgcgcggatggcggcactgatgaaagcgcggcagattatggtttatacccacgactcaattggcctgggcgaagatgtactcgctataattaacgggggtaccgagctgaccgtcagtaactcccgatcatcaataacggaaaatgggttaaaccgaccgcctgcgttagccagtaaatcagcagccactccgcgcccagcaatacgggccagtatccgcgcgggcattgcagcattagccccagacgcagaccaaacggaaataacagcaccgccatatcagggcgctcaaccagatgcaggctga

SEQ ID NO: 25893 - DNA, 910 bp, Homo sapiens
  SIMILAR (107)..(760): 991254mologous to Escherichia coli Acriflavin resistance protein F (EnvD protein),accession number D90846,Smith-Waterman Score=1032.
caatgccaacgtgcgtaacccgcagggcgcgctggaagatggcactcaccgctggcagatccagaccaatgatgagctaaaacccgccgctgaatatcagccgttggatgtgcgcaacgccgggatgaccaacgccaaaccggctattttactgatgatccgcaaactgccggaagccaatattatccagacggttgacagcatccgggcaaaattaccggagttgcaggaaaccattccggcggcgattgatctgcaaattgcccaggatcgctcccccaccattcgcgcctcgctggaagaagtcgagcaaacgctgattatctcggtggcgctggtgattctggtggtgtttttattcctgcgctcgggtcgcgccactattattcccgccgtttcggtgccggtttcgctgattggtacgtttgcggcgatgtacctgtgcggattcagtctcaataacctttcgttaatggcgctcaccatcgctactggtttcgtggtggatgacgccatcgtggtgctggaaaacattgcacgtcatctggaagcgggaatgaaaccgttgcaagccgcactgcaaggtactcgcgaagtcggttttacggtgctgtcgatgagtctgtcactggtggcggtgttcctgccgctgctgttgatgggcggattgccgggccgactgttacgcgaatttgccgtgacgctttctgtcgccattggtatatcgttgctggtttctctgacattaacgccaatggttgtggatttgtcgccaacgcaatgttatcagaggatcccgttattacctaataactggtacggtaaatatagagatcccaattaccccggttatcggaattttgacaaggtcttcaggaattaccgactggatcgaaaaacgctgttgtaa

SEQ ID NO: 25894 - DNA, 3687 bp, Homo sapiens
  SIMILAR (898)..(1659): 1001254mologous to Escherichia coli transketolase,accession number D12473,Smith-Waterman Score=1364.
atggtgaaagaggtgctggatacgatgattgggctggcgcagtcgggtatgacaatgttgtgtgtaacacatgagatggggtttgcacgaaccgtcgctgaccgggtaatttttatggatcgtggggaaatagtggagcaagctgcacctgatgaattttttgcgcatcctaaatcagagcgtacgagggcatttttatcgcagttccctactctcgcatggggagaccccacactaccatcggcgctacggcgtttcacttctgagttcggcatggggtcaggagcagcccccctcagttctccagcgcccacggcagatagggaccgaactgtctcacgacgttctaaacccagctcgcgtaccactttaaatggcgaacagccatacccttgggacctacttcagccccaggatgtgatgagccgacatcgaggtgccaaacaccgccgtcgatatgaactcttgggcggattagccaaccttcgtgctcctccgttactctttaggaggagaccgccccagtcaaactacccaccagacactgtccgcaacccggattacgggtcaacgttagaacatcaaacattaaagggtggtatttcaaggggtcgactcaccctgccccgattaacgttggacaggaacccttggtcttccggcgaaatcgggcgtaaatcgcaacaccactatgaaccatttgtgatgggcgcgagcttccgtcgcaccgaacaaatcctcgctttaaccggctgcgatcgactgactatcgcaccgaatttactgaaggagctgcaggaaaaagtttcgccagtggcattcgtctgttcgccgttgatcaacgcaaactggaagatcttcttgccgccaaactataaaccagccacggagtgttatatgtcccgaaaagaccttgccaatgcgattcgcgcactcagtatggatgcggtacaaaaagccaactctggtcatcccggcgcgccgatgggcatggctgatattgccgaagtgctgtggaacgattttcttaaacataaccctaccgacccaacctggtatgatcgcgaccgctttattctttccaacggtcacgcgtcgatgctgctctacagtttgctacatctgaccggttacgacctgccgctggaagaactgaagaacttccgtcagttgcattcgaaaaccccaggccacccggagattggctatacgccaggcgttgaaaccaccaccggcccgcttggacaaggtttggcgaacgccgtcgggctggcgatagcagagcgtacactggcggcgcagtttaaccagccagaccatgagatcgtcgatcacttcacctatgtgtttatgggcgacggctgcctgatggaaggtatttcccacgaagtctgttcgctggcaggcacgctgggactgggcaagctgattggtttttacgatcacaacggtatttccatcgacggtgaaacagaaggctggtttaccgacgatacggcaaaacgttttgaagcctatcactggcatgtgatccatgaaatcgacggtcacgatccgcaggcggtgaaggaagcgatccttgaagcgcaaagcgtgaaagataagccgtcgctgattatctgccgtacggtgattggctttggttcgccgaataaagcagctcccagcaacctgaccatctggaaaggttctgtttcgctgaaggaagatccagcgggcaactacattcactacggggtgcgtgaatttggcatgacccgtatcgccaacggcatcgcgcaccacggcggctttgtgccgtataccgcgacgttcctgatgtttgttgaatacgcccgtaacgccgcgcggatggcggcactgatgaaagcgcggcagattatggtttatacccacgactcaattggcctgggcgaagatggtccgacgcaccaggctgttgagcaactggccagcctgcgcttaacgccaaatttcagcacctggcgaccgtgcgatcaggtggaagcggcggtgggctggaagctggcggttgagcgccacaacggaccgacggcactgatcctctcaaggcagaatctggcccaggtggaacgtacgccggatcaggttaaagagattgctcgtggcggttatgtgctgaaagacagcggcggtaagccagatattattctgattgccaccggttcagagatggaaattaccctgcaagcggcagagaaattagcaggagaaggtcgcaatgtacgcgtagtttccctgccctcgaccgatattttcgacgcccaggatgaggaatatcgggagtcggtgttgccttctaacgttgcggcttgcgacgtaaaacgcgaggtggtgcatgatttacgtctctcgccgattactcatcacctgtttgctgctggtatctggggattacgcagcggtgccgtcacgctggaaacctcgcaggtattcgccgcgctgatgggcgatgcgccgcgcagtatgacgatggtggtcaccgaatggcgtttaccacgcgtgctgatggcgctgttgattggcgcacgactgggcgtcagtggcgctatttttcagtcgctgatgcgtaacccgctcggcagccctgacgtaatgggctttaacaccggggcgtggagcggcgtgctggtggcgatggtgctgtttggtcaggacctgacggctatcgcgctgtcagcaatggtgggcggcattgtcacttcgctgctggtctggctgctcgcctggcgcaacggcatcgacacctttcggttgattattatcggtatcggcgttcgcgccatgctggtggcctttaatacctggctgttgctgaaagcgtctttagaaacggcgctaacagcaggtttgtggaatgccggatcgctcaacggcctgacgtgggcaaaaacctcgccttccgcacccatcattatattgatgctcattgccgccgccttactggtacgccggatgcgcttgctggaaatgggcgatgataccgcgtgtgcgctgggcgtcagcgtcgaacgttcgcgtctgttaatgatgctggttgcagtgcctcggcggtatttaccttatcgtcttgttaattcaggagtctcgcaaaaaatgaccgaatcagtagcccgtttgcgcggcgaacagttaaccctgggatatggcaaatataccgttgcggaaaatctgactgtagaaatacctgatggtcacttcacggcaattatcgggccaaatggctgcggtaaatccacgttactgcgtaccttaagccgcctgatgacgcctgctcatgggcatgtctggctggatggcgagcacattcaacattacgccagtaaagaggttgcacgccggattggtctgttggcgcaaaatgctaccacgccgggcgatatcaccgtgcaggagctggtggcgcgtggacgttatccgcatcaaccgctgtttacccgctggcgcaaagaggatgaagaagcggtaacgaaagcaatgcaggccacgggaataactcatctggcagatcaaagcgtggataccctttctggcggacaacgcagcgagcgtggatcgcgatggtgctggcccaggaaacggcaattatgctgctcgacgaacccacgacctggctggatatcagtcactgtggggataatccggccttatcggcttcagctttaa

SEQ ID NO: 25895 - DNA, 2637 bp, Homo sapiens; identical to SEQ ID NO: 10616
  SIMILAR (1837)..(2619): 961254mologous to Escherichia coli soluble lytic transglycosylase,accession number M69185,Smith-Waterman Score=1320.

SEQ ID NO: 25896 - DNA, 5348 bp, Homo sapiens
  SIMILAR (3213)..(3455): 971254mologous to Escherichia coli transketolase,accession number D12473,Smith-Waterman Score=406.
  misc_feature (1)...(5348): n = a,t,c or g
cttccgagctggaaacacgcagtaagttgtaactaatgcgggcagcttccatgttcggcatcaccagaatattggcggaacctttcaaagagctgtccggcatacggtcgttgcgaatcgcttccaccagcgctgcatcgccgtgcatttcaccatcaatcatcagttctggtgcacgttccctgaccagttccagcgcctgacgcattttgctcgacgacgggcagtcagaagaaccaaagttggagtgcgacaacaaagcaacgcgcggctcaataccaaaacgacggacagtttctgccgccatcaaggtgatctccgccagctcttctgcatccggttcatcattaacatatgtatcaggcaataaaggtgttaccaccgtcgtggcgttaagcaagtgaaagggtttggcgaccatctgacccaggcggttatcgactggaaagcgagctgtgaacgccgttttgtgttcaggccgaatgaagcgataacgccagcagacagacaagcggtaatggcgaaaatgaccgccaaacgacatcggcacttccgcccagcgtgccagcccggcggtgacggagccaaagtcatcgccgcctgcaatcggaatgcccggcaactgttctgccagcgcttttttaatcagcggagaacgggcgctaccgccggtcaggtagataacgtccggtttttcctgggcgttatccagggccagttgcacctgttccagaatccgcgtcagtggctggctgagggcgctttccagccctcgctggctaatcagcgtagccagttcattgctgataaacggcagtgaggcgcgggtttccgctacgcttgaaagagcaattttgcactcttctgcgctacgcaccaggcgatagcttaaacgctgacgccagacttttgtatgttgaggaccggtagttttctgattgaacccagcgatctcggcgtggtcaatatgtgcgctgaacgcaatctgccgttcgtcgccgggcacgcgctgatctgctacaacgcggtgccccctgaaaatattgctcaaacagggcatgatgcgctggtgtatgccagtggagctttcccagagactggctggtgaatctgcttaatcagtacgatgagctggccgttcgtaaccagtttcaagtgtaactcgtgagattcggtcttctgccgttggcttattccgcccggtgcttttccgcgcgttcggaagaccgcccgaaagatgagtgtgaaacctgttgcattaagtatccgaacgggcgcaacgtgctgtcgcaggaaatccatcaagtgtttgtactcaatggcattcagtccatgagcggctacgtttacaacctcggtaacgagctggcatccatgcagggcctggttgatgtggtccgcctgtcaccgcagggttcttcagcgcgagaagcattctcccactctctcgatctcgcccgtctggctgaaaagcgcggctatcatcgctactggctggcagaacaccacaatatgactggcattgccagtgctgccacgtcggtattgatcggctatctggcggcgaataccaccacgctgcatctggggtctggcggcgtgatgttgcctaaccactcaccgttggtcattgcagaacagttcggcacgcttaatacactctatccggggcgaatcgatttggggctgggtcgtgctccgggtagtgaccaacggacaatgatggcgctacgtcgtcatatgagcggcgatattgataatttcccccgcgatgtggcggagctggtggactggtttgacgcccgcgatccaatcttagagccgacacataacgggcgtcgattgtgctctacagttnggcacccgaggatgggctatacgccaggcgttgaaccaaccaccggcccgcttggacaaggtttggcgaacgccgtcgggctggcgatagcagagcgtacactggcggcgcagtttaaccagccagaccatgagatcgtcgatcacttcacctatgtgtttatgggcgacggctgcctgatggaagaaggctggtttaccgacgatacggcaaaacgttttgaagcctatcactggcatgtgatccatgaaatcgacggtcacgatccgcaggcggtgaaggaagcgatccttgaagcgcaaagcgtgaaagataagccgtcgctgattatctgccgtacggtgattggctttggttcgccgaataaagcaggtaaggaagaggcgcacggcgcaccactgggggaagaagaagtggcgctggcacggcaaaaactgggctggcaccatccgccatttgagatccctaaagagatttatcacgcctgggatgcccgtgaaaaaggcgaaaaagcgcagcagagctggaatgagaagtttgccgcctataaaaaggctcatccgcaactggcagaagagtttaccccgacggatgagcggtggtttaccgaaggactgggagaaaacgactcagaaatatatcaatgagttacaggcaaatccggcgaaaatcgctacccgtaaggcttcgcaaaatacgcttaacgcttacgggccgatgctgcctgagttgctcggcggttcggcggatctggctcccagcaacctgaccatctggaaaggttctgtttcgctgaaggaagatccagcgggcaactacattcactacggggtgcgtgaatttggcatgaccgctatcgccaacggcatcgcgcaccacggcggctttgtgccgtataccgcgacgttcctgatgtttgttgaatacgcccgtaacgccgcgcggatggcggcactgatgaaagcgcggcagattatggtttatacccacgactcaattggcctgggcgaagatggtccgacgcaccaggctgttgagcaactggccagcctgcgcttaacgccaaatttcagcacctggcgaccgtgcgatcaggtggaagcggcggtgggctggaagctggcggttgagcgccacaacggaccgacggcactgatcctctcaaggcagaatctggcccaggtggaacgtacgccggatcaggttaaagagattgctcgtggcggttatgtgctgaaagacagcggcggtaagccagatattattctgattgccaccggttcagagatcgaaattaccctgcaagcggcagagaaattagcaggagaaggtcgcaatgtacgcgtagtttcccctggcctcgagcgatattttcgacgcccaggatgaggaatatcgggagtcggtgttgccttctaacgttgcggctcgcgtggcggtggaagcaggtattgccgattactggtacaagtatgttggtctgaaaggggcaattgtcgggatgacgggttacggggaatctgctccggcggataagctgttcccgttctttggctttaccgccgagaatattgtggcaaaagcgcataaggtgctctggagcctctcctgccagaaataaaacttgtggcacaggcttctcattggagcccccacagtccatttggttgtaatgaatgtgcctctcttgtgtaggttgcaatcgttttgcagcctctgctaccaagcttggtggcggtgttcctgccgctgctgttgatgggcggattgccgggccgactgttacgcgaatttgccgtgacgctttctgtcgccattggtatatcgttgctggtttctctgacattaacgccaatgatgtgtggctggatgccgtctggtgggcgtggtgctgcttggcaccattgcgctgaatatctggctgtatatctcgatcccgaaaaccttcttcccggagcaggacactggcgtgttgatgggcgggattcaggcggatcagagtatttcgtttcaggcgatgcgcggtaagttgcaggatttcatgaaaattatccgtgacgatccggcagtggataatgtcaccggctttacaggcggttcgcgagtgaacagcgggatgatgtttatcaccctcaagccacgcgacgaacgcagcgaaacggcgcagcaaattatcgaccgtctgcgcgtaaaactggcgaaagaaccgggggcgaatctgttcctgatggcggtacaggatattcgcgttggtgggcgtcagtcgacgccagcagtacacgttggtaccgagcggcatctggtcgttcgcggaaagcgtgaccgcacgggaagggccgtcgaggctaccttttgccgagttaacgttagcgccggtaatggcggtgcgcacggtttcgctggtcaggccgagggcggcaatcgcctgagcgttaagtttgacgcgaacagccggacgctgaccgccggaaagcgtcaccaggccgacgccggaaatctgcgagattttctgcgcgacgcgggtttccaccatatcttccacttgcgtcatcggcatggcggttgaggtgacggcgagcgtcatgatcggcggatctgccgggttcactttgctgtaaaccggcgggttagccaaatcgctcggaaacaagttggtcgcagcgttaatcgcggcttgcacttcttgctcggcgacaatcgagcggtaatgttacctggaactgcaaagtgataactacggcaccgccggaactttgcgacgacatctgtttcaggccagacatctgcccgaactggcgttctagcggcgcggtaacggcaaaggtcatgacatccgggctggcacttgggtagagcgtgaccacttgaatggtcgaatagtccacttccggaagcgccaaaacgggcagggcgcgataaccgataatcccggcgagtaagatcgccaccatcagcagcgtggtggccccaggacgcataataaacaggcgcgacgggccgcctgtgctgctcgggggtaacacctgcatcaggagcgtgctccttttttcgcgtattcgcggctggtggctttcttcttccggagtagtggcgctctgggcttccaccacttccactttcgccccttcggtcaggcgatcaatgccgtctgtcaccacgcgatcgcccgcagaaatacctgcacggatcaccactttctgactgtcctgaatgcccggcgtcaccagatgtttgctgaccttgttttcgctattcgcgccccaaaggggtcgagctcagtccgatcacgggctacgttccgggtacagttttcggccatttccaaaatgagcgggcataggtgtacggggggagaagagagacccataatgagtgccagaccgcggctcgcaagagtcagcgagctatatccccggcgagaggagatgtgggcgcactccaaagcaatgaagctatcatccatgaagtagcagtccatgaggaagtccat

SEQ ID NO: 25897 - DNA, 1176 bp, Homo sapiens; identical to SEQ ID NO: 7749
  SIMILAR (836)..(991): 331254mologous to Escherichia coli Transposase,accession number AB024946,Smith-Waterman Score=64.

SEQ ID NO: 25898 - DNA, 1443 bp, Homo sapiens
  SIMILAR (1)..(258): 1001254mologous to Escherichia coli K12 putative transport,accession number AE000412,Smith-Waterman Score=439.
atgagcctgaacgacgcgggcacgctggtgagtaacttctggatgtcatacatggtcggcatgtgggcgttcagctttattcttcgcttctttgatttgcaacgcattctgaccgtactggctggtctggctgcgattctgatgtacgtctttaacaccggaacaccagcacatatggcgtggtcaattctcgctctgggcttcttctccagcgcgatctataccaccatcatcaccctgggttcacagcagaccaaagggcgcagaatcttgtggaaaacaccgcaacgcagcgccgcctttacgtatcgtttccagggtcatttgtacctggcccttgtccatacaacaggtctccttgccttgacgttagtctccttgagtttacggtggtatatccgggtaattaccgggccgttggaagatgaaactgaattcccgtctcgtcagcaaggccgattgggctcggagtctcaagtcgactctaggtaccagctaatgaccatgtattacgaattccgagctcgggtacccggattagaacgaatgtggcaacataattcagtgtcagggaaaaaaggactggctgcactctgtttactggctgtgctgggcttagcggctgcgatcaacaagagaatgcggcggcaaaagtggaatacgacggactttcgaacagccaaccgctgcgtgtcgatgccaataaccatacgtaacattccggtgaccgttgaacgccagttgtatcggcttatccctggtgaagaagagatgagctttattctgcaaccggtgaccagcaatgagattgacagcgatgcgctgtatctcgatgaaatcacgcttaccagcgagcaggatgcagttctgcgctacggtcaggtggaagtaccgctgccaccgggagccgacgttgagcgcacaacatggggcatttcggtcaataaacccaacgccgcgaaacagcaggggcaattgctggaaaaagcgcgaaatgaaatgggcgaactggcctatatggtgccggtgaaagaactgacgggaacggtcactttccgccatttgctgcgcttctcgcaaaaagggcaattcgttctgcctcctgctcgttatcatctgcgacggtcgcatagccttcgccatggcaggcgtcatacccgcaaaggcgaaagaggtacgattaacatagtgaacggaacaccaattcacgaacgttcccgaaatatcgataacagacgctctctggggcattgggagggcgatttagtctcaggcggtgtggggacggtgattggcgtggtgaccggggtaattatttttaccgtcatcaactatggcctgacgtatatcggcgtaaacccatactggcagtacatcatcaaaggggcgattattatcttcgccgtagcgctggattcactgaaatacgcgcgtaagaaatga

SEQ ID NO: 25899 - DNA, 1800 bp, Homo sapiens
  SIMILAR (773)..(1111): 351254mologous to Escherichia coli O157:H7 IS30 transposase,accession number AE005493,Smith-Waterman Score=114.
tcacgccaagggtctccaatggccaccagagtagctcgatacagtgtcgattggggctttctcaaaccctgtgttaaaccgggtgccctcggggtttttctcacaggatttgctgtaaacccaccttcgcctgcaccgatgtaaggcgttgaggcaaacccgatgcttaccattgatatagtaggggagtgggggtagctggcctctgcacaactgtgttagagcgttagctgtaacccgccttcgcctgacgcggatgtaacggtttgccgccaccgccacggggtgcgcggcagatacactgcaaccagcagaaacagcaactgtgaccggggagtgatcgcagaagtgcgcgaatgcaacagccgggaaggacggtgctactaaccaacgggacgcagcgttgaaaggtagcattatcgtaccgaattgccccggggtacgggcaaccttcggtacttggcggcttaaggctcggagcctcgaatccgagctccgggggtagtggacgtaggtgttatttgaaactttcagtcttttttcattgatcaactgagtcctctccgggttgccattgtggcgatgcttcttgctccggccgaaccgtgctgatgccatgtagctcaagtacctgactgcgtaatacagcccgtctgcgtctggtttttcaggacggtttttcctgaggtagcctgagtttaacggcactccttcctgacactgctgagcgcgaggagatacgagctggtttgtcagccaaaatgagcattcggcgatagctactgcgctgaatcgcagtccttcgacgatctcacgtgaagtcagcgtaatcggggcagacgctattacaaagctgttgatgctaataacgagccaacagaatggcgaaaaggccaaaaccgtgcttactggatcaaaattaccattgcgaaagcttgttctggaaaagctgaatatacagcatctgcgacggtcgcatagcctcgccatggcaggcgtcatacccgcaaaggcgaaagaggtacgattaactagtgaacggaacaccaattcacgaacgttcccgaaatatcgataacagcgctcttgtaacggtattacgctaatgcacgaatatttgatatgcttactgggcacaagccgaagtgcgacacgcttgttgacactaatgcaggaaaaacgcgaagaatttggtggagggtgcagtagacacccgcactgcacctcacgataacctacgtactggttttgatatttgccaatggctggaatattacgtatgctttttacgcagcacccgtagtgcctgacacttgttgtgtttgggggggaaggtcgggcatccattgagtcgagagagcctagaaccagatgttcccttatgaaaggacctacgaaccggatgttaccctgcctgttacagcatctgctagtatgccgcctacgcctgcaacggatgaccggtttgccgcctccgcgaactgcacggttggcgatgagctgttgcatgtattgcttaccacgtgcgctggcgtatctaagagggggtggggtccgtattgtccagttggttgctcgacgacgacgccatgggcgagtgattgacgcagctatcgcccggaactgcgtccgcgggaaacagtatagccggagatccccgatttgacctatgccgtgtgggcagttatgtgtagaactctcgctcctgttccgggttctctccccttgggtttcatcgggggtgtagtgccaaggtgatcgcgcgctacaggggccccttcttactgcgttctttgccat

SEQ ID NO: 25900 - DNA, 2852 bp, Homo sapiens
  SIMILAR (1940)..(2461): 891254mologous to Escherichia coli IS30 transposase,accession number U70214,Smith-Waterman Score=799.
atgaaaacgttaattgcccggcataaagctggtgaacatatcggcatatgttcagtctgttctgcccatccgttggttatcgaagcggcgctggcatttgatcgcaacagcacgcgcaaagtgctgattgaagcaacgtcaaaccaggtcaatcaatttggcggttataccggaatgacaccggcagactttcgcgaatttgtttttacgattgccgataaagttgggtttgcacgcgaacgcattattctcggcggcgatcatctggggccaaactgctggcagcaagaaaatgcggatgcggcgatggaaaaatccgtcgagctggcagtggtcattgacctgtggtcacgtgccgttattggctggtcaatgtcgccacgcatgacggcgcaactggcctgcgatgccctgcagatggcgctgtggcggcgtaagaggccccggaacgttatcgttcacacggaccgtggaggccagtactgttcagcagattatcaggcgcaactgaagcggcataatctgcgtggaagtatgagcgcaaaaggttgctgctacgataatgcctgcgtggaaagcttctttcattcgctgaaagtggaatgtatccatggagaacactttatcagccgggaaataatgcgggcaacggtgtttaattatatcgaatgtgattacaatcggtggcggcggcacagttggatcaactctctgctgtcgcagaagcggaacacgcaaggtagaattgaagatggaaggcagcatgacaaatgggtcgcggagcgcaaccgtatagaggatccccgtctggtcaccgtgcgtgaaggtgaagcccgtgaagtggtgctggcaaaaatgcacgaaaaacgcgttgaaaaagcgctagttgccgcactggtggtcgcactgctgattagcggtggtatcctgacctgggccggatttaacgatccgcaggagatcaacggcaccttaagcgccgatgccacacctgctgaagctatctcccccgtagccgatcaggactggcctgcctatggtcgtaatcaggaaggtcaacgcttttcgccgctgaaacaaattaacgccgataacgtccataatctgaaagaagcctgggtgttccgtactggcgatgtgaagcagccgaacgatccgggtgaaatcaccaatgaagtgacgccgattaaagtgggcgacacccctttactgtgtaccgctcaccagcgcctgtttgcgcttgatgccgagatggacggcatcgccacgctgaaagagatcaaagcgttaaacccggcaattccggtgctgattatgactgcgtactccagcgtcgagacggcggtagaggcactgaaaactggggcgctggattatctcatcaagccgctggatttcgataacctacaggcgacgctggaaaaagcgctcgcgcatacgcacagtattgatgctgaaacacctgcggtgactgccagccagttcggtatggtcggtaaaagcccggcgatgcaacacctgctcagtgaaatcgccctcgtcgcgccatcggaagccacggtactgatccacggcgattccggcaccggtaaagagctggtcgccagggcgattcacgccagtagcgcacgtagcgaaaaaccgctggtaacgctcaactgtgcggcactcaacgaatccttgctggaatctgaattgttcggtcacgaaaaaggggcgtttactggagccgataaacgccgggaagggcgctttgttgaggcggacggcggcacgctgtttctcgatgaaattggcgatatctcgccgatgatgcagataatacctttcatcgcaaaggaaaaagcagcttcatctgtccgtgactctagaggatcccctgagcgcgaggagatacgagctggtttgtcagccaaaatgagcattcgtgcgataggttactgcgctgaatcgccagtccttctaccttctcacgtgaaagttcagcgtaagggggggcacaggctattacaaagctgttgatgctaatatccgagccaacagaatggcgaaaaggccaaaaccgtgcttactggatcaaaatgtaccattgcgaaagcttgttctggaaaagctggagatgaaatggtctccagagcaaatatcaggatggttaaggcgaacaaaaccacgtcaaaaaacgctgcgaatatcacctgagacaatttataaaacgctgtactttcgtagccgtgaagcgctacaccacctgaatatacagcatctgcgacggtcgcatagccttcgccatggcaggcgtcatacccgcaaaggcgaaagaggtacgattaacatagtgaacggaacaccaattcacgaacgttcccgaaatatcgataacagacgctctctggggcattgggagggcgatttagtctcaggtacaaaaaactctcatatagccacacttgtagacacgaaaatcacgttatacgatcatcgttagactcaggggcaaagattctgtctcagtaaatcaggctcttaccgacaaattcctgagtttaccgtcagaactcagaaaatcgctgacatgggacagaggaatggacctggccaggcatctagaatttactgtcagctcaggcgttaaagtttacttctgcgatcctcagagtccttggcagcggggaacaaatgagaacacaaatgggctaattcggcagtactttcctaaaaagacatgtcttgcccaatatactcaacatgaactagatctggttgctgctcagctaaacaacagaccgagaaagacactgaagttcaaaacaccgaaagagataattgaaaggggtgttgcattgacagattga

SEQ ID NO: 25901 - DNA, 1254 bp, Homo sapiens
  SIMILAR (496)..(987): 921254mologous to Cloning vector pZC320 SopA,accession number U26464,Smith-Waterman Score=773.
atggacgatatcccgcaagaggcccggcagtaccggcataaccaagcctatgcctacagcatccagggtgacggtgccgaggatgacgatgagcgcattgttagatttcatacacgggtcaccgtcgacagcgacacacttgcatcggatgcagcccggttaacgtgccggcacggcctgggtaaccaggctttgcagaactttcagcggtataccggcatacagcatgtgcatcgcataggaatggcggaacgtatgtggtgtgaccggaacagagaacgtcacaccgtcagcagcagcggcggcaaccgcctccccaatccaggtcctgaccgttcttttactctagaggatccccggcgaagatgccggatgctatcccggcgaaaatacgtcgctcaattccaccagaatcagtaccagcatcagcggtgtggcgtacagcaatccattcttacgcacaaagaaatgctgggtaccgagctcgaattcaatagcgtgcataaatcggaagatgacgtgctagaggatacccctaaatttgatgaaggtaaactgcccaccgatccacacctgatgctccgactggccattgaaactgttgctcatgactatgatgtcatagttattgacagcgcgcctaacctgggtatcggcacgattaatgtcgtatgtgctgctgatgtgctgattgttcccacgcctgctgagttgtttgactacacctccgcactgcagtttttcgatatgcttcgtgatctgctcaagaacgttgatcttaaagggttcgagcctgatgtacgtattttgcttaccaaatacagcaatagtaatggctctcagtccccgtggatggaggagcaaattcgggatgcctggggaagcatggttctaaaaaatgttgtacgtgaaacggatgaagttggtaaaggtcagatccggatgagaactgtttttgaacaggccattgatcaacgctcttcaactgtgcctaagcctgaatctgagcctggttccctggtcagaagttatagttttacttcctttggtgagaatacacaagaaaaccaccagggtggatggttaggtggcattactgagcaaaaaggtctcctggatcttacattttctcagtggctccctcagccattagcagttgctcccactacacacacatgtccacatcttcccatgcttctccaaacaatggcagcctttacagaattctatatccaggaatccttcactaagtga

SEQ ID NO: 25902 - DNA, 1363 bp, Homo sapiens
  SIMILAR (531)..(1217): 931254mologous to Escherichia coli O157:H7 putative transport protein,accession number AE005538,Smith-Waterman Score=1070.
gccgccagactggggtgatttttccggcacatagcgtaaaactataattgccaaagtaaaacagtgtaaaaggtatgtaacagaccattgactggctgaatggtctgtcatactttgttaccctgcaaaggggagtaacttcattgccggtcgatcgtccattacgatgtgtgaaaaaacacatccggtcaccgggcaacccgaaaggaatacgcagacgtattccttttttgttgtaagtgagaccttgccggaaggcgaggtctatgcataaaaagcagcggctgacgtcttccgacgttggccgtttttttatgtgtaaggaacttctatgaatactgtcggcacgccgttgctatggggcggattcgctgttgttgtcgccattatgctggctatcgacctgttgttgcaggggcgtcgtggggcacatgccatgaccatgaaacaggctgcggcctggtcgctggtctgggtgacgctgtcgttactgtttaacgccgctttctggtggtatctggtgcaaaccgaaaggtcgcgccgttgccgatccacaggcactggcctttctcacaggttatctgattgagaaatcgctggcggtcgataacgtctttgtctggctgatgttgttcagctatttctctgttccggcggcattacaacgccgcgtgctggtgtatggcgtgctcggggcgattgttctgcgtaccatcatgatcttcactggcagctggctaatttcgcagttcgactggatcctgtatatcttcggtgccttcctgctgtttaccggcgtgaagatggcgctcgcccatgaagatgaatcaggcattggcgacaagccgctggtgcgctggctacgcggtcatttgcgcatgaccgacaccatcgacaacgagcatttctttgtgcgtaagaatggattgctgtacgccacaccgctgatgctggtactgattctggtggaattgagcgacgtgattttcgccgtggatagcattccggctatcttcgccgtgaccactgacccgttcattgtgctgacctcaaacctgtttgcgatcctcggcctgcgtgcgatgtatttcctgctggcgggcgtaacaaagcgtttctcgatgctcaaatatggcctggcggggattctggtgtttatcgggatcaagaggctgattgtgaactttaacctattgcaaacgcgcgcttgcttgggcgggggttgggcttttggggagacgttaattataaagcctggtgaatatcggatgaaaacagcggggggataattttatctgctaagccggacctgtattacatgacacgtttctcctctctccagaaagggcgggggggggatttt

SEQ ID NO: 25903 - DNA, 318 bp, Homo sapiens
  SIMILAR (318)..(4): 1001254mologous to Homo sapiens CLN3 protein,accession number AF077969,Smith-Waterman Score=589.
tcaggagatgtgagcaacaagaaatagcacacaggctggtccccacagaatgagaaaaggcaaccaggacgaagcttccagcagcacaaatcccactgacgagaacccgggggctgtagggcagcaggtgaaggccaagaggagccaacaatttgatgacgagtgtggggaggatgtccgccaggagcacagccagaagcccaccgcgttcttccaatgcgcgccctgatggtccaacagagggagccggggctccgggacggtctcctccccctcggaatccgaaaagcgccgccgcgagcctgcacagcctcccat

SEQ ID NO: 25904 - DNA, 1269 bp, Homo sapiens
  SIMILAR (1047)..(46): 971254mologous to Homo sapiens Batten disease CLN3 mutant protein in family L61,accession number W13593,Smith-Waterman Score= 1631.
tcaggagagctggcagaggaagtcatgcagaggcaaagccaggagccccgacagggagatccccagtgtgtcagagatgcaggtggccgccattgcaaactcccggtgctcatcactggtctccagggcgatgttgtggaaggtgttcacgtaggctgcgcctcccaggagcccctcatacagaatgatcaggaagacgaggtagatgcttggcagaaagccgaaccacacgtctgccagcaggaacaccaggttgaggcactgcagcagggccagggcccaggtgaaacggatgcgacagcagcggagagaagagcgggaggcaaagacgccagcctggtacagcatctggtaccagcggtattgctgagcgtgactcagggaagtgttccagaaaaagaggagttcaaaaagtccctggttaatgaaatactcggcaaagtaaactacgaccaagggaacaatgtaccacagcagacccccagccatcatccgaaccttgaacactgtccacctttcccgaagggagaggctggagctggagcctggcttcgactccggggcctcggttcttatgaggggctgccgggctgcgctctctgcttcttcttcccctccagggtcctgggcctcaggagatgtgagcaacaagaaatagctggccagcagcagggcagggatacccagcatggacagcagggtctgctgaggggagaggccggcctgggtgaggcccaggtaggacagggcccccagcagcccagctcccccagtccctgaggaccaccaggagatcacggccctggggtagaaggcagtgagggagaggaaggtgacctccccaaggcctgatgagatgctagcgaagaccacaccacacaggctggtccccacagaatgagaaaaggcaaccaggacgaagcttccagcagcacaaatcccactgacgagaacccgggggccagacctgtagggcagcaggtgaaggccaagaggagccaacaatttgatgacgagtgtggggaggatgtccgccaggagcacagcatggctctggtttcccgatgtcctcttgtggctaaggatgtcgtgggcggcactcagcatcaccacataagagaagttgttgcaaaggcccagcagccagaagcccaccgcgttcttccaatgcgcgccctgatggtccaacagagggagccggggctccgggacggtctcctccccctcggaatccgaaaagcgccgccgcgagcctgcacagcctcccat

SEQ ID NO: 25905 - DNA, 569 bp, Homo sapiens
  SIMILAR (113)..(292): 961254mologous to Escherichia coli nusB,accession number M26839,Smith-Waterman Score=293.
gaacgtgctggcaccaaagctggcaacaaaggtgcagaagctgcactgaccgcgcttgaaatgattaatgtattgaaagccatcaaggcctgaaattagtaaggggaaatccgtgaaacctgctgctagtcgccgcgctcgtgagtgtgccgtccaggcgctctactcctggcagttgtcccagaacgacatcgctgatgttgaataccagttcctggctgaacaggatgtaaaagacgttgacgtcctgtacttccgtgagctgctggccggggtggcgactaataccgcatgacctcgacggactgatgaagccatacctgtcccgcctgctggaagaactggggcaggtagaaaaagcagtactgcgcattgcgctgtacgaactgtctaaacgtagcgatgtgccatacaaagtggccattaaggaagcgatcgaactggcgaaatcgttcggcgcagaagacagccataagttcgtcaacggcgtactcgataaagcagcacctgtgattcgccctaacaaaaagtgatatccaggccggtagattcacggaagaccgttccat

SEQ ID NO: 25906 - DNA, 449 bp, Homo sapiens
  SIMILAR (166)..(225): 501254mologous to Escherichia coli RhsA protein,accession number D90709,Smith-Waterman Score=41.
tgtattgcaggaagtgggtaaaaccaaatctgacttgtacgccacaggatgattcccagtatccagggatggatacaaagacagcaagtgattacctgccacagacaaattggccaacaactcaattaccaccaggatatacttgtgcagaaccatatttattgcccagacattaataaaccctaaggccagcggtcgagtgacggatagcgcattgacgatatgcaggctgttggtcatcaccgtgatgttattaaagcgcgagagcagggaaccatctgcaaaacggtaggcagcttctgcaatcagctctttcttgtgggtgttgatgagtgttttatgatcgataggcggatcggattcctctttattcaacaccactccgccataagtacgaatgacggttccggcatgttccagaatgaccagatctttgcgaatggttgtgc

SEQ ID NO: 25907 - DNA, 440 bp, Homo sapiens
  SIMILAR (440)..(63): 961254mologous to Escherichia coli Enzyme IIANtr,accession number U12684,Smith-Waterman Score=596.
ccgcgagcgtgttgaagcagtgatgaatcagcatggattttccccttcccgctctggcgcgcttcggtatccgtaatgatttgatacagctcttcatcgctctgggctgcgcgtaaacggcggcagatggttttgtccgccagacgtttcgccaccagcgacagagtatgcaggtgcgttttagtttggtctgccggcaccagcagggcaaaaagtaagtccaccggttggttgtcgatggcatcgaaagctataggcgtttcgagctgaacgaaaacgccaacggcgcgcagagtatcttcttccagtttgccatgcggaatggcaataccattgccgataccggtactgcccattttttcccgcgtcaggatagcttcaaaaaccacctgaggcagctcgctaagttgtttcgccgcccgctcgctgatgacttccat

SEQ ID NO: 25908 - DNA, 706 bp, Homo sapiens
  SIMILAR (89)..(199): 891254mologous to Escherichia coli glucitol-6-phosphate dehydrogenase (sorbitol-6- phosphate 2-dehydrogenase),accession number U29579,Smith-Waterman Score=166.
gccagtgcccaaagttggcaagccttccagttcgacctatagaggatcggttttaaatttgaattctgttaaggagtaaaaattgatccaggttgccgttgtcatcggtggtgggcaacctttaggcgcgttcttgtgccacggtctggctgccgaggggtatcgcttcccggttgtcgatattcagagcgacaaaagccgcaaatgtggcacaagaaattaacgccgaatatggtgaaagtatggcgtacggttttggtgctgacgccactagcgagcaaagcgttctggcgctctctcgtggggtagatgaaatctttggtcgcgtggatttgctggtctacagcgccggaatagcaaaagcagcctttatcagcgacttccagctcggcgattttgaccgttcgctacaggtgaatctggtgggttatttcctgtgtgcgcgtgaattttcgcgtttgatgatccgcgacgggattcaggggcgcattattcagatcaactcgaaatccggcaaagtgggcagcaaacacaactctggctacagcgcagcgaaatttggtggcgtcgggctgactcaatcactggcgctggatctggcggagtacggcattacggtgcattcactgatgctcggtaacctgctgaaatcgccgatgttccagtcactgttgccccaataaaaaaccaagctgggtatcaaacc

SEQ ID NO: 25909 - DNA, 2637 bp, Homo sapiens
  SIMILAR (600)..(1): 1001254mologous to Escherichia coli transcriptional activator protein from homology search,accession number D28595,Smith- Waterman Score=1019.
atgcaggttggcgacgtcggtttccagcatccgcgcgcaggcagcccagttgtgatgattttgtgccagtgcctgacgaatagtttcacgctggaacgcttctgtcgcttcacgcaggttttgcttaacaacgggcaccgccgccacttctggcgtcggcaacgtcacctcaggaaaagcaaaatgttgcgcctcaagaatcacttcatcgccgctgcgggtggctctcgccagaactaccgcccgatgaatagcatgttccagttcgcgcacgtttcccggaaaactgtagtgttgcagtaaatttcgcgctccggcacttaataccacgcgggagagcccctgccgcaaacgacactgctcgcagaaataccccgccagcagaatgacatcatcgccccgctcacgcagcggcggcaccgaaagtggaaacacgctcaggcgatgaaacaaatcggcgcggaatcgccctgccagcacctcttcgcgtaaatcgcggttagtcgccgccagcacgcgcacatcgacccgcaaacaacggtcatcgccaacgcgctgaatatcgccatactgcaacaccctcagcagcttggcctgcagttcccacctgggtcgtccgaaggcgagtacaacgaagaattctctctgctgccggttgttaactacctgaaagacaaactgtctaacccggttcgtctggttaaagattacctcgacggcgttgacgttgctgaaggtgaactggttgttctggaaaacgttcgcttcaacaaaggcgagaagaaagacgacgaaaccctgtccaaaaaatacgctgcactgtgtgacgtgttcgtaatggacgcattcggtactgctcaccgcgcgcaggcttctactcacggtatcggtaaattcgctgacgttgcgtgcgcaggcccgctgctggcagctgaactggacgcgctgggtaaagcactgaaagaacctgctcgcccgatggtggctatcgttggtggttctaaagtatctaccaaactgaccgttctggactccctgtctaaaatcgctgaccagctgattgttggtggtggtatcgctaacacctttatcgcggcacaaggccacgatgtgggtaaatccctgtacgaagctgacctggttgacgaagctaaacgtctgctgaccaccagcctccactcccatggctgagcaagtgtgagcacatgcatctatatgtgcatagaaatgatcgccgctgaggcaagcaaagttaacaatatcggcctctgtcattgtgcggcggggagtcaacaggctgtcgcctggttgtagctcctcaaaatatttgcggaacggatgaatatcgccggagatggcacgtgacagattggcaccaacagtgcgaatggttccttcatcaaactgtttgcgtgctgacaggtttgccatggtgtagccgttttgatgagtcatccctgcgctaaaccagttgcccagtggtagcgagagatcgagagcgatatattttcctgtattggcgttgctgtcgccgttgttatagcgctgaagccggtccacctttgcatcgacttgtgttatattgtcatcttcagccatcatcatcacagtaaaaatcactgatatttccaaagaaggttcatttcttttgacttgaatgagctctgtgatgtcacaatgtcctatatgtgcttggtggatggatagtaaaattaattgatatcttctacatgttacacatttatcatcatcattcttctttctattgaactgattcgccaggcgcggcgggaatatccgcagctggatggcgtgttctgtacgaatgatgacctggcggtcggcgcggcgtttgaatgtcagcgtcggtgaaggtgtgctgatgacttccgctttactctgggcttctgctaccagcggtgttaatggctgagctggtgtgccgggggcgtcatcaggctgtgctgttgtgagttgctcagaagtcagttttgtgaagagcgttggtttctctgtcggtaacacggttgacggcgcatcagtcactttgggcgtattgtcaaaacccggcaacatcgcaaaaagggcgctcaggcttgcggtgacgtcttcattcagatcatccgctttttcgtcttttgtcgtatttttgtcagccaccgcagccaacgccatcgtctgagcggtggttaacggtgttgatgtggattgttcgtcgttgatgacaggcggtgtttcatccacagggatcagtaaattagcttgttgcgcgtcggaaacaatatcgctgatcagcggctcgccttttgtcgtgggcttatctgttgccaccagcaactggggggccgctttgtcggtagttgtctcgcctgctaatgcttcgctcaacaacgcgagaaaatcttgtgcagcatcgctggctttgccgccaggcaatgtggtggtgtcaacgtcatccatctttttctgatcgaggcggttttctgcaagcagtgccgccgtggattgccgttcctgcagtgtctgccaggcctgcaaacgttgttttttttctcgccaactgttcagggcaatgtcaactttctgcgtctgcaatatcagctttataccctggcgctgcatcgttatctgcgccat

SEQ ID NO: 25910 - DNA, 987 bp, Homo sapiens
  SIMILAR (341)..(895): 1001254mologous to Escherichia coli gut R protein (AA 1- 257),accession number X13463,Smith-Waterman Score=942.
  misc_feature (1)...(987): n = a,t,c or g
gcgggcggtgcgatttttgataacctcgcattaatcttcgccatcggtgtggcatccagctggtcgaaagacagcgctggtgcggcggcgctggcgggtgcggtaggttactttgtgttaaccaaagcgatggtgaccatcaacccagaaattaacatgggtgtactggcgggtatcattaccggtctggttggtggcgcagcctataaccgttggtccgatattaaactgccggacttcctgagcttcttcggcggcaaacgctntgtgccgattgccaccggattcttctgcctggtgctggcggccatttttggttacgtctggccgccgagatccccgtcaggccgccattctggagtatctgcaaaagcagggtaaatgctcggttgaagaattggcgcaatactttgacaccacaggcacaaccattcgcaaagatctggtcattctggaacatgccggaaccgtcattcgtacttatggcggagtggtgttgaataaagaggaatccgatccgcctatcgatcataaaacactcatcaacacccacaagaaagagctgattgcagaagctgccgttagttttatccatgatggcgattcgatcattcttgatgctggcagtaccgttttgcagatggttcccctgctctcgcgctttaataacatcacggtgatgaccaacagcctgcatatcgtcaatgcgctatccgaactggataacgaacaaactatcctgatgccaggcggaacgtttcgcaaaaaatcggcctcatttcacgggcaactggcagagaatgccttcgagcatttcaccttcgataaattgtttatgggcaccgacggcatcgatctcaatgcgggcgtaaccacctttaacgaggtttatacctggacgctggtggtggataccgagcaggtttttggtgcccacgctgccatcggcattgcgatagccctcaaaggtgtatccttccagcggcg

SEQ ID NO: 25911 - DNA, 1773 bp, Homo sapiens
  SIMILAR (1221)..(1256): 1001254mologous to Escherichia coli glucitol-6-phosphate dehydrogenase (sorbitol-6- phosphate 2-dehydrogenase),accession number U29579,Smith-Waterman Score=65.
atggatgcaaagtgcgatcgatcgcgctttccttggctgtggcccaccaagcgtcctcgtggatgttttgccacgtttgtgccaattggtatcccctacgaccaaactaaaacgcacctgcatactctgtcgctggtggcgaaacgtctggcggacaaaaccatctgccgccgtttacgcgcagcccagagcgatgaagagctgtatcaaatcattacggataccgaaggtactccggatgaagcacgttgtgaggagaaacagtacatggtactgatgatcgtcagcggacgttcaggttcaggtaaatctgtcgccctgcgtgcgctggaagatatgggtttttactgcgtggataaccttcccgtagtgttgttacccgatctggctcgaaccctggccgatcgcgagatttctgccgccgtcagcattgatgttcgtaatatgccggagtcaccagaaatattcgaacaggcgatgagtaacctgcctgacgctttctcaccgcaactcctgttcctggatgccgaccgtaataccttaattcgtcgttacagtgacacgcgccgactgcatccgctttccagcaaaaacctgtcgctggaaagtgctatcgacaaagaaagcgatttgctggagcctctgcatgggtttccggattacgacactgttggtttttcctgcaaacgacgtattgattatgtatgccgaataaagcattcacgccgcatccggcaagttgtattgctcaacttcgctaaatctggtgctttttcaacaacgcgcggaactgatgataagacccgacgttctctacttgtgactctggtgcgtattttctgtgtgcgcgtaattttcgcgtatgatatccgcgacgggattcatgtgcgcattattcagatcaactcgaaatccggcaaagtgggcagcaaacacaactctggctacagcgcagcgaaatttggtggcgtcgggctgactcaatcactggcgctggatctggcggagtacggcattacggtgcattcactgatgctcggtaacctgctgaaatcgccgatgttccagtcactgttgccacaatacgcgaccaagctgggtatcaaaccggatcaagtcgagcagtattacatcgacaaagtaccgttcaaacgcggctgcgattatcaagatgtgctgaatatgctgctgttctacgccagtcctaaggctgtcgtacttgcaccggacagtcgatcaatgtcaccggcggtcagcgggcgctttaaaccgcgggtcgtggtcgccatcgcgctggacgatcagcagcgcatcgtcgacaccttgtttatgaaaggactgaccgtcttcgcccgaccgcaaaaaattcccgcaattaccggccgccattctggagctactctgcaaaagcagggtaaatgctcggttgaagaattggcgcaatactttgacaccacaggcacaaccatgcgcaaagatctggtcattctggaacatgccggaaccgtcatccgcacttctggcggagtggtccccgactccccccctcatactcggcgagacccccgccggttttctatggccttcccctggttcgacaacattcgatcggcagaattccaccacgtaacgacactgctcgcagaaataccccgccagcagaatgacatccatcgccccgctcacgcagcggcggcaccgaaagtggaaacacgctcaggcgatgaaacaaatcggcgctggaatcgccctgcccagcacctcttcgcgtaa

SEQ ID NO: 25912 - DNA, 168 bp, Homo sapiens
  SIMILAR (168)..(40): 931254mologous to Homo sapiens hypothetical protein,accession number AL096744,Smith-Waterman Score=206.
ttaaaggtcttcatccttgtcatcttcaccttgagtagagagtgagaacatgcgatgtttggttttctgttcttgtgttagtttgctgagaatgatggtttccagcttcatccatgtccctgcaaaggacatgaactcatccttttttatggctgcatagtattccat

SEQ ID NO: 25913 - DNA, 261 bp, Homo sapiens
  SIMILAR (261)..(151): 861254mologous to Homo sapiens Human secreted protein, SEQ ID NO: 6834,accession number G02753,Smith-Waterman Score=162.
cttccagtgcaggctgacctttgctgagaacctgctcttgcagatttctttcatgatctcgttcaatgcgaatccccctgcttctgccacagtgaattcttttaggatgtctgtgatgtcacatagcactatgagtgagaatatgcggtgtttggttttctgcatttgtgatagtttgctcagaatgatggtttccagcttcatccatgtccctacaaaggagatgaactcatccttttttatggctgcatagtattccat

SEQ ID NO: 25914 - DNA, 3780 bp, Homo sapiens
  SIMILAR (556)..(2994): 231254mologous to Plasmodium falciparum liver stage antigen,accession number X56203,Smith-Waterman Score=284.
atggatgaagctggaaaccatcattctgagcaaactatcacaaggacagaaaaccaaacaccacatgttctcactcataggtgggaactgaacaatgagaacacttggacacagggtggggaacatcacaaactggggcctgtcgtggggtgggaggacgtgggagggatagcattaggagaaacacctaagggcactggcagagttctacttggtgctggccacactgagttccaatgcaaagtcccagaatggctgagctctccttcccccaagcatacagattctctctccgcaccatgtggccactgcctggagatgagggaagggtggtgttggcatttcaagactgtctttgctatcctcttcagtgcctctgtcagcgatatgaagttaaaaccagttgttgaaagtgatacactaacaattgagtctggaccacttgctagtgaagataaaccactttcgtgtggtacaaactctggaaaagaacaagaaataaatgagactctgcctatcacaactgtagctcagagttcagttctacttcatcctcaagaagcagcagccaggattagaatgtcagcaaggcagaaacagataatggaaatagaagagcagaagcaaaagcaattggaattacttgaacaaattgaacagcagaaattaagattagaaactgactgcttcagggctcagctggaagaagaaaaaagaaaaaaaactcaaccgactggggtaggatgcagaaaatctcatcactacataaatcatttgcattcttttagttctctgcctgttaaagttgagtcaggaaaaattcaagaacccttttcagccatgagcaaaagtacagtttccacaagccattctataatcagccaaatgcatgataggcctttgctgccgtcagagaatatcacagcccagcaaggtaatatgaaggccctccaagaacagttagacctacagaagaaagttcttcaggcaactcaggaagctcaggaacagttgcttttgtgcaaacagaaagaagtggaacagcaaacgggcctctcggtattccttcccttggtaactccagattcatctgctttattgccttctgccaaagcagatttggggagaatccaggaatcttcaccaaccaagaataatattgcagtttcctcagaccatcatgtgatctcacaacttcaggataagcgtttgagtctttcacagcctatcctatcacagcaaaataattttaaatttctccaagagcagttgaatattcagaaggatagccttcaggctaggcgagaagcccaggaagtattgtatgtacataaacagagtgaattggatagaagagtatgttccgaacaggctgagccctctttcccatttcaggtagctcagcatacatttacttcactaccatctgctgatacaaaatctggaaaaatacaggagcaacattcatctaagagcgagaaaggacttgtttcatgccaatctgacatccccatatctcaggatgggtctttgagtttcctacagcagttcctacctctacatgatagtttgaagttgctccaagaacagttgactaaacagagggatactcttcaggctaggcatgaagctcaggtggaattacttttacatagacaaagagatttgggggacagtaagtctgggctggtgagctcttcatcctcaccagtggttgttcagcattcagttgcttcacaagcttctgctaaagctgagcctaggagaattcaggagctttatttatctgagaaggagaatgtggatgaatctgagagattccaggaatgtatatcaatcaagagtgacagtaccattcccttaagccatcctaagatcccaagatgtcaggaaagacttttgagagtttcacaacatatgctacctctacaagataatttggaggaacaccaagcatggctagacactgagaaagaagcctttcatttcagccagaaaacccaagaaaatacatcttctgaacaaactggttcatcttcattcataccccagttggtacagctttcatttacttcgttagcttcagctgagtctggcacaatcctggaacctctttttacagagagtgaaagtaaaattttttcaagccaccttcagatcccacaattgcaggataggcttttgaggatatcgcaacttatccagcctcaacaagataatttgaaggcacttcaagaacagttagctacacagagagaagccatcattctagctagacaagaagctcgggaagaattacttttacatcagagtgaatgggagggaagaatatctcccgagcaggttgacacctcttccttacccctagtaccacagcattcattcgcctcattacctcttaatgaatctgaaagaaaccaagaaccatgttcaattaacagtgataatatagtatcctcaggtcactcagagataccaacattgcctgatgggctgttgggtttatcacatcttgttttacctcaacaagataatttgattgcacttgaagaacacttgcatgcacagacagatttccttccttctattgagaaaacccagaaagaattggttttgtcaaaaccatgtaaatttgaggaaaaggtatcttctgagcattttatccagtctcaccatggtgatttgcaggcacttcaacagcagttagatacacagaagaaagccattcgatctatacaggaagtccaagaagaattgcttttgcaaagattaagtgaattggagaaaagggtatcatctgaacaagtttgctcctcttcatttgtatcccagcaagataacttgggacttcagaaacagttggatctacaaagagaagttctgcattatagccagaaagcccaggaaaaattgcttgtacagagacaaacagcattgcagcagcagatacagaaacatgaagagactttgaaggatttctttaaagacagtcagataagtaagcccacagttgaaaatgatttaaaaacccagaagatggggcagctcagagactggtttcctaatacacaagacctagcaggaaatgatcaagaaaatattaggcatgcagataggaacaactctgatgataatcatttggcttcagaagatactagtgccaagcaaagtgggagacatgagacatcaatcaacacatgtacgataagcattggtttggttcggaaaagtttcctctttgtggcaaagctgaactctggacttagcaggcttccctatggtcagtgtgcatttagagtctgccgaagatcatgtactctccactatgtcaaaactgcccatattttgtacaagttaattgcagaggttacaaggggatttggccacctccttaactttttcccacagcacatggcaagcacaaccccccagctggattcagggcacaaaggaaaagattgggagggaagcagagggagatgtgacactgacaaaaaagaaggcaaggtggccacagaggcagagactagagtcacgcagctgcaagtcaaggaatgccagcagccaccagggctgaagcggcaaggaacgggttctcccctggagcctctggagggaggctggccctgccaacaccttgatctgcaacttctttccagcttccagaactgtgagagaagaagttctgttgttctaagccatcaacttgtggtaatttggtatagcagccataggaaaccctatgcaaacagtgaactaaataatgagcggtatttgtag

SEQ ID NO: 25915 - DNA, 1150 bp, Homo sapiens; identical to SEQ ID NO: 24334
  SIMILAR (322)..(810): 791254mologous to Escherichia coli Dipeptide transport ATP- binding protein DppF,accession number D90788,Smith-Waterman Score= 596.

SEQ ID NO: 25916 - DNA, 1395 bp, Homo sapiens; identical to SEQ ID NO: 11100
  SIMILAR (224)..(286): 851254mologous to Homo sapiens PRO1546,accession number AF116638,Smith-Waterman Score=93.

SEQ ID NO: 25917 - DNA, 2433 bp, Homo sapiens
  SIMILAR (1337)..(1399): 801254mologous to Homo sapiens Human secreted protein, SEQ ID NO: 6833,accession number G02752,Smith-Waterman Score=85.
atgagaggcagaggcagctgtcagtgggtactgatgctgccatgtccggggacaaatgcccacaggatggcaggagggctgctggatgagatgtttaaccatgcaggcgctggacgcttccgtttcttgggcagcatcttggtcaatctctcttcctgcgtggcactgaaccgtttccaggctctgcagtctgtcgacatcctggagactaaagcacatgaactcttgcagcagaacagcttcttggccagagtgtatgctgttcttcccatcgtgccttcttgggaaatatcctatgtcagagtggacaaagtaaacccccagtctcctcctgtgaaccggagcagagggaattgtcatgttcccatccacatgtcagcagccaaattacacaatcaaactcctaaatgttctcatattacttcatgggtacccaagccatggtcaaggcctgtatggaatccttcaccaccctgtccagtatacagcctatatctaaggatttgcactgcagagaaaataacctccctcagttttcccaaggttaggctactcacaggtcgctggtatggcagggttctccaactaggagacctagaaaaagacctagaaggagcaagtgtaggactcccaagtcctggttgctacaccagttctttaagaacccaagagggccagtggatgtatgtggccagtcggtgcccactgtcaccatccccttctcctgttagcatgccagcagaaactgggtccgccttcacaccaggcttcgtccaggtcatagaacatccaaactctggaccgactttgcatgtccagttggataccccaagagcattcttcctctcagtcatggcacagaagctgctttctcaatgtaactcgcccatggtccttttacagtccagtgggaaaaaacagatggatgggtcctttctggtccttttccctggatgctctgctcctgttcttcacattgcattcatatgtggcctggcctgtagagatgatggccctgaatttgcttggctagtagcaaatcccatagagcccaagacctcacctggaaccagaaatttatcaacaccaaaagctggttggatcaggagaggtcgaaagactggagctgagagtgtagggaaggaaggaataaagaaaggaaaggaaaggaagggaaaagaacggaatggaatggaatggaatggaatggaatggaaaggaatggaactgaacggaacggaacggaaaggaaaggaggaagggaggaagggaggaatggaggaaggaaggggagagtgtaggctgctgtcttcccagatgccccagtgtttctcaagggacatggatgaagctggaaaccatcattctgagcaaactatcacacggacagaaaaccaaacactccatgtcctcactcataggtgggaactgaacaatgagaacacttggacacagagtggggacatcacacaccggggcctgtcatgggctctgtctccgctgccttccgcacaacacagccagctgaagtctgacgtgatttgtgaattggaggtcacctgtgacatgctgaccagtttgcccctacagctgtctgctggtagtgttcctgcactgggttgtgaacctcatggagggcacaaggtttccctatcctgcacacccttaccaacactcgttatttcttgtctttttgataacagccatcctaacaggtatgaggaaattgaaaagatatggtcctcgccgaatcagctaaattgtgaaagtcttagcaagaatctttctagcaccttggagagcttcaagagcagcttggaaaatgccactggccaggactgcacaagccagccgaggctggagacggtgcagcagcacttgtacatgttggccaaaagcctcgaggaaacttggtcatcagggaatcccatcatgacttttctcagcaatttcacagtaactgaggatgtaaaaataaaagatttgatgaagaatatcaccaagttgactgaggagcttcgctcttccatccaaatctcgaatgagactatccatagcattctagaagcaaatatttcccactccaagaggtttctgcatgacaggcatggtcccaaaaacttgggctcaaagcccgtgctccaagggagccaatgttctgtgggggatgacacagtaaatatgcaaacaaaagaaggtggctccctagcacggcccgcaactgtgcagggcgtccagctgctccgcgcacaagtggccgcgatcctggcccggaggctccgccgcacgctgcgcgccgggaagagcaccctcgccgacctgctgctgccagtcctcttcgtggccttggccatgggcttgttcatgcctactcaacgtgaagatgacaaggataaagacctttatgatgatccacttctagttagacaatag

SEQ ID NO: 25918 - DNA, 2034 bp, Homo sapiens; identical to SEQ ID NO: 9170
  SIMILAR (1156)..(1875): 991254mologous to Escherichia coli No definition line found,accession number U00039,Smith-Waterman Score=1229.

SEQ ID NO: 25919 - DNA, 1497 bp, Homo sapiens; identical to SEQ ID NO: 24676
  SIMILAR (1159)..(1494): 991254mologous to Escherichia coli K12 flavodoxin 2,accession number AE000373,Smith-Waterman Score=607.

SEQ ID NO: 25920 - DNA, 2634 bp, Homo sapiens
  SIMILAR (1753)..(2538): 961254mologous to Escherichia coli K12 IS5 transposase,accession number AE000234,Smith-Waterman Score=1318.
  misc_feature (1)...(2634): n = a,t,c or g
cggacgccagggggttttcccgtcccgcgcggttgcaagagcccggcccagcggccaagatcgcatgccggcagctgcctctagaggtcgatgtccgcattactgggggctcggaattcaaagtgaccttattactaagcgttattgtgtgaagggctctcgcttttgctcggggctccgaacctcgctggggtgaagattttaaggtgtatcccggcggctcatactctcaataaatccctgttagtaaatgctgctattataactcattcattgcctgagccagcagtcgcgcagctgcctcaagcgcagaggattgaaaaaatcttcagatatatatcatcactctgaacatacgcaattaacggcggaatctcacgattctaccgttttttattatttttcagaggagtagtgatgaataattctgaaggtttgaagtcgtttcagcaatcgcttgctgatctgccgcaatgggtatcagagcggcttctgcagcaaattaaccagttaactaactacgagccagtgatcggcattatgggtaaaaccggtgttgggaagagcagtctgtgcaatgccctgtttgccggagatatatcaccggtcagcgatgtggcggcctgtacacgtgagccattgcgctttcgcctgcaagtcggcgaccgctatataacgctgatggatctgcccggcgtgggcgaaagtggcgctcgcgataccgagtatgctgcgctgtaccgcgaacagcttcctcgcctcgacctggtactgtggctgattaaggccgatgaccgggcgctgacggtggatgaacatttttatcatcaggtgattggagaggtataccggcataaggtgctgtttgttatcagccagtcggataaggccgaacctaccagncggtggtccacctcaaatgtcgcaacggcccaagcggccggcccgggcctcacccccatcaacccattcgaggaggcatcggacccggccaccaccgccaaacacacagtacatcacagcaaggcacaactgcaacatgcaccatcacaaacaattggtacaagaagccccacaggacctgaacttttgattacggctgatgatcgggcactggcgactgatgagcatttttaccgtcaggtgattggcgaagcataccggcataagatgctgtttgttatcagccagtcagacaaagctgaacccaccagcggtggaaatatcctttccacagagcagaaacaaaatatcagccgcaaaatctgcctgctgcatgagctattccagcccgtgcatccggtgtgtgccgtgtcggttcgcctgcagtggggactaagggtgatggcagagcggatgattaagtgtctgccgcgtgaggccagcagcccggtagtagcgctactgcaacatccctttcgaacaacggtagcccgggagcaggcacgtgacgatttcggtgaaaccgtaggtgccatactcgatacgtggcccgcgctgtctgggatttcttcttctgagtgtttaattctgccctattattctccgagccctgtcgcaagtgcggcagggctttctttatttgttttacccatactgaggagtctgcttatgacccgtctggcttcgcgctttggcgctgcaaatcttattcgccgtgaccgtccgttaacccgtgaagagtatttcgcgtggtgccagcgtatcagtgagatcggacaagatctctctctcgcatggagcagatctgcatggcagaatatgaccgctgtcatcgagccgttttatcccaaggcgggcaatggccgacggccctatccgctggagaccatgctgcgtattcactgcatgcagcattggtacaacctgagcgacggtgccatggaagatgccctgtacgaaatcgcctccatgcgcctgtttgcccgattatccctggatagcgccctgccggatcgcaccaccatcatgaatttccgccacctgctcgagcagcatcaactggcccgtcaattgttcaagaccatcaatcgctggctggccgaagcaggcgtcatgatgacccaaggcactttggtggatgccaccatcattgaggcacccagctctaccaagaacaaagagcagcaacgcgatccggagatgcatcagaccaagaaaggcaatcagtggcactttggcatgaaggcccacattggtgtcgatgccaagagtggcctgacccacagcctggtcaccaccgcggccaacgagcatgacctcaatcagctgggtaatctgcttcatggagagaagcaatttgtctcagccgatgccggctaccaaggagcgccacagcgcgaggagctggccgaggtggatgtggactggctgatcgccgagcgtcccggcaaggtaaaaaccttgaagcagaatccgcgcaagaacaaaacggccatcaacatcgaatacatgaaagccagcatccgtgccagggtggagcacccgtttcgcatcatcaagcggttttcgtgcagcgatgcgacgtccaggggcgtgaaacacagtttaaggcgctgctctatccgttcggcaacatatctctgcacttgccttcctcggcatgattttgctgctgatgtgcacgatggatga

SEQ ID NO: 25921 - DNA, 634 bp, Homo sapiens
  SIMILAR (1)..(348): 1001254mologous to Escherichia coli uvrB,accession number X03678,Smith-Waterman Score=587.
accccatcaatggcgaaagcgattggcgaaaccgaacgtcgccgtgagaaacagcagaagtacaacgaggaacacggaattacgccgcaaggcttgaacaagaaagtggtcgatatcctggcgctggggcagaacattgccaaaaccaaagcgaagggcagaggaaaatcgcgcccgattgttgagccggataatgtgccgatggatatgtcgcctaaagcgttgcagcagaaaatccatgagctggaagggttgatgatgcaacacgcgcagaatctggagttcgaagaagcggcgcaaattcgtgaccagttgcatcagctgcgtgagctgtttatcgcggcatcgtaacaggatagcgaagaagactgatgacaaacggaaaacagcctgatgcgctacgcttatcaggcctacattttctccgcaatatattgaatttgcgcggtttgtaggccggataaggcgttcacgccgcatccggcataaacaacgcgcactttgtcttcaataggaagccggaattttccttcggatttccgttaacctaaagcctgtaacgccttttccagcgcgttatgtaacagctggcggtcatgacgatacggaatatcgctggcctccagtacctcct

SEQ ID NO: 25922 - DNA, 537 bp, Homo sapiens
  SIMILAR (521)..(387): 821254mologous to Homo sapiens Human secreted protein, SEQ ID NO: 7553,accession number G03472,Smith-Waterman Score=222.
atgaggttttacggacagctggctgaagacccagggcagcaaaaagctggggaaacaacaaggcatactgaagactatatttctcagctgcctttgcagagacaagggatccccgaacttgcccttcagaaagatctttttattaacaagatttatggaaaagagttcaatgtctgcaggtcgactctagaggatccccgagttcatgtcctttgtagggacatggatgaagctggaaaccatcattctcagcaaactattgcggggtcagaaaaccaaacactgcatgttctcactcataggtgggaattgaacaatgagaacccttggacacaggaaggggaacatcacataccagggcctgtcatggcgtgggatattgggggagggatagcgttaggagatacacctaatgtaaatgacgaattaatgggtacagcacaccaacatggcacatgcatgaatatgtaacaaacctgcacattgtgcacatgtaccctagaacttacagtataataataaaaaaaatgtctgacc

SEQ ID NO: 25923 - DNA, 1019 bp, Homo sapiens
  SIMILAR (534)..(803): 801254mologous to Homo sapiens Human PG1 protein sequence,accession number Y36728,Smith-Waterman Score=387.
tttttctggaatcaaaaagctctttaataacataacactaaatttaagtcagaagtggttaattttacttttgcataatgattgaactcatagacatatctagtagaagtttgaataatttgagtttataacctggaatgagtaaaagttttaaagatcagatcaaaaaaacaaaagtttcaaataaaaagagaaggtttgtgactgcatttttagaagtgtgcattaatagtgatggtttaacatggaatactatgcagccataaaaaaatgatgagttcatgtcctttgtagggacatggatgaagctggaaaccatcattctcagcaaactatcacaaggacaaaaaaccaaacaccacatgttctcactcataggccttgcagtattaaaacatgtgctaacaccacgaataaaggcaactcacgttgcttttgattgcatgaagaattatttagatgcaatttatgatgttacggtggtttatgaagggaaagacgatggagggcagcgaagagagtcaccgaccatgacggttgactggattgttgctgacatcttggccatcaggcagaatgcgctaggacatgtgcgctacgtgctgaaagaagggttaaaatggctgccattgtatgggtgttactttgctcagcatggaggaatctatgtaaagcgcagtgccaaatttaacgagaaagagatgcgaaacaagttgcagagctacgtggacgcaggaactccatgctatagacagcccaggaataagaagctggagcctgcttctaagtccatactcacctctctgaaaggacccgcaaatgcctaccaccaccagccccatcctaatgggtcacctgtcaccatggtgactgctgcctccccaccagactgcgagctccacaggggccctaaaggaaacctggtctggctcaacgaaggcacctcccctgacctggcacaaaagctgggcaactcaccaaggcgcctgaaaattcctaaactttgcttggtcgcctga

SEQ ID NO: 25924 - DNA, 2255 bp, Homo sapiens
  SIMILAR (385)..(669): 1001254mologous to Homo sapiens potassium channel TASK3,accession number AF212829,Smith-Waterman Score=479.
atggccctgcgcagtggggcgggctgcttcggccgggtctggcgcagggtgtcggggttcccggacgcctggccccggcgctcgagcagcctcctgtgcctgtccgccttctcggctgagcccgggcccgcgccgcccctgccccgccagccgcctcgcggtggcggtggctgtggcggccccagcggagggggccccccccagcctccccgccccccgcctccccgctgctgctgctgctgctgccgccgccgcttacaacttggaggcggcggcggcggcggcggaggaggaggcggcggcggccgccgggcgctgcagtgggacgcgcgcggctgtgagcctgcgggacatgccccccgcgccggctccttgctggcggccatgaagaggcagaacgtgcggactctgtccctcatcgtctgcaccttcacctacctgctggtgggcgccgccgtgttcgacgccctcgagtcggaccacgagatgcgcgaggaggagaaactcaaagccgaggagatccggatcaaggggaagtacaacatcagcagcgaggactaccggcagctggagctggtgatcctgcagtcggaaccgcaccgcgccggcgtccagtggaaattcgccggctccttctactttgcgatcacggtcatcaccaccataggatcattaaaaaagaagaaaccatcagatcttagaaatcagatctcatctgcagagtgtagaggacaatttgaaatcgggcttaggaagcactgcctctttgtagatgtcatggacacagccaagaaatggggcagaagtggggtttcttctgattctggggtacatcaaagagacacctcggaatgcggagacacccagcatggtgctctgaggaggggtgggaatcaggccagctgctggcgccaggcctctgtgagtctgcagggcatctggcaggaagagatgcctacttgtgaaatggactttggctgtcactggccctgtcagacatgtgaggtgcagcccactcaggaagggacatggatgaagatggaaaccatcattctcagcaaactatcacaaggacagaaaaccaaacatcgcatgttctcactcataggtgggaattgaacaatgagaacacttggacacaggaaggggaacatcacacactggggcctgtcattggggggacaaagaagcaaggagaagaggaacatgctgtcctcctggggggtggggggcacaaagaagcctggagaagtggaacagttttcggcagcaagagtgacagctggggaatatttatccaggagcaaatgtgggtcttatgtgaatgcaggaggtgtggagggataggcgtgggcgggaaccgggactgcctgtggctatggcaggccagtgccagttccaggtggacgcgggctccacaagccctgcactcggagcggcccgctggccccgggcaccacctccccgtggggcagggctcgggacctgcagccagccatgcccaagcccccccaccgcggtgggctgccaccaagtctcccggacgggtgccgcccccttgtccaggggccagtcccatcgaccgcccaagggctgaggagtgcacgcccgtggtgtgggactggcaggcagctccgcccttggccctggtgcgggatccactacaggaagccagctgggctcctgagtcaggagggacttggagaacttttgtgtccagagggaggattgtatatgcaccaatcagcactgtgtctagcttggggttggtggatgcaccaatcagcactctgtatctagctaatctgcccagtcaagaagacaaactaacgataaccatttggtgtggtaaacagtgtgatcaaggacaaggagctgtgggaacaccgaagagggatacctacctcaatacgattattggaaaagggtcaggcaagtctctggaaatggtagcagttgaaccaagtagaagtgtaggccatatgttgcttctggctgaacacacgactggggagcgtggaagggaaatgtgtggttggagtccccacgcagtccttactggggcactgcctactggagctatgagaagacggccacagtcctccagactccagaacggtagatccactgacagcttataccatgtgcctggaaaattctcagacactcaacaccagcccgtgaaaacagccacgaggggtgctataccctgcaaagccacagggacacagctgaccaagactatgggaacctag

SEQ ID NO: 25925 - DNA, 2221 bp, Homo sapiens
  SIMILAR (839)..(1477): 981254mologous to Escherichia coli K12 putative GTP-binding protein,accession number AE000133,Smith-Waterman Score=1070.
atggcagccataaaaaaggacgagttcatgtcctttgtagggacatggatgaagctggaaaccatcattctgagcaactatcacaagtacagaaaaccaacactccatgttctcactcatagtttttataccagcctgatgccaattctgctgctgaaggaaatcgcccaggcattacgccgcacgccagcgccgatggtttatatcggcaatctggggcgtgagttgagtttacctgcggctaatttgaagctggaaagcaagctggcaattatggagcagtatgttggtaaaaaggtcattgatgcggtcatcgtcgggccaaaagtggatgtctcggcggtgaaagagcggattgtgatccaggaggtactggaggccagcgatattccgtatcgtcatgaccgccagttgttacataacgcgctggaaaaggcgttacaggctttagtcttcttcgctatcctgttacgatgccgcgataaacagctcacgcagctgatgcaactggtcacgaatttgcgccgcttcttcgaactccagattctgcgcgtgttgcatcatcaacccttccagctcatggattttctgctgcaacgctttaggcgacatatccatcggcacattatccggatcacaatcggggcgaatttctttggccctcgcttggtttgggcaaggaattggacactttttggtcaagcctgcgggtattcgggtcccctgtctctgctgtttcacgggagttggttcgcaagttttccctgggggggactgtcgactctacaggatctctgcctgtttgcggagatatatcaccggtcagcgatgtggcggctgtacacgtgagccactgcgctttcgcctgcaagtcggcgaccgctatataacgctgatggatctgcccggcgtgggcgaaagtggcgctcgcgataccgagtatgctgcgctgtaccgcgaacagcttcctcgcctcgacctggtactgtggctgattaaggccgatgaccgggcgctgacggtggatgaacatttttatcatcaggtgattggagaggtataccggcataaggtgctgtttgttatcagccagtcggataaggccgaacctaccagcggtgggggacagttgtccacggcgcagaagcagaatatcagccgcaaaatctgcctgctgcatgagctgttccagcccgtccatccggtgtgtgctgtgtcggtccgtctacaatgggggcttaaggtgatggccgagcggatgattaagtgcctgccacgtgaggccaccagcccggtggtgtcgcaactccatccttcctttcgcacgacggtagtccgggaacaggctcgtagcgattttggtgaaaccgtcggggccgtactcgatagcatcagtgcctttcccctgatacccgccccggtgcgggccgtcattcaggccgtgcgcaccacggtggtatcttttgccgccagcgtcacgctgttattgttgccattaagatctaccccggtcgagaaatcgccaacctgcatactgcctgccagcgaaaccttcccactgttggttgtgatgctgaaccctgtcgcttcattgctaacgttaacatcacccgtattggatactagttgccccactcactcgttgagtgcagcacagccgaatctgatccagctatcaggaaacaacaatatctcctttgttgttaaccgtgccgttgtcaccaatgttctcaacaccatgcgcaccgcctgtaacagtcaggctaccatccagatttacaatgccgatattgcccgcgattttggtacccgtggaatcttttccatcaacagtggtttttccactgtctattcgcggagaattggacaccagtcccccgaagttactggggaggccatggcacttacgctgtcctctcagccttcgtgtattgacgatggcctggtcgccgtcaatctggataccgatggactccggatcggtgacgctcgtcaaaaagccatcaccgccggttacccggtggttgatactgatgacaaatgccggataaggcgtttacgccgcatccggcatgaacaatgcgcagatgaaaactcttatcaggcctacaactattgccgacctgtaggccggataaggcacttgtgccgcatccggcaatcaatgcctgatgcgacgctgtcgcgtcttatcaggcctacaactgttgccgacccgtag

SEQ ID NO: 25926 - DNA, 895 bp, Homo sapiens
  SIMILAR (379)..(245): 591254mologous to Homo sapiens Human secreted protein, SEQ ID NO: 6720,accession number G02639,Smith-Waterman Score=119.
ttttagggacatattattaatcattcgactttaagttctagaatacatgtgcagaacgcgcaggtttgttacataggaatacatgtgccatggtcctttgctgcacctatcaacctgtcaacccatcatctaggttttaagccctgcatgcattaggtatttggcctgatgctctcccttcccttgccccccaccccccacccctcaacaggccccagtgtgtgattgtgtgatgttccccaccctgtgtccaagtgttctcattgttccagttcccacctatgagtgagaacatgcggtgtttggtttttctgtccttgcgatagtttgctgacgatagtttgctgagaatgatggtttccagcttcatccatgtcccctacaaaggacatgaactcatcctttttttatggctgcatagtattccatggtgtatatgtgccaacatttttcttaatccagtctatccattggatgggacatttggggttggttcccagtttttgcttttgtgaatagtgctgcagtaaacataagggtgacagagtgagactccgtctcaaaaaaaaaaaaaaaaaaaaaaaagtggggggaaggattccacagcaagaaaacgctctaaaataaacaaaagtgcccgagggagtgagaaggtgctggctaccctgtggaaaccagaggatgacaggggtgacatttggcctgagacttcatcggaacatgctggttcacccctgtaatcccagcactttgggaagccgaggcggcgagaagatcgcttgagtgaggccaggaattcgaggctgcagtgagctatgatagcatcattgcactccagcctgagtgacagagcaagactcttgtctctgaaaaaataaaataaataaaatgaaat

SEQ ID NO: 25927 - DNA, 373 bp, Homo sapiens
  SIMILAR (3)..(71): 731254mologous to Escherichia coli No definition line found,accession number U00039,Smith-Waterman Score=77.
aagtctataccgggctgaaaccccgcactatcgacgctcagtacaccccgatcaacgtcgtctgaagttcctttctctgacgcaccacgcctattccccgcttctggtggtgatcaacaaagcgaagtttgatggcttaagtccggagttccagcaggcgctagtttcatctgcacaagaagcgggtaactatcagcgcaaactggttgctgaagatcagcaaaaaatcatcgacggcatgaaagaagcgggcgtggaagtcatcaccgatctcgaccgcaaagcctttagcgacgcactggggaatcaggttcgcgacatgtttgttaaagatgtgccgcagggagctgatctgctgaaagccgtggatgag

SEQ ID NO: 25928 - DNA, 1218 bp, Homo sapiens
  SIMILAR (1)..(624): 1001254mologous to Escherichia coli K12 putative oxidoreductase,accession number AE000495,Smith-Waterman Score=1046.
atgggcgcttttacaggtaagacagttctcatcctcggtggcagtcgtggtatcggtgccgctatcgtacgtcgtttcgtcaccgatggggccaatgtacgattcacctatgcggggtcgaaagatgccgctaaacgcctggcacaagagactggagcgacagcagtattcacagatagtgctgacagagacgctgtcattgatgtcgttcgtaagagcggcgcattggatatcctggtggtaaatgcaggtattggcgtctttggcgaggccctggaattaaatgccgacgatattgatcgccttttcaaaatcaatattcatgctccttatcatgcctctgttgaagccgcccggcagatgcccgaaggcgggcgcatcttaatcatcggctccgtgaatggcgatcgtatgcctgttgcaggcatggctgcttatgccgccagcaaatctgccctgcaaggcatggcgcgcgggctggcccgtgattttggaccgcgtgggatcaccattaacgtcgtccagccagggccaattgataccgacgctaatcccgccaacgggccaatgcgcgatatgttgcatagtttgatggctatcaaaagacatgggcaaccggaagagtcgctgctctatcatgcgggaattttgccacgtcagaaggcgattattctcggtagctttagcggcagcacgcccaatgattatgacgcaggttacaacctggagtcagtgtacgcgtttttgcgttcccgcctgtcgattccactcattaccggcctcgattttggtcatgaacaacgcacggttacgctgccaacgaacttatcggctttacgaaataacgcttccaagggccagacagacataaagggactgtctgacagcaccttcgtcacgccgaaggtagatattgataccagcgataagctgtacgccgacgcatggcttggctttaaaggtacggactggaaaaacgaaattaatgtccgcgattttattcaacataactatacaccgtatgaaggcgatgaatctttcctcgccgaagcgacgcctgccaccacggaattgtgggaaaaagtaatggaaggcatccgtatcgaaaatgcgacccacgcgccggttgatttcgataccaatattggcaccaaaatcgctgagtccgagcggtctggtctggaaaccaagaatagtccttacgcattgttggcctga

SEQ ID NO: 25929 - DNA, 354 bp, Homo sapiens
  SIMILAR (1)..(87): 1001254mologous to Escherichia coli No definition line found,accession number U00039,Smith-Waterman Score=142.
atggcaaatttctctgcgctaagtgaagtgcgttatgactacatcaaaatcgcgcgagaactgtttgtgatgctgcgtcagtcgccgtggctggcgtcgtcgccttcccagatgatggcgcaaccgggcatcagtcgaggaagccggaacgagccgcccagatacggcaaacccgccatctcccccgacgccgttggccggagttcattcaatcgccagactggccacgaccaggttttccccgacctggataagccgggcacgatgagacgcaagcgcagacttaatcgtgagtttagcctcacgtcattacggcacccccaggcctttacacctttatgcgttgccggactc

SEQ ID NO: 25930 - DNA, 5289 bp, Homo sapiens
  SIMILAR (3711)..(2965): 741254mologous to Escherichia coli K12 formate dehydrogenase- O, major subunit,accession number AE000464,Smith-Waterman Score= 955.
  misc_feature (1)...(5289): n = a,t,c or g
tcagttatcttcaattctgagaaggcttaagctctcgtagcagtccagacagacgaccgcgtattctccgttttccagcagcaggccgtcatcgctcttctggtgctttacaaagggaaactcgttgacgggtaacgcccgaactcttttccgataagtcgtaatgccgcacaggtgacagttgtaatcgtgccaattgtatttacgatccgctgggttgacgctgggactttgggcctcatactttcgccactgattcaacatggaatggtaacaaaaggtgcaaactaacggctgaattgttcttaactgctctgcattgcgaagtgaattgtgtttgagcaacagtgggaaataaggacgcgaaccctctttactggcatagagcactctggctaacgttaggtccgagtgcaggccgcaaagatagcagtagattgatgtgctggcaggcgtcgaggacgatatggatggtgtggagggcggagtgttgatactcatggcgccgtggcgagatccgtttggtgaactggaggtcagcatgggcgagggaatgttgtatcttctgtgctctaggggaactcgttctgcatccatggtctcccactggctggccaagtaatccttgcagtccttgcaggccagcacgcgattgctgttaagttcgttgttgttgttattattgttgttattggtattattgttattattgttgttgttggttacagcgttggccttgagacagggaaagtgcatggcgtgggagttcatatgctcggcactggtggacagccaatccattttgtttgaggggcacagcactttgcaaatggagcaagatgacgatgttggttgcttgtccgtcgtttgttggccacacaacaccacactttgccagccaatgccaatgccaataccaataccaattgcaattccccaatgccccaaaggcaagttgcattcgctgtcgccgatgaaatgaaatttgcaaacctgagagaccgggcatcctgcttttgctttctggattatgccgtcaaaggtagaggcatcaatacccggcaccgcaacttcactcttcagtgcgattttcgtaatcgcaaaaccggcatccactttatccagcgacacatcggcggtggtatcaatcgatgttggcgtgaatcccgcttcccccagcattaatgaaagcgccattgagaaacatgcggcatgcgctgcgccaatcagttcttcagggttggttcctttttcgccttcaaaacgcgtgttaaatccatacggctgttggttcagcacgccactctcggtggatactgttcccttcccgcgtttgatatcgccttcccagtgtgcctgacctttcttatggattgtcattgttgctctcctgtgggcncagttcggcgcatcgtacggcttacgcggtagcagcggtttcacttcattcactaccacgctttcaccacggaacagaatgttaccctgagcgatacctttcgctgcctgcaacaggtctttgtcgtcacgaccaaacaccaccagcagtttgacgtaaggattctgcggatggttaatcatctcaatcaccggggcttttaccgccggatgatcgcgcaggaagtccggccgtttgtcgttggttgcaaagacaatggcattgcgatccggcagttggttatagagtaccgggaagttctgcccacgccagccagaacgcgaaccaaaccacgaggcgacaatggcagaggcttgttgcagcccaacatccggcgcacccgcaaagaccatcggcaaggtgttggtgcggttatcgctcgggtcaaagaatggcaccgggaagtgtgacaggtcattcttcacattcagggtctgataggtcagatccagtccactgtccgcccaacatccagccaaagcgtggtgctggccggtttttcgcacacgtccggcgtggtcagcgtgccggtaacggcagctggggttagtcacgcatagtgatttcccgatcgttcggaacgactttcgcccacggattgtgcgcagccagcagttcttccacggtcggaatagacacatcggaattacggaagatgtgttgaggatcttgttggtttccgcctgccctttccactcttcgcggctctgaccgttatcgagctgtttgtcgatccacggaatcaggctacccgccagcggcacgccaaagttatccaccggcagctcaccgctacgggttaaggttgtgactttgcgttcgatatcgagaatagcagaggacggggtcgcgagttcatctgccacatggccatacagatggcccatctgggttaataactcacgcatatgtcgcgcaccaccgccggaagcggcggtacagttaccgccaacaaaagtcctgatgccattatttaatccgtcggtaatgacgtcctgattgacggggtcaagaatgatgatggcgtcatctttcatgcgcaaagacgatgctgcgtcaatccagtaaccttgccatccgctttcacgaagctttggatagatttcgttggtataatcgccgccctgacaggtcacaatgatatcgagggcctttagcgcctccagatcaaaggcatcctgaagtgtgccagtggttccgccaaaagacggcgcagcctggccaagctgagaagtagaaaagaagacagggcgaatggcgtcgaagtcgcgctcggttgccggatcggtaatatcggccagcgccttaccgttgctctccatcgccacttcttctgaagatggctcatgcggaatggcgtagttccatgtcatgttcagcacctggtccgggttcgcgccaccctgttcggcatacatctttccagtgccactgtaaccagcgacctgagttaacgatagaaccgttctcttccgcgaagcaggtcgatggcagacggaacacttcggtctggatcttcgacgagtcaattcgttcagctcaccgtggttctgccagaagttagaggtctcagtgctcagtgggtcgatggtgacgaggaacttcagtttcgacagacaaccgatcactttgttcttgttcgggaatgaggcaacagggttaaagccctggcagatatagccattgaccttgccctctttcatcatctcgaagtattgcaggacgtcgtagcctttatcccacttcggcaacgcagtcaaagcccccagttgttctctttctgcgcggcatcgctcatagaaagatttcatcaggctaacgaagaacttcggatagttgctccagtagtcaccttgatcagccagcgtcgctttcggcgtgttcgcttccagatacgactgcaaatcaacctgtttttctgacggcagcgtcagataacctggcaggctggtagagagcaggcctaagtcagtcaagccctgaatgttggagtgaccacgcaatgcgttcacgccgccaccggccatacccatgttaccgagcagcaactggatcatcgccatagtacggatgttctgcgcacccacagtgtgctgcgtccagcccagcgcgtacaggaaggtggttgtgcgatccggtgcgctggtggaggccagcacttcacacactttcaggaagtcggcttttggacagcgcggatgagtcagtgtttcatcgcgtttcgcatagccgttttcatcgagctgatagttccaggacgatttttcgtattgacgtttttcagcgtcgtagccgctgaacagaccgtcttcgaaagcaaaatcattgatgaacttttgtaaggagcttatgaaggaaacaagcccgtgccgcagatattcccgtggcgagcgataacccagcgcactatgcggatgccattcgttataatgctcgaacgcctctgcaaggttctttgctgccgttaacccgtctggtttgggcatgatactgatgtagtcacgctttatcgttttcacgaagctctctgctattccgttactctccggactccgcaccgccgtgttcttcggttcaagtcccaacatccgggcgaactggcgtgtttcattagcccggtagcatgaaccattatccgtcagccactccactggagacgacggaagatcgttgccgaagcggcgttccaccgctcccagcatgacgtcctgtactgtttcactgttgaagccgccggtagtgaccgcccagtgcagtgcctcacgatcacagcagtccagcgcgaacgtgacacgcagtctctctccgttatcacagcagaactcgaacccgtcagagcaccatcgctgattgctttctttcacggccactctgcctgtatgtgcccgtttcgatggcggtacagcaggttttcgctcaagcaacagcgcattctggcgcatgatccggtaaacacgtttggcattgatcgcaggcatacccatcaagttctgcctgtctgcgaagcaacgcccatacccgacgataaccatacgttggcagctttccgataaacatggggtatacggagaaggcacatccggaatcaatagtggggacgaactggcggggggccatatcattccaagttcatcgggttcgtgttgggaaaagtgaccgtggccaaatgttttgccatcgccaggacgttccggcagcatatcaacgccgatgatccgttttgcaccgcgacctttcgccagcatcatcgccatcatgccgactgcgcccagaccgaccaccagcacgttatcactgccggaaacttcgccgcgcaaaattccttcatacgctgtaccaacgccgcaactgataaacgcaccatcttcgtagctcagcgcatccggcaggaggatcagatctttgtcttccgccagcaagtattcggcatgaccgccgtcacgctgccagccgtaagccgcttttccttcgccagtacaagaaataggaaaaccgcgacggcagttcgggcaaaaaccacagccagaaatgtgatacaccagcacgcggtcgccctctttaaaatggcggcagccttgccccatcgccacaatctgcccgcacggttcatgaccgttgataaagccctggtataacggtttatcgggtgccgccgctgtggcacggtgttgatgatagatatagtggacatcgcttccgcaaatcccggaggatttcattttgatcagtacctggttaatccccggcgtcggcaccgcaacttcccgcagatcgacggtcgaatttcctggtaaataagctgccagcatcgttttcataaatccctcattaacaatacgattaattttcat

SEQ ID NO: 25931 - DNA, 1617 bp, Homo sapiens
  SIMILAR (453)..(1): 991254mologous to Escherichia coli adenine phosphoribosyl- transferase,accession number M14040,Smith-Waterman Score=755.
atggcccgggaacgggacaaggctgtagctggtaatgccctgtttttcgagacgctgttcgccgccgagatcgaacaggttgataatgaacgcagcgtcagccacttcaccacccagacgacggatcagtttaacggtcgcttcgatagtgccgccggttgccagcaggtcgtccaccaccagaactttgtcgcccggtttgatggcatcaacgtggatctccagctgatcggtgccgtattccaggtcgtaagtttcactgatggtttcacgcggcagtttgcccggtttacggaccggtacaaagccaacgcccagacccagagctaccggagcgccaaacaagaagccacgcgcttcggtgccgacaactttggtaatgcccgcatttttgtaacgctcaaccagcaagtcgatgctgagagcgtaagctttcgggtcttccagtggggacggatcaactgggttgatcgtcatgcaaagaaagagattattctcaaaaaagaacccgccaccagtttctggaagcgggttatggtcagactggcgtcgatattgcccgtggaatggttatgccatctggtaaaccggtcagcacgccagatttacggcagcgcagcatatccggccaacaattttttccagcggctggttaatatatcccgcatcatgagcggtaattgtggtggcaatattggtatcgaaatcaaccggcgcgtgggttgcattttcgatacggatgccttccattactttttcccacaattccgtggtggcaggcgtcgcttcggcgaggaaagattcatcgccttcatacggggatcctctagagtctgcgataccaaagttgaacgtaaagagatcccgcagtggtttatcaaaatcactgcttacgctgacgagctgctcaacgatctggataaactggatcactggccagacaccgttaaaaccatgcagcgtaactggatcggtcgttccgaaggcgtggagatcaccttcaacgttaacgactatgacaacacgctgaccgtttacactacccgcccggacacctttatatcacgtccagctggctgtacatacgcgaatgagtgccacgcacctgagtctgccactatccgcaacgatgttgctgccagaccttgcaattgtgcgcaatgtgctgcgctagattgcgtgtcagttttcgtcactatacggcactcgtgtagcagtgtatattcagcacctggcatactggttgcagctctacaggcgggccacaagccggttgcgctggtaggcggcgcgacgggtctgattggcgacccgagcttcaaagctgccgagcgtaagctgaacaccgaagaaactgttcaggagtgggtggacaaaatccgtaagcaggttgccccattaccggatcgcaaaaatatttcgcctgcggattcgcggctttcacctgacggacgataccgaggatatgttcaccctgctccgccgatcccagatagccacttaatacggcatcacaggtgtgtaatttatcaatggcggcaatgccttgcacaatttcggttaaatggctgggcggcatcacgcagccagtccatttgccgtattgggtgtgattag

SEQ ID NO: 25932 - DNA, 3603 bp, Homo sapiens
  SIMILAR (837)..(899): 581254mologous to Escherichia coli cyclopropane fatty acid synthase,accession number M98330,Smith-Waterman Score=63.
atgagttcatcgtgtatagaagaagtcagtgtaccggatgacaactggtaccgtatcgccaacgaattacttagccgtgccggtatagccattaacggttctgccccggcggatattcgtgtgaaaaaccccgatttttttaaacgcgttctgcaagaaggctctttggggttaggcgaaagttatatggatggctggtgggaatgtgaccgactggatatgttttttagcaaagtcttacgcgcaggtctcgagaaccaactcccccatcatttcaaagacacgctgcgtattgccggcgctcgtctcttcaatctgcagagtaaaaaacgtgcctggatagtcggcaaagagcattacgatttgggtaatgacttgttcagccgcatgcttgatcccttcatgcaatattcctgcgcttactggaaagatgccgataatctggaatctgcccagcaggcgaagctcaaaatgatttgtgaaaaattgcagttaaaaccagggatgcgcgtactggatattggctgcggctggggcggactggcacactacatggcatctaattatgacgtaagcgtggtgggcgtcaccatttctgccgaacagcaaaaaatggctcaggaacgctgtgaaggcctggatgtcaccattttgctgcaagattatcgtgacctgaacgaccagtttgatcgtattgtttctgtggggatgttcgagcacgtcggaccgaaaaattacgatacctattttgcggtggtggatcgtaatttgaaaccggaaggcatattcctgctccatactatcggttcgaaaaaaaccgatctgaatgttgatcctggattaataaatatatttttccgaacggtgcctgccgtctgtacgccagatgctcattaccgcgagccggtccaggctcgggggggggacttgtttgtaccagaaaaatgccagcgcatagtcttttgcgactccgttgccatttctgtacatccacccaagattattttgcgcataagacattccgctctccgcggctatctgataccagacaaccgcttctttataattgggggcttctccacgatccagtgtccagccaagggcgttggaagcgaaaaagatgtcgataaactttatgtccgcagcgccaacggcgaaatggtgccattctcggcctttaccacttcacattgggtgtatggctctccgcgactggaacgctacaacggtctgccgtcaatggagattcagggggaagccgcgccaggaaccagttccggcgatgccatggcgttgatggaaaaccttgcgtcaaaattacctgcgggcattggttatgactggacgggtatgtcgtatcaggaacgcttatcgggaaaccaggctcccgctctggtagcaatttcctttgtggttgttttcctgtgccttgctgcactctatgaaagctggtcaattcctgtctcggttatgttggtagtgccgttagggattgtcggcgtgctgctggcggcgacactctttaatcaaaaaaatgacgtctactttatggtgggcttgctaacgacaattggcttgtcggccaaaaacgctattttgatcgttgagttcgctaaagatctcatggagaaagagggtaaaggtgttgttgaagcgacactgatggcagtacgtatgcgtctgcgtcctatcctgatgacctctctcgcctttattctcggcgtattaccgctagctatcagtaacggtgccggcagtggcgcgcagaacgctgtgggtatcggggtaatgggaggtagctcggtaccgacgctgaatatctgcccgcccctgcatcggctttttatcgccttccagatgaatattcgccgcaatgctgccgcccgccatgccaaatttcagcggttgcaggcgcaggtcagcatttttgaggatgatatgagtagaaagatcgctaatcggcaggctactgccatgctcaatgcgccgccctttgaagcgaacatcggcatccataacgtcccatttatcggtttcgaagcggtcataaggcagcactttgcccgcaggctgaacgcttttttcgcccttcttctgttcagaccgtttcgacttttctgcccctttcccggaatcaacgccaatcaacggtcccaggtccgccagccgcaattgccgcgactcgacatcaccttccagttttggtcgtggctttccggtggtgtagaccagagaaccgtggatatcgctatcaccaattcgcccattaaaaccgcgataatcaaagaccgacgatttttcagtgtcgattttcgctaccagccgaccatccgtttcaaacggcggggtatcgggcagcagaacgcccgtcagttcatagagatcacccaagcggaaatcagcctgtaccggaaacggcgtcccttcgccacgcagcgccagcataccgcctattttcccgtaaccgcccaaaggtattcgccccctttcttatccgtttcccttcgatccgtaataagcaaccctgaagcaagcatcgagagcttgcaggaacggcgtttttggttgcagtgtgagcgtgcttacacctggcagccgatctatcaaacatgcgggcggttaatggccgtggagctattaacggtggtcacgcatcccttgaacccttcgcaacgcctgccgccggatcgctattttactgaaatcaccgtcagccatcggatggaggttgtgaaagagcagattgatttgctggcgcaaaaagccgacttctttatagagcacggcctgctggcatcggtcaatattgatggccctacgctcatcgccctgcgtcagcaaccaaaaatcctgcgccagattgagcgtcttccctggctgcgtttcgaactggtggagcatatccgtctgccgaaagattcaacctttgcctcgatgtgtgaatttggcccgctgtggctggatgattttggtaccgggatggcaaatttctctgcgctaagtgaagtgcgttatgactacatcaaaatcgcgcgagaactgtttgtgatgctgcgtcagtcgccggaaggacgcacactcttttctcagcttttacatctaatgaatcgctattgtcgcggggtgattgtcgagggcgtagaaacgccggaagagtggcgtgatgttcagaactcgcccgcattcgccgcacaaggctggtttctttcacgcccggggccgttagaggacgaatgcatgatcagcagagtgacagaagctctaagcaaagttaaaggatcgatgggaagccacgagcgccatgcattgcctggtgttatcggtgacgatcttttgcgatttgggaagctgccactctgcctgttcatttgcattattttgacggcggtgactgtggtaaccacggcgcaccatacccgtttactgaccgctcagcgcgaacaactggtgctggagcgagatgctttagacattgaatggcgcaacctgatccttgaagagaatgcgctcggcgaccatagccgggtggaaaggatcgccacggaaaagctgcaaatgcagcatgttgatccgtcacaagaaaatatcgtagtgcaaaaataa

SEQ ID NO: 25933 - DNA, 1102 bp, Homo sapiens
  SIMILAR (227)..(1051): 991254mologous to Escherichia coli XANTHOSINE PHOSPHORYLASE (EC 2.4.2.-),accession number D90869,Smith-Waterman Score=1409.
gttattagtagattgcttaataaagtggttttctaaaaacgacatattgttaatgcaaaggaattaatatcgccaatacagtttttaccgtggattaatagagaaaagatataaatccatcgatatcgaatcgctattgaatgcgtgagaaaagtgtattggtaagagccgggacaacctcgctataaaaaggcgttagattccaccctacagaaaaaggatatgtatgtctcaggttcaattttctcataacccgctgttttgcatagatattatcaagacttataaacctgatttcacgccacgagtggcctttattttaggttccgggctcggcgcgctggccgatcagattgagaacgctgtcgcaatttcctacgaaaagctgccgggcttcccggtaagtacggtacatggtcatgcgggggagttagtgctgggccatctccagggcgtaccggtggtatgtatgaaaggtcgcggacatttctacgaaggtcgtggaatgaccattatgactgacgcaattcgtacctttaagctgctgggctgcgagctactgttctgcaccaatgcggcaggctcgctgcgtccggaagtgggggcaggcagcctggtcgcattgaaagatcatatcaacaccatgcccggtacgccgatggtgggtcttaacgatgatcgttttggagagcgcttcttctcactggcaaatgcctacgatgcggaataccgcgcactgttacaaaaagtggcgaaagaagagggtttccctctgacggagggcgtgttcgtctcgtatccggggccgaatttcgagactgcggcggaaattcgcatgatgcaaattattggtggggatgttgttggtatgtctgtggtgcctgaggttatttcagctcgccattgcgaccttaaagtcgttgcggtctctgcgattaccaatatggcggaaggtttaagcgatgtgaaattgtcacatgcgcaaacgctggcggctgcggagctctctaagcagaacttcatcaaccttatttgtggctttctgcagcaaaattgcctgagaaaaacaataagaaacggcctcgcgggtgaggccaaatga

SEQ ID NO: 25934 - DNA, 2064 bp, Homo sapiens
  SIMILAR (25)..(375): 961254mologous to Escherichia coli Hypothetical protein 126: PIR:Q3ECTC,accession number D10483,Smith-Waterman Score=581.
atggacttcgctgaaacggagctcgagttcatcaaattctggggagatatcatcaccaacaagctgaacgaggcgctcgcagcacaaggcgataatgtggtgattaatctggcgtcagatgagtattttaaatcggtgaagccgaagaaattgaatgccgagattatcaagccggtgttcctcgatgagaagaacggcaaatttaagatcatcagcttctacgctaagaaagcacgcggtctgatgagtcgtttcattattgaaaatcggctgaccaaaccagagcaactgactggttttaatagcgaaggttacttctttgatgaagattcctccagcaatggcgaactggtgtttaaacgctacgagcagcgcgctgaatgccggattgttacccggcatttgtcatttagcggtgatgtttgcctggaccatgaccgccgtgatgatcatgaggagctttcttatggtggcgcggcggtggcggcggtccttgttatcgaaccgaacaaactggcctttgacggcagcggttatctggcctgggaaggtctgatctgcatgcaggaaatcggcaaatgcaccgaagaacatcaggcgattgtgcgtaagtggctggaagagcgcaaactggatgagtttccggttgggccctttcccggggaaaaaaccaaccgggggttggttgcgaagcaggcgcccgtcgacacgcccgagaagcgcgcatcggtgatgagcgacaccgtcttgccccacgagatatgctttagcgcggagcgcgacaaaacggtgcgcctgacctttgccgacagtgcgccaggtgtcagtgacgatcagctacaaaaattgtttgaacgtttttatcgcaccgaaggttcccgcaaccgtgccagcggcggttccgggctggggctggcgatttgcctgaacattgttgaagcacataatggtcgcattattgctgcccattcgccttttggcgggcgtggtgataagccccagcacatcgtgaccgtccaccgggccgatgtagttaaagcccagctcttcaaacaacgtgccaggcactaccatgcctttaatatgttcttcggcataccagccgccatattttttatcacgcagtgcgccgttcatggctttgataccgtgatcaaccaacgagtaagcgccaggtcgacccatcgccgcagcaacggaataaaccggcgtttagccatcatttcgtcgacgatatcgccaagttgttgtaatttcggtgcgcaaacgtcacgcagcatcagctcgttgtctggtaaaccgacgaccgatgcccagactgcacggcctgccaggaatcccgatgcgcccgccgtcattgccacgcgtacggcacgcgggaacagtttttcgtcgacaccggaagagaggatcacccatggcatattgatatggtcattcagaccttgtgaagcacagagaagctctttgttgcggacctttgccataaaacggcatttcaacttttgtgaggcgctagtttcatctgcacaagaagcgggtaactatcagcgcaaactggttgctgaagatcagcaaaaaatcatcgacggcatgaaagaagcgggcgtggaagtcatcaccgatctcgaccgcaaagcctttagcgacgcactggggaatcaggttcgcgacatgtttgttaaagatgtgccgcagggagctgatctgctgaaagccgtggatgagccaggctgggcagagcgcgatatggcagaactgtggcaatgctgcatggctgtcattcgcgccctgcttactcattctggtgttagcggggaacaaaattgtcggtatcggcatcttcgcacaaggaaaggggcttggtttttgttggataaaaacgacaaaccgctcgggaatgctattttgtcctcggaccgccgggcgatggaaatcgttcgtcgctggcaggaagatggcatcccggaaaaactctacccgctgaccccgacaaaccttgtgggacccgggcatccgggggttgctgttacacctggcctgaaaagaggcacgaacccataa

SEQ ID NO: 25935 - DNA, 3297 bp, Homo sapiens
  SIMILAR (1237)..(2091): 911254mologous to Escherichia coli K12 putative ATP-binding component of a transport system,accession number AE000350,Smith- Waterman Score=1304.
atgaagaaagtcttcaaaaatgcaccatatcgattttgtccagtgtacgtttgcccgtgcggatacatgggcgtctggcaggacagctaccggaaggataagccgctgaaaggtctgctggatattctgaagctcggcttccgtggctaccgccatctggcggagtttgcgccttcttcggtgaagggcatattccgtgtgctgacttctctggcgacgccagcaacgcaaccactgatcaatgctgagccagctgtagccgcccagacggaacaaaatccgcaggtggggcaagtgatgccgggcgtgcagggcgctgatgcgccagtcgtggcgcagaacggtccttcgcgtgatgtgaagctgacctttgcgcaaattgcaccgccgccgggcagcatggtgctacgtggcattaacccgaacggcagcattgagtttggtatgcgcagcgatgaagtggtgacgaaggcgatgctcaacctcgaatacaccccatcgccatcgttactgcctgtccagtcgcagttaaaggtttatctcaatgatgaactgatgggcgtgctgccagtgaccaaagaacagttggcgacttcaaccgtgtacggctggagtttgtcggcccattatcaggacgtgtgcgaaaaaccggccagcaccacgcttttgctggatgtttggcggagcagtggactggatctgacctatcagaccttgaatgtgaagaatgacctgtcacacttccggtgcccattctttgacccgagcgataaccgcaccaacaccttgccgatggtctttgcggcctctgccattgtcgcctcgtggtttggttcgcgttctggctggcgtgggcagaacttcccggtactctataaccaactgccggatcgcaatgccattgtctttgcaaccaacgacaaacggccggacttcctgcgcgatcatccggcggtaaaagccccggtgattgagatgattaaccatccgcagaatccttacgtcaaactgctggtggtgtttggtcgtgacgacaaagacctgttgcaggcagcgaaaggtatcgctcagggtaacattctgttccgtggtgaaagcgtggtagtgaatgaagtgaaaccgctgctaccgcgtaagccgtacgatgcgccgaactggggcatccatttattactcaaccgtaaccgatttgccagggttacgcggctgcaggcatgcaagctttggggccgcactgacaatgtgttgctggaaaacggtggtcatttagacataaacgcatatggttcggcaaacaagacgattattaaagataaaggaacaatgtcagttttaaccaatgctaaagctgatgcgacccgaatagataatggcggggttatggatgttgcaggaaacgcgacaaataccataattaatggtggcacacagaatattaataattatggcatagccacaggcaccaatatcaacagcggaacgcaaaatatcaaaagcggcgggaaagctgacacaacaattatatcctccgggagccggcaggttgttgagaaagatggtacggcaattggcagcaatattagcgccggaggctcgctgattgtctataccggcggtattgcacatggggttaaccaggagacgggcagtgctttagttgccaacacgggtgcagggactgatatcgaaggatacaacaagctctctcacttcactattaccggaggggaggctaattatgttgtgctggaaaataccggcgaactgacggtagtggctaaaccctcggcgaaaaatactaccattgatactggcggtaagctgattgtccagaaggaggctaaaacagatagcaccagacttaataatggcggcgttctggaggttcaggacggtggtgaggctaagcatgttgagcaacaatccggcggcggcattaattgcttccacgacctccggaacacttatcgaaggaaccaacagttatggaattcagaagctaaaaatgtagtgctggaaaacgctggctcattaacagtcgtcactggttcccgcgcagttgacacgattattaatgccaacggcaaaatccatgacgggcagcctgaatcagaagtaattgctcgcccgccatcgagtgggcggcacagcattaacgaggggcagtgcagtgcctgtcatgcctggaacaccatcaccgaggtgcgtcttgctgcgtcgccaatggtggcgcgtaacgagcgtctcagcggctatgccggtagcgccggggtggcaaaagtccagaaactctccgatatcagccttgaagagctgccgcgtttttccaccggatttaaagagttcgaccgcgtactaggcggcggcgtggtgccaggaagtgccattctgattggcggtaaccctggagctgggtccaggtgctcatcacgtggcattaacccgaacggcagcattgagtttggtatgcgcagcgatgaagtggtgacgaaggcgatgctcaacctcgaatacaccccatcgccatcgttactgcctgtccagtcgcagttaaaggtttatctcaatgatgaactgatgggcgtgctgccagtgaccaaagaacagttggcgacttcaaccgtgtacggctggagtttgtcggcccattatcaggacgtgtgcgaaaaaccggccagcaccacgcttttgctggatgtttggcggagcagtggactggatctgacctatcagaccttgaatgtgaagaatgacctgtcacacttccggtgcccattctttgacccgagcgataaccgcaccaacaccttgccgatggtctttgcggcctctgccattgtcgcctcgtggtttggttcgcgttctggctggcgtgggcagaacttcccggtactctataaccaactgccggatcgcaatgccattgtctttgcaaccaacgacaaacggccggacttcctgcgcgatcatccggcggtaaaagccccggtgattgagatgattaaccatccgcagaatccttacgtcaaactgctggtggtgtttggtcgtgacgacaaagacctgttgcaggcagcgaaaggtatcgctcagggtaacattctgttccgtggtgaaagcgtggtagtgaatgaagtgaaaccgctgctaccgcgtaagccgtacgatgcgccgaactggactaggggtaatggtactttaaatgggttaagtgagttacggcttataaagtgcttggcttgtagtaagagtggtgatgatgaagatgagaaagagaaggaggtcataaagcaatga

SEQ ID NO: 25936 - DNA, 3884 bp, Homo sapiens
  SIMILAR (959)..(1369): 1001254mologous to Escherichia coli No definition line found,accession number U00039,Smith-Waterman Score=693.
atgaattattctttaaaacaattaaaggttttcgtcacagtagcgcaggagaaaagttttagtcgtgcaggagagcgtatcggcctgagccagtcggcagtgagtcacagtgtgaaggaactggaaaatcatactggtgttcgccttctggacagaaccacgcgtgaagtggtgcttacagatgcagggcaacagctggcttttcgtcttgagcgactgctggatgaactgaacaacacgttgcgcgataccgggcggtatggggcaacaactgaacgcagtgcgcggtattccgcatcgctgcctgcccccacttccggacgcagcgagcctgccgcattggtgcagaacagtagctcgcagcccagcagcttaaaggaaaatattatgaaattacgctctgtaacctacgcattattcattgctggcctggctgcattcagcacattttttctggccggcacaatctatacgttgcggttatgaaacatcgcaagccgactcgcaacatagtggggcgaaaaaattcaatgatttactgcaggagagacccaaaggcgagctgaaattaaaactgttcccggacagcactctcggtaacgcgcaggcgatgatcagcggcgtacgtggcggcaccatcgatattggaaatgtccggctcgaattactttgccgggttatcaccagtgatgaacttgcttgatgtccctttcctgttccgcgataccgctcacgcgcataaaacgctcgacggcaaagtcggtgatgatctgaaagcctcacttgaaggtaaaggactgaaagtactggcctactgggaaaacggctggcgcgatgtcaccaactcgcgcgcaccggttaaaacccccgccgacctgaaagggctgaaaatccgcaccaacaatagcccgatgaatatcgccgcattcaaagtctttggcgctaaacccgatcctcgatgccgtttgccgaagtctataccgggctggaaacccgcactatcgacgctcaggaacacccgatcaacgtcgtctggtcagcaaaatttttcgaagtgcagaagttcctttctctgacgcaccacgcctattccccgcttctggtggtgatcaacaaagcgaagtttgatggcttaagtccggagttccagcaggcgctagtttcatctgcacaagaagcgggtaactatcagcgcaaactggttgctgaagatcagcaaaaaatcatcgacggcatgaaagaagcgggcgtggaagtcatcaccgatctcgaccgcaaagcctttagcgacgcactggggaatcaggttcgcgacatgtttgttaaagatgtgccgcagggagctgatctgctgaaagccgtggatgagccaggctgggcagagcgcgatatatgggcatttgcgccagcgtttttttacccactgtttattagcgacttcaaccgtgtacggctggagtttgtcggccattatcaggacgtgtgcgaaaaaccggccagcaccacgctttggctggatgttgggcggagcagtggactggatctgacctatcagaccctgaatgtgaagaatgacctgtcacacttcccggtgccattctttgacccgagcgataaccgcaccaacaccttgccgatggtctttgcgggtgcgccggatgttgggctgcaacaagcctctgccattgtcgcctcgtggtttggttcgcgttctggctggcgtgggcagaacttcccggtactctataaccaactgccggatcgcaatgccattgtctttgcaaccaacgacaaacggccggacttcctgcgcgatcatccggcggtaaaagccccggtgattgagatgattaaccatccgcagaatccttacgtcaaactgctggtggtgtttggtcgtgacgacaaagacctgttgcaggcagcgaaaggtatcgctcagggtaacattctgttccgtggtgaaagcgtggtagtgaatgaagtgaaaccgctgctgccggccggcagccagcccgtttggtccagcagcgcaagcgagagcaggtgttgcttctacgcgtaggaaattgcacatcagtgtttgcggaaatatccggtggattgccaagaatgatgtcttcggcgtgacatggggccacggcacccagctgcgccagccagttcctgtgttggccgtccccacaccacgcccagatcgccacggatagcgaacgaacgattcaacaccaagaaagcccgtgaaatcgcagcggttattttgcttgctttgctcatcgttcgcttcttcatattcttcctgtgccagtcttaaagatagtccagccaggcggaaaatgaggcagcttatagcgccagaaccgccgtattcagcgtttctatcggtgcccgggcgtgaaagaaaccagccttgtgcggcgaatgcgggcgagttctgaacatcacgccactcttccggcgtttctacgccctcgacaatcaccccgcgacatatagcgttttattatatgtaaaagctgagaaaagagtgtgcgttcttccggcgactgacgcagcatcacaaacagttttcgcgcgattttgatgtagtcataacgcacttcacttagcgcagagaaatttgccatcccggtaccaaaatcatccagccacagcgggccaaattcacacatcgaggcaaaggttgaatctttcggcagacggatatgctccaccagttcgaaacgcagccagggaagacgctcaatctggcgcaggatttttggttgctgacgcagggcgatgagcgtagggccatcaatattgaccgatgccagcaggccgtgctctataaagaagtcggctttttgcgccagcaaatcaatctgctctttcacaacctccatccgatggctgacggtgatttcagtaaaatagcgatccggcggcaggcgttggaagggcagatcggtaaacagatattcaaattcactgtccatttctcggccataggcgtggaatgaacttttaatcatattaatgccaccgaacgggtgtagcgcacgtttcaacggcgcatccgttgccaggccaacaattttttccagcggctggttaatatatcccgcatcatgagcggtaattgtggtggcaatattggtatcgaaatcaaccggcgcgtgggttgcattttcgatacggatgccttccattactttttcccacaattccgtggtggcaggcgtcgcttcggcgaggaaagattcatcgccttcatacggtgtatagttatgttgaataaaatcgcggacattaatttcgtttttccagtccgtaccacaggagttagagcgattattcatttctgtatcaatctctaagcctaatacagccaaatgttccatgaccagacgacgaattaagcttgaattctctcctattccgccggtgaatataattccatccaggcgacgtaatgaagctgcgtgtccggcaatatgacgggcaattcggtgaacaaaggttttaattgccagttgcgcgcgttcgtgaccttcatgccaggctttttccagaacacgtaaatccgaagaaagaccggaaatacctaataatcccgactctttattcactacgcgttccaggtcacccaggctctggttggtttggctggcgacccaggacatcgcaccaaagtcgacatcgccactgcgggtacccatcatcaagccttccagcggcgtcattcccattgaggtatcaacactctgaccgttgcgaaccgcgcagattgacgcgccattgccaagatgcgccacaaccaggccggagtcatcttccgtcagattcagcagcgaatgtgcgcgctgggaaacatagcggtgcggacgtgccggggaaaccat

SEQ ID NO: 25937 - DNA, 573 bp, Homo sapiens
  SIMILAR (573)..(190): 991254mologous to Escherichia coli K12 putative ARAC-type regulatory protein,accession number AE000383,Smith-Waterman Score= 632.
ttagggaataccaaaacggtgaaaggctggctggcacagcttcctgctaaatatcaccagcgcgccacctgcatgtttgaccgccacggtctgctggcgctgctggctggacgttttcttgcatttgtccgtacgctgctgccaaccatggcgggaatttccggtctgccaaaccgccgcttccagtttttcaaggctaaattgcgatgcgctttcatagccgacgcgcatcgctgctgcgctggccttcatgccgtcatggatgatcatcatccgcgccttatgcagacggtaattcttcaaatactgcaacggcgaggtactggtgacagacttaaaattatggtggaacgccgatacgctcatgttggcttctgccgccagttgctcgacgctcaggttttcggtgtatttattctcaatccgtttcagcacgcggctaatcagactgaagtgagtctggcgactgaccagcgccagtaacgcgccgccgcaaggtccggtcagcacgtagtacagaatttcgcggatgatctgtttgccgagaatacgcgcatccagtggtcgctccat

SEQ ID NO: 25938 - DNA, 2187 bp, Homo sapiens; identical to SEQ ID NO: 1148
  SIMILAR (1501)..(2184): 991254mologous to Escherichia coli ATH1 protein,accession number D90769,Smith-Waterman Score=1180.

SEQ ID NO: 25939 - DNA, 2790 bp, Homo sapiens
  SIMILAR (2780)..(2694): 961254mologous to Escherichia coli substrate-binding protein,accession number D85613,Smith-Waterman Score=131.
ttatttacggtacaaaatggcttgtgaataccactgtcctgtcacgatggtttcgtccaccatgacgacaacgtaataatcagcttttgcagcgacagctttcgctttgatttctgctaatgcgtcatccggagaaccccgaaccatcgtgcttacgctacctattcgctgtaacccttgcgtctggtcgcggcgaatctcttgcggatggtccgttactggcggtgctggctgtggcgtacctgatttaatcttgaagagttgccggtaaaacactgggccatgtcgatggcgcaaaagcatgtgctggttgtcgaccacagtaaatttggcaaggtgcgtccggcgcgcatgggtgacctgaaacgctttgatattgtggtgagcgattgttgcccggaagatgagtatgtgaagtacgcgcagacgcagcgcattaagttgatgtattaatgacgtataaccggatgacgtttcgcgccatccggttatcagaagattaagagaaccaggtgtcagatactccaccggtacgctccagatgtgtatcagacgcgagaacgggaacagcaggaataacgtcatccccagcaccaggtgcagacggaagataaacgccacaccatcgaggtgttgagaagcgccaccgtggaaggtcaccaccgactgcgcccagccaaccagtttcatcatctcgctaccgtccatatgctgagcggagaacggaatggtcaacaggcccagcgcgcactggataacgagcagcgacaggatcaggatatccgctccggtagtggttgcacgcacgcgtgggctgaacagacgacgtttcagcaacagcacgccgccaatcagacacagcacgccgctggcaccaccagcaaacattgccattttctgtttcacttcaatcggcagccaggcttcatacatccagtgcggcgtcagcataccgaagaagtgaccgacaaaaatccccagaatcccgatatggaacaggttcgacgccaggttcatccggctaaattgcgatgcgctttcatagccgacgcgcatcgctcgtgcgctggccttcatgccgtcatggatgatcatcatccgcgccttatgcagacggtaattcttcaaatactgcaacggcgaggtactggtgacagacttaaaattatggtggaacgccgatacgctcatgttggcttctgccgccagttgctcgacgctcaggttttcggtgtatttattctcaatccgtttcagcacgcggctaatcagactgaagtgagtctggcgactgaccagcgccagtaacgcgccgccgcaaggtccggtcagcacgtagtacagaatttcgcggatgatctgtttgccgagaatacgcgcatccagtggtcgctccatcacgtcgagtaacccgtccgccgcgcataaaatctcttccgtgaggttgtattcccgacgcattgtccggtatgtggttctgacgttgagcgtgtggaaggtgaagcggttgcccgctgtaccggtgccctgatttgcggtgcgcagcgtaaagagtcgctgaaacactttgtttcccgccgtgcgatggatgttgacggaatgggcgacaaaatcatcgatcagctggttgaaaaagaatatgtccatactccggcagatctgttcaaactcaccgcaggcaaactgaccggactggagcgtatggggccaaaatcggcacaaaacgtggttaacgcgctggaaaaagcgaaagaaaccacctttgctcgcttcctctatgcacttggcatccgtgaagtcggcgaggccaccgcagcaggtctggcggcatatttcggcacgctggaagcgctggaagccgcttcgattgaagagctgcaaaaggtgcctgatgttggcattgtcgttgcatcccacgttcacaacttctttgccgaagaaagcaaccgcaatgtcatcagcgagctgttggcggaaggtgttcactggcctgcgccgatcgttatcaacgcggaagagattgacagcccgtttgctggtaaaaccgtggtgcttacgggcagcttcaggcacgccgcttaaacgcgccagtttgctgatgttttccggctgtttcagccacacgtctgggttagcaatgtacggttgctgagcatcgatggcgctcaggatgtttctcggcaaaatcttgcgcaccacccagacgtccagcgttggcgcgccccactgcccgacctgttcagaatcggtcaacaccttgccgtctttttccagggcgttaaccgccggtgcccagacataagcaccatcaatatctccccgctgccaggcagcgataatcgcgggcggctgcaggttcacaatctccacttgcccgggtttaatgccccagtgtttcagtgccgccagcaggctgtagtgggtggtggagataaacggtacggcgatgcgtttgccaatcagatcttccggtttgctgatagttttctttaccaccagcgcttcggagttacccagttttgacgccagcaagaagacttcaatcggcacctgttggctggctgcaaccgctaacgggctggaaccgaggttgccgatttgcacgtcgcctgaagccagcgcccgcacgatgctggtccggccagtccacggttgtccgctttctttagcaaaggtgttgtcggcctgagccactttcccggttcggctgaggtttgatacgccacggtgacgttcaccgcctgtgcctgaaaagcgatgaatgccagtgcggcaagaagcgccccgcat

SEQ ID NO: 25940 - DNA, 2451 bp, Homo sapiens
  SIMILAR (1206)..(529): 931254mologous to Escherichia coli formylglycineamide ribonucleotide synthetase (EC 6.3.5.3),accession number M19501,Smith-Waterman Score=1073.
atggtcgatgccgataccgcctatataaccagccgtggcctgcgcacattaggtgtgcgtttgcgtcaacatcatgaaagcagtctgaaagtggctgaatggctggcagaacatccgcaagttgcgcgagttaaccaccctgctctgcctggcagtaaaggtcacgaattctggaaacgagactttacaggcagcagcgggctattttcctttgtgcttaagaaaaaactcaataatgaagagctggcgaactatctggataacttcagtttattcagcatggcctactcgtggggcgggtatgaatcgttgatcctggcaaatcaaccagaacatatcgccgccattcgcccacaaggcgagatcgattttagcgggaccttgattcgcctgcatattggtctggaagatgtcgacgatctgattgccgatctggacgccggaaagtccatggctgttattcaagatatcatcgctgcgctctggcaacacgactttgccgcgctggcggatcctcatattggtagctgcgttatcttcggtagaaagctgcggcgtgatggtgtgacgtacatcttccacgcgggcaaatgcagaaatcaccagcgacagcggcgacgtcatttcgcgctcttcgttaccttcctgccagcgggttttcatcgacatggagtctttacccaccgggatcgtcaggcccagcgccggacaaagctcttcgcccacggctttaacggcttcatacaggcccgcatcttcaccagggtggcctgccgccgccatccagttggcggaaagtttgatgcgtttgatatcgccaatttgtgttgcggcgatacgggcagaggcggcgaaatccagcagcgcaaccggcgcacgctcgccaatcgccatcgcttcaccgtagtagctgtcgaggctggcggtagtgaccgcgcagttagcgaccggcacctgccacggccccaccatctgatcgcgcgctaccatgccggttacgctgcggtcgccaatggtcaccaggaaggttttttccgccacagtcggcagatgcagcacacgtttcaccgcgtctgcaatggtgatcccttcacgggccagcgcgtcgcctttcgctttcagcgtttgtacaatcgcgggtcatcttcggcgtttaccaagcaggacgtccagcggcagatcgatcggctgattatcaaaatgacgaatcgggcagagacacgatcagtctctcggcgcttacaatcaccgcgggcaagcaagacacaaaatatagagcttttttcttcttcttgtccttcttccgccgctgatacccactatacaccaaacaaaccacgagagaaagcagcgacgagcaaacgagagagaaaccacaccagcacagaagagcagcagagaacaacagcaataaaacaacacatcgcactgggtgacagttccaactcagaggcggccaacgcaaaagctccgaacaacacaggtgtcataatgaaaaaaagaaatttcagcgcagagtttaaacgcgaatccgctcaactggtcgttgaccagaactacaccgtggcagatgcagccagcgctatggatgtcggcctttccacaatgacgcgatgggtgaaacaattacgtgatgaacggcagggcaaaacaccaaaagcctcccccattaccccggaacaaattgaaatccgatcctcctatttcatcttgccagctccggctggccgcatgcgcagtggtggaaacaactcaactgacccgcagctggatgcgctgatccaacggacgctaagtggttcacacaccctcgccgaagcgaaactgcgggaagaaaaagcgcagtcccaggccgatttgttagatgccggttcacaatttacaggtcgcagcgttagggatgctcaaccgccaacgtgtctcggcgaacggctttttaatgcccttattcaatggatgcgccagcactgggtatggacgggccgatactatacggaagccacagtaggtttgtttgccggactggatcttgatttgtggggtgtgcatcgctcagcggttgccgccgccattggcgcgcataatgccgcgctggcagaaaccgcagcagtagagctatcgctggccacgggcgtagcgcagctttattacagtatgcaggccagctatcagatgctcgatctgttagaacaaactcacgatgtgattgattacgcggtgaaagcgcaccagagtaaagtggcgcacggtctggaagcgcaagtgcctttccacggcgcgcgggcacagattctggcggtcgataaacaaattgttgccgtcaaagggcaaatcaccgaaacgcgagaatctctgcgtgcattgattggcgcgggagccagcgatatgccggagatcagaccggtggcattaccgaaagtccagaccgggattccggagaaactcctctaa

SEQ ID NO: 25941 - DNA, 744 bp, Homo sapiens
  SIMILAR (1)..(195): 1001254mologous to Escherichia coli malate dehydrogenase,accession number U18997,Smith-Waterman Score=330.
ggcgaacaaggcgttgtcgaatgtgcctacgttgaaggcgacggtcagtacgcccgtttcttctctcaaccgctgctgctgggtaaaaacggcgtggaagagcgtaaatctatcggtaccctgagcgcatttgaacagaacgcgctggaaggtatgctggatacgctgaagaaagatatcgccctgggcgaagaggaataccaaaacggtgaaaggcttggctggcacagcttcctgctaaatatcaccagcgcgccacctgcatgttttgaccgccacggtctgctggcgctgctggctggacgttttcttgcatttgtccgtacgctgctgccaaccatggcgggaatttccggtctgccaaaccgccgcttccagtttttcaactggttaagtggattgctgtgggtcagcgtggtaaccagttttggctatgccttaagtatgattccgttcgttaaacgccatgaagatcagtgcagaaacggagttttcggaaaaagaaaaggcggcattgctgccgccttaattttaactcgcctgagaaggcgcttcgtcagttcctggaagcgtttcagggagttgcggcgcaaatcctcgcaggccgacgacatgaacgtgttcggtattctggaagactttacgcaccagtttataggtggtgcctttctccgggctgatatttccggcgctgcgaagatgagttgccttgcaaaggctcaggccagcagctccatgcattag

SEQ ID NO: 25942 - DNA, 6240 bp, Homo sapiens
  SIMILAR (933)..(4): 991254mologous to Escherichia coli K12 putative transport,accession number AE000192,Smith-Waterman Score=1571.
ttacacgtgagcaacgggtttcggcgtatgaccggcgttgcgcagcagcatcagcaaatagataaacgatacgctggcgatcatgataaacaataaattatcggagaaattctgcattagcatagcggtaaatgacgggccaagcagacttcccacagtatagctcaacagtaaggcctggttcatcgccaccagttgatgatgttcaactttctcgcaagcccatgccatcgccaccggatatagcgtaaagccagcggcaccgaggatgaataacgctggggccatcgccgcctggctaagcatcgcgatactgccgagaatgacgacaaagacctgaacacgcaacaccagcagtcgaccaaacttatccgccagacgtccaatcggccattgtccaaggatacccgcactgaccagtaccgccatccagaaaccaatgctggcattgctcacccctttgtgattgaggtacagcggcatcaggccatatagagatcccagaacgattcctgagataatgcagccattcacgccaagccgcgcctgacggagttttagcattgacgtaattgacgtcgaatcatggttttcagcctgctgattcagcacacgcgtaaacaacagcggtaagatccctgccaacgtcaaacctgtaacccacggcaatacggacatcagctcggttgaaactttgctgaccagtaactggcctaaaaacgttcccacgtaataaaccatcatatacgcagcaagcaaacgcccacggttacgtgacgtcccactgcacatcagcgcgctctcaacaaccacccaaatcatggcacagccgacgcccgcgacaaaacgccaagccaaccagctccagaatccaatcatcaggccaagggcggcacagccagcggcaaaaatgaaggaggccagataatagctgtcagcaatgtaccgaacaggttgccggtacatacgatgaagtgagaaggctaactgcctgttgaatgtgttcagcgcagtcatttccggctcggtcagcgtcagttgctgtgctttgtcgatcagcagtgactcggtggtggaaacgtccagacgagcgcgatagttacggaaaccgtcagcaattggctccagcagctcaaacatctcaatgtcagtctgatcctgacgcgcatcaacgcgacccggcgcaaacggtacatgaatgctcaaacctgcggcgcttgcggctttctcaacaccaaccacaccagccagcactatgatatccgccagcgaggctttaccagactctttctggattttctccagaacaggcagagcacgaacggctgcggcgttcacatcccagtcgcgctgcggcattaatgccagacgcgcaccgttggcaccaccgcgtttgtcgccaccacggaaggtagaagcagatgcccaggccaccgataccagctcactaacagacagaccagaatccgcaatcgcgaatttcagatcgataatgtcctgctcggtcgggttgtagatcggctgcggcagcggatcttgccagatcagatcttctttcggcacttccggcccgatgtagcgagatttcggccccatatccctgtgcgtcagtttgaaccaggcacgggcaaaggcttcgttgacgcctgcgatggtccggccgtgtgtgtttctgttgtctctgtgtgtctttgtttgttcgtgtgctgtgttgtgttcttgtcttcgtgtctctctcgctctcctgtcggcgtccagatcggcaatcagatcgtcgacatcttccagaccaatatgcaggcgaatcaaggtcccgctaaaatcgatctcgccttgtgggcgaatggcggcgatatgttctggttgatttgccaggatcaacgattcatacccgccccacgagtaggccatgctgaataaactgaagttatccagatagttcgccagctcttcattattgagttttttcttaagcacaaaggaaaatagcccgctgctgcctgtaaagtctcgtttccagaattcgtgacctttactgccaggcagagcagggtggttaactcgcgcaacttgcggatgttctgccagccattcagccactttcagactgctttcatgatgttgacgcaaacgcacacctaatgtgcgcaggccacggctggttatataggcggtatcggcatcgaccatctggcccatcagataggcattttcccgtagctgctcccagcaacgggcattgcacacggcagtgccaatcatcgcataccccaccaccgccaagcacggcgcgttgtgatctaaggatccccgaaaacgtttatccgctacaaacgcatgaagattcaacatgttgcaatagattttgtaggcctgataagcgtagggcatcaggcattgagcacctaatgccggatgcgtcgtgaacgccttatccggcttcgctttggcggtttcttcgccgaccagacctatcttcaggtaacccgcctgatgcagcgtatccattaccttcatcaacgtctcgtaatcgacggttttgtccgctcggaagaagatggtggtgtctttcttgccttcggttaacgcattcaacgccgtaatcattgtttcatcggtgaccggatcgttaccgataaacatcgagttgtctgccttcaccgacagataaaccggtttttccgggcgcggctgcggcgtgctggtagaagcaggcaagttcaccttcacatctaccgtcgctaacggtgccgccaccataaagataatcagcagaaccaacatcacgtcgataaacggcgtcacgttgatatcatgcatttcgccgttatcgtcgaggtttcgttcagatgcattgccatcggatattatcctgcgccgtaattccgtgcgacacgaaccggatgcgcacggggcgggcttcacgatcacggtcccggtttggcgcccaataccctccgagcccgagacagctcgacaccgccggcagagacgctttgccgttcggcagcggctcaacggttccctctttcggcaaccagccgtaataaccggtttccggctcgttcctttctgctgggcattggcagaacgcgcaagaccggtcaggcgataagagtaaacaccgtcatcatccaacgaatcgctaaagtcaaaaccagtctggaacaggctgtcagtaccggctttaaactgaacttctttcagcggttcggtggtcggacgcttgctgaccatattcaacaggccgccaggactgcttttaccgtaaagcacggaaaccgggccacgcataatttcagcgcgttccagcatatacgggtcaatgaccgcatcgttatagaagttgccctgcaacttcaggccattcagatagttattctggctttggccttctgccgcaaagccgcgaatgatcaggtggtcataggtgttggatgcgccacgcgtaccaacagagacacccggcgtgtagctaagcgcttcttttaccgacttcggctgatgcagcgccatctcttcggcggtcacaacagaaatagactgtggcactttttgaatcggcgtatcggttttagtgccggtagcagactgtcgcgccgcaatagttgcagcaagccccatgcgctttcttgggcgcaggtgaacggtaacgtgaagtgtctcttcggtcaacgcgccgtgataaagaatccgtacggtgtcggggctggcatccagggagttgcgtgggctggggtccagtttggggggtctatctttggttgagagcgcaaacacagaggaaccgctcggctgacgactggtaaaggcgtcggcatggatagagacaaacaggtcagcacgctgtttctgggcttttgctacgcgcacttgcaatggaatgaagatgtcttcattgcgcgtcatgtacaccttcatattgccctctttctcgatcagagagcgcaaacggcgagctatttgcaataccacatctttttcgcgcgttttgtatttccccaccgcaccggagtcttcgccaccgtggccagggtcaagcataatgacaatcggacgatcgcgccctgctttacccggttgtggaccactttgcgctggcggcacctgcttttcgaggtcgcctttgttgtaatcctccagcagcgccagcagcgggtcctgcatatcctgtgcattggccggatagaggtccatcaccagacgctctttaaacccggcgaccggcgcaagggcaaacagctgcggttttacgtttggctttaattcaaaaaccatccgtacggtttgcgggtcaaattgcccgacgcgcgccgacttgatgaacgggtcgtctgcacgaatttgtgccgccatccccttgagtaccgagttcaggtttacatcttcgatatccaccaccacgcgttcagggttactcaacgcgaactgcttatatttcagctgacgatttgattccaccgtcacgcgggtgtagctggacgcaggccagacgcgcaccgccacgacctggctgaccgcagccagactgacctgacttacgctcaatagccacatggcacccgcgcttatccccatattggcaatgtcggcaccaatgacgccgatgaagaatcttctcaggtacatgcacaaggtctggtgattcgcgacctgccgctgattgccagcaacttccgtaataccgaagacctctcttcttacctgaaacgccataacatcgtggcgattgccgatatcgatacccgtaagcatgctgcttgtgccgtgcctaatacactcgtggctcgtggtcttaggaagcatctgaagcgggtagcagctccacagcattggattgctggatgaattgactagtgtgtttgctccttgtccaaccaccagtccccacaagctgagagatgtgctgctgcctgaagattgtctgcatgaaggaaccagacttaagtatgccggggatccgtctagactggtgatgactgggcgaagcacatccgcagtggaaaacgtagcagttataccgcaggtgaattggtagtgccgaacggttcgatggtttccgctggggagaaaaaggcaaatggaatctggaatccattgccgccggtacggaaaccgaattgtcgttaaccctgctcggtcaacatgacgctgttgcaggcgtggccttcccctactttggcggcattgaaaatccgcattttcgcagcgtaaaacacaatccggtgctgtccggtggtcagcgtttatgatttggtactggcgaattacggcctcgatcgcgggctggaagatgaaaacagtgcgaaagattacgctgaaatcaaaccgtacaccccagccggcgtgccgcgccagtatattgaaaccatcgcccgtgaatttgccgataccgcccataaaacgcatgggcgctcgatgattatcctcggcgcaggtgttaaccactggtatcacatggacatgaactaccgcgggatgatcaatatgctgatcttctgcggttgtgtcgggcaaagcggtggcggctgggcacactatgtcggccaggaaaaactgcgcccacaaaccggctggttgcactggcctttgcgctcgaccggtaataacacgaaacgttggcgtaaagtagcggatgcgcacatcgctgtcgtcgctgtgcagcagaaaagcagtttccgaatggccgaactcgcgggcgataagctgcatttgcgcttcgctaagattatcggcggggaaaacaacaccggcagaattgccgcgaaacggttgtgaggtaaaagcatcgacgtggtacacaatttgatatcgacgagtaaagtactcaaacggcgcgctccacacatgcaccagtcgggtgaacgggaagagcaggaagatggtcattcccaacaccagatgcaggcggaagacgaacgctacgccgttgagcatctctgacgatccaccacggaaagtgacaatgctttgcgcccaacccaccagcttcatcatttcgctaccatcaggatactgtgctgaaaacggtatggtacttagccccaacagacactggatcagcaaaatgctcatgatgatgatatccggcgtagtggaagtggcacgcacgcgctgatttgtcagcctgcgccacagcagtcctgcgcggcaatctacgtcacacaccgcaaataacggcgagcacaatgccagaattgttcccgccctgcgaaaccagccgtaatacagggggtacat

SEQ ID NO: 25943 - DNA, 1149 bp, Homo sapiens
  SIMILAR (286)..(594): 801254mologous to Escherichia coli ORF_o219; alternate name yghB,accession number U28377,Smith-Waterman Score=390.
tggcaaatcaaccagaacatatcgccgccattcgcccacaaggcgagatcgattttagcgggaccttgattcgcctgcatattggtctggaagatgtcgacgatctgattgccgatctggacgccggttttgcgcgaattgtataacattgccacttttggacaattttgcagacattttattgtgaaaagtcttaaattgttgcgtccgggatcaaggcgtcccggacgattcaggagtacaataggcagataaaggcttaaacgctgttccacaggaaagtccatggctgttattcaagatatcatcgctgcgctctggcaacacgactttgccgcgctggcggatcctcatattgttagcgttgtttactttgtcatgtttgccacgctgtttttagaaaacggcctgctgcccgcctcatttttgccaggcgacacgttgttgatactggcaggcgcattgattgcccagggggttatgaatttttccggcctacgaattgcggttttggacccccgcaaccaagtccggggcggcgggttaagtatattcaaggggcgctggttagggaatcccaaaacggtgaaaggcctggctggcccagcttcctgctaaatatcaccagcgcgccacctgcatgtttgaccgccacggtctgctggcgctgctggctggacgttttcttgcatttgtccgtacgctgctgccaaccatggcgggaatttccggtctgccaaaccgccgcttccagtttttcaactggttaagtggattgctgtgggtcagcgtggtaaccagttttggctatgccttaagtatgattccgttcgttaaacgccatgaagatcaggtaatgacgttcctgatgatcctgccaattgccttgttaaccgctggcttgttaggcacgctgtttgtggtgattaaaaaaaaatactgtaacgcctgacgattttccccgttcccggttgctgtaccgggaacgtatttaattcccctgcatcgcccgcattcttgccgcatcttcccccggcgtcacaccgaagtaacgtttaaactcacggctaaattgcgatgcgctttcatagccgacgcgcatcgctgctgcgctggccttcatgccgtcatggatgatccccgggtggg

SEQ ID NO: 25944 - DNA, 1290 bp, Homo sapiens
  SIMILAR (1290)..(1063): 401254mologous to Escherichia coli ETHANOLAMINE UTILIZATION PROTEIN EUTI (FRAGMENT),accession number D90874,Smith-Waterman Score=110.
atgcccccagagatccctgagacaggctgttaccctcctgacacaggccccctgcactggcccctgattgaccagtcacagatatccaatctgacctctgactcccagggacccgcgaagagggaggagaaagcagggaacaaagaagagaaaagggaaaagaggagacagaagaagaagaggaatacagagacacaaacacaagacacggaagcacagaacaaacacagacaagaagacaacgaaaagcaacaacaacaagaaacaaagaagacgaaagacaacaaaaaagagaggagaaacaaaaaggaagaaacaaacaagcacaaaaaacaaagaaaaaaaaaacgagcaaacaaggccgtcgcttcctgctctacttgccgaagaaaagacagaaaacgaagaaggtatagccggtaccacaccgtcggttctcatttccacgccctggaccgcaccacgctgtcaccgccaaccgtgatatcagctactacacggtgcatgaatccttcgttccaccattccgctggtgttctgcgaagcggagaaaatggaccccaataccagttcctgaaagtgatgatgattgatgaacccgccatcctcgaccaggaagtgaaagagaaatataccgtgctgaaagtgcgccgtacttcctcgaaatcctcgataaacgcgttaacaaaggccgatcgggaagacttcttccaggtcgcctgcggacgcgggataacgtgtacagataccagctcgccgatacgctgtgcgctgcggcacctgcatcggtcgcggctttacaggctgcaacatcaccagaaccatggcagtacacaggccgccgccaatctgcttaacaccaaccagttgacgcgcgcagctttcaccatcgcgtcagaagcctcaatcagtgcaacaggccccgggtttcgatcattcctaatgcttccattgtgctttcctcttatcagggtccagaacgggaccgttcattcaaccagtgtttgtaaactgtttcgcggttcacttctgtctgacgcggcacagctgccaccagcgccagtcgataatttcctgcacgctacaaccacgagagagatcgtgcatcggcgggcaagtccttgtatcagtggcccgacggcacgatatccgccgagtcgtgtgcgattttgtaaccaatatttccggcttccagcgacggaaaaaccatacattgggccttgccctgtagcgggctggcaggcgctttttgcgccgcccttccggcacgaagtcggcgtcaaactgtaa

SEQ ID NO: 25945 - DNA, 1842 bp, Homo sapiens
  SIMILAR (1231)..(1818): 1001254mologous to Escherichia coli K12 putative oxidoreductase,accession number AE000373,Smith-Waterman Score=983.
atgaggtgccagaacgcctggtggattatgcaacattccagtggcagcgagcgtctgtccagcgttttattgcactttcggcgaacgaatctggctgatagcaacgacagaatccagtatcatagcttacgttttttcgacgaggacggtgcccagtggctggtgatccttggcgacgtgttgaatcacggcccgcgtaatgctttaccggacggttacgcgccacgcaaagtcgctgaacggcttaatgaagtggcacataaggttatcgctgtgcgcggcaatctgcgacagcgagtggatcaaatgctgctgatttcccgggcaatcaatcggttagtggcgagcaactggaatcggcgctcggcacaaatgcggtgtccgatctcgggcaaaaacttggcgtggataccagtacagcttccagtttactggcagaacaattgccgaagattattgatgcgctctcaccgcaagcatgggtcaggaaccaatctacctggggaactcatggctattaaactcattgctatcgatatggatggcacccttctgctgcccgatcacaccatttcacccgccgttaaaaatgcgattgccgcagctcgcgcccgtggcgtgaatgtcgtgctaacgacgggtcgcccgtatgcaggtgtgcacaactacctgaaagagctgcatatggaacagccgggcgactactgcattacttataacggcgcgctggtacagaaggccgctgatgctatgacgactatcgttcctgaaaaactctctcgcgaagtcggttctcatttccacgccctggaccgcaccactgctgtacaccgccaacccgtgatatcagctactactacggtgcatgaattccttcgttgccaccaattcccgctggtggtctgcgacggaggaagaatgaccccaagagccatgttcttattcagtagtgctcacatactgatgcctctgaactatcacaactctcatattaatacattgttcccggtggcgggtacgctgatggttgaaccgactgaatctgaaagcaaagtggaactggatcgctttatcgacgcgatgctggctatccgcgcagaaattgaccaggtgaaagccggtgtctggccgctggaagataacccgctggtgaacgcgccgcacattcagagcgaactggtcgccgagtgggcgcatccgtacagccgtgaagttgcggtattcccggcagcacttgtgactggtggcagtcgcggcatcgggcgggcaactgcattactgttggcgcaagaagggtatacggtggcggttaattatcagcaaaacctccacgcggcgcaggaagtgatgaacttaataacgcaagccggtggcaaagcattcgtgctccaggcggatatcagcgacgaaaaccaggtcgttgcgatgtttacagcaatcgatcagcacgatgaaccgctagcagcgctggtcaataacgccgggatcttgtttacccagtgcaccgttgaaaaccttaccgcagagcgaatcaaccgagtactttccaccaacgtgacgggatattttctctgctgccgcgaggcggtaaaacgcatggcgcttaaaaatggtggcagtggcggcgctatcgtcaatgtctcttcggtggcctcacggttgggttcgccaggggaatatgttgattacgcggcatcgaaaggggcgattgatacgttaaccaccggactatcgctggaagtcgccgcgcaggggattcgcgttaactgcgtgcggccagggtttatttataccgaaatgcacgccagcggcggcgaggcttggacgcgtcgatcgcgttaa

SEQ ID NO: 25946 - DNA, 1278 bp, Homo sapiens
  SIMILAR (655)..(921): 961254mologous to Escherichia coli f270,accession number L10328,Smith-Waterman Score=434.
cgttaacttttcaccaaaaagtagtcaaattcaccacgccctgcgcaccgtcgcggggcgttttgctgttaaatcaatagattatttttggcatgattcttgtaatgccagcaagagatttcatatttgggagagcatcatgctggaactactttttgtgattggctatttagtcatgctgatggtcaccggcgtttcgttgctgggcattatcgccgcgctggttgtggcgacggccattatgttcctcggcggtatgctggcattgatgattaagttgctgccgtggttactactggcgatttcggtggtgtgggttattaaggcgattaaagcaccaaaagtgccgaaatatcagcgttatgaccgctggcaattggcggttagacgatcccctctgctgcccgatcacaccatttcacccgccgttaaaaatgcgattgccgcagctcgcgcccgtggcgtgaatgtcgtgctaacgacgggtcgcccgtatgcaggtgtgcacaactacctgaaagagctgcatatggaacagccgggcgactactgcattacttataacggcgcgctgggtacagaaaggccgctggatggttagcaccgttggcggcaaaactgcttctcaagcttatggacgaactaatcggtttcctggaaaaactctctcgcgaagtcggttctcatttccacgccctggaccgcaccacgctgtacaccgccaaccgtgatatcagctactacacggtgcatgaatccttcgttgccaccattccgctggtgttctgcgaagcggagaaaatggaccccaatacccagttcctgaaagtgatgatgattgatgaacccgccatcctcgaccaggctatcgcgcgtattccgcaggaagtgaaagagaaatatcccgtgctgaaagcaccgaatctccaacaaccacatggaagttcaggctccagcttccaccgagaaatctttttctcctccagatctgaagacaaaaggagaggaggcctggtggtgagcgggatatctctgttagttgtcagcgcaggtccatgggttaggaatgctaatgagcctcttggccagctgaagacttggttctctctctcgcacaccctgacgctcacatacactcgggctcctgcatgccgactgacaagcacacagacagagcctcgtgcacgaccctgtctctctcctctttcctctgagcccagagatcgatcgctgaccccacggttgggccaacgctttatttatctggctgtgcaatga

SEQ ID NO: 25947 - DNA, 1509 bp, Homo sapiens
  SIMILAR (1)..(555): 991254mologous to Escherichia coli similar to ~start codon is not identified yet,accession number D90869,Smith-Waterman Score= 966.
atgcttttctactatctcactcgcatgattgtaagtccccactttgcgcagatattgtggcgcagggatatcgctccgtcgttgggcaaagagaaacgcgcatttaccttaagctggctggcagcgttaagcgtgctgctacttctgttgtgcacaccttatgaaaacgactttattgccggttacctggtacccgttttcttcatcatctttaccctcggggtcggtaagcttcgctatccgtttttaaatctcacctgggctgtttcaacgctttgccttctgaattacaaccagaactttttgcaaggggtggaaaccgaatattcgctggcatttattcttgcggtgctgatttcctttagcgtttgcctgctctatatggtgcgcatttatcatcgcagtgaatggcttaatcgccgctggcatttgcaggcgctgacagatccgttaacgctcctacccaactttcgtgcgttggaacaagcgccggagcaagaggcgggcaagagtttttgctgcctgcgcactgataatcttgagtttatgagtcgtcggtcaaaagctgaaaagctgtctcagtgtgatggttttgtctggaagtataaacctcacgcattcgcgctgggctttgttgaagcgccacgcggtgaagacgtgcactggagcatgctcggtgataaccaaaaattgttccgctggcgctgccgtgccgccacggcaaccgacaacatgccgaagatgagcaacaaccggttggggaaatcgctgccgatggattatcgccgcggtgacgatattcgtcgccgggtgtcggcggcgctggataaagtcgggctactggacaaagcgaagaacttccctattcagctttcgggcggtgaacaacagcgtgttggcattgcccgcgcggtggtgaacaagcccgcggtactgctggcggacgaaccgactggtaacctggacgacgcgctgtcggaaggcattttacgtctgtttgaagaggggtacacgcaggcctcagcagagttctgtcaatcactggctcagtacgattacatcaccctgcgggcatgcccgcaggtcacatcaccgaaccccacacctgattatggtatccgttacggcgaactgtcgctcaagatgattcgggatagcaacgtgctcatgaccgccacgcttataccgacgttcattagcaacacgatgcacctcttccggcgtcatcgggttagcgccgttacgatctgccccccacagcagcagcagataacgcaaacgttgcagccctgcagtcggacgcgcctgaatcacagtataagcgcgctgggtatcgagttttacggaagagacaaccgcgaccggatagccttccgggaaacgaccgcctggctacgattcaccagcattcggcttaaacagccttccagcaccagttccatctgctttgctaccatcgccggatcgtcaacttccagtgtggttaacagttcgtgggtgaaatcgtag

SEQ ID NO: 25948 - DNA, 1326 bp, Homo sapiens
  SIMILAR (436)..(1011): 981254mologous to Escherichia coli K12 putative outer membrane protein,accession number AE000300,Smith-Waterman Score= 1006.
atgcatacttttgaagtggctgccaggcatcagtccttcgccctgccggcagaggaattgtcgctgagccccagtgcggaaattcttgatatcaaaaatcaggagttatcgggaacgttaactctgtattcccggccctctatcgcccaatgctggttggtgcccgcattaggtgactttacacgccggtatccgtctatttcgctcaccgtgctcactggtaatgacaacgtcaatctgcaacgtgccggaatcgatttggcgatctactttgatgatgcgccgtcagcgcaactcactcatcactttctgatggatgaagaaatcctgccagtatgtagcccggaatacgctcaaagacatgctttaaccaacacggtaattaacctgtgtcactgtacgttgctccatgacagacaggcatggagcaacgactccgatttgcagttggccggtggtggagcagatcttgatgtcagcgtgaaagagacgagcggctcggtaaccacctatctggtgccttatgcagcggtgccaaatatgctgcaacccggcgtgtcgaaatatgatttagcggcgggtcgtagccatattgaaggggcgagcaaacaaagtgattttgtccaggcgggttatcagtatggttttaataatttattgacgctgtatggtggctcgatggtcgcgaataattattacgcgtttactttgggggctggctggaatacacgcattggtgccatttccgtcgatgccactaagtcgcatagtaaacaagacaacggcgatgtgtttgacgggcaaagttatcaaattgcctacaacaaatttgtgagccaaacgtcgacgcgttttggtctggcggcctggcgttattcgtcgcgtgattaccggacatttaacgatcacgtttgggcaaacaataaagataattatcgccgtgatgaaaacgatgtctatgacattgccgattattaccagaacgattttggccgcaaaaatagcttttccggccaatatgagccagtcattgccagaagtgcggcgcgggtgtgctgtgccgatggccgagcagggagtgaagcagtgattgataaagatctcgccgctgcgttgctcgccgagcagattaatgcagatggactggtgatcctcaccgatgctgatgcggtatatgaaaactggggaacgccgcagcaacgtgccattcgccatgccacaccggatgagttagcgccatttgccaaagccgatggttcgatggggccgaatgtaacggcggcctacaaccggtgccgcatccggcaattggtgcacaatgcctga

SEQ ID NO: 25949 - DNA, 5073 bp, Homo sapiens
  SIMILAR (1177)..(2367): 881254mologous to Escherichia coli No definition line found,accession number U00039,Smith-Waterman Score=1820.
atgaaaatcagtcgggaaacactccaccagctaattgagaataaactctgccaggctgggttaaaacgtgagcacgctgcaaccgtggctgaagtattggtttacgccgatgccagagggatccactctcatggcgcggtgcgcgtggaatactacgcggaacgcatttcaaaaggcggcaccaaccgcgaaccggagtttcgtcttgaggaaaccggaccgtgctcggcaattttacatgccgacaatgccgccggacaggtcgcggcgaaaatgggtatggaacatgccatcaaaaccgcccagcaaaatggcgttgcggtggtcggtatcagccggatgggtcacagcggcgcaatctcttattttgtgcagcaggcagcccgcgccggattcattggcatttcgatgtgccagtccgatccaatggtggtgccgtttggcggcgcggaaatttactacggtactaacccctggcctttgccgcgccgggagaaggcgacgagatccttacctatgatatgccgactaccgtacaggcatggggaaaagtgctcgacgcccgctcgcgtaatatgtctatcccggatacctgggcggtcgataaaaacggtgtaccaacaaccgatccgttcgcgcgaattattccgtcaacatcttagccagaccatgcgcgaattaaatgccattacccccgcgcccggttttaatcaggtttattatcccggacaggatcaggatattaaacaacgcaaagccgccgtcgaaggcatcgaaattgttgatgatatttaccagtatttaatttccgacgcgctttataacacgcacgcgctcaatggcgttaagaccgactgtcggcactggctgggtaaaggccccggattaacgccgagtcatgatgacacgctgagcaggaatgctgctggcggcctgctgctgggcacagcctgggcccagttccttatccggttggcagattgtgtcacgtgcaacgggccgcaggtggtggcatgcttggcatgtgcacgaatcatggcgtggaaagaggtagaaccgtatccgctggatgtgctggttgcggaaagccaggggatgattggctatatgctggcgcagagtttgagcgcacagccgcagatgccgcccgtgacgacggtgctgacgcgcattgagagaaatgtattggtccggtttatcagccagaagaacaagaggcactggaagcgcttacgctgcaaagatgagacgggaatagccaacgccgattctgtcgattttgatgcgccacgtaccacgcgatcgttcttgcaaatgaccatgggctggttcctgaaagaaaaacagctggcgatgatgcagacgccgcaccacttcttctcaccggacccgtttgaacgcaacctggggcgtttccgtaaaacgccgaacgaaggcacgctgttctatggatggcaacgatatgtggacgccactttcttctgcggttcctgtgcggtgattcgtcgtaagccgctggatgaaattggcggcattgctgtcgaaaccgtgactgaagatgcgcatacttctctgcggttgcaccgtcgtggctatacctccgcgtatatgcgtattccgcaggcgtcggggctggcgaccgaaagtctgtcggcgcatatcggtcagcgtattcgctgggcgcgcgggatggtacaaatcttccgtctcgataacccgctcaccggtaaagggctgaagtttgctcagcggctatgttacgtcaacgccatgttccacttcttgtcgggcattccacggctgatcttcctgactgcgccgctggcgttcctgctgcttcatgcctacatcatctatgcgccagcgttgatgatcgccctattcgtgctgccgcatatgatccatgccagcctgaccaactccaagatccagggcaaatatcgccactctttctggagtgaaatctacgaaacggtgctggcgtggtatatcgcaccaccgacgctggtggcgctgattaacccgcacaaaggcaaatgtggactggtggaagaagagtacgtcgactgggtgatctcgcggccctacatcttccttgtcctgctcaacctggtgggcgttgcggtaggcatctggcgctacttctatggcccgccaaccgagatgctcaccgtggtcgtcagtatggtgtgggtgttctacaacctgattgttcttggcggcgcagttgcggtatcggtagaaagcaaacaggtacgccgatcgcaccgcgtggagatgacgatgcccgcggcaattgcccgcgaagatggtcacctcttctcgtgtaccgttcaggatttctccgacggtggtttggggatcaagtatcacacgaaagggaggagcagacaagcaaggttacggaaagcccgaagcctttgtggacgaacctgcgaccgcctcaacgggacaaacagcagaggcccgggaagaagccaaccaccaagggccttcgacgggttcgagttccgctgtgataacggagagagactgcgtgtcacgttcgcgctggactgctgtgatcgtgaggcactgcactgggcggtcactaccggcggcttcaacagtgaaacagtacaggacgtcatgctgggagcggtggaacgccgcttcggcaacgatcttccgtcgtctccagtggagtggctgacggataatggttcatgctaccgggctaatgaaacacgccagttcgcccggatgttgggacttgaaccgaagaacacggcggtgcggagtccggagagtaacggaatagcagagagcttcgtgaaaacgataaagcgtgactacatcagtatcatgcccaaaccagacgggttaacggcagcaaagaaccttgcagaggcgttcgagcattataacgaatggcatccgcatagggcaaatccagatgccaacgtagtcagcgaagatgtgctgcgtgagagcgtcggtaagtcggtcgttaaccttattcacggcgtgcgtgatatggcggcgatccgccagctgaaagcgacgcacactgattctgtttcctccgaacaggtcgataacgttcgccggatgttattggcgatggtcgatgattttcgctgcgtagtcatcaaactggcggagcgtattgctcatctgcgcgaagtaaaagatgcgccggaagatgaacgtgtactggcggcaaaagagtgtaccaacatctacgcaccgctggctaaccgtctcggaatcggacaactgaaatgggaactggaagattactgcttccatagccaacccggttatgaatgcctaatcgatccgctgaacgatagcgccaaacgcgccaccatgttcggttcgttcgcggtgatccgcgagtccggtatcaacagcctacgtgttggcgacgtttattacgtaggtcatctgccgtggttcgagcgcgtgtggtatgcgctggcaaaccatccgattctgctggcggtgctggcggctatcagtgtgatattgctggcatgggtactgtggcgtctgctgcgaattattagtcgtcgtcgtcttaacccggataacgatgttcaggcagcctgtacctggcctgcctgggagcagtttaaaaaggattacatcagtcaggaagggcgcgtcatcgaccccagcgacgcgcgcaaaatcaccacctccgaagggcaaagttacggcatgttctctgccctggcggctaacgaccgtgcagctttcgataatattctcgactggacgcagaacaatctcgctcagggttctttaaaagaacgtttgcccgcctggctgtggggcaagaaagagaacagtaagtgggaagtgctggacagcaattcggcctccgatggtgatgtctggatggcctggtcgttgctggaggcggggcgtttgtggaaagagcagcgttataccgacatcggcagcgcgttgctaaaacgtatcgcgcgggaggaactacctggccgccgacgctggcgcagtatttcacccgctttggcgcgccgtggaccacgctgcgcgaaaccaatcaacgtttattgctggaaaccgccccgaaaggtttttcgcccagactgggtgcgctatgagaaagacaaaggctggcagctaaaagccgaaaaaacattgatcagcagctacgacgctatccgcgtttacatgtgggccgttcagcgccagcgcgtggccgataactttcccggcagcgatgcctattacaactatgtgctgaccctgtttggacaaggctgggatcaacaccgtttccgcttctcgacaaaaggaatgcgcaaattcacactaaacatattcacgctttccctcggtctggccgtcatgccgatggtcgaggcagcacaaccgctcagcaacagttgctggagcaagttcggtaaggcgaagcgaaccatcgtgaagatctggtgcaacggcggtatatcgggtggaactatcggatcgaataaccggacgggcgggattatcattattgatttcatcgatatgaataatgaagatcaccgccgccgagtgctgcactcgctggatgccaagggcggcctgcgtattgctttaccgcatcttgacgcctggcgtccggaaatcctcaacaaaatagaatccgcgactggcatgccggtagaagccagtcagctctcagccagctggcagaattttggcccgacgcttgaagcacacgacatccgtgcagaactaaaagatggcggcgaattttcggttaaacgcgttactctggcgctggatgtctggcagagcctgttacatatgcgctggcagtttcgcgacctcactttctggcagctgcgctttcgcaccaacactcctatcaccagcggtggtagtgatgacagtctggaagccagtcacatcagcgatctgtttcttcgtcaatttgaccagttgtgcgaattctgctggatgacgatcgacaaaggcgatgtaaccggcggtgacgtctggctgaaacagggcggtgccagctggttgggcgagaagcaaacgcatacggctgctcggtggataatctga

SEQ ID NO: 25950 - DNA, 3388 bp, Homo sapiens
  SIMILAR (1565)..(3007): 991254mologous to Escherichia coli similar to ~start codon is not identified yet,accession number D90869,Smith-Waterman Score= 2487.
caacagcactcgcacaaagcgaggtgagagtatgtatcgcatggacaaactaaccactggtgctgcctatggcgcttcagccgggagcatcctaaacggcatgttgaatgcctacagccccgagcagtggaacgctatcggcgtgctgacaaccgccgcagcaggagccgagatgaacccaacgttgaggaataagctggtgggtgccattgttggcggatcaggggcaatcactattgctgcagtaatgctgggcaatgcggatggactcgaaggtcggcgttattacgcctatcaggatgtggtcggcgtctggaccgtttgcgatgggcacactggtaccgacattcgccgcggtcaccgatataccgacaaagagtgtgacaacctgcttaaggcagatctgcgaaaggtggcaagcgccatcgacccgctgatcaaggttcgcatccctgagccaacccgcgccgcgctttactccttcacctataacgttggctctggtgcttttgccagctcgacgctgctgaagaagctgaactccggtgatgttccggtgcacctgaagatcgtattcagagcgtgggtgccgtctcctgactggctagtccactctatgcgcacactccctgagagattggcgctcgagtatactcgtagtggagccaataggggtatctggggattacgcagcggtgccgtcacgctggaaacctcgcaggtattcgccgcgctgatgggcgatgcgccgcgcagtatgacgatggtggtcacctatttttttttaccacgcgtgctgatggcgctgttgattggcgcagcactgggcgtcagtggcgcgatttttcagtcgctgatgcgtaacccgctcggcagccctgacgtaatgggctttaacaccggggcgtggagcggcgtgctggtggcgatggtgctgtttggtcaggacctgacggctatcgcgctgtcagcaatggtgggcggcattgtcacttcgctgctggtctggctgctcgcctggcgcaacggcatcgacacctttcggttgattattatcggtatcggcgttcgcgccatgctggtggcctttaatacctggctgttgctgaaagcgtctttagaaacggcgctaacagcaggtttgttggaatgccggatcgctcaacggcctgacgtgggcaaaaacctcgccttccgcacccatcattatattgatgctcattgccgccgccttactgtcgcaccgcacattgcccgacgcattagcggcaccgctcgctgggggctaacccaggcggcgctatgcggggcgctgttactgcgtggcggccgatctctgcgcccaacaactgtttatgccgtatcaacttccggagtctcgcaaaaaatgaccgaatcagtagcccgtttgcgcggcgaacagttaaccctgggatatggcaaatataccgttgcggaaaatctgactgtagaagctcttccccagggctgccgaaggaatgaagaacctttcttggggtcctcccatccagcggacagcgataaagccgaactagttaaagtgatatccacctttttcggcgatgcttttgccattttcacggtcgttgatttgctaagccttttcaccgctgtgctgatttacaacatgcttttctactatctcactcgcatgattgtaagtccccactttgcgcagatattgtggcgcagggatatcgctccgtcgttgggcaaagagaaacgcgcatttaccttaagctggctggcagcgttaagcgtgctgctacttctgttgtgcacaccttatgaaaacgactttattgccggttacctggtacccgttttcttcatcatctttaccctcggggtcggtaagcttcgctatccgtttttaaatctcacctgggctgtttcaacgctttgccttctgaattacaaccagaactttttgcaaggggtggaaaccgaatattcgctggcatttattcttgcggtgctgatttcctttagcgtttgcctgctctatatggtgcgcatttatcatcgcagtgaatggcttaatcgccgctggcatttgcaggcgctgacagatccgttaacgctcctacccaactttcgtgcgttggaacaagcgccggagcaagaggcgggcaagagtttttgctgcctgcgcattgataatcttgagtttatgagtcgtcattacggcttaatgatgcgcgttcactgtatccgctcaatttgccgtacgctgctgccgttgatgcaggaaaacgaaaagttgtatcaattaccgggtagtgaaaacatgttagtgctgagcgggccggaaacggaagggcgactccagcatatggttaacatcctgaatagtcggcaaattcactggaacaataccgggctggatatgggctatggtgctgcctgggggcgttttgatggaaatcaggaaaccctgcaacccttgttggggcagttaagctggctggcggagcaatcctgcgcacatcatcatgtgctggcgctggatagcagagaggagatggtttccgggcagaccactaaacaggtgctattgctgaataccattcgcacggcgttagatcagggtgatttgctgctctacgcccagccaattcgcaacaaagagggtgaaggttatgatgagatcctcgcgcgactgaaatatgacggcggcattatgaccccggataagtttctgccccttattgctcagtttaaccttagcgcgcgttttgatttgcaagtgctggaatccttgttgaagtggctggcaacacacccttgcgacaaaaaaggaccgcgcttttcagtcaatttaatgccgctcacgctgctgcaaaagaatattgccgggcggattattcgtctgtttaagcgttatcacatctccccgcaggcggtcattcttgagatcaccgaggagcaggcgttttctaacgcagaaagcagcatgtacaacatcgagcagctgcataagtttgtatccggactttttatcaccccaaagagaaactctgccactgttaaacaacagctgcccacttccccctctggcctggggacctggggcacaggggctggtggagacacggggtctggctgcaaccggagagttcggcgctttggatttcgcaacgtcagccattaccgcagcgtcgttaatggcaacgctcgcggtgatggcgacaatgaaccaatcagccgagcttcaatatcatcatccgcaataactaaacgccgggtacgcggaaacttaatcgccagttcagtcaggcaagataatccctctctgcgctcacttctcatggcagaaaaagaaaaaatgaccgccgcaaacgagatccgcgacatggcatcctga

SEQ ID NO: 25951 - DNA, 1830 bp, Homo sapiens
  SIMILAR (706)..(942): 971254mologous to Escherichia coli similar to P. aeruginosa carbamate kinase,accession number U82664,Smith-Waterman Score=390.
  misc_feature (1)...(1830): n = a,t,c or g
cccttgttctgttcggagtggccgaaacgtaccctgttgcgaatgatttcgctgcgggcgctggggcatacgtcaggggcagatacgctgctggggttcgggcttggccaacaattattacaaggaaaaccatgaaaacactggttgtggctcttgggggcaacgccttactccagcgcggtgaggcgctgacggcagaaaatcaatatcgcaatatcgccagtgctgtacccgcgctggcacgcctggcccgttcttatcggttggcgattgttcacggcaacgggccgcaggtggggctgctggcattgcagaatctggcgtggaaagaggtagaaccgtatccgctggatgtgctggttgcggaaagccaggggatgattggctatatgctggcgcagagtttgagcgcacagccgcagatgccgcccgtgacgacggtgctgacgcgcattgaggtttcgcctgatgatccggcgtttttgcagccagagaaatttattggtccggtttatcagccagaagaacaagaggcactggaagcggcttacggctggcagatgaaacgtgatggtaaatatttgcgccgggtggtggcgtctccgcaaccgcgtaaaattctcgacagcgaagccatcgagttgttgctcaaagaggggcatgtggtgatttgcagtggcggcggcggtgtgcctgtgacgatatgacggagcagggagtgaatcagtcattcataaagatctcgccgctgcgttgctcgccgagcagattaatgcagatggactggtgatcctcaccgatgctgatgcggtatatgaaaactggggaacgccgcagcaacgtgccattcgccatgccacaccggatgagttagcgccatttgccaaagccgatggttcgatggggccgaatgtaacggcggtgagtggttatgtcagaagccctgtgcagatgcaccaccggcagtttcagccagtcataattcacatcgctaccaatcagattgatcatcaccgacggattattcaccactggttgcgngaatggcttaatcgccgctggcatttgcaggcgctgacagatccgttaacgctcctacccaactttcgtgcgttggaacaagcgccggagcaagaggcgggcaagagtttttgctgcctgcgcattgataatcttgagtttatgagtcgtcattacggcttaatgatgcgcgttcactgtatccgctcaatttgccgtacgcttctgccgttgatgcagggaaaccgaaaagttgtatcaattgccggtgaactgctgttagtgctgagcgggccggaaacggaagggcgactccagcatatggttaacatcctgaatagtcggcaaattcgctggaacaataccgggctggatatgggctatggtgctgcctgggggcgttttgatggaaatcagcaagccctgcaacccttgttggggcagttaagctggctggcggagcaatcctgcgcacatcatcatgtgctggcgctggatagcagagaggagatggtttccgggcagaccactaaacaggtgctattgctgaataccattcgcgcggcgttagatcagggtgatttgctgctctacgcccagccaactcgcaacaaagagggtgaaggttatgatgagatcctcgcgcgactgaaatatgacggcggcattatgaccccgcataagtttctgccccatactgcgcagtttaaccttagcgcgcgttttgatttgcaagtgctggaatccgtgttgaaggcgccgccccccccccctgcgatctgcagaacgaaagcacactggcggccgtga

SEQ ID NO: 25952 - DNA, 3639 bp, Homo sapiens
  SIMILAR (430)..(1080): 991254mologous to Escherichia coli K12 putative enzyme of polynucleotide modification,accession number AE000169,Smith- Waterman Score=1158.
atgaaacgactcattgtaggcatcagcggtgccagcggcgcgatttatggcgtgcgcttattacaggttctgcgcgatgtcacagatatcgaaacgcatctggtgatgagccaggcagcgcgccagaccttatccctcgaaacggatttttctctgcgcgaagtgcaggcattagccgatgtcacgcacgatgcgcgcgatattgccgccagcatctcttccggttctttccagacgctggggatggtgattttaccctgttcaatcaaaaccctttccggcattgtccatagctatactgatggcttactgacccgtgcggcagatgtggtgctgaaagagcgtcgcccgttggtgctctgcgtgcgtgaaacaccattgcacttaggccatctgcgtttaatgactcaggcggcagaaatcggaggaaataccggggaaatagacgaagaagaactggaatccttgttatatgccattgcgaaggggaatgtttttaacttccagaccattctgcatctgcccgttgccgtgcaaaatgacaccatcgatttttaccaaatgttcgctcggatttggtcatcgcatccacaatggctgacattgtatttagcgcaacatcgcgcagtgattatccccgatgatgcaaaactgcacagaaatttactccgctggtatagcgcaggtcgcctggatatccccgaacttctggattacgcccagtcatggcgggaaactgaacctgataatgaagatgcgccttattatgaatacgcgcaacgcgtctattgtggagaaggcgaaagcctgttggcagaactttgtgactactggcgcgagtatccctccacccaggcggatgctttaatgttgcaatggtgccgtcagcatcgggtcgattattacccattactggtgatgatgattgaagcgcgtgatctggttaacgatcagggaaaaccgctactttatgtccccggcgacagcgcccgtacgcgttttcatttatacgaaatactcagcgatgaaaaactctctgcgctggggcgttcactggtcgagatggttttgcacaaaggaccgtcttacgttcgtgccgtcgcagaccaaacagcaactgctggttatgtaaaaactaacactgcatacaccattacttatcattcatcgtctattgcggacattgtcatttcgggtactcgcgtaatatataaaagcgatcaaaaaagtgtcaacgtacgtctggaaaataaagggaataacccgttgcttgtccagagttggttagatactggcgatgacaacgctgagcctggcagtattacagtcccttttactgctacgccgccagtatcgcgtattgatgccaaacgtgggcaaacaatcaaattaatgtacacagccagcacctcactgcctaaagacagagagagcgtgttctggtttaacgtactggaagttccaccaaaaccagatgcagaaaaggtcgcgaatcaaagcctgctgcaactggcatttcgcacacgtataaaacttttctatcgcccggatggattgaagggaaatccctctgaagccccgttagccctgaagtggttctggtcaggttcagaaggtaaggcgtcattacgagtgaccaatccaaccccttactacgtctcttttagcagtggtgatttagaagctagcggtaaacgctatccgattgatgtgaaaatgattgcaccatttagtgatgaggtcatgaaagtcaatggccttaatggcaaagcgaattctgcaaaagtgcatttttacgccattaatgactttggtggcgcaattgaagatcttcgtgtaacttgcgatcttcgtatcccttatgtcccctgttctcagtttttatctttctgcggttacttatcactgtcacggaggtgtgttcgattcgtgttttcggtcccgccatgcgtcctatcggccttggcaatattctacccggaatgcgcatacggtgctgtctggcctctgggcacctgtttcggagggcctggacatggccgttaccggttggccatctttccccactcaaatccatcggcgacccgtaggtgtttctcaatttgtacggcctgttgtgccagttcctgcacttctttcgttggtcagcgagaagatgtcacgctgttcctgcggtacgtcttcgattttaacctgcttgccgtgctcctgggtcggcgcgtaaaccatgcggatttttttcgaccccatggtgcggcgcacgatagccgggcgattcgccgccagtgtcggtttatgcacgtaaaactcatccgggttaaccgcaccctgcacgaccatctcaccaaggccccatgcggaagtgataaacaccacctgagttcaacaaatagccaggatccgttccgtcgggcggtactgtttttatatttgaaccgctacggttacaacggcctgtgtcgttacaatctgcgcggtgagtttaacgtgccgttcggccgctacaaaaaaccctatttcccggaagcagagttgtatcacttcgctgaaaaagcgcagaatgcctttttctattgtgagtcttacgccgatagcatggcgcgcgcagatgatgcatccgtcgtctattgcgatccgccttatgcaccgctgtctgcgaccgccaactttacggcgtatcacacaaacagttttacgcttgaacaacaagcgcatctggcggagatcgccgaaggtctggttgagcgccatattccagtgctgatctccaatcacgatacgatgttaacgcgtgagtggtatcagcgcgcaaaattgcatgtcgtcaaagttcgacgcagtataagcagcaacggcggcacacgtggacgaactgctggctttgtacaaaccaggagtcgtttcacccgcgaaaaaataattctcaaggagaagcggatgaaacagtatttgattgccccctcaattctgtcggctgattttgcccgcctgggtgaagataccgcaaaagccctggcagctggcgctgatgtcgtgcattttgacgtcatggataaccactatgttcccaatctgacgattgggccaatggtgctgaaatccttgcgtaactatggcattaccgcccctatcgacgtacacctgatggtgaaacccgtcgatcgcattgtgcctgatttcgctgccgctggtgccagcatcattacctttcatccagaagcctccgagcatgttgaccgcacgctgcaactgattaaagaaaatggctgtaaagcgggtctggtatttaacccggcgacacctctgagctatctggattacgtgatggataagctggatgtgatcctgctgatgtccgtcaagcctggtttcggcggtcagtctttcattcctcaaacactggataaactgcgcgaagtacgtcgccgtatcgacgagtctggctttgacattcgactagaagtggacggtggcgtgaaggtgaacaacattgcgcgaaatcgctgcggcgggcgcggatatgttcgtcgccggttcggcaatcttcgaccagccagactaccaaaaaagtcattgatgaatgcgcacgattcagaaagcggtccagcaatgcgttggacctgtcgtccatcactttag

SEQ ID NO: 25953 - DNA, 1263 bp, Homo sapiens
  SIMILAR (4)..(573): 781254mologous to Escherichia coli 27 kD protein in ECDAMOPRA,accession number U18997,Smith-Waterman Score=726.
gcctgggcgcgtcaggaccgtcgactcagcgtaaaacaatggggtaaaccgcccgttgatgagaccattccggcaaaagaacaggtacgtattctgcgtaaactgttcgatcgctattatggcgaggttgccggaagaggggacggtttttgttccccgcacgttgcccgatacgttgggcgcgttgcaggttaaaggccctgccggctagggcctggtcacccaacaaaccgaacgccgttcgtcgcgccgctgctcgaagccttagatatcgccaaatacttcagcgtggtgattggtggtgatgatgtgcaaaacaaaaaaccgcatccggacccgctgttactggtggctgagcggatgggaattgccccacaacagatgctgtttgtcggcgactcacgcaatgatattcaggcggcaaaagcggcaggttgcccatcagttggcttaacctacggatataactacggcgaggctatcgatctcagccagcctgatgtaatttatcagtctataaatgaccttctgcccgcattagggcttcccatagcgaaaatcaggaatcgaaaaatgactaagcccatcgtttttagtggcgcacagccctcaggtgaattgaccattggtaactacatgggatgcacagaagctgatcgccagttcgcctttaactttaacaacttcgtgctgattcaactgttaaccaacggcggcccggatcgtcttggcacgaccacgccagccggttataccgacctgcttgttaactacacctaccgcatcgcttttgaaggcggcgggggtcaggacttcggtctggcggcagcaattgccacgctgatcttcctgctggtggcgattatgttcccgctgctgatggtcgtcgctatctcgctgcgtcagggaaactttgcgaccggcagcctgatcccggagcaaatctcctgggatcactggaaactggcgttaggttttagcgttgaacaggctgatggtcgcattacgccaccgccattcccggtactgctgtggctgtggaactcggtaaaggtcgccgggatttccgcgattggcattgtggcgctctccaccacctgcgcctacgctttcgcccgtatgcgctttccaggcaaagcgacgctgctgaaaggaatgctgattttccagatgttcccggcagtactttcactggtcgcgttgtatgcgttgtttgcaccgcgcgtgcgggcggcattgtgttaccgatcatcaacagcgtga

SEQ ID NO: 25954 - DNA, 3243 bp, Homo sapiens; identical to SEQ ID NO: 24385
  SIMILAR (2674)..(3240): 991254mologous to Escherichia coli sulfite reductase (NADPH) flavoprotein beta subunit,accession number U29579,Smith-Waterman Score=999.

SEQ ID NO: 25955 - DNA, 1386 bp, Homo sapiens
  SIMILAR (554)..(739): 501254mologous to Escherichia coli 24 kD protein,accession number U18997,Smith-Waterman Score=106.
ctataggttttctctcgtccggtgtggcaggggcgggtatcgcgtgtctccccactgtcccggttgggttgtcgtcagccggcttgtacgggggtatacgcctttcgtcccgtagtacttgcgtttgaggggtgtaccgtttacgcgtcgcatattgttaaaggtatggaccccaagcctcttagtgcacctgggtccctgtgggtttcggccaacccgggttccatgttgggcccaggggttcggtcttgcccctgtcccctttcggggcccaaggggggggcacggtggacaacaacacactttcaaggcggaacggcgcacgggtggggctcccataaggacgcccgtgggatcgcgctccacgcggaccaccacccccgcacgtgttgaaccgactgtctttgtcccacatccttccgcacgcatctcacgtgtcacagcaaaatcgatcacgaaagagtctaaatcaaaacccgtggtcaccaagtaagcaacgcgattgcggcatggcgttacatccgtgggtggcgatggcggtttacagctaaccgtgatggataagctggatgtgatcctgctgatgtccgtcaccctggtttcggcggtcagtctttcattcctcaaacactggataaactggcgaagtacgtcgccgtatcgacgagtctggctttgacattcgactagagtggacggtggcgtgaaggtgaacaacattggcgaaatcgctgcggcggcgcggatatgttcgtcgccggttcggcaatcttcgaccagccagacgcccgttgatgacgacatccggcagaagaacaggtacgtattctgcgtaaactgttcgatcgctacttggcgaggttgccgaagaggggacgtttttgttcccgcacgttgccgatcgttgggcgcgttgcaggctaaaggcctgccgctaggcctggtcaccaaaaaccgacgccgttcgtcgcgccgctgctcgaagcctgcgcgacggccctgtgcctgcaacaggtcctgagaaacagctccgcaggcgctcttggaagatacaaccctgtctggcagagcagcctcgcacttgcgttccaggcctgaatagcagccccacaggctgcccctggcacacatgccctcagactggtggagcagtttgcacccatgtcccaagcctgagaaatagccccaagggccacccctggcagcacacccccaggacagccgagcaactgcgtacacatgctcctggtcaagtaacaacccatagccccaacaccagctccaagttggcagacccactgggcacacatatgctcctaacataagaaacagccttgtgagcccaccctcgcaaagctggaccaccgccaccataaagtctctcat

SEQ ID NO: 25956 - DNA, 3003 bp, Homo sapiens
  SIMILAR (1921)..(2268): 1001254mologous to Escherichia coli K12 putative oxidoreductase component,accession number AE000205,Smith-Waterman Score=600.
atgagagctctcttctctgacatccaggctctgggcatctctcaaaaagagatggtcaaagaatctgatgaggatgcctgcaagttttcctggaatttgatgcaaatacgaggctatgctaaagccattcagcaagctgtaggagccccaagtggagaaactcaaactagttcacaggagcaaacatcatgcagctccctccaaggctacatcactcgtgggttgtggtgtttctttgtggaagtccccaagctcttaggctggcgcaccaagcacccagctcatgaaagggtccgggtcgtggccctcatcgtgcagcagccattggcaggcagcatcagagagtggttacagcaaggacatggaatcagacagctcgggcctggacccaccactctgccagcctacctgggcagcagtgtggatgagggtgacccacttaacctctttgagactcaagcagctgcgctggttggacttcaaaggaagcaggaaaacagctcagatatcttctttagctctcctttcacggtgaccccagacgccctaccaacagccattacatgggagcacattccgtttgcaaagctggcgggtctaattgcagggcctttggtggagatgtgcaggcagaggctaagcaaagagtttgaggccttgaaaggggaattcagggacctcgggcactgtcttccaggagcccaaaaaccggaggttacagaactcgcaaccattgttatagccgtgtccccaccagaaaacgacggcgagcgaatccgcaaacatggtaacaggtgttccccgaccggaaaacgacggccagcgaaaccgcaatcacggtcaaagattgtgtacttgtcgctcctcgtagttaagtcgaagaatgtggttatcgggtatccacgtgatatagcatcgtgcgccacagttggctcatcagccatacttcgcattctgctgaagcacgtgatacatcatacgcgtagatgctgcgtatccgctgctatatacatcacgcgtgtgcgcaatcactacgctgcacttcacggcattgctcactatagcgcatatactcgataccatgtagccgctcacatctcatattgccacttctatcgtcggacatgcatccatggcagtatctcttcgacgtatctcgtatcgcatcgccactgtctgtgtgacttgacatactatacgtatctctcatcacttagagctatactgtacgaattcgctagctcgtcgctagcgtattgcactactcatgactcgtacatccgccactcgcgatgtggtcatgcgcgctatccagtagtcgtgattcgcgcatctgcctcctcgcgacttgagcatctagtgacatcgtgtacttgttcgccagcgctgaagaatcctccatgccgccttcgaagcagtgttgaccgaattgctctgaataccatggctttccggacgcgcaaaagatatgggatccgctgcgggggcggaatgaaagcgttaacggccaggcaacaagaggtgtttgatctcatccgtgatcacatcagccagacaggtatgccgccgacgcgtgcggaaactccgcagcgtttggggttccgttccccaaacgccggctgaagaacatctgaaaggcgctggcacgcaaaggcgttattgaaattgttttcggcgcatcacgcgggattcgtctgttgcaaggaagaagaagaaaggttggccactggtaaggtcgggtggctgcccgttgaaacacttctggcgcaacagcatattgaaggtcattatcaggtcgatccttccttattcaagccgaatgctgattgtcctgtgcgcgtcagcgggatgtcgatgaaagatatcggcattatggatggtgacttgctggcagtgcataaaactcaggatgtacgtaacgatcctttactggtgccgctgtttaccctgattcgtgaggggaaactggctgcgaactggccactggagcaggatgagttgctgacacgtttgcagaaaagctgtgatatgacgcaagtctctgccgattacaatgcgttgtttatcggcgatgaatgtgctgtgccgccatatcgtagcgcatgggttgagggcgcgacggaagcggaagtgcgcgcttttctttctgagcgagggatgccattagcggatacgccagccgatcacatcggcacattgctgctcgcagcttcctggctggaagatcagtcaacggaagatgagagcgaagcactggaaacactgttcaaaaggggcgcccccccaagtccctgtgcctgtggggaaaggccccggcccctcatgggagccccgtcggggggttttccaaaggccccaagacgtgggcgccccacgagggggcgtcttaaattcgaaaaaacgcccggcagcagactagatcatccacggtcgaattccgccttcgttagcaacgaagggacccggcgtcgctttacgcccaacgcgatcgccaaaatggccaaaaacggcagagccaatggggcgcgcgacgaaggcgatggcgaagggacaccctaccttgtgtaccctatcgacgttacctacatccttgaaggaccagtgtttccaccggctggattccatcatgacgagttcagcccccaagggtcgtcgatatcatcaacgatcggcgttgtgcaccgcgcgactacttccggcactcagtgcgcaaatgttgcgcaaatcacggctacactttccaaggtgacagccagcctacagggctctctatatccaactcattcggagtcgagcatctccacgagagtatcaggctcatatgcttctgctcgtcagccaatcagtcgtggttgtagcggccgactagtaacagccagattcgcgccaaatctgacaggcagaatagagcattgccgtcaatggatccaccactcgactatgcgctgcagagcttgcgatagctcgtcgcgcgaatgccctgtgagagaaactgctagctag

SEQ ID NO: 25957 - DNA, 657 bp, Homo sapiens
  SIMILAR (396)..(13): 961254mologous to Escherichia coli paaD,accession number X97452,Smith-Waterman Score=699.
  misc_feature (1)...(657): n = a,t,c or g
atggcatcctcaaatacatttgaaataatcgaaaggttcgcggcaactatcgcagcggtacaatgctttgcaggccgtggaaccaaattcactgataagtgtggtatggacgctggcgcagcgcgggcaacgtacttctggcggcaaatgggcatggcaactgtgtccggcgggcgggctaatgccatactctcgcagacgctcacgggcatcgggggtcatccagtcggtggtccatgccgggtcgagttgcagcacaacctgaacgggggtaaacccgttggttgtcattgcctcacgtatcgcgccaatcaaatgttccgttgccggacaaccggaatatgtcggcgtaaagccgatcacccatccttctcccatctgtgtcacattacgcaggggatctctgaaggctactcaaaagcggcnagtggtatgcgccagcgggtaatgattgcgctggcattctcctgcgagccgcaattgattattgccgacgaaccgactacggcgctggacgtcacggtgcaattgcaggtaaggcacatcgactcgggaacaactaccactgtgattttgaacaagccccttgacgtcgctaagcctgtttcttcatctctaaaatcaaataatgtgcaaaaagtacttaacaatggctga

SEQ ID NO: 25958 - DNA, 480 bp, Homo sapiens
  SIMILAR (256)..(399): 1001254mologous to Escherichia coli Dipeptide transport ATP- binding protein DppD,accession number D90789,Smith-Waterman Score= 279.
ttaagggacccagccaaggacacgggaaacggggtacaaccaccatgtccaaaaaacccctggtgaaaattcctgtgtcgccccccgattattcggcccccgaaaactttcaatacgctcatagtgctggcgcgtcggtgcatacagtgctttcgctttttcgatatcgcctgctttaatcgcgtcggtaaaggctttggtgtcggtcaccagctgcgtggtttccgccatgacatacgtggattcgcccaatggacccatttgcctgacggctgcgcttttcgcgatcgttgctatgcggcaggtgcacagtgtgaaaacgtcccggcgctgacagcgtgtggtgacaacaaccagcgctgtgcctgttggtatccgcagcaggaggttataagtgtctgacacgttattaacgttacgcgacgtccatatcaatttcccggcccgtaaaaactggcttggtaaaacggtgtggcgcat

SEQ ID NO: 25959 - DNA, 1198 bp, Homo sapiens
  SIMILAR (32)..(304): 1001254mologous to Escherichia coli Dipeptide transport ATP- binding protein DppD,accession number D90789,Smith-Waterman Score= 467.
tgcttgacccgaaagcaggaggaaagcagtcatgacccaacccgttctggacattcaacaactgcatttgagtttccccggttttaacggtgatgttcacgcgctcaacaatgtgtccttgcagattaaccgcggtgaaattgtcggtctggtgggagaatccggctcaggtaaatcagtcaccgcaatgctgattatgcgtctgctaccgacgggcagttattgcgtacatcgggggcagatttccctgctgggagaagatgttcttaacgcgcgggaaaaacagcttcgtcagtggcgcggccacgagtggcgatgatctttcaggaaccgatgaccgccctcaatccgacacgtcgaatagctcttcagatgatggacgtgatccgccatcatcaaccaataagtcgtcgggaagccagagctaaagcgattgacctgctggaagagatgcaaatcccggatgccgtggaagttatgtcgcgctatccgtttgagctttcaggtggtatgcgccagcgggtaatgattgcgctggcattctcctgcgagccgcaattgattattgccgacgaaccgactacggcgctggacgtcacggtgcagttgcaggtactgcgtttgcttaaacataaagcccgcgccagtggaactgcggttctgttcatcagccatgatatggccgtggtgtcgcaactgtgcgatagcgtttacgtgatgtatgccggaagcgtaattgaaagcggcgtgacggcagacgttatccatcatccccggcatccgtataccattggtttgctgcaatgcgcaccagaacatggagtaccacgccagctattacccgccattccagggacggtaccaaacctcacccatttgcctgacggctgcgcttttcgcgatcgttgctatgcggcaggtgcacagtgtgaaaacgtcccggcgctgacagcgtgtggtgacaacaaccaacgctggggcctgttggtatccgcagcaggaggttataagtgtctgacacgttattaacggtacgagacgtccctattattttccggccggtaaaactgggttgggaaaactacggaacatggtcatgcctttaaggggatggatttacagaaccctttaaagtcgacctgaagggctgccagcttgggcactgggcctcggttaaaaacgtctggaatgggaaaaa

SEQ ID NO: 25960 - DNA, 310 bp, Homo sapiens
  SIMILAR (309)..(151): 1001254mologous to Escherichia coli K12 bacteriophage DNA packaging protein,accession number AE000161,Smith-Waterman Score= 263.
ctataagtaggctaaacacccagcagcattttggataacgaacacggcaaatttcaccacattcacctcagggatgtagtcgttgcccattgcattcatgaggcccgctgaaagggcagtgtttcccagcgccttcctggtatgcgattctgactgttcgatatattcactcagcaaccccggtatcagttcatccagcgcggctgctttgttcatggctttgatgatatcccgtttcaggaaatcaacatgtcggttttccagttccggaaaacgccgctgcaccgacagggggatcccgtcgagaata

SEQ ID NO: 25961 - DNA, 1470 bp, Homo sapiens
  SIMILAR (40)..(777): 531254mologous to Vibrio cholerae RnfD-related protein,accession number AE004183,Smith-Waterman Score=702.
atggcttcaatcttgatggtattggtctgttcagtgttggtgttgctcgcagccgtgccaggaatcgcagcgcaactgtggttttttggttggggtactctcgttcagatcctgttggcatcggttagtgctctgttagccgaagctctcgtactcaaactacgcaagcagtcggtagccgcaacgttgaaagataactcagcattgctgacaggcttattgctggcggtaagtattccccccctcgcgccatggtggatggtcgtgctgggtacggtgtttgcggtgatcatcgctaaacagttgtatggcggtctgggacaaaacccgtttaatccggcaatgattggttatgtggtcttactgatctccttccccgtgcagatgaccagctggttaccgccacatgaaattgcggtcaacatccctggttttatcgacgccatccaggttatttttagcggtcataccgccagtggtggtgatatgaacacactacgcttaggtattgatggcattagtcaggcgacaccgctggatacatttaaaacctctgtccgtgccggtcattcggttgaacagattatgcaatatccgatctacagcggtattctggcgggcgctggttggcaatgggtaaatctcgcctggctggctggcggcgtatggttgctatggcagaaagcgattcgctggcatattcccctcagcttcttagtaacgctggcgttatgcgcaatgttagcacgtttgaccacctcccgggagatgcacctcggtgcggttaatcgtgccggtgaagagcgtttcatgggcaatcaactgattctggttgtccagatacaacacccggaactcttcccgctcaagcgcggccatatgcagtcgcagccattcacgtacggcgtgggtagaggtgaaggctacgccgggctcatgcaggtggcggtccagagccctgagcgcccgctgaatgagacgtgtgcatcgacctgctttttggccaatggatggtcacgccgacaggccagcacgaacggctcgttgaccagtggggtaaaatcaatggatgaatttgtgacgttgttcatgtttatgccaaagtctgattcgttacacagcaccgattccatgcaattattcgtgccttgtatcgacgaagttgaagccgtccttaagcggatccaacggtttgatccggtcggtgtggcggcaaaagatctgcgtgactgtctgctgatccaactctcccaattcgataagaccacgccgtggctggaagaggccagactgatcattagcgatcatctcgatctgttagccaatcacgacttccgcactttaatgcgcgtcacgcgtctgaaagaagatgtgctgaaagaagccgtcaatctgatccagtcgctcgatccgcgccccgggcagtcgatccagactggcgaacctgagtatgtcattccagatgtgctg

SEQ ID NO: 25962 - DNA, 3258 bp, Homo sapiens; identical to SEQ ID NO: 15912
  SIMILAR (1885)..(2469): 921254mologous to Escherichia coli K12 aconitate hydrase B,accession number AE000121,Smith-Waterman Score=907.

SEQ ID NO: 25963 - DNA, 648 bp, Homo sapiens
  SIMILAR (641)..(534): 661254mologous to Escherichia coli K12 bacteriophage DNA packaging protein,accession number AE000161,Smith-Waterman Score= 115.
ctacaccacattcacctcacggatgtagtcgctgcccatctcattcatgatggcccgctgaaagggcagtgtttcccagcgcccttcctggtatgcggattctttcgggagatagtaattagcatccgcccattcaacggcggtctgtggctccggctgttcgatatattcactcagcaaccccggtatcagttcatccagcgcggctgctttgttcatggctttgatgatatcccgtttcaggaaatcaacatgtcggttttccagttccggaaaacgccgctgcaccgacagggggatcccgtcgagaatactggcaatttcacctgcgatccgcgacagcacgaaagtacagaatgcggtttccaccacttcagcggagtctctggcatttttcagctcctgtgcatcggcctgcgcacgcgtaagtcgatggcgttcgtactcaatagtccctggctggagatctgtctcgctggcctgcagcagttcttcaacctcccggcgcagcttttcgttctcaatttcagcatccccttgccaccgcctcgcagaacgggcattccctgttcctggcagttctgaatggacggatactcgcacccgaaatgtcagccagctgctttttggttgacttccattgcacat

SEQ ID NO: 25964 - DNA, 2960 bp, Homo sapiens
  SIMILAR (2220)..(2903): 891254mologous to Escherichia coli K12 putative membrane protein,accession number AE000312,Smith-Waterman Score=1028.
atgcaagagagtgccgcccaaagtacccccaaaagccccatacgccagcccatgcgttgcgtttttattgacggagacatacccatgacaacacagacgcagcacgacctcgcacccgctaaccaacccgaatttgaactgaccgtcacgccggtccccgatgaacagcgtatcgatttctggccacagtactttggcgctatcccgcagtggctactcctggagccgcatatcttcgcctggatggaccgcttctgtgagggctacagcggtggtatctggtcgttctacaccctcagcaatggcggcgcatttatgtcccccgagcctgacaacgatgagacatggcgtctgtttaactgcctgaacggtaacgatgcccaaatgagtgcagaagcagcaggtattgctgtctgcctgattgcgtatagccaccatgcctgccgtacagaatgtgacgcgatgaccgcacactattaccgctgcgggaccttcacctctacccacgccgtacgtgaatggctgcgactgcatatggccgcgcttgagcgggaagagttccgggtgttgtatctggacaaccagaatcagttgattgcccatgaaacgctcttcaccggcacgattaaccgcaccgaggtgcatccccgggaggtggtcaaacgtgctctgcacttcaacgcggcggcggtgatactcgcgcataaccatccttccggcgagacgacacctagccaggccgacaaaaccctcacgcagcgactggttcaggcaaatctattcgttcgcagaacacggtctgctttgaggtattacatgaaaattatcagtaaacgcagggcaatgacgatataccgccagcatcctgaagtccgaatctttcgctactgcaccggcaaataccagtggcacggtagcgtctgtcattacaaccctgcctgggggttgacccggaaactacgcctgttgcaccgctaccttctgccagcgttttgcctgtgccgtctactgctcatcagttgctgatacgctgccaggcgttacttattcaactgctccataacggctggcgctatcaggaacagagtgctattgaagaatcgaagaaattcagcgccaatctgaacggcactgaaattgccattacctatgtctacaaaggccatggggaggctgcaaatggagctggagaggcacagcgttttgaaggcttcaagggcttcatcatcggtaatagacacgtaatcagcgcgtccagtgctgttaagatacgcgtgttgtgggccgacagacgggaaatccagtccggcggagatggacggtgcgccgtgctcgccagtttcgataccgtgaccacctggctccacaccaatcaggccgacgttggtttcattgatgaaatcagcaaacatgccgatggcattcgaaccgccgccaacacaggcgataacggcatccggcaggcgacttatctttccgacctgcaggcatgcaaacttcgccgagccacatgcagcacagataaaacccgtcttgccttcgctggcctgaaattcggtgactacggctccatcgattacggccgtaactacggtgtagcatacgacatcggtgcgtggactgacaattcgtgtggtgacacttggactcaaaccgacgtgttcatgactcaacgtgcaactggtgttgcaacctatcgtaacaacgacttctttggtctggttgatggtctgaactttgctgctcagtaccaaggcaaaaacgagcgtgacactgcacgccgttctaacggcgacggtgttggcggttctatcagctacgaatacgaaggctttggtatcgttggtgcttatggtgcagctgaccgtaccaacctgcaagaagctcaacctcttggcaacggtaaaaaagctgaacagtgggctactggtctgaagtacgacgcgaacaacatctacctggcagcgaactacggtgaaacccgtaacgctacgccgatcactaataaatttacaaacaccagcggcttcgccaacaaaacgcaagacgttctgttagttgcgcaataccagttcgatttcggtctgcgtccgtccatcgcttacaccaaatctaaagcgaaagccgtaggacgtatcggtaatgtgaccaaggccattacaagctattaccccccaattgggtttaatcttcccggcgccgataaacgagccgctatttataaccgtctccgcagttacgggcggtttcatgttacgtatgaatggttgcgtctcgaagaccgcacgagccatagcggagagctaccgtcaggcggcaaatcctttaccgtcaatttcgctaaacctggcaactacaatctgacattacgcgataaagacggcttaattctcgctgggttaagtcatgccgtcagcggtaagggcagcacggcgcatactggtacggtagatatcgtggcggataaaacgctgtaccagccaggcgaaaccgcgaagatgctgattacctttccggagccaattgatgaagcattattgacgctggaaagcgatcgcgtggaacagcagtcgctgctttcgcatccggcaaactgcgtaacgctacaacgtttaaacgatacccagtatgaagcccgggttccagtgagcaattcctttgcgcctaacatcactttttcggtgctgtatacccgtaacggtcagtacagttttcagaacgccgggatcaaagttgccgttccccagctggatatccgggtgaaaacggacaacccccatccccagcctggtgaactggtcaatgtcgaattaacctcgtcgctgaaaggtaaacctgtttctgcgcagctaacggtaggcgtggtcgatgaactttatatctcggttatggataccacagcaattattactcccggtgttacggttttggttattaagacgaatccaggaacctgttaa

SEQ ID NO: 25965 - DNA, 2108 bp, Homo sapiens
  SIMILAR (1156)..(1575): 981254mologous to Escherichia coli Prophage QIN DNA packaging protein NU1 homolog (fragment),accession number D90798,Smith- Waterman Score=694.
atgacgccacaggaccggcgtctcattcagcgggcgctcagggctctggaccgccacctgcatgagccccgcgtagccttcacctctacccacgccgtacgtgaatggctgcgactgcatatggccgcgcttgagcgggaagagttccgggtgttgtatctggacaaccagaatcagttgattgcccatgaaacgctcttcaccggcacgattaactcgaccgagcccccactccctccattcaatcacccatccatccccagcgcggtccagcccgtgacgggagagcctgaagcagaaggtgggggggcgtccacagctgtcccccttccccccccccgacagctgggcactggaccctggagggggaagggcacgggaaactcctcgaggggtttcaaacgccaccaaggagcccatctctgtcgctcagcatggcaatgtggcgataaagagatccgccgtgagttaaagtactacgcgcatcttggtcgccggttaaaagactggagtggaataccgcgctatcacggtaccgttgagacggattgcggaaccggttatgtctacgatgtgattgcagattttgacggcaagccttccattacgctgaccgaatttgctgaacaatgccgttacgaagaagacattgcacaactgcgccagctactgaaacagctgaagcgttatttgcaggataaccgtatcgtgacgatgtcgctgaagccgcagaatatcctctgtcaccgcatcagtgagtcagaggttatcccggtcgtctgcgacaacattggtgaaagcacattgattccactggcgacctggtcgaagtggtgttgtctgcgtaagcaagagcggttatggaaacgatttatcgcccaaccggcgctggctattgccctgcagaaagatctgcaacctcaggctacagaggccagcggtgcggaaaacatggcctcgatcgcatctggcaacattgcccggacagatccagacatgttgtccatccctttgtccaagaagatctgctgctttggcgaccgcatcatcgaaatccccgagactatagaccagcccgttaggttttgggtcctgaccggtccagtcgtggacatgggcatttatgcctgctatcttagcagcccgcaatggggatggtatgccgaaagggatgctgaaattgagaacgaaacagtgcgccgggaagttgaagaactgcggcaggccagcgagacagatctccagccagggactattgagtacgaacgccatcgacttacgcgtgcgcaggccgacgcacaggagctgaaaaatgccagagactccgctgaagtggtggaaaccgcattctgtactttcgtgctgtcgcggatcgcaggtgaaattgccagtattctcgacgggatccccctgtcggtgcagcggcgttttccggaactggaaaaccgacatgttgatttcctgaaacgggatatcatcaaagccatgaacaaagcagccgcgctggatgaactgataccggggttgctgagtgaatataaccgcgctgacagacaatacgcagggggcagcagagttgccgccaggtttgctgcttccccacgggtcgcggtcttgtccgttattaccgggctgattccacgccatgtttgtgctccatatttgttatgcggtgatccctgttgtctttcgacgccagaggatatgactccacgcttcagacgctacgccgttagatcaggtaatcgatcaacgccgggtcttgaccacagatgcgacgcctgccaacgatcggcatacgaacttgcagacttacgctgccgtcctcctccatccactctttttctattgcctgaagctgataaaaacgacttctcagacgcccttcctgcggtggcagacgcaatgtatgctgcgccacctcgccggaaagccgctccgtcaaagcctgaaaaagctgtggtatccccgctccggtctgtgcggaaagccagacacggttcggtttgttctcttcgtcccgatcaatacgcggttcgaaatcttccagcatatcgatcttgttcatcaccagacctgcagtttatggtctggtgtgcgctggctga

SEQ ID NO: 25966 - DNA, 2883 bp, Homo sapiens
  SIMILAR (602)..(631): 901254mologous to Escherichia coli K12 putative permease,accession number AE000463,Smith-Waterman Score=48.
atgagcaagatcaaaacgctactgcaatacagcccatccagcaccaactcccagccgtggcattttattgttggcagtaaagcgtttgttgaatcggtgcgggcagaacaccccgatgcccggcaccattgcgtggcgtgggtcgcgggtgcgccggatgattctcaacagctgggtttctctgacgacggggagccggcgggaacggcaggtaaaccgatgctcgcccagctaatgggcagcggcgtcggggaaattaccgctgtggtagtgcgctactacggcggcatattgcttggcaccggtgggttagtgaaagcgtatggcggcggcgtgaatcaggcgctgcgccagctaacgacccaacgcaagacgccattaaccgaatatactttgcaatgtgaatatcatcagttaaccggcattgaagcgttgctggggcagtgtgacggcaaaattatcaacagtgattatcaggcattcgttctgctgcgggtggcgcttccggcggcgaaagtggctgaattttccgcaaagctggcggattttagccgtggttcattgcatgcgccggccagactagcgtcgatatcagcaggatgtagattcccgacgcaagatcggtccaaaagcatgatgaactgctcctacggcgcaatggttcccgctatcaccaaaaaccccaacgaacgcgcctcactggcggcatggcgtcagggcggcgctacgctgggcctgctgctgtgcacggtgggattcgtgccagttatgaatcttatcgaaggtaatcagcaacttggctatatcttcgccgccacgctgttttcactgtttggcctgctgtttatgtggatctgctactcgggcgtgaaagagcgttatgtcgaaacccagcctgctaatccggcgcaaaagccgggcctgctgcaatctttccgcgcaattgcgggtaaccgcccgctgttcattctgtgcattgccaacctctgcactttaggggcgtttaacctcgccatccaggtctattacacccagtacgtgcttaacgatcccatcctgttgtcgtatatgggatttttcagcatgggctgtatttgcatcggcgtattcctgatgcctgcctcagtcagacgttttggcaagaagaaagtttatatcggcggcctgctgatttgggtgctgggcgatctgctcaactatttcttcggcggcggttcggtcagcttcgtggcgttctcctgcctggcgttctttggctcagcgtttgttaacagcctgaactgggcgctggtttccgacaccgtcgagtacggcgagtggcgcaccggcgtgcgttcggaaggaacggtctacaccggttttaccttctttcgcaaagtgtctcaggcgctggctggtttcttccccggctggatgctgacgcaaattggctatgtgccgaacgtcgcacaggctgaccacaccattgaagggttacgccagttgatcttcatctacccaagcgcactggcggtagtcaccattgtggcgatgggttgcttctacagcctgaacgagaagatgtatgtccgcattgtggaagagatagaagcccgtaaacgcacggcgtttcttccagcgccattggctttcaacgtaaacatttacgccgagtttgcgtccggctttttccagatattccgcagccatataggtgtgagcaatacccgccggacaggccgttacgcagacgatagttggcgcgttggaaaaagaggcagaaggttgcgtgcctcccttgtcatccagcgccgagagcaactcatcaggcgtcgtcgccgactgtatacgcgcccgaatctcatcatccgcaaggcgcgtggtggctcctgcgcctgcgccggctcctgcaagtgcaaaaagtgcaaatgcacctcctgcaagaagagtgagtgcggggccatctccaggaatctggggctgtggctaaggctacttgattctatagaaacagaaaaaggcaaacgcagccttttctacattttcagagtaactcccgtcagttgcgagcaaaaaagccgctacgctttagctatacgtgctaattcaagagaagagaccatggacaacgacaaaattgatcaacacagcgacgaaattgaagttgagagcgaagaaaaagagcgcggcaaaaaaatagaaatagatgaagaccgactcccctcccgggcgatggcaattcatgagcatatccgccaggatggtgaaaaagagctggacgcacgcatagcgctgggtgtcgagaatattatcgaaagctgcacggtcgttagccgccagggcaaagatgccgacatcatgatcatcggtggtatcccggacaaactgaaagacgataagcagatcgacctattggtgcaggcgaccgaaagctgggtgaaaacaccgatgcgccagaccccgttccccggcattgtgccggacgagagcgatcgcgcggcagaaacccggtcaacgctgacctcttccggtgcgatggcggcggtgattggcttccagtcgccgtataacgaccagcgcagcgtgattgcgctgttggcagatagcccacgcggttatgaaatgcttaacgatgcggtgaacgatagcggcaaacgcgccaccatgttcggttcggtcgcggtgatccgcgagtccggtatcaacagcctacgtgttggcgacgtttattacgtaggtcatctgccgtggttcgagcgcgtgtggtatgcgctggcaaaccatccgattctgctggcggtgctggcggctatcagtgtgatattgctggcatgggtactgtggcgtctgctgcgaattattagtcgtcgtcgtcttaacccggataacgagatctatgagtga

SEQ ID NO: 25967 - DNA, 5116 bp, Homo sapiens
  SIMILAR (61)..(4500): 941254mologous to Homo sapiens complement component C3,accession number K02765,Smith-Waterman Score=6989.
ctcctccccatcctctccctctgtccctctgtccctctgaccctgcactgtcccagcaccatgggacccacctcaggtcccagcctgctgctcctgctactaacccacctccccctggctctggggagtcccatgtactctatcatcacccccaacatcttgcggctggagagcgaggagaccatggtgctggaggcccacgacgcgcaaggggatgttccagtcactgttactgtccacgacttcccaggcaaaaaactagtgctgtccagtgagaagactgtgctgacccctgccaccaaccacatgggcaacgtcaccttcacgatcccagccaacagggagttcaagtcagaaaaggggcgcaacaagttcgtgaccgtgcaggccaccttcgggacccaagtggtggagaaggtggtgctggtcagcctgcagagcgggtacctcttcatccagacagacaagaccatctacacccctggctccacagttctctatcggatcttcaccgtcaaccacaagctgctacccgtgggccggacggtcatggtcaacattgagaacccggaaggcatcccggtcaagcaggactccttgtcttctcagaaccagcttggcgtcttgcccttgtcttgggacattccggaactcgtcaacatgggccagtggaagatccgagcctactatgaaaactcaccacagcaggtcttctccactgagtttgaggtgaaggagtacgtgctgcccagtttcgaggtcatagtggagcctacagagaaattctactacatctataacgagaagggcctggaggtcaccatcaccgccaggttcctctacgggaagaaagtggagggaactgcctttgtcatcttcgggatccaggatggcgaacagaggatttccctgcctgaatccctcaagcgcattccgattgaggatggctcgggggaggttgtgctgagccggaaggtactgctggacggggtgcagaacctccgagcagaagacctggtggggaagtctttgtacgtgtctgccaccgtcatcttgcactcaggcagtgacatggtgcaggcagagcgcagcgggatccccatcgtgacctctccctaccagatccacttcaccaagacacccaagtacttcaaaccaggaatgccctttgacctcatggtgttcgtgacgaaccctgatggctctccagcctaccgagtccccgtggcagtccagggcgaggacactgtgcagtctctaacccagggagatggcgtggccaaactcagcatcaacacacaccccagccagaagcccttgagcatcacggtgcgcacgaagaagcaggagctctcggaggcagagcaggctaccaggaccatgcaggctctgccctacagcaccgtgggcaactccaacaattacctgcatctctcagtgctacgtacagagctcagacccggggagaccctcaacgtcaacttcctcctgcgaatggaccgcgcccacgaggccaagatccgctactacacctacctgatcatgaacaagggcaggctgttgaaggcgggacgccaggtgcgagagcccggccaggacctggtggtgctgcccctgtccatcaccaccgacttcatcccttccttccgcctggtggcgtactacacgctgatcggtgccagcggccagagggaggtggtggccgactccgtgtgggtggacgtcaaggactcctgcgtgggctcgctggtggtaaaaagcggccagtcagaagaccggcagcctgtacctgggcagcagatgaccctgaagatagagggtgaccacggggcccgggtggtactggtggccgtggacaagggcgtgttcgtgctgaataagaagaacaaactgacgcagagtaagatctgggacgtggtggagaaggcagacatcggctgcaccccgggcagtgggaaggattacgccggtgtcttctccgacgcagggctgaccttcacgagcagcagtggccagcagaccgcccagagggcagaacttcagtgcccgcagccagccgcccgccgacgccgttccgtgcagctcacggagaagcgaatggacaaagtcggcaagtaccccaaggagctgcgcaagtgctgcgaggacggcatgcgggagaaccccatgaggttctcgtgccagcgccggacccgtttcatctccctgggcgaggcgtgcaagaaggtcttcctggactgctgcaactacatcacagagctgcggcggcagcacgcgcgggccagccacctgggcctggccaggagtaacctggatgaggacatcattgcagaagagaacatcgtttcccgaagtgagttcccagagagctggctgtggaacgttgaggacttgaaagagccaccgaaaaatggaatctctacgaagctcatgaatatatttttgaaagactccatcaccacgtgggagattctggctgtcagcatgtcggacaagaaagggatctgtgtggcagaccccttcgaggtcacagtaatgcaggacttcttcatcgacctgcggctaccctactctgttgttcgaaacgagcaggtggaaatccgagccgttctctacaattaccggcagaaccaagagctcaaggtgagggtggaactactccacaatccagccttctgcagcctggccaccaccaagaggcgtcaccagcagaccgtaaccatcccccccaagtcctcgttgtccgttccatatgtcatcgtgccgctaaagaccggcctgcaggaagtggaagtcaaggctgccgtctaccatcatttcatcagtgacggtgtcaggaagtccctgaaggtcgtgccggaaggaatcagaatgaacaaaactgtggctgttcgcaccctggatccagaacgcctgggccgtgaaggagtgcagaaagaggacatcccacctgcagacctcagtgaccaagtcccggacaccgagtctgagaccagaattctcctgcaagggaccccagtggcccagatgacagaggatgccgtcgacgcggaacggctgaagcacctcattgtgaccccctcgggctgcggggaacagaacatgatcggcatgacgcccacggtcatcgctgtgcattacctggatgaaacggagcagtgggagaagttcggcctagagaagcggcagggggccttggagctcatcaagaaggggtacacccagcagctggccttcagacaacccagctctgcctttgcggccttcgtgaaacgggcacccagcacctggctgaccgcctacgtggtcaaggtcttctctctggctgtcaacctcatcgccatcgactcccaagtcctctgcggggctgttaaatggctgatcctggagaagcagaagcccgacggggtcttccaggaggatgcgcccgtgatacaccaagaaatgattggtggattacggaacaacaacgagaaagacatggccctcacggcctttgttctcatctcgctgcaggaggctaaagatatttgcgaggagcaggtcaacagcctgccaggcagcatcactaaagcaggagacttccttgaagccaactacatgaacctacagagatcctacactgtggccattgctggctatgctctggcccagatgggcaggctgaaggggcctcttcttaacaaatttctgaccacagccaaagataagaaccgctgggaggaccctggtaagcagctctacaacgtggaggccacatcctatgccctcttggccctactgcagctaaaagactttgactttgtgcctcccgtcgtgcgttggctcaatgaacagagatactacggtggtggctatggctctacccaggccaccttcatggtgttccaagccttggctcaataccaaaaggacgcccctgaccaccaggaactgaaccttgatgtgtccctccaactgcccagccgcagctccaagatcacccaccgtatccactgggaatctgccagcctcctgcgatcagaagagaccaaggaaaatgagggtttcacagtcacagctgaaggaaaaggccaaggcaccttgtcggtggtgacaatgtaccatgctaaggccaaagatcaacttcacctgtaattaaatttcgaccttcaaggtcaccattaaaaccaggcaccgggaaacaggaaaagaggcttcaggatggccaaggaacatttggttcctttgaggttttgttaccgggtaccgggggagaccagggatgccactatggtctatattgggacatatccatggatggactgggctttgctccaggacacaggttgaccttgaaggcagcctgggccaatggtgttgacagatacatctccaagtattgagcctggacaaaagccttctccgataggaaccaccctcattcatcttacctgggacaaggtcttcacactcttgagggtggactgtcttagcttttcaaagtttcaccattacttttaattgttaggagcttattcccaggcttgggggccagttcaaggtctacgcctattacaacctggaggaaagctgtacccggttctaccatccggaaaaggaggatggaaagctgaacaagctctgccgtgatgaactgtgccgctgtgctgaggagaattgcttcatacaaaagtcggatgacaaggtcaccctggaagaacggctggacaaggcctgtgagccaggagtggactatgtgtacaagacccgactggtcaaggttcagctgtccaatgactttgacgagtacatcatggccattgagcagaccatcaagtcaggctcggatgaggtgcaggttggacagcagcgcacgttcatcagccccatcaagtgcagagaagccctgaagctggaggagaagaaacactacctcatgtggggtctctcctccgatttctggggagagaagcccaacctcagctacatcatcgggaaggacacttgggtggagcactggcctgaggaggacgaatgccaagacgaagagaaccagaaacaatgccaggacctcggcgccttcaccgagagcatggttgtctttgggtgccccaactgaccacacccccattcc

SEQ ID NO: 25968 - DNA, 1297 bp, Homo sapiens
  SIMILAR (347)..(400): 881254mologous to Homo sapiens metallothionein-IG,accession number J03910,Smith-Waterman Score=88.
  misc_feature (1)...(1297): n = a,t,c or g
ctgaaggaaaaggccaaggcaccttgtcggtggtgacaatgtaccatgctaaggccaaagatcaactcacctgtaataaattcgacctctgcctcccaggttcaagacagaaagtcgaagtcttcctgggccatgtctgcagcctgggactttcctttggagtagaaataggagggtgcttggttttcccagcatgaatggagaggacatggggcttctcttcctctgctctgagtgggaaaggagctctgagggctggctctgcaacagagaagggggaagtggacactcaattgaaccccactgctgtaccttcctgcatctcactcaccgttcactggctttttctcttctagcaggtgtctcctgcacctgcgccagctcctgcaagtgcaaagaagtgcaaatgcacctcctgcaagaagagtgagtgcggggccatctccaggaatctggggctgtggcttaaggttgggagggaacccaaggctgtccctgaagtgcgtgcttctggggaaccggccttcctttgtccctgtaggttgtcactgcctgtctagtcttctgcaactttccagggcttatgtgaggtggggcagctttctccaaaggaagacccgattctcaatgtccaaccaagttgtctcctgacaaaaaaccatgcccatcatgaactaaagggtccctctggggctgggagggatggagacaggcctctgttggggcagggagttctcatgatcgagtctgcttctgaccgtctcaatctccgtttcctccccaggctgctgcttcctggctgccctgtgggtggttggcaaagtgttgcccagggctggcatctgcaaagggggcatcgggagaagtgcaagctgctgcgcctgaatgtcgggacagccctgcttccaaggtacaaatagagttgacccgtaaaatccagggatttttttgtttttttgattacaatctttgaacccctttggctaacattcctttttttcttgtggaaatatgtggaataattaatttaaacacttaagacttgnnnnnnnnnnnnnnnnntataatggggcgccccttttaaagaacccttggggggcccaaatttaacccgggctgggaaggctatagcttttcccttatagggggggttttaaaaagctagtggggaattttgggaaaaaaccctttcttgtgtgggggagcatattggaccaccctcccctccgaattttaacgccccagggcaaaataaaatttttaagggggaagggggtaaaccaacccgctattcccg

SEQ ID NO: 25969 - DNA, 295 bp, Homo sapiens; identical to SEQ ID NO: 25061
  SIMILAR (273)..(4): 841254mologous to Escherichia coli NH3-dependent NAD synthetase,accession number M15328,Smith-Waterman Score=454.

SEQ ID NO: 25970 - DNA, 1080 bp, Homo sapiens; identical to SEQ ID NO: 25062
  SIMILAR (1)..(774): 991254mologous to Escherichia coli UDP-N- acetylmuramoylalanine-D-glutamate ligase,accession number D10483,Smith-Waterman Score=1322.

SEQ ID NO: 25971 - DNA, 1267 bp, Homo sapiens; identical to SEQ ID NO: 25063
  SIMILAR (104)..(901): 941254mologous to Escherichia coli RhsB core protein with unique extension,accession number U00039,Smith-Waterman Score=1343.

SEQ ID NO: 25972 - DNA, 939 bp, Homo sapiens; identical to SEQ ID NO: 25064
  SIMILAR (321)..(76): 971254mologous to Escherichia coli K12 putative 2-component sensor protein,accession number AE000384,Smith-Waterman Score=397.

SEQ ID NO: 25973 - DNA, 1764 bp, Homo sapiens; identical to SEQ ID NO: 25065
  SIMILAR (638)..(600): 761254mologous to Escherichia coli K12 Mg2+ transport ATPase, P-type 1,accession number AE000495,Smith-Waterman Score=48.

SEQ ID NO: 25974 - DNA, 1401 bp, Homo sapiens; identical to SEQ ID NO: 25066
  SIMILAR (1401)..(856): 1001254mologous to Escherichia coli phosphoacetyltransferase,accession number D17576,Smith-Waterman Score=905.

SEQ ID NO: 25975 - DNA, 1215 bp, Homo sapiens; identical to SEQ ID NO: 4903
  SIMILAR (849)..(292): 631254mologous to Escherichia coli No definition line found,accession number U00039,Smith-Waterman Score=452.

SEQ ID NO: 25976 - DNA, 4752 bp, Homo sapiens; identical to SEQ ID NO: 9224
  SIMILAR (3136)..(3885): 921254mologous to Escherichia coli No definition line found,accession number U00039,Smith-Waterman Score=1200.

SEQ ID NO: 25977 - DNA, 4653 bp, Homo sapiens; identical to SEQ ID NO: 25069
  SIMILAR (2304)..(1504): 891254mologous to Escherichia coli O157:H7 aspartokinase II and homoserine dehydrogenase II,accession number AE005625,Smith- Waterman Score=1162.

SEQ ID NO: 25978 - DNA, 720 bp, Homo sapiens; identical to SEQ ID NO: 9287
  SIMILAR (531)..(620): 931254mologous to Escherichia coli Glycolate oxidase subunit GlcD,accession number D90811,Smith-Waterman Score=141.

SEQ ID NO: 25979 - DNA, 912 bp, Homo sapiens; identical to SEQ ID NO: 25071
  SIMILAR (1)..(657): 991254mologous to Escherichia coli TldD protein,accession number D44451,Smith-Waterman Score=1138.

SEQ ID NO: 25980 - DNA, 1860 bp, Homo sapiens; identical to SEQ ID NO: 4900
  SIMILAR (616)..(1071): 961254mologous to Escherichia coli No definition line found,accession number U00039,Smith-Waterman Score=708.

SEQ ID NO: 25981 - DNA, 1180 bp, Homo sapiens; identical to SEQ ID NO: 25073
  SIMILAR (105)..(647): 981254mologous to Escherichia coli glucose-1-phosphate adenylyltransferase,accession number U18997,Smith-Waterman Score= 949.

SEQ ID NO: 25982 - DNA, 591 bp, Homo sapiens; identical to SEQ ID NO: 25074
  SIMILAR (91)..(387): 1001254mologous to Escherichia coli Phospho-N-Acetylmuramoyl- Pentapeptide-Transferas e,accession number D10483,Smith-Waterman Score=521.

SEQ ID NO: 25983 - DNA, 3390 bp, Homo sapiens; identical to SEQ ID NO: 4901
  SIMILAR (3390)..(2749): 981254mologous to Escherichia coli formylglycineamide ribonucleotide synthetase (EC 6.3.5.3),accession number M19501,Smith-Waterman Score=1123.

SEQ ID NO: 25984 - DNA, 4247 bp, Homo sapiens; identical to SEQ ID NO: 25076
  SIMILAR (3810)..(2944): 991254mologous to Escherichia coli Glycolate oxidase subunit GlcD,accession number D90811,Smith-Waterman Score=1457.

SEQ ID NO: 25985 - DNA, 4944 bp, Homo sapiens; identical to SEQ ID NO: 25077
  SIMILAR (964)..(1737): 941254mologous to Escherichia coli Phospho-N-Acetylmuramoyl- Pentapeptide-Transferas e,accession number D10483,Smith-Waterman Score=1257.

SEQ ID NO: 25986 - DNA, 1980 bp, Homo sapiens
  SIMILAR (1362)..(4): 821254mologous to Escherichia coli RhsB core protein with unique extension,accession number U00039,Smith-Waterman Score=1975.
tcactggctctctttctggtctatactccgcaaatcctgatccttgatgtgtcgatttccttcgggggaaattacggcggtaaggtaccgggcgatgttgaattcaaaccgggttttaatggccctgcgtgtctttaacggcaatatacggtcaacggctttcgtatgcgcggtactgattaagcccttcctcgcggtgaccggccggtcattgtgtggattatcataacggtagcgagtgatatcgccgtcaggggcagtttcctgaatcagacggcccaattcatcatattcccggcgcaattccagcccgtcaggcccggtggctgacgttaactggttgtggtggttatagtaaaacgccgatgccctgccatccggcgtggttatgcgcgtgatgaggcccgtcaccacatccgggctgtactctgttgtcctgcctgcggcatccgtctgtgccctgagcctgcccacggcgtcaaactgactctgcgtgacgctgccgtccgcgtgttcctttttcaccacccgcttcagcccggcttcgccctgcgtgtgcagcacttcacggcggtccaggctgtcggtgatggtgatgcggtctttctcatactgatacgtgtagcttaagcctgccgggtttagctgttctgtcacccgcccgtcgctgtcgtaacggtaacggatttccggccggcccgtgtgacggtgcgccaccatccggccccggtatttatcatcgtaagtaaagctgcgcacctgtttgccactacggtcatacaccaccgccagttcgccgcggggcgtccagccatagcgcaccagcggcgcgcagggtaaattctccgggtattccgggtcgtgcgtcagccacacggcagacagacggatgccgttgtcccggccatattcggtgtaacccggcagggtatcaggaaaagcggacggttccgtcccgccggaaatggcctgctgccgggcttcttctgcctcgtgcgcatgcgtggtcagtaccagccggaagtgacgcccggcaccatccgtcacgccggtgatttcgccggtctgtgtgcgcccgaagcggtccaccagcccggtcagtacccggtacggcggcagcggcgcaggcagcacctcatccgcttccggcacccgctcacaccagccgagcagccaccacggcccctgcggactgtttgtcgccagataacgatgcggacttaagcggagttcttccggcagcgcctgccagagtgcggccagccggtgaccttcatccagtttcgccacgccgccgcgcaccagccacagtgactcgctgcggctgtaaccgtccttggcccggatgctggctttcatgtattcgatgttgatggccgttttgatcttgcgtggatgctgtttcaaggttcttaccttgccggggcgctcggtgatcagccagtccacatccacctcggctagctcctcgcgctgtggcgccccttggtagccggcatcggctgagacaaattgctcctctccatgcagcagattacccagctgattgaggtcatgctcgttggccgcggtggtgaccaggctgtgggtcaggccactcttggcatcgacaccaatgtgggccttcatgccaaagtgccactgattgcctttcttggtctgatgcatctccggatcgcgttgctgctctttgttcttggtcgagctgggtgcctcaatgatggtggcatcgaccaaggtgccttgagtcatcatgacgcctgcttcggccagccagcgattgatggtcttgaacaattggcgggccagttgatgctgctccagcaggtggcggaaattcatgatggtggtgcggtccggcaaggcgctatccagggataaccgggcaaacagacgcatggaggcgatttcgtacagagcatcttccatcgcgccatcgctcaggttgtaccaatgctgcatgcagtgaatgcgtagcat

SEQ ID NO: 25987 - DNA, 4641 bp, Homo sapiens
  SIMILAR (2076)..(1231): 991254mologous to Escherichia coli K12 putative thymidylate kinase (EC 2.7.4.9),accession number AE000210,Smith-Waterman Score= 1454.
  misc_feature (1)...(4641): n = a,t,c or g
tcatcgggcactgacgcgggtcgcaggtatagaccccgtcaacgtccgtccaaatctcgcaacaatcggcgcgtaaacaggcagccagcaccgcagcagagtagtcggaaccgttgcgtccaagcaccaccagttcgcctttttcattaccggcggtgaaactgccatcagcaccatgtgatcagccggaatgcggcttgccgaagtacggcgggtggactcagcaatatcgacggtagattcgaggtaatgccccactgccagcagtttttcgaccggatcgataacagtaacgttgtgaccgcgcgcttctaatacgccggccataatggcgatcgacattttctcgccacggcaaatcagcgcaggttcggcatcgctgatattgggtaaagcatcctggccgctaatggttttttctatcatcgccaccaggtggttggtgattttggcgggggcagagaggacggtggccacctgcccctgcctggcattgctttggtcgaaaaaaaaagcccgcactgtcagggtcggccttttttctgtgtttcctgtacgcgtcacccgcaccttttctacgccatcgcgagtaaagacctgaacgtcgataaccgtaccggatacaccgtttggtacgcgcagagaagagtctttaacgtcagaggctttctcaccgaagatcgcacgcagcagtttttcttctggggtcagctgagtttcacctttcggcgttaccttaccaaccagaatgtcgccaccggtcacttccgcaccaatgtaaacgataccggattcatccagtttggagagcgcagcttcacccacgttcgggatgtcagcggtgatctcttccggacccagcttggtgtcacgggacacacacgccagttcctgaatgtggatggtggtgaaacggtcttcctgaacaacacgctcggatacgaggatggagtcttcgaagttgtaaccattccacggcatgaacgctacgcgcatgttctgaccaagcgccagttcaccgaggtcggtggacggaccgtctgccagcacgtcgccacgttcaaccggttcacccagagacacacacggcatctggttgatacaggtgttctggttagaacgggtgtatttggtcaggttgtagatgtcgatacctgcttcacccggatacatctcgtcttcgttaactttgataacgatacgggaagcatccacgtactgaacgacaccaccacgtttagcatcggccacaaaatagagatacggcgtttttgccggatgcgcagcagccttcagcgaatccgcccccggcgtcgctatcgcacctggcggcagaccggtaatggtataggtgttatacgctgtcggcgtttccaggtctgcacgagaaagtttgccattataacgctctcccatcccgtaaatcacggtcgggtcggtctgcaggcgcataccaatgcgtaaacggttgataaatactgaggcaaccttatcgcgttcactggcaacggcggtttctttttcgataattgatgccatcgtcaccaactggtttttatctttataaggcagaccgtccgcacgcccttcccaggcgctatcgaccgctttcaccattttcttgtgcgctcgcttgagtaacgcgacatcggtggtattggcggtatacatccaggtgtctggccagaaccaaccttcaatccactccgggttttccagttcaagtgcctgcgctacggtggcgtacttatcatcgctcagcgtatgcttgatatacggggcctcacgcaattgcttgaggtaatcgctcagacgcatcccttctaccagtcgcagagggaactgtgcttctttaccgctttccagcaatttcagcatctcgcgcacggtcatctgcggtgtaaagcggtaagtcccggctttaaagtgagaaagatccggttcgatacgcagcagccattgaaaaacccgtggacgattgatgatcttatcggcataaagctgttcaccgagcgccagacgtccggtccctggcttcagggtaaatatcgtctcttctttgataagcaatttgcttccagacgcccacaccagcggcgatacccagtaccaccagcaataacaacagccgaggatcgcaatcgccataatcggtttgccccccatcgcgaagatatcgctgatggcgttagtcgccgcaatgcggccaaaatcgaaaggattatcaacgatcggcataaagaagtcggtggtactgataacgctggtgccattgcccagatcgtacaccgccgcatcgtcgcgggtttcattacccacaagcaaattcggatcaacaaacttcgcctgctcactatgcaggatggtttccaacacttttggggaaattttacagccgcaaccagctccgtggctgtattgggtcaaacgaatcgagttctcgctcatggacatctctaccggactttcagttaatgcgccactgcgccagatgccgccaaacccctgggcaactgctgccatttgcatcgccatgaccgcgcatccggcagacatttcctgttcccagcgcgggactttatgattctcttcgcatttcgccaccaccgtgatgatgagcggtgcgcggaacggcgcattacgggctttgtcgatagctttgtcatcactaccggcagcaatcgccccctgttccagtacggcgctgaaacgctcgcgcccttccccttcaatcacaaaaaaatgccacggttgcatggacttatggcccggcgcacgcatacccgcacgcaggatgttttgcagctgttcacccgttggcgcgggttcagccaagcgggaggcgcgattactcttgtcaatccagccatttaccagcacgggttcattttccagcgagagcaacacatcgacggcttcctgggcggcactggcttctatgtaacgggtgattaactccccttcgcgatgcttcttaaccagatacttccatttccaaccgctttcaagattttcaagttgttgatatttcatagcgatctcaatgttaccgtgtaactcttccgcgctggcatgaatttcaccaccgtttacatgcagtgttgcatctgaggtgtgggtgactttctccactttcagaacaacatagacctggttgattcggtcaaaatattgctcaagtttggcaaatttggctgtaacaaattcgcgcagtgcctcggtgatctcgacgttatttccggtaatgttgagctgcatagtgtcttccttatcggttgggtcaaacgagttgtttacgttcgcaacagtgcggcgtgccaccatgataccttgttccgacagcaaagaggttaacttgctgtcgctcaacggtttcgctgggttttccgccgcgattaatttcttcaccagcgcacgaatcgccgtggaggaagcttcgccgccgccctcggtattgacgtgactggaaaagaaatacttcagttcaaaaatgcctcgtggactatgcaggtatttttgcgtggtcacgcgagatatcgtcgattcatgcatttcgacagcctgggcgatatcggccagtaccatcggtttcatatattcttcaccttgctcaaagaaggcttgctgctgttcaacgatacagcgactcacgcgcagtagcgtatcgttacggctttccagactcttgatcaaccatttggcatcctgcagattgctgcggataaactggctgtcatcaaaatttaacgcgtnattgcacatcgaggcgtagtgctggttgatttgcagacgcggaatgctgtcactgttgagttctaccgtccagtgaccgttatgcttacgcaccagcacatctggaatgacatactcaggttcgccagtctggataccgtttttaccgccacaggcagtcgttgcggctccagaacgacgaggccgatgatgaacaccaatagcagttcgctgctctttatcgtggcgcttcgcgtcttctgttttagcctgttcctgattcgtatccgcctgcttatcggcgatagttttcgcagtaaaatcagcatcctgactggttttatcctgctttggttcatcatcgctcattgcttttttaaagcctttgatcgacgcaccaagatcggaaccgatggagccgagctttttggtgccaaaaagcagtacaacgatgacggcaataatcaataactgccaaatactgataccacccatacatgttcctgaatggcaatttcgactctcgatcgcgtcagcgtcggccaggaaccggcttgtgtgaaaacctgtccgaccggggctatccacttcggcaccaagaaggagatgctggagctggcggaacagcgcgtggcgaaactgaaagcgcgtggttacgaacatgctggcgtctacaacccggaaggggtcggtggtacgcacgttatgtacgtgctgcatcacgccgatcagccggagctgtatcacggtctgccgaaagatccgaagatcgacacctcggtaagcctgtggaaaggcgcgttgaaaccgctggcagcggctggctttattgccacttttgccgggttgattttccactacatcggtattggcccgaataaggaagtggacgatgacgaggaggatcat

SEQ ID NO: 25988 - DNA, 1308 bp, Homo sapiens
  SIMILAR (703)..(750): 1001254mologous to Escherichia coli proline dipeptidase,accession number M87049,Smith-Waterman Score=88.
ttaacgaattccattgtgtggtgtcccgttgtatatatggttgtaggtcgcgggtgtcggtggttggcctcccggcaccatggtgccaaacgcaatggtgttgtggttgcactccggccgcgcgtgtgtcatgatacgttgggggtatggctccctcccattgccctgcgtttggtcaatcgacggggtcgtttcctgtgatctatcgggatcagggtactcaatggtgtggtgcggtgcagggtgccataggcctctgtcgttgctgggtgtgttagtgtcacaggtcgtggttgcctgcgcgccgtcgcggcaccgtggggctcgctgtaaacgcccgtactgtccccgtggtacatagtcccacttcgccgacagtgaattcagagtaagcgccgtcagatcagaaaagagattttcttgtcccgcatggagcgattcgcggccaacgagcatgacctcaatcagctgggtaatctgctgcatgagaggagcaatttgtctcagccgatgccggctaccaaggggcgccacaggcgaggagctggccgaggtggatgtggactggctgatcgccgagcgcccggcaaggtaagaaccttgaacagcatccacgcaagaacaaacgccaaggtgcttaatttccctggactcccgccgaacccggttcaatcgcgggccgtttatgccgcatggtatcggcatccgctgggcctgcaggtgcatgacgtcgctggttttatgcaggatgtagcggtacgcacctcgcggcaccggcaaaatatccgtacctgcgctgccccgtattctccagccgggcatggtgttaaccatcgaaccgggtatcggcagctgctgaggggtgtttgtgcgtagcccgaattttactgctgttggcctagaactattgtacccatcaagagtttgggtcagcatcccaactaggatcctcctgatgtacgtgcttgtttcgcaagttattgatgtgtcgtggggatactcctggcttctctcgtctgttggctcgggtccgtgtgtgttttgtcgtgttgtgttatgtgtggttgtggcctcgtgtgttcgtgcttgatggtagtccattgcttgcgtgctggtacacttggcggttgtttgtattgtgggtggtgtagtgcgtggtagtctgtggttgggtggctgtgaatgtatcttgtggggcttgcgggattgtggtccacctcccttgtttgactttgttgtgacgtgtgataatggatgcgagtttgttcgcctcggattcttggtattgatcatgtcctgttgtttcat

SEQ ID NO: 25989 - DNA, 1305 bp, Homo sapiens
  SIMILAR (406)..(516): 781254mologous to Escherichia coli K12 IS5 transposase,accession number AE000234,Smith-Waterman Score=149.
atgcggaatgtgccggaccctcagatgaaggcgcattacagaaatggtggtctgttctaccgttcttcaaagacggttatggttttgaggaagactgggcagaagtttatacctcgaaaatcttccaccagaaagctacccagtcggcgcaccaatcccgtggccatcgataccgttccgtctggttatgccctgatgcaggggcaggcttttgacaatctgcttacccgaaacttgcagccgcttatccagacgtgtgctgtggcgaccgtcatcacttccggtcagcacgtcgtgcgttttcccttgggaaggtgcgaacaagttcctgatatgagatcatcatattcatccgagcgcatcccagagggacatcatgagccatcaactcaccttcgccgatatgaattcagcactaagcgccgtcagacccgaaaagagattttcctctccgcatggagcagattcctgccatggcagaatatgaccgctgtcatcgagcgttttatcccaaggcgggcaatggccgacggccctatccgctggagacctgctgcgtattcactgcatgcagcattggtacaacctgagcgacggtgcatggaagatgccctcgccctgccggatcgcaccaccatcatgaatttccgcacctgctcgagcagcatcaactggcccgtcaattgttcaagaccatcaacgctggctggccgaagcaggcgtcatgatgacccaaggcactttggtggtgccaccatcattgaggcacccagctctaccaagaacaaagagcagcaagcgatccggagatgcatcagaccaagaaaggcaatcagtggcactttggatgaaggcccacattggtgtcgatgccaagagtggcctgacccacagccggtcaccaccgcggccaacgagcatgacctcaatcagctgggtaatctgttcatggagagaagcaatttgtctcagccgatgccggctaccaaggagcccacagcgcgaggagctggccgagcgcagatcctcaaaaacggctgccgcatcgtcagccagttcggcggcgtcatcggatcatcggcgtctgcttcaaaagatgaggcgaccagacaagcgtcagcacgaagagcagcgccacgacggcatccacgaaggcgacagaggctgctggagtgcgacggcggcagctcagagcaaaagtacggcggaatccgcggcaagcgcgccgagacagcagctaaacgggcagaggatattgcatccgccgtgcgcttgaggatgcaagtacgacgaaaaaggggatag

SEQ ID NO: 25990 - DNA, 2025 bp, Homo sapiens
  SIMILAR (1389)..(1210): 441254mologous to Escherichia coli transposase,accession number U95365,Smith-Waterman Score=105.
atgatatcaaaacgctctgagcgctcgttcggctatggcgtaggcctagtccgtaggcaggacttttcaagctcggaaggtttcttcaatctgcattcgcttcgaatagatattaacaagtgtttgggtgttcgaatttcaacagcaacaagtacaatgggcatcgtattgcccgaacagataaagctagcatgcaacggtatacagcgagtcgctctttgtggaggtgacgattacctaacatcggtcgattcgtttgatgttatgttttgttctcgctttggttggcaggtacggccaagttcgttctgttcccctgtatttacctgggtaactgagaatcagcagcaccttcacagaggtaaagacaatctctcattgaagaataataattcagcctgtggcgctgcctgtggtagcctcaggggtgagaaatcagacccacccagtgcgaggaataacccaagctctcagcaaggcgggaaaaaagaaagtggccagcaacctagcttaaaggatcctcacatactgcggcacgactctgcgcacagaccaaggaaggagaagccgcggcagccggtaaatgcttccttggtggtcaaattctggagggttaaatgtgtgtgtgtgcataatgatcacaaacgacctgcttgcagtgttgtttgtgtggatggtgacacctactgctggacggaggcgtatcccgccatgggcctgccaacactaagagggcctgattctgccttaggggagcggccagagaggacagaacgagtgggagtgtgtaaaggaccatcagagtgggggaaacaggtgggctggatagcaagttttggaagcactgaacacccacacggagctgctcctctcaagcggggaggcatcttcactaaggagtgtctgttcccctgtattacctgggtaactgagaatcagcagcaccttcaacagaggttggccagcgtgaataacatcgccagttggttatgtttttcagcaaccccttgtatctggctttcacgaagccgaactgtcgctgatgatgcgaaatgggtgctccaccctggcccggatgctggctttcattattcgatgttgatggccgttttgttcttgcgtggatgctgtttcaaggtcttaccttgccggggcgctcggcgatcagccagtccacatccacctcgccagctcctcgcgctgtggcgccccttgcagattacccagctgattgaggtcatgctgttggccgcggtggtgaccaggctgtgggtcaggccactcttggcatcgcaccaatgtgggccttcatgccaaagtgccactgattgcctttcttggttgatgcatctccggatcgcgttgctgctctttgttcttggtcgagctggtgcctcaatgatggtggcatcgaccaagaatctgctccatgcgggacaagaaaatctcttttatggtctgacgcgcttactgctgaattcactgtcggcgaagtcccagaatgactgtctagaccaatgtccttactcattccttattcttctgagctttgctaactggagtacaggagcagtcagcaggcccagagtcaggtggttgagttatcaagccttcataaccagagggtctgagcacttgttggactgtgcttactcagcttctcatttacaattaccactgcacctgagagtaccaagagattctgagccagagattacgatttccaacttccagctcctcaagagctacactgatgaagtgggcatttcagtgtttccatacttattctctctacgcatttgggcaagttgtttaatttctcctttcaatgcctataaaatgctgatagttctagcagctgccctgcatgacatcatgagaattatagataacaagccatggaaatttgcaaatagctgcccagcagcagcacgggaactcccacctcccccttatataagagccaaatgtcggggcgctatcaggctactgccacgacagtctgactgcatggctatcagctga

SEQ ID NO: 25991 - DNA, 1818 bp, Homo sapiens
  SIMILAR (783)..(100): 921254mologous to Escherichia coli IS5 39.3kDa protein,accession number U70214,Smith-Waterman Score=1122.
ttatgggggcgccgacacaggcagggggagcgccacaatacggcgggaaagagcggtatacaaaacacatccgtgtgcagaaagacgatgccgcgccggtaccttgccggggcgctcggcgatcagccagtccacatccacctcggccagctcctcgcgctgtggcgccccttggtagccggcatcggctgagacaaattgctcctctccatgcagcagattacccagctgattgaggtcatgctcgttggccgcggtggtgaccaggcaatgtgggccttcatgccaaagtggccactgatggcctttcttggtctgatgcatctccggatcgcgttgctgctctttgttcttggtcgagctgggtgcctcaatgatggtggcatcgaccaaggtgccttgagtcatcatgacgcctgcttcggccagccagcgattgatggtcttgaacaattggcgggccagttgatgctgctccagcaggtggcggaaattcatgatggtggtgcggtccggcaaggcgctatccagggataaccgggcaaacagacgcatggaggcgatttcgtacagagcatcttccatcgcgccatcgctcaggttgtaccaatgctgcatgcagtgaatgcgtagcatggtttccagcggataaggtcgccggccattaccagccttggggtaaaacggctcgatgacttccaccatgttttgccatggcagaatctgctccatgcgggacaagaaaatctcttttctggtctgacggcgcttactgctgaattcaccctgagtattatcgaggctgacttccgcatttgggctaatgctggttaacgcattgtagcgtgcattaagcccctcgatagccagcgttccccctgtaacattcaggtttccgccacctgtcagttcaccctgactgatcccacctttatttaccgtcagcgccccctctttgaacaaaacagtcgaacccatctgcccggtgaatgtctctaccgtctgcgtcgatccattaagatcgacgatggccgcgttgctgatgttcagttcccgggtgttgccaagtgcaccatccgcatcggtacgtaatgtccccatctgaacgtaggttgccccctgatagtcgttctgaccgttggaaagcgaaacctgtcgcaccgtattgattgccagatccccttcaccaccgatttttgccgacatatcggccgttgcgccataggctccgccatgttcggctaacgtcagcttttgcccaccatggatgttcagcgctttcagcccatagttaacgtacaaaccattacctggtgcggtcgtgaggcggaatccataatcaccctcggcgaccaccgttccgttttgcgcaatgtgtaacgttttgtccgcttccacctcgtcgcccttgtctatcacattaatcacagtaactctccttagtctccagaaatagacactgttctgaacttggtatgtatgcttgttaaagcaggcagctgcattcctttttacacactgttcgcggttttcttccagccactgcgcgccttgttcggtcagcgcaatctgcttcttacctccttcctcttcgcggatggtaatcagcgactgctcctgcagaaaatccagcgttgggtagatgacgcccgggcagacgtaattcaccgtgaccaaagaaacgttgccgacgaccgccgccgcgaccgtggcgaccaccgcagcattgaccgtgttcatgctggtgaccgtgtccgcagtgctcgtgttctgacttctcacctttgcagcagccctcatggcgtggctggccttcat

SEQ ID NO: 25992 - DNA, 4638 bp, Homo sapiens
  SIMILAR (3052)..(4143): 991254mologous to Escherichia coli putative glycosyl transferase,accession number U38473,Smith-Waterman Score=1860.
  misc_feature (1)...(4638): n = a,t,c or g
atgctctgtacgaaatcgcctgccatgcgtctgtttgcccggttatcnctggatagcgccttgccggaccgcaccaccatcatgaatttccgccacctgctggagcagcatcaactggcccgccaattgttcaagaccatcaatcgctggctggccgaagcaggcgtcatgatgactcaaggcaccttggtcgatgccaccatcattgaggcacccagctcgaccaagaacaaagagcagcaacgcgatccggagatgcatcagaccaagaaaggcaatcagtggcactttggcatgaaggcccacattggtgtcgatgccaagagtggcctgacccacagcctggtcaccaccgcggccaacgagcatgacctcaatcagctgggtaatctgctgcatggagaggagcaatttgtctcagccgatgccggctaccaaggggcgccacagcgcgaggagctggccgaggtggatgtggactggctgatcgccgagcgccccggcaaggtaagaaccttgaaacagcatccacgcaagaacaaaacggccatcaacatcgaatacatgaaagccagcatccgggccagggtggagcacccatttcgcatcatcaagcgacagttcggcttcgtgaaagccagatacaaggggttgctgaaaaacgataaccaactggcgatgttattcacgctggccaacctgtttcgggcggaccaaatgatacccattcgctacctgctggcgtatcgtgacgttggcaatacatttcccagaccgcctgccacggcaacgatttctgctcttccagcagtgccagacgcgcagtgtaatcgcccgccgcttccagcttgcgcagctcagcgaggcatcgaagaagtcaaggccgatatgcacccggtcaaacagatcgtgacgcacaatctcactggcaattgcctgggtttcatcatccagcagcactacgtgatcgctgtcccagcgaacctggactggcttgaacgttgcaagcaaagcaactcgggtggaagtgcccggcgtccaggcacagcgcagtctggctggctggttggcataccccatgtaaaactcattggagccaaccgtgtagctctctgcgccaatgccaaacaattggctctcaacggcgtcgatattgggtttagcttctcgcctgatcacctcatccagtgctgccagcagacgctgacgcggggcgagacggtcaacggtgatatctttcataccatccgggatccagatgttcatcaccgatggtgtgccgagttgctcgccaaaataggccgaaacgcgacggctggctttgcagtgatcaatccagaactggcgaatgctgtcctcactggcattacgcgctttgcccggataattgcctgtggcctgaatccccccggtcagcgaaccttccgggttttcaaaaccggaaacatcatcgcctgccagcagtgcattgaaacggctgcgccagctcatgcaacacatcggcatacagcagcgccagctgtcgaaaatgcagcgcgcaggcttggcaataatttgcggttggagatcctctggcaggttgggttgactggaaatcataaagcgaaagatctcaatgcggcgcaactggatgcactcgcacacgcgttactggagattcctcgattttcctacgctacgcgggggcaggtggatgagaataagcatcatggggcgctgtttcgctttaaggtttttcatcgagatggcgaacccccccacgccatacccgcacaaatagccagcagagcaaaaatcgacagcaggatttgcggtagcgggcgtagtgcccgcagtaagatttgtttatcgaaaccaagaccaatccgccagccaattgccatatacgccatcgccagcagccattccggtagttcgatgcatcgggatgagcatcgtgccggaaggaagacgcagcaggcatcccactgtaccggcaacgaccgcgagcaaaatagtaagcaggagattaatgctcactggcgggaaccagacgatatgctggttaaccgcttcagcgttatcgcccagcatcatgcgggtgaccagaacagcggcccccggcgacgaacagcactccgcagattttgccataaacgccaccaggcgaattatcttgcgcccggaaagaagaaatctccggagacgaagaacggccacaggtgggtgcgggaacctttgaaccgaccggttttggccaaagctcggctctttcgccttttccagcgcgcgcacctttctttcggcatcacaagccaattggaaaccagtggagtcaatggtgtaaccgtcacgctcagcttggtacagctcacgttttacggtaacgttagtgagatcatcagacatcaatgtcaacttacacggcacggcaatcacccgctgccactgacggcaatccagggtatcgccctctttagtgacaatcaggctgcctatcgcttccgggctgaccagcgcacgttgcggccctttggtctgccagtagcccgccagccagtccggcgcgggggttttcacgacattgttatagttttcgacttcggcacagcccgccagcaacaagagcgcgcctgcaattgcgagttttttcatcattcgtcctgcatgagaagaaaagaggattgtggcattaaagccctgatgtcgccagcctttcaagaggctacattcatgtcatggcagcaattcaaacacgcctggttgattaaattctgggcccccatccctgcggtcatcgcggcgggtattctctctacttactattttggcattactggcaccttttgggctgtcacgggtgaatttacccgttggggcggccagctcctgcaactgttcggcgtccatgctgaagagtggggttactttaaaattatccatctggaaggatcgccattaacccgcatcgacgggatgatgatcctcggtatgtttggcggctgctttgccgcagcgctgtgggccaacaatgtagcggtaccgacatggtgtaatggctgcggcacaagtcatgaggtgcgggtcattaccgcaccgccttactacccgcaatggcaggtgggcgagaactattccgcctggcgctacaaacgagaagagggggccgccacggtgtggcgctgcccgctgtatgtgccaaaacagccgagcaccctgaaacgcctgttgcatctgggcagttttgccgtcagcagtttctttccgctgatggcgcaacgtcgctggaagccggatcgcattattggcgtggtgccaacgctgttttgcgcgccgggaatgcgcctgctggcgaaactctctggtgcgcgtaccgtgctgcatattcaggattacgaagtggacgccatgctggggctgggccttgccggaaaaggcaaaggcggcaaagtggcacagctggcaacggcgttcgaacgtagcggactgcataacgtcgataacgtctccacgatttcgcgttcgatgatgaataaagccatcgaaaaaggcgtggcggcggaaaacgtcatcttcttccccaactggtcggaaattgcccgttttcagcatgttgcagatgccgatgttgatgcccttcgtaaccagcttgacctgccggataacaaaaaaatcattctttactccggcaatattggtgaaaagcaggggctggaaaacgttattgaagctgccgatcgtctgggcgatgaaccggtgaattttgccattgtcggccagggcggcggcaaagcgcggctggaaaaaatggcgcagcagcgtggactgcgcaacatgcaatttttcccgctgcaatcgtatgacgctttacccgcactgctgaagatgggcgattgccatctggtggtgcaaaaacgcggcgcggcagatgccgtattgccgtcgaaactgaccaatattctggcagtaggcggtaacgcggtgattactgctgaagcctacacagaactggggcagctttgcgaaacctttccgggcattgcggtttgcgttgaaccggaatcggtcgaggcgctggtggcggggatccgtcaggcgctcctgctgcccaaacacaacacggtggcacgtgaatatgccgaacgcacgctcgataaagagaactcgaaactctatccagttgtgatggcaggtggctccggtagccgcttatggccgctttcccgcgtactttatcccaagcagtttttatgcctgaaaggcgatctcaccatgctgcaaaccaccatctgccgcctgaacggcggtcaggctcggcgtcggtgccgataccatactgacgtgacccggcgcgaggaacgcatcgataccgttatccggctgttccagcaaactgcgcaacgtcgggataagcgtaatgtgctggcagaagaatttcaacgcatccatcggcgagtaaacgatgcgcacatcggcaccgcgtgcttttgcctgcaacagcgatccctgtttccccggcacgcgcatggcgtcgccaaaggtacagaagatgacttccggatggctggcaatctccacgcaggtgtcgattctacccatcggcagtacgcacaccgggcaccccggaccgtggataaactcaacgttttccggcagtaa

SEQ ID NO: 25993 - DNA, 2631 bp, Homo sapiens; identical to SEQ ID NO: 9169
  SIMILAR (2631)..(1900): 991254mologous to Escherichia coli K12 putative transport protein,accession number AE000394,Smith-Waterman Score=1249.

SEQ ID NO: 25994 - DNA, 1575 bp, Homo sapiens
  SIMILAR (1)..(495): 951254mologous to Escherichia coli Tail fiber protein GP37,accession number D90774,Smith-Waterman Score=780.
atggcagtaaagatttcaggtgtactgaaagacggcacaggaaaaccggtacagaactgcacaatccagctgaaagcaaaacgtaacagcaccacggtggtggtgaacacgctggcctcagaaaatccggatgaagccgggcgttacagcatggacgttgagtacggtcagtacagcgttattctgttggtggaaggattcccgccgtcacatgccgggaccattaccgtgtatgaagattctcaacccggtacgctgaatgattttctcggtgccatgacggaggatgatgcccgtccggaggcactgcgccgttttgaactgatggtggaagaggtggcgcgtaacgcgtccgcggtggcacagaacacggcagccgcgaagaagtcagccagtgattgccgcacattagcccgtgaagcgggaaaccatgcggctgatgctggggactcagcacgcgcagccagcacgtcagccggacaggcgggtagctcatttgcacttgttcatcatcctgttccttcccccagtctcctggcgctcgtgcttcggccctttagaaaccttcctcaaccttcttcgggaaacccaccaacccaaaacgcgccggcccaacaaacaacgggcccccctttccccccaagccccaaacaacggccggccgcgggccccccacaacccgcgcgcccacggcataacacacttcgcgacgctcgcctccttctacccttacgacccttactaactcgcactttctcccatttcttcacgaacacgacctttggtcgacgattccgcatctgggtcctaggtttgccgtctaattgctctgaggctccctattcctgttccctgggccaactggggggtccttttcccgttccatgcctcggatgggtactggatcctgctcctctcgtttgcgttggcccggtgtctccaggccctatggagtggcattgcattgcttgttatcggcccttgggtccctattttcgacgttgtgtgcgggttcccggtccccgattcctttggcctctagttgctccgttggaacttcttcaatttggctttccctattttagcagcttatgttgttacaccttatttcgggatcgtcaaggggagcacgcgtgggaccttgcaccacatatcgccgcactgccactgattgcctttcttggtctgatgcatctccggatcgcgttgctgctctttgttcttggtcgagctgggtgcctcaatgatggtggcatcgaccaaggtgccttgagtcatcatgacgcctgcttcggccagccagcgattgatggtcttgaacaattggcgggccagttgatgctgctccagcaggtggcggaaattcatcgatcgaatctgctccatgcgggacaagaaaatctcttttctggtctgacggcgcttactgctgaattcactgtcggcgaagactcatcaacacagcagcaaaaccaaacatgccgtcagcacccacagcggccagttgccgtgccccatgattccaaacggcaaacacgacagcgacacataatcaccaaccaagtgaccctgtaa

SEQ ID NO: 25995 - DNA, 2040 bp, Homo sapiens
  SIMILAR (904)..(1263): 1001254mologous to Escherichia coli Hypothtical protein in gltJ 5'region ,accession number D90705,Smith-Waterman Score=635.
atgatgacccaaggcactttggtggatgccaccatcattgaggcacccagctctaccaagaacaaagagcagcaacgcgatccggagatgcatcagaccaagaaaggcaatcagtggcactttggcatgaaggcccacattggtgtcgatgccaagagtggcctgacccacagcctggtcaccaccgcggccaacgagcatgacctcaatcagctgggtaatctgctgcatggagagaagcaatttgtctcagccgatgccggctaccaaggggcgccacagcgcgaggagctggccgaggtggatgtggactggctgatcgccgagcgccccggcaaggtaagaaccttgaaacagcatccacgcaagaacaaaacggccatcaacatcgaatacatgaaagccagcatccgggccagggtggagcacccatttcgcatcatcaagcgacagttcggcttcgtgaaagccagatacaaggggttgctgaaaaacgataaccaactggcgatgttattcacgctggccaacctgtttcgggcggaccaaatgatacgactggcacaggcagatgacgccgccccggcagcgggcagtactctggacaaaatcgccaaaaacggtgtgattgtcgtcggtcaccgtgaatcttcagtgcctttctcttattacgacaatcagcaaaaagtggtgggttactcgcaagattactccaacgccattgttgaagcagtgaaaaagaaactcaacaaaccggaccggcaggtaaaactgattccgattaccttacaaaaccgtattccacttgttgaaaacggcactttcgattttgaatgtggttctaccaccaacaacgtcgaacgccaaaaacaggcggctttctctgacactattttcgtggtcgttttgctcaacaaactgaatgaagagcaaaaaatgaatatgcgcatcatcagcgccaaagatcacggtgactctttccgcaccctggaaagcggtcgtgccgttgcctttatgatggatgacgctctgctggccggtgaacgtgcgaaagcgaagaaaccagacaactgggaaatcgtcggcaagccgcagtctcaggaggcctacggttgtatgttgcgtaaagatgatccgcagttcaaaaagctgatggatgacaccatcgctcaggtgcagacctccggtgaagcggaaaaatggtttgataagtggttcaaaaatccaattccgccgaaaaacctgaacatgaatttcgaactaagggcaaaagcagacagcagacacagaggagaagatttaaaacttgacaactctaactgcaaccccaaggcagaatttttcacaggttatgtaacagattctggcacttcccactcataccatccagaatgctgttggttccagttcctgatgttatttgggaggctaagtccctattatcttcccctcttcttccaacctttctctgatcatgctccccaattccatgttggcaatctgaaatacagcatccttacaaaaatccctagtttcaagtccagaaatctgattaaagagtttttcatttcctttgcaggagttcagaaagaaacagcaactggggataacattggggatggaaaggcaagtttcttgggggcatattgtggaggaaagattcggggtgacagaacagaaagttacaggctaacagaggagttgtggttaatagaaagctctcatgttagcttggagcctgtgcacagaagtcaagaattggggtttgggaacctctgcctagatttcggaggatgtatggaaatgcctagatgtccaggaagaagtctgctgcaggggcagggctctcacagagaacctctgctacagcagtgcagaagtgaaatgtgggatcagagctctcccagagtccctactggggcatcacctagtggagctgtgagaagagggccactgtcctccgaccccataatggcagatccaccaacagcttgcaccaagtgcccggaaaagcttcaggcactcaatgccagccagtga

SEQ ID NO: 25996 - DNA, 1608 bp, Homo sapiens
  SIMILAR (1)..(528): 1001254mologous to Escherichia coli IS5 39.3kDa protein,accession number U70214,Smith-Waterman Score=929.
atgagtcatcaacttaccttcgccgacagtgaattcagcagtaagcgccgtcagaccagaaaagagattttcttgtcccgcatggagcagattctgccatggcaaaacatggtggaagtcatcgagccgttttaccccaaggctggtaatggccggcgaccttatccgctggaaaccatgctacgcattcactgcatgcagcattggtacaacctgagcgatggcgcgatggaagatgctctgtacgaaatcgcctccatgcgtctgtttgcccggttatccctggatagcgccttgccggaccgcaccaccatcatgaatttccgccacctgctggagcagcatcaactggcccgccaattgttcaagaccatcaatcgctggctggccgaagcaggcgtcatgatgactcaaggcaccttggtcgatgccaccatcattgaggcacccagctcgaccaagaacaaagagcagcaacgcgatccggagatgcatcagaccaagaaaggcaatcagtggcactttggtcatgaaggcccacagttggtaagaaccttgaaacagcatccacgcaagaacaaaacggccatcaacatcgaatacatgaaagccagcatccgggccagggtggagcacccatttcgcatcatcaagcgacagttcggcttcgtgaaagccagatacaaggggttgctgaaaaacgatacccaactggcgatgttattcacgctggccaacctgtttcgggcggaccaaatgataccgtccttgagacccgtcctggcccgcgtgacctggggtaactcccatgtcactgttcctgcccctgggatggggatgtccaaccttcccccacccccaggcaatggacttgaggagagaggctccactgacaaagcgaggcacttcctggagtctgctgcgcccctggccatggacccttatagctgtgccctgactacctacgcgctgaccctgctccgcagcccggcagcccctgaggcactgcgcaagctccgtagcctggccatcatgcgagagagagtccacatctccacccccaacaagtatgagttccagtatgtgcagcggccactgcgcctcacccgctttgatgtggctgtgcgagctcacaatgatgcccgtgtggccttgtcttctgggccccaggacacagcaggcatgatcgagatcgtcctgggggggcatcagaacaccaggtcatggatctccaccagcaagatgggagagcccgtggccagtgcacacacggccaagatcctctcctgggatgaattcagaacattctggatcagctggcgtggtggccttatccaggttggccatggtccagagccatccaatgagtctgtcattgtggcctggaccctcccgaggccaccagaggtccagttcattggcttttccaccggctggggctccatgggtgaattccgaatctggaggaagatggaggtggacgagagctacagcgaggccttcaccctgggggtcccacacggcgccatccctgggtctgagcgagccaccgcctccatcatcggcccgcagcagcccgtccagcagtggcatgtggggctgcagtga

SEQ ID NO: 25997 - DNA, 1665 bp, Homo sapiens
  SIMILAR (1029)..(484): 871254mologous to Escherichia coli No definition line found,accession number U00039,Smith-Waterman Score=833.
tcagttcacatcgggcatcagttctttcagtttcagtcgacgagcctgaatatctgcccgcccctgcatcggctttttatcgccttccagatgaatattcgccgcaatgctgccgcccgccatgccaaatttcagcggttgcaggcgcaggtcagcatttttgaggatgatatgagtagaaagatcgctaatcggcaggctactgccatgctcaatgcgccgccctttgaagcgaacatcggcatccataacgtcccatttatcggtttcgaagcggtcataaggcagcactttgcccgcaggctgaacgcttttttcgcccttcttctgttcagaccgtttcgacttttctgcccctttcccggaatcaacgccaatcaacggtcccaggtccgccagccgcaattgccgcgactcgacatcaccttccagttttggtcgtggctttccggtggtgtagaccagagaaccgtggatatcgtttgtcatcaatggcgatccgcccttgatcgaaaagaatattatccagccgaaacgaccatgccgacggctttgcattcgcgtctttgtatcatcgttggcaagattaaacgtccagttattgttcttttcagagaggcgaatcaggcgcgcgtcgggcttttcgagcttgatccacggcagccagaccgttttggtcagcagcgccagcggggccagcgttgcctctacgcgtggcaaatgcaccatcgtgacttcgggaatatccggtggattgccaagaatgatgtcttccgcgtgtacatggggccacggcacccagctgcgccagccagtttcttgtttttgccgctcccacaccacgcccagatcgccacggatagcgaacggacgattcaactccgcagagactttctggttgatagtcggtttgagtcgattccagtcaaaagttgcaatcaaaatgatcgccacgacaatcatccgaaaggctgtaagaaataacttcgttgttgaagagatctctcctctgtaagagcggtatcgcttgaccttaatcgctgctttaagtgagagggttcccatcaggcgctgaacagctttatggttaatctgtttcccttctcgatgaagagacagcgttaccctacggtatccgtatcggcctctattctcgtgataaatctcactaatacgctttttaacgtccgcatacttgtcaggcttgctgagagcttgcctttcaagatcctcaatgcgtcggtcttttgacagctccaatgctgatgccgctttttctggatcaactgatattgcaatgtttcttttggtgccaatcttgagcgcgcgtaaaccagcttctccgcgctcttcatagaccttcagccacctggctacagaaccactaccagcaagcataaagtgagcagcagcctgattaagggacatgtgctgctcgatcacagctttcacgaccttaatacgcaactctggatcagcactaacgcctttaggtttgggaattaaacctttttctccatgtttttcatagagggcaacccatgtcctgacctgggttcgggggacaccaaaacgtgccgagatgatcctgtaaccatcatcagttgtgaagtagtgattcacgacttcaaggcgcttttcaaaagggtattttggctttgacat

SEQ ID NO: 25998 - DNA, 917 bp, Homo sapiens
  SIMILAR (917)..(273): 991254mologous to Escherichia coli K12 IS5 transposase,accession number AE000291,Smith-Waterman Score=1108.
gtctgtgtgcgcccgaagcggtccaccagcccggtcagtacccggtacggcggcagcggcgcaggcagcacctcatccgcttccggcacccgctcacaccagccgagcagccaccacggcccctgcggactgtttgtcgccagataacgatgcggacttaagcggagttcttccggcagcgcctgccagagtgcggccagccggtgaccttcatccagtttcgccacgccgccgcgcaccagccacagtgactcgctgcggctgtaaccgtccttggcccggatgctggctttcatgtattcgatgttgatggccgttttgatcttgcgtggatgctgtttcaaggttcttaccttgccggggcgctcggtgatcagccagtccacatccacctcggctagctcctcgcgctgtggcgccccttggtagccggcatcggctgagacaaattgctcctctccatgcagcagattacccagctgattgaggtcatgctcgttggccgcggtggtgaccaggctgtgggtcaggccactcttggcatcgacaccaatgtgggccttcatgccaaagtgccactgattgcctttcttggtctgatgcatctccggatcgcgttgctgctctttgttcttggtcgagctgggtgcctcaatgatggtggcatcgaccaaggtgccttgagtcatcatgacgcctgcttcggccagccagcgattgatggtcttgaacaattggcgggccagttgatgctgctccagcaggtggcggaaattcatgatggtggtgcggtccggcaaggcgctatccagggataaccgggcaaacagacgcatggaggcgatttcgtacagagcatcttccatcgcgccatcgctcaggttgtaccaatgctgcatgcagtgaatgcgtagcat

SEQ ID NO: 25999 - DNA, 1602 bp, Homo sapiens
  SIMILAR (1602)..(871): 991254mologous to Escherichia coli K12 putative transport protein,accession number AE000394,Smith-Waterman Score=1249.
ctgctggagcagcatcaacgggcccgccaatcgttcaagaccatcaatcgctggctggccgaagcaggcgtcatgatgactcaaggcaccttggtcgatgccaccatcattgaggcacccagctcgaccaagaacaaagagcagcaacgcgatccggagatgcatcagagcaagaaaggcaatcagtggcactttggcatgaaggcccacattggtgtcgatgccaagagtgggctgacccacagcctcttcaatagtttcttcgccggtagcgatggtgcccgcattaatatccattaaatcaaaccagcggttcgccagctcggtgcgggttgccattttaatgacgggtaccgccatcaggccgtacggcgtaccacgaccggtcgtaaacacttgcactgtgatacccgaagccacctgttgcgtgccacagacaaaatcgctggctggcgtcgcggcgtaaattaatccgcgtttagtcgggcgttgaccgggcgacagcacttcaacaattgcgcttttacccgatttagcaatggagccgagtgccttctctaccacgtttgccagaccgcctttcttgttgcccggcgaagggttggcgctgcggtcggtttttcccatattgagatagttatcgtaccactccatctcctccagcagccgttggccgacctcttcgttcacgttgcgcgtcggctgtccagcacgatgggaattcgcgatcaacgcccacttcccggttaacttctgaacaacatcacccgttggcgccgcagcgcaccagtagatcagacgcatagccaatcggcggggtttgccgttacaccagaaaacgcattcgtggccagtagcggacctagcagacatcgtcatcagcgctgaacatcccacgaaaaccagtgctgcattgaaggagtgcagttcacttaccaggtagccaatcaccagtggagtgacaatggaggcaacattgccaaagacgttaaagacgccgccgcagaggccaacaatctctttcggcgcggtgtcagaaatcaccggccagcccagcgcaccaaatcctttgccaaagaaagccagcgccatcagcatgaccaccagcgtggtgttgttggtgtagttacataagatgatggtggaagccagcaacattcccagcacaatcggtagcttacgtgccagggtcagggataaaccgcgtttgatcagataatccgagaagacacctcccagcacgccgcccgcaaaaccacacagtgctggaatcgaggcgaccagacccactttcagaatcgacatgcctttttcctgcaccagataaatcgggaaccaggtgaggaagaaccaggtgatggtgttgataaaatattgtccgaaaaatacgcccagcatcatgcggttagagagcaattgcttgatgtaatgcagtttgggtccgcttgctgccgcactgcccggctttttgtggtccatatcgaccaccgcgccattttcagagataaacttcagctcttccgcagacatacgtgggtgatctgtcgggttatgaatcaacttgatccacagcgccgtcagcacaaaaccaatcaaccccat

SEQ ID NO: 26000 - DNA, 2472 bp, Homo sapiens; identical to SEQ ID NO: 9160
  SIMILAR (859)..(1533): 921254mologous to Escherichia coli Adhesin AIDA-I precursor,accession number D90839,Smith-Waterman Score=1029.

SEQ ID NO: 26001 - DNA, 2115 bp, Homo sapiens
  SIMILAR (2115)..(1369): 811254mologous to Escherichia coli transposase,accession number U95365,Smith-Waterman Score=1018.
tcaacgaagatgctgcggggtaactacatccactacggtgttcgcgatctcggtatgaccgcgatttgctaacggtatctccctgcacggtgggcttcctgccgtacaacctccaccttcctgatgttcgtggaatacgcacgtaacgccgtacgtatggctgcgctgatgaaacagcgtcaggtgatggtttacacccacgactccatcggtctgggcgaagacggcccgactcaccagccggttgagcaggtcgcttctctgcgcgtaaccccgaacatgtctacatggcgtccgtgtgaccaggttgaatccgcggtcgcgtggaaatacggtgttgagcgtcaggacggcccagaccgcactgatcctgtgcagccagagtagcgtagccaggctaccaattggggtaattttcggtcccaaatcgcagccaatcacattggcataaaccatcgcttctttgataacgccagatgccgtgctgccatcaatggacaacgcgccaaccagtaccgtcggcatattgttcataatagaagagaggaaggcggtgaggaatccggtgccgagcgtcgcggcccacaggccgttatccgccagcacgttgagtacgccagaaagatattccgttaatccggcattgcgcaggccataaaccaccagatacatgccgagcgagaagatgacaatctgccagggggcaccgcgcaggactttacccgtattaatcgcatgaccgcgtttagcgacgacaaataatatcagcgcgcccacagctgcaatggcgctcaccggaatgccgagcggttccaggacgaaaaatcccaccagcagaagcagtaaaacaacccagccagtttttctgccgtttctggcacgctgcggtttgtgctggtgcggatgggtaatcatcgggaagccagcagcggttgctatacggcgatggcgcgatgagtgatgcgggtaaacagctggctgaacgtgagcattaccgtttacgtcgcgatgcgcaagctctcgcgcagtggaatggcgaaacgcttcctgttgatccactaaacgatgccgtcctttctgacgacgactggcttgaactggccggttttgctttcgctcatcgtccgctattaacgtcgttaggttgcttattgcgtctgttacaaaccagtgaactggcattaccggcgctgcgcaacagttgttactgcttttccacggtgtcggggataacccggtggcaatgggggaaataggcaactggtttgcaccgctgtttcctgatgcgctggccagttgcccacccggtaaacgcgctttacgcaccaggaagttgagcgcgcgctgggtatccatcagacacaggcgaactttccagccgatatcttccagttccgccagagtggagagcgcctcgtcgtactcatcgccctgatgcccttccataatcacccggctcaactgctccaggtcgctatagatattttcaatttcatctgccaactgttcgattttggtttcgaacagatccagcagcaactcgtaggcgttaccgttcttggcatcgacaccaatgtgggccttcatgccaaagtgccactgattgcctttcttggtctgatgcatctccggatcgcgttgctgctctttgttcttggtcgagctgggtgcctcaatgatggtggcatcgaccaaggtgccttgagtcatcatgacgcctgcttcggccagccagcgattgatggtcttgaacaattggcgggccagttgatgctgctccagcaggtggcggaaattcatgatggtggtgcggtccggcaaggcgctatccagggataaccgggcaaacagacgcatggaggcgatttcgtacagagcatcttccatcgcgccatcgctcaggttgtaccaatgctgcatgcagtgaatgcgtagcatggtttccagcggataaggtcgccggccattaccagccttggggtaaaacggctcgatgacttccaccatgttttgccatggcagaatctgctccatgcgggacaagaaaatctcttttctggtctgacggcgcttactgctgaattcactgtcggcgaaggtaagttgatgactcat

SEQ ID NO: 26002 - DNA, 1134 bp, Homo sapiens
  SIMILAR (1)..(864): 991254mologous to Escherichia coli IS5 39.3kDa protein,accession number U70214,Smith-Waterman Score=1502.
atgagtcatcaacttaccttcgccgacagtgaattcagcagtaagcgccgtcagaccagaaaagagattttcttgtcccgcatggagcagattctgccatggcaaaacatggtggaagtcatcgagccgttttaccccaaggctggtaatggccggcgaccttatccgctggaaaccatgctacgcattcactgcatgcagcattggtacaacctgagcgatggcgcgatggaagatgctctgtacgaaatcgcctccatgcgtctgtttgcccggttatccctggatagcgccttgccggaccgcaccaccatcatgaatttccgccacctgctggagcagcatcaactggcccgccaattgttcaagaccatcaatcgctggctggccgaagcaggcgtcatgatgactcaaggcaccttggtcgatgccaccatcattgaggcacccagctcgaccaagaacaaagagcagcaacgcgatccggagatgcatcagaccaagaaaggcaatcagtggcactttggcatgaaggcccacattggtgtcgatgccaagagtggcctgacccacagcctggtcaccaccgcggccaacgagcatgacctcaatcagctgggtaatctgctgcatggagaggagcaatttgtctcagccgatgccggctaccaaggggcgccacagcgcgaggagctggccgaggtggatgtggactggctgatcgccgagcgccccggcaaggtaagaaccttgaaacagcatccacgcaagaacaaaacggccatcaacatcgaatacatgaaagccagcatccgggccacggtggagcacccatttcgcatcatcaagcgacagttcggcttcggcctccgaggcacagacagcagcctcctgctacaggaaccggccccgcagtgtggccagtctgacctagtctgccacccttaccccagtcctactttcaaggaaggagtagcctcagtacccctccctgagcttggtgtccaggaccccagcctgactgctacatcagacctctcagagttccctggattttccagacccagttcagaagagacctgtgacacgaagcctgctgctgcaggccctgctactggactcctctccctctga

SEQ ID NO: 26003 - DNA, 2034 bp, Homo sapiens; identical to SEQ ID NO: 9170
  SIMILAR (1156)..(1875): 991254mologous to Escherichia coli No definition line found,accession number U00039,Smith-Waterman Score=1229.

SEQ ID NO: 26004 - DNA, 1875 bp, Homo sapiens; identical to SEQ ID NO: 17693
  SIMILAR (739)..(1509): 951254mologous to Escherichia coli RstB,accession number U41101,Smith-Waterman Score=1235.

SEQ ID NO: 26005 - DNA, 1675 bp, Homo sapiens
  SIMILAR (1)..(954): 951254mologous to Escherichia coli IS5 39.3kDa protein,accession number U70214,Smith-Waterman Score=1554.
atgagtcatcaacttaccttcgccgacagtgaattcagcagtaagcgccgtcagaccagaaaagagattttcttgtcccgcatggagcagattctgccatggcaaaacatggtggaagtcatcgagccgttttaccccaaggctggtaatggccggcgaccttatccgctggaaaccatgctacgcattcactgcatgcagcattggtacaacctgagcgatggcgcgatggaagatgctctgtacgaaatcgcctccatgcgtctgtttgcccggttatccctggatagcgccttgccggaccgcaccaccatcatgaatttccgccacctgctggagcagcatcaactggcccgccaattgttcaagaccatcaatcgctggctggccctaggcgtcatgatgactcaaggcaccttgttcgatgccaccatcattgaggcacccagctctaccaagaacaaagagcagcaacgcgatccggagatgcatcagaccaagaaaggcaatcagtggcactttggcatgaaggcccacattggtgtcgatgccaagagtggcctgacccacagcctggtcaccaccgcggccaacgagcatgacctcaatcagctgggtaatctgcttcatggagagaagcaatttgtctcagcgatgccggctaccaaggagccacagcgcgaggagctggccgaggtggatgtggacctgctgatcgccgagcgtcccggcaaggtaaaaaccttgaagcagaatccgcgcaagaacaaaacggccatcaacatcgaatacatgaaagccagcatccgtgccagggtggagcacccgtttcgcatcatcaagcggcagttcggcttcgtgaaagccagatacaaggggctgctgaaaaacgataaccaactggcgatgttattcaccctggccaacctgtttcgggtggaccaaatgatacagctgccaacgtatgagttatcgtcgggtatgggcgctgcttcgcagacaggcagaacttgatggtatgcctgcgatcaatgccaaacgtgtttaccggatcatgcgccagaatgcgctgttgcttgagcgaaaacctgctgtaccgccatcgaaacgggcacatacaggcagagtggccgtgaaagaaagcaatcagcgatggtgctctgacgggttcgagttctgctgtgataacggagagagactgcgtgtcacgttcgcgctggactgctgtgatcgtgaggcactgcactgggcggtcactaccggcggcttcaacagtgaaacagtacaggacgtcatgctgggagcggtggaacgccgcttcggcaacgatcttccgtcgtctccagtggagtggctgacggataatggttcatgctaccgggctaatgaaacacgccagttcgcccggatgtcgggacttgaaccgaagaacacggcggtgcggagtccggagagtaacggaatagcagagagcttcgtgaaaacgataaagcgtgactacatcagtatcatgcccaaaccagacgggttaacggcagcaaagaaccttgcagaggcgttcgagcattataacgaatggcatccgcatagtgcgctgggttatcgctcgccacgggaatatctgcggcagcgggcttgtaatgggttaagtgataacagatgtctggaaatatag

SEQ ID NO: 26006 - DNA, 1746 bp, Homo sapiens; identical to SEQ ID NO: 9165
  SIMILAR (1)..(753): 991254mologous to Escherichia coli similar to E. coli yeiG,accession number U73857,Smith-Waterman Score=1329.
  misc_feature (1)...(1746): n = a,t,c or g

SEQ ID NO: 26007 - DNA, 1917 bp, Homo sapiens; identical to SEQ ID NO: 9167
  SIMILAR (1)..(741): 991254mologous to Escherichia coli K12 IS5 transposase,accession number AE000234,Smith-Waterman Score=1294.

SEQ ID NO: 26008 - DNA, 1611 bp, Homo sapiens
  SIMILAR (1611)..(652): 861254mologous to Escherichia coli K12 IS5 transposase,accession number AE000291,Smith-Waterman Score=1393.
tcatcgggtgccgcgcattcgaaattcgcgcacaccgtcggctcgacgagcacggtttgtggggatgagatgagcagctcgatggttccggagccggtcgcggagcctcgggacacgcaccgagaggtccacgtcgacgcaccccacggcacctcgtcgcgagcggcacgcgcaactacccagccacacaacacaccggagggcaggacgcggcacccctaggaggtggaaggtccctggccctggctccatgtggcacgtgctctggtccttctccagcagcaggcttgtcagaccctcccagtccttcagctgagtccctgcacagtcccacaggttgtctactaagtaagcagcgtggtcgtggagctgtagcacaccattattgagcgtagtctggtttgccgcgccacccatttgaacaatttgataaccgtcatttaatactgagtattctgcggcgccattcatttcaatgtactgataccctccgttaatttcagtattattacttacaccaaattcttttatatgctgttctccgccaggattgattttcgtattattggcggtcccataaaccagctggatatctttttccaggacaacaccatcaactgtctcaccatactcaacagttgatgccaatggtatcatttggtccgcccgaaacaggttggccagcgtgaataacatcgccagttggttatcgtttttcagcaaccccttgtatctggctatcacgaagccgaactgtcgcttgatgatgcgaaatgggtgctccacccctggcccgggatgctggctttcatgtattcgatgttgatgggcggtttgttcttgcgtggatgctgcttcaaggttcttaccttgccggggcgctcggcgatcagccagtccacatccacctcggcaagctcctcggcgctgtggcgccctttggtagccggcatcggctgagacaaattgctcctctccatgcagcagattacccagctgattgaggtcatgctcgttggccgcggtggtgaccaggctgtgggtcaggccactcttggcatcgacaccaatgtgggccttcatgccaaagtgccactgattgcctttcttggtctgatgcatctccggatcgcgttgctgctctttgttcttggtcgagctgggtgcctcaatgatggtggcatcgaccaaggtgccttgagtcatcatgacgcctgcttcggccagccagcgattgatggtcttgaacaattggcgggccagttgatgctgctccagcaggtggcggaaattcatgatggtggtgcggtccggcaaggcgctatccagggataaccgggcaaacagacgcatggaggcgatttcgtacagagcatcttccatcgcgccatcgctcaggttgtaccaatgctgcatgcagtgaatgcgtagcatggtttccagcggataaggtcgccggccattaccagccttggggtaaaacggctcgatgacttccaccatgttttgccatggcagaatctgctccatgcgggacaagaaaatctcttttctggtctgacggcgcttactgctgaattcactgtcggcgaaggtaagttgatgactcat

SEQ ID NO: 26009 - DNA, 3952 bp, Homo sapiens
  SIMILAR (3070)..(3783): 1001254mologous to Escherichia coli IS5 39.3kDa protein,accession number U70214,Smith-Waterman Score=1250.
atgaaactgatggccattcaggaacaggcgcgcggcgaacaatgcttccgtgattccgagtgggatttgcagttccacattcaggtcgctctggcgacgcagaactccgccctggcggctatcgtggaaaaaatgtggacccagcgtagtcataacccgtactggaaaaaactgcacgaacacattgattcccgtaccgtcgataactggtgtgatgaccacgatcaaatcctcaaggcgctgattcgcaaagatcctcatgctgctaagctggcaatgtggcagcatctggaaaacaccaagatcatgttatttaacgaaaccagcgacgacttcgagttcaatgccgaccgctatctattcgccgaaaacccggtggcgattgcgaaagaactggagctgaccgcatcagcggaaattttactctgggatgactattttgcacctggctacggcgtgccgaacgacgaaggcatggaagcagtgaaattgctgccgcggctggaaggcattctgcttgatcctgtgtataccggaaaagcgatgcgggggctgattgacggtatcagtcagaaacgcttcaaagatgaagggccgattctgtttattcatacccggcggtgcgcctgcgctgttcgcctatcatccccacgtttagctccggaaacgctcatgcaagaaagtatacaactggttattgattccttgccgttcctgctgaaaggggctgggtatacgctgcaactcagtatcggcggcatgttttttggcttactgctcgggtttattctcgcgctgatgcgtctgtcgccaatctggcccgtgcgctggctggcgcgtttttatatctctatttttcgtggtacgccgctcatcgcacaactgtttatgatctattacggcctgccgcagtttggtatcgaattagatcccattccgtcagcaatgattggtctgtcgttgaacactgccgcctatgctgccgaaacgctgcgcgccgccatttcttctattgataaaggtcagtgggaagcggcagccagtattggtatgacgccgtggcagaccatgcgtcgcgcgattttgccacaggcggcgcgtgtggcgttgccgccgctgtcgaacagctttattagcctggtaaaagatacgtcgctggccgcgacaatccaggtgccggagctgttccgtcaggcgcagttgattacctcgcgtacgctggaggtgttcaccatgtatctggcggcttcgctcatctactggatcatggcgactgtgttatcgacgttgcatctgacaaatggcagcgcattagctgggaagaagcattctccccaacgaaaccgggatgctgacccagaaatttgcccgctccctcgggatgctggcggtagacaaccaggcgcgcgtctgacacggaccaacgcaagtcttgctccaacatttggtcgcggtgcgatgaccaaccactgggtggatatcaaaaacgctaacgtcgtgatggtgatgggcggtaacgctgctgaagcgcatcccgtcggtttccgctgggcgatggaagcgaaaaacaacaacgacgcaaccttgatcgttgtcgatccccgttttacgcgtaccgcttctgtggcggatatttacgcgcctattcgttccggtacggacattacgttcctgtctggcgttttgcgctacctgatcgaaaacaacaaaatcaacgccgaatacgttaagcattacaccaacgccagcctgctggtgcgtgatgattttgctttcgaagacggtctgttcagcggctacgacgctgaaaaacgtcaatacgataaatcgtcctggaactatcagctcgatgaaaacggctatgcgaaacgcgatgaaacactgactcatccgcgctgtgtgtggaacctgctgaaagagcacgtttcccgctacacgccggacgtcgttgaaaagggatcctctagagaccagagatcccagtggtttaagccatcatccgcaaattatccgtgcctggcagcagggggcggacaatttggcatcggtagcggcggctccggtcacgtcagcggttatagcgtggtgcatcaggcactggaagaagagctggccgagtggcttggctattggcgggcactgctgaatatctctggtttcgtcgctaatcaggcagttattgccgcgatgatggcgaaagaggaccgtattgctgccgaccggcttagccatgcctcattgctggaagctgccagtttaagcccgtcgcagcttcgccgttttgctcataacgatgtcactcatttggcgcgattgcttgcttccccctgtccggggcagcaaatggtggtgacagaacgcgtgttcagcatggacggcgatactgcgccactggcggaaatccagcaggtaacgcaacagcacaatcgctggttgatggtcgatgatgcccacggcacgggcgttatcggggagcaggggcgcggcagctgctggctgcaaaagccgtgcgttacaactggcagaaaaactgcgtcagcaaggctgctgggtcacggcgattcgcccgccaaccgtacccgctggtactgcgcgactgcgcttaacgctaacccgatatcgaccgtctgctggaggtgctgcatggcaacggttaataaacaagccattgcagcggcatttggtcgggcagccgcacactatgagcaacatgcagatctacagcgccagagatgtgacgccttactggcaatgcttccacagcgtaaatacacccacgtactggacgcgggttgtggacctggctggatgagccgccactggcgggaacgtcacgcgcaggtgacggccttagatctctcgccgccaatgcttgttcaggcacgccagaaggatgccgcagaccattatctggcgggagatatcgaatccctgccgttagcgactgcgacgttcgatcttgcatggagcaatctcgcagtgcagtggtgcggtaatttatccacggcactccgcgagctgtatcgaggtggtgcagtgcctcagaggatccctaacctccgccatttaagtgaattcagcagtaagcgccgtcagaccagaaaagagattttcttgtcccgcatggagcagattctgccatggcaaaacatggtggaagtcatcgagccgttttaccccaaggctggtaatggccggcgaccttatccgctggaaaccatgctacgcattcactgcatgcagcattggtacaacctgagcgatggcgcgatggaagatgctctgtacgaaatcgcctccatgcgtctgtttgcccggttatccctggatagcgccttgccggaccgcaccaccatcatgaatttccgccacctgctggagcagcatcaactggcccgccaattgttcaagaccatcaatcgctggctggccgaagcaggcgtcatgatgactcaaggcaccttggtcgatgccaccatcattgaggcacccagctcgaccaagaacaaagagcagcaacgcgatccggagatgcatcagaccaagaaaggcaatcagtggcactttggcatgaaggcccacattggtgtcgatgccaagagtggcctgacccacagcctggtcaccaccgcggccaacgagcatgacctcaatcagctgggtaatctgctgcatggagaggagcaatttgtctcagccgatgccggctaccaaggggcgccacagcgcgaggagctggccgaggtggatgtggactggctgatcgccgagcgccccggcaaggaaaaaggggaggaaggacgactccccggaccctacggggtgcctcggttgaacaacgaattacgccggtcacccccaccgagggaatttccccccgcccttgggggaaagcgacctcggacccccccgtgcccacggcgggtccgtggctctgatcgcacgaccgcac

SEQ ID NO: 26010 - DNA, 4763 bp, Homo sapiens
  SIMILAR (948)..(253): 991254mologous to Escherichia coli K12 putative dehydratase,accession number AE000370,Smith-Waterman Score=1207.
ctacagcgtgttgccttcccagacaacttcgcggtagtgcttcacgtcggtgtcgccttcagtgctgataaccagcaccacggcatctttgttcagcgccagtttttccatcaggctttgacgttgcgggtgataatgaaccgctgcgagaacgcccaaaccgacagcgccggattcaccggagatgatgcgcgggtcgttgccgtacggattacccagcacgcgcatacctaatgcggcaacgcgccaacggttgacgatgtcgcctttgacgccggagcgataaatacagtcagctttgtcaggttcaacaataatgctgtgcagattttgcgggctatagacgtcgaccagataacccagcacaccaccggccattgctccgacaccggcttgcagcagaacgtgcgtcggggttacgcccatttcacgcatttgctcgacggcttcatctgccagggttgcgtagccttgcatgatccaggttgggattttggtgtaaccttcccatgccgtgtcctgtaccacttcccagccgtgctgctgcgcgtgttgcatggtcaggcgaacggtatcgtcatagttcatatccgtgacgatgcactcggcaccgaggttcagaatggcgtcaacgcgttcctgagcagaacctttcggcatgtaaatcaccgcattctgtccgagttgctgtgctgcccacgccacaccgcgcccgtggttgccgtcggtggtggtcgcgaaagtcattttttcgccgatggcatttttcaggtgctcaaatgacagcgtttcgatatcaagatgatatttttcacacaataattgagcgatggcgtacgcaccgccaagcattttgaaggcgttcagaccgaatcgttttgattcgtctttgacgagaattttcttcacaccaaaaaggtttgcgagatcgtccagcgcataaagcggtaatacctggcccggccatacatgaatcatgaaagccagcatccgggccaggttggagcacccatttcgcatcatcaagcgacagttcggcttcgtgaaagccagatacaaggggttgctgaaaaacgataaccaactggcgatgttattcacgctggccaacgcttcgagatacttaacgccaaacaccagcgaaatgagcggcttgccgacgatcaacaccgcgagcgccaccagaataccgattccgcccgccagtaaaccggacttcacacctaacaaccacggtctggtggtgcgcggatctaaacgcatcacctctgggtaaaaacttttacccagcaaacccgctggcgttccggcggcgtcgaagaatgtcatggcgattttaaataacccggcggcagcgggtcctaacacgatccccaccaacactgtgctgcacgagttacgcgccgaccagatggagtgggcaatgttggttgaccagacaaaactccacgcgcctttaatgtatcgggcagactcaaacagattcaatttgaaggcgttatggatatttcggcggcgtaattcgcgcgcggcaaaccaccagtacatggtgccgccaaccagattcgacacgtaccaggcaataacaaaacccgcaaaaccaaagtcaaaataccaggctacgacgctccccgctgcgcgcagaacaggtttcgtcgcctgctgtacagcaattaaatcgaagcgatctaccggacgccaaatgccgtcggcgtggaggaagccttgaaggattgacgggcataaagggtgcagccaaaattggtctccgaccatgacgggcaggatggggtagggaggcccgaaatgccccggccgtaaaattccggaacggaccatctcgttctgttgctgtgtgccagagatacagcgccgcttcgtcggcttcgccggtacgaatacgaatgacgcgttgcaattcagcgacgaagatttgccgtcgccaatttttccggtgtaagccgcttttggcaggaaattgacgctgtattccgccccccggtacagctcggcatgccctttctgacgcccgaaacctttcacttcggtgacggtcaggccctgaataccaatggaagataacgcttcacgaacgtcttccagcttgaatggtttgattatcacggtcaccagcttcatagatcccctccggtcagaattcggtaatggttgcacgctggctgccagctcttcgcccgcaagttgcagttgatacatctgccagtagcgtccctgggccgccagcagttgctggtgagtgccctgctccacggcttgcccacgatgaagcaccagaatggtgtcggcatcacaatggtcgataagcggtgagcaatcacgccgcagagcatgttgaatcgcctgttcagtaccggagtcaatgctggcggttgcctcatcaaggatcaggatttgcggcgtctcgaccagcacgcgcgccagtgccagcagttgcttttgcccaactgagagattattcccctgctcgcccagcggcgtgtaaataccgtcgctcatgctacgcgccagctccgccagttgcacggtttccagcgcctgccagacgcgttcttcggagatatcccgacccagcgtcacgttggcgaggaaggtatccgccagcaccaccggatcttgctgcaccattgccacgccctggcgcagcgcgctgtgacttagcgaacttaatggacgaccatcaaggcgaatctcaccttccgttagcgggtaatagcccatcaataaactggcgagggtgcttttgccactgccggtatgcccgaccagcgccacaaaattgcgcgaaggcacagagagattaatgttctttaacaccagatagtcatcgcgataagcaaatgacacgttatcgacttcgatggtgccactctggtactgtggctgattaaggccgatgaccgggcgctgacggtggcatgaacatttttcatccatcaggtgcattggagaggtataccaggcataaggtgctgtttgttcatccagcagtcggataaggccgaacctaccagcggtggtccacctcaaatgtcgcaacggcccaagcggccggcccgggcctcacccccatcaacccattcgaggaggcatcggacccggccaccaccgccaaacacacagtacatcacagcaaggcacaactgcaacatgcaccatcacaaacaattggtacaagaagccccacaggacctgaacttttgattacggctgatgatcgggcactggcgactgatgagcatttttaccgtcaggtgattggcgaagcataccggcataagatgctgtttgttatcagccagtcagacaaagctgaacccaccagcggtggaaatatcctttccacagagcagaaacaaaatatcagccgcaaaatctgcctgctgcatgagctattccagcccgtgcatccggtgtgtgccgtgtcggttcgcctgcagtggggactaagggtgatggcagagcggatgattaagtgtctgccgcgtgaggccagcagcccggtagtagcgctactgcaacatccctttcgaacaacggtagcccgggagcaggcacgtgacgatttcggtgaaaccgtaggtgccatactcgatacgtggcccgcgctgtctgggatttcttcttctgagtgtttaattctgccctattattctccgagccctgtcgcaagtgcggcagggctttctttatttgttttacccatactgaggagtctgcttatgacccgtctggcttcgcgctttggcgctgcaaatcttattcgccgtgaccgtccgttaacccgtgaagagtatttcgcgtggtgccagcgtatcagtgagatcggacaagatctctctctcgcatggagcagatctgcatggcagaatatgaccgctgtcatcgagccgttttatcccaaggcgggcaatggccgacggccctatccgctggagaccatgctgcgtattcactgcatgcagcattggtacaacctgagcgacggtgccatggaagatgccctgtacgaaatcgcctccatgcgcctgtttgcccgattatccctggatagcgccctgccggatcgcaccaccatcatgaatttccgccacctgctcgagcagcatcaactggcccgtcaattgttcaagaccatcaatcgctggctggccgaagcaggcgtcatgatgacccaaggcactttggtggatgccaccatcattgaggcacccagctctaccaagaacaaagagcagcaacgcgatccggagatgcatcagaccaagaaaggcaatcagtggcactttggcatgaaggcccacattggtgtcgatgccaagagtggcctgacccacagcctggtcaccaccgcggccaacgagcatgacctcaatcagctgggtaatctgcttcatggagagaagcaatttgtctcagccgatgccggctaccaaggagcgccacagcgcgaggagctggccgaggtggatgtggactggctgatcgccgagcgtcccggcaaggtaaaaaccttgaagcagaatccgcgcaagaacaaaacggccatcaacatcgaatacatgaaagccagcatccgtgccagggtggagcacccgtttcgcatcatcaagcggttttcgtgcagcgatgcgacgtccaggggcgtgaaacacagtttaaggcgctgctctatccgttcggcaacatatctctgcacttgccttcctcggcatgattttgctgctgatgtgcacgatggatga

SEQ ID NO: 26011 - DNA, 2781 bp, Homo sapiens
  SIMILAR (457)..(1410): 971254mologous to Escherichia coli IS5 39.3kDa protein,accession number U70214,Smith-Waterman Score=1617.
atgtttggtggtgatctcacccgtcgttatgggcaaaaggtgcataagctgacgctgcacggcggttttagctgccctaaccgtgacggtaccatcgggcgtggtggctgcacattctgtaatgttgcctcgtttgccgatgaagcgcagcagcatcgttccattgccgagcaactggcgcaccaggcgaatttagttaaccgcgctaaacgctatctggcctactttcaggcgtataccagcacctttgcggaagttcaggtgctgcgttctatgtatcagcaggcggtgagccaggccaatattgtcggtttgtgtgtgggtacccgcccggactgcgtgccggatgcggtgctggatctgctttgcgaatataaggaccagggttacgaagtgtggctggagctggggctacaaaccgcccacgacaaaacactgcatcgcatcaaccgcggccatgattttgcctacagtgatattactgaattcagcagtaagcgccgtcagaccagaaaagagattttcttgtcccgcatggagcagattctgccatggcaaaacatggtggaagtcatcgagccgttttaccccaaggctggtaatggccggcgaccttatccgctggaaaccatgctacgcattcactgcatgcagcattggtacaacctgagcgatggcgcgatggaagatgctctgtacgaaatcgcctccatgcgtctgtttgcccggttatccctggatagcgccttgccggaccgcaccaccatcatgaatttccgccacctgctggagcagcatcaactggcccgccaattgttcaagaccatcaatcgctggctggccgaagcaggcgtcatgatgactcaaggcaccttggtcgatgccaccatcattgaggcacccagctcgaccaagaacaaagagcagcaacgcgatccggagatgcatcagaccaagaaaggcaatcagtggcactttggcatgaaggcccacattggtgtcgatgccaagagtggcctgacccacagcctggtcaccaccgcggccaacgagcatgacctcaatcagctgggtaatctgctgcatggagaggagcaatttgtctcagccgatgccggctaccaaggggcgccacagcgcgaggagctgtccgaggtggatgtggactggctgatcgccgagcgccccggcaaggtaagaaccttgaaacagcatccacgcaagaacaaaacggccatcaacatcgaatacatgaaagccagcatccgggccagggtggagcacccatttcgcatcatcaagcgacagttcggcttcgtgaaagccagatacaaggggttgctgaaaaacgataaccaactggcgatgttattcacgctggccaacctgtttcgggcggaccaaatgatacaccactcgcatctcgccataacgactgcgtttgcgaatgagcctgtgccccagaaagataaagccgtcattaacatgggggattttagtcttatccatgttcagcctgagtttcagactgccttcgagcacaccccgacactcctccctgatggcttccacctgtgctttggtgcctttgacgatgaggacaaaatcatcggcatagcggcagtacgccaccgcgggtttccactgccagttttctctgaccgccgtacttcggccccgttggatactgttattccagtaccaccgatcttttctggctttcccgctcaggtagcgctcatgcaggatcttggcatcgcccttgatgtcgccaaccagctgcatgtgccaatgccgctgggggccgcctcacgggaggtttatagccaggcgcgcgcagcgggtcgcggtcgccaggactggtccgccattctggaacaggtccgtgtcagtgccgggatgactgccaaatacaccatcaacgacattacgcgcgcatcgggcggttttgccatgctggcggtcgatcagcgcgaagccatgcgcatgatgtttgccgcggctggggcacccgctccggtagccgatagcgttttaactgatttcaaagttaacgctgcaaaggccctctcgccttatgcctcggcgattctggtagatcaacaattctgctaccgccaggtggttgagcaaaacgcgattgccaaaagttgcgccatgattgtcgccgccgatgagttcattcctggcaacggtattccggtcgatagcgtggttattgaccgcaaaatcaatccgctacagatcaaacaagacggtggcaaagccttaaaactgctggtgctgtggcgtagtgatgaagatgcgcagcaacgtctggatatggtgaaagagttcaacgaactgtgccactcacacggtctggtaagcatcattgagccagtcgtccgcccaccgcgtcgtggcgataaattcgatcgcgaacaagcgatcatcgatgccgccaaagagctgggcgacagtggcgctgacctctacaaagttgaaatgccgctttatggcaaaggtccgcaacaagagcttctctgtgcttcacaacgtctgaatgaccatatcaatatgccatgggtgatcctctcttccggtgtcgacgaaaaactgttcccgcgtgccgtacgcgtggcaatgacggcgggcgcatcgggattcctggcaggccgtgcagtctgggcatcggtcgtcggtttaccagacaacgagctgatgctgcgtgacgtttgcgcaccgaaattacaacaacttggcgatatcgtcgacgaaatgatggctaaacgccgctaa

SEQ ID NO: 26012 - DNA, 3109 bp, Homo sapiens
  SIMILAR (1462)..(2244): 961254mologous to Escherichia coli IS5 39.3kDa protein,accession number U70214,Smith-Waterman Score=1332.
atgcagtattggggaaaaatcattggcgtggccgtggccttactgatgggcggcggcttttggggcgtagtgttaggcctgttaattggccatatgtttgataaagcccgtagccgtaaaatggcgtggttcgccaaccagcgtgagcgtcaggcgctgttttttgccaccacttttgaagtgatggggcatttaaccaaatccaaaggtcgcgtcacggaggctgatattcatatcgccagccagttgatggaccgaatgaatcttcatggcgcttcccgtactgcggcgcaaaatgcgttccgggtgggaaaatcagacaattacccgctgcgcgaaaagatgcgccagtttcgcagtgtctgctttggtcgttttgacttaattcgtatgtttctggagatccagattcaggcggcgtttgctgatggttcactgcacccgaatgaacgggcggtgctgtatgtcattgcagaagaattagggatctcccgcgctcagtttgaccagtttttgcgcatgatgcagggcggtgcacagtttggcggcggttatcagcagcaaactggcggtgctgcgtggccgctctccatccttgttattgacaaattaatatatcgtcgcccttgctgtggaacactgcagccagatgtgattattacaccggttctgccggtggcctgcattagcacctggcgccatactgaggcagatcccaaagaaacagcaaagggttggcctccactactctccgatgtcctatgtgtcttggagataccgcgtctgccactggacgataacggtattctgtttatcgaaaacgttggcaacctcgtatgcccggccagcttcgatctcggtgaaaaacacaaagtggcggtgctttccgttaccgaaggtgaagacaaaccactgaaatatccgcatatgtttgccgccgcctcgctgatgctgctcaacaaagttgacctgttgccgtatctcaactttgacgttgaaaagtgcatcgcctgcgcccgcgaacggcgaagggatggaccagtggctgaactggctggagacacagcgatgtgcataggcgttcccggccagatccgcaccattgacggcaaccaggcgaaagtcgacgtctgcggcattcagcgcgatgtcgatttaacgttagtcggcagctgcgatgaaaacggtcagccgcgcgtgggccagtgggtactggtacacgttggctttgccatgagcgtaattaatgaagccgaagcacgcgacactctcgacgccttacaaaacatgtttgacgttgagccggatgtcggcgcgctgttcgccctggcgcagacccgcgagcaaggctacgccctggacagcgaagagaacgagcagggcgtgcgctgcgtggcggtgccggtgtggaaccacgagtcccgcgtcatcgacgacctgagcctgtcgacgctgacctcccgcgctggtaatggccggcgaccttatccgctggaaaccatgctacgcattcactgcatgcagcattggtacaacctgagcgatggcgcgatggaagatgctctgtacgaaatcgcctccatgcgtctgtttgcccggttatccctggatagcgccttgccggaccgcaccaccatcatgaatttccgccacctgctggagcagcatcaactggcccgccaattgttcaagaccatcaatcgctggctggccgaagcaggcgtcatgatgactcaaggcaccttggtcgatgccaccatcattgaggcacccagctcgaccaagaacaaagagcagcaacgcgatccggagatgcatcagaccaagaaaggcaatcagtggcactttggcatgaaggcccacattggtgtcgatgccaagagtggcctgacccacagcctggtcaccaccgcggccaacgagcatgacctcaatcagctgggtaatctgctgcatggagaggagcaatttgtctcagccgatgccggctaccaaggggcgccacagcgcgaggagctggccgaggtggatgtggactggctgatcgccgagcgccccggcaaggtaagaaccttgaaacagcatccacgcaagaacaaaacgggcatcaacatcgaatacatgaaagccagcatccgggcccaggtggagcacccatttcgcatcatcaagcgacagttcggcttcgtgaaagccagattcaaggggttgctgaaaaacgataaccaaatgggcgatgtttttcacgctgggcaacctgtttcgggcggaccaaatgatacaacgggttcttccccccatgtggagggcttcttgcgagaaccgaatggccattttgggaccaccctcttactgcctagtgaaggcattggttataggctttcaaaaaggcggcttttttgggctagacccccccaaggccagggaagcccgaaaaggggcctcgctgacttataggaggacattaaaggggtttgatcaacgggaaaatttggaggcagataggtacaacagaaagagacacccgatgtctgctacttgcggcggtagtttttccgtgtgtgattgcattatcgtgcgttatttcttcgcttccggtagtgcctatatcgttgctatgttaccggtatttgccatgctggcgaacgtctccggcgcaccgttaatgttaaccgcgctggcactgttgttctccaactcctatggcggcatggttactcactatggcggcgcggcaggtccggtcatctttggcgtgggttataacgatattaaatccttgtgcttcgatgaacgtacccgtattgacgttgcggatacgtacgcgagtaactggcgaagtcgctgcaatcaaaccattttcaatggcgaatgccccaacaccagacagcatattgccgcagttaggcgtggtatcgacacgttgctcatgaacgattacctgcgcaaacagataatcgacatcagcacgcggatcgctggaacggctaataatggcgactttactggtcagtggattaccgccgccaataccgtcaatttccagatcgttgccggaacccataattgccatcaatattttatcgcgctgcgtttgatcttcgggtaa

SEQ ID NO: 26013 - DNA, 2802 bp, Homo sapiens
  SIMILAR (1177)..(1935): 991254mologous to Escherichia coli IS5 39.3kDa protein,accession number U70214,Smith-Waterman Score=1306.
atgacgcagattttcacgggtacattagtggaagccgatcctttccacgccgtgacgctcgttgccaatcacgacacccaaccgttgcaagccctcgaagcgccggtcgaaccgtggtttaaaccgctggcgtatgccttaattttgttgcgggaaaatggcgttccttcggtattctatccggacctctacggtgcgcattacgaagatgtcggtggtgccgggcaaacctatccgatagatatgccaataatcgaacagcttgatgagttaattctcgcccgtcagcgtttcgcccacggtgtacagacgttatttttcgaccatccgaactgcattgcctttagccgcagtggcaccgacgaatttcccggctgcgtggtggtcatgtcgaacggggatgatggcgaaaaaaccattcatctgggagagaattacggcaataaaacctggcgtgattttctggggaaccggcaagagagagtagtgaccgacgaaaacggcgaagcaaccttcttttgcaacggcggcagcgtcagcgtgtgggttatcgaagaggccgccaacaatcgtcagtacgactacggagctggccataaaataccagttatcaattacactgacgtgcatttgcggattgaacgcagctgccgcttccgtgctgatccccgacagcaacacgagctgcaactctccagcaaactggcagttcatgatgtgctgaccaatatttataatcggcgctactttttcaacagcgtagagtcattattgtcgcgacctgttgttaaggacttctgtgtcatgctggttgatattaatcagttcaaacgcatcaatgcccaatggggacatcgtgtgggtgataaagtgctggtttcaattgtcgatattatccagcaaagcatccgccccgatgatattttagcgcgactggagggtgaggtgtttggcttgctatttaccgaactcaatagtgcccaggcaaaaatcattgcggaacgtatgcgtaaaaatgtcgaactcctgaccggctttagtaacagatatgatgttcctgaacaaatgaccatcagtattggcacggttttttcaacgggtgacacgcgtaatatctcgcttgtcatgacggaagcagataaagccttacgcgaagcgaaaagcgaggggggcaacaaacattggtacaacttgagcgatggcgcgatggaagatgctctgtacgaaatcgcctccatgcgtctgtttgcccggttatccctggatagcgctttgccggaccgcaccaccatcatgaatttccgccacctgctggagcagcatcaactggcccgccaattgttcaagaccatcaatcgctggctggccgaagcaggcgtcatgatgactcaaggcaccttggtcgatgccaccatcattgaggcacccagctcgaccaagaacaaagagcagcaacgcgatccggagatgcatcagaccaagaaaggcaatcagtggcactttggcatgaaggcccacattggtgtcgatgccaagagtggcctgacccacagcctggtcaccaccgcggccaacgagcatgacctcaatcagctgggtaatctgctgcatggagaggagcaatttgtctcagccgatgccggctaccaaggggcgccacagcgcgaggagctggccgaggtggatgtggactggctgatcgccgagcgccccggcaaggtaagaaccttgaaacagcatccacgcaagaacaaaacggccatcaacatcgaatacatgaaagccagcatccgggccagggtggagcacccatttcgcatcatcaagcgacagttcggcttcgtgaaagccagatacaaggggttgctgaaaaacgataaccaactggcgatgttattcacgctggccaacctgtttcgggcggaccaaatgatacacagtcaatattccgcgttgaggagacatcaagatggatcagtctcgtttaagccggagacacacacctgcgatgctcatcgccctgctctaaagccggcgaatgattatgtccgtaccttcttccgtggcgttgatattagtcaggtattcagtgcgaaagatattgcccgccggacaccgaatggcttaattcgtaaaacccctggcttcggcccacgttcggcactgaaattattgcaggatgaagatcgcgaatatggctacgttatcgaacgcggtaataagtttgtcggcgcagtctccatcgattcgcttaaaaccgcggctgtccctcctgttcagctactgacggggtggtgcgtaacggcaaaagcaccgccggacatcagcgctatctctgctctcactgccgtaaaacatggcaactgcagttcacttacaccgcttctcaacccgccgggcagtgacgtcatcgtctgcgcggaaatggacgaacagtggggatacgtcggggctaaatcgcgccagcgctggctgttttacgcgtatgacagtctccggaagacggttgttgcgcacgtattcggtgaacgcactatggcgacgctggggcgtcttatgagcctgctgtcaccctttgacgtggtgatatggatgacggatggctggccgctgtatgaatcccgcctgaagggaaagctgcacgtaatcagcaagcgatatacgcagcgaattgagcggcataacctgaatctgaggcagcacctggcacggctgggacggaagtcgctgtcgttctcaaaatcggtggagctgcatgacaaagtcatcgggcattatctgaacataaaacactatcaataa

SEQ ID NO: 26014 - DNA, 5471 bp, Homo sapiens
  SIMILAR (1864)..(926): 961254mologous to Escherichia coli K12 putative inner membrane component for iron transport,accession number AE000162,Smith-Waterman Score=1505.
ctgctgtgttctgttcacacccttctctgactgtcggtgggatctgtaatgcatgtgtttggcatagtaaagtgttaattaataatctgcggacaaagaagactatataggaatcttgagccatcaagcagggtacagcttttgatctgtgtatcatggaaggtgaaagtatcatttggtccgcccgaaacaggttggccagcgtgaataacatcgccagttggttatcgtttttcagcaaccccttgtatctggctttcacgaagccgaactgtcgcttgatgatgcgaaatgggtgctccaccctggcccggatgctggctttcatgtattcgatgttgatggccgttttgttcttgcgtggatgctgtttcaaggttcttaccttgccggggcgctcggcgatcagccagtccacatccacctcggccagctcctcgcgctgtggcgccccttggtagccggcatcggctgagacaaattgctcctctccatgcagcagattacccagctgattgaggtcatgctcgttggccgcggtggtgaccaggctgtgggtcaggccactcttggcatcgacaccaatgtgggccttcatgccaaagtgccactgattgcctttcttggtctgatgcatctccggatcgcgttgctgctctttgttcttggtcgagctgggtgcctcaatgatggtggcatcgaccaaggtgccttgagtcatcatgacgcctgcttcggccagccagcgattgatggtcttgaacaattggcgggccagttgatgctgctccagcaggtggcggaaattcatgatggtggtgcggtccggcaaggcgctatccagggataaccgggcaaacagacgcatggaggcgatttcgtacagagcatcttccatcgcgccatcgctcaggttgtaccaatgtttaatgtcggccacgtctgccagggtgatttgctgcttcatcggcgtcaggatcggcagctggcgcagtgcctgcggactatcgcgccagctttgcggataacgcagattaattggataacgggcaatcccttccaccgtttcgccaaccatcgccccgcccaccgcagaagtcacaaacaactgcacatccgccaccgtcataccgtaacgtgcggctttttcacggttaatctcaacgttgatatagcgcccaccttccagccgctcggcaagcgcagaagctacgcctggcaccgttcgcgctacttcttcaatttgctcagccatcgcgtcgatatccgccagcacagtgccggaaactttaatgccgatggggcttttaatgccggttgagagcatatcgatacggttacgaattggcggcacccacagattcgccagccccggcagccgcacggtgttatccagttcctcaatgattttgtccatcgtcatgcctggccgccactgctcctgcggcttaagctggatggtcgtttctaccatctccagcggagcagaatcggtggcggtttccgctttcccggttttgccaaatacccgcgccacttcaggtacgctcataattagcttgtcggttttttgcagcatactcgccgcctctgctgcggaaatccccggcagcgtcgatggcatatacaacaagtcgccttcattgatctgcggtaaaaattccccgccaactttattgagcggccagagaaccgtcagcaccgaaagcgccgccaccagcagcgtggttttcggccagtgcagtactttcagcaacagcggatgataaacacgaatcaaaaagcgattgagcgggtttactgctttccggcggaattttgccacggattccaagtagcccatcaggatcgggatcactacgattcgccagcagcgccgcaaccgccattcgcaatacgtttttggtgaaaccgccaaacgggcccaacagaacgcccttccgcaggcaccgtaggagatacaaattttcggttccggcgcggactgccacgcacgcagcgcaggggatcgcattgcacgggtgaccgcgccggtaaacagtaaaatatccgcatgacgcggtgaaggaacgactgtaatgccgaagcgttctgcatcaaacagcggcgaaagcgtggcgaaaatttcgatttcgcaaccgttgcagccgccgcagtccacgcggtaaacataggcagaacgtttgatttttttcagtaacgacgccttcatgctggcgatggattcatccaccgtcatggggaccggaatgccgttggcgtcacgggggcattccgggcaagtctcaaagctttcgcggtggttttccgcgcggctgtcgccgttgtgcttaagcagcgcaatggcgtagtcgatctctttctggacggcgaaaggacgattgcagacgcggcagttgcacagcgcgaagcgggactgttgcaggaagtcttctttcttccacaccgccagttcgtactcttgcgacagtttgatcgccgccgtcgggcagacttcttcgcagcgtccacagaagatgcagtgcccaagattaaactcccaggcaagctctcctgtggcgaggtcagtttcaaccgttaaggcgtttgacgggcaggcattgacgcaggccgcgcagccgatgcactgctgcgggttctgctctggcttaccacggaagtttttatcaaccgcaatcggctccagcggataagacgaggtcgccgtgccggttttgatgagctcaatgctgtaacgctcgagttctttgtacggcaccactttgctcttcttcttacgcacatcgaccacggtcatgcggtcggtacaggagtagcaagggtcgaggctaccgataatcagcggcgcatcggaaacggtgttgccgcgcagcatgtagcgcagggtcggccagttcgcgtaggtcgcggcacggcagcgccagcggacagcgttcatgccgaacaaagcgcgatcagccacgcctggttgagtggtgaaaaagcgcttgcagccatcaccgttaactacacgccttgtggtcactgccgtcagtttatgaatgaactgaacagcggtctggatctgcgtattcatctgccgggccgcgaggcacacgcgctgcgtgactatctgccagatgcctttgggccgaaagatctggagattaaaacgctgctgatggacgaacaggatcacggctatgcgctgacgggtgatgcgctttctcaggcagcgattgcggcggcaaaccgttcgcacatgccttacagtaagtcgccaagcggtgtcgcgccggatatccagcgcgcggttctggcagaaaaagccgatgcgccgttgattcagtgggatgccacctccgcaacgctgaaagctctcggctgtcacagtatcgaccgagtgcttctcgcttaagcctggtgccggatgcgtgcgtgaacgcctgtgtccaggcattgccgagccctctgcctggtgtcgaaattcccggcaaacagtttgccgtttcttgcgcaaaaccagctgggtaaagtagcgctgatggaaattttccttagatcgagtctcctgcatgttaaagcgcgtgttcctcagcctgttagtcctgatcggcttgctgctgttgactgtgctcggcctcgatcggtgcatcaggagctggtggtgtggcgcacactcggtgtcggggaaaaaactgctgcgtaccacgttgtggtgtgagttcgccatgcttgggtttgtttccggcctggtggcgcaattggtgcggaaacggcgctggcagtgttgcaggcgaaagtgtttgattttccgtgggagccagactggcgattgtggattgttctgccgtgcagcggacgctgctggctgtcgcttttcggcggctggctgggtgcgcgactggttaagggtaaggcgcggcgtggcctgttcggtgtgccccggcggagtgacgtccggccatccggtcaatcccctgctcggtgcaaaggtccttcccggtgaaaccgacatcgccctgcccggcccgctgccgttcatcctctcccgcacctacagcagttaccggacaaaaacgcccgcgccggtggggagcctcggccccggctggaaaatgcctgcggatatccgcttacagctgcgcgataacacactgatactcagtgataacggcggcagaagcctgtattttgagcacctgtttcccggtgaggacggttacagccgcagcgagtcactgtggctggtgcgcggcggcgtggcgaaactggatgaaggtcaccggctggccgcactctggcaggcgctgccggaagaactccgcttaagtccgcatcgttatctggcgacaaacagtccgcaggggccgtggtggctgctcggttggtgtgagcgggtgccggaagcggatgaggtgctgcctgcgccgctgccgccgtaccgggtactgaccgggctggtggaccgcttcgggcgcacacagacgttccaccgcgaagccgccggtgaattcagcggcgaaatcaccggcgtgacggatggtgcctggcgtcacttccggctggtactgaccacgcaggcgcgcgtgcagaagaagccggcagctggcattccggcgggccgcaccgtgtccgcgctcgatccgtttccacgccgttcgcaccaatcgtacaacaccgctacctcgctgaaaccggtgcggcagctgcttgatgcggcgttaaaaatcgatcatcgccgcacgctaccgaaatactccttcggcacgttccgtcgctggtatcgcagcgtggcggctcagcaagcacaatataaagaccaggtcgctttctttcacggctgcttcgttaactacaaccatccgcagttaggtcaagatttaattaaagtgctcaacgcaatgggtaccggtgtacaactgctcagcaaagaaaaatgctgcggcgtaccgctaatcgccaacggctttaccgataaagcacgcaaacaggcaattacgaatgtagagtcgatccgcgaagctgtgggagtaaaaggcattccggtgatagccacctcctcaacctgtacatttgccctgcgcgacgaatacccggaagtgctgaatgtcgacaacaaaggcttgcgcgatcatatcgaactggcaaaccgctggctgtggcgcaagctggacgaaggccaacacgttaccgctgaaaccgatgacgctgaaagtggtttatcacactccgtgccatatggaataaatgggctggacgctctacacctggagctgttgcgtaacatcccggggcttgagttaccgtcctggattcccagtctgcgtattccgcccattcgggtcgtcatccacatgttccgccagatagaagaaagcggcgcagatctggtggtcaccgactgcgaaacctgtaaatggcagattgagatgtccacaagtcttcgctgcgaacatccgattacgctactggcccaggcgctggcttaa

SEQ ID NO: 26015 - DNA, 3468 bp, Homo sapiens
  SIMILAR (625)..(1113): 991254mologous to Escherichia coli IS5 39.3kDa protein,accession number U70214,Smith-Waterman Score=853.
ggcgacgaggtggaagcggacaaaacgttacacattgcgcaaaacggaacggtggtcgccgagggtgattatggattccgcctcacgaccgcaccaggtaatggtttgtacgttaactatgggctgaaagcgctgaacatccatggtgggcaaaagctgacgttagccgaacatggcggagcctatggcgcaacggccgatatgtcggcaaaaatcggtggtgaaggggatctggcaatcaatacggtgcgacaggtttcgctttccaacggtcagaacgactatcagggggcaacctacgttcagatggggacattacgtaccgatgcggatggtgcacttggcaacacccgggaactgaacatcagcaacgcggccatcgtcgatcttaatggatcgacgcagacggtagagacattcaccgggcagatgggttcgactgttttgttcaaagagggggcgctgacggtaaataaaggtgggatcagtcagggtgaactgacaggtggcggaaacctgaatgttacagggggaacgctggctatcgaggggcttaatgcacgctacaatgcgttaaccagcattagcccaaatgcggaagtcagcctcgataatactcagggtgaattcagcagtaagcgccgtcagaccagaaaagagattttcttgtcccgcatggagcagattctgccatggcaaaacatggtggaagtcatcgagccgttttaccccaaggctggtaatggccggcgaccttatccgctggaaaccatgctacgcattcactgcatgcagcattggtacaacctgagcgatggcgcgatggaagatgctctgtacgaaatcgcctccatgcgtctgtttgcccggttatccctggatagcgccttgccggaccgcaccaccatcatgaatttccgccacctgctggagcagcatcaactggcccgccaattgttcaagaccatcaatcgctggctggccgaagcaggcgtcatgatgactcaaggcaccttggtcgatgccaccatcattgaggcacccagctcgaccaagaacaaagagcagcaacgcgatccggagatgcatcagaccaagaaaggccatcagtggccactttggcatgaaggcccacattggtggtcgatgccaagagtggcctgagccacagactggtcaccaccgcggccaacgagcatgacctcaatcagctgggtaatctgctgcatggagaggagcaatttgtctcagccgatgccggctaccaaggggcgtcacaccgccgaggagctggcccaaggtggatgtggactggctgatcgccgagcgcccccggcaaggtaagaaccttgaaacagcatccacgcaagaacaaaacggccatcaacatcgaatacatgaaagccagcatccgggccagggtggagcacccatttcgcatcatcaagcgacagttcggcttcgtgaaagccagatacaaggggttgctgaaaaacgataaccaactggcgatgttattcacgctggccaacctgtttcgggcggaccaaatgataccccctaatatgtcaaagccaaaatacccttttgaaaagcgccttgaagtcgtgaatcactacttcacaactgatgatggttacaggatcatctcggcacgttttggtgtcccccgaacccaggtcaggacatgggttgccctctatgaaaaacatggagaaaaaggtttaattcccaaacctaaaggcgttagtgctgatccagagttgcgtattaaggtcgtgaaagctgtgatcgagcagcacatgtcccttaatcaggctgctgctcactttatgcttgctggtagtggttctgtagccaggtggctgaaggtctatgaagagcgcggagaagctggtttacgcgcgctcaagattggcaccaaaagaaacattgcaatatcagttgatccagaaaaagcggcatcagcattggagctgtcaaaagaccgacgcattgaggatcttgaaaggcaagttcgatttcttgaaacgcggcttatgtatctaaaaaagctgaaagccttagctcatcccacgaaaaaggctgcggagataccgcgcagtacgttttattatcatctaaaggctctcagcaagcctgacaagtatgcggacgttaaaaagcgtattagtgagatttatcacgagaatagaggccgatacggataccgtagggtaacgctgtctcttcatcgagaagggaaacagattaaccataaagctgttcagcgcctgatgggaaccctctcacttaaagcagcgattaaggtcaagcgataccgctcttacagaggagaggtagggcaaaccgcccctaatgttctccaaagagatttcaaggctacgcggccaaacgagaagtgggttaccgatgttactgaatttgcagtcaatgggcgcaagctgtatttgtctccagtaatagatctcttcaacaacgaagttatttcttacagcctttcggatgattgtcgtggcgatcattttgattgcaacttttgactggaatcgactcaaaccgactatcaaccagaaagtctctgcggagttgaatcgtccgttcgctatccgtggcgatctgggcgtggtgtgggagcggcaaaaacaagaaactggctggcgcagctgggtgccgtggccccatgtacacgcggaagacatcattcttggcaatccaccggatattcccgaagtcacgatggtgcatttgccacgcgtagaggcaacgctggccccgctggcgctgctgaccaaaacggtctggctgccgtggatcaagctcgaaaagcccgacgcgcgcctgattcgcctctctgaaaagaacaataactggacgtttaatcttgccaacgatgatacaaagacgcgaatgcaaagccgtcggcatggtcgtttcggctggataatattcttttcgatcaagggcggatcgccattgatgacaaacgatatccacggttctctggtctacaccaccggaaagccacgaccaaaactggaaggtgatgtcgagtcgcggcaattgcggctggcggacctgggaccgttgattggcgttgattccgggaaaggggcagaaaagtcgaaacggtctgaacagaagaagggcgaaaaaagcgttcagcctgcgggcaaagtgctgccttatgaccgcttcgaaaccgataaatgggacgttatggatgccgatgttcgcttcaaagggcggcgcattgagcatggcagtagcctgccgattagcgatctttctactcatatcatcctcaaaaatgctgacctgcgcctgcaaccgctgaaatttggcatggcgggcggcagcattgcggcgaatattcatctggaaggcgataaaaagccgatgcaggggcgggcagatattcaggctcgtcgactgaaactgaaagaactgatgcccgatgtgaactga

SEQ ID NO: 26016 - DNA, 7021 bp, Homo sapiens
  SIMILAR (6461)..(7018): 1001254mologous to Escherichia coli glycerol-3-phosphate dehydrogenase (EC 1.1.99.5) (anaerobic) chain C,accession number D90855,Smith-Waterman Score=986.
atgccgatggaaatgctttgtacggtattcctcactcgttctttcccccgtttcccttggatcgccctcgccggcccgcaccccttcatgaatttccgccacctgctggagcagcatcaactgccccgccaattgttcaagaccatcaatcgctggctgcccgaagcaggcgtcatgatgactcaaggcaccttggtcgatgccaccatcattgaggcacccagctcgaccaagaacaaagagcagcaacgcgatccggagatgcatcagaccaagaaaggcaatcagtggcactttggcatgaaggcccacattggtgtcgatgccaagagtggcctgacccacagcctggtcaccaccgcggccaacgagcatgacctcaatcagctgggtaatctgctgcatggagaggacaatttgtctcagccgatgccggctaccaaggggcgccacagcgcgaggagctgccgaggtggatgtggactggctgatcgccgagcgccccggcaaggtaagaaccttgaaacagcatccacgcaagaacaaacggccatcaacatcgaatacatgaaagccagcatccgggccagggtggagcacccatttcgcatcatcaagcgacagttcggcttcgtgaaagccagatacaaggggttgctgaaaaacgataacccactggcgatgttattcacgctggccaacctgtttcgggcggaccaaatgatacgtcactgtgatggggtgatcgcgtttggcggcggctcggtgctggatgcggcgaaagccgtgacgttgctggtgacgaacccggatagcacgctggcagagatgtcagaaaccagcgttctgcaaccgcgcttgccgctgattgccattccaactaccgccggaaccggctctgaaaccaccaatgtaacggtgattatcgacgcggtgagcgggcgcaagcaggtgttagcccatgcctcgctgatgccggatgtggcgatcctcgacgccgcattgaccgaaggtgtgccgtcgcatgtcacggcgatgaccggcattgatgcgttaacccatgccattgaagcatacagcgccctgaacgctacaccgtttaccgacagtctggcgattggtgccattgcgatgattggcaaatcgctgccgaaagcggtgggctacggtcacgaccttgccgcgcgcgagagcatgttgctggcttcatgtatggcgggaatggcgttttccagtgcgggtcttgggttgtgccacgcgatggcgcatcagccgggcgcggcgctgcatattccgcacggtctcgcgaacgccatgttgctgccaacggtgatggaatttaaccggatgtcagattggtcggcactgcgaactaaaaatccagataatagccttgaccgggaaaacggaaagcatcaaattcctgacaccattcgcgtgcgcgactatcgcggcaaactgatagtaccgggctttgtcgatacacatatccattatccgcaaagtgaaatggtgggggcctatggtgagcaattgctggagtggttgaataaacacaccttccctactgaacgtcgttatgaggatttagagtacgcccgcgaaatgtcggcgttcttcatcaagcagcttttacgtaacggaaccaccacggcgctggtgtttggcactgttcatccgcaatctgttgatgcgctgtttgaagccgccagtcatatcaatatgcgtatgattgccggtaaggtgatgatggaccgcaacgcaccggattatctgctcgacactgccgaaagcagctatcaccaaagcaaagaactgatcgaacgctggcacaaaaatggtcgtctgctatatgcgattacgccacgcttcgccccgacctcatctcctgaacagatggcgatggcgcaacgcctgaaagaagaatatccggatacgtgggtacatacccatctctgtgaaaacaaagatgaaattgcctgggtgaaatcgctttatcctgaccatgatggttatctggatgtttaccatcagtacggcctgaccggtaaaaactgtgtctttgctcactgcgtccatctcgaagaaaaagagtgggatcgtctcagcgaaaccaaatccagcattgctttctgtccgacctccaacctttacctcggcagcggcttattcaacttgaaaaaagcatggcagaagaaagttaaagtgggcatgggaacggatatcggtgccggaaccactttcaacatgctgcaaacgctgaacgaagcctacaaagtattgcaattacaaggctatcgcctctcggcatatgaagcgttttacctggccacgctcggcggagcgaaatctctgggccttgacgatttgattggcaactttttacctggcaaagaggctgatttcgtggtgatggaattctggtgtcctgtcctctggtgttttcgtcggcattttcgtggagggcggcggatggcggtaaaaaccgtaacgttcaccccagcgttttcgataggccggagccttacgtccgcgcacccagagccgtatccagatcagcggctgaataaggtagagaagggcggtgtaaagcaattcgagcataaccagtcctgccgccagcaggtcggcgttaccattatcaaggtcgtcaaacagctggctgatattctgccgtccgcgttgcccagcgttttccggtcaaaatcatggtcgataaacctgacccggaaatgttccgcatcggcgcttcggcagtcgctaatcttgagccgcaataatgagcgcgctcaactccctgccattaccggtgtgctgttttacggtattcagtcgaacgcgttttacaccaaatttgtcgcgatcttgtttgtggttgccacggtgctggagatcggcagcctgtttttgatctacaaatggtcatacggcgaaccgttgatccgattgatcatcgccggaccgatcctgatgggctgcatgtttttgatgcgcacccatcgcttggggctggtctttttcgccgtcgccattgtcgctatttacgggcaaaccttccccgccatgctcgactatccggaagtggtcctgcgtgccgaattaagccatttactgggcgaaaaactcagtcgtattgagtgcgtcaatgaaaaagcggatacggcgttgtgggctttgtatgacagccagggaaacccaatgccgttaatggcaagaagctttagtacgcccggaaaagcccgacaactggcatggaaaaccaccatgctggcaagaagtgggactgtccgtatgccgactatttatggtgtgatgacgcatgaagaacaccccggccccgatgtcctgctactggagcggatgcgtggtgtttcggagtacgcgctggctgcatgcacctgtcactcccaccctatgggattcctctcatctgctccaacaggacagcccatatgcgcttgttacgccgagatacgcctgagaacgtgccggagcccaaccttctttgtcagcagacagacgggcagcgttaagaccggccagcaaaccttgcgcagcggcttcttcgtaaccgaaacgtggctggatgcgccatttatcgataaagaatttggcgttcaaccgcagcagttgcccgattactggggacttgcggggatcagcagttcaaaggtaccgggtgttgcgggaatcggaccaaaaagcgccacgcagctgctggtcgagtttcagagtctggaagggatatatgagaatctggatgcggttgccgaaaagtggcgcaaaaaattagaaacccataaagagatggcgtttctgtgccgcgatattgcccgcttacaaaccgatttgcatatcgacggcaatttacagcaattgcggttgcgttgcttcacgcgggttgccaccggtacaaacatcatccagtgccgcctgcgccagtgccggaatgtcttccttgcgtacaccaacatcacgcaaatgtggcggaataccgacatcacggttgagagcaaacaccgcttcaacagcggcattacgcgcctcttccaggctcataccttccactttcacgcccataacgcgcgcgatatcgcggtacttctcaccggtaaagtcagcgttataacgcatgacatgcgcaagagtaaatctgcgtatcttcataccatgactcataaaggagataccccgatgaccattactccggcaactcatgcaatttcgataaatcctgccacgggtgaaccactttctgtgctgccgtgggctggcgctgacgatatcgaaaacgcacttcagctggcggcagcaggctttcgcgactggcgcgagacaaatatagattatcgtgctgaaaaactgcgtgatatcgccagcatccgggccagggtggagcacccatttcgcatcatcaagcgacagttcggcttcgtgaaagccagatacaaaggggttgctgaaaaacgattaccaactggcgattgttattcaccctggccaacctgtttcggccggacccaaatgatacgcatagcgcacagacagataaaaattacagagtacacaacatccatgaaacgcattagcaccaccattaccaccaccatcaccattaccacaggtaacgaggtaacaaccatgcgagtgttgaagttcggcggtacatcagtggcaaatgcagaacgttttctgcgtgttgccgatattctggaaagcaatgccaggcaggggcaggtggccaccgtcctctctgcccccgccaaaatcaccaaccacctggtggcgatgattgaaaaaaccattagcggccaggatgctttacccaatatcagcgatgccgaacgtatttttgccgaacttttgacgggactcgccgccgcccagccggggttcccgctggcgcaattgaaaactttcgtcgatcaggaatttgcccaaataaaacatgtcctgcatggcattagtttgttggggcagtgcccggatagcatcaacgctgcgctgatttgccgtggcgagaaaatgtcgatcgccattatggccggcgtattagatgcgcgcggtcacaacgttactgttatcgatccggtcgaaaaactgctggcagtggggcattacctcgaatctaccgtcgatattgctgagtccacccgccgtattgcggcaagccgcattccggctgatcacatggtgctgatggcaggtttcaccgccggtaatgaaaaaggcgaactggtggtgcttggacgcaacggttccgactactctgctgcggtgctggctgcctgtttacgcgccgattgttgcgagatttggacggacgttgacggggtctatacctgcgacccgcgtcaggtgcccgatgcgaggttgttgaagtcgatgtcctaccaggaagcgatggagctttcctacttcggcgctaaagttcttcagccccggaccattacccccatcgcccagttccagatccctttgcctgattaaaaataccggaaatcctcaagcaccaggtacgctcattggtgccagccgtgatgaagacgaattaccggtcaagggcatttccaatctgaataacatggcaatgttcagcgtttctggtccggggatgaaagggatgcgatgcacgcgcccgtatttccgtggtgctgattacgcaatcatcttccgaatacagcatcagtttctgcgttccacaaagcgactgtgtgcgagctgaacgggcaatgcaggaagagttctacctggtaactgaaagaaggcttactggagccgctggcagtgacggaacggctggccattattcggtggaggaggccaacaatgaatgacaccagcttcgaaaactgcattaagtgcaccgtctgcaccaccgcctgcccggtgagccgggtgaatcccggttatccagggccaaaacaagccgggccggatggcgagcgtctgcgtttgaaagatggcgcactgtatgacgaggcgctgaaatattgcatcaactgcaaacgttgtgaagtcgcctgcccgtccgatgtgaagattggcgatattatccagcgcgcgcgggcgaaatatgacaccacgcgcccgtcgctgcgtaattttgtgttgagtcataccgacctgatgggtagcgtttccacgccgttcgcaccaatcgtcaacaccgctacctcgctgaaaccggtgcggcagctgcttgatgcggcgttaaaaatcgatcatcgccgcacgctaccgaaatactccttcggcacgttccgtcgctggtatcgcagcgtggcggctcagcaagcacaatataaagaccaggtcgctttctttcacggctgcttcgttaactacaaccatccgcagttaggtaaagatttaattaaagtgctcaacgcaatgggtaccggtgtacaactgctcagcaaagaaaaatgctgcggcgtaccgctaatcgccaacggcgtttaccgataaagcacgcaaacaggcaattacgaatgtagagtcgatccgcgaagctgtgggagtaaaaggcattccggtgattgccacctcctcaacctgtacatttgccctgcgcgacgaatacccggaagtgctgaatgtcgacaacaaaggcttgcgcgatcatatcgaactggcaacccgctggctgtggcgcaagctggacgaaggcaaaacgttaccgctgaaaccgctgccgctgaaagtggtttatcacactccgtgccatatggaaaaaatgggctggacgctctacaccctggagctgttgcgtaacatcccggggcttgagttaacggtgctggattcccagtgctgcggtattgcgggtacttacggtttcaaaaaagagaactaccccacctcacaagccatcggcgcaccactgttccgccagatagaagaaagcggcgcagatctggtggtcaccgactgcgaaacctgtaaatggcagattgagatgtccacaagtcttcgctgcgaacatccgattacgctactggcccaggcgctggcttaa

SEQ ID NO: 26017 - DNA, 2247 bp, Homo sapiens
  SIMILAR (331)..(951): 991254mologous to Escherichia coli putative,accession number L31628,Smith-Waterman Score=1121.
atgttaatcctcgctacgctgttgctgttttgcgcagtgctactgatcgtgctggtgggaacgctttatccgatgatttacggcctgctgggctggggacgcctctccgttggcgcgccgtattttaaccgcgcgacgttaccgtttggtctgttgatgctggtggtgattgtgctggcgacgtttgtctctggcaaacgcgtgcagcttccggcgctgcgtcactgcgatcaatgcgggtatccactgcgccatctccgggaaccagaactggacataaacgccaatggcggtgatttcagagatccccaccgccatccacataaaccacttattgttcgcgatgcgcaccgtatcgaagatatctggcagtttttctataaaggtgcttactggcgtcgcggtccggttacgatgtcggccatttcagcggttgatatggcgctgtgggatattaaagccaaagctgccaacatgccgctttaccagttactcggcggcgcgtctcgtgaaggggtgatggtttattgccataccaccggtcacagtattgatgaagctctggatgattatgcccgtcatcaagagcttggattcaaagccatccgcgtgcagtgcggaatccctggtatgaaaaccacctacggcatgtcgaaaggtaaaggtctggcttatgaacccgcaaccaaaggacagtggccggaagagcagctgtggtcgacggagaaatacctcgatttcatgccgaaattgtttgacgcggtacgtaacaagtttggttttaatgaacatttgctgcatgacatgcaccatcgcttaacgcctattgaagcggcgcgctttggtaaaagcattgaagattatcgcatgttctggatggaagacccgacgcctgcggaaaaccaggaatgcttccgtctcattcgccaacataccgtcacacccatcgcagcgatcacctctctgcgccattttatggcgggcaaatccgaggctgatattgccgccgagtttacgcgtctggagcacatcgaggccacggaaaccgaaggtattaccgcgcttccgggggcaatcgccttactcagtcatttgaataaagcaggtattccgtgggccattgtgacttctggctccatgccggtagcgcgagcgcgccataaaatagctgggcttcccgcaccagaggtgtttgtaaccgctgagcgagtgaagcgcggaaaaccagaacctgatgcgtatctgttaggcgcgcagctgctggggcttgcgccgcaggaagtgcgtatggatgcggtcgctttgtttgttattgtcgcgtttgcattaagcggaacgctgacagtcccagaagtattttccggcttttctgatcctaacgttgtcctgattgccgccttgtttattattggcgatggtttggtccgtaccggtgttgccaccgtaatgggaacatggctggtcaaagttgcgggcaatagtgaaatcaaaatgttggttttgttgatgctgaccgtcgcggggcttggcgcgtttatgagttcaaccggcgttgtcgctatctttattcccgtggtgttaagcgttgccatgcgtatgcaaacgtcgccgtcacgtctgatgatgccgttaagttttgccgggctgattagcggcatgatgacgctggtggcgacgccgccgaacctggtgagactacaaacggatgtgattgacgtggagttcaaaacgagttgccgcgccctgatattgcaccgcctggatcgtgccattggcctgcagttcaccaggggtgttgaggcggatatgttccggtcgcagggcgaagcttcccgtcatgccacaaagtttctctgccatcagtccatcaaaaacattcgatgtaccaacgaacccggcaacaaacggccgtcggcaaaggagccatggattctagcaactaacttacctgttgaaattcgaacacccaaacaacttgttaatatctattcgaagcgaatgcagattgaagaaaccttccgagacttgaaaagtcctgcctacggactaggcctacgccatagccgaacgagcagctcagagcgttttgatatcatgctgctaatcgccctgatgcttcaactaacatgttggcttgcgggcgttcatgctcagaaacaaggcgcgtttttcgccgaaggccagccagtagtttttatcattacgcgccatcagaatcgggaaggccgcgttggagatattctctaa

SEQ ID NO: 26018 - DNA, 2374 bp, Homo sapiens
  SIMILAR (1497)..(2138): 1001254mologous to Escherichia coli moaA,accession number X70420,Smith-Waterman Score=1111.
atgggctccccgaaaagaaagtacacagaggtgcacaaggagaacctggctgctggccgtgtatggacagatgctgggtcaaataggcatttcctgttcctgggcatggtgacagctatacagacccactgcccacaaagggttttggtcacagcgcaaggaagctggggttggcctgaaattgcatctgatactgacaagcagaaaaccaggaggagctgcgagatggaagagagcagcgagaaagaggccggagcgagtgagactctgacagtttcccacagtccaccaacgacgatatgtccgggttcttctgttctccccttctcctacccctatcctaaaaacgactttcctattttccacaatttgtctacacacaaaatggcagggaagcccagacttggaagcacatgtaagacgccgattttcgccatccacggcatagtcgccacgccaaccagtagcaggccgattatctcaacgctaaagcaaatcatcgctacgtttaagccaccgatacggttaatgccgttaggacataacaaacgcgtaccgacaaacgcacagctaaacagcgtcagcgcgaaagccgcactcgtcccaacctttagcgtcataaaacagcgtgataaaggtggcgatgacgccaaatccggcggaagccagtgccagcgccataccgtacagccagacgcgcccaagcaccgtgcgaaacggcagcggtttgcctttactggcttttaccgtcggacgcgggatcgccaacaaaatggccaccagcgccacgcccataatgattaacgctaacgcctgcaagccgacccagtggataaacacgacgcctaacggcgcaaccatcgccatcgacccgtcagtgacatgccgtccacgaatcaccgcccgaatgccggagcaaccagcaacgcccaactcggacctgccgcactatcatcgacattatggagatgtatcatgcgttgcatgtttcctggtctaatttgcaggaccagcaatccatcgatgaacgtcgtgtcaccttcctcggctttgacgccgccactgaagcacgttacctcggttatgtccgctttatggttaatgtggaagggcgctatacccattttgacgccggaactcacggttttaacgcccagacgccaatgtgggaaaaatatcagcgcatgcttaatgtgtggcatgcctgcccgcgttttctgtttgatcttgatggaacgctggtggattccctgcctgcggtagaacgggcgtggagcaactgggccagacgtcatgggttagcgccggaagaggtgctggctttcattcacggtaaacaggcgatcacctctctgcgccattttatggcgggcaaatccgaggctgatattgccgccgagtttacgcgtctggagcacatcgaggccacggaaaccgaaggtattaccgcgcttccgggggcaatcgccttactcagtcatttgaataaagcagcgagcggcgtcaccaataaaggctttcttaccgtcgatgaaattcgccgggttacgcgcgccttcgccagactgggcaccgaaaaagtgcgcctgacaggaggagagccgtctttacgccgcgactttaccgatatcatcgccgctgtgcgggaaaacgacgctatccgccagattgcggtcacaaccaatggttaccgtctggaacgcgatgtggcgagctggcgcgatgcgggacttactggcattaacgtcagtgtcgacagtctggacgcccgccagtttcacgctattaccgggcaggataaattcaaccaggtcatggcagggattgatgctgcatttgaggccggttttgagaaggtcaaagtcaataccgtgctgatgcgtgatgttaatcatcaccagctcgacacctttctgaactggatccagcatcgccctatccagctgcgtttcatcgaactgatggaaacgggcgagggcagcgagctcttccgtaagcatcacatctctggtcaggttctgcgtgacgagctactgcgtcgcggctggatccaccaattacgtcaacgcagcgacggtcccgcgcaagtcttttgccatccagattacgccggagagattggccttatcatgccgtattgataaagacttcttgcgccacttgcaaccgcctgcgcgtttcctccattggtaaactccatctctgcctgtttggtgaaggcggcgttaacctgcgcgatctgctggaagacgatacccagcaacaggcgctggaagcgcgtatttcagcggcgctgcgggagaagaaacagacccatttcctgcatcaaaacaacaccggtattacgcaaaacttatcgtacattggcggctaa

SEQ ID NO: 26019 - DNA, 399 bp, Homo sapiens; identical to SEQ ID NO: 55
  SIMILAR (351)..(103): 431254mologous to Mycobacterium avium Gsa protein,accession number AJ251811,Smith-Waterman Score=118.

SEQ ID NO: 26020 - DNA, 622 bp, Homo sapiens
  SIMILAR (432)..(307): 391254mologous to Homo sapiens bA632L2.2 (glypican 6),accession number AL354811,Smith-Waterman Score=67.
  misc_feature (1)...(622): n = a,t,c or g
tgcttgccccgtgccctcatctagccagggaatcagacacataaccagatgatgtgagtgcaatgggtgttttgacaggcactggcagaggggagccgggtgcctgggagcactcacagaggagctcgtctagctcctggcgactcctcccttccctctttagcaggggagctctttttggccttctgctaaagggccaagcctgaccatggagtgatggagcaggtcccctcccgtccctgcctcaccctgatgggaggggctgatctgtgaacagtcctcaagtgctgctttagtaaggctcaggggagcgagagcaagtgattctcctttaccccagctctgtggggtctccccacaccgacccacatgggggtcagctctgtggggaggagaacagtgtacatctgaaatgggagaaactattgatccaccgggaccccatacattttccaaaaatttttgttttgaattacaataatactaccggggaattacttttgggcaaaaacaaaattaagggggaaagggctttacggcatccccacccttttggggaaaaaggggaggggcgggccctggccttttgttcccccgggcgcccncctgtttgtttgtctcg

SEQ ID NO: 26021 - DNA, 453 bp, Homo sapiens
  SIMILAR (67)..(195): 321254mologous to Thiocapsa roseopersicina HupI,accession number L22980,Smith-Waterman Score=66.
atgactataaaagctgtttggccgccaagaagggaaaactctccattgttcacatcaaatgtggtcatcaaggataacgaacaggaaggaccttccaggggaaaatgcagggacctgtggacaatgtggaagcaagctgagggagccggctctggccttggccagcccagaaaggggctcagcagcggcgggctgaagttctcctcaagtgccgccaaagtgggagcccaggcagaggaggcgccgagagcgagccaaggctgtgaggactgccagcacgctgtcacctctcaagagtatgagagaaaaggacttccaagaacccatttccacagctgctctaagtcctatgccaggtgcacgtacatctctgtggcaaaagctatcggctgcatctacacatcccctgcatctttccagcttcttctcatggagtctagtttgttctcatag

SEQ ID NO: 26022 - DNA, 949 bp, Homo sapiens
  SIMILAR (364)..(278): 431254mologous to Cervus nippon amelogenin,accession number AB028028,Smith-Waterman Score=65.
  misc_feature (1)...(949): n = a,t,c or g
atgacagcagtagcggttaacatgctgaataatcagttaggggttgtgttcagccgcagacttgtagttgttgaagccaacgttggaactgatctagaggggctgcctcctctggatccagccctttggtcaatgtgcaacatgatgttcttcaaagagattaatgcttttctatttccaataatggcaggcccgtttttcagaccaatcctttcactgaaaataaatgaagtcccatcgaccagccaagggctgaggagtgccggcggacgacacctggactggcaggcagctccacctgcagccccggtgcgggatccactgggtgaagccagctgggctcctgaatctggtggggacgtggagagtctttatatctagctcagggattgtaaatacaccaatcggcactctgtatctagctcaaggtttgtaaatacaccaatcagcaccctgtgtttagctcaangtttgtgagtgcaccaatcgacactctgtatctagctgctctggtgaggacgtggagagtctttatgtctagctcagggattgtaaatacaccaatcggcactctgtatctagctcaaggtttgtaaatacaccaatcagcaccctgtgtctagctcagggtttgtgaatgcaccaatcgacactctgtatctagctactctggtggggccttggagaacctttgtgtggatactctgtatctaactaatctgatggggaggtggtgaacctttgtgtctagctcagggattgtaaacacaccaatcagcaccctgtcaaaacaggccactgggctctaccaattagcaggatgtgggtggggccagataagaaaataaaagcaggctgcccgagccagcagtggcaacccgctcgggtccccttccacactgtggaagctttgttctttcgctctttgcaataaatcttgctactgctc

SEQ ID NO: 26023 - DNA, 1285 bp, Homo sapiens
  SIMILAR (619)..(1032): 381254mologous to Mus musculus proline-rich salivary protein,accession number M19419,Smith-Waterman Score=147.
atgtttctgcaggctgcacaaaaagcatggaacccgcatctgcttctggtgaggactcaggctgcttccactcatggcagaagagctgacccccatgtgggtcggtgtggggagaccccacagagctggggtaaaggagaatcacttgctctcgctcccctgagccttactaaagcagcacttgaggactgttcacagatcagcccctcccatcaggggacattgttgtgtctcctcatcctggacctgaggacaggaaagctttccctggagcacactgaagagcccagtgatgtcccctcccatctcctctatcggtggagcatcagctctgcgatcactgaagtctttcaggctctcgcttcctctgattccacctcgcagccagtaaatgtccacaccaaggaggatatgaaagtacaagacatagccctggtccttccatcgaggaagtcaaggaatgcatgcaggacgacaactagtacttgcaaggcacttcttatgcgccagctggcagccagagttattctgcaaaactgtgtttccaagtcctcaagaggaatacatgtcccccagaaaaacctaaccctgccagtgagaggtgacagcgtgcttgctggcagtcctcacagccctcgctcgctctcggcgcctcctctgcctgggctcccactttggcggcacttgaagagcccttcagcccaccgctgcactgtaggaggcccctttctgggctggccaaggccggagcccgctccctcagcttgcagggaggctttagctgccttcccgcggggcagggctcgggacctgcagcccgccatgcctgagcctcccccacctccgtgggctcctgtgcagccggagtctccccgacaagcgccaccccctgctccgcggagcccagtcccatcgaccacccaagggctgaggagtacgggcacaaagcaccgggactggcaggcagctccacctgcagccccggtgcgggatccactgggtgaagccagctgggctcctgagtctggtggggacgtggagaacctttatgtgtagctcagggattgtaaatacaccaatgggcactctgtatctagctcaagttaagtttcctgctgaatatttcgaaactctttgcaaactgacttcagcacctctgtgggatattcccttccactgccaacccttagttgtcagaaactctgtctttgggaagcatgctacattttctagaacaaatctagatactttagaaatgatggatgatgatgatgatgatgaatga

SEQ ID NO: 26024 - DNA, 573 bp, Homo sapiens
  SIMILAR (24)..(359): 901254mologous to Homo sapiens tumor protein (AA 1 - 172),accession number X16064,Smith-Waterman Score=509.
tgagatgtctcgactctacagatcgcgagatcgcgacgagtgtgcctgcagatgaggtgaagatggtcagtaggacagaagctaacattgatgactcgctcattggtggaaatgcctccgctgaagcgcccgagggcgaaggtaccgaaagcacagtaatcactggtgtcgatattgtcatgaaccatcacctgcaggaaacaagtttcacaaaagaagcctacaagaagtacatcaaagattacatgaaatcaatcaaagggaaacttgaagaacagagaccagacagagtaaaaccttttatgacaggggctgcagaacaaatcaagcacatccttgctaatttcaaaaactaccagtaacaaatgtggcaattattttggatctatcacctgtcatcataactggcttctgcttgtcatccacacaacaccaggacttaagacaaatgggactgatgtcatcttgagctcttcatttattttgactgtgatttatttggagtggaggcattgtttttaagaaaaacatgtcatgtaggttgtctaaaaataaaatgcatttaaactcaaa

SEQ ID NO: 26025 - DNA, 574 bp, Homo sapiens
  SIMILAR (65)..(355): 981254mologous to Homo sapiens tumor protein (AA 1 - 172),accession number X16064,Smith-Waterman Score=493.
  misc_feature (1)...(574): n = a,t,c or g
gctcgctcgagntttcaggctcgtgtaaagctagcgccgtcgtcgtctcccttcagtcgccatcatgattatctacggggacctcatcagccacgatgagatgttctccgacatctacaagatccgggagatcgcggacgggttgtgcctggaggtggaggggaagatggtcagtaggacagaaggtaacattgatgactcgctcattggtggaaatgcctccgctgaaggccccgagggcgaaggtaccgaaagcacagtaatcactggtgtcgatattgtcatgaaccatcacctgcaggaaacaagtttcacaaaagaagcctacaagaagtacatcaaagattacatgaaatgttaacaaatgtggcaattattttggatctatcacctgtcatcataactggcttctgcttgtcatccacacaacaccaggacttaagacaaatgggactgatgtcatcttgagctcttcatttattttgactgtgatttatttggagtggaggcattgtttttaagaaaaacatgtcatgtaggttgtctaaaaataaaatgcatttaaactcaaaaa

SEQ ID NO: 26026 - DNA, 687 bp, Homo sapiens
  SIMILAR (18)..(53): 831254mologous to Homo sapiens tumor protein (AA 1 - 172),accession number X16064,Smith-Waterman Score=52.
cgagcaggaagtcgatcatgattatctaccgggacctcatcagccatggtcagtaggacagaaggtaacattgatgactcgctcattggtggaaatgcctccgctgaaggccccgagggcgaaggtaccgaaagcacagtaatcactggtgtcgatattgtcatgaaccatcacctgcaggaaacaagtttcacaaaagaagcctacaagaagtacatcaaagattacatgaaatcaatcaaagggaaacttgaagaacagagaccagaaagagtaaaaccttttatgacaggggctgcagaacaaatcaagcacatccttgctaatttcaaaaactaccagttctttattggtgaaaacatgaatccagatggcatggttgctctattggactaccgtgaggatggtgtgaccccatatatgattttctttaaggatggtttagaaatggaaaaatgttaacaaatgtggcaattattttggatctatcacctgtcatcataactggcttctgcttgtcatccacacaacaccaggacttaagacaaatgggactgatgtcatcttgagctcttcatttattttgactgtgatttatttggagtggaggcattggttttaaagaaaacatgtcatgtaggttgtctaaaaataaaatgcatttaaactcaaaaaaaaaaaaaaaaa

SEQ ID NO: 26027 - DNA, 675 bp, Homo sapiens
  SIMILAR (102)..(485): 981254mologous to Homo sapiens tumor protein (AA 1 - 172),accession number X16064,Smith-Waterman Score=644.
  misc_feature (1)...(675): n = a,t,c or g
cgtccgcccacgcgtccggccgctccggctgcaccgcgctcgctccgagtttcaggctcgtgctaagctagcgccgtcgtcgtctcccttcagtcgccatcatgattatctaccgggacctcatcagccacgatgagatgttctccgacatctacaagatccgggagatcgcggacgggttgtgcctggaggtggaggggaagatggtcagtaggacagaaggtaacattgatgactcgctcattggtggaaatgcctccgctgaaggccccgagggcgaaggtaccgaaagcacagtaatcactggtgtcgatattgtcatgaaccatcacctgcaggaaacaagtttcacaaaagaagcctacaagaagtacatcaaagattacatgaaatcaatcaaagggaaacttgaagaacagagaccaganagagtaanaccttttatgacaggggctgcagaacaaatcaagcacatccttgctaattcanaaactaccagttcttattggtgaaacatgaatcagatgcatggntgtctatggactaccggaggatgtggacccataatgatttcttanggatgttanaaaggaanatgtaacaanggtgcattatttggactatactgcatatactggtttgctgtctccccacaccgggcttagacaatggatg

SEQ ID NO: 26028 - DNA, 1190 bp, Homo sapiens
  SIMILAR (142)..(672): 431254mologous to Oryctolagus cuniculus translationally controlled tumor protein,accession number AJ225898,Smith-Waterman Score=236.
ggtaccgcccgctcccccctccccccgagcgccgctccggctgcaccgcgctcgctccgagtttcagggctcgtgctaagctagcgccgtcgtcgtctcccttcagtcgccatcatgattatcctaccgggaccctcatcaagccacgatgagatgtttctccgacatctcaaagatccggggagatcgcggacggggtttgtgcctggaaggtggagggggaagatggtcaagtaggacagaaaggtaccattgattgactcgctcattggtggaaaatgcctccgctgaaaggccccgaggggcgaaaggtaccgaaaggcaccagttaatcactggtgttcgatattgtcatgaccccttcacctgccaggaaaccaagttttcacaaaaggaggcctccaagaaggtacatcaaaagattacatgaaatcaatcaaaagggaaacttgaaagaacaggagaccagaaaagagtaaaacctttttatgaccaggggctgcagaacaaatcaagcacatccttgctaatttcaaaaacttaccagttctttatttggtgaaaacatgaatcccagatggcatggttgctctattggactacccgtgagactgggtggtgaccccatatatgattttcttttaaggatgggtttagaaatgggaaaaatgttaaccaatgttggcaattattttggatctatcacctgtcatcataaactggcttcttgcttgtccacccacccaaccccgggacttaagaccaaatggggactgatgtcatcttgaggctcttcatttattttgactgtgatttatttggaggtggaagcattggtttttaagaaaaacatgtcatgttaggttgtctaaaaataaaatgcatttaaactcatttgagagaatgccttttagtttaatgcatatttaaactaaattgatcctgtagtgttcctggagaagctagagcctgattgtaggctactactcatcaattaacttctacagtggagactacttctgggactggaatataaaaaagaatcaaaggttctgattttgagttgcaataaagggaaagaccatgctcatagcagtgccaacatctgaagtgtggagccttacccatttcatcacctacaacggaagtagttaaatggaaccgattaccaagagaataaaaagagactc

SEQ ID NO: 26029 - DNA, 1640 bp, Homo sapiens
  SIMILAR (634)..(1524): 851254mologous to Homo sapiens protocadherin gamma B2 short form protein,accession number AF152518,Smith-Waterman Score=1248.
atggtggtgccggtgtacaaatactctggcaagaacgcctgtttgtcttaccgtttgctcaaggccagcgagccgggacttttcgcggtggggaagcacacgggtatggtgcgcacggcgcgagccatgttggacatagacgcgctcaagcaaagcttagtagtgaccgtccaggaccacgtccagccccctctctccgccactgtcacgctcacggtggcagtggccgacagcatcccccaagtcctggcggacctcggcagcttcgagtctccagctaactctgaaacctcagacctcactctgtacctggtggtagcggtggccgcggtctcctgcgtcttcctggcattcgtcatcgtgctgctggcgcacaggctgcggcgctggcacaagtcacgcctgctgcaggcttcaggaggcggcttgacaggtgtgtccggctcgcactttgtgggcgtggacggggttcgggctttcctgcagacctattcccacgaggtctctctcaccgccgactcgcggaagagtcacgtgatctttccccagcccaactacgcagacatgctcatcagtcaggagggctgtgagaaaaatgattctttgttaacatccgtagattttcatgaatataagaatgaagctgatcatggtcagattgcaagtagtaccactctgagtatgaaagcaaaagatcctgcagatctaccagcccactgcagtatccaagttgaaattcttgatgacaacgattgtgcacttgaagttattgtgattcaagtatctactcccaaaccggaggattcgccaccaggaacagtgatcgccttgataaaaacgagagacagagactctggagaaaatggagaagtttactgccaagtgttgggaaatgccaagtttattttgaaatcttcctcaaagaactattacaaactagtgacagacggcgctctgtaccgggaggagatcccagaatacaatctcaccatcacagccaccgacgggggcaagccgcccctctcctccagcataattgtcaccctgcacatctccgacgtcaacgataatgccccagttttccaacagacttcctacatggttcacgcgtcttacttagtcagtgtacccgaaaacaaccctcctggggcctccatcgcgcaagtctgcgcctcggacatggacttggggttgaacggccaagtctcctactctatcatggccagcgacctagagcctctggcactggcctcttacgtgtccatgagcgcgcaaagtggggtggtgttcgcgcagcgcgcctttgactacgagcagctgcgcaccttcgaactcacactacaggcccgcgaccagggctcgcctgcgctcagcgcaaacgtgagcctgcgcgtgttggtgggcgaccgaaacgacaacgcaccgcgggtgctgtaccccgcgctgggtcccgacggctctgcgctcttcgatatggtgccgcgcgctgcagagcccggctaccgggtcgtagcgagtgtgtcacaggctgaactgcagttttacctggtggtggccttggccttaatctcagtgctcttcctcctcgccgtgattctggccattgccttgcgcctgcgacgctctctacagccctgcgg

SEQ ID NO: 26030 - DNA, 1527 bp, Homo sapiens
  SIMILAR (634)..(1524): 851254mologous to Homo sapiens protocadherin gamma B2 short form protein,accession number AF152518,Smith-Waterman Score=1248.
atggtggtgccggtgtacaaatactctggcaagaacgcctgtttgtcttaccgtttgctcaaggccagcgagccgggacttttcgcggtggggaagcacacgggtatggtgcgcacggcgcgagccatgttggacatagacgcgctcaagcaaagcttagtagtgaccgtccaggaccacgtccagccccctctctccgccactgtcacgctcacggtggcagtggccgacagcatcccccaagtcctggcggacctcggcagcttcgagtctccagctaactctgaaacctcagacctcactctgtacctggtggtagcggtggccgcggtctcctgcgtcttcctggcattcgtcatcgtgctgctggcgcacaggctgcggcgctggcacaagtcacgcctgctgcaggcttcaggaggcggcttgacaggtgtgtccggctcgcactttgtgggcgtggacggggttcgggctttcctgcagacctattcccacgaggtctctctcaccgccgactcgcggaagagtcacgtgatctttccccagcccaactacgcagacatgctcatcagtcaggagggctgtgagaaaaatgattctttgttaacatccgtagattttcatgaatataagaatgaagctgatcatggtcagattgcaagtagtaccactctgagtatgaaagcaaaagatcctgcagatctaccagcccactgcagtatccaagttgaaattcttgatgacaacgattgtgcacttgaagttattgtgattcaagtatctactcccaaaccggaggattcgccaccaggaacagtgatcgccttgataaaaacgagagacagagactctggagaaaatggagaagtttactgccaagtgttgggaaatgccaagtttattttgaaatcttcctcaaagaactattacaaactagtgacagacggcgctctgtaccgggaggagatcccagaatacaatctcaccatcacagccaccgacgggggcaagccgcccctctcctccagcataattgtcaccctgcacatctccgacgtcaacgataatgccccagttttccaacagacttcctacatggttcacgcgtcttacttagtcagtgtacccgaaaacaaccctcctggggcctccatcgcgcaagtctgcgcctcggacatggacttggggttgaacggccaagtctcctactctatcatggccagcgacctagagcctctggcactggcctcttacgtgtccatgagcgcgcaaagtggggtggtgttcgcgcagcgcgcctttgactacgagcagctgcgcaccttcgaactcacactacaggcccgcgaccagggctcgcctgcgctcagcgcaaacgtgagcctgcgcgtgttggtgggcgaccgaaacgacaacgcaccgcgggtgctgtaccccgcgctgggtcccgacggctctgcgctcttcgatatggtgccgcgcgctgcagagcccggctaccgggtcgtagcgagtgtgtcacag

SEQ ID NO: 26031 - DNA, 2560 bp, Homo sapiens
  SIMILAR (1058)..(2560): 1001254mologous to Homo sapiens protocadherin gamma B2 short form protein,accession number AF152518,Smith-Waterman Score=2545.
tttcgtgaaggccagtatagattcggaaacagaaaacaaaagcaggaaaagtgaccttagcccggattctgccatccccggaaggcttattcctcctatgggcaaaggagcaaagggagccagaagatgaaagcgagctcagggaggtgcgggctggtgcggtggctgcaggtactgttgcccttcctgttgtctttgttccccggggctctcccagtccagatccgctattcaattccagaggagctggccaaaaactcggtcgtaggaaacctcgccaaggatctggggctcagcgtccgggacttgccagcccggaagctgcgggttagcgcggagaaggaatatttcacagtaaacccagaaagcggagacttacttgtgagtgacagaatagaccgagaacagatatgcgggaagcagcctctgtgtgttctggatttcgatactgtcgctgaaaatccactaaatattttctacatagcagtaattgtgcaggatataaatgataataccccgctattcaaacagactaagattaatttaaaaattggcgaatccactaagccaggtacaacatttccacttgacccagccctggattcagatgttggtcctaactcactacaaagataccaccttaatgacaacgagtactttgatctcgctgagaaacagactccagatggtcgtaaatatcctgagttgattctaaaacactctctggacagagaagagcacagtttacatcaattggtcctcacagctgtggatggcggagacccacctcaaagtggcacgacccaaatccgaatcaaagtcacggatgccaacgataaccctccagtgttcagccaggacgtgtacagggtcaccctgagggaggacgtgccgccgggcttctttgtgcttcaagtgacagccaccgaccgggatgaaggcataaacgcagagatcacctactcctttcataatgtggacgaacaagtgaaacactttttcaacttaaatgaaaaaacaggagaaatcacgacaaaggatgatttggattttgatgattgcaagtagttacactctgagtatcgaagcaaaagatcctggagatctagcagcccactgcagtatccaagttgaaattcttgatgacaacgattgtgcacctgaagttattgtgacttcagtatctactcccctaccggaggattcgccaccaggaacagtgatcgccttgataaaaacgagagacagagactctggagaaaatggagaagtttactgccaagtgttgggaaatgccaagtttattttgaaatcttcctcaaagaactattacaaactagtgacagacggcgctctggaccgggaggagatcccagaatacaatctcaccatcacagccaccgacgggggcaagccgcccctctcctccagcataattgtcaccctgcacatctccgacgtcaacgataatgccccagttttccaacagacttcctacatggttcacgtggcagagaacaatcctcctggcgcctctatcgctcaaatcagtgcctctgaccctgacttgggccccagtggccaagtttcctactccatcgtagcgagcgacctgaagccgcgggagattttatcctacgtgtccgtgagcgcgcagagcggggtggtgttcgcgcagcgcgccttcgatcatgagcagctgcgcgccttcgagctcacactgcaggcccgcgaccagggctcgcccgcgctcagcgccaacgtgagcctgcgcgtgttagtgggcgacctcaatgacaatgcgccacgggtgctgtaccccgcgctggggcctgatggctccgccctcttcgatatggtgccacgcgccgcagagcccggctacctggtgaccaaggtggtggcggtggacgcagactcaggacacaacgcttggctgtcctaccacgtgctgcaggccagcgagcccgggctcttcagcctggggttgcgcacgggtgaggtgcgcacagcgcgtgccttgggcgacagggacgcggcccgccagcgcctgctggtcgctgtgcgtgatggaggacagccgccactctccgctacggccacgctgcacctaatcttcgcggatagcctgcaagaggtattgccagacctcagcgaccgccgggagccctctgacccccaggcaaaactgcagttttacctggttgtggccttggccttgatctcagtgctcttcttcctcgcggtgattctggcaatctccctgcgcctgcgactctcttccaggtcagatgcttgggactgttttcagcctggtctcagctccaagcctggacctggggttctccccaattacagtgagggtacattgccctattcctacaacctgtgtgttgcctcacaatcagccaagacagagttcaattttctgaacataaccccggaattggttcccgcgcaagatctcgtctgtgacaatgcctcttgggaacaaaatacaaatcatggagccgctggggtcccttttgcctcagatactattttgaaggtgagctttaat

SEQ ID NO: 26032 - DNA, 436 bp, Homo sapiens
  SIMILAR (53)..(181): 1001254mologous to Homo sapiens lipophilin A,accession number AJ224171,Smith-Waterman Score=219.
tctaaatcactcatcattggttaaagccgagctcacagcagaataagccaccatgaggctgtcggtgtgtctcctgctgctcacgctggccctttgctgctaccgggcaaatgcagtggtctgccaagctcttggttctgaaatcacaggcttcttattagctggaaaacctgtgttcaaagttccaacttgcccaatttaaggcacctgtggaagctgttgcaagcaacatggaagcgattaattgcgtggatacgatgggcctatgagaaaagagtgctaattacaaaaacattgggaaaaatagcagagaaatgtgatcgctgagatgtaaaaagtttttaatgctagtttccaccatctttcaatgataccctgatcttcactgcagaatgtaaaggtttcaacgtcttgctctaataaatcacttgccctg

SEQ ID NO: 26033 - DNA, 3750 bp, Homo sapiens
  SIMILAR (1450)..(3690): 901254mologous to Homo sapiens KIAA0433,accession number AB007893,Smith-Waterman Score=3443.
atgagtgaagcccccagattcttcgttggaccagaagatacagaaataaatcctggaaattatcgacatttcttccaccatgcagatgaagacgatgaggaggaagatgattctccaccagaaaggcagattgtggttggaatatgttccatggcaaagaaatccaaatccaaaccaatgaaggaaattcttgaacggatctccttatttaaatatatcacagtagtagtatttgaagaggaggttattttgaatgaaccagtggaaaactggcctttatgtgattgtcttatttctttccattctaaaggatttccactggacaaagcggttgcctatgcaaaactcaggaatccatttgtaatcaatgacttgaatatgcagtatctcatacaagataggagagaagtatatagtattcttcaagctgaaggtattttacttcctcgttatgctattttgaaccgtgacccaaataatcccaaaggagtgaagctgcagaccttcgcggtgagtgttacagctcttaaggtagcgcgtctggagttgttcgttcctcccggtgggctcttggtcttgctgggctcaggtgtgaagctgcagatcttcgcgggctgcaggtggagctgcctgccagtcacgcgccgtgtgctcgcactcctcagcccttgggtggtcgatgggactgggcgccgtggagcagggggtggtgctcgttggggaggctcgggccgcacaggagcccatggagtggaatgtaatctgattgaaggggaagatcatgtagaagtaaatggggaagtttttcaaaagccatttgtagaaaagccagtcagtgcagaagatcacaatgtttacatttattacccaacttctgctggtggtggaagtcaaagactctttagaaagattggcagtagaagtagtgtttattctccagaaagcaatgtacgaaaaacaggctcatatatatatgaagagtttatgcccacagatggtactgatgttaaggtttatacagtgggtccagattatgcccatgctgaagctcgaaaatctccagcacttgatggcaaggtggaacgagacagtgaaggaaaagaagtaagataccctgttattctcaatgcacgagagaaattaattgcttggaaagtctgccttgcttttaagcaaacagtttgtggctttgatttgttacgggccaatggacagtcctatgtctgtgatgtcaatggcttcagttttgtgaaaaattccatgaagtattatgatgactgtgcaaaaatacttggaaatattgtaatgcgagaacttgctccacaatttcatattccatggtcaatacccttagaagctgaagatatcccaattgtaccaactacatctggaactatgatggaacttagatgtgtcatagctgttatacgtcatggggatcgaacaccaaaacaaaaaatgaaaatggaagaagtgctagatattgcacgacagcttcttatggagctagggcaaaataatgattctgaaattgaagaaaacaagccaaaacttgaacaacttaagactgtattagagatgtatggtcatttttctggaataaatcgtaaggttcagttgacctatctccctcatggttgtcctaaaacatctagtgaagaggaggacagccgaagagaagaaccatctttacttttggttctaaaatggggaggtgaattaactcctgcaggcagggtccaggctgaagaacttggaagagccttcaggtgtatgtatcctggaggtcaaggagattatgcaggatttcctggttgtggtttacttagattacatagcacctacagacatgacctcaaaatatatgcctctgatgaaggacgagtccagatgactgcagctgcttttgcaaaggggcttttagctttggaaggagagcttacacccattcttgttcaaatggtgaaaagtgcaaatatgaacggtcttttggatagtgatagtgactctctgagcagttgtcagcaacgtgtgaaggcaaggcttcatgaaatacttcagaaagacagagattttactgctgaagattatgaaaagcttactccatctggaagcatttctcttatcaaatcaatgcatttaattaaaaaccctgtgaagacctgtgataaagtttattccttaattcagagtttgacttctcaaatcagacatcgaatggaagatcctaaatcatcagatattcagctttaccatagtgaaacattggagcttatgctacgtagatggtccaagttagagaaagactttaaaacaaagaatggaagatatgatattagtaaaatccctgacatatatgactgtataaaatatgatgtccagcataatggttccttgaaattagaaaacacaatggaattatataggctttcgaaggcattagcagatattgttatccctcaggaatatggtataactaaagctgaaaaactggagattgccaaaggctactgtactcctctggttagaaaaattcgctcagaccttcagaggacacaagatgatgacactgtaaataaacttcatcctgtgtattctagaggtgttctgtctcctgaacgtcatgttcgtactagattatattttaccagtgaaagtcatgtacattctttgctgtctattcttcgctatggtgccttatgcaataccaatgattctcagaatgaagatggaggaatggtgaaggagatggaatcaaaggatgaacagtggaaacgagctatggattatttaaacgttgtcaatgagctcaactacatgactcagattgttatcatgctttatgaggatcctaataaggatctttcctcagaagaacgctttcatgttgaattacactttagtccgggagccaaaggttgtgaagaagacaaaaatttgccatctggctatggatatagaccagcttccagagagaatgaaggcaggagaccttttaaaattgataatgatgatgaaccacatacttctaaaagagatgaagttgatcgagctgtgatattgtttaaaccaatggtatcagagccaattcatatacacaggaagtctccacttccaagatctaggaagacggctacaaatgatgaagagagccccctgagtgtgtctagcccagagggtactggtacctggctgcattataccagtggtgtgggtactgggcgtcgaagacgcagatcaggggaacaaatcacttcttcccctgtctcccccaaatcattggctttcacatccagtatttttggctcatggcaacaggttgtatctgaaaatgctaattacctgagaacaccaagaactcttgtggaacagaagcagaatcctactgtagggtctcactgtgcgggcctgtttagcacctcggtgctcgggggttcttcaagcgcacctaacctacaggattatgctcgtactcatcgtaaaaagctgacctcttctggctgcatagatgcctctacagctttacgttccagtccaataatgagaaaaaaagtatctttaaatacgtatacacctgcaaagatcctcccaacaccaccagctaccttaaagagcactaaagcaagcagcaaaccagctacaagtggaccttctagtgcagttgttcctaatacctcatctcggaaaaagaatataactagcaaaacagaaacgcatgaacacaaaaaaaacactgggaaaaagaaatga

SEQ ID NO: 26034 - DNA, 2874 bp, Homo sapiens; identical to SEQ ID NO: 14611
  SIMILAR (1842)..(4): 971254mologous to Homo sapiens myosin X,accession number AF234532,Smith-Waterman Score=3122.

SEQ ID NO: 26035 - DNA, 369 bp, Homo sapiens
  SIMILAR (357)..(181): 401254mologous to Myxococcus xanthus response regulator FrzZ,accession number AF049107,Smith-Waterman Score=92.
cttgagctagatacagagtgccgattggtgtatttacaatccttgagctagacataaaggttctccacgtcctcaccagagcagctagatacagagtgtcgattggtgcattcacaaaccttgtgctaaacacagggtgctgattggtgtatttacaaaccttgagtggggctgcaggtggagctgcctgccagtcctgcaccctgtgctcgcattcctcagcccttgggtggtcaatgggactgggcgccatggagcagggggtggtgctcgtcggggaggctcgggctgcacaggagcccatggagtgggtgggaggctcaggcatggcaggctgcaggtcccgagccctgccccgtgggaaggcag

SEQ ID NO: 26036 - DNA, 555 bp, Homo sapiens
  SIMILAR (381)..(136): 981254mologous to Homo sapiens cell recognition molecule Caspr2,accession number AF193613,Smith-Waterman Score=432.
ctaactgggaggcaccccccagtaggggcagactgacacttcacacggccgggtactcctctgagacaaaacttccagaggaacgatcagatggcagcattcgcagttcacgaaaaaccgctgttctgcaaacaccgctgaatccaggtgatccaggtgccaggggtcggtggcggacgacatgggggagagggtcagcggcgaggccccgcagttggactccaccagctcgccctggatgtggacgtgagccgaggcgtttgtctgcctcaaggcggccttgagaggggcgatctggttgaactggactctggagaggcaaccagtgaatcctggggtgttgtatttgtgaatctcttggtcaattttccctgtttctagtggatcccgcactggggctgcaggtggagctgcccgccagtcctgcaccgtgcgctcgcattcctcagcccttgggtggtcgatgggactgggcgctgtggagcagggggtggcgctcgtcggggaggctcgggccgcacaggagcccatggagtgggtgggaggctcaggcat

SEQ ID NO: 26037 - DNA, 543 bp, Homo sapiens; identical to SEQ ID NO: 6191
  SIMILAR (246)..(341): 661254mologous to Homo sapiens Human secreted protein, SEQ ID NO: 6536,accession number G02455,Smith-Waterman Score=104.

SEQ ID NO: 26038 - DNA, 444 bp, Homo sapiens; identical to SEQ ID NO: 2752
  SIMILAR (399)..(187): 641254mologous to Homo sapiens hypothetical protein,accession number AL162044,Smith-Waterman Score=229.

SEQ ID NO: 26039 - DNA, 1608 bp, Homo sapiens; identical to SEQ ID NO: 6426
  SIMILAR (492)..(28): 1001254mologous to Homo sapiens sperm protein 10,accession number M82968,Smith-Waterman Score=809.

SEQ ID NO: 26040 - DNA, 432 bp, Homo sapiens
  SIMILAR (323)..(144): 361254mologous to Hydra sp. mini-collagen,accession number X61045,Smith-Waterman Score=103.
ctagatataaagactctccacgtccccaccagactcaggagcccagctggcttcacctagtggatcccgcaccagggctacaggtggagctgcctgccagtcccgcgctgcgcgctcgcattcctcagcccttgggtggtcgatgggactgggcaccgtggagcagggggtggtgctggctggggaggcttcggtcgcacaggagcccatggagtgggtgggaggctcaggcatggcgggctgcaggtcccgagcccattctggaggagtagggatgacaatgacttggcagataattcctgaagttccatgaattcctttgccatctattatatttgtttctttacaaaaactcagtaagtttctacttgatgttgaatatctttgctccggctcccttagagcatgtgcttctgtggggatcacgctcat

SEQ ID NO: 26041 - DNA, 894 bp, Homo sapiens
  SIMILAR (460)..(350): 321254mologous to cercopithicine herpesvirus 15 EBNA2-like protein,accession number AF200187,Smith-Waterman Score=47.
ctaggtataaagactctccacgtccccaccagactcaggagcccagctggcttcacctagtggatcccgcaccggggctgcaggtggagctgcctgccagtcccgcgcggtgcgctcgcattcctcagccctcgggtggtcagtgggactgggcgtcgtggagcagagggtggtgctcgtcggggaggctcgggccgcacaggagcccatggagtgggtgggaggctcaggcatggtgggctgcaggtcccgagccttgccccacgggaaggcagctgcacctgtggaggcaggaagcggagctagagaggaacagaacctgggttttccgagggagcctcgttcaggtgggggcgccaggggctctgacggcatctgtgggatgcgtgtgatgttccggaagtggatattgttctgcccatcttcgaggtaagaagcctttaggccatggactggtccatgttcccacacaaagccagacagcaggaggctcagcgcaaaaccaggtggcctgagcacactgtcatccaccacatcacacgccagcagaactgaccagaacacccccaagacgtcaagcttgttcttaaagtttccccaaattgttccagctgagtcatgagttacaacacgattgtgagtcgtttcttgatgggcaccaagagccctcagcttttcttcgtctttctcaagaactacgtgaactaaaaatcccagcctcccgctccagcgcgggccagggctggcaagggcccctgcgtccaagtcccccttggcatggctcccctcgcccaacgtggcagccctcagaggagccggaagaccgctggtgctgggcctgggctgctgctcctgctgacaagtggattttggtctgtaggatttcagtgtcat

SEQ ID NO: 26042 - DNA, 599 bp, Homo sapiens
  SIMILAR (387)..(524): 411254mologous to Lymantria dispar nucleopolyhedrovirus DNA binding protein,accession number AF081810,Smith-Waterman Score=73.
gaggggcctgtcttcagccagggacaagcagaacattatggtcagcatcatccacaaggtcaagaggccacagagccccctgagggcagtatactggccccttcgatattgtatcctacccagcaggagggccacagtgaactagatctacttggtgtgaactttgaagtcctcacctctgcttgtcacctatcaggctatcaggatgaactgataaatcagctgaagggagcaaagtcacagtgcgtgagaattgttttggagatttactcaggagcccagctggcttcacttagtggatcccgcaccggggctgcaggtggagctgcctaccagtgccgcacggtgcgcttgcattcctcagcccttgggtggtcgatgggactgggcgccgtggagcagggggtggtgctcgtcgaggaggctcgggccgcacaggagcccatggagtgagtgggagactcaggcatggcgggcttcaggtcccgagccatgggctggttgtctcttctaccccagatcctatatgtcatcttcttgcccactccacaccatccactctgacctctttgctgttcttcaaggacgcacaaagtcat

SEQ ID NO: 26043 - DNA, 780 bp, Homo sapiens
  SIMILAR (636)..(169): 261254mologous to Arabidopsis thaliana contains similarity to phytocyanin/early nodulin-like protein~gene_id:K19P17.3,accession number AB007644,Smith-Waterman Score=122.
tcagcgtcttttctgcggcttccttctatcccgctccgaggctgcagggccctggcagagtggcgtcagctggaaggctggccagagccggattttgttgcactccgggcaggaagatggccgaggcggcggctgacggagatagtagtgccttgctgaagtcacggcggccggcggcgccctcctggaggctgacgggacggaggcagggaacttcccggtgagccagccgggcctagcaggagccttcggcggctgcccaaagccgtggggacggctggctgactcagccgctctctggacggagttgctgggtccccacaagcctgcccgtgcagcagactcaggagcccagctggcttcacctagtggatcccgcaccagggctgcaggtggagctgcctgccagtcccgcgtcgtgcgcttgcattcctcagcccttgggtggtcgatgggactgggcgccgtggagtagggggtggtgctcgttggggaggctcgggccgcacgggagtccatggagtgggtgggaggctcagacatggcgggctgcaggtcctgagccctgccccgcgggaaggcagctaaggcctcagttcttgacttctgtgaacccacaggatcaacatcatgtgaaagccaccaaggcttgtgtcctgcactctctgaagcaatggcccgatctgtaccttgggtcccgggcctcacccacaaaaccatttttccctcgtaggcctccaggcctatgatgggtagggctgccatgaatgtctctgacat

SEQ ID NO: 26044 - DNA, 962 bp, Homo sapiens
  SIMILAR (167)..(120): 811254mologous to Homo sapiens Human secreted protein, SEQ ID NO: 7102,accession number G03021,Smith-Waterman Score=74.
atgaggccgcggaccctcgcggtgagtgttacagctcttaaggtggcgcgtctagagtctgtcccttctgatgttcagatgtgttcggagtttcttccttctggtgggctcgtggtctcgctgggctcaggagtgaagctgcagatcttcgtggtgagtgttacagctcataaaagcagcgtggacccaaagaactcaggagtccagctggcttcacctagtggatcccgcaccgggactgcaggtggagctgcctgccagtcctgcgccgtgcgctcgcattcctcagcccttgggtggtcgatgggactgggcgcagtggagtagggggtggtgctcctaggggaggctcgggccgcacaggagcccatggagtgggtgggaggctcaggcatggcgggctgcaggtcccgagccctgccccgcgggaaggcagccaaggcccagcgagaaatcgagcacagtgccggtgggccggcactgctgggggactcagtacaccctccgcagccactggcccgggtgctaagtcccccattgcccggggccagcagggcttgctggctgctccgagtgcggggcccaccaagcccacgcccacccggaactccagctggcccgcaagcgccgcacgcagccccggttcccgctcgtgcctctccctccacacctcccttggtccacttgacaaacgatgttctaagagtgaaggtcaagtgggcctttttctttacactccacaagtagctcaaaacattccacactgcagtctttgtcagatttggtccgtggcttcctgatacaggattttgctcttctttgagtttccagttttcttttttaatttccctggatactcttccatatagaaagggagtcatctgtttattggaggcattggatgatctgctgtttttcttggttgagacttggtaccaccaagaagcagtcagtgccctcat

SEQ ID NO: 26045 - DNA, 1405 bp, Homo sapiens
  SIMILAR (1125)..(343): 231254mologous to Leishmania major proteophosphoglycan,accession number AJ243459,Smith-Waterman Score= 138.
ttaattgttgtgcagtttcatagatgggtcaggaggtggacaagttggggccagagatgatggcagtccagcagcaactccctgtgctcccttctctttgggcagagattctatttttgacatttgcacaagacaggtagggaaaggggacttgtggtagtggaccataccttgagctagatacagagtgccgattggtgtatttacaatccctgagctagacataaaggttctccaaggccccaccagagcagctagatacagagtgtcgattggtgcattcacaaaccttgagaaaccttgagctaaacacagggtgctgattggtatatttacaatccctgagctagatatactctccacattcccactagactcgggagcccagctggcttcacccagtggatcccacaccggggctgcaggtggagctgcctgccagtcccgcgccgtgcgctcgcattcctcagcccttgggttgtttgttccttcccggtcgatgggactgggcgccgtggagcagggggtggtgctcgtcggggaggctccggccgcacaggagcccatggagtgggtgggaggctcagacatggcgggctgcaggtcccgagccctgccccgcgggaaggcagctaaggcccagcgagaaatcgagcacagcgccgatgggccggcactgctgggggactcagtacaccctccgcagccactggcccgggtgctaagtcccccattgcccggggccagcagggctggccggctgctccgagtgcggggcccaccaagcccaagcccacccggaactccagctggcccgcaagcgccgcacgcagccccggttcccgctcgtgcctctccctccacacctccctgcaagctgagggagtgggctccagccttggccagcccagaaaggggctcccacagtgcaggggggaggctgaagggctcctcaaatgccaccaaagtgggagcccaggcaggggagaagaattgtggcattcacgatagaagtgggggtgttgagggaagatctgttttgaatggtgatcctactttgaacattttgggtgtagagcagtacgaggccatcaggtatccaggtggagatggcatactgctgagccagcaggaaaaggcaacaggacgaggggcaggatttgccactggaatgtcagcaggccatacctcaggcgttcagctccatggagcaaagacagtagtgatcacgttccttgacaacagtgctagtgtgcggggagcttttagttttccttttctctgctccttgaaccaagaatccagcatcagcatcagcatcagcatcagcatcagcatctgctcagctgtaggccatgattgtctgtactgtttaccagcagctcatgtaatatgcttgatgtaa

SEQ ID NO: 26046 - DNA, 955 bp, Homo sapiens
  SIMILAR (214)..(107): 401254mologous to Homo sapiens Deleted in Colorectal Carcinomas,accession number R13144,Smith-Waterman Score=42.
tcagcttgcagggaggtgtggagggagaggcgcgagcaggaaccggggctgcgcgcagcgcttgcgggccagctggagttctgggtgggcgtgggcttggcgggccccgcactcggagcagccggccggcccggcgctgtgctggatttctcgctgggccttagctgccttcctgcggggcggggctcgggacctgcagcccgccatgcctgagcctcccacccactccatgggctcctgtgcggcccgagcctccccaaggagcaccaccccctgctccacggcgcccagtcccatcgaccacccaagggctgaggagtgcgagcgcacggcacgggactggcaggcagctccacctgcagccctggtgcgggatccactgggtgaagctagctgggctcctgagtctggtggggagccaacaccttcggggccaggggtcgcgggcagcggcagcactcacacacatgcactcacacacgcatgcacacatgcacacacacgcgccgagccccttcggcttcctcctcctcctcgtcctcttcctccacctctttctccacctcccctgcgcctctgctgccttcgaagcctttttccttgtccactgacagaatcagcagcaaaagcaggcagcaaaaagttccattcggtccaagagatcccgagccccgcggtgtgcgagctgggagttggaaccgtactacacattgatccggagaagtggagggctggaagggaaaatgtggagaccggagggaaacgaactggatcaggcaaagattccacgggaagggggtgggggcagacagactatggcttagggaaaaaagagcggaccgaggaggcttccaggagctgcatttgcctggtctgcgtatcaatgcgcagggatgccctctgtgggcaaagcgtgggaagtcacttttgtcaatggagcctgcgaacatcctga

SEQ ID NO: 26047 - DNA, 1394 bp, Homo sapiens
  SIMILAR (930)..(1313): 411254mologous to Fowlpox virus gag,accession number AF006065,Smith-Waterman Score=274.
actggtgcactcacaaaccttgagctaaacacagggtgctgattggtgtgtttacaaaccttgagctagatacagagtgccgattggtgtatttacaatccttgagctagatacagagtgccgattggtgtatttacaatccctgagctagacataaaggtcctccacgtccccaccagagcagctagatacagagtgtcgattggtgcactcaaaaaaccttgaagcttaaacacagggtgctgattggtgtatttacaatccctgagcttagatataaagactctccacgtccccaccagactcaggagcccagctggcttcacctagtggatcccacaccggggctgcaggtggagctgcctgccagtcccggtgccgtgcgctcgcattgctcagcccttgggtggtcgatgggactgggtgccgtggagcagggggtggtgctcgtccgggaggctctggccgcacaggagctcatggagtgggtgggaggctcaggcatggcgggctgcaggtcccgagccctgccccgcgggaaggcagctaaggcccggccaacaccctttggtcacatgaataaaagtcaagccctttctttgctcattgctcagcctctgggtattaatctgctgagctggtggccacctaaatacaatcgtcctgttcccctcattggtctctccggtctcctgattccagccacattttgcctgggggagacccgtgactccaggcatgctatcaggacaacttcaacccgaggggagatcagctctcccgcaacctggtgccgctctctgacagcacaacagaacctaaggggctacaggatgattcaaggaacagtgtgctacaggacctcggtagcccaccagtggctagaaaacaatgcactggaaggcacccttaatgtcctggcatatgcacagggccagttcccagaagcagacccgcactgggacccaaacaaggaagcccaactacagcaactgcagaggtaccaagaggcactcctgcaagttttgagaaaaggagagaaaaaggcattcaatatgggaaacatttcagaggtgcttcagagagcagatgaaagctgtagccagttttatgagagactctatgaggccttccagctttgcagtccatttgaccctgaggctactgagaaccagtgcatggtaaacgcagtgtttgtagggcaaacccagggagacatcaggcgaaagctgcaaaagctagagtgtttcactggcatgaatgtcactcaggttttagaagtggccaccaaggtgtacactaactgtgaggaggagactcagggaaaaggccaatttgctggtggcagcacttatggaaaggggggcgaatgtcccaagacgaagtggatgtag

SEQ ID NO: 26048 - DNA, 2616 bp, Homo sapiens
  SIMILAR (1562)..(1473): 731254mologous to Homo sapiens putative p150,accession number U93563,Smith-Waterman Score=118.
ttatttgagttcattgtagattctggatattagccctttttcacatgagtaggttgcgaaaattttttcccattttgtaggttgcctgttcactctgatggtagtttctttggctgtgcagaagctctttagtttaatcagatcccatttgtcaattttgtcttttgttgccattgcttttggtgttttagacaagaagtccttgcccatgcctatgtcctgaatggtaatgcctaggttttcttctagggtttttatggttttaggtctaacatttaagtctttaatccatcttgaattgatttttgtataaggtataaggaagggatccagtttcagcttcctacatatggctagccagttttcccagcaccatttattaaatagggaatcctttccccattgcttgtttttctcaggtttgtcaaagatcagatagttgtagataagcagcgttatttctgagggctctgttctgttccattgatctatatctctgttttggtaccagtaccatgctgttttggttactgtagccttgtagtatagtttgaagtcaggtagtgtgatgcctccagctttgttcttttgacttaggattgacttggcagtgtgggctcttttttggttccatatgaactttaaagtagttttttccaattctgtgaagaaagtcattggtagcttgatggggatggcactgaatctgtaaattaccttgggcagtatggccattttcacgatattgatttttcctacccatgagcatggaatgttcttccatttgtttgtatcctcttttatttccttgagcagtgatttgtagttctccttgaagaggtccttcacatcccttgtaagttggattcctaggtattttattctctttgaagcagttgtgaatgggagttcactcatgatttggctctctgtttgtctgttgttggtgtataagaatgcttgtgatttttgtacattgattttgtatcctgagattttgctgaagttgcttatcagcttaaggagattttgggctgagacaatggggttttctagatatacaatcatgtcatctctgaaaatttgaagggtccttgctgcagccacactcacatcattggcttgttcatcaacagtcaatattctgagaacactgaagggaaagaagatggttctctgtagaccaccccagaatagctcaaattttttcctctggctcagctgaatgacaagagcaaggttagggctgacataggcaagctcacttgctagggtaggaaaccctctaggacagttccagaagttagcggggtttggtggaagggtattttggcaccagcagagagcatgctgggctgctgcaaggagcaggagctggcaatcaacagcgagtttggatgttggcaacctgccaccaacaggccccagtatgtaatgttcccctccctgtatccgtatgttctcattgttcaactcccacttatgagtgagaacatgtggtgtttggttttctgttcttgtgttattttgctgagaatgttggtttccagcttcatccatgtcctgtaggagaagttcatcacatatatttttggccagattatctacaaaagcagttgtttgtactgattcagtaatagatacaacagcaatgctaacagttgccataatgtctatggctgagcctgtaaagaccataagtgtaaatgtgaatcttttgtgtctgacctgggacagggcactttctaaggtggcaagggcagaagaatcttgccaattgcatgtcaaattggctggtagaagtgcctcagattgtctccttaataccacgacactggaagtttttaaactagacatatcatgaccagtgatacatgaggcaaaccaagcctgtccctgcacccgggtcacaaatgtggcatttccaggtgtaatggaaatgttagttccagactcaggagcccagctggcttcacctagtggatcccgcaccggggctgcaggtggagctgcctgccagtcctgcgccatgcgctcgcattcctcagcccttgggtggtcgatgggactgggcgccgtggagcagggggtggagctcgtcggggaggctcgggccacacaggagcccatggagtgggtgggaggctcaggcatggcagactgcaggtcccgagccctctcagagcccgttctccttttcttcttagctgcacactcagctgccaactcgacagcccctgccttacttgcagccaagggcatcagtacaaatatcaacacagtgacaaaggcaaacgtcttactattgttacgaagagttttgacttcataccttcctaaattggattcagggaccctcaaaaatctgcagatggcccttcgcgaatcgctgcctgaggtactgtcaggcctacgggagctagattcctgcctcatctgagctcccactggctgcttcttactgcaagggggctgagaagcactggctggctggatcgtcagacttccagctgaaaaacccattacgtgtgtggtcaaaatgtcgatgaaggcttgacttgcaccagcgcttctggctcctatccttccaaaggccttatcttcaaatacagtcat

SEQ ID NO: 26049 - DNA, 954 bp, Homo sapiens
  SIMILAR (598)..(422): 341254mologous to Acrocephalus arundinaceus MHC class I antigen,accession number AJ005513,Smith-Waterman Score=81.
caactattttaggtgctggagtatgtttgaagagtgtgctgggaaaaaggaagcatttcttcattgatttaaatcagtatgaatattatatgcctaaataaaaaatttgcacaggtaaattctctcaactgtgaatgggaagaagctgccccaggaattctgtgaggatggtattccctggagtctggctttggaagatttcatttgttgctagaaataacaggttgagaaagagggagttagcatcacctaaaacctgcacgtgaacaagggttgacatgatacactatggccttagaaaagggccaggtgaaaccccaagctaatcactgcggtctttcagagccggacagacaggtgccagcagagcccgggggctcactctcctttcaagtcattcctcagcccttcgaaagggaagccccaaacacttttgcacgctgtgctggcagacattcttggcctggtgtgtctggaaagttgcattcagtccttcacggtgccaaacacagtttgatttagggaagtccacacaatggacactggaaatccttacagacccaaaatcccacttgttcagcaggaagcagcagccccaggcccgagcaccagcggtctttccggctcctctgaagggctgccacgttggggcgagggggagccattgccaagggttccagggttgctttaggccatctgtggccccactcatcctggggacagatggtttttctttattggaaaaattgtggacttttaaaacctgttgactaaacagtaattaatttatatttgtgaaaaatgccactgtcctagtgatttctgatgtaaataatgttgtgtatatagtatgtatttaaattttcctacattgtaaaactgctgtacttttgattcttgtatattaaaaagtgttactgagcatttttagaattgggctaacaaaaaaaaaaa

SEQ ID NO: 26050 - DNA, 3477 bp, Homo sapiens
  SIMILAR (2521)..(3474): 991254mologous to Escherichia coli K12 putative oxidoreductase,accession number AE000497,Smith-Waterman Score=1661.
atgctgcggatcaacggcatcgttgaagcggaaggtagtttccagctcatcgatcacttcctgcggagcttcaacattcatcagaacgtagtgtgctttgtgcagtttgttgactcggcgaacacgaggcaagaaaaggaagttcggtatgccatgattcatgacgagtcacggtgcaatggctgtaatatttgcgcccgcgcatgccgtaaaactaaccacgtccccgctcagggaagccgtttatcgatagcacacattccagtcaccgataacgacaacgaaacgcagtatcacttttttcgccagtcatgtcagcactgcgaagatgctccgtgcatcgacgtttgcccgacgggggcgtcgtggcgtgatgagcaggggatcgtgcgggtagaaaaatcgcagtgcatcggctgcagttattgcattggcgcttgtccgtaccaggttcgctaccttaaccctgtcactaaagtggcagataaatgtgatttctgcgctgagtcccgactggcaaaaggctttccgcccatttgcgtcagcgcctgcccggaacacgcattgatctttggtcgcgaagatagcccagaaattcaggcgtggttgcagcaaaataaatactatcaatatcagctacctggtgccgggaaaccgcatctgtatcgccggttcggtcaacatttgattaaaaaggaaaatccatcaccgcaacaccgcgaaggggtgaaagatgtgatgcgctttaacgagccgatgtacaaggttggagagcagaacagcgtctgtatgtcctgtcatctgccggaacagttgcaaaaagcgttctggccgcacgatgtccactttctcaccggcgtcggcgtgctggcagccgtcagcggcaccgcagggcgcgtggtggcgaaaacgttgaatatcaatggggtgcgttacggcatggtgcatgacgagtcgttatgcatcggctgtaccgcctgtatggatgcttgtcgggaagtgaacaaggtgccggaaggcgtctcgcgcctgacgattattcgtagcgagccgcagggcgaatttcctgatgtgaaatatcgcttcttccgtaagtcttgccagcactgcgatcatgcgccgtgcgttgacgtctgcccgaccggtgcgtcttttcgcgatgctgccagtgggattgtcgatgttaatccggatctctgcgtcggttgtcagtactgcatcgccgcctgtccgtaccgcgtgcgctttatccatccggtcacgaagacggcggacaaatgcgatttctgccgtaagaccaatttgcaggccggtaagttgcccgcgtgcgttgaagcttgcccgaccaaggcgctgacgtttggcaatctggacgatcccaacagtgagatttcgcaactgctgcgccagaagcccacttaccgctacaagctggcgctgggaaccaaaccgaagctgtaccgcgtaccgtttaaatacggggaggtcattacccctgtaggattcattggttatggtcaagtcaaatggaatatctcagaatttggatataatatagtatcagtgctggaacgttcagacaggaaagttgtcatattaatggataagctagatgaggcaaggcgatattttagacttgtgaaggcgttacagcaggaaggtgcattagtaaactggaaaaataatcccgacggtacacgcagtccgtatgaaataaatgtgacctatatggatgcgttaagccgccgtgagagtagcgatgaagaacgttgcgccaggtttatccttgcccatgcgattttgttaagtttccccggtgtgccagcgatatatattcaaagtattcttggctcgcgtaatgattacgcaggtgtcgaaaaactcggatataaccgtgcgattaaccgtaaaaaatatcacagtaaagagataacccgagaactgaacgatgaagctacattaaggcatgcggtatatcatgagttgtcgcgtttaattacacttcgtcgcagccataacgagtttcatccggataataattttaccattgatacgattaattcatccgtaatgcgtattccaagaagtaacgctgatggtaattgtctgactggattgtttaatgtcagtaaaaatattcagcatgtaaatagtactaatctgcatggtcgggatctgattagtgaagttgatatattgggtaatgaaataacgctgcgcccctggcagaaaaccctggcatgcaccgttaagcaagtgcccgtggaagaagatgcctataacactaaagtgcattactctttcaccggttcgctgccggaagtgatcgaaaccagccatgactacgccaaatggatggacaaagagcagcttatcgatcgcaaagcggttgccacagtcatcagcaacgttgctgaaggcgcgttttacgatggcgtactgcgtattgtgcgtaccgaagatggtagcgcatggaccggtgttcctgtcagcgcctggattgccgcaccccgccctgccatgctctacacttcccaaacaacaccagagaaggaccaaaaaatgtcgatgataaaaagctatgccgcaaaagaagcgggcggcgaactggaagtttatgagtacgatcccggtgagctgaggccacaagatgttgaagtgcaggtggattactgcgggatctgccattccgatctgtcgatgatcgataacgaatggggattttcacaatatccgctggttgccgggcatgaggtgattgggcgcgtggtggcactcgggagcgccgcgcaggataaaggtttgcaggtcggtcagcgtgtcgggattggctggacggcgcgtagctgtggtcactgcgacgcctgtattagcggtaatcagatcaactgcgagcaaggtgcggtgccgacgattatgaatcgcggtggctttgccgagaagttgcgtgcggactggcaatgggtgattccactgccagaaaatattgatatcgagtccgccgggccgctgttgtgcggcggtatcacggtctttaaaccactgttgatgcaccatatcactgctaccagccgcgttggggtaattggtattggcgggctggggcatatcgctataaaacttctgcacgcaatgggatgcgaggtgacagcctttagttctaatccggcgaaagagcaggaagtgctggcgatgggtgccgataaagtggtgaatagccgcgatccgcaggcactgaaagcactggcggggcagtttgatctcattatcaacaccgtcaacgtcagcctcgactggcagccctattttgaggcgctgacctatggcggtaatttccatacggtcggtgcggttctcacgccgctgtctgttccggcctttacgttaattgcgggcgatcgcagcgtctctggttctgctaccggcacgccttatgagctgcgtaagctgatgcgttttggccgccgcagcaagtaa

SEQ ID NO: 26051 - DNA, 984 bp, Homo sapiens
  SIMILAR (1)..(696): 871254mologous to Escherichia coli No definition line found,accession number U00039,Smith-Waterman Score=991.
atgcgcttcccggtgtcggatttgccgaacaaagccttgctgatggagatgctggagcaggttgtcgcgcgtaaacaaaccaccgcgctgatgatcatcacctgtgaaaccctgcgtgatactgcgggcgtgctgaaagaggcgcaacgagaaattctgctgctgacgctggtggaaaaactcaaatcggtactgtcgccacgtatgatcctcgcgcagattagcggttatgactttgctgtcattgccaacggtgtacaggaaccgtggcacgcaatcaccttaggtcagcaagtgctcactatcatgagcgagcgcctgccgattgaacgtattcaactccgtccgcactgtagcattggcgtggcgatgttctacggcgatctcaccgccgaacagctttacagtcgcgctatttctgcggcatttaccgctcgccataaaggcaagaatcagattcagttctttgatccgcagcagatggaagccgcccagaagcggttgacggaagagagcgatatccttaatgcactggaaaatcatcagtttgctatttggttacagccacaggtcgagatgaccagcggtaaactgcgggggatctcaaaacaattagtgggattcaccaatcggcagaacggtgcgaccaaactgctcgttcagtacttcacccatcgccagatagattgcgctggcaccgcagatcagcccaatccagccggcaaagtggatgattgcggcgttaccggcaatgttaccgatcgccagcagggcaaacagcacggtcaggctaaagaaaacgaattgcagaacgcgtgcgcctttcagcgtgccgaagaacataaacagcgtaaatacgccccacagacccaggtagacaccaaggaactgtgcatttggcgcatcggtcagacccagtttcggcatcagcagaatcgcaaccagcgtcacgcagaaagaaccaatcattttggggtccgatga

SEQ ID NO: 26052 - DNA, 2604 bp, Homo sapiens; identical to SEQ ID NO: 18283
  SIMILAR (451)..(1398): 931254mologous to Escherichia coli K12 putative outer membrane receptor for iron transport,accession number AE000242,Smith-Waterman Score=1487.

SEQ ID NO: 26053 - DNA, 1508 bp, Homo sapiens
  SIMILAR (400)..(663): 1001254mologous to Escherichia coli No definition line found,accession number U00039,Smith-Waterman Score=438.
atggggcctggggacttgccccgaggtctggccactttctggacagaattggggctgctgagttgggccagggagctggccaggatgccagctgtggagatgccacccaggtcctgcccaggccgcagcaggctttcctgcagcattggcgtggcgatgttctacggcgatctcaccgccgaacagctttacagtcgcgctatttctgcggcatttaccgctcgccataaaggcaagaatcagattcagttctttgatccgcagcagatggaagccgcccagaagcggttgacggaagagagcgatatccttaatgcactggaaaatcatcagtttgctatttggttacagccacaggtcgagatgaccagcggtaaactgcctggcaagagcgcggccattatgctgcccttgtcggtaaacctctctgcgctgcaactgatgcacccgaatatggtggcggatatgctggaactgttaacccgctatcgcattcagccgggaacactgattctggaagtgacagaaagccgacgtattgacgaccctcatgctgcggtggcaatcctccgtccgctgcgcaatgccggagttcgggtggcgctggatgatttcggcatgggctacgcagggctgcgtcagctgcagcatatgaaatcgttggtccggctgaccaagagcgaggtgagtagcgaaacggatcaggatgaattgccgttagcgaaagtcagcgaagttgacgaggcgaagcggcaatggttgcaggggatgcgtcaccccgttgatacggtaaccgaaccagaacctgctgaaatcctggctgagttcattcgccagcattctgcggctgggcagctggtggcgcgcgccgtgtttctctcgccaccctatttggttgcagaagaggaactgtcagttttgctggaaagcattaagcagaacggagactacgcggatatcgcttgtttgacgggaagcaaggatgattactattactcaacgcaggccatgagtgaaaactacgcggcgatgtctttgcaagttgtggagcaggacatcttttccccccattgcacacgccgttcgttttgagtgccagacgtatcctcgtccttacaaagtcgccatgctgatgcaagcgccatattacttccaggaagcgcagattgaagccgcgatcgccgcgatggatgttgcacctgaatatgccgatatacggcaggggatcgtcgggtagaaaaatcgcagtgcatcggctgcagttattgcattggcgctttccgtaccaggttcgctaccttaaccctgtcactaaagtggcagataaagtgatttctgcgctgagtcccgactggcaaaaggctttccgcccatttgagtgcgacagtcgcgtgcttgacgacagtggcggccacgcatgtcgcagtgacatattggccacaagccataatgagtcgagctttgagacctgtctcagtgtcaagcaatcaacaacggcatacggttag

SEQ ID NO: 26054 - DNA, 1164 bp, Homo sapiens
  SIMILAR (112)..(633): 981254mologous to Escherichia coli Phage shock protein A,accession number D90768,Smith-Waterman Score=821.
atgcagcagttacagaacattattgaaaccgcttttgaacgccgtgccgagatcacgccagccaatgcagacaccgttacccgcgaagcggtaaatcagctgcaaagaggttccaacatcaacgctctgttagagaaagcggaagatccacagaaactggttcgtctgatgatccaggagatggaagatacactggttgaagtacgttctacttcggcgcgcgcgttggcagaaaagaaacagctgactcgccgtattgaacaagcgtcggcgcgtgaggttgaatggcaggaaaaagccgaactggcgctgctgaaagagagagaggatctggcacgtgcagcgttaattgaaaaacagaaactgaccgatctgattaagtccctggaacatgaagtgacgctggtggacgatacgctggcacgcatgaagaaagagattggcgagctggaaaacaaattgagcgaaacacgcgctcgccagcaggcattgatgttacgtcatcaggcggcaaactcgtcgcgcgatgtgcgtcgtcagctggacagtggcaaactggatgaagcaatggctcgtttcgaatctttcgaacgtcgtattgaccagatggaagcggaagcagaaagccaagccttgagctttccccggctgtggataagggtcttgtccaacaataataatcggacctaccttatattatatcatctatgcaactatgaactctggccaagcagcttcttgtcccctgtgaacacctggattggtttttgcccgtatggtaaacatccgggatttgacctgttccgaacccggtttaaggaattgacacatcggaccaatgataaactgccggatagtcgtccacttgctaaagcataccgagatgcttggcgaggagggggacaacaaaaggctctgggtttcaggacgtggacaagaagtataagagcacctgtttggatcattcgtgtcacgctcaacatgaagaatgttatagtaaccatattagagtccacgggcaacggtatgttcgcaccgaacactcacaatattcagccaccagaccagcaagcaccaatctccattcacatgtggcatgcctctcttgtgtgcaacgtcggccacgcaacccataggactcagcgaccaacagttggagactag

SEQ ID NO: 26055 - DNA, 1041 bp, Homo sapiens
  SIMILAR (91)..(456): 981254mologous to Escherichia coli Membrane-associated ATP- hydrolase amsA,accession number D90735,Smith-Waterman Score=615.
atgcagcagttacagaacattattgaaaccgcttttgaacgccgtgccgagatcacgccagccaatgcagacaccgttacccgcgaagcggtaaatcaggcagatactctggtccaggttgagcaaaaacagggcaacgccattctcagcggcctgagcgatatgatccctaactcatcgcccgagtctgcaccggagatccaactgctgcaatcgcgcatgattctcggtaaaaccattgctgaactgaatctgcgcgacatagttgagcagaagtattttccgattgtgggtcgcggctgggcgagattaaccaaagaaaaaccaggtgagctggcgatcagctggatgcatattccacaactgaatggtcaggatcagcaactgacactcacggttggggaaaacggccactatacactggaaggtgaagagttcaccgtcaatggtatggttttaaagggatccccacacggctttgacgctggcgttcgacttagttgcatggtcgaaaaagatatgatcagcgtggctgatcgcggcaaacctttccactggcaatttgcaaaggagctggaaattgctgtcgcaggaaatatcattctggatgatgttgatgctgaactggaggccgttatgatgggtgctggtatcgggtatatgctctatgaacagatcaaggagtaccttgatactggtcgtttagaatgtgtactgtcagactggagcacagagcgtcccggcttccagatatattatccaaaccgccagtatatgtcatgcggcttgcgcgcatttctcgattataggatccccggcggctgggcgcactatgtgggtcaagaaaaactgcgatcgcataccggctggcagtcgctggcgttcggccttgactggcaacgtccggcgcgttacatgaacaggacttcttatttttataaccactccagccagtggcgttatgaaaccgtcacggcggaagagtgtgctgacaccgatggcggacaaattccgctataccggacactcgatcgactttaa

SEQ ID NO: 26056 - DNA, 2583 bp, Homo sapiens
  SIMILAR (1717)..(2568): 991254mologous to Escherichia coli yehL,accession number U00007,Smith-Waterman Score=1420.
atggtgcggttatgcatccggttgcccatacgggtgtacgcaaaagtggtggataaaaacgcattaagtctgtggatgcgagaacgtagcgatctttgggtgcagccaaaagttgatggcgttgcggtaaccctggtttatcgggacgggaaactgaacaaagcaatcagtcgcggtaatggcctgaaaggcgaggactggacgcagaaagttagcttaatttccgctgtgccgcaaaccgttagcgggcctttagccaacagtacgcttcagggggaaatatttctccagcgcgaggggcatatccaacaacaaatggggggaataaatgcccgcgcaaaagttgctggcttgatgatgcgccaggacgatagcgacacgctgaattctctgggcgtttttgtctgggcatggccggatggaccgcagttaatgtctgatcgtttaaaagagctggctaccgcaggttttactctaacgcagacgtatacccgtgcggtgaaaaatgctgatgaagttgcgcgcgtacgcaatgagtggtggaaagcggaattacccttcgtcaccgatggcgtagttgtacgagcggcgaaagagcccagaatcccgccattggctaccgggccaggcagagtggctggtggcctggaaatatcaacctgtagctcaggttgccgaagtgaaggcaatgagcccggtaaaatatcggtggttgcgtcactcgcacctgtcatgctggatgataaaaaagtccagcgggtgaatattggttccgtcaggcgctggcaggagtgggatattgcgcctggtgatcagattctcgtcagccttgccggtcagggtattcctcgcattgatgatgtgtgtccctcggatccggcaatcttatctgatatagtaccgtcatgggaacaacacagtggtaaaaaagcgggcggtctcgtcccgtatgatgaaaaatcagggaagaaagggtcagaaaccggctacttcgacaaagacgaagcacgtttccagaaagaaggcttccgcgttgtgccaccagcggcgctacgtcagggtgcgtttattgcccgtaacaccgagctgaggccgtcttacgtcaacatcggcgcatatgttgatgaaggcaccatggttgatacctgggcgaccgtcggttcttgtgcgcagattggtaaaaacgtccacctttccgctggcgtgggcatcggcggcgtgctggaaccgctgcaggctaacccaaccatcattgaagataattgcttcatcggcgcgcgctctgaagtggttgaaggggtgattgtcgaagaaggttccgtcatttccatgggcgtatacattggtcagagcacccgtatttacgaccgtgaaaccggcgaaatccactacggtcgcgttccggcgggaaagttgacgcgaaaactcgcggcaaagtcggcattaacgaactgctgcgtaccatcgactaaaagtatgcacacgggcagcacgacgctgcccgatttttttgcagggatgagcgatgatttcacgccgccgatttttgcaggctactgccgcgacgatagccacgagctcaggtttcggttatatgcattactcctgatttctgacgcgattgctcttggcatagaaccaaagcccgatttgatattactgggcggcgattacgtattatttgatatgtcgctgaatttttcggcgtttagtgacaattatcatctgcagcgtccgcctgctgttgtgttatacgccgatgaactggcaaaattaaaacaaaatgataacgcaccttgcccgcccggttggcagttaagtttgcctgcggcccgtgcttttatccttggcgacgaagcgcaaaatatcagccgtaaagtggtgattagcccctccgctgtcgaacgtatgttagtcactcttgctaccggccgcggtttgatgttggtgggggaaccgggtaccgcaaaatctcttctttctgaattactggcaaccgctattagcggcgatgccgggttaaccatccagggcggggcatctaccaccgaagatcaaatcaagtatggctggaactacgccctgcttatcaatcatggtccgtcaacggaagcgctggtccctgccccgctttatcagggaatgcgcgacggcaaaatcgtccgtttcgaagagataacgcgtacaccgctggaagtgcaggactgtctgttaggtatgctttctgacagggtgatgacggggccggaactcactggtgaagccagtcagctctatgcgcgagaaggctttaatattattgccactgccaatacccgcgatcgcggcgtcaatgaaatgagtgctgcgctaaagcgtcgcttcgattttgaaacggtttttccgattatggatttcgcccaggagttggaactggtcgccagtgcttcggcgcgtttgctggcccatagcggtattccgcataaagtgcctgacgcggtactggaattactggtccgcaccttccgcgatctgcgtgccaacggcgaaaagaaaacgtcaatggatacactgacagcgattatgtcaccgctgaagccgtga

SEQ ID NO: 26057 - DNA, 2964 bp, Homo sapiens
  SIMILAR (2218)..(2730): 991254mologous to Escherichia coli BasR,accession number D14055,Smith-Waterman Score=877.
atggctagcggtcgacttaacgcgttagctccggaagccacgcctcaagggcacaacctccaagtcgacatcgtttacggcgtggactaccaggcgtcagtcttcgtccagggggccgccttcgccaccggtattcctccagatctctacgcatttcaccgctacacctggaattctacccccctctacgagactcaagcttgccagtatcagatgcagttcccagtaattccgattaacgcttgcaccctccgtattaccgcggctggattttcgaagaagttccggtcatttccatgggcgtatacaatggtcagagcacccgtatttacgaccgtgaaccggcgaaatccactacggtcgcgttccggcggggtctgtggttgtttcagaaagttgacgcgaaaactcgcggcaaagtcggcattaacgaactgctgcgtaccatcgactaaaagtatgcacacgggcagcacgacgctgcccgatttttttgcagggatgagcgatgatttcacgccgccgatttttgcaggctactgccgcgacgatagccacgagctcaggtttcggttatatgcattactcctgatttctgacgcgattgctcttggcatagaacaaaagcccgatttgatattactgggcggcgattacgtattatttgatatgtcgctgaatttttcggcgtttagtgacgtactctccccccttgccgaatgtgcgccgacgtttgcctgcttcggcaaccacgatcgccctggcagaattgcggcagcaagtattggaccgctcaacaataccgtcaggaagaaagccagcaccagaagctccgattcgattcagggagttaaacgcccgcagtggcgatcccaggtgcatgacagaggcaataaacccgacgcccatcaacagccagaggaaaaacatgccacggacaatacgctgacggtctgcgtcatttttggcggcgaaccagccaattccgctaacaatcagcgcgcctactacgcattgacccaatacggtgggtattacacgggcagttttcaaccagggttccagattcgggaacgaatttttcccagaacggtgagccgatgcgatcttcgaacaggatccgaatgcacgcgttgcttgcgaaacctacgtaatttcggtgatgaaaaagatatcgagcttcaagaaactgaatgcgccgtcatcagagcattggtgcaggtatcgcactggcaatccactctggccgctgcgggccaggtactgaccatcatcgttcgtactattaccgttgctttccagcacgctgcggataaggctgctgataacggcaacctgacagcgatttcctggatccacgtttcttctctgttcctgcaagcaatgcgtgtggctattccggccgtcatcgttgcgctgtctgttggtaccagcgaagtacagaacatgctgaatgcgattccggaagtggtgaccaatggtctgaatatcgccggtggcatgatcgtggtggttggttatgcgatggttatcaacatgatgcgtgctggctacctgatgccgttcttctacctcggcttcgtaaccgcagcattcaccaactttaacctggttgctctgggtgtgattggtactgttatggcagtgctctacatccaacttagcccgaaatacaaccgcgtagcggtgcgcctgctcaggcagctggtgagcgaaatggttgatacaactcaaactaccaccgagaaaaaactcactcaaagtgatattcgtggcgtcttcctgcgttctaacctcttccagggttcatggaacttcgaacgtatgcaggcactgggtttctgcttctctatggtaccggcaattcgtcgcctctaccctgagaacaacgaagctcgtaaacaagctattcgccgtcacctggagttctttaacacccagccgttcgtggctgcgccgattctcggcgtaaccctggcgctggaagaacagcgtgctaatggcgcagagatcgacgacggtgctatcaacggtatcaaagtcggtttgatggggccactggctggtgtaggcgatccgatcttctggggaaccgtacgtccggtatttgcagctcttggtgccggtatcgcgatgagcggcagcctgttaagtccgctgctgttcttcatcctgtttaacctggtgcgtctggcaacccgttactacggcgtacgcctggtggtactggatttagggttacccgacgaagatggactgcattttctcgcccgtatccggcagaaaaaatataccctgccggtactgatcctcaccgctcgcgatacgctgaccgacaaaatcgccgggctggatgtcggtgccgacgactatctggtgaagccttttgcgctggaagagttacatgcccgtatccgcgccctgctacgacgccataataatcagggcgaaagtgagctgattgttggcaatctgacgctgaacatgggtcgccgtcaggtatggatgggcggtgaagagttgattctgacgcccaaagaatatgctctgctgtcacggttaatgctcaaagcaggcagtccggtgcatcgggaaattctctacaacgacatctataactgggacaatgaaccctcgaccaacaccctggaagtgcatatccacaatctgcgcgacaaagtgggcaaagcccgtatccgcaccgtgcgcggctttggctatatgctgctgatcagcgtcttctggctatggcatgaaagtaccgagcagattcagctgtttgagcaggcgctacgcgacaatcgcaacaacgatcgccacatcatgcgtgagatccgcgaagcggtcgccagcctgattgtccccggcgtctttatggtcagcctgacgctatttatctgctatcaggcgcggcgtacgcaccgcgggattatcatcttcaacgatagtcagttcaaccgttga

SEQ ID NO: 26058 - DNA, 1262 bp, Homo sapiens
  SIMILAR (215)..(610): 921254mologous to Escherichia coli 'tetrahydrodipicolinate N- succinyltransferase',accession number D26562,Smith-Waterman Score= 595.
actgagctcgactctagaggatctgggaatttcgcttcatggtgcccgaattacaaccattggcgagcgagtagaagatttattcataattgccaccgctgaccggcgtgcgcttaataacgagttgcagcaggaagtgcatcagcggttgacagaggccctcaatccaaacgataaagggtgatgtgtttactgatatgaaaagagtttaacaatgcagcagttacagaacattattgaaaccgcttttgaacgccgtgccgagatcacgccagccaatgcagacaccgttacccgcgaagcggtaaatcaggtgatcgccctgctggattccggcgcgctgcgtgtagcggaaaaaattgacggtcagtgggtgacgcatcagtggttgaaaaaagcggtgctgctctctttccgtattaatgataatcaggtgatcgaaggggcagaaagccgctacttcgacaaagtgccgatgaaattcgccgactacgacgaagcacgtttccagaaagaaggcttccgcgttggtgccaccagcggcgggtacgtcagggtgccgtttattgcccgtaacaccgtgctgatgccgtcttacgtcaacatcggcggcatatgttgatgaaggcaccatggttgatacctgggcgacccgtcggttcttgtgcgcagattggtaaaaacgtccacctttccggtggcgtgggcatcggcggcgtgctggaaccgctgcaggctaacccaaccatcattgaagataattgcttcatcggcgcgcgctctgaagtggttgaaggggtgattgtcgaagaaggttccgtcatttccatgggcgtatacattggtcagagcacccgtatttacgaccgtgaaaccggcgaaatccactacggtcgcgttccggcggggtctgtggttgtttcaggtaatctgccgtcaaaagatggcaaatacagcctctactgtgcggttatcgttaagaaagttgacgcgaaaactcgcggcaaagtcggcattaacgaactgctgcgtaccatcgactaaaagtatgcacacgggcagcacgacgctgcccgatttttttgcagggatgagcgatgatttcacgccgccgatttttgcaggctactgccgcgacgatagccacgagctcaggtttcggttatatgcattactgtgagccaggctggtttgaattaatccgtcaccgcctcgccttttttaaagacaacgcagcaccattcaaaattctttttctggcc

SEQ ID NO: 26059 - DNA, 633 bp, Homo sapiens
  SIMILAR (594)..(632): 1001254mologous to Escherichia coli OrfA protein,accession number X55034,Smith-Waterman Score=60.
atgggcaagaaaaactggaacactcttggagagggagtctgcagctgcaggatgtttttgccagatgcaaacacattggccaagaacagtgcttgctctgcagccagcgctgtccaagcagcagaccgcccagacagccaggaagcagaggccctggagcacatggcccacagtcgctgtgcactcaggtgtcagacactcgtcattgtccacgtgtctctcatgagagtcagctggtatcacagcgtcatcatcgtggtgcctctgactgaaccactgctagaaagcttggttcgatgtcggctgcgttcgcgcagagacgacgttccggtcgctcctgctgtgtctgccacccctcgcagagagcctttcagttctgcgtattgcagagaggacgaatgcatgatcagcagagtgacagaagctctaagcaaagttaaaggatcgatgggaagccacgagcgccatgcattgcctggtgttatcggtgacgatcttttgcgatttgggaagctgccactctgcctgttcatttgcattattttgacggcggtgactgtggtaaccacggcgcaccatacccgtttactgacgctcagcgcgaacaactggtgctggagcgagatgctttag

SEQ ID NO: 26060 - DNA, 2577 bp, Homo sapiens
  SIMILAR (1897)..(2574): 961254mologous to Escherichia coli K12 putative oxidoreductase,accession number AE000355,Smith-Waterman Score=1074.
atgtgggcttttcgcggcaaacgccccgtcacgttgaaaatcctacacgtaccaattacgaatctacgaaaaaatattacatcgactcggggcctcaccaaggagtcttcccaaggaaagctggttcgcgcccaggaagaatatactcccgctcgggaaatcgcaaagatgggctggcaatccttgccggcccggcggtattgtctttgctggcgaaagataagacgttacatcaccttacgtctaaacatcgcgtacgccggggggtacaaggcaccagtggaagatatagccctttggatggagaccgatggggcatgtgaccatgtcgattttacctggaacatcccctcaaagtgccagggccctatggacatagtgtcccgcccagtgttttggcatgcccatggcattgtacttttcgcgggtgcccgaaatttgaaccccacgctaacgcgaataccgccctatttgtggcttttgaccctacgcaccggttacgcggctgcaggcatgcaagctttggcgctcgactctagaggatcccccgatgctgtcgtgctttccactcagcactctgaagagatcgaccagaaatcgctgcaagaagcggtaatggaagagatcatcaagccaattctgcccgctgaatggctgacttctgccaccaaattcttcatcaacccgaccggtcgtttcgttatcggtggcccaatgggtgactgcggtctgactggtcgtaaaattatcgttgatacctacggcggcatggcgcgtcacggtggcggtgcattctctggtaaagatccatcaaaagtggaccgttccgcagcctacgcagcacgttatgtcgcgaaaaacatcgttgctgctggcctggccgatcgttgtgaaattcaggtttcctacgcaatcggcgtggctgaaccgacctccatcatggtagaaactttcggtactgagaaagtgccttctgaacaactgaccctgctggtacgtgagttcttcgacctgcgcccatacggtctgattcagatgctggatctgctgcacccgatctacaaagaaaccgcagcatacgctgctgaagcgcggactgaaggctgttcgctggatgtaccggagaatatcgttcatagcggtaaaacctggtttgtggaagcgaaactgaaacagggcattgagagcgcgacccagaagaaaatcgtcaagatgatcaaagacagcaaactgaaagtgcaggcgcaaattcagggcgatgaaatccgcgtaacgggcaaatctcgtgatgatttgcaggctgtcatggcgatggtacgtggtggcgatctcgtttctagcaaacgcacttttaacgcctcgtatgcggcaatgttcgccgggatttcaatgcgcaaactgctgacatacggcggttctttcatggtactggcgactgtcagccacactgcggccagcattgcgccagcgagaaatacccctgaccccgcccagcgaaccggcaatcgccacgccaagaaactggctggtggagtaaaacccatcgccgtactttgtaaactgctggcgatctttatgataagtgaggcagaggttcctcaattaacgcccaagaaagtggagcgaaacattgccgatggttggcgttccaacaattccgaccaataccaggcaaacagatggcattggcaatacgtaaagaaggcacaccaggtatgtcgaaatccggggctacgagatgttgctccaggcgtacctacaggttcctcatcgcaggccaagtggtgtgggcgtggttggacattcaacgggatcagatgtgtaggccacgggtcaactttcgcgtaccagcccattgggggtggcgctcgttgttcgaccaggtcgccttctcaaggtctcgatggcaaaccaggtgcccttgacataccaggcaaagcggtcacgctaatcgacaacgctgccagtattctggcgtcgttaatgccaccggaagtaagcagccgcttgcagcatcggttgacggagatgggcgttcatctgctgttgaaatctcagttacaggggctggaaaaaacggattctggcattcaggcaacgctggaccgccagcgcaatatcgaagtggatgcggtaattgccgccaccggactgcgcccggaaaccgccctggcacgacgcgccgggctgacgattaatcgcggcgtttgcgtcgatagttatctgcaaaccagtaataccgatatttacgcgctgggcgattgcgcggaaattaacggtcaggtattgccgttcctccagccgattcaacttagcgcgatggtgctggcaaaaaatcttctcggcaataacacgccgctgaaactcccggcgatgctggtgaaaatcaaaacgccggaattaccgctgcatctggcaggcgaaacccagcgtcaggatttacgctggcaaattaataccgaacgccagggaatggtggcgcgcggcgttgacgatgctgaccagcttcgcgcctttgtggtcagtgaggatcggatgaaagaggcatttggattgttgaaaacattgccgatgtag

SEQ ID NO: 26061 - DNA, 3774 bp, Homo sapiens
  SIMILAR (1636)..(2112): 1001254mologous to Escherichia coli Spermidine/putrescine transport protein A,accession number D90748,Smith-Waterman Score= 834.
atgtggtccttcgaattacggtttccccgcgcggtgaccgatgcggcaattgttggtcgtcatgtcggaaccacgttaatggtggcgcgttatgcggtcaacacattgaaagaagtggaaaccagtctgagccgctttgagcaaaacggtattccggtgaaaggggtgattctgaactccatcttccgccgcgccagcgcgtatcaggattatggctattacgaatacgaatatagtcggatgcgaaataacgacgcctgcattcgcaccgccccgccggataaggcgttcacgccgcatccggcaagcaaaccagctcataagccgggagaacaacctatgaaaaacaatccgctgatctcaatctatatgccgacctggaaccgacaacaactggcgattcgggcaataaaatcggttttgcgccaggactacagcaactgggagatgatcatcgtggatgattgctccacctcctgggaacaactgcaacatgcgttcaccgaatacgtgcgcaacaaccgtcttccggagcctgtcatacgcgtaaaacagccagcgctggcgcgatttagccccgacgtatccccactgttcgtccatttccgcgcagacgatgacgtcactgcccggctgtatgcgcgagaagcgatcgaccgtctgcgtgacacctcttcttctcaccagcgtatttccgtggtggaagtgatgggccgttattgtggagatctgacgttggctgcggccattgccggtggctgtgaattcgttgtggttccggaagttgaattcagccgtgaagacctggtaaacgaaatcaaagcgggtatcgcgaaaggtaaaaaacacgcgatcgtggcgattaccgaacatatgtgtgatgttgacgaactggcgcatttcatcgagaaagaaaccggtcgtgaaacccgcgcaactgtgctgggccacatccagcgcggtggttctccggtgccttacgaccgtattctggcttcccgtatgggcgcttacgctatcgatctgctgctggcaggttacggcggtcgttgtgtaggtatccagaacgaacagctggttcaccacgacatcatcgacgctatcgaaaacatgaagcgtccgttcaaagaagtgataaaggaatccaaagttgaagagcccaggaaacgggaaactgtatccataatgctgaccaaatatgcagcctataacacctttcaccactgtgaacagtgccgccagtacatggacttcacctctgcctcccagaacgaactggcgctgcacagcaagaaagagatcgacgagtatttcgcgcatgtctggcaaaccatgcaggcatgtatcgatcgcgggatgaacaccgaaggtgtactgccaggcccgctgcgcgtgccacgtcgtgcgtctgccctgcgccggatgctggtttccagcgataaactgtctaacgatccgatgaatgtcattgactgggtaaacatgtttgcgctggcagttaacgaagaaaacgccgccggtggtcgtgtggtaactgcgccaaccaacggtgcctgcggtatcgttccggcagtgctggcttactatgaccactttattgaatcgaactgctgggcggtagcccggaacagggatgtgatgcgcgatggtcgcattgagcaagacggcacgccgcgtgaaatctacgaagagccgaaaaacctgtttgttgccggcttcattggcgaaatcaatatgtttaacgccactgtcatcgaacgtctagacgagcagcgcgtacgcgccaacgttgaaggccgcgaatgtaatatctacgttaacttcgccgttgaaccggggcaaaaactgcatgttctgctgcgcccggaagacttacgtgttgaagagattaacgacgacaaccacgctgaagggctgattggttacgttcgcgagcgtaactacaaaggcatgacgctggagtcggttgttgaactggaaaatggcaagatggtgatggtcagcgaattcttcaatgaagacgatcctgactttgaccactctctcgaccaaaaaatggccattaattgggtagaaagctgggaggtcgtactggctgatgaagaacacaaaatatgttggacttttatcagagctcctatgaattttcacgtttggtttcgatctcaaaaacctggtttcccaatggttcaacagagccggatagttcccgctttcgtcacacaacaaatggtgtttccagactggaaggtcagcttccttttcaccttcacgcaccctggtcatttcaaacttgttcgccggcctgaccagatccacatcctgcggttcggtactcatttcgacgatttgacgataggcctctttacgctcatctttcaacgacttgatttgcggtgtgtactcggccagccacgccttcgccagtctatcggcctcgccatcgaagtaatcctgcacctccatcaccagccccatgccagcaacggtaacacgagcctccatgattgcttccagatattcctctgcatcctcttctcgatccgcaaccttatcggccagatattcgacatagctgtccctcctgttcagctactgacggggtggtgcgtaacggcaaaagcactgccggacatcagcgctatctctgctctcactgccgtaaacatggcaactgcagttcactttacaccgcttctcaaccggaacacttggattcagtgtggttcactgggccggcccatgggtaccctcaaaaacccggcggtagaagaaaataaaaaggcacagcttgagcgtgataaacagcttagcgaacagcaaaaacaagcggcgttggcgaaagaatataaagctcaggtgaagcagcttattgaaatgaaccgaatcaccattgccaatggcgatattggttttaacttcactgacggcaatctgattaagaagatttttgtcgataagctcacacaggcgcagttgattaatggtcgtctggcgattgcccgcttgttggtcgataacaatagcgaaggtgaatacgccattattcccgccagcgttgccgataaaattgctcagcgcgatgccagcagtatagtgttgcacagcgcgctcagcgccgaagagcaggatgaagacgacccgtatgccgacttcaaagtgcctgatgatttgatgtggcctacggtttatgggcgaagtgtagaccggataaggcgttcacgccgcatccggcagtcgtgcgccatgcctgatgcgaagctttgcgcgtcttatcaggcctacggcttacgggcgaagttttattggcgtggtagcatatgttgccgagcagtgctcgagcgtaaccgcgaacagccgatgacccgcaccaaagaactggcggaagtcgtggctgctgcaacgccggtgaaagataagtttaaacatcccgcgacccgtaccttccaggcggtgcgcatttgggtaaacagtgaactggaggagatagagcaggcgctaaaaagctcgctcaacgtgctggccccgggtgggcggctttcgatcatcagcttccactcgctggaagaccgtattgtgaaacgttttatgcgtgaaaacagccgcggtccgcaagttccggcagggttaccgatgactgaagagcagctcaaaaaactgggtggccgtcagctgcgagcactaggcaagttaatgccgggcgaagaagaggtggctgagaaccctcgtgcccgtagttcagttctgcgtattgcagagaggacgaatgcatga

SEQ ID NO: 26062 - DNA, 1275 bp, Homo sapiens
  SIMILAR (151)..(1272): 991254mologous to Escherichia coli K12 putative oxidoreductase,accession number AE000355,Smith-Waterman Score=1865.
atggaggcaggcaagttccaagatctgcagggtgagtctgcacgctacagacctaggagagccaaagatgcagttccaatcagaaggcaggaaaaaagccgatgtcctagttcaaagtgtaagccattacgcctggccagttatgtgatcggcattgtgatcatcggttcgggcttcgccgcccgccaactggtgaaaaatattcgcaaacaggacgccactattccattaaccctgattgccgccgacagcatggatgagtacaacaaacctgacctcagccatgttatcagtcaggggcaacgtgccgatgaccttacccgccagacggcgggtgaatttgccgagcagtttaatctgcacctgtttccacaaacctgcgtgacggatatcgatgccgaagcccgtgtggtgaaaagccagaataatcagtggcaattcgacaagctagtactggcaaccggtgccagtgcctttgtcccgcctgtgcctgggcgtgagttaatgctgacgttaaatagtcagcaagagtatcgcgcctgtgaaacgcaactgcgggatgcccgacgcgtgttgattgttggcggtggtttgattggtagcgaactggcgatggatttttgtcgtgcaggcaaagcggtcacgctaatcgacaacgctgccagtattctggcgtcgttaatgccacccgaagtaagcagccgcttgcagcatcggttgacggagatgggcgttcatctgctgttgaaatctcagttacaggggctggaaaaaacggattctggcattcaggcaacgctggaccgccagcgcaatatcgaagtggatgcggtaattgccgccaccggactgcgcccggaaaccgccctggcacgacgcgccgggctgacgattaatcgcggcgtttgcgtcgatagttatctgcaaaccagtaataccgatatttacgcgctgggcgattgcgcggaaattaacggtcaggtattgccgttcctccagccgattcaacttagcgcgatggtgctggcaaaaaatcttctcggcaataacacgccgctgaaactcccggcgatgctggtgaaaatcaaaacgccggaattaccgctgcatctggcaggcgaaacccagcgtcaggatttacgctggcaaattaataccgaacgccagggaatggtggcgcgcggcgttgacgatgctgaccagcttcgcgcctttgtggtcagtgaggatcggatgaaagaggcatttggattgttgaaaacattgccgatgtag

SEQ ID NO: 26063 - DNA, 2082 bp, Homo sapiens
  SIMILAR (1438)..(2073): 981254mologous to Escherichia coli K12 putative LACI-type transcriptional regulator,accession number AE000494,Smith-Waterman Score=1063.
atgaattcaaaaaagctttgttgcatatgtgtgttattctcgctgcttgcaggatgtgcctctgaatcttctattgatgaaaagaagaaaaaagctcaagtcacacaaagtaatattaataaaaacactccccagcaactgacagacaaagatttattcggtaatgaaaccactctggccgtatccgaagaggatattcaagctgcgcttgatggagatgagttccgcgttccccttaattctcctgtaatacttgttcaatccggcaaccgcgcaccggaaaccattatgcaggaggagatgcgaaaatattatactgtttccacattctctggtatcccggacaggcaaaaacctctgacttgttacaaaaaccaagataaaaatgagaaccaggatgttgccagtgctgagaatatgaactggattcccgcactgcgttttgtggcttccaaaagacatcataaaacgaatattgttttccccggatatgttgccgaccggaaaaatttgactcttggcccgaaatcaacagggctggaaaaaacggattctggcattcaggcaacgctggaccgccagcgcaatatcgaagtggatgcggtaattgccgccaccggactgcgcccggaaaccgccctggcacgacgcgccgggctgacgattaatcgcggcgtttgcgtcgatagttatctgcaaaccagtaataccgatatttacgcgctgggcgattgcgcggaaattaacggtcaggtattgccgttcctccagccgattcaacttagcgcgatggtgctggcaaaaaatcttctcggcaataacacgccgctgaaactcccggcgatgctggtgaaaatcaaaacgccggaattaccgctgcatctggcaggcgaaacccagcgtcaggatttacgctggcaaattaataccgaacgccagggaatggtggcgcgcggcgttgacgatgctgaccagcttcgcgcctttgtggtcagtgaggatcggatgaaagaagcatttggattgttgaaaacatttgccgatgtaagtgggctactgtgcctaaaatgtcggatgcgacgctggcgcgtcttatccgacctacaaagttatgaaaattcgatgaataggaaagtggcaagggccggcggaattaaacggctggcggaaccaaacttggatggccgaaggcggaatctggccgtaaacccggccggggtttacaggcaaaaggtggaatcaccgggcaggataccggccggatacatggacgactacgcccggacaacctgcaaaccggcgcaatggccggatggaacgcaaaggtgggatcggattcagggtggcgtccgccaaaaccaatgggcgaaaagtgaagccgaaaagcgcggaatcacgttgaaaattgccgatggtcagcaaaagcaggaaaaccagattaaagccggttgggaaccggtattaaaagaggcgaaagatgccgaaatcccggtattcttgctcgatcgttccattgatgtgaaagacaaatctctctatatgaccaccgtcactgccgacaacatcctcgaaggcaagttgattggtgactggctggtaaaagaagtgaatggcaaaccatgcaacgtggtggagctgcagggcaccgttggggccagcgtcgccattgaccgtaagaaaggctttgccgaagccattaagaatgcgccaaatatcaaaatcatccgctcgcagtcaggtgacttcacccgcagtaaaggcaaagaagtcatggagagctttatcaaagcggaaaacaacggcaaaaacatctgcatggtttacgcccataacgacgacatggtgattggtgcaattcaggcaattaaagaagcgggcctgaaaccgggcaaagatatcctcacgggttccattgacggtgtaccggacatctacaaagcgatgatggatggcgaagcgaacgccagtgttgaactgacgccgaatatggcaggtcccgccttcgacgcgctggagaaatacaaaaaagacggcaccatgcctgaaaagctgacgttaaccaaatcattcttaataagataa

SEQ ID NO: 26064 - DNA, 2658 bp, Homo sapiens
  SIMILAR (1740)..(940): 1001254mologous to Escherichia coli K12 putative oxidoreductase,accession number AE000355,Smith-Waterman Score=1343.
ttaaaataggggtttacaccggttaaaggtagttcccggataggtttcggcaatcgtggggtcgttaaagttggtgttgacgaagtattcaaaagtgtggcggcacctttctggttcaataatcgcttgccggatatgaataatttcggtagcgcgttcgctaaagtagtgaatatctagaatctcttttgtttcccgatggaataaaattttcagcgtgcccacgttcatgccgacgatttgtgcgcgtgtcagatgtttaaattgggcgtggcccacttcatatggcactttcattgcggtcagctgctgttcggttttgcccatagagttgatttccgggatggtgtaaataccggtagggatatcttcaatcagatgtgcgagtgttcgccttttaccagcgcggctgtacggatgcgcccactcggcgaccagttcgctctgaatgtgcggcgcgttcaccagcgggttatcttccagcggccagacaccggctttcacctggtcaatttctgcgcggatagccagcatcgcgtcgataaagcgatccagttccactttgctttcagattcagtcggttcaaccatcagcgtacccgccaccgggaacgacatcgtcggcgcgtggaaaccgtagtcgatcaggcgcttggcaatatccagctcgctgatgccggtttcttctttcagcgggcgaatatcgagaatacattcgtgcgccacgcgaccgtcgcgaccggtatacagcaccgggaaggcatcctgcaggcggctggcaatatagttggcgttgaggattgccacctggcttgcttttttcagcccttctgcgcccatcatgcggatgtacatccagctgattggcaggatagaggcgctaccgaacggtgccgcagaaaccgcgcccggaccaccaccgccgtgcggaatgcagatcaccagcatcgccgggagtttcagcggcgtgttattgccgagaagattttttgccagcaccatcgcgctaagttgaatcggctggaggaacggcaatacctgaccgttaatttccgcgcaatcgcccagcgcgtaaatatcggtattactggtttgcagataactatcgacgcaaacgccgcgattaatcgtcagcccggcgcgtcgtgccagggcggtttccgggcgcagtccggtggcggcaattaccgcatccacttcgatattgcgctggcggtccagcgttgcctgaatgccagaatccgttttttccagcccctgtaactgagatttcaacagcagatgaacgcccatctccgtcaaccgatgctgcaagcggctgcttacttccggtggcattaacgacgccagaatactggcagcgttgtcgattagcgtgaccgctttgcctgcacgacaaaaatccatcgccagttcgctaccaatcaaaccaccgccaacaatcaacacgcgtcgggcatcccgcagttgcgtttcacaggcgcgatactcttgctgactatttaacgtcagcattaactcacgcccaggcacaggcgggacaaaggcactggcaccggttgccagtactagcttgtcgtattgccactgattattctggcttttcaccacacgggcttcggcatcgatatccgtcacccaggtttgtggaaacaggtgcagattaaactgctcggcaaattcacccgccgtctggcgggtaaggtcatcggcacgttgcccctgactgataacatggctgcgctccctcgggatgctggcggtagacaaccaggcgcgcgtctgacacggaccaacggtagcaagtcttgctccaacatttggtcgcggtgcgatgaccaaccagtcgtgatggtgatgggcggtaacgctgctgaagcgcatcccgtcggtttccgctgggcgatggaagcgaaaaacaacaacgacgcaaccttgatcgttgtcgatccccgttttacgcgtaccgcttctgtggcggatatttacgcgcctattcgttccggtacggacattacgttcctgtctggcgttttgcgctacctgatcgaaaacaacaaaatcaacgccgaatacgttaagcattacaccaacgccagcctgctggtgcgtgatgattttgctttcgaagacggtctgttcagcggctacgacgctgaaaaacgtcaatacgataaatcgtcctggaactatcagctcgatgaaaacggctatgcgaaacgcgatgaaacactgactcatccgcgctgtgtgtggaacctgctgaaagagcacgtttcccgctacacgccggacgtcgttgaaaacatctgcgtacgccaaaagccgacttcgttggtaaacttgagtaatgcgttgttcgatgcccgtgtatgctcgtattacttgcatgtgctcgataaagtacagggcgcggcgcattttatggtgagtgatgacgaagcacggcagattatgcgtgagttgctgacactggtgtcgggatatctggtgccgaaactggcgcgagaaattggcggcgaacccagcaaaacgccgctggatctccacgtacgcccgcagtaagggctttgaaaattcttcgttgccaggcaccagcagtactgaaggtccaccctggaatgctccaggcttggtgggggaagggcaatccaccat

SEQ ID NO: 26065 - DNA, 1005 bp, Homo sapiens
  SIMILAR (1)..(438): 1001254mologous to Escherichia coli low affinity tryptophan permease,accession number L10328,Smith-Waterman Score=751.
atggggaatattccgcgagaaagctttaaggcgattatctcctcaggcggcaacgttgattcgctggtgaaatcgttcctcggcaccaaacagcacggcattatcgagttttgcctgctggtgttctctaacttagctgttgccagttcgttctttggtgtcacgctggggttgttcgattatctggcggacctgtttaagattgataactcccacggcgggcgtttcaaaaccgtgctgttaaccttcctgccacctgcgttgttgtatctgatcttcccgaacggctttatttacgggatcggcggtgccgggctgtgcgccaccatctgggcggtcattattcccgcagtgcttgcaatcaaagctcgcaagaagtttcccaatcagatgttcacggtctggggcggcaatcttattccggcgattgtcattctctcctggtaccgagctgattctggaagaccgtatgtgaaacgttttatgcgtgaaaacagccgcggtccgcaagttccggcagggttaccgatgactgaagagcagctcaaaaaactgggtggccgtcagctgcgagcactaggcaagttaatgccgggcgaagaagagttcagttctgcgtattgcagagaggacgaatgcatgatcagcagagtgacagaagctctaagcaaagttaaaggatcgatgggaagccacgagcgccatgcattgcctggtgttatcggtgacgatcttttgcgatttgggaagctgccactctgcctgttcatttgcattattttgacggcggtgactgtggtaaccacggcgcaccatacccgtttactgaccgctcagcgcgaacaactggtgctggagcgagatgctttagacattgaatggcgcaacctgatccttgaagagaatgcgctcggcgaccatagccgggtggaaaggatcgccacggaaaagctgcaaatgcagcatgttgatccgtcacaagaaaatatcgtagtgcaaaaataa

SEQ ID NO: 26066 - DNA, 1725 bp, Homo sapiens
  SIMILAR (1151)..(1195): 801254mologous to Escherichia coli K12 putative oxidoreductase,accession number AE000355,Smith-Waterman Score=58.
atggggcggacaacacgcagggacgcggcgcaagcgcccggcactcgaagatctggtgactctagaggatacccgtatgttaccaggccagagggcacagatgccgacgacccgcagaaggacaaagcagcgctgggttctcatcgggtagcagggcagcccgagctcttcagcatcgacgagctcacacggagagatccgcacagtgcaagtggggcttggaccgcgagatacaccgtgagcaccatcgctgcattcgcgctagtaatagccaatcgtctctataccatcgaagaagaggccaccacgccgagcggatgtggacccgcgagttcctctactagctcacgtggtgtggatatgtgtcttcggaacttgtgtatgcatggttatgacgccactattccattaaccctgattgccgccgacagcatggatgagtacaacaaacctgacctcagccatgttatcagtcaggggcaacgtgccgatgaccttacccgccagacggcgggtgaatttgccgagcagtttaatctgcacctgtttccacaaacctgggtgacggatatcgatgccgaagcccgtgtggtgaaaagccagaataatcagtggcaatacgacaagctagtactggcaaccggtgccagtgcctttgtcccgcctgtgcctgggcgtgagttaatgctgacgttaaatagtcagcaagagtatcgcgcctgtgaaacgcaactgcgggatgcccgacgcgtgttgattgttggcggtggtttgattggtagcgaactggcgatggatttttgtcgtgcaggcaaagcggtcacgctaatcgacaacgctgccagtattctggcgtcgttaatgccaccggaagtaagcagccgcttgcagcatcggttgacggagatgggcgttcatctgctgttgaaatctcagttacaggggctggaaaaaacggattctggcattcaggcaacgctggaccgccagcgcaatatcgaagtggatgcggtaattgccgccaccggactgcgcccggaaaccgccctggcacgacgcgccgggctgacgattaatcgcggcgtttgcgtcgatagttatctgcaaaccagtaataccgatatttacgcgctgggcgattgcgcggaaattaacggtcagcgcgatggtgctggcaaaaaatcttctcggcaatacacgccgctgaactcccggcgatgcctggtgaaaatcaaacgccggaattaccgctgcatctggcaggcgaaaccagcgtcaggattacgctggcaaataatacgaagccaggaatggtggcgccgggcccttggtaacctgtgttctacttctgatgaatttgcctattctagcgcacaagcaacgcagaagagaaagaaaaaaaaacacaaaaagagagagggactgaacaaacacaaagaaaaaaagagaaaacagaaaggacagaaagatcagaaacacagggaaaagccacagcagccagacaaagaacaagagaacgggaaaaagagaaagaaagagcacaaagagaacaacgagcaaagcaggaaagtaaagagaaaaaaccaagaagagaccaagcgggcaacaaaaacaaagagaaataagaagcgaaacaaacaaaaacaagaagcaaaaacaaaaagaagcaacaataagacaatgcacattcatcgtagccccgtctgtggcctggacaggctctga

SEQ ID NO: 26067 - DNA, 3135 bp, Homo sapiens
  SIMILAR (727)..(1284): 901254mologous to Escherichia coli OrfB protein,accession number X55034,Smith-Waterman Score=840.
atggactacatggtaccagtgggaatggactggctgtgcagagagactgcaggcatgcgagtgtccatcaagaaagggtctgttgtttttcctcttaaccctgaattggtcatgaaagtagttaggcaaagatccacaattgtaaccccttctggcttcaaagccggagcttttaactttgaacgcttcaaggaagcatcaaatcagacactggggagcacatttctatattctctaagctgtcctaagcctaatcttggatcccagcctctggactttgataccaaaaaatcctatacgctaaaggtagaggcagccaatgtccatattgacccacgcttcagtggcagggggccctttaaagacacggcgacagtcaaaatcgtggttgaagatgctgatgagcctccggtcttctcttcaccgacttacctacttgaagttcatgaaaatgctgctctaaactccgtgattgggcaagtgactgctcgtgaccctgatatcacttccagtcctataagactctacagaatccccggggacgatgccaaatgcgttcaattcaaccgtgaaggcgtgaaagcactgaaagccaaaccggttgaaaaagccgcgccagcacccgctgccgcagcaccaaaagcggctccaactccggcaaaaccaatgggggaacagctagcactctacaggatggccgggtccaatgccgatcgaattcaaggtcgtatggacccaacccgtgggcagtcagccgctgaatggctacaaaccgcagaagaagccgatatcgcctgggtattgaaaacctatggtgaagagcgttttgccaaacgcattgcccgcgccattgtcgagcgtaaccgcgaacagccgatgacccgcaccaaagaactggcggaagtcgtggctgctgcaacgccggtgaaagataagtttaaacatcccgcgacccgtaccttccaggcggtgcgcatttgggtaaacagtgaactggagaagatagagcaggcgctaaaaagctcgctcaacgtgctggccccgggtgggcggctttcgatcatcagcttccactcgctggaagaccgtattgtgaaacgttttatgcgtgaaaacagccgcggtccgcaagttccggcagggttaccgatgactgaagagcagctcaaaaaactgggtggccgtcagctgcgagcactaggcaagttaatgccgggcgaagaagagttcagttctgcgtattgcagagaggacgaatgcatgatcagcagagtgacagaagctctaagcaaagttaaaggatcgatgggaagccacgagcgccatgcattgcctggtgttatcggtgacgatcttttgcgatttgggaagctgccactctgcctgttcatttgcattattttgacggcggtgactgtggtaaccacggcgcaccatacccgtttactgaccgctcagcgcgaacaactggtgctggagcgagatgctttagacattgaatggcgcaacctgatccttgaagagaatgcgctcggcgaccatagccggaaaccaaaacgtcaggaagaacatgccaactttatcagttggcgttttgcgttgttatgcggctgtattctcctggcgctggcttttctgctcggacgcgtagcgtggttacaagttatctccccggatatgctggtgaaagagggcgacatgcgttctcttcgcgttcagcaagtttccacctcccgcggcatgattactgaccgttctggtcgcccgttagcggtgagcgtgccggtaaaagcgatttgggctgacccgaaagaagtgcatgacgctggcggtatcagcgtcggtgaccgctggaaggcgctggctcgagtactactggtccggctgacggcaacgctggaccgccagcgcaatatcgaagtggatgcggtaattgccgccaccggactgcgcccggaaaccgccctggcacgacgcgccgggctgacgattaatcgcggcgtttgcgtcgatagttatctgcaaaccagtaataccgatatttacgcgctgggcgattgcgcggaaattaacggtcaggtattgccgttcctccagccgattcaacttagcgcgatggtgctggcaaaaaatcttctcggcaataacacgccgctgaaactcccggcgatgctggtgaaaatcaaaacgccggaattaccgctgcatctggcaggcgaaacccagcgtcaggatttacgctggcaaattaataccgaacgccagggaatggtggcgcgcggcgttgacgatgctgaccagcttcgcgcctttgtggtcagtgaggatcggatgaaagaggcatttggattgttgaaaacattgccgattcgcgcgaccagactcgatacgctgttggatccagcgtttttcttcggtgctggtaatgtgcatatactcggcaccaatcgggccgcagtaggtttgcttgagggcttccagcagctcgccgagtttcatgcgattatggatggcaccactcctcgcgtgctggagaacgccgaaggcgatcgcaccacgccttctatcattgcctatacccaggatggtgaaactctagttggtcagccggctaaacgtcaggcagtgacgaacccgcaaaacactctgtttgcgattaaacgcctgattggtcgccgcttccaggacgaagaagtacagcgtgatgtttccatcatgccgttcaaaattattgctgctgataacggcgacgcatgggtcgaagttaaaggccagaaaatggcaccgccgcagatttctgctgaagtgctgaaaaaaatgaagaaaaccgctgaagattacctgggtgaaccggtagctgtccctaccctcagtactcttgcttggaatgctgtgagagaagggggtctcattcccactaagtgtgagtacacttatgtccttgattgcagctggcagccatcctatgagaatgagcagaatctgatttacgataaaacagacactttgaatggcagaataaaggaaggaaaccaaatatttaaagacaccatagagcccatagatcaactaattgtaaagcctgaccattccagttatgagtcagtaagtcccctctatgatgaaatcagttag

SEQ ID NO: 26068 - DNA, 671 bp, Homo sapiens
  SIMILAR (432)..(385): 1001254mologous to Escherichia coli HisP-like nucleotide binding protein (phnL),accession number J05260,Smith-Waterman Score =74.
attctccagccgatcgccgccgtcgcgcacgtcgccaattccacggcatccagtacggtggtgatgccgctcgccaccatcagcgcgtctggctgctcatcgccgagtgggcaggccagtcaactttcgggcgcgggggaagaatttatccagattatcggtatgcagctcaatcagccccggcagcgccagccgccttcgccgtccatcgcctccggcaggcggctctggctttcgcaaaggcgcggatttcgccgttctgcacctccagcgaaccgcttaccactcgttttccagcaccagcttaacgttattgataatcatgaagaggctccattgggtgcaggcggtcggcgacgtcattacgtacagcttcgtcatggagatgcctacgatggctgcgccacgggttttggcttcgcgaatcagttcaccaccgcggcgctgtttttggcgtccagcgaggcggtgccacaggcgttcggcacgttcaggcgggtgagaagacgcgcggctttagcggcgcaggcttacgcggaacgccggtatcgagcagcggctgcatcaccacttccagtgctagatacgcgggatgacgcgcagaaactggctcacccagccgacggtggtttgcggatttccaccactttgcgcgctggcgcggtgaccag

SEQ ID NO: 26069 - DNA, 1005 bp, Homo sapiens
  SIMILAR (1)..(150): 861254mologous to Klebsiella pneumoniae putative ammonium transporter,accession number AJ006531,Smith-Waterman Score=214.
atggctgcacctgcggtggcccataaagccgacaatgcgtctatgatgatttgtactgcgctggtgctgtttatgactattccggggattgccctgttttacggtgggttgattcgcggcaaaaaactgctgtcaatgctgacgcagatctctggcccaacccactgggtgccctggatctcccccgagaccaccgcccggccccacctggctgtcatcgggctggatgcctacctgtggtaccgctcactctcatgcccacagcagggctggctgggacgggggttcaggggaggtgggctctggcagaggccaagctcgggcagggcaggccccatggggagcggggaggaatggtcacctctgctcaggtctcgccagcacgtttcccgggggacacagcagccagagagcccgaaggtggccggtgccgaggtggccgtcagctggccggaggtggaagaggtgagggcctgtctgagctgggccctggtactcctgcagctctgggcaaacctggacgtgctactggtggcctcttggcaggagctgagtcggcacgtgtgcgccgttaccaaggctctcgcccagtatcccctcaagtgcgtgatgccaaggctgaaggggggcaggatcacctcaaggcagtaccgggaatcccaggccttctccttctgcacagcagggcgctgggcagccggcgagccagtggcaagagacggcgcagggctgcaggcggcctggcggaggcagatcaggcagttcagtcgggtcagcccagccgtggctgatgcagttgtcacagccttcccctccccccgccttctgcagcaggcgctggaggcctgcagcacggagcgggagcgcatgggcctcctggccgaccttcctgtgccgcccagtgaaggcgggcgtccccgcagggtggggcctgacctctcccgccgcatctgcctcttcctgaccacagccaaccctgatctcgtgctggacgtgggctcctga

SEQ ID NO: 26070 - DNA, 1638 bp, Homo sapiens
  SIMILAR (1)..(681): 971254mologous to Escherichia coli HisM-like integral membrane protein (phnM),accession number J05260,Smith-Waterman Score=1132.
atgattatcaataacgttaagctggtgctggaaaacgaggtggtaagcggttcgctggaggtgcagaacggcgaaatccgcgcctttgccgaaagccagagccgcctgccggaggcgatggacggcgaaggcggctggctgctgccggggctgattgagctgcataccgataatctggataaattcttcaccccgcgcccgaaagttgactggcctgcccactcggcgatgagcagccacgacgcgctgatggtggcgagcggcatcaccaccgtactggatgccgtggcaattggcgacgtgcgcgacggcggcgatcggctggagaatctggagaagatgatcaacgccatcgaagagacgcagaaacgcggcgtcaaccgcgccgagcaccgtctgcatctgcgctgcgaactgccgcatcacaccacgctgccgctgtttgaaaaactggtgcagcgcgagccggtgacgctggtgtcgctgatggaccactcgccgggccagcgccagttcgccaaccgcgagaagtatcgcgaatattatcagggcaaatactccctcactgatgcgcagatgcagcagtacgaagaagagcaactggcgctcgccgcacgctggtcgcagccgaatcgcgaatccatcgccgcctgtgccgcgcgcgaaaaattgcgcttgtctattgcatctttttggacggatcgtgaaacgctcgcagaacttctgccaatcaactaccgacgacacccggactgtatgcccctggacttgccaggttctccagcgtttagtgggccaaaatcgggtaaacgttctttccgagggcacctttggtttatgcccgatttccgaagcctggccgggatgccgtcggctcttatggaattctcgtccgaacgttcccaggcccggatactggtcacgcgaattgcggttcgtcgtagtccattctccgacgtcaatttgatcaatgggcgagagcacattgaaaccggcaaccgatttcatacctccgcgactccgtatgcctgccatgaagaaactttcggtctggataaactctacgaactgtgcgaaatcgcccgtgaagagctgaccaacggcggctacaatatcggtcgtgttatcgctcgtccgtttatcggcgacaaagccggtaacttccagcgtaccggtaaccgtcacgacctggctgttgagccgccagcaccgaccgtgctgcagaaactggttgatgaaaaacacggccaggtggtttctgtcggtaaaattgcggacatctacgccaactgcggtatcaccaaaaaagtgaaagcgactggcctggacgcgctgtttgacgccaccatcaaagagatgaaagaagcgggtgataacaccatcgtcttcaccaacttcgttgacttcgactcttcctggggccaccgtcgcgacgtcgccggttatgccgcgggtctggaactgttcgaccgccgtctgccggagctgatgtctctgctgcgcgatgacgacatcctgatcctcaccgctgaccacggttgcgatccgacctggaccggtactgaccacacgcgtgaacacattccggtatctggtatatggcccgaaagtaaaaccgggctcactgggtcatcgtga

SEQ ID NO: 26071 - DNA, 1533 bp, Homo sapiens
  SIMILAR (1533)..(1072): 981254mologous to Escherichia coli adenylate kinase (adk) (aa 1-214),accession number X03038,Smith-Waterman Score=784.
tcaacgaaaaaacaacgcggcgaaattcaccacccagacgggcatggtatagctcaggatcgccaccttccccgcacctccgttgaccaacgcccactgcgccagaccaaccatcccgcaggtttgtaacaggccaatggctaaggtgtatttaaacggtgtcgggcgcattccgcgaccacgtaataaaaggacgatgaataaaacgagagcgccgaaaatgcagcgtaaggcggtaaagtcgaaggcaccgatgtaactggtgacttgcttcatgaaaatccagctataactccagataagtgtgagcacaaccaggccactgattgccagtgggttgctctttcctgcggcagacatgagagatccagtgtgtagttttcgttcgcccactatacgctggtaaagaacgttcagcgactgccagcaagcagccgggtctacgtaatagatctccaatactaattgccgacgttcagcccgcgcgcttgcggcattaccaccaacttcttgaatttcgccgatccagttgacatgatgcagatgaaactgcaaatgcaggccgatcatgccgacaatttcgccatcaagcagcgccagatggtagcgcatgtttgggtcgcgcagattggcgttaaaacccacgcgaaacgcgtggtggtcaaactccgcttgttttagctcacaaatcagcgcgtaaaccgcgtcggtgtcgtactgcgtggccgggcgaagctcacaagcaggcatggtgtttctcctttggcgcaggctgccgtcattgttgagcgtatggcaatcctgtggagtatagcgggcggcgcgcgccaggcgggcgttaatttcactggcgttttcacggccacggttttccaggcgctggcggaggatctccggcgaaacctgtaaacagacgggcagcagcgccgattgatagcgcgcccgcgcctgcggcagatgggcgcgtgagccgttgaccagcacgtcgaatccggcgtgcagccagagatcaatctcgacgccgacgccataatacagaccgttagcgtgccagcttaaggccaacagattttggacttcagcacccggcttggtgccgtcaactttcgcgtatttggtattacccgcttctgcttctttggagtagtagccgatcagcggtgctgtcatctgatggtattcaaccagacgtttacgtacggtctcttcctgatcatctttacgggtagtcagttcttcaccggtaacgtcgtctttgccttctactttcggcggattgaatttaacgtgataaacacgaccagacggcgcatgaacgcggcgaccgacgatacggtcaacgatcagttcgtccggtacgtcgaattccagaacgtaatcaacattgatgcccgcttctttcatcgcgtctgcctgcggaatggtacgcgggaagccgtccaacaggaaaccattacggcagtcttcctgagcaatgcgctctttaaccagcgcgatcaccagttcgtcggtgaccagtttgccagcatccat

SEQ ID NO: 26072 - DNA, 2160 bp, Homo sapiens
  SIMILAR (2160)..(1111): 1001254mologous to Escherichia coli similar to,accession number D90873,Smith-Waterman Score=1856.
ttatttccagatacgtaactcatcgtccgttgtaacttctttactggctttcattttcggcagtgaaaacgcataccagtcgatattacgggtcacaaacatcatgccggccagcgccaccaccagcacactggttcccaacaacagcgcgctatcggcagagttgagcagtccccacatcacaccatccagcaacaacagcgcgagggtaaacaacatgctgttgcaccaacctttcaataccgcttgcaaataaataccgttcattatcgccccaatcagactggcgattatccatgccacggtaaaaccggtatgttcagaaagcgccagcaagagcaaataaaacatcaccaatgaaagccccaccagcaaatattgcattgggtgtaaacgttgcgcggtgagcgtttcaaaaacaaagaacgccataaaagtcagtgcaatcagcagaatggcgtacttagtcgcccggtcagttaatttggtattgaatcggctggcgtcgttatatgtaatggcttcggcggataaatttcgaatatccgcagctgcccggtggtttctcataatgctgaagtcacgatagctggtttcagatgtgaccagatgacagcgctgcaggtacgtaccagccagcgtcatgcgtttgacccgcgcggtgtacatttgtgacggcacagtgcgaatgcgccaacgtttagcgcctgccttcgccttggaggcgcgaatcacatccagccagttttgtttggttggtaaaaagtaattcggcgcgtagtcatcctgacgacaggcgcacatataaaacgatgttgcacgcttgtcaaaaccaacccgcagcggcaggtatccatttgcaacggcatctggcttgcagtggcctccaccagcacagtcggagattcgataaggatttccctctttgcgcgcgtaaccgggctgattgcagataaacgccgagaggttctgcgccccggcagatgtgccgagataaagatcgaaaggattaaactgcgcgcgcataaactcatccagcacgccagccgtgaaaattccacgctgtccgccgccttcgcacaccagagctattcgtccaggctggaacggcccccactcccgcatccgctgatgcagcgtcagtgacggcttctcggaaaacagctgctggtaatccgtggcaaattgccccagatgccagaatccccactgcatggcggcgtcttttaccgtcatactttgcgaccacggacttatcagttcgcggcgtacggcgttcaggcgaatgcgtttcagccacgcgttcgggccaatgcctaaaatagcgtgaaacgcgttttgtagcgtgcggcggctgacatgcagttgattacacaaatccagcaccgtcaccggttcggacatgttttccagcacatattcacgggcgcgggaaagcaatcgacggtaactctgatgactgatgctttccgccgtcaccattggttgcgcttcttccagcatggcccccatcgccattagcaaattatcccccagcacttttcgcactgcaggctgatggagattttccggattctcgcaaaacgtcgccagcgcctgttggacaaagccccacagcgcggctttatgctgctctttcacttccagcgccgactggttacgcaacatatgtaatacccgatccgggttatgcaaaaagttagcctgccgggtgatgacatcttcagaaagcaccacgcccaggatcgtgtaatcatccggcgtgctcagttcaaattcagtgccaccagggcgggtggcgatttccgcgcttcccagacattgcgaaccgataaatccctgctcaccgcgcgtcgccggaatgccaaaccagaacgagttcggccagaccaggcacgactgacgcagcgccagaccggtgtattcacgaaaaacctgaatatcatcgagtagaatttccgtaaattcaccatgaaacttgcccggatgcagctgatcgtaaatctgctgccaggcggtaatcgttaaagcatgttcatagacatccgttgtctgtcgttgatgaacattatccacttcgaccttcggcgtgagcttcaggttttcgggtaagggttcatgataaagatggtgcaaattggctgtacgggtctttttcat

SEQ ID NO: 26073 - DNA, 1182 bp, Homo sapiens
  SIMILAR (100)..(750): 971254mologous to Escherichia coli HisP-like nucleotide binding protein (phnL),accession number J05260,Smith-Waterman Score =1065.
atgcggcgtaaacgccttatccggcctacaaatgcgctccccgtacgtcggataagacgcgtcagcgtcgcatccgacacccgaaccacgaggcgaaaaatgattaacgtacaaaacgtcagtaaaaccttcatcctgcaccagcaaaacggcgtgcgcctgcccgtcctcaatcgcgcctcgctcaccgtcaacgcgggcgaatgcgtggtgctccacggccattccggcagcggcaaatcaactctgctacgctcgctgtacgccaactatctgcccgacgaaggtcaaatccagatcaaacacggtgacgagtgggtagacctggtcaccgcgccagcgcgcaaagtggtggaaatccgcaaaaccaccgtcggctgggtgagccagtttctgcgcgtcatcccgcgtatctcagcactggaagtggtgatgcagccgctgctcgataccggcgttccgcgtgaagcctgcgccgctaaagccgcgcgtcttctcacccgcctgaacgtgccggaacgcctgtggcacctggcaccatcgacattttccggtggcgaacagcagcgcgtcaacatcgcccgcggctttatcgtcgactaccccattctgctgcttgacgaacctaccgcctcgctggacgccaaaaacagcgccgcggtggtggaactgattcgcgaagccaaaacccgtggcgcagccatcgtaggcatcttccatgacgaagctctggtgctggaaaacgaggtggtaagcggttcgctggaggtgcagaacggcgaaatccgcgcctttgccgaaagccagagccgcctgccggaggcgatggacggcgaaggcggctggctgctgccggggctgattgagctgcataccgataatctggataaattcttcaccccgcgcccgaaagttgactggcctgcccactcggcgatgagcagccacgacgcgctgatggtggcgagcggcatcaccaccgtactggatgccgtggcaattggcgacgtgccgacagaacgagactgtgtctcaaaaaataaaaataaaaatgaagaaaagaacaaaaaaaagattgatgttatgagtcccttccattttccaaaccacctttccatcagtcccatcaaggggccatctattccagagtttatggctaattcatttgttaggtcgtgctag

SEQ ID NO: 26074 - DNA, 811 bp, Homo sapiens
  SIMILAR (685)..(179): 981254mologous to Escherichia coli putative ammonium transporter,accession number U82664,Smith-Waterman Score=858.
ttacgcgttatagccattctcgcctgggctgttgacatccagccctttctcgctccttgctcgtcccggtacacccagaccacccgtcagatccgccaatttgtagccgataaatgccacaacaccggaccagacgatcgtaatggcgatgctgtccagctgtaccagcaactgatggcccatgcgtcacaccttcagcgaagcccacgccgcccagcgagctggcggcaaaaatcccggtcatgatacagccgactatgccacgaacgccgtgcacaccgaagacatcgcagggatcatccacccgcagcaagcgtttgagcatggtaacgccccacaagcccgccagaccagctaccacgccgataatcaacgcgccgccaaccccaatgtagccgcaggctggcgtcacgccgaccagaccggcaatcgcgccagaacacgcccccagcagtgaaggcttaccacgcagcgcccattcaccgaagatccagccaagaattgccgccgccgttgcgaccacagtattcacaaatgccagtgccgcgatttcattcgccgtgcccgctgacccggcgttaaagccaaaccaaccgatatagagaatggcagtcccggtgaagaccatcggcaggttgtgcggtttaaacgcctctttaccgaagcccacgcgttttccccttaagcgttgatcctcgcgacagcgaacaggccaacaggtgggcagtttcttccactgtttccgcaaatacttaaagcgctttcggagtttgttactctcgccgacgaaattgaacatgtgaatgctaat

SEQ ID NO: 26075 - DNA, 2311 bp, Homo sapiens
  SIMILAR (1)..(1077): 901254mologous to Escherichia coli yohA,accession number U00007,Smith-Waterman Score=1693.
atgcttatggcaaactacggtttttgcaccattttcgctgccacgtcgggcaacaaaggaagaaaaatccatatgaaatggctatgttcagtaggaatcgcggtgagtctggccctgcagccagcactggcggatgatttattcggcaaccatccattaacgcccgaagcgcgggatgcgttcgtcaccgaactgcttaagaaaatgacagttgatgagaaaattggtcagctgcgcttaatcagcgtcggcccggataacccgaaagaggcgatccgcgagatgatcaaagacggatcaggtgatggaattaagccgcctgaaaattcctcgttttctttgcattacgaacgattgcctggcacaggtcagcgcacggtgttcccgattagcctcggtctggcctcgtcttttaacctcgatgcagtgaaaacggtcggacgtgtctctgcttatgaagcggcagatgatggcctgaatatgacctgggcaccgatggtcgatgtctcgcgcgatccgcgctggggacgtgcttccgaaggttttggcgaagatacgtatctcacctcaacaatgggtaaaaccatggtggaagcgatgcagggtaaaagcccggcagatcgctactcggtgatgaccagcgtcaaacactttgccgcatacggcgcggtagaaggcggtaaagagtacaacaccgtcgatatgagtccgcagcgcctgtttaatgattatatgccgccgtacaaagcggggctggacgcaggcagcggcgcggtgatggtggcgctgaactcgctgaacggcacgccagccacctccgattcctggctgctgaaagatgttctgcgcgaccagtggggctttaaaggcatcaccgtttccgatcacggtgcaatcaaagagctgattaaacatggcacggcggcagacccggaagatgcggtgcgcgtggcgctgaaatccggaatcaacatgagcatgagcgacgagtactactcgaagtatctgcctgggtggattaaatccggcaaagtgacgatggcagagctggacgatgctgcccggcatgtactgaaccaaaacggcgtgcgcctgcccgtcctcaatcgcgcctcgctcaccgtcaacgcgggcgaatgcgtggtgctccacggccattccggcagcggcaaatcaactctgctacgctcgctgtacgccaactatctgcccgacgaaggtcaaatccagatcaaacacggtgacgagtgggtagacctggtcaccgcgccagcgcgcaaagtggtggaaatccgcaaaaccaccgtcggctgggtgagccagtttctgcgcgtcatcccgcgtatctcagcactggaagtggtgatgcagccgctgctcgataccggcgttccgcgtgaagcctgcgccgctaaagccgcgcgtcttctcacccgcctgaacgtgccggaacgcctgtgggcacctggcaccatcgacattttccggtggcgaacagcagcgcgtcaacatcgcccgcggctttatcgtcgactaccccattctgctgcttgacgaacctaccgcctcgctggacgccaaaaacagcgccgcggtggtggaactgattcgcgaagccaaaacccgtggcgcagccatcgtaggcatcttccatgacgaagctctggtgctggaaaacgaggtggtaagcggttcgctggaggtgcagaacggcgaaatccgcgcctttgccgaaagccagagccgcctgccggaggcgatggacggcgaaggcggctggctgctgccggggctgattgagctgcataccgataatctggataaattcttcaccccgcgcccgaaagttgactggcctgcccactcggcgatgagcagccacgacgcgctgatggtggcgagcggcatcaccaccgtactggatgccgtggcaattggcgacgtgcgcgacggcggcgatcggctggagaatctggagaagatgatcaacgccatcgaagagacgcagaaacgcggcgtcaaccgcgccgagcaccgtctgcatctgcgctgcgaactgccgcatcacaccacgctgccgctgtttgaaaaactgccatgtgaccgtaacgatggtaagaaaagcggattacagcggatatcgttgttcatcaccccagagatggaaggctacccgacagatgaaaatcaagccgctgcctatatgaacaagattatcgagaaagagatcatgcgcgcaccggagcagtacctctggatccaccgtcgctttaaaacgcgcccggtgggagaatcgtcgttgtacatttaa

SEQ ID NO: 26076 - DNA, 2930 bp, Homo sapiens
  SIMILAR (1920)..(1991): 1001254mologous to Escherichia coli phnM,accession number D90227,Smith-Waterman Score=135.
cgcgggggcccaaaaaagccgccaaggctgttaaaaataatttgtcctgcccgggtctcgtttatgactattccggggattgccacatgttttacggtgggttgattcgcggcaaaaacgtgctgttcgatgtgtacgcagagatgtacggtgacatttgcactggtttgtattctctgggtggtttacggttactcgtctggcgtttggtgagggcaacaacttcttcggcaacattaactggttgatgctgaaaaacatcgaactgacggcggtgatgggcagcatttatcagtatatccacgtggcgtttcagggatcgtttgcctgcattaccgtcggcttgatagttggggcgctggcggaacgaatccgcttctcagctgtgttgattttcgtggtggtatggctgacgctctcttacattccgattgcgcatatggtgtggggcggtggtttgctggcttctcacggtgcgctggatttcgcgggtggcaccgtggtgcacattaacgccgcaatcgccggtctggtgggcgcgtatctgataggaaaacgcgtgggcttcggtaaagaggcgtttaaaccgcacaacctgccgatggtcttcaccgggactgccattctctatatcggttggtttggctttaacgccgggtcagcgggcacggcgaatgaaatcgcggcactggcatttgtgaatactgtggtcgcaacggcggcggcaattcttggctggatcttcggtgaatgggcgctgcgtggtaagccttcactgctgggggcgtgttctggcgcgattgccggtctggtcggcgtgacgccagcctgcggctacattggggttggcggcgcgttgattatcggcgtggtagctggtctggcgggcttgtggggcgttaccatgctcaacgcttgctgcgggtggatgatccctgcgatgtcttcgctggtgctggaaaacgaggtggtaagcggttcgctggaggtgcagaacggcgaaatccgcgcctttgccgaaagccagagccgcctgccggaggcgatggacggcgaaggcggctggctgctgccggggctgattgagctgcataccgataatctggataaattcttcaccccgcgcccgaaagttgactggcctgcccactcggcgatgagcagccacgacgcgctgatggtggcgagcggcatcaccaccgtactggatgccgtggcaattggcgacgtgcgcgacggcggcgatcggctggagaatctggagaagatgatcaacgccatcgaagagacgcagaaacgcggcgtcaaccgcgccgagcaccgtctgcatctgcgctgcgaactgccgcatcacaccacgctgccgctgtttgaaaaactggtgcagcgcgagccggtgacgctggtgtcgctgatggaccactcgccgggccagcgccagttcgccaaccgcgagaagtatcgcgaatattatcagggcaaatactccctcactgatgcgcagatgcagcagtacgaagaagagcaactggcgctcgccgcacgctggtcgcagccgaatcgcgaatccatcgccgccctgtgccgcgcgcgaaaaattgcgcttgccagccacgatgacgccacccacgcccacgttgctgaatctcaccagcttggcagcgtgatcgccgaatttcccaccacgttcgaagcggcggaagcctcgcgcaagcatggcatgaacgtgctgatgggcgcgccgaatattgtgcgcggcggctcgcactcccggcacgtggcggccagtgaactggcgcagcttggcctgctggatatcctctcttccgactactaccccgcccagcctgctcgatgcggcatttcgcgtcgccgatgaccagagcaaccgctttacgctgccgcaggcggtgaagctgggcaaacgcgccgacctggtgctggcgcatcgcaaggacaatcatattcatatcgaccacgtctggcgtcaggacagcctgctggcggaactccgcctgcgggaacaaactcagttactggtggcgcatcgctacatcacgcgcgatgccagcgccggaagtgaaaaccatatcgccctgagcgagcaggagttttttacccgcgcggggcaaaatctgttggccttaagctggcacgctaacggtctgtattatggcgtcggcgtcgagattgatctctggctgcacgccggattcgacgtgctggtcaacggctcacgcgcccatctgccgcaggttctgttgcgtgtttcttacgttgttttttttttaggtgattttctaccagccaaacgggaagttagcgagtcaggttttcaggcgcactgccaaagcagctggtttgctaataatctcggtgagcgttttgcttcaggcaatgataccgtctgggaaaacttcccggcgtttagcgtcgcagtaacgacgccagccgatccatacccattaactgaccgggcgactaagtacgccattctgctgattgcactgacttttatggcgttctttgtttttgaaacgctcaccgcgcaacgtttacacccaatgccatatttgctggtggggctttcattggtgatgttttatttgctcttgctggcgctttctgaacataccggttttaccgtggcatggataatcgccagtctgattggggcgataatgaacggtatttatttgcaagcggtattgaaaggttggtgcaacagcatgttgtttaccctcgcgctgttgttgctggatggtgtgatgtggggactgctcaactctgccgatagcgcgctgttgttgggaaccagtgtgctggtggtggcgctggccggcatgatgtttgtgacccgtaatatcgactggtatgcgttttcactgccgaaaatgaaagccagtaaagaagttacaacgggacgatga

SEQ ID NO: 26077 - DNA, 1066 bp, Homo sapiens
  SIMILAR (482)..(760): 971254mologous to Escherichia coli K12 PTS system enzyme II, trehalose specific,accession number AE000495,Smith-Waterman Score= 466.
  misc_feature (1)...(1066): n = a,t,c or g
acgcccaccattcatcgtcaagtatgtattctcaaactctgccgactgtgtcgtaaaaatacacgacgttcgatcgatcgacgcacttctgcaagcgtacggtcgcggactgttacgtaagggcatcgccacggccaccgaaantgtgaaggaactggaaaatcatactggtgttcgcctgctggacagaaccacgcgtgaagtggtgcttacagatgcagggcagcagctggctttgcgtcttgagcgactgctggatgaactgaacagcacgttgcgcgataccgggcgtatggggcaacaactgagcggaaaagttcgggtcgctgccagccagaccatttccgcgcatcttattccgcaatgcatctcgagctgcactcgtgaagtccactctagaggatcccccgttcccgtttttaaatttttccgcgcaatatattctgcagccaaccaaaaatgtcatctgccatggggctttatgatgagcaaaataaaccaaacggatatcgatcggttgattgaactggtcggcgggcgcggcaatattgcgacggtgagccactgtattactcgcctacgctttgtcctcaaccaaccggccaatgccagaccgaaagaaattgagcaactccctatggtgaaaggctgtttcaccaatgccgggcaatttcaggtggtgattggcaccaacgtgggtgattactatcaagcactgattgcgtcaaccggacaggcgcatgttgataaagagcagctgcccgcgttgattagcggcggtttgatcctcggtttttggaatgtgatcggtgattggcccatgaccaacggtcatacgctggcgcaaatgtacccttccctggaaaagatatacgaatttcttgggaggatcaggaaaacgatcttcttatacctgccaggaggatttggatctgtacgattgcactggtatgaccgcacggtcggcacggatggcgaaggacagtcgcttacggtcagaccgccgtatgtacgtaagtatgcgagcgatgcgcaaaattatgatacgctctgtgcgtccttctag

SEQ ID NO: 26078 - DNA, 3546 bp, Homo sapiens
  SIMILAR (1875)..(829): 951254mologous to Escherichia coli K12 putative dehydrogenase,accession number AE000371,Smith-Waterman Score=1766.
tcatgatcgtctcctccgtcgtgatggtcgtttttggtgttgcgacgaaccagcacggttaagcccggccagcacagcccagtggtagcaccatgcctttataccagggtgcgttgaatattttgcgaacgcggcaccggtagaaagatcgtccagtttcggcaggtcgagattttcataaggcacacccgtcagtaccagaacctgagtaccgccgccctctttctcgccgtacagatgcggataatatttcggcaccgtatgcaggtaagtgtcgccagatttcagcgtctgacgcggatagtggtattcgctgccaggcttcagcgccagacgttttttcgcctccgccatcagctctttctggttgcacagctcgcacttatgcagcgcaccaaacgggttgttgtagtcgtacttcggcacgttgtacggacaggcgaccatgcagtaacggcagccggtgcacacatctttgtcgtaatggacaatgccggttttcggatcttttttcagtgcagagaccgggcacacagagacacagttcggatcgacgcagtgcatacactgtttcttaatgtacgcgtagccgttctcctcctggtctttgttgacccctgtgccgctggtccacacctgaatgatgttattggtatacggcgacagtttgtcgttgttcgaccaggtctggtgtccttgcgggttacgttcagggaaattgatatcctgacacttggtgacgcaagcctggcagcctacgcacaaggtcgagtcgtacaacatccccagcgatcccggaattggcgggcggttttcagcagccgcatgaccgtccgattccagtttgatcatgcagttagcctgatcgatatccgggatacccgatttctgcatgataatggcgacgccgcgaccgatgtgccagtcaccattttgcggtttcggtgacgaccattggatcatctcgcgaccctgacgcaggatctcttccagtgcacagctggcggcggatggaacggaggtcggcgctttaccttcaccgattgcaccgagaattttcagctcttgcccttcgtgtacccggttacgttcgataatttccagttggtcgatctgtaactgttcagccagttccgctaatgccatggtgatagcgaagttaccattcggtgcgccataaccctgataagcaccatttgggcaaatgttgctgtagtaggtggtgacctggaaatcgacgttatcgcacggatataacggcagcgacagcgccgttccgttacacggtacggtgagtgagtggttgccgtaagggccagtgttggcgcggaaatccattttcactgccgtcaggcgaccattttttttcgctcccagtttgacggtgactttcgcgacgtgacgagaggtgttagcaataatcttttcttcacgggtgtagcggaacagtaccggacgcccggtcacgcaggttgcccaggcgcacacttcttccagcaggatgtcctgtttggaaccaaaaccgccgccaactcgctctttaatgacatgaactttatgctgtttcatgcccacgaggcgcgcgacctggcggcgtaagtgccatggtacctgggtggaggcgtggataaccagacgatcgccgtccatacgagtaaagcagatatgtgtttcagtcgggcactgctgcgcttgcgttgagttataggttcgctcaatgatcacatcggcatcggcaaagcctttgtccatatcgccaatatgaccatgaatactggcggcgatatttttgcgagggcgagaaccgatcgggaagttgatgatcagatcctcgccgcgctgggctgaatggaggggcacctctggatccgtatcgacctgagccagtcggcagtgagtcacagtgtgaaggaactggaaaatcatactggtgttcgcctgctggacagaaccacgcgtgaagtggtgcttacagatgcagggcagcagctggctttgcgtcttgagcgactgctggatgaactgaacagcacgttgcgcgataccgggcgtatggggcaacaactgagcggaaaagttcgggtcgctgccagccagaccatttccgcgcatcttattccgcaatgcattgctgaaagccatcgccgctatccagatattcagtttgtcctgcacgatcgtccgcagcagtgggtaatggaaagtattcgccagggagatgtcgattttggcatcgtcatcgatccaggcccagtgggcgatctgcaatgtgaagcgattctttccgagcctttctttctgctttgccatcgcgatagcgctttggccgtggaagattatgtacctggcgctaccattgcctgaaggtagcccactggtggtaaagcgcattacgccggttgttgaacgccagttgatgctggtgcgcaggaagaaccgttcactttccaccgccgctgaagctttatgggacgtggtacgagaccagggcaatgcgctaatggccgctgcataggtagcgtcacggtcaaactcgtactcgttccagttggtaagagtgaatttctcgctgcccagcataaagttgtaacctgcaacccagccggcgacatagccgttgtcgccagtgtaataggtttgatctgtataacgcttagcaaagtacggtttgaagccccaaccgctgccggtgaaaagccagctgcagcggaactctaatcctgggttgcgcgtttgataacgtaaggagaatctctgtctattcgccaaccgcgaaaaccagcattgaatcggtggtactgtagataaggtcgctatgaggaatgaacgtttcccaggtaatgttgtgggtcgcaatatgcacttcagtaattgcaggcgcggtaccgccatcgccacatacaggagtgacataacaaacatggcaatccctgccacagaaccgacgattttcagcgatttcataccgcgtgaagcaacccacataaagaagataaacagcaccagcgttaacccctgtaacgctacgactgaatattctttgattagcgaaccgtcgcctttcatcgcccaaccgagcgcaatcagaattgcctggggtttttgtgccagatagggaatatgcaccacccagtaggtccacgcggcgagataagccagtccgggtcccatcgtgtgtttaatccaggtactgaccccgcccttcccatctttgaaggtcgagcctaactgaccaacaattagcgcataaggtgtgaaatagagtgcaaagataaacacccatgaaaaaacaaccaccagcccctggttggcatagttattaacaacgttgccaaaaccccagacagtgataaaagacatcagcgcaatgttgtaccatcgcaactgtttttcctgaacattcccagccatagacaaatccttcgccaaaattaaaggggcatcggtaaaacgagggattatgcgcggcaaataagaagtgcggaaatgacctgcaaacattgcacataccacagttataaacgccgtcaatacactatttttcat

SEQ ID NO: 26079 - DNA, 1657 bp, Homo sapiens
  SIMILAR (111)..(212): 1001254mologous to Escherichia coli similar to,accession number D90870,Smith-Waterman Score=161.
gaggatacgaaaaagtttcataaagactccagatgatcgatggttctattgtgcttcttccagtttgagaaataaaattgatttattgcatccattcatgaagaaaacagatgaattattctttaaaacaattaaaggttttcgtcacagtagcgcaggagaaaagttttagtcgtgcaggagagcgtatcggcctgagccagtcggcagtgcagtcacagtgtgaaggaactggaaaatcatactggtgttcgcctgctggacagaaccacgcgtgcagtggtgcttacagatgcagggcagccgctggctttgcgtcttgagcgactgctggatgaactgaacagcacgttgcgcgacaccgggcgtatggggcaacaactgagcggaaaaagttcgggtcgctgccagccagaccatttccgcgcatcttattccgcaatgcattgctgaaagccatcgccgctatccagatattcagtttgtcctgcacgatcgtccgcagcagtgggtaatggaaagtattcgccagggagatgtcgattttggcatcgtcatcgatccaggcccagtgggcgatctgcaatgtgaagcgattctttccgagcctttctttctgctttgccatcgcgatagcgctttggccgtggaagattatgtaccctggcaggcattacagggagcgaaattggtgttgcaggattacgcgtcaggcagccgaccgctgattgacgcagcgctggcgcgcaatggtattcaggcgaatattgtgcaggagattggacatccggcgacgctgttcccgatggtagccgcaggcatcggcatcagtattcttcccgcactggcgctaccattgcctgaaggtagcccactggtggtaaagcgcattacgccggttgttgaacgccagttgatgctcataaacgttattcagacgctgcgctttgctttcatattccggttgtcgcgacggcaacatttcgctaaagtcacgccccttcttcaccggcatggggattatttcgtgtttattggttttgattacggtacagcaaactgttcagtggcggtcatgcgtgacggtaaaccgcatttgctaaaaatggaaaacgacagcacgctgctgccttcaatgctttgcgcgccaacgcgtgaagcgtgcggaagggttgacgtaatagaggtttcaaagtcaaaagtgcgaaaaaacacctatgccatgcgctatgttgccggacaacctgcggaaaggatcttaccgccggggtcttttgcgagcatcggccaggcattaccacctggggaaccgttaagtaccgaagagcgtattcggatcctggtgtggaacatatacaaacagcaacgcgctgaatggttgtcggtattaaagaactacggcaaagatgcacatctggtgttattgcaggaagcgcagacaacgccagagttagtacagtttgcgaccgctaactatcttgccgccgatcatgtacccgctttcgtgctgccacaacatacttctggcgtaatgaccctttcggcggcacatccagtgtattgctgcccgttacgtgaacgaaaacccattttgcgtctggcgaaatcggcactggtgacagtctatccaattttcccgtatttgtctaactcataa

SEQ ID NO: 26080 - DNA, 456 bp, Homo sapiens
  SIMILAR (204)..(4): 981254mologous to Escherichia coli similar to,accession number D90885,Smith-Waterman Score=352.
tcaaatctgtcgtaactgcgcctcaacatacaaatagccaattcccagcacctgttgtgcgcggcttaattgcccaaagccaatttgcgtcgctttcacgctcggtccttcgtcgcggtcgaacgggttaaatcctgtctggcgaataatagtattaagccagttctcaccaaaggcacaactgcgaccgtacaaccaaatccgcgcctgtttttttaatgcgcttaacgaggcgacagtttccaggcagccataacgtccacagtcgcagacgacgccatccgtattaacgatggtgtgaccaatctgtccgctaccatacaaaccgagaattttgctggcttcgcgcgcgacattatccatctcgtccaacagttccagcagctccgggttcaaatcttcttctttagtaccgctacgtagctgttgttcgatcaggtggcagagattcttcat

SEQ ID NO: 26081 - DNA, 969 bp, Homo sapiens
  SIMILAR (606)..(1): 871254mologous to Escherichia coli K12 putative GTP-binding protein,accession number AE000349,Smith-Waterman Score=889.
ccttagtccccactgcaggcgaaccgacacggcacacacagaccacacgggctggaatagctcatgcagcaggcagattttgcggctgatattttgtttctgctctgtggaaaggatatttccaccgctggtggattcagctttgtctgactggctgataacaaacagcatcttatgccggtatgcttcgccaatcacctgacggtaaaaatgctcatcagtcgccagtgcccgatcatcagccttaatcagccacagaatcaggtcgagccggggaagttgttcgcggtacagcgcagataactcggtatcgcgaacgccactttcgcccacgccgggcagatccacgatggtcataaagtgttctccaatctgcaggcgaaagcgtaaaggatcacgtgtacaggccgctacatcgctgaccggcgatacttcaccggcaaacagggcattgcaaaggctactctttcccgccccagttttacccatgatgccgatcactggctcgtagtgggttaactgatttatctgatcatcgggagacaaaacagaggcttctaggtactcaggatgattacgtaaagtaaaagtcagtttgctcaggatatgtgtcggaacgtcctgctcatcaataattttggccgtatccagcatgatccggccatatttcatttccagcgtaacgaagcggttccactctggaccgttagcgcacaagaggtcaaaaaggatttcaccagtggtctcagacacggctcggtacgtggggatctctagagtcgtaatcacgcatggacactgccggaagaaagcagccgtcccataattaaacgtgcactggaaggcggcataaatttctttgataccgccaacagttattctgacggcagcagcgaagagatcgtcggtcgcgcactgcgggatttcgcccgtcgtgaagacgtggtcgttgcgaccaaagtgttccat

SEQ ID NO: 26082 - DNA, 933 bp, Homo sapiens
  SIMILAR (933)..(490): 901254mologous to Escherichia coli succinyl-CoA synthetase beta-subunit,accession number J01619,Smith-Waterman Score=684.
ttatttagagtctatgaataatttcttaagcatagcaggagtggagtagggatatgccagccaggccttgattttggcttccataccagcggcatcgaggccgagttcggcgcgcatttcttcctgagttccttgcggaataaagaagtccggcaggccaatgttcagcacgggtactggtttacgatgggccatcagcacttcgttcacgccgctgcctgcgccgcccataatggcgttttcttctacggtgaccagcgcttcatggctggcggccatttccagaattaacgcttcatcaagcggtttcacaaaacgcatatcgaccagcgtggcgttcagcgattcggcgactttcgccgcttcttccacgaattcgaggaatgcgccgccgccagtggagatgtaggagattttgtcagcaatgccgaacaggtcgattgctgccagagccccgcagccgccagcgctggagaacgtttcgctgtatgcgatagcgttagccacgatttcagtacctttgcgcactttttcgatttccacgccgcttccgttggagcccataaagaccacacgacgggaactacggtcaacaacggcaccgagatacagctctttagcgatatcggtcgctgcttcaaccagaatctggttaaccggttgcccattggcatctgtttgatacgttaccagacgcttgcccagccagttttctgcaaaagcacggatgtcttctttgctgtttacaactttcacaccgcccgctttaccgcggccaccagcgtgaacctgacatttcactacccacggaccggcaccgatttttgaagcggcttcttctgcttcgcgcggagtagtacaggcataacccaccggtgctggtaagccatagcgggcaaaaagttgttttgcctgatattcatgtaagttcat

SEQ ID NO: 26083 - DNA, 663 bp, Homo sapiens
  SIMILAR (536)..(480): 631254mologous to Escherichia coli isovaleryl-CoA dehydrogenase precursor homolog(PIR:C34252),accession number D10483,Smith-Waterman Score=69.
atggcttaccagcaccggtgggttatgcctgtactactccgcgcgaacgagaagaagccgcttcaaaaatcggtgccgcgcgtgcaaattgcggcgggagagttgcgggtagttcggcatcacgagaatggtgtcggcccaggcgacgttctcgatccagataacttccgcgccccattctgcgaacatttgcccggcaaacggtccggcgatttcgataccggagaagacaacgcgcaatccggccaacggccgaatttcggcatggacgcatcaggtcgcatcaggcagcgcacggacttagcggtattgcttcagcaccgcacgacccagcgtcaggatctgcatttcgtcagatcccccggagacgcggtctacacgcagatcacgccagaagcggctgatgcggtggttgcccgcaatcccgacaccgcccagcacctgcattgcgctatccacaacttcaaatgccgcattgggcagaagtatttgcacatcgctgcatcgccagaggccagcggtgtcgacgatcgcttttacgttatccagcgactgacgtgcctgtgcagcgacgtctgccggtacttcgcccgttttcggatttaccgggatctgaccggaggtgatgatcatattgcccagatcaacgccctgtaccggtaa

SEQ ID NO: 26084 - DNA, 1528 bp, Homo sapiens
  SIMILAR (1484)..(1528): 1001254mologous to Escherichia coli fixC protein homolog(PIR:S14072),accession number D10483,Smith-Waterman Score= 76.
aatgcagactgcgctacggaccacggtatctccacgagcctggataatgcaggagcacgtcgagccgcgaactgcatattcaatcgtgacgttagcatctacttcattagagcatctcccaaggcttacactactagtatgcatttccgtgcatccgatatgtttgtgctgggaatttcgctgacacaggatcaacacatctacactacaatggaccacagcttaatgcaaccattgatgtatcgaatctcgagtctcggctacccaccgtatacttactacgaagtttattactctatgtcgggtgcggagaaagaggtaatgaaatgtgccccgcttacgcagggcatccatttattactcaaccgtaaccgattttgccaggttacgcggctgcaggcatgcaagctttggcgctctatgtcgggtgcggagaaagaggtaatgaaatgtgccccgcttacgcagggcatccatttattactcaaccgtaaccgattttgccaggttacgcggctgcaggcatgcaagctttggcgccagatcctgactgaagagcagtatctgacgcgctggaagagttcggcagacgcgatgaaagaagcgggcatcaatgttgattacgttctggaattcgacgtaccggacgaactgatcggatggagcacgaacgctatgtcgggagctcttatgtccgaagatatctttgacgccatcatcgtcggtgcagggcttgccggttcggttgccgcactggtgctcgcccgcgaaggtgcgcaagtgttagttatcgagcgtggcaattccgcaggtgccaagaacgtcaccggcgggcgtctctatgcccacagtctggaacacattattcctggtttcgccgactccgcccccgtagaacgcctgatcacccatgaaaaactcgcgtttatgacggaaaagtcagcgatgactatggactactgcaatggtgacgaaacctcgccatcccagcgttcttactccgttttgcgcagtaaatttgatgcctggctgatggagcaggccgaagaagcgggcgcgcagttaattaccgggatccgcgtcgataacctcgtacagcgcgatggcaaagtcgtcggtgtagaagccgatggcgatgtgattgaagcgaaaacggtgatccttgctgatggggtgaactccatccttgccgaaaaattggggatggcaaaacgcgtcaaaccgacggatgtggcggttggcgtgaaggaactgatcgagttaccgaagtcggttattgaagaccgttttcagttgcagggtaatcagggggcggcttgcctgtttgcgggatcacccaccgatggcctgatgggcggcggcttcctttataccaatgaaaacaccctgtcgctggggctggtttgtggtttgcatcatctgcatgacgcgaaaaaatcggtgccgcaaatgctggaagatttcaaacagcatccggccgtttgcaccgctgatcgcgggcggcaagctggtggaatattccgctcac

SEQ ID NO: 26085 - DNA, 1755 bp, Homo sapiens
  SIMILAR (646)..(1413): 801254mologous to Escherichia coli similar to H. influenzae HI1439,accession number U82664,Smith-Waterman Score=1009.
atggtcatagcaattctggcatcttctactgtatggtctgctgataatgctccggtaacggcacaagagcttactcaacaagttcagcaaaccctgaactcggctgcggcattgagcgtcatctctgaacaaggtttatatgctatgcgtgtacgtgcagagagacatcatgtttttacagaaattcaaggcgctacatgtgattttcccggcagctgcgcggtgctggcggcaacccaggtggaagagattgaagaagtgcactggacagagctcgcaatgccggcgtcactgtgggtctgccgggtcacagagttcggcccgctgattgtctctattgatacccacggcaacaacctgatagccgacaacaaaaagctgttcgccgaacgccgcgatccctcggcgaatctttcatgcctgcaggccgcgcagttcgtcgcgtttgcccgcaacggctgcttcgccgtctcatactccagcaccgcgaagcccttcagctgcccatcctggccgcacgccagctgccggaggaagaccgagatggtgatctcccgcgttctgcatctggcgcgccgcattattacgccgctggtttctggcgttgtggtgatgattatcggcctgtcgctaattcaggttgggttaacgtccattggcggcggttacgcagccatgagcgataacaccttcggcgcaccgaaaaatctgctgctggcaggcgtggtcttagctgcaggtcgaaaagtagcggcggtttgccgagctattcacaaatctttggcgactggttcgaaagacaacaagctgatggcgattactccggcgatgcgtgaaggttccggcatggtcgagttttcacgtaaattcccggatcgctacttcgacgtggcaattgccgagcaacacgcggtgacctttgatgcgggtctggcgattggtgggtacaaacccattgtcgcgatttactccactttcctgcaacgcgcctatgatcaggtgctgcatgacgtggcgattcaaaagcttccggtcctgttcgccatcgaccgcgcgggcattgttggtgctgacggtcaaacccatcagggtgcttttgatctctcttacctgcgctgcataccggaaatggtcattatgaccccgagcgatgaaaacgaatgtcgccagatgctctataccggctatcactataacgatggcccgtcagcggtgcgctacccgcgtggcaacgcgggcggcgtggaactgacgccgctggaaaaactaccaattggcaaaggcattgtgaagcgtcgtggcgagaaactggcgatccttaactttggtacgctgatgccagaagcggcgaaagtcgccgaatcgctgaacgccacgctggtggaagatgcgttttgtgaaacccttcccgaccgatatgcaggcccagttcacgctgttgaacctgaagggaccgggtttatcaccgaaacggtctttgaaaaccgctttatgcatgtgccagagctgagccgtatgggcgcgcacgccgaaatcgaaagcaataccgttatttgtcacggtgttgaaaaactttctggcgcacaggttatggcaaccgatctgcgtgcatcagcaagcctggtgctggctggctgtattgcggaagggacgacggtggttgatcgtatttatcacatcgatcgtggctacgaacgcattgaagacaaactgcgcgctttaggtgcaaatattgagcgtgtgaaaggcgaataa

SEQ ID NO: 26086 - DNA, 2481 bp, Homo sapiens
  SIMILAR (354)..(827): 901254mologous to Escherichia coli adenylate kinase,accession number U82664,Smith-Waterman Score=728.
gaacctgtttattcgtcgtatgaaccagctgctggtttcctgatgtaatgccggatgaccttcgtgtcatccggcatttttcttttcatcatctgcactttccgcaaattatctcgccattaaccgtttcagccccaggtgcctttcttgaggcaatcgcctgttggtggtatcgtttatcgctttttcaaaaaattcgacacattttaaggggattttcgcaatgcgtatcattctgcttggcgctccgggcgcggggaaagggactcaggctcagttcatcatggagaaatatggtattccgcaaatctccactggcgatatgctgcgtgctgcggtcaaatctggctccgagctgggtaaacaagcaaaagacattatggatgctggcaaactggctcaccgacgaactggtgatcgcgctggttaaagagcgcattgctcaggaagactgccgcaatggtttcctgttggacggcttcccgcgtaccattccgcaagcagacgcgatgaaagaagcgggcatcaatggtcattacgttctggaattcgacgtaccggacgaactgatcgttgaccgtatcgtcggtcgccgcgttcatgcgccgtctggtcgtgtttatcacgttaaattcaatccgccgaaagtagaaggcaaagacgacgttaccggtgaagaactgactacccgtaaagatgatcaggaagagaccgtacgtaaacgtctggttgaataccatcagatgacagcaccgctgatcggctactactccaaagaagcagaagcgggtaataccaaatacgcgaaagttgacggcaccaagccgcaaatttatcgcggcagtttgtatgttagcgaccagattggtcacaccatcgtcaatccggatggcgtcgtctgcgactgtggacgttatggctgcctggaaactgtcgcctcgttaagcgcattaaaaaaacaggcgcgggtatggctaaaatcacaaccggttagtactcaacttgatcctgaaaaactgactacagcgcagttaatcgctgcctggcaaagtggagaaccgtggatcaccagctgggttgatcgctctgccaatgccattggtttgagtctgtataacttcctcaacatcctcaatattaatcagatttggttgtacggtcgcagttgtgcctttggtgagaactggcttaatactattattcgccagacaggatttaacccgttcgaccgcgacgaaggaccgagcgtgaaagcgacgcaaattggctttgggcaattaagccgcgcacaacagggcgttgatctgggcaatatgatcatcacctccggtcagatcccggtaaatccgaaaacgggcgaagtaccggcagacgtcgctgcacaggcacgtcagtcgctggataacgtaaaagcgatcgtcgaagccgctggcctgaaagtgggcgacatcgttaaaactaccgtgtttgtaaaagatctgaacgacttcgcacccgtaaacgccacttacgaagccttcttcaccgaacacaacgccaccttcccggcacgttcttgcgttgaagttgcccgtctgccgaaagacgtgaagattgagatcgaagcgatcgctatgctctataccggctatcactataacgatgccccgtcagcggtgcgctacccgcgtggcaacgcgtcgggcgtggaactgacgccgctggaaaaactaccaattggcaaaggcattgtgaagcgtcgtggcgagaaactggcgatccttaactttggtacgctgatgccagaagcggcgaaagtcgccgaatcgctgaacgccacgctggtcgatatgcgttttgtgaaaccgcttgatgaagcgttaattctggaaatggccgccagccatgaagcgctggtcaccgtagaagaaaacgccattatgggcggcgcaggcagcggcgtgaacgaagtgctgatggcccatcgtaaaccagtacccgtgctgaacattggcctgccggacttctttattccgcaaggaactcaggaagaaatgcgcgccgaactcggcctcgatgccgctggtatggaagccaaaatcaaggcctggctggcataatccctactccactcctgctatgcttaagaaattattcatagactctaaataattcgagttgcaggaaggcggcaaacgagtgaagccccaggagcttacataagtaagtgactggggtgaacgaatgcagccgcagcacatgcaacttgaagtatgacgagtatagcaggagtggcagcatgcaatacaaccccttaggaaaaaccgaccttcgcgtttcccgactttgcctcggctgtatgacctttggcgagccagatcgcggtaatcacgcatggacactgccggaagaaagcagccgtcccataattaaacgtgcactggaaggcggcataaatttctttgataccgccaacagttattctgacggcagcagcgaaga

SEQ ID NO: 26087 - DNA, 1020 bp, Homo sapiens
  SIMILAR (238)..(1017): 931254mologous to Escherichia coli ATH1 protein,accession number D90769,Smith-Waterman Score=1250.
atggccttcacgttcaatatcatcctgccagtcccagttactccagcgatccagcccaatgcgcgtatacggcgtcaccgagtggttgccgagcgtcagcggcaaataggcgcgaatttcttgcgtggaaaactcaccgttattgcggctgtcgtccatattgaagccgcgctcgagataatagttcactcgcaaggcaagcgccattcccgtacacatcaccagtgcggtacaggcgatccgacggttgcccgaagtttactgcgttatcgctggcacaacttgccaggcgcgcaggagaaagcgcgacgcaacggctggcagggcgcgctatttccgtgggaaagcgcgcgcagcggcgaagaagagacgccggaatttgccgccattaacattcgcaccgggctgcggcaaaaagtggcctcggcgcaggcggaacatcatctggtggccgatatcgcctgggcggttattcaatactggcagaccacgggggatgaaagtttcattgcgcatgaaggcatggcgctacttctggagacggcaaagttctggattagccgcgcggtgagagttaacgatcgtctggaaattcatgatgttattgggccagacgaatataccgaacatgtcaataataatgcatacaccagctatatggcccgctacaacgttcaacaggcgctgaatattgcccgccagttcggctgtagcgacgatgcgtttatccatcgcgccgaaatgttcctcaaagagctatggatgccagaaattcagcccgacggcgttttgccgcaggatgattcgtttatggctaagccggcgattaatctggcgaaatacaaagcggcggcggggaagcaaaccatactgctggattattcacgcgcagaagtgaacgagatgcagatcctcaaacaagctgatgtggtgatgctccattacatgctggcggaccgaagaagaaaagggttactggtttcatgcttatcaacccgaagatctttgtaccatccataa

SEQ ID NO: 26088 - DNA, 1699 bp, Homo sapiens
  SIMILAR (213)..(172): 921254mologous to Escherichia coli K12 putative endoglucanase,accession number AE000380,Smith-Waterman Score=62.
tcatataatactgaatacgcggtagtctgccgtgcctattatcttccgactggcctgacggtacttgtgtagtggtaatgtgtacgatctacctatggcaacgcacgcatacctgcaggtcgaatctcgagtatccactggtgacgagctggacgtcgcagggcagtaggaaagagaagcggcttccgtaatgtacgccagctcgtttttatccccaggcgcgtttttcgccgaaggccagccagtagtttttatcattacgcgccatcagaatcggaaaggccgcgttggagatattcaccaccgcctgaccgcgcgcattacccgtgctgccatagaagttggtggagtcatggaatacatggaacttgctgacagatttgtagttcgtatccacgccccacagcttgttgataacgccctgaatctggccgtcattaacattgcgcgtcgtcagcgagaaccagcgagcctcgttacaaccatcggttttcgcacaaatcgcggtatcgatctctttggcctgacccgtattaaactgctcaataaattcgttaggcagattaacgacttgctcaccttcccccagcgtcgcaccgttggataacgagagattgataatctcgttgatcacgttgggatattcggcaaagaccttgcgtacatcgtccggaacaacacgggtattattttgcccggtcgtcgaatagcgatgaataagctgatcaatattcgccccgcgaacttcatcacccagttcagtcagcgcaatggtcgacttattgccgcgcactgaacccagtgactctagagatccccggtaccggccaggtccgggcctggggctgctgctggcgtttaccttgtttggtaaagggatgagtaaacgttctggcccggggcgatgattattcacttcctcggtgggatccacgaactgtatttcccgtatgtgctgatgaagccgctgaccattattgccgacgatgcgggcggtatgtctggcactggacggtggtctgggacctgcaggcacgataaatgcgcgaaagaggcggatacggcagcgttttcccggctggcacagggggcgatgcaggcgctggtgaaagcgatgcccgcctggctgacccacggctttgaagtggctggcggtattctgcctgccgttggttttggcttgctcgtgcgcgtaatgttcaaagcgcaatatatcccttacctgatcgccggtttcctgtttgtttgctacatccaggtcagcaacctgttgccggttgccgtactgggcgcaggctttgcggtgtatgagtttttcaatgcgaaatcccggcagcaagcgcaaccgcagcccgttgccagtaaaaatgaagaagaggactacagcaatgggatctgggcgatgttgccgatccttgagggcaaaaccgctctcctggcccggataaagaaaatcatcgtcgctataaactttaagcagcacagactggattcgcccggccttcaccgccgccgcagaaacttcccgcgctttgtcgagagtaaacacggtgatgacgtcggtgccctgttcaacggcgtcagcaaccagcgcgcgcatgactcgcgcctctttgtaatccaccgccacaatgccgctgtagcctaatgccagcaatttttccgccagccacggattacgaccaaactgcttggtcat

SEQ ID NO: 26089 - DNA, 1865 bp, Homo sapiens
  SIMILAR (1145)..(1282): 841254mologous to Escherichia coli ALPHA-AMYLASE PRECURSOR (EC 3.2.1.1) (1,4-ALPHA-D-GLUCAN GLUCANOHYDROLASE),accession number D90889,Smith-Waterman Score=202.
atgggacgcttgaacacgctggcgggagtgcgcggcaataagtcgaccattgcgctgactgaactgggtgatgaagttcgcggggcgaatattgatcagcttattcatcgctattcgacgaccgggcaaaataatacccgtgttgttccggacgactgtacgcaaggtctttgccgaatatcccaacgtgatcaacgagattatcaatctctcgttatccaggtagagtatgatgttactgcgaaaaggcccacatgtctaagtcatcgaaacccactaacaattcgcgaggagcaattttgctcagctaatagagtagacacgtggttaaaagctaatggaactaagcggcgtacttacctccaatggaaagcctcaaagttccgacggatccaatacggcgttatgacgggaatagtaagattactggggcccacgggaaaagaaaaagctggcttcacttctatcccctaccaagaatgttaccaaacgaaattgcgcccatacgatcggaaggaagcgccattaacggggcaacaaacgtctagacttaatgttcaaacaaagccatgcatctatgtatataaagcaaccggaacagttggactaccaattgaacttgaaagaggtgataacagcggtgtttatcagtatggtcgtgctgaacatttcacccacattatatctgacaaaccttccccaaaagataaatatgttgcatatgctattaacattcctgactatgagctggcagccgatgtatataatattaacgtgacgtcaccttccggacagcaagaaacatttaaaatattaatcaatctagaacatctacggcaaacacttgaacgtaaatctcttactgctgttcagaaatcacaatgtgaaatcatcacccccaaaaaacctggcgaagcgattcttcatgcttttaatgccacctaccagcagatcagagaaaatatgtctgaatttgcacgttgccattatgggtatatacaaatccctccagtgacaactttccgcgccgacggaccagaaactcccgaagaagaaaagggttactggtttcatgcttatcaacccgaagatctttgtaccatccataatccaatgggagatttgcaggattttattgcattggttaaagatgctaaaaaatttggtagtcgatatcattcctgattatacctttaactttatgggaattgggggtagtggtaaaaatgacctggattatccctctgctgatatacgagcgaagatcagtaaagatatagaagatccagtaacaaaagaacgtaaacaaatccatccagaagatatacatctcactgcaaaagacttcgaagcaagtaaagataacatctctaaggatgaatgggaaaacctccatgcattaaaagaaaagcgtttaaatggaatgcctaaaacaacacccaaaagtgaccaggttattatgttgcaaaatcaatacgttcgtgaaatgcgaaaatatggcgtacgaggtttacgttatgatgcggcaaaacactcaaaacatgaacaaatagaaagatcaataaccccaccgcttaaaaattataatgagcgggtacacaatactaacttatttaacccaaaatatcataaaaaagccgttatgaattacatggaatatctggtaacttgtcagttggatgaacaacaaatgtcatcactgctttatgaaagagatgatttaagcgccattgatttttcattgctcatgaaaacgataaaagccttttcatttggtggagatcttcaaacccttgcatcaaaaccgggttccacaatctcaagtatcccatcagaaagacggatattgattaacattaaccacg

SEQ ID NO: 26090 - DNA, 2034 bp, Homo sapiens
  SIMILAR (1318)..(1974): 951254mologous to Escherichia coli damX,accession number U18997,Smith-Waterman Score=1067.
atggagctactagctcatagtattgtcatagcaacatggcgattacgccagaatcgcagcggtgctgagcattttggcctccagcggttaatgctacatgccagtcagttgtcattgacgcatccttttactggcgagccgctgactattcacgcgggcctggacgacacctggatgcaggcgttatcacaatttggctggcgcggtctgcttcctgaaaatgaaagggttgagttcagtgcgccatcgggtcaggatggagatccaaccttaggtctcatcaaggaagtggcatgtgagctgagtgggatgatgagaaggagccagccatgggaagaggccgaggaaagcattccagacagaggggagagcctgctggaagtgtctgggacaccgaacgcaggctggggtgctgagggccttgcagaacgggaagcgctgctcttatgctgctgttgcgggcccatggggccagaccccctcgggctgggctcccccgggtctgtccggggccgtagccgtttgattcaccacgctattagcggcgaggcgttatgggaagtgaccagtgaaggtcttgatatggcggctgcccgccagtttgccattgaaaaaggtgcccccgcccttcgcgctatgacctttatcgaacgtgcggcgatgcttaaagcggtcgctaaacatctgctgagtgaaaaagagcgtttctatgctctttctgcgcaaacaggcgcaacgcgggcagacagttgggttgatattgaaggtggcattgggacgttatttacttacgccagcctcggtagccgggagctgcctgacgatacgctgtggccggaagatgaattgatccccttatcgaaagaaggtggatttgccgcgcgccatttactgacctcaaagtcaggcgtggcagtgcatattaacgcctttaacttcccctgctggggaatgctggaaaagctggcaccaacgtggtctgggcggaatgccagccatcatcaaaccagctaccgcgacggcccactgactcaggcgatggaatttgaagataaggcgcaacagcgagatgtggaaacggcgaggcacttcacattttttcggattattgcaaatgaggataaaaaaaccgggtttccccggtttcagacaatagtgattacggcttcgcacaaaaccatcgatcgtacacgttatacgtacggagcgtggcgctgttatcggccacttctcactgttgaggagtatcgtgcgacgggaagtctgatcacccaaccgaagttccctcctcataaatcttctgaagttcatcgagtgccgcggaatcagggacgctttgtggcggtcaattccacgttgccgactgaacccgcaacggttgcgcctgttcgcaatggcaatgcatcgcgtgacacggcgaaaacgcaaaccgctgaacgtccgtccactacgcgcccagctcgtcagcaggcggtgattgaaccgaaaaaaccgcaagcaaccgtgaaaacggagccgaagccggtagcacagacgccgaagcgtactgaaccagctgcccctgtggcgagcacgaaggcaccggctgcgacttctacgccagcaccaaaagagacggcgactacggctccagtacagacggcatccccggcgcaaaccacagcaacacccgctgctggggcgaagaccgcaggtaatgttggttcgttgaaatcggcaccgtccagccattacactctgcagctgagcagttcctctaactacgacaacctgaacggttgggcgaagaaagagaatctgaaaaactacgttgtctatgaaacgacgcgtaatggtcagccgtggtatgtcctggtttctggcgtgtacgcttcgaaagaagaggcgaaaaaagcggtatctacattgccagcagatgtccaggccaaaaacccgtgggcgaaaccgctgcgtcagcggcaccgggatcttcggggcgatgaacgaagggatgaccggcgatccgagtattttaatcgccaagtcatttcttga

SEQ ID NO: 26091 - DNA, 1692 bp, Homo sapiens
  SIMILAR (859)..(1557): 961254mologous to Escherichia coli K12 putative chloride channel,accession number AE000255,Smith-Waterman Score=1142.
atgaacaaagaaattttggctgtagttgaagccgtatccaatgaaaaggcgctacctcgcgagaagattttcgaagcattggaaagcgcgctggcgacagcaacaaagaacaaatatgaacaagagatcgacgtccgcggcggtttgctgactgatgcggtcatcaagcatccacatgcggtgctgctgctggacgaaatcgagaaagcgcacccggacgtgttcaatattctgttgcaggtgatggataacggtacgctgaccgataacaacggacgcaaagcagacttccgtaacgtggtgctggtgatgaccaccaacgccggggtacgggaaactgagcgcaaatccattggtcttatccaccaggataacagcaccgatgcgatggaagagatcaagaagatctttacaccggaattccgtaaccgtctcgacaacattatctggtttgatcatctgtcaaccgacgtgatccatcaggtggtggataaattcatcgtcgagttgcaggttcagctggatcagaaaggtgtttctctggaagtgagccaggaagcgcgtaactggctggccgagaaaggttacgaccgggcaatgggcgctcgtccgatggcgcgtgtcatccaggacaacctgaaaaaaccgctcgccaacgaactgctgtttggttcgctggtggacggcggtcagtactttcttgcgggattgcgagaaaggcatcagtttgacatgaagctaaacgaaccggaagatcatattggttcactgctgtatgatggctgcgtggttggcggagaatggtcgccagacagaatgcgaagaattgctggcatggcacctttttccgtgtcgcccgtgtttcattgcccatttctgctcatgcatcatctacacatctatccggatctgcgcactatgttccaccgtctgcttatcgcaacagtcgtcggtattctcgcggcctttgccgttgccgggtttcgtcatgcgatgctgctactggagtggttgttcctcaataatgactccggcagtctggtcaatgcagcgacaaacctttccccctggcgacggttgctaactccggcgctcggcggactggcggcgggtttgttgctgatgggctggcagaaatttacccaacaacgccctcatgcgccgaccgattatatggaagcgttgcaaaccgatggacagttcgattacgcagcaagcctggttaaatcgcttgcctctctgctggtagtaaccagcggcagtgcaattggtcgcgaaggtgcgatgattcttttagctgcccttgccgcctcctgttttgcccaacgttttacgccacgccaggagtggacattatggatcgcctgtggggccgcggcgggaatggctgcggcctatcgtgccccgcttgctggcagtttatttatagccgaagtgctgtttggcactatgatgttggcctctctcggcccggtgattatttccgccgtcgtggcattgctggttagcaatctgattaatcatagcgacgcgttatctacaacgtacactctcagtgacggtcaggtcgtgatatgcctgatagccgaatttggctacctaacaatgctcccaatcggggagctacgtaagaacggttacactctcccatcaatcgtaatgggtctgaggagtaatcattttcgtttataa

SEQ ID NO: 26092 - DNA, 3090 bp, Homo sapiens
  SIMILAR (1105)..(1812): 1001254mologous to Escherichia coli SERINE/THREONINE PROTEIN KINASE AFSK (EC 2.7.1.-),accession number D90880,Smith-Waterman Score=1208.
atgagttccgatctgatcatcgccgccagtacctcaaccttctcaatgacgcctgtaaacctcggcgtcccgtataacctggtcggcattcacaacctgacccgcgacgcgggcttccacattgtcaaagagctgatttttacccgcgcgctggctgtcggcatcctcaaccatgttgtggaagtggaagaactggaagatttcaccttacaaatggcgcaccacatctctgagaaagcgccgttagccattgccgttatcaaagaagagctgcgtgtactgggcgaagcacacaccatgaactccgatgaatttgaacgtattcaggggatgcgccgcgcggtgtatgacagcgaagattaccaggaagggatgaacgctttcctcgaaaaacgagtaaaaatggaaactcagtggacaaggatgaccgccaatgaagcggcagaaattatccagcataacgacatggtggcatttattagctcggcgtccacagtgcgtcagagttcaaccttcgctgattgggtactgatggttgcgccgccgctgatctttttcctggtggcggttattttgtggggaagcctacgcagctccggcgcaattatgcggctggtgggcaagggtggcattgaagcgatctcccgtctgatgggattcctgctgcgccatcgcgacgtcggtagcatctggtgccagcgccagcactttaacctgcataccaagcccgatgatcatcatcgcgatcccccagaaaatactcagcaccccgaggtgtatttcactgttcgccgcagtaagggaagtaacttaatcaggcacaaaagggtgataagcgccccaataccaatcgcgaagaaggtcattcgccaaccgaaatactggcccacaatgcgcccgagaggtaaccctaagaccatcgccagtgctgtaccggtggcaattaaactcaatgcctgtgctcgcttcccggccggagccatacggatcgccagagacgccgtaatcgaccagaaaatcgcatgtgcaaaagccacaccaatgcgactgatcaccagaacggtaaagctccactacaaaaacgacagtacgtggctggcaataaccagcgatggtactgtggcatggcaaactaaagtcgcgggtgaagcactttcgcgcccggtggtcagcgacggtctggtgttaatccacaccagtaacggtcagttacaagcgctgaacgaagctgacggcgctgtcaaatggacagttaacctcgatatgccttcgctctctttgcgtggcgagtctgcgccgacaacggcttttggtgcggccgtcgtggggggcgataatggtcgcgtcagcgcagtgctgatggaacagggccagatgatttggcagcagcgtatttcccaggcgaccggttctaccgaaattgaccgtctgagcgatgttgacacgactcccgtcgttgttaacggcgttgttttcgcgctggcctataatggtaacctgacggcgcttgatctgcgcagtggtcagattatgtggaaacgcgaactgggttcggtgaatgatttcatcgtcgacggcaatcgcatctatctggtcgatcaaaatgaccgggtgatggcgttgaccattgatggcggcgttacgctgtggacacaaagcgatctgctgcatcgcctgctgacttctccggtgctgtataatggcaacctggtggtcggtgacagtgaaggttatctgcactggattaacgtcgaagatggtcgtttcgttgcccagcaaaaagttgatagttccggtttccagactgaaccgggtgtgaacatttccacggcgacagtttgccgtcagtgtgaagatgcaccgtgcgctaacgtctgcccgaatggtgctatcagccgtgataaagggtttgttcatgtgatgcaggaacgttgcattggttgcaaaacctgcgttgtggcttgcccgtatggtgcgatggaagtggtggtacgtccggtgatccgcaacagcggcgcgggtctgaatgtacgggctgacaaagccgaagccaataaatgcgacctgtgcaaccatcgtgaagacggcccggcgtgtatggcggcttgcccgactcatgcgctgatttgtgtcgatcgtaataaacttgaacaactgaccccagaaaaacgccgccaggcaaaattgcgagcgatgaagccagatgagtttgcgcaaatccagcaggcggtaattacccagatgctgcagcacccgcaaacgctcggcgaagaagcatcgaagttaagtaaagatttcgatcgcggcaatatgcgcttcgattcgcgtgataaaatcgtggcccagataaaactcgtgacgccgcaaaaacttgctgatttcttccatcaggcggtggtcgagccgcaaggcatggctattctgtcgcagatttccggcagccagaacgggaaagccgaatatgtacaccctgaaggctggaaagtgtgggagaacgtcagcgcgttgcagcaaacaatgcccctgatgagtgaaaagaatgagcaaaacctttacgattgcggcgctctatttgcgcctgttacttggactagcggttccgccgcctttccccgcccgctgaccgttgaagaactgctggtggtcacctttaccgaggctgccacggcagaattgcgcggtcgtatccgtagcaatatccacgagttgcgcatcgcctgtctgcgtgaaaccaccgacaatccactgtacgaacgcctgctggaagagatcgacgataaagcgcaagccgcgcagtggttgttgttagccgaacggcagatggatgaagcggcagtctttactattcacagcttttgccagcgcatgctcaacctgaatacaaacgaatgttgtttccagcggacgaccaagactatccacagggatagttttaagtccacgcccagagcagcaaaatcttgctcaggtttactccctgcgctggcacctagccagatctccagtaacacgccaatccagcctttatcgcgttttaaattctctggcgtaaccagcccgacaagtgccgccagttctcccaatgtataa

SEQ ID NO: 26093 - DNA, 2238 bp, Homo sapiens
  SIMILAR (1)..(792): 1001254mologous to Escherichia coli Flagellar biosynthesis protein FlhA,accession number D90830,Smith-Waterman Score=1341.
atggtcgatttccagcaggatggtgagttgttgggccgtatacgcagtatccgcaagaaatttgcccaggagatgggatttctgccgccagtggtgcacattcgcgacaatatggatctgcaacctgcccgctatcgcattttgatgaaaggcgtggagattggcagtggtgatgcttatccggggcgctggctggcgattaaccctggaaccgctgccgggacgttacctggtgaggcgaccgtcgatccggcatttggcctgaatgctatctggattgaaagtgcgctaaaagaacaggcgcagattcaggggtacacagtggttgaggccagcacggtggtagcaacgcatcttaaccacctcattagccagcatgccgcagagctgtttggtcgtcaggaggcgcaacagctgttggatcgcgtcgcccaggagatgccaaagctgacggaagatctcgttcctggcgtcgtcacgctcaccacactgcataaagtgctgcaaaatctcctcgatgaaaaagtaccgattcgcgatatgcgcaccattctcgaaacgctggcggaacatgcgcccatccaaagcgatccacatgaattaaccgccgtcgtgcgcgtggcgttgggacgggcgattacccagcagtggtttcctggcaaagatgaagtccatgttattggcctcgatacaccgctggaacgtttgttactacaggcgctgcagggcgggggaggactggagccagggctggcggatcgtttactggcgcaaactcaggaagcgctatccgtcaggagatgctgggtgcgccgcagtatggtgggtaaccagcgctggaacctatgcgataaagtggtcgccatcattgttacccgtctggattcgttgtcagaaaatctcgccgttcaaaccatgctgccagcgttctatgaacaaggttacgacccaatcatgatggaaagtcagttttccccgcaattagttgccgaacatttgggagtgctgaaacggcgtaatatcgacggcgtagtgctgttcggttttactggcataacagaagaaatgttagcccactggcagtcatcgctggttctgctggcgcgtgacgcaaaaggctttgcttcggtctgttatgacgacgaaggggcaatcaaaatcctgatgcaacggctgtatgaccaggggcatcgtaatatcagttatctcggcgtgccgcacagtgacgtgacaaccgggcttgctatgaagcaaggctatgagaacgttgcaaaagtgattacgcctgaaactaccgccttactgtgcgcaaccgacacgctggcacttggcgcaagtaaatacctgcaagagcaacgcatcgacaccttgcaactggcgagcgtcgaaatgccggtagcgaccggacgttacccgaccacgcgctacggcctggtggaactggagccgaaaaccggacgcaaacatcagcttcgccgacatcttgcccatttgcgtcatccgattattggcgatagcaaacatggcgatttacgccagaatcgcagcggtgctgagcattttggcctccagcggttaatgctacatgccagtcagttgtcattgacgcatccttttactggcgagccgctgactattcacgcgggcctggacgacacctggatgcaggcgttatcacaatttggctggcgcggatggagagataagttcctaatccagggagaaaacggtatggcggaaattggtatttttgtcggcaccatgtacgggaattcactgttagtggccgaagaagcggaagcgattctgaccgcgcagggccacaaagcaacggtatttgaagatcctgaattaagcgactggctgccctatcaggataagtatgttctggtggttacgtccacgaccgggcagggcgaacttcctgatagcattgtgccactctttcagggaatcaaagatagtctgggcttccagccgaatctgcgttatggcgtgattgcgctcggcgacagtagttatgtgaattctgccatggggggaacaggtcgaagcctgttggcggaacagagcgctcaccgggtggcgaatgctgctgaagacgccagtgaaaaccggaacggaacggatcaaatcggggtccacatgggggagcgtcatcattccaaccacttctctctgctacactttgaccagaatatccccatcatacacgcaacacacaacaccctaatgtag

SEQ ID NO: 26094 - DNA, 993 bp, Homo sapiens
  SIMILAR (585)..(319): 881254mologous to Escherichia coli K12 putative chloride channel,accession number AE000255,Smith-Waterman Score=401.
ttaagtcgatcgccggcctccaaaggagcgctttgggtttgaaaggggcggctctcgatgcgtgcgggtctttttgctgcgccaaaagttgcggtcggtaagtaacgttttaacccttcgggaatcacgctgcttgagctcggcacggtgacgttcggctgctaatgtcacgtcgtgggacctttccgagtacggcgaaacctgatcagtgcacagcatgccacttacactgaactccgcgccacacgacgacgagggcagcacggcggctattgcgatacttcgggacgcctcgttaccgacattccatcgacatccacatgcagctcgacatgacgacatcgcgatcgctatcgagccttcgcgaccaattgcactgccgctggttactaccagcagagaggcaagcgatttaaccaggcttgctgcgtaatcgaactgtccatcggtttgcaacgcttccatataatcggtcggcgcatgagggcgttgttgggtaaatttctgccagcccatcagcaacaaacccgccgccagtccgccgagcgccggagttagcaaccgtcgccagggggaaaggtttgtcggtctcctccggcgttcaaaaagcggcttaaagccctcggttgaaggaacgggccgcaatcctagctgactcaattcctgatgggtcggttccgtgcctttttcggcttttttttgacaaaaatggggtctattcttcccaatggtgtctttggggttgggttccgctagatccgatgtgtgaggctcccttgataagtttcgaagaaggtgaagccgtgttgccccctgtgtgcaactgtgttgggatgcgatgtgcaatgcccacgtgtcgctgctgtgatctgacgaagagtgaaacggtggttgctgcttgtggatgctgctgcatgttgcctgctgcacgtgtgcacgatgaggcctagccaagatactctggatggattgctggccttgccgaatggacat

SEQ ID NO: 26095 - DNA, 4347 bp, Homo sapiens
  SIMILAR (1064)..(1108): 801254mologous to Escherichia coli rhamnulokinase,accession number L19201,Smith-Waterman Score=64.
atgctgtttccgctggcgaccagcggcgcgatggagccgttccccttcctggcgggcacggctggcgcgctggtcggcggtctgcaaaacattggttccggcgtgctggcgtcgctctctgcgatgttgccgcaaaccgggcagcctggggttgttgatgaccttaatgggattgttgatcgtgctgtgctggctgccgctggcgacgcggatgtcgcatcaggggcagcccgtttaagcgcacgtcaccgcagcatcgtcatcagctccatgggagaacgatgctgctttatcagatcacgcatcacccgcatatgcggtcactggatttgcccgcagggtaatgagattccagtggtcgccgttgccagccatgataccgccagcgcggttatcgcctcgccgttaaacggctcacgtgctgcttatctctcttctggcacctggtcattgatgggcttcgaaagccagacgccatttaccaatgacacggcactggcagccaacatcaccaatgaaggcggggcggaaggtcgctatcgggtgctgaaaaatattatgggcttatggctgcttcagcgagtgcttcaggagcagcaaatcaacgatcttccggcgcttatctccgcgacacaggcacttccggcttgccgcttcattatcaatcccaatgacgatcgctttattaatcctgagacgatgtgcagcgaaattcaggctgcgtgtcgggaaacggcgcaaccgatcccggaaagtgatgctgaactggcgcgctgcattttcgacagtctggcgctgctgtatgccgatgtgttgcatgagctggcgcagctgcgcggtgaagatttctcgcaactgcatattgtcggcggaggctgccagaacacgctgctcaaccagctatgcgccgatgcctgcggtattcgggtgatcgccgggcctgttgaagcctcgacgctcggcaatatcggcatccagttaatgacgctggatgaactcaacaatgtggatgatttccgtcaggtcgtcagcaccaccgcgaatctgaccacctttacccctaatcctgacaattcactctacacgacagacaaaggagctttgcgcatgaccactcaactggaacaggcctgggagctagcgaaacagcgtttcgcggcggtggggattgatgtcgaggaggcgctgcgccaacttgatcgtttacccgtttcaatgcactgctggcagggcgatgatgtttccggttttgaaaacccggaaggttcgctgaccggggggattcaggccacaggcaattatccgggcaagcgcgtaatgccagtgagctacgtgccgatctggaacagcactttaagcttatcgggatcgaattggtttaaccgcaaggctttggggagtcccgcgcgttatgacgtgttgccaaaatggtggcggaatgtcgttaaaccgaccaggacccgcctgtatatcggtatcgccttctataaagtgggtgaaccttcaaagatagagccagactggatgattaacggcggcgtaccggaactgaaaaagcagctcgatcttaacgatgctgtgcccgaaattagcggcaccatcttgttccgtgaggactatcggaataaaccgcagactcaacaagcggcagatccgcccattcgtgctaaagccgcggaaattgccgttgcgcatgctcattatctgagtatcgagttttatcgaattgtccgcatcgacccgcatgccgaagaattcttgagtaatgaacaagttgagcggcagttgaagagtgcgatggaacgctggattattaacgtgctttctgcccagataaggccgcagccagcagtgacgctattatcgcggtctggcgaccgtagaaatgccggtagcgaccggacgttacccgaccacgcgctacgcgcctggtggaactggagccgaaaaccggacgcaaacatcagcttcgccgacatcttgcccatttgcgtcatccgattattggcgatagcaaacatggcgatttacgccagaatcgcagcggtgctgagcattttggcctccagcggatggagagataagttcctaatccagggagaaaacggtatggcggaaattggtatttttgtcggcaccatgtacgggaattcactgttagtggccgaagaagcggaagcgattctgaccgcgcagggccacaaagcaacggtatttgaagatcctgaattaagcgactggctgccctatcaggataagtatgttctggtggttacgtccacgaccgggcagggcgaccttcctgatagcattgtgccactctttcagggaatcaaagatagtctgggcttccagccgaatctgcgttatggcgtgattgcgctcggcgacagtagttatgtgaatttctgcaatggcggcaaacagttcgatgccttgttgcaggaacagagcgctcagcgggttggcgaaatgctgttgattgacggcccgttgaaaacccggaaccggaaacggcaatccaatcccggggtccaaccgtggggcccccagcgtgtcccgatatgttccctgcagccgaaaataacggacaagaccaagaggaaaaggagagaggaggggaagagagaagagcacgagagagaatcgaaacacggaggagaaggagagagaccaccgaagcaggaaagacggcagagagaaaagaaaggagacacgaggggacgggaagggcaggggcgggaagggaaacagaaggacgcgaggaacggagaggaaggaggggaggaaaaggggaggaagagggaggaaaggagagagccaggaaaagcgggaacgcgagatggaggaggtggaaaagagagaaagagagagcgacgagaagatgagagagggacaagggagaaggagaagaaggagccagacgagggagaaacggccaagggaggaggacggagaacagaagagaaggaaagaagaacagaggaagagaagaaagagcaggcaggggacaggaagcaggacgaggagacgaagaagagaaggagagagggcagaaagagggagaggaagaagcggagacggaacgagaaaaggagaagaaagaaagagaaaaaagaacgaaaccagaaagagagggaaaagtacgcgagagggcaggaagagggaacagcgaaggaaggaaggaaagaggagggagcagggcgagagacacagagagggaaggaacggacggtagagacgaggagaaacgcagaggacaagaaagaaggagaggggaaacgagagaaagagataaagaggaggagacacgcacagaaagatgcgctagacgagacaaagaggcgagacagaaagagagggacgcagagggagcgcgaaggagagcaaggagggagtcttagtttttttgtgtttgatgtggtagttggtgtatgtgccgaaaatcgcgtggacgggcgctgggcattggcgctcaatcggtgtagtgctcggcgttctgctgtcgcgtcgttaattatggcggacactcatcacgcacaagggcccggtaaaagcgttctgggcatcgggcagcgaattgtttctatcatggttgaaatggtagagacacgtctgcggctggcggtggtggagctggaagaggaaaaagcgaatctctttcaacttttactgatgctgggcctgacgatgcttttcgctgcatttggtcttatgagcctgatggtgctaattatttgggcggttgacccgcaatatcgcctgaatgcgatgattgccaccaccgtggtgttgctgctactggcactgattggcggtatctggacgctacgtaaatcgcgtaagtctacgttgctgcgccatacacgccatgagttagcaaacgatcggcagctgctcgaggaggagtcccgtgacagtaaagtcgaacgtgaacgaccattaccccgtttaacggtgctgccgctggtgtgtatccgaactcggggcgagcattacgatgtccgtgagcaaaacctggccatcatcacggtgaacattgcgcgcagctgcggattatctgccgcagtggcaggccgctggcgcacggttgattggcgggtgctgtcgcaccacgcctgcggatatcgccgcgttaaaagcgcgaagctgagggtttatcgggtctacatcgttcattgtaggcctgataagcgcagcgcatcaggcattgccggatggcggcacaagcgccttatccggcctacaaaaccacaaaacgttatgccgcatccgccagaacaaacatgccgtacggatggatttcaagataatactgctcgccgacgtccggttgcagacgcgtag

SEQ ID NO: 26096 - DNA, 2874 bp, Homo sapiens
  SIMILAR (1)..(675): 961254mologous to Escherichia coli K12 putative EC 3.5. amidase-type enzyme,accession number AE000130,Smith-Waterman Score= 1163.
atggatggtcctgccaacctgcgtcattttgatcgtcaactggaaggtattaccgggcgcgatgtgatcgttctaccggagatgtttaccagcggctttgccatggaagcggcagcttcgtcgctagcacaagatgacgtagtgaactggatgacagctaaggcgcagcagtgcaatgcgctgattgcaggcagtgttgcattacaaacggagtctggttcggttaaccgctttttgctggttgagccgggcggcacggtacatttttatgataagcgtcatctgttccgcatggcagatgagcatctacattataaagcgggcaatgcgcgagtgattgtgaaatggcgcggctggcgtattttgccgctggtgtgctacgacttacgttttcctgtgtggtcgcgcaatctcaacgattatgacctcgccctgtacgtcgccaactggcctgctccgcgctctctgcactggcaggcattgctgacggcccgcgcgattgagaatcaggcgtatgtggcgggatgcaatcgcgtcggcagcgatggcaacggctgccattatcgcggtgacagccgggtgattaatccgcaaggagagattatcgctactgccgacgcgcatcaggcaacgcgcattgatgcggagctgtcgatcaaatcccttacagcctttttaagtagtgttatagcatcagccttcctgtatgggaacggttcttacattgaatatatctctaggaacatgggcaggacctggaaggatccccggcgttctcggagactgaaccctgagctgggcccctggctgacatttgcagatgagccgctggtcccctcggagccccaaggtgctctgccgtcactgtgcctggctcccaaggcctacgacgtagagcgggagctgggcagccccacggacgaggacagtggccaagaccagcagctcctacggggaccccagatccctgccctggagagcccctgtgagagtgggtgtggggacatggatgaggaccccagctgcccgcagctccctcccagagttggagcagatcttcagaagaacacctatgcatctctgagtttttcatcttgcatgggcaagcagcgcaatggtgaaaaatgcgccgccaattgccatcagcgtcagaaactgcggccagacgatttcgaatccggcaccccgaggatggcctgcgcgaggctaacaaagtgtgtcgtcggcatggtcagcataatgtcctgcaccatctgcggcatactttcgcgcggcgtggaaccaccggaaagcatttgcagcggcagcagcaccagaatcaccagcagccccagttgcggcattgaacgcgctatcgtccccataaaaatgccgattgacgtggtggcaaacagactgagcgccacgcccagcataaacagcgggatcgagccttcaatcggtacgcccagtacacctttcaccatcagcaccagcgataatcccgataccaccagcaccaccagccccatcgaccagatcttcgccatcatgatctcaaacggcgttatcggcatcaccaagcctctggagaggaatagttctgattctttgatgttggccttgggcgatcctgagcagaggtttctgttggacctgcctggatttcggatctacagaaactgtgagataataaagggtcccctccgtaaatttcctgaactgaggcggatagcggttgtaataggtcggaccgtggctgccgatggtgtacaatcactgctcaaacgtgcggaagacattgtgctggcgacgcttattctgctgctgatctccccggtgctgtcctctgaagcgcacaccacttacggtgtaatcggcgttaaagtgtggatcttcaaaggcgagatcctgggtggtatggctgctgttgaacaaccggaaacctgctcgccagatccagcttcccagcctgcaacgcgcatttgtaactgggttcaggataattatgcccagccgctcacccgcgagagcgtggcgcagttttttaatatcacgcccaatcatctgtcaaaactgtttgctcagcatggaacgatgcgttttatcgagtatgtgcgttgggtgcgaatggcgaaggcgaggatgattttgcagaaatatcatctgtcaattcatgaagtggcacagcgttgcggttttccggatagcgactatttttgtcgcgttttccggcgtcagtttggcatggattatgtcgatatcctgcaaattcatcgctgggattacaacacgccgatcgaagagacgctggaagccctcaacgacgtggtaaaagccgggaaagcgcgttatatcggcgcgtcatcaatgcacgcttcgcagtttgctcaggcactggaactccaaaaacagcacggctgggcgcagtttgtcagtatgcaggatcactacaatctgatttatcgtgaagaagagcgcgagatgctaccactgtgttatcaggagggcgtggcggtaattccatggagcccgctggcaaggggccgtctgacgcgtccgtggggagaaactaccgcacgactggtgtctgatgaggtggggaaaaatctctataaagaaagcgatgaaaatgacgcgcagatcgcagagcggttaacaggcgtcagtgaagaactgggggcgacacgagcacaagttgcgctggcctggttgttgagtaaaccgggcattgccgcaccgattatcggaacttcgcgcgaagaacagcttgatgagctattgaacgcggtggatatcactttgaagccggaacagattgccgaactggaaacgccgtatagggtaccaactcattggctatttctggtttttccgggaggatcagcgcaataa

SEQ ID NO: 26097 - DNA, 3159 bp, Homo sapiens
  SIMILAR (2691)..(1567): 991254mologous to Escherichia coli Nodulation protein V (EC 2.7.3.-),accession number D90844,Smith-Waterman Score=1918.
ttactgaatctgacaccgaattccattcagaataatagattgtgctattttttctgcttctgggctttgttgataatgcgcaagacaacttacgggtttactttgttcgagccatttaatgctgatatttccctgctgctcaataccacgaacaaatgcttgtccaccctgtccaacattaccaatgacattgccttgctcatcataaatatctgcagcaaatggaatatttttaccatcacttcgtgtgatgttcataatggctgattgcccttgcacggtttcaaaatcagcaaagacgactgaaccctgacgcggtacagctactgcactggtactttttaattcaacatcgttctcaagatcgttgatatccagcgcgatacggttttcatgataaggagaaagagcgctggtgacaccataaccccatcgatcgatagtactgttgccataatttattcgcgctccttgagcacctggagcctgaactaccgccagtgtatcggagtcgctaaaactatcattactgaaagtcagtccaccgctatgcaatacaaaaccaccgtcggtgctgagagaaacttgacggctgttatcgctatttgcagaaattgaaccgggcacgtttcccggtttaccttttatggaggcattaaattgttcccagcgagttttattcaagttgagccgctgttcatactttacggttttattttgcacacctccgctgttcgttctttggagcgcattttggaggttcccttttactcggtccttgtttgggctccgcacgatgcagcagcgagatacaacaagactaacgacgaagctagtaataatcgcgccatcgcgaacgcctgtcagctgcagcgggagctgggcatcgtgaccgtatggcgggcaacttgtcgaggccggtggtaagcgcacagcgcgacgttctgatgcgggcagccagtgttccagcggtagcggccagacatttatcatttcttgtcgcgcttgcgggcaatcagcggcaacacgtttgccattttcatccagccagatggggaaacgaatgccattaatgccttcctgctccggcagtaatagagttggcggctgactcccgtccagcagccaggttgccaggcggcggcgacagttaccgtcaccttccggcaaagactgtccgcccggccagcagataacgccacgagtgactgagttcgggcgcgggtcttccggcagattcgcactgcgcgacagtaagatattattgacctgattcaacaatggtacggcactggcaaagccaaactgaccaacaacgggcgtgccgtccggtctgccagtccagatcccaatgacatagcgagcgttaaccccaatcgcccaggcgtcacgatagccatagctggtgcccgttttccatgccagtggggcgacgcgcggcaaggcactatccggcaagggttgcgcttcatcaggcataatccggggaatgatccacggcggccccgaagaacaacagagtagcggaccgacatagaaggcagcacaaagccccaggcacgagtaggcataggtgtttatttcaccgcttatcagcttttcaacctgttggagatctttattgagatcctccggccaggtcagttgctgaaaggtgagtccgcgcagctcttcctgactgtacccgagaaactggcagagcgctttgttggtttgcagccattgtccctcggtgcccactaacgccataccgatagcggaatattccatcgcgttccgaaagtgggtttcgctttcggaaatgtgtttgcgttccgcacgaaaggcatacatcaccatggtcatgatgttggcgggcagcaggatcagcaaaaacggtagccacggcatatggctcatcaggtacgtacgcggcgtagcaagcagggagggatccgcggccatcatcagcgacaccatcatcaccgtggtaaggaagatcaaaaaggcttccattcgtggcagacgcacggcgctccacatcaacagcacaataatgaaagtaaaaggccacggcagatacagcatcgaaagccagcttaacgtcagtgtgatggctaacgtgagcagcgactcaaaaagcaaccgtgggttgcgatggcgcagcagatagtgtggtttaaataacaatcccagcggcaccagtgccagagcgccgatggattctgacagtacccatatcaaaaatgccctgagaggatcgtctccgggcgtcagcaggacaaccagaacaccccccaacagaggcggaacaatggcgctgccgagtgccagacgcagccagtcagccagattttgcaaggggttataccacggcagcaatttacgtagcagcactgccccgaccacggcttcaacaatattgatggtcgtccaggtcatgttcagcgagctggtggaaaaaagcaggatggatgcggcgatatttcccagcgaacagctcagcgcaattcccggccacatgcgcccggcatggcgataaaacgccaccatcatgatggacgtcgggaaccacagtggggcgagttgggtgccaaactgcgaaagctcaagcgagaaaagggtaaagataaacgagactaaacctaaactgaccaggtgaagcagcgggtggggcagggcaattaatacatgctgtgattggttgctcattaccgctttatccgccagacctgggcgccaagattcgtttctgtggttatgctaggacaaaagttctacattttatatgcgaaatgctcataaagtgacgtaaaggcggaaaatttgcgcacctgcggtaaacattttttacctttactaaaactgatcctctaggagtcaccctgctcgccgttcaagttgggcaggggggggcggttgtaacaggtgcaggagatctaatacccctgccgctcaccactgttagacacgacgtcgcgcgggggccggtctgtcggctcgcatgttggtagctcctcccactattcagcactctcaccagtactctcggtgctgtgtctcctcctccttcgtcgctcgggccccgggccggtctactggctctatctctcgcgcgcgctcgtcgcgctgatcgcaatatcggcacagtgtcgcacgatcgtcgcatgcgtccctgcc

SEQ ID NO: 26098 - DNA, 1484 bp, Homo sapiens
  SIMILAR (780)..(1): 901254mologous to Escherichia coli K12 putative EC 2.1 enzymes,accession number AE000230,Smith-Waterman Score=1255.
ctgccccgtgggaaacttgaataagtgggtcatgccagacgatatcattaatgcctgtgccactgttgagaggttgcaggcaatcaccagcacaatctggcggtcaaagcgcagaaaatgattcttatagaaccccttcaccaccttctcgcagtaataattaaagcgctcgcgcagcattccggcattggtatgcttatcggcctgcgccagtttggactcgccccaggtatcgacatccggccacgggaagaattgcagcgcgggcgcacctgccatatctcccggcaagacaaagcgcccaggctgaataaagtgcagcccctgctctttacagtggtggagataatcggtccacgcggcggcaatgtccgccagccggttttcgtcggcaggcgctagcgggtccagcccttcgctcatcattcgccatttcgccgaccattctccgcgctgaccattgagtaagcccgtcatctggcgcgaccagcttaaatagtcctgcgccagcatcggcaggtcgagcaaccattcgccgggataatccacaatttccagatacagcgtggaggtatccttaaagtggcgtagcagcgaatcattcgatttaaaacgtagcgccaggcggatttcactgacgccgcgcgttggcgttggccaggcgggtggatcgccatataactgcgccagcccttcgtcataggtgaagcgcggaatgccaaagtcacgctggggaatgcgtttcacgcccagcaggcgctcttcacgcaccgcattaacagcggcaaaaagtggtaccgttcgctggggtatcatttcggcaaggcaagcagggcaagtagcggcatcgggaacaatttgcgtattcatggtgccgcctgtgctctggcgtatagtgaactcggtgggcaaatttgaccaaaaaaacgggtctcgcgttgaaccataacaaagggccccaggggcggacagtgctgatacaattgaacaagaaacgtttccgggtcttcccgcagccggacttctacgccatcgccgtcattacagacatcgccgtgaagatttaattgctgtgccagctgccagacaaacggacgaaaaccgacgccctgcactttgccacgaatacgcagttggacaccgcaagatgtgttttttgccattgagttattcccgccatcatgaattgcgtaacccgccctgccggacacgacagcgtcgcatccggcagtcacaggtcggcgataccgcccgctccgtattctacgaatatttccgggaattcggcggcgtttttctgcgctcagttgttcaagtttattacgatcgacacaaatcagcgcatgagtcgggcaagccgccatacacgccgggccgtcttcacgatggttgcacaggtcgcatttattggcttcggctttgtcagcccgtacattcagaaccgcgccgctgttgcggatcaccggacgtaccaccacttccat

SEQ ID NO: 26099 - DNA, 3002 bp, Homo sapiens
  SIMILAR (859)..(1455): 971254mologous to Escherichia coli similar to S. cerevisiae Lpg20p,accession number U82664,Smith-Waterman Score=1016.
atggtggcgttttatcgccatgccgggcgcatgtggccgggaattgcgctgagctgttcgctgggaaatatcgccgcatccatcctgcttttttccaccagctcgctgaacatgacctggacgaccatcaatattgttgaagccgtggtcggggcagtgctgctacgtaaattgctgccgtggtataaccccttgcaaaatctggctgactggctgcgtctggcactcggcagcgccaactcagccggtgtgaacatttccacggcgacagtttgccgtcagtgtgaagatgcaccgtgcgctaacgtctgcccgaatggtgctatcagccgtgataaagggtttgttcatgtgatgcaggaacgttgcattggttgcaaaacctgcgttgtggcttgcccgtatggtgcgatggaagtggtggtacgtccggtgatccgcaacagcggcgcgggtctgaatgtacgggctgacaaagccgaagccaataaatgcgacctgtgcaaccatcgtgaagacggcccggcgtgtatggcggcttgcccgactcatgcgctgatttgtgtcgatcgtaataaacttgaacaactgagcgcagaaaaacgccgccgaattcccggaaatattcgtagaatacggagcgggcggtatcgccgacctgtgactgccggatgcgacgctgtcgtgtccggcagggcgggttacgcaattcatgatggcgggaataactcaatggcaaaaaacacatcttgcggtgtccaactgcgtattcgtggcaaagtgcagggcgtcggttttcgtccgtttgtctggcagctggcacagcaattatctcacgggagtcgtatgcgggatggcacatgcaacttgaagtatgacgagtatagcaggagtggcagcatgcaatacaaccccttaggaaaaaccgaccttcgcgtttcccgactttgcctcggctgtatgacctttggcgagccagatcgcggtaatcacgcatggacactgccggaagaaagcagccgtcccataattaaacgtgcactggaaggcggcataaatttctttgataccgccaacagttattctgacggcagcagcgaagagatcgtcggtcgcgcactgcgggatttcgcccgtcgtgaagacgtggtcgttgcgaccaaagtgttccatcgcgttggtgatttaccggaaggattatcccgtgcgcaaattttgcgctctatcgacgacagcctgcgacgtctcggcatggattatgtcgatatcctgcaaattcatcgctgggattacaacacgccgatcgaagagacgctggaagccctcaacgacgtggtaaaagccgggaaagcgcgttatatcggcgcgtcatcaatgcacgcttcgcagtttgctcaggcactggaactccaaaaacagcacggctgggcgcagtttgtcaaaagcgatgaaaatgacgcgccagatcgccagagcggttcaacaggcagtcagtgcaagaactgcggggcagacacagagccacaagttgcagctggccctggattgtctgagttaaacccggtgcattgcccgcacctgcattatcgggcacacttccgcgccgacagacacagcgttgcatgcagcctattggacacgccagtcacgggccatcaggtggcaccaacgtacagacagcaagtaccccgagcgggccaggtgcatgacccgagtaaacatacacggatgccgtgcgagaacatcgaccccgtgcgaacaatcatccgtcgaatcagtgatccaccagtgcccgccagtgcgacacttggcgcatccaaagccagccggatccggccacggcgttcccacagtatcccagaaatcacggcaaaatcacgaaagcccggcggacaacccaaatggcaagtcatctgctggctggatcgcgacgagaaagtagtggtcatgcaaaccgtgcgtgaccagataggccagcatgtttttactgctcatcgtctggaccgacccacttctggtgtgttgttgatgggattatccagcgaggccggacggctgctggcacaacagtttgaacagcaccaaatccagaaacgttaccatgcgattgtgcgcggctggttgatggaagaagcggtgctggattatccactggtggaagaactggacaaaatcgctgataaatttgcccgcgaagataaaggcccgcagccagcagtgacgcattatcgcggtctggcgaccgtagaaatgccggtagcgaccggacgttacccgaccacgcgctacggcctggtggaactggagccgaaaaccggacgcaaacatcagcttcgccgacatcttgcccatttgcgtcatccgattattggcgatagcaaacatggcgatttacgccagaatcgcagcggtgctgagcattttggcctccagcggttaatgctacatgccagtcagttgtcattgacgcatccttttactggcgagccgctgactattcacgcgggcctggacgacacctggatgcaggcgttatcacaatttggctggcgcggtctgcttcctgaaaatgaaaggggtgagttcagtgcgccctcgggtcagggatggagaaataagttcctaatccagaaaaacgatggcgaaatggcttttggcgcccatgtcggattctcgtgtggcaaaaggacgccctaccgcgggccaacaggattgaacgaaaacagggccatcgaaatgtgggtatcccaggggaacttattgactggaaaaaaggccacttaatgggaatattgggatcgcaccttcgcgacaattgcactgccgctggttactaccagcagagaggcaagcgatttaaccaggcttgcggcgtaatcgaactgtccatcggtttgcaacgcttccatataatcggtcggcgcatgagggcgttgttgggtaaatttctgccagcccatcagcaacaaacccgccgccagtccgccgagcgccggagttag

SEQ ID NO: 26100 - DNA, 1836 bp, Homo sapiens
  SIMILAR (596)..(84): 421254mologous to Escherichia coli paaX,accession number X97452,Smith-Waterman Score=217.
atgcatgcacagattggccccatgaaaaagtttcggacaggcatttggtcagtaatgccagcattctttatttggcacgcagtgctgcgcgagaagcgccaggtaatttgcgctcaaaacaaaatcacgttatcgccacacccgctttcatcaaaagtgtctgtacatcggccagtttttgcgacggcgatgccatcaggtggtgcccagtgcgccaaaaccttgccagatcaactgctttttgacatcgccagcgttgatttatctaaaccttccgagagcaacaggagccatttacatcccatgcaggttgctctgcgcgataaattttactttctgcccgtcgctcaggcgcaagcctttatcactgaggctatagaaactgcgtcgcccgatcgggaaacatccagccagccttctttattaagacgaaacaaagcggtgccacgaaacgctcaccaaatcccagcccttccagcaaagcagccagactaccaaccagatttcaccaccacgatgggaaagcgaatcaccatacagagagagatcaaagatgtgccactgaccggaacagcgtttacagcatgttggaaaaaacgattgcctggctggcggtactttgtgtaccgctctgcaccacagcatccgcgtaaaccacgtttcaacaattcgccaaggtgctcaacaacatcgcattttcgccaagctgcattttcagccgctctggctcgatacgaatcataccggaatacggtaatcatcgttaaatgtctgacgcatattcggcgcaagaatggcactttgcttacgtgctgcgctcctctggcgacagtgaccagacaatcgagcaaagatgcggatcctaagcgtaaaaaggccagaatgcttcgccatggaaaacctgccgcgccacggcacatgcggttcttccgtgcgaatggtcgctaccagcgcgtgatgctgatatcccagaaagtcagcggaatatcggctttgttgcgcaaccaggaatctagccctggccctacgagagagaatgtcctgccagagccaagacgggtgagtaatttttcgctggcggcattgatagccgaaacggcagttgtggtggtgcattcgccgccagaggttcatgtacgcgctgctcagtacggcaacgcgcaaccgccaccccaccatgccgccgccaacaatggctacatcaacactttgcattgttattccttaaaaccgcgttcaacgcgccacccaaccgagggtgcgctgcgcagcacatcgcgtgccggggtgaataattccatcgtcatcagcccgatgtgcgcccgacaaccagcggtgcccaacggttggcaaaaagatgtacaagctactgggaagcgcacgaggcttcattttgagtgggtcaacgcaaacaaccagacctctgcttcattcagcaaagtattctcggcgttgacaatacgttgcgtaaaaccaaagaggtgccacgcattgatgttatttcagtctgtatttcgacatatcgtcgagccgcgcagtgctggtcggcttctcggttcttattccgacattggcgcatttgtggtgaccattccggtggttggcgtggcgctattcagtttggcgcagcccggaaaaccagattacaaactgaaacaggcaatacctgccagattaccgcggccaccagaagtcgttaatcagccaagttcgccaactaataacgccccgactttttgccataccgtcattaccgacgaggtgaacaggctggtgcccaaaccgccagcaaataaagccgagtgtaaagcaaaggccggccaccagatgggttaa

SEQ ID NO: 26101 - DNA, 1353 bp, Homo sapiens; identical to SEQ ID NO: 21756
  SIMILAR (1)..(804): 1001254mologous to Escherichia coli formate channel B,accession number M63654,Smith-Waterman Score=1379.

SEQ ID NO: 26102 - DNA, 4815 bp, Homo sapiens; identical to SEQ ID NO: 24178
  SIMILAR (2258)..(2199): 1001254mologous to Escherichia coli HyfR,accession number M63654,Smith-Waterman Score=95.

SEQ ID NO: 26103 - DNA, 2829 bp, Homo sapiens
  SIMILAR (393)..(560): 961254mologous to Escherichia coli putative enzyme,accession number AF242208,Smith-Waterman Score=271.
cagcaccaccagcagcaccaccgcgttcagtgccaccactgcgggtacgccatcgacgggaaatacaccatcagcgtcacccatctggcgcaggccaaacttctgggccaggaaagtgtacttgctccactggttttgccaccgccagccctcgaaagaggtgctctttcatctggcgctgtatcgcaacaatccgcgctgtaaagcggtggtgcatttgcacagcacatggtcgacggcgctttcctgcctgcaagggctggacagcagcaacgttattcgtccgttcacaccatacgtggtgatgcggatgggaaatgtcccgctggtgccttattaccgaccgggcgataaacgcatcgcacaggatctggcggaacgggaaacacacagatcatgcttttttactggcaaatcatggcccagtggtttgcggtgaaagcctgcaagaagccgccaacaatatggaagagctggaggaaacggcaaagctgatttttattctcggtgaccgcccgatccgttatctgaccgcaggtgaaattgcggaattaaggagttaatgcaatgcctcgttttgcagctaatttatccatgatgttcaccgaagtgccttttattgaacgcttcgccgcagcgcgaaaagccgggttcgatgggtaccgagatcgagtcgtatcgtggctttggatctttcttcaggggtagccaatgcaccggccaggttgggtaaatcaccgtgtgaccgatgcaatgcaaggcaatggcaatgcatggggtatcaagtgctgtccaagcgttgtacgatatttggggagcgtctagccacaggttgctgcacgtgttccgactggacttgtacgcatgggagtgcatgcacccggcagctggtagaacactacctcggaccgtgcaaggcattgcatccatggctcgtggtactcggaggatctctagagtctgaccagggctccaggtgatcgacggaacttgtatcagggaggcatgcaccgcgtggtgaatacacgtcgaccatggctccagcttaacgatatttggaggtagctcggtgctcacgtgtcgacggaatcttggtccatggagggcatgcactgatggtggtgaatacacgtgcgacctgcaggcaggcatgcatgctcggtactggaggatccttgtcgaccgtgcaaggccattgccattgcattgctctggtgtcacttggcagtatccctcatcagcagtcagaccgaaggcctcctcaacgagttcaactgctaatatttggcagtgtccaggcaccggctgcatcaaccgttgtctgcactgcacacgtttgtcaccagtgggcatgggcatagcgtggtcactgggcagggatccttcgtcaacaggagagacaccaatatcccaagcgtctaaccgacaattcacggcacggacatgcacctgacgcatcacggatgtccgaccggcacacttgcaccaagggtatggaaattgcaccgtaagatgggttgaacttacacccgtaggcccaagcgcaaccacgacaaaaccaagcaaaacgcgcccgcccaggcaagggcggcgtaaccgagcaacgacgggaaacctcgccaccgcggcaacggcccccgcaccggcaaacggccaacacaaccccgaacgaacacctgcccaggccgccacatctccaacacgacggcaacccggacggaccgccacatggtgcaaaagtaattgtggttttgccattactgttgacttgtttactacatccctccaaattatagctttctctgaagaaatctccttgctcgccgcagccgcctccgccacgcgcctcctccgccgccgggactccggcagctttatcgccagagtccctgaactctcgctttcttttaatcgcctgcatcggatcaccggcgtgccccaccatgtcagacgcagcctagacaccagctccgaaatcaccaccaaggaaggagaagaaggagttgtggaagaggcagaaaatggaagagacgcccctgctaacgggaatgtaatgaggaaaatggggagcaggaggctgacaatgaggtagatgaagaaaggaagaaggtggggaggaagaggaggaggaagaaggtgatggtgaggagaggatggagatgaagatgaggaagctgagacagctacgggcaagcgggagctgaagatgatgaggatgacgatgtcgataccaagaagcagaagaccacgaggatgaatgttaacacccactggcttggaattccagctggccagtgcaggaagctggagactgcctgaaatgaaccaagttcctgaggggcttggagtgggggcagctgccatctctgtggttccagcctgccggctcctctgggagtccaggaggtctctgaaatgtggctgaataatcaggcaggtgtccccgctgattaaacacaaaggaaagactgtcttcccaagtctgtgactggcaccgagttttaggttcacggataaaacgcgtctcctctgtctcctcctccgaaggccgctgccggctgcagtcccgcccccagccccgcggtcacctgcagcgggtgcactcaggcctccgtcggccggctccaccggcagctcccacagcccgtccgcactgtcgtcgtcgcctctgcgcccagggcagccgccgccggcactgcgccgccctcccgcgctccttgtcgttcggcgtctgagagcttgaggccccagaaggccgcgcacgggctcctggagtgttcgtgcctctttctgcgactccatggcggacatccggtcaggccgtggcat

SEQ ID NO: 26104 - DNA, 1483 bp, Homo sapiens
  SIMILAR (175)..(651): 311254mologous to Escherichia coli putative enzyme,accession number AF242208,Smith-Waterman Score=132.
cccggaaaaccagattaacaaactgaaacaggcaatacctgccgattaccgcagccaccagaagtgcgttaatcagccaagttcgccaactataacgccccgactttttgccatcaccgtcattaccgacgagcgcggctatgcaaccggttcggctggcaatctgtcgctgctttacctgacgggaatttactggcgacaccgacagttcatgcctgggcaattcgatccgcagcggttttccaaagtcgccgcggatggcgaatggttaagggtgacaaaccctcgaaagagtgctctttcatctggcgctgtatcgcaaaatccgcgctgtaaagcggtggtgcatttgccagcacatggtcgacggcctttcctgcctgcaagggctggacagcagcaacgttattcgtccgttcaaccatacgtggtgatgcggatgggaaatgtcccgctggatctggcggaactggcagcagaaatcaggcttttttactggcaaatcatggcccagtggtttgcggtgaaacctgcaagaagccgccaacaatatggaagagctggaggaaacggcaaagtgatttttattctcggtgaccgcccgatccgttatctgaccgcaggcgtctgcccgctggcgaagatgctgaacggtaccgggcagtatttatcgataaaacggtgtaccaacaaccgatccgttcgcggtacatgctctgctccccgcgccgggccaaaagggtatggcctgatgatgatgattgacgtcctctcagcgtcttactcggcttaccgttcgggcgacagaactttactatattcctaccacagggcctctgcctgtgctgactccaccaccttgacagtcctcatctcctacacctttcacttagttaattcctacagcactgtaccacctcttgaaggatcagggacccaaccagcttcaccgtcctttcctacccgggtgtctgatgaccataatcgtgactttttcttcctcttgtctccctgtggtctactacagaatttggcacaatgtattagacaagttggaatccagcttgattttggttgtgttataatttcagctcagacagaaactgatgggcctttggtctgtggacgttttgaggaagggaccccctttagtccccaaacaccgagagactgtgatcccaacaggagctacagtggaaacacacaaggagtcagaggagcaacctctagtcctggctctgccatcagctttgagcaaacagtgaatgctcggagccatgttttgagagtcacactgactttgggtttgacaagacctatgctttatgtcactgggtcattgaaatggattaatatatgcattcttcctatctctctgaagcctctccggtattacattcacctggctgctcagttccccacagctcctatttccctaggaagaagtctccatgtagtgccccatgaagaggttgctatgtga

SEQ ID NO: 26105 - DNA, 413 bp, Homo sapiens
  SIMILAR (1)..(108): 1001254mologous to Escherichia coli K12 putative dihydroxyacetone kinase (EC 2.7.1.2),accession number AE000218,Smith-Waterman Score=183.
atgcaagttgatggcggcgaaggtgtactgttgattatcaaaaattacaccggcgatattcttaactttgaaacagcgaccgagttactgcacgatagcggcgtaaaagggaattctacccccctctacgagactcaagcttgccagtatcagatgcagttcccagtcagagggatctttctaaagcacaaatccaattatgggtacgagacaggattgtctaaatcgcacaacctaaatattcaaaaaaatgaatatttaattcaaggaacagaaacgaggcaacaagatgtttgtagaagcattgaaacgccagaacccggcgctgatttccgccgcactaagcctgtggcagcagggcaagatcgccccggacagctgggtgatcgacgtggatcagatactggaaaacg

SEQ ID NO: 26106 - DNA, 359 bp, Homo sapiens
  SIMILAR (226)..(8): 611254mologous to Eimeria acervulina EAMZp35 protein,accession number X12445,Smith-Waterman Score=157.
tggaaactccaactcccgggttgcaggtagaaggtgggcttcaggaagaaggtgggcttcaggtaagaggtgggcttcaggtagaaggtgggcttcagggaagaggtgggcttcaggaagaaggtgggcttcagggaagaggtgggcttcagggagaaggtgggcttcagggaggaggtgggcttcagggagaaggtgggcttcagggagaaggtgggatcatcgggagacaaaacagaggcttctaggtactcaggatgattacgtaaagtaaaagtcagtttgctcaggatatgtgtcggaacgtcctgctcatcaataattttggccgtatccagcatgatccggccatatttcat

SEQ ID NO: 26107 - DNA, 2493 bp, Homo sapiens; identical to SEQ ID NO: 9229
  SIMILAR (7)..(516): 941254mologous to Escherichia coli similar to E. coli YjhG,accession number U70214,Smith-Waterman Score=829.

SEQ ID NO: 26108 - DNA, 1857 bp, Homo sapiens
  SIMILAR (799)..(1839): 991254mologous to Escherichia coli K12 putative transport protein,accession number AE000358,Smith-Waterman Score=1691.
atggagggagatcgacttaattcagagtaccccacattcgggaatagacgaaagacatataccgttggacgtacgctgtcaacatatcaggtgcttcgctgcttctgcaagcaactggttacgcgcctgagtcagtttttcgtgaccaaggccagcctggtcaatcagctcaaagtcaaagccggttgcagtacccagttccacgattgcgggcaggttaaaggcgaaaaccatcgcatctttgatttgcgagaaagcgcgtgttgcacgcatggtaatcgcttcaactttgttttcttcgcccggacgatcggcccagtccttcaaggaaacgaacgcaataccggtattctgaccacgtcccgcaaagccgaagccgttaacggcgaacaccgactcaacgttgttcttttctttggtcagatagtaatgcgttacctcattgagcactttctgtgtacgttcctgcgttgcacctgctggcagctgaaccatggtcataaacacgccctggtcctcatctggcaagaaggagcttggcagacgcacgaacagataggccatgccgaccacgatgatcagatacagcaccaggtaacgccccgtactgcgcagaataccgcctacgctgtcggtgtagtggtgcgtgctcttctcgaacatgcggttaaaccagccgaagaagccttttttaccttccccgtgatcgcctttggcaatcggtttcagcatggtggcacaagagctggagtcaggatcaacgccaccagtaccgacagcgccattgctgaaacaatggcaaaggtacaaccattcgttgctttgctcctcgtcagcctgttagtcgcacttgcggcaggtataccggcgggcgaagtgggtaaagtgatgatcgccgggatgggcggtgtgcttggttccgtcactattattattggtctgggcgctatgctggggcgtatgatcgaacactctggtggtgcagagtcactggctaattatttcagtcgcaagttaggtgacaaacgaactatcgctgcgctgactctggcagcgttcttcctcggtattcccgtcttctttgatgtcggctttattattcttgcgccaatcatttacggttttgccaaggttgccaaaatatcgccactcaaatttggcctgcctgtcgctgggatcatgctcactgttcacgtggcggtaccgccgcatccaggccctgtcgccgcagcggggttactccacgcagacatcggctggctaaccatcatcggtattgcgatttctattcccgtaggggttgttggctactttgcagcgaaaataatcaataagcgccaatatgcgatgtcagtagaagtactggaacagatgcaactggctccggccagtgaggaaggcgcgacaaaattaagcgataaaataaatccaccgggcgtcgcgctggtcacctcgctaattgttattcctatcgcgattatcatggcgggtacggtttccgcaacactgatgccgccttcgcatcccctgcttggtacgctacagctgatcggctcaccaatggtagctctaatgattgcgctggtgctggcattctggttattggctctacgtcgcggctggagcttacaacacaccagcgacattatgggctcagcgcttcctactgcggcggtagtgattttggttactggtgctggaggggtatttggcaaagtgctggtggaatcgggcgtcggcaaagcccttgccaacatgctaccaatgattgacctgcctctgttaccagccgcatttattatttcactggcgctgcgtgcatcgcaggggtcagcaacctctcatatgaaagaatag

SEQ ID NO: 26109 - DNA, 1614 bp, Homo sapiens
  SIMILAR (262)..(747): 951254mologous to Escherichia coli ProW protein homolog,accession number D90732,Smith-Waterman Score=777.
atgaaaattgaactgaagattacaatcaatttaacaacaagttacacaaccaattcagactccgccagcccaccaatcatgattggacggtgtaaggacaacaccaacaaaaacaggaagttagaagtctcagcaaaacaccgaccagacggctttaatacctgcctggtatattccacgtctgcccgacaaataattgacgaaattaccgtcactattcactttcacccggttatcatcggggggagacgctttgaactccttcaattttgcgcaacgttaccgcttctggcgccgatcccgctggtgattttgtggtttggcattgatgaatccgcaaaaatctttctggtggcgctcggtacgctattccccatttatatcaacacctggcatggcatccgtaatatcgatcgcgggttggtggagatggcgcgtagctatggattatccggcataccgctgtttatccatgtgatcctgcctggtgccctgccctcaattatggtcggcgtgcgttttgcgttgggcctgatgtggctgacgctgattgttgccgaaaccatttctgccaattcaggcattggttatctggcgatgaatgcgcgggagtttttgcaaacggacgtggtggtagtcgctattattctttacgccctgctcggcaaactggctgacgtcagcgcgcagctgttagagcgcctctggttgcgctggaacccggcttatcatttgaaggaggccacgggcacgccattgttgctcaatgcagtaagcaaacattacgcggaaaatatcgtcctgaaccaactggatttacatattccggcaggtcagtttgtggcggtggtgggccgcagcggtggtggcaaaagtaccctgctgcgcctgctggcaggtctggaaacgccaaccgcaggcgatgtaatgggccttatgaacgcatttgattcgcaaaccgaagattcttcacctgcaattggtcgcaacttgcgtagccgcccgctggcgcgtaaaaaactctccgaaatggtggaagaagagctggaacagatgatccgccgtcgtgaatttggcgaaggtgaacaattaccgtctgaacgcgaactgatggcgttctttaacgtcgggcgtccttcggtgcgtgaagcgctggcagcgttaaaacgcaaaggtctggtgcaaataaacaacggcgaacgcgctcgcgtctcgcgtccttctgcggacactatcatcggtgagctttccggcatggcgaaagatttcctttctcatcccggtgggattgcccatttcgaacaattacgtctgttctttgaatccagtctggtgcgctatgcggctgaacatgccaccgatgagcaaatcgatttgctggcaaaagcactgggggatcctctagagtgggcgtcaacgttaccttgctggaacgcggcgcgggcatcagcgggcgtcaggcgaggattctgcagcaaccgcaaaagtagagacgctaagcaatcccgccagcgccagtttaatgatgttacgcatgggcattacctcgcagagacagaaggtcaggaacctgttgcccaaccaacaatgtattcagcgagttgctcttcatga

SEQ ID NO: 26110 - DNA, 2133 bp, Homo sapiens
  SIMILAR (751)..(1284): 1001254mologous to Escherichia coli K12 putative flavodoxin,accession number AE000355,Smith-Waterman Score=927.
atggggtcattcatgtgccaggaagaggctggtgagggagcctcgggagaactgtacatcaagagcatccccaagggtgactcattaggatcaacatccagtggggctgagagcagcagcagcgagtgttatctcagagacagacccacagcaagacaggagatgtgcacagcgctatatcagaataatgtcggcgttaccattgccgcagatcaccctggtcgcgaagtgatgcgtacaaatacccctttagtttattcaggcaggcaggtgcgcggcgatattttgaattcaatgctccccattgagcgtaatggtgaaatcctcggctatatctgggccaatgaattaaccgaagatattcgccgccaggcctggaaaatggatgtgaggattatcattgtgctcaccgctggtttgctgataagcctgctgttgattgtccttttctcccgtcgcctgagcgccaatattgatatcatcaccgatggcctctcgactctggcacaaaatattcccactcgattaccacaattgcccggtgaaatggggcaaatcagtcagagtgttaataacctcgcccaggcactgcgtgaaacgcggacacttaacgatctgattattgaaaacgctgccgatggcgtcattgccattgaccgccagggtgatgtaaccaccatgaacccagcagcagaagttatcactggctatcaacgccatgaactgtcgactctagagatcccctatccccaggggattgcggaaaccgacccacgcgtggcggtgaaaattttcaacgtcgcccgaagcgataaaaacgaaatcctgactaatgtcttccgctcaaaaggcgtgctggtcggcacttcgacgatgaataacgtgatgatgccgaaaatcgccgggctggtggaggagatgactggtttacgcttccgtaacaaacgcgccagtgctttcggctctcacggctggagcggcggtgcggtggatcgtctttccacgcgcctgcaggatgcgggtttcgaaatgtcgcttagcctgaaagcgaaatggcgaccagaccaggacgctctgaagttatgccgtgaacacggtcgcgaaatcgcccgtcagtgggcgctcgcgccgctgccgcagagcacggtgaatacggtagttaaagaagaaacctctgccaccacgacggctgacctcggcccacggatgcagtgcagcgtctgccagtggatttacgatccggcaaaaggcgagccaatgcaggacgttgcgccaggaacgccaactggcatcggaaggcaaaatgagaagcaaattgaagatctgacccgcgaggcgatgggcttttctgaaaaacgcggtgactcgctcaatgtcgttaactcgccgttcaatagcagtgacgaaagcggcggagaactgccattctggcaacagcaagcgtttatcgatcagttacttgctgccggtcgctggttgctggtactgctggtggcgtggctgctgtggcggaaagcggtacgtccgcagctaacacgtcgcgctgaggcgatgaaagctgtacagcaacaggcgcaggcccgcgaggaagtggaagatgcggtggaagtccgcctgagcaaagacgaacaactacaacaacggcgcgctaaccaacgtctgggggcagaagtcatgagccagcgtatccgtgaaatgtctgataacgatccgcgcgtggtggcgctggtcattcgccagtggataaataacgatcatgagccgtggctactgccgatgctctctgctgctgtacctctgccgctggagcctgctaacaccaccgtttctcaaccgatgatcacgttgctgctgattgcctgcccgctgctgccattcatcattatggcgatttgcaaaggcgatcgtttgccatcgcgttcccgcggtgcggcctgggtgtgcggttacgaccacgaaaaatcaatggtgattaccgctcacggttttgccatgccggtgaaacaggcgtttgcgccggtgctgaaactacgcaaatggctgaatccggtgtctctggtgccgggctggcagtgcgaggggagtgcgttgctgttccgccggatggcgctggttgaactggcggtactggtg

SEQ ID NO: 26111 - DNA, 4218 bp, Homo sapiens
  SIMILAR (1663)..(2256): 961254mologous to Escherichia coli K12 putative dihydroxyacetone kinase (EC 2.7.1.2),accession number AE000218,Smith-Waterman Score=999.
  misc_feature (1)...(4218): n = a,t,c or g
atggaacactttggtcgcaacgaccacgtcttcacgacgggcgaaatcccgcagtgcgcgaccgacgatctcttcgctgctgccgtcagaataactgttggcggtatcaaagaaatttatgccgccttccagtgcacgtttaattatgggacggctgctttcttccggcagtgtccatgcgtgattacgactctagagatccccacgtaccgagccgtgtctgagaccactggtgaaatcctttttgacctcttgtgcgctaacggtccagagtggaaccgcttcgttacgctggaaatgaaatatggccggatcatgctggatacggccaaaattattgatgagcaggacgttccgacacatatcctgagcaaactgacttttactttacgtaatcatcctgagtacctagaagcctctgttttgtctcccgatgatcagataaatcagttaacccactacgagccagtgatcggcatcatgggtaaaactggggcgggaaagagtagcctttgcaatgccctgtttgccggtgaagtatcgccggtcagcgatgtagcggcctgtacacgtgatcctttacgctttcgcctgcagattggagaacactttatgaccatcgtggatctgcccggcgtgggcgaaagtggcgttcgcgataccgagttatctgcgctgtaccgcgaacaacttccccggctcgacctgattctgtggctgattaaggctgatgatcgggcactggcgactgatgagcatttttaccgtcaggtgattggcgaagcataccggcataagatgctgtttgttatcagccagtcagacaaagctgaatccaccagcggtggaaatatcctttccacagagcagaaacaaaatatcagccgcaaaatctgcctgctgcatgagctattccagcccgtgtggtctgtgtgtgccgtgtcggttcgcctgcagtggggactaaggcagacgaccaatcagagtacttttgccgtcatcgacgctaccacaggtcagaaaacgcagcaggcttttatgttgttgcgcaatcatccaggcttcgacgccgccttcattggcgatttgttgtgcaagaaaaccttgccagatgccaaaccgttgcctctcagcaacgaacagatgaagcaaattgaagatctgacccgcgaggcgatgggcttttctgaaaaacgcggtgactcgctcaatgtcgttaactcgccgttcaatagcagtgacgaaagcggcggagaacntccattctggcaacagcaagcgtttatcgatcagttacttgctgccggtcgctggttgctggtactgctggtggcgtggctgctgtggcggaaagcggtacgtccgcagctaacacgtcgcgctgaggcgatgaaagctgtacagcaacaggcgcaggcccgcgaggaagtggaagatgcggtggaagtccgcctgagcaaagacgaacaactacaacaacggcgcgctaaccaacgtctgggggcagaagtcatgagccagcgtatccgtgaaatgtctgataacgatccgcgcgtggtggcgctggtcattcgccagtggataaataacgatcatgacgtcatcctgctgatgaccattggcgaagaccgggcggcagagggaacaactggcaggactggcgaaacgcatccatcgctgacactgcatcaggatccggtgtatgtcacccgagctgatgcccctgttgcaggaaaagtcgccctgctgtcgggtggcggcacggaacacgagccgatgcactgtggttatatcggtcaggggatgctttcgggggcctgtccgggcgaaattttcacctcaccgacgcccgataaaatctttgaatgcgccatgcaagttgatggcggcgaaggtgtactgttgattatcaaaaattacaccggcgatattcttaactttgaaacagcgaccgagttactgcacgatagcggcgtaaaagtgaccactgtggtcattgatgacgacgttgcggtaaaagacagtctttatactgccgggcgacgcggcgttgccaacaccgtattaattgaaaaactcgtaggcgcagcggcggagcgtggcgactcactggacgcctgtgcggaactggggcgtaagctgaataatcaaggccactcaataggtatcgctctcggtgcctgtaccgttcgctccgcgggcaaaccttcttttaccctggcggataatgagatggagtttggcgtcggcattcatgctattttgaaaggcgatattcccgaagcggaagctattcttgccagcattaaaccggcaggcgtggtcagccgtgccgatgtagtgctgcctaaccagttccaggcgctgcgtaaaagttttattccagagcgcccggtgccggtaatggttactcgcctgtttgagctaccggttcaaatctcgctgggcgtttactcgctcgaacgtccggcaaacccgcagccaattgcctatctggtactacagccgcgacgtaaagccaataaccagaatgccagcaccagcgcaatcattagagctaccattggtgagccgatcagctgtagcgtaccaagcaggggatgcgaaggcggcatcagtgttgcggaaaccgtacccgccatgataatcgcgataggaataacaattagcgagggcctggatgcgcggtaccgccacgtgaacagtgagcatgatcccagcgacaggcaggccaaatttgagtggcgatattttggcaaccttggcaaaaccgtaaatgattggcgcaagaataataaagccgacatcaaagaagacgggaatagacgctgcaggcatactaaccaaccgcattgccggattgaggctgtagaatatgacgatggacgattatgcccgctacatggagcacataggggccagtcgagcgatggtgagcttgttaagccaaccgttaaaactcaatcgctcgccgtacattattctatcggcaaattacgtcatcggccaaatcatggcgcagtatattaccagcgactccggtctggaatgggccttatgaacgcatttgattcgcaaaccgaagattcttcacctgcaattggtcgcaacttgcgtagccgcctggcgcgtaaaaaactctccgaaatggtggaagaagagctggaacagatgatccgccgtcgtgaatttggcgaaggtgaacaattaccgtctgaacgcgaactgatggcgttctttaacgtcgggcgtcttcgcgctggcagcgttaaaacgcaaaggtctggtgcaaataaacaacggcgaacgcgctgcgtctcgcgtccttctgcggacactatcatcggtgagctttccggcatggcgaaagatttcctttctcatcccggtgggattgcccatttcgaacaattacgtctgttctttgaatccagtctggtgcgctatgcggctgaacatgccaccgactctagagatccccggtaccggcccaaattctattccatctcgagatcagtaccggtcagcgacaacattactctgcagcagcttctgctttctctgaacgatcaaccagctcgatgtaagccatcggcgcgttgtcgcctgcacggaagccacacttctcgctacgagtgtaaccaccggcacggctcgcgaaacgcgggcccagttcgttaaacaggacctggacgcccgtgctgtgttctcgggcgatgcagcagtttaccggtatgaacatcatcatgtactgacgccgcgtatcttcaaaatggcgggctttacgaccacagaacaacagatgattgcgactctggtcgtagggctgacctttatgttcgccacctttattgcggtgtttacggtagataaagcagggcgtaaaccggctctgaaaattggtttcagcgtgatggcgttaggcactctggtgctgggctattgcctgatgcagtttgataacggtacggcttccagtggcttgtcctggctctctgttggcatgacgatgatgtgtattgccggaatatgcgactgagcgccgcgccagtggtgtggatcctgtgctctgaaattcagccgctgaaatgccgcgatttcggtattacctgttcgaccaccacgaactgggtgtcgaatatgattatcggcgcgaccttcctgacactgcttgatagcattgcgctgccggtacgttctggctctacactgcgctga

SEQ ID NO: 26112 - DNA, 1938 bp, Homo sapiens
  SIMILAR (1400)..(1347): 881254mologous to Escherichia coli glucose-1-phosphate adenylyltransferase,accession number U18997,Smith-Waterman Score= 89.
ttactcgcgcagacgattaacggtgttcgcagttatgccggtccatttgaacggacgcttcatgttttcgatagcgtcgatgatgtcgtggtgaaccagctgttcgttctggatacctacacaacgaccgccgtaacctgcgattatcgcaaggtcaaggcaaagtccggtaatggcgttctgaataccagagatattctctggcgaaacccaccttaaggtttcaactttatcgaagccgactttttccatctcttctttaatacgatgtactacgcgtttctcgtcgcagctttcactgggaatagcaaccatgtcgcacaggaagcgagtcatatccgctttaaaatcgctgtccaggttgtcagcgaattctttggtgttcgcaaaccaggtagagcgatcatcactcacaaacttgggctgcacgcgctgttctggatgatcgctattctggcaacgaccggcattgcgttgaccatttgggttgtgcccaacagtagcactcacgtacttaatcgtgagtccggaatggtgaaaggcagtttcagtaaagtgctggcggaaccgcaggctgactttgatgacttcgccgatttgtacaaacagcggaactttaaccacagcgccagtagacagggtagcccaggtcaccttccagtccccggaatgcctgcaacacatgcggctcacgattgccttgcgatatttccgagttgccttgagcaggaggttactggtatatgctagtgtttgtttcaccttctcggggtgagttgaggccttccccaccagaactgaaaaggcacaagaggtgacaaaggtgctactaaaagacatcatatcaaggtttgggttgcctttaacccgcagctggcgaacgtcaaagcggtggatgatatctacccgatgtatggcgatctgcaaactaatccccctggcctgaaaccgcaggcgggcagcgtattgctggccccacgcctgatggcactgcttaacctgaaaacgggcgacaccattgacgtgggcgatgccaccttgcggattgccggagaagtgattcaggaaccggattccggttttaaccccttccagatggctccgcgtctgatgatgaatctggcggatgtcgataaaaccggagccgtgcagccggggagtcgggtcacctggcgttataaattcggcggcaacgagaaccagctcgacggggtctggaacaggacgaaggcgcgctggggcgatcgatggaacgctcgcaacagttcctgctgctttcggcgcttctgaccttgctgctggcagtggcagcggtggacctgcaggcatgcatgacacgcggataaggccagatcgaggttcgctttccataaagtttccagcgtacccacatcgcgccaagtacggctcggcatccgggtcggattgtacgcaagagagcgggaacgggtgcgcataggccagaccggcttcggtgatcttgggaatcaaatctttgccaaagtcgtggctggagttctcatcgcgatcgtcttcttccagcagttcatacagatagtcggcgtcaaagacgtagatacccatactcgccagagatttgctcggatcgttcggcattgacggcgggttagcaggtttttcaacgaattcgataattttatcgttctcatcaaccgccataacgccaaatgcggaggcttcttcaatcggtactggcatacaagcaacggtgcaacgtgcgcctttttcgacgtgatcgataagcatacgcgagtagtcttgcttgtagatatggtcgcccgccaggatcaccacgtattccgctttataacggcggataatgtcgaggttttgggtgaccgcatctgcggtgccgcgataccagttttcccctttcattctctgctgtgctggcagcagatcgacaaactcgttcat

SEQ ID NO: 26113 - DNA, 2323 bp, Homo sapiens
  SIMILAR (863)..(1312): 951254mologous to Escherichia coli cytochrome o ubiquinol oxidase C subunit,accession number U82664,Smith-Waterman Score=718.
tatcactctgattacgcgattcctgtccgtcgccgtacaacggcgtgaccgctgaagccctggcgatgcccgccataatctgattgcttctaacgatcacagcggcgcgtcccatggcagcgtaaaaacctacatgacaggctttatcctgtcgatcattctgacggtgattccgttctggatggtgatgacaggagctgcctctccggccgtaattctgggaacaatcctggcaatggcagtggtacaggttctggtgcatctggtgtgcttcctgcacatgaataccaaatcagatgaaggctggaacatgacggcgtttgtcttcaccgtgctaatcatcgctatcctggttgtaggctccatctggattatgtggaacctcaactacaacatgatgatgcactaagagcggcggttatgatgtttaagcaatacctgcaagtaacgaaaccaggcatcatctttggcaacctgatctcggtgattgggggaatcctgctggcctcaaagggcagcattgattatcccctggttatctacacgctggttggggtgtcactggttgtggcgtcgggttgtgtgtttaacaactacatcgacagggatatcgacagaaagatggaaaggacgaagaatcgggtgctggtgaaaggcctgatctctcctgctgtctcgctggtgtacgccacgttgctgggtattgctggctttatgctgctgtggtttggcgcgaatccgctggcctgctggctgggggtgatgggctttgtggtttatgtcggcgtttatagcctgtacatgaaacgccactctgtctacggcacgttgattggttcgctctccggcgctgcgccgccgggtgatcggctactgtgcggtaaccggtgagttcgatagcaacgcagcgatcctgctggctatcttcagcctgtggcagatgcctcactcctatgccatcgccattttccgctttaaggattaccaggcggcaaacattccggtattgccagtggtaaaaggcatttcggtggcgaagaatcacatcacgctgtatatcatcgcctttgccgttgccacgctgatgctctctcttggcggttacgctgggtataaatatctggtggtcgccgcggcggttagcgtctggtggttaggtatggctctgcgcggttataaagttgctgatgacagaatctgggccgcgcaaagctgttcgggtttctctatcatccccatcactgccctctcggtgatgatgtccgttgattttatggtaccggactcgcatacgctgctggctgctgtgtggtaaccacaccctctctattaaaaaggtgctacggcaccttttttattagcattagaaacatatccctctcgaaatatttactaaaaaatccgcatgtttaccccattcgtttgccgctttacactagtcgcgaatttaaaacagaggtggtaatgaacgattataaaatgacgccaggtgagaggcgcgcgacctggggtttagggaccgtattctcgttgcgcatgctgggcatgtttatggttctgccggttctgaccacgtacggcatggctctgcaaggtgccagcgaagcagtaatccggtattgccattggtatttatggtctgactcaggccgtttttcagatcccgtttggcctgctttccgaccgcattggtcgcaaaccattaattgtcggtgggctggcggtgtttgccgccggtagcgttatcgctgcgctttccgactccatctgggaaattattctgggccgggcgctacaaggctctggagcaattgccgccgccgttatggcgctgctttccgatctcacgcgcgaacaaaaccgcaccaaagcgatggcgtttatcggcgtgagctttggcattacctttgccattgcgatggtgcttggcccgatcatcactcacaaacttgggctgcacgcgctgttctggatgatcgctattctggcaacgaccggcattgcgttgaccatttgggttgtgcccaacagtagcactcacgtacttaatcgtgagtccggaatggtgaaaggcagtttcagtaaagtgctggcggaaccgcggctgctgaaactcaactttggcattatgtgtctgcatattttgctgatgtcgacgtttgttgccctgcccggacaactggctgatgcagggttcccggcggctgaacactggaaggtctatctggcgacaatgctaatcgcctttggctcggtcgtgcctttcattatttacgctgaagttaagcgcaaaatgaagcaagtctttgtcttctggtcttag

SEQ ID NO: 26114 - DNA, 5622 bp, Homo sapiens
  SIMILAR (2184)..(835): 981254mologous to Escherichia coli phenylalanyl-tRNA synthetase beta-subunit,accession number K02844,Smith-Waterman Score=2278.
tcaaaaaatgtctaacagcactatgcatttgacaaggatatacacataggccattgtgttttgtttgctctcaagtccattcctcattcttccacctttaggctgcatttccacaggtcccttgccaactaccttccggttaggtttgactaatggaagcgctggttggacttcagatagcctggggttgaaggccaacatctgaggatcattaggatctaccacagaaggatatggctcgaaaatcacaacttttctaggagattccaacgcagacctacacatggatactagtagatctaccaccttgggcagtatggctattttcacgaaattgattcttcctatccatgaccatggaatattcttccatttgtttgtatcctcttttatttcgttgagcagtggtttgtagttctccttgaagaggtccttcacatcccttgtaagttggattcctaggtattttattctctgtcctccgtaataaaattcttcggaatcattgtcaccttcagaatcttcctccactgtactattctgtcttgattcctgcaatcgtgtattagaagcaacaaccagaccattcctcaggatggagtgccagttttcaatgtgtgagccatttttcagctgatgtcccaatccaaatcgctcttttgtggaaatctgaaagacatcaacagtgggcacaacagtgtgaaagtgttcctgttgagtcacatcctctccatgcacctgttgtttcctgactttgtaatgtggaattctaagtggctcccagggtttgaaaagcaaacacacacagctcccgttcacatacggtaggcagatttcttcaatctccatatcgaaacgccagctcggcgcaactgcctgccattcgtctttgccttcggtcacttcgcagccgagacgacgcagaatgtcagttacctgctcatccgcaatatgatggccgatcaggcgatccagtttgctacgacgtagagtgatggttgcacgcttcggcagcgttgcttcgttggtgatatcaattaccgggccagcctcaccaccgcagatgtcgatcagcagacgggtcgcacgttccatcgctttgtgctgcagtgccggatcaacgccacgctcataacggtgagacgcatcggtatgcaggccatgacgacgagcacgaccggtgatagacagcgggctaaagaacgcgcattccagcagcacgttttgtgtttcgtcattcacgccagagtgttcgccaccgaagatgccgcccatcgccagcgccttgttgtggtcggcgatgaccagagtgtcagcattcagcttcgcttcagtaccgtcgagcagcaccagcgtttcgccctctttcgccatccgcaccacaatgccgccttcaatgcgatctttatcgaaagcgtgcatcggctggcccagttcgagcagcacatagttggtgacgtcaacaactgcatcgatagaacggatcccgcaacgacgcaatttttctttcatccacagcggagttggcgccttaaccgttaatgccacacggccaagataacgcgggcaggcttccggcgcttcgactgtaatcggcagcgtgtcgtcgatggtcgcaccaaccggaacgatttccggttgaaccagcggcagctggttcagcacggcaacgtcacgcgcaacaccaatgatgcctaagcagtcggcacggtttggcgtcacgctgatttcgatggtgttgtcatcaagtttcaggtattcacggatatcggtgccaatcggcgcatccgcaggcagttcgataatgccgctgtgatcgtcagaaatgcccagttcagagaaggagcacagcatcccttcagacggttcgccacgcagtttcgccgctttaattttgaaatcacccggcagaacagcaccaatggtcgctaccgctacacgcaggccctgacggcagtttggcgcaccgcagacgatgtccagcaggcgatcgccgccgacattcacttttgtcacacgcagtttgtcagcgttcggatgctgcgcacactcaaccacttcaccaacgaccacgccgtggaagctgccggcaaccggttctacaccgtcaacttccaggcccgccatagtgatttgatttgccagcgcatcgctatcaatcgccgggttcacgggatcctctagaatacatccccactggttaagcagaagaccaagttggcctctgaaagaagtaagcgtaggagcagtggcactaacaaatgccttttgtctgctgtgcagaggcaccgtggattgcatcgtgttagtaggaaggggtcgcttatttctccataaagtaaggtgaccagccatacaggctgaaaatatgacccgtggaacaaccggcgtgtgtgtgctggcagaacaagcgggcgctaacgtccacgtaattgatgttggtattgcgcgatgagcatcgtgtgctgcaatgtgatccccgccaagagtatggcgattgactatcaggaagggatcaagaatccggtaggactttcgggcgtgcggatgcagggcaaaagtgcacctgatcacatgtcgaccaaccggaagtaattggcggaaaaacatcgtcaaagcggttgaacgttgtggggcctttggcacgccgccaagcgacgccgaagcgattaaagttcgcacacgggttgtgcgctgggttccatcgttggaaaagatgagagcgtggaagtgccgagcgtaggtgtcgtccgccggagtctgcaacgtcagctggcagaggtacacgcgtctgcgtagatgatgacgggctgggtgagaagctacgtactgtgctgctttgattttacgcagcaggtcagacgcgtcacggccaatgccttcagcggtaacttcgattgcctggatgataccctgcgggtcaacaacgaaggtcgcacggtcagccagaccttcatcttcacgcatgttgtcgaagttacgggtcagggcgccagtcgggtcgccgatcatcgcatatttgattttagcgatggtttcagagctgctgtgccatgctttgtgggtgaagtgagtatcggtagatactgcgtatacgtctacgggatcctctgcacaggagtgttttggtttcaggtgaacataagcgccatccgacgtttcagcgtgagtctccggcaaatacaggaggtttacaatgaaacgcgcgtctttgctcgtcacggacagcgtatcggtcgtcgtagcgactggaaaaaagcttacgtcaccctgaaagaaggccagaatctggacttcgttggcggcgagatcgccagagagattttccagccctttcaactgttccagcgccgcgcgcattttctcctgacgtttggcatcgtaacgtttcaggcgaatcagcggttcaatcagacgtgaagccacctgcgggttacggctgttgaggtcggtaagcatttccaccaggaacaggtaaccgctgccatcttcggcatggaacgctgccggattgctgcccgcaaacgcgccaatcaacgaacgaatacggttcgggttgctcatggtaaatgagcgatgctgcaacaggccgcgcaccgtctccagcacattcgccgccgggataggtagtgttttctcaatttcaagacactgctgctggtccatctgtttagacgggttttcctccgcatcagactccggcatcgcaaactgcacccggtcggtcttggagggccagtgaataaagccgcttatgcattctgcctgggcgcaatggcgaacggcgtttacggcccgtatgccattttcgcctccgtcaaaatggtttcggcatttaccgtaaccgcttccacgatgctcgcaccgcgcctggctgttagggctggcaggtattaccgaaggggcgatcccgatggcgattgaagatccgctgcgggttattggttcgtttgtgctgggctctatggtaacgggcgctattgtcggtgcgatgaatataataaatcgcacgctcagggtcgaagcgagcgtaacgagtgcgcaaatcgtacaaacaatcattcgattacgacgataggttttaatgatccgttgtgctttttgcatgcgggccacctggactttgattgccagaccaccgcgtgaggtttcgcggtatttggcgttcatgtccttaccggtttcgtacatcgtttcgatgaccttatccagcgagacgcgcggtgcactggtgcggcgcagagccatccgcgcggcgttaatcgccttcacagaggcaatggcattacgctcaatgcacggcacctgaacctgccctgcaaccgggtcgcaggttaaaccaaggttgtgttccatgccaatttccgccgccacgcaaacctgttccgggctaccgcccagcagttcggcaacctctgttctcatcaggtcaccctccagacggacgaatccatagctgccgctgctttccggcgtggccccacgggcaataccgccattgttatcgtgaccgagatgacccccctgaatgctgagacggacgctgttgttttcaccatttacaccggtctgatggctgcgggagcctgccacaatccggtcatagtcccttgcctgtgtcagcatggaggcatacagggggacttctgcacgataagcattttcactgcgcagataccagctctcatcactgtcccggttgagggagtagttaaaggcaccggcctgcagcctgttcccctggacaaaggccccttcctccgtggtggcaccgttaatggcttccaccacctgaaaaccctggaccgccatcttcatgaacccggcgtggccttcacctccacccgtgcagcacgggaatggctgattctgaacatggaactcgacgttcgtaccccacgctttcgcgccaatcttacgcgctgcttcttcggcatcggctttaatcttcgccttacgttcttcgtaatcggcgatgactttcccacgctcacgcagaatttccggatactgatcggcgttatcgatggtgaattccggctcgcccataaagcggtggccgcgaatcacgcgatcggactgaatgcccagaatggttgccggaatgactttgtcgcccagcagcagggtcacggtgtgcaccggacgcacgaagtgcacgtcgcttgcgccccaacgcatcagtttcgggatcggcagtttcgccagagaagtcgcaaccatattcggcagcagtgcttcggtgctttcgcccttcacatgggcgcgatacagcagccattcgcctttatcggtagtcagacgctcagcctggtcaacggtaataccgcaaccacgcgcccaaccttctgccgctttgctcggtttgccttcagcgtcgaacgcctgggcaatcgccgggccgcgtttttcgatttcacgatccggttgcgcttccgccaggttagctactttcagcgccagacgacgcggagcagcaaaccattgaacggtgccgtgtgcgaggccagcgttatccagctccgcagtaaagttcgcagcaaaggactcagccaggctgcgcagtgcttttggtggcagctcttcagtgccgatttccaccagaaaagttttctcagacat

SEQ ID NO: 26115 - DNA, 2128 bp, Homo sapiens
  SIMILAR (853)..(1299): 1001254mologous to Escherichia coli HrsA,accession number D64014,Smith-Waterman Score=767.
atgaccaggctgcaggcaacagtgactgatggaaacggcaacccgttagccaatgaggcggtgacattcacgctaccggcagatgtgagcgcaagctttactctcggacaaggcggttccgccattactgatatcaacggcaaggctgaagttacactgagcggtacaaaatccggcacctaccccgtgacagttagcgtgaacaattatggtgtcagtgatacgaaacaggtgactttgattgccgatgctggtaccgcaaaactagcctccttaacctctgtatactcattcgtcgtcagcacgaccgagggcgcaaccatgacggcaagcgtcactgacgctaacggcaacccggtagaaggcataaaagttaatttccgcggaacctccgtcacgctaagcagcaccagcgttgaaacggatgatcggggtttcgctgaaattcttgtgacaagcaccgaggtcggactgaaaacagtttcagcctctctggcagataaacctactgaagtcatctcgcgattactgaatgccagtgcagatgttaattctgcgacgattaccagtctggagataccggaagcgcgtgatagcgctcgccgtccaccagataacgccctttacatagcgtcggataacctgcgttttcgccgtcctgataacggtcgatcagcacttcgttcaggcgggattccagcccctgcggcgtttgttgccagcgcacgaaacgggccggagaacacgcgcctatggtgttgggcgactcacccgtcagatacgacgacagatagcaacgaccttccgacataatgcacaggctgccgaaagcaaagacttccagtggtacagggctttgcggctggacttgccgccaacatgatcggctccgggtttctcggcgcggtcgttggcggattgatagccggttacttgatgcgctgggtgaaaaatcacttgcgtcttagcagtaaattcaatggattcctgactttttatctctacccggtgctcggtacgttgggagcgggcagtctgatgctgtttgtggtgggggaacctgtcgcctggatcaataactcgcttaccgcctggctgaacggtctgtcaggaagtaacgcgctgttgctgggtgccattctcggttttatgtgttcctttgaccttggagggccagtgaataaagccgcttatgcattctgcctgggcgcaatggcgaacggcgtttacggcccgtatgccattttcgcctccgtcaaaatggtttcggcatttaccgtaaccgcttccacgatgcttcgcaccgcgcctgtttaaagagtttgaaattgagaccggggaatccaccttgctgttagggctggcagatattaccgaaggggcgatcccgatggcgattgaagatccgctgcgggttattggttcgtttgtgctgggctctatggtaacgggcgctattgtcggtgcgatgaatatcggcctttcgacacccggtgccggcattttctcgctctttttacttcatgataatggcgcgggcggtgttatggcggcaattggctggtttggcgcggcattggtgggggctgcaatctctgaaggaaaacggatcttcaggtacagggacctcataatcgtaaatagcaaccagctctttttgcacgatcatcgctttccccgctgggaagggctggagtcggtctttttcctgctggcggcatttcaacaagatgtcgggatctggccgccgctgggtgcaatgctcggtcttgctactgccgtggtgctaggcttcctgctctactggggcggtattcgcctcaatcttggtgcattttttaaatggaccagcctgtttattctcttcgtcgccgcagggctggcagctggtgccattcgcgcatttcatgaagccggattgtggaaccactttcaggaaatcgccttcgatatgagtgcggtgctctcaactcactcgctgtttggcacgctgatggaagggatttttggctatcaggaagcgccgagcgtcagcgaagtcgccgtctggtttatttatctcatcccggcgctggtggcatttgctctgccaccacgcgcaggggcgacagcgtctcgctccgcgtaa

SEQ ID NO: 26116 - DNA, 525 bp, Homo sapiens
  SIMILAR (52)..(480): 951254mologous to Escherichia coli K12 putative enzyme,accession number AE000397,Smith-Waterman Score=710.
atgagcggctacgtttacaacctcggtaacgagctggcatccatgcagggcctggttgatgtggtccgcctgtcaccgcagggttcttcagcgcgagaagcattctcccactctctcgatctcgcccgtctggctgaaaagcgcggctatcatcgctactggctggcagaacaccacaatatgactggcattgccagtgctgccacgtcggtattgatcggctatctggcggcgaataccaccacgctgcatctggggtctggcggcgtgatgttgcctaaccactcaccgttggtcattgcagaacagttcggcacgcttaatacactctatccggggcgaatcgatttggggctgggtcgtgctccgggtagtgaccaacggacaatgatggcgctacgtcgtcatatgagcggcgatattgataatttcccccgcgatgtggcggagctggtggactggtttgacgcccgcgatccaatcttagagccgacacataacgggcgtcgattgtgctctacagtt

SEQ ID NO: 26117 - DNA, 700 bp, Homo sapiens
  SIMILAR (16)..(564): 981254mologous to Escherichia coli Flagellar basal body protein flgJ,accession number D90744,Smith-Waterman Score=921.
atgaatgcccgctcgaaaactgtggtgcgttatcaaaatcaggcgctttcgcagctggtgcaaaaggccgtgccacgtaactacgatgattcgctgccgggtgacagtaaagcattcctcgcgcaactctcgctgcccgcccaactggcaagccagcaaagcggtgtgccacatcatttgatcctcgctcaggcggcactggaatctggttgggggcaacggcaaatccgccgcgaaaacggcgagccgagctataacctgtttggtgtcaaagcctctggcaactggaaagggccagttactgaaatcaccacgactgaatatgaaaacggcgaagcgaagaaagtaaaagcgaagtttcgcgtctacagctcgtatctggaagccttgtcggattacgttgggctgttaacgcgtaacccgcgctacgccgccgtgacgaccgccgcgagtgcggaacagggggcgcagcccctacaggacgcgggctatgccaccgatcctcactatgcccgcaaactcaccaacatgattcagcagatgaaatcgataagcgacaaggtaatttgccccgaacagcgccacacctgctgcgcctgcaccgccaaggttgtgagaaatattccagaaaccgaggaatgtcccgcgtttacgacgcggcgtccatttggtgatggtggagtaactgcacgaaccgccg

SEQ ID NO: 26118 - DNA, 1431 bp, Homo sapiens
  SIMILAR (1)..(444): 841254mologous to Homo sapiens peptidylprolyl isomerase,accession number X52851,Smith-Waterman Score=676.
atggtcaaccccaccgtgttctttgacacggagcccttgggccgcatctcctttgagctgtttgcagacaagtttccaaagacagcaggaaactttcatgctctgagcactggagagaaaggatttggctataagggttcctgctttcacagaattgttccagggtttatgtgtcagggtggagacttcacatgccatgatggcactggtggcaagtccatctacagggagaaatttgatgacaagaacttcatccggaagcatacagtttctggcatcttgtccatggcaaatgctggacccaacgcaaacagttcccagtttttcatctgtgctgccaagactgagtggttggatggcaagcatgtggtcttcagcaaggtgaaagaaggcatgaatattgtggagaccatggagtgctttgggtccaggaatggcaagaccaagggagctgggctagcaggcagccactctcaaagatggctggctgcatctgtgtgcggtgcctctcagccaagcagactcctctcaactgcgtgccggcagcaaaaactccagatttctggtcgctccaaaggctgttctagaaaaacctctggtctggaggaccaaggcctaactaaagatggtacaaacaacacacagggcatcaagcttcagcttggtgaagaggaggagcatagcccacgtcccagctcccttgtccccgtgtcacagctcaaggctaacggcagctctagtgccagcattgcttgtgctgaggatgggccagcacgtcctgtgcccgggtgccagtgtcagaatcaagggcaccatcaaaataagaggccaaggacttctcagctatgccaaatgccaaagacgcatcttgttgtggcggatgcccggcccaacatcagccgggttttttttggccttccggagcgggaatccgcgctttggagctttcccagagactggctggtgaatctgcttaatcagtgcgatgagctgggcattcgtaaccagtttgaagtggaagtcctgagctacggtcatctgccgctggcctactccgcccgctgctttaccgcgcgttcggaagaccgcccgaaagatgagtgtgaaacctgctgcattaagtatccgaacgggcgcaacgtgctgtcgcaggaaaaccaacaagtgtttgtactcaatggcattcagaccatgagcggctacgtttacaacctcggtaacgagctggcatccatgcagggcctggttgatgtggtccgcctgtcaccgcagggtactgacactttcgcgatgctcgacgccttccgcgctaatgaaaatggcgctgcaccactgccgttgacggcgaacagcgactgtaacggctactggcggcggctggcagactttgagtgcacctgggcccactcccaagggggctgtcatgcatag

SEQ ID NO: 26119 - DNA, 1281 bp, Homo sapiens
  SIMILAR (286)..(1269): 821254mologous to Escherichia coli Flagellar hook-associated protein 1 (hap1) ,accession number D90744,Smith-Waterman Score= 1302.
atgcgggtgttgccggtacttgtgggcggcgtcctttctcgcgtttccttcgtcgtcatcatgatgcttcgtcctgccggcctcgtggtccgtttccggcgttccttggccgacgaccggagtaatcaatacgttcatcttcatacagtgacgggcattgacataccagcgtcagccaatctgcgcccgaatgcgaaaatcctcaacatctgtgacatgccaatcggtattgaaagccggatggcgcaaataacgcgatcaactggtgagcgaattaaaccagatgttggtgtagaagtcagcgttcaggatggcggcacttataacatcacgatggccaatggttactcactggttcagggaagtacggcgcggcaactggcggcagttccttccagcgctgacccttctcgtacgactgtcgcttatgttgatgggacggcaggcaatattgagatcccggagaaattactgaataccgggtcgctgggcggcattctgacattccgttctcaggatctggaccagacgcgtaatacgcttggacaactggcgctggcatttgccgaggctttcaacacccaacacaaagccggatttgatgctaacggcgatgccggtgaagatttctttgctatcggtaagcccgcggttctgcaaaacacgaaaaacaaaggtgacgttgcgatcggtgccacggtaactgatgcctccgcggtactggcgacagattacaaaatctcgttcgataataatcagtggcaggtcacccgccttgccagcaataccacttttacggtgacgccggatgccaacggtaaagtggcatttgatggtctggagttgacgtttacaggaacgcctgccgttaacgacagcttcacgctgaaaccagtaagtgacgccatcgtcaacatggatgtattaatcaccgacgaagcgaaaatagcgatggcgagcgaagaagatgcgggtgatagcgataaccgcaagggtcaggccctgctggattcggaaagcaacagtaaaacggtgggcggggcgaaatcctttaaagacgcttatggctcgttagatccccagtggtcaggcccgcgatttctttaccgaacagatgatgaaaaacgtcaggatgtggtggcgaactttaacggtctgagcgttattgccaaccgggaagctattcgttcaggtgatgatttgctgggggccattatcagctttcgtagtaaagacgaaatttccaccctcaatgcgcaagtgacgcaaataaaacaatga

SEQ ID NO: 26120 - DNA, 2475 bp, Homo sapiens
  SIMILAR (1684)..(2415): 971254mologous to Escherichia coli Flagellar hook-associated protein 1 (hap1) ,accession number D90744,Smith-Waterman Score= 1176.
atgctgatccagcgccgcaggctggcgtttgatcgggcgaagcatcgccgggcagagatgttagcgcaacgtgcgcgtggcgaagaggaagcgcatcatcacagtagcccggaaggagcaattgaagtcgatgaaagcgaagtcgatctcgatgccatcagtgcgcaatccttgcggctggtgcgctcaattttgatgttgatcgccctgctttctgtcattgtgctgtggtcagaaatccattccgctttcggcttcctcgaaaatatttcgctgtgggatgtcacctccacggtacagggcgtagaaagtctggagccaattaccctcggtgcggtgctgattgccattctggtgtttatcatcaccacgcagctggtgcgcaacttgcccgcgctgctggaactggcgattttgcagcacctggatttaacgccgggtacgggttacgccatcaccaccatcaccaaatatctgctgatgctgattggcgggctggtcggcttctcaatgattggtattgagtggtcgaaattgcagtggctggttgccgcgctcggtgttggtctcggttttggtttgcaggaaattttcgccaactttatctctggtctgattatcctgttcgaaaaaccgattcgcattggcgatacggtgacaattcgcgatctcaccggtagcgtgacgaaaattaacacccgctgccacacccaccgcaggcagcagctgctgcttcagcaggccgccaccagcagcgccgacgtgatttatcttggtgaagcggtatgcagcaagcgtcgggcaaccaaagttggcgactggctggagatggcaaaatcgctcgccgggagtggtaagcagattgtgctctccacgctggcgctggtgcaggcatcatctgaactgggcgaactgaaacgctatgttgagaacggtgagtttctgattgaagccagcgatctcggcgtggtgaatatgtgcgctgaacgcaaactgccgttcgtcgccgggcacgcgctgaactgctacaacgcggtgccccctgaaaatattgctcaaacagggcatgatgcgctggtgtatgccagtggagctttcccgcgcctggctggtgaatctgcttaatcagtgcgatgagctgggcattcgtaaccagtttgaagtggaagtcctgagctacggtcatctgccgctggcctactccgcccgctgctttaccgcgcgttcggaagaccgcccgaaagatgagtgtgaaacctgctgcattaagtatccgaacgggcgcaacgtgctgtcgcaggaaaaccaacaagtgtttgtactcaatggcattcagaccatgagcggctacgtttacaacctcggtaacgagctggcatccatgcagggcctggttgatgtggtccgcctgtcaccgcagggtactgacactttcgcgatgctcgacgccttccgcgttaatgaaaatggcgctgcaccactgccgttgacggcgaacagcgactgtaacggctactggcggcggctggcaggactgagcttgcgccagatcaagacgtgcctgatcttcctgctctgccagccacgggggcgcaggccctacaggacgcgggctatgccaccgatcctcactatgcccgcaaactcaccaacatgattcagcagatgaaatcgataagcgacaaggcggcgttaaatacggcaagtaataatatctccagctataacgttgccggatatacccgccaaaccactattatggcgcaggccaatagcacgttgggcgctggcggctgggttggcaatggtgtctacgtttctggtgtgcagcgtgagtatgatgcgtttattaccaaccagttacgtgcggcgcagacgcaaagtagcggtctgactgcccgctatgagcagatgtcgaaaatcgacaatatgctctccaccagtacctcttcgctggcaacacagatgcaggatttcttcaccagcctgcaaacgctggtgagtaacgcggaagacccggcagcgcgccaggcgctgattgggaaatcagaaggattggtgaatcagtttaaaaccaccgatcaatatctgcgcgaccaggacaaacaggtcaatatcgcgataggtgccagcgttgatcagatcaacaactacgctaaacaaattgccagcctgaacgatcaaatctcgcgcctgacaggcgtgggggcaggggcgtcacctaacaatctgctggatcaacgcgatcaactggtgagcgaattaaaccagattgttggtgtagaagtcagcgttcaggatggcggcacttataacatcacgatggccaatggttactcactggttcagggaagtacggcgcggcaactggcggcagttccttccagcgctgtcccttgtagtacgactatcagtgtgtgctgactagggcgtcagccattattgagatctccgggtacggacattgaattcgta

SEQ ID NO: 26121 - DNA, 991 bp, Homo sapiens; identical to SEQ ID NO: 17864
  SIMILAR (991)..(395): 981254mologous to Escherichia coli K12 putative 2-component sensor protein,accession number AE000485,Smith-Waterman Score=975.

SEQ ID NO: 26122 - DNA, 617 bp, Homo sapiens
  SIMILAR (97)..(489): 671254mologous to Escherichia coli similar to,accession number D90858,Smith-Waterman Score=418.
atgtggcctggtatggtgactcatgctgttcgcatcccactgcacaatgacacagtcaccctgtccgacaatttccagcccttcgccggtacagatgccatgacaataacccgccctctggagatgcttcgcgacggtaaatgcccgcagccagattggatttcgtctgaaggagcatgtgctggaaacgctacagactccccccatccttttgaattaaaagcgggcaaaacaatcacgctggaagatggaaggcagattaacggcgcagattacttagctgctccagtgccaggtaaagcgctcgctattttcggcgataccggcccctgcgatgccgcacttgacctggctaaaggtgtcgatgtcatggtgcacgaagcgacgctggatataaccatggaagccaaagccaatagtcgcggccatagctctacacgccaggctgcgacacgagaatctgaactgttccgctacaccgtgaagcacagtctgatttttgccagcgttatcggcattatcaccctgctgcaggcgtctacgaagatctacactccaggccggaaagagcaaggggagcccatgacccctcgccgcacgccagcccgctttggtct

SEQ ID NO: 26123 - DNA, 1710 bp, Homo sapiens; identical to SEQ ID NO: 10729
  SIMILAR (1)..(867): 951254mologous to Escherichia coli K12 putative 2-component sensor protein,accession number AE000485,Smith-Waterman Score=1408.

SEQ ID NO: 26124 - DNA, 1222 bp, Homo sapiens
  SIMILAR (1222)..(470): 991254mologous to Escherichia coli K12 putative 2-component sensor protein,accession number AE000485,Smith-Waterman Score=1229.
ctgttgtagcccgcagttatgggcaatatcggtcgctttcgaagaccagggagagatggtgccaggacgcggggtcaccagcaggagtttgccttgcggggcgtggctggcgagtgccgggccatatttcagcaggcgttcaagttgtgcgtgctcatcatcgtttaacggcgcattgaggtcagcaaaatggacaaccttgatacgacttctagctcggtacccaagcgtgatccaacggtagctaaagagatagacgtcgagtcgctgcatcagtttacgtacttcagttttgtccctgaaggttgaaatggcaccgatgataacgccattactgcgcaccggaacggtgttgatcagtaatagccggtctttaatcgtaatctcttcgtcgcggcgcggggtaccgtcgcgtaacacttccgagacatctaccacctgtgaccatgagtggcttagcgtcgacagtttctctatcgtcctgcgacttacggtaattcagcaattcttgtgcggcatcgttgatcagcgtgacctcgccgcgatcgtccacggcaacgacgccttctttgatagactgcaacatggcctggcgttgctcaaacagcgtggagatttcgtagggttccaggccgaaaaggatttttttcagtaccttaaccagaatgcaggtgccaatcagtccgaccagcatgccaaataataccgaccagataatgctccagcgactgtcattgatctgttgggtcacacggcttaactcaaggccgatcgccaccacgccaatttgtttatgattttcatcgtagatgggggtaaatacgcgtaaagcctgcgccagaaaaccgcgattgatagcgacattttcttcgccattcagcgctttaaggatgtcatcacctttaaatggctgaccaatacgctgggcttcaggatgcgagtagcgaagactttgcatatcggtaacgacaataaacagcagatcgttgcgtttgcgtacggcttccgcgatggcctggatgccactctcctgcggttttttctgcaagccctgacggatttccggcgagtcggcgagggtacgcgccactgccagtgccttgttggctagcccatctcgcgtcatatcactgatttgcgagaagtaaatcagatgcaccaccaatagcaccgagaacagtaccgcactgaccattaagatcactgtggtactcaatttcat

SEQ ID NO: 26125 - DNA, 2703 bp, Homo sapiens
  SIMILAR (1192)..(1764): 951254mologous to Escherichia coli Acriflavin resistance protein D,accession number D90845,Smith-Waterman Score=907.
atggaccacttggagaaagtctacgaatgcgagtcagagcccctggactgcaccacaggggcagagatcagtcctaagaggagagctgcggacgtgcggaggggcatcttgggggcacgtggaaagactggcggacgcacgaacccctatactcaggaatatggggtcacagggagaaggggagggggtgtccgaggcgacctgaacgcgaggatttggggcaaaaaggtgagaaacagttcccggggaagctcgctcggggagtttgggatgaaaagccagggcgccaaacagccggatgggactgagctgtctctggcgaatgcgtcctggatatgggtgccgttccttgccatcttcaccattgcggcgtggtttggcatgaacgatcttgctacctcgaaagcctccatcaaggagcagttgccggtactcaaacggggtcatctgtggattatgagcctgctgtatctggcaaccttcggctccttcatcggcttctccgcgggctttgcaatgctgtcaaaaacgcagttcccggatgttcagattctgcaatacgctttcttcgggccgtttattggtgcgctggcgcgttatgcaggtggtgcattatctgaccgtctgggcggaactcgtgtcacgctggtgaactttattctgatggcgattttcagcggcctgctgttcctgaccttaccgactgacgggcagggcggaagtgactctagaggatcccgggtccttcccggtgaaaccgacatcgccctgcccggcccgctgccgttcatcctctcccgcacctaccagcagttacccggacaaaacacgcccgcgcccggtggggagcctcggccccggctggaaaactgcctgcggatactccgcttaacagtgcgcgataacacactgatactcagtgataacggcggcagaagcctgtattttgagcacctgtttcccggtgaggacggttacagccgcagcgagtcactgtggctggtgcgcggcggcgtggcgaaactggatgaaggtcaccggtggccgcactctggcagcgctgccggaagaactccgcttaagtccgcatcgttatctggcgacaaacagtccgcaggggccgtggtggctgctcggttggtagcactcttcttagattatggtcttatgatatctattgcaataagaaagattttgccggatccggcagtgcatggctggacttcatttgttggcgttgatgacactaacccgtcgttgaacagtgcacgtttacaaatcaacctcaaaccgttggatgaacgtgatgatcgggtgcaaaaagtcatcgcccgtctgcaaacggcggtagataaagtgccgggcgtcgatctcttcctgcaaccaacgcaggatctgactattgatactcaggtcagccgcacccagtaccagtttaccttgcaggccacgtcactggatgcgctcagtacctgggtgccacagttgatggaaaaactccagcaactgccacagctttctgatgtctccagcgactggcaggacaaagggctggtggcgtatgtcaatgttgatcgcgacagcgccagccgtctggggatcagcatggcggatgtcgataacgccctgtacaacgcgtttggtcagcggctgatttccactatttatactcaggccaaccagtatcgcgtggtgctggagcacaacaccgaaaatacctccatggtcgcggcgctggataccattcgcctgaccagcagcgacgcggcgggtgctcgatccgccagcacaccgccgaccatcaggccaacaaacatcgcgccgccggtcagcgtcaccaaaagccccacctgccaggtggaatgtgtcatcatctggatttgcaccggcaccgcgacgccgagcaaacccagagacacaattgagatgaaacgagcgaggaatactgcgcgaaacgccggccctggtcaatccgacgcggttattcggcgtggtcagccgctggcgatcaccggagcatcaatcgccagcagtgagccggtcagggtgacgctggtggaaacaatacgctgcggctggctttccagtggagagggggcagaacggcgcaggacatcacattgcgcttatgctttacggcggaaaaaccacgtaggcagcggcggagttctggtgttctgtccgactttaccgccattacagatctgcccgatgctcagctcggctgcggaacaactgtgctcgcatgttctgccgctgtttgggctgtgccttggctggcctgcggataatccggatcttaagccgcgtttaccggcctccattttggtgcatgaaaacagctatcaaccgctggataaagcggcactggcgcagtatgacgagcaactggcggaatattacctcacccgtggcagcaataatcgccgggatacctggagcgatcatatccgccgaacaatcattaaagaaagccgcccatttattctggattatttgcacaaacaggccgctaccttggccggtgcacttcgcttaacggtcgatgccgtcattgtcccttggggcaatatcgcggatatcgctgacaacggcgatgccaactactacctgatggaagcctacaaacaccttaaaccgattgcgctggccggtgacgcgcgcaagtttaaagcaacaatcaagatcgctgacccagggtga

SEQ ID NO: 26126 - DNA, 1184 bp, Homo sapiens
  SIMILAR (827)..(1036): 981254mologous to Escherichia coli oxygen-insensitive NADPH nitroreductase,accession number D38308,Smith-Waterman Score=370.
atgggttgtttagacctaggagatggtcgggctgggagtgtcgctcgctattttcggcgataccggccaccctgcgatgccgcacttgacctggctaaaggtgtcgatgtcatggtgcacgaagcgacgctggatataaccatggaagccaaagccaatagtcgcggccatagctctacgcgccaggtactgaaaaaaatccttttcggcctggaaccctacgaaatctccacgctgtttgagcaacgccaggccatgttgcagtctatcaaagaacgcagtcggcgtcacaggttgcccaaagagaaaaagataatgacgccaaccattgaacttatttgtggccatcgctccattcgccatttcactgatgaacccatttccgaagcgcagcgtgaggcgattattaacagcgcccgtgcgacgtccagttccagttttttgcagtgcagtagcattattcgcattaccgacaaagcgttacgtgaagaactggtgacgctgaccggcgggcaaaaacacgtagcgcaagcggcggagttctgggtgttctgtgccgactttaaccgccatttacagatctgtccggatgctcagctcggcctggcggaacaactgttgctcggtgtcgttgatacggcaatgatggcgcagaatgcattaatcgcagcggaatcgctgggattgggcggggtatatatcggcgccctgcgcaataatattgaagcggtgacgaaactgcttaaattaccgcagcatgttctgccgctgtttgggctgtgccttggctggcctgcggataatccggatcttaagccgcgtttcaccggcctccattttggtgcatgaaaacagctatcaaccgctggataaagcggcactggcgcagtatgacgagcaactggcggaatattacctcacccgtggcagcaataatcgccgggatacctggagcgatcatatccgccgaacaatcattaaagaaagccgcccatttattctggattatttgcacaaacagggttgggcgacgcgctaaaaccgccacgtcgatgtatgatacgcgggcttttgaccaggtctgacagagaggtgcatggtgaaaattgccatattgtcccgggatggaacgctctattcttgtaatcgggctgcgggaagcccctatacagcgcgggcacccg

SEQ ID NO: 26127 - DNA, 1341 bp, Homo sapiens
  SIMILAR (1)..(756): 911254mologous to Escherichia coli similar to,accession number D90861,Smith-Waterman Score=1145.
atgggagaagaggccgtcgcctttgccattatcatcgcaccgctaatggtccggctgggctatgacagtattaccaccgtcctggtgacctatattgccacgcaaatcggttttgccagttcgtggatgaacccgttttgtgtggtcgttgctcaggggattgccggcgttccggtgctttctggctccgggttgcgcatcgtggtgtgggttatcgccactctgattggcctgatctttaccatggtgtacgcctcacgagtgaaaaagaatcctcttctgtcacgcgtgcatgagtccgaccgcttctttcgtgaaaagcaggctgatgttgaacaacgtccgtttacctttggtgactggctggtattgattgtcctgaccgccgtaatggtctgggtgatttggggcgtgatcgttaatgcctggttccagttcttcaccatgggtctggtgattggcatcatcggcgttgttttccgccttaacggcatgacggttaataccatggcttcatcctttaccgaaggggcgcgaatgatgatcgcccctgccctgctggtgggtttcgccaaagggattttgctgctggtcggtaatggtgaagcgggtgatgccagcgtgttaaataccatcctcaacagcattgccaatgccattagcggtctggacaacgcggtcgcggcctggtttaaaagtatcatgatccggtcattccagcacgtgtatacgaagagccgtcgtgccggaaccacccgcaatacgctgataaaaggaacggttcatcgccttacacataatgtaagaaaggatagcccccgaagaaccgaccagcgcaccggtcacaatcagcaggtcgttgctgagcataaagcccgcagccgcagccgcccagccggacaatgccagcacttgcaggccgacgctgtccgtgcgaacaaatacaatcagcagcaggaaggaaacgaccagagccgccaggttcattttgtgacggtttggcagcatcaatggtttagacgaaatcttgccacacagtttgccgaacgccaccaccgaacccgtgaacgttaccgccccgatgaagataccgaggaacacttccgtcaggtgaatattgaccagaatcggtgccattcccgcgtcatgatgcagatagctgttaaagccaaccagcactgccgccagacccacgaagctatgcaggatcgccaccagttctggcatttcggtcatttcaactttcttcgccagacggataccaattgccccaccaatgaccatcgccagcaagatccagccaacattacccgtatccggtccaaaaatggttgcgattaa

SEQ ID NO: 26128 - DNA, 1788 bp, Homo sapiens
  SIMILAR (1773)..(721): 971254mologous to Escherichia coli pyridine nucleotide transhydrogenase,accession number X66086,Smith-Waterman Score=1715.
tcattctgaccctgaagccagcggcccactgacacgcctccgcgccatggagcagcgccgcgtcaccgacttcttcgcgcgccgccgaacaccggggtcggtaccatccacagatcgccgctgaacgatagtgagaatgatcccctgcaccagttccggcagacgcacaaaagcaatggtgatattgcgcacatcgctggttaaccccgccagcaacgaggcgctaccgagttgttcaatgcgctcgacgtgagtatccagaatccgcggatgattatcagcccttaaatccagcacaggacagagctgtccggttcgcctctggttgccgttggccgaatgtgctcgctcactccacgggtgatttttgagcactgacgacgtgccagtgtgggggcaaggctcggggatagggcccaggacatgcagcaggtccctcctggagccagcaccctggggtgggaaggcgttcggtccacagccactctcaaatctgcagctgcacgtggtggagaagtattccgaaagtcctttgcttggaggcgtgttggtgagggctgaggatgagggcggagctaggtgcagagccagcgcagggttttccagacagcagtaactgcacgtgcagaggccctgaggtatggggcgcccgctgtgcttgaggaacagcagaggggtcagtgtgaagacatacccatgcacacaagccccccatgtacacaggcacaaccacgtatcggtatcagcaaagtcatcattgatctcgtccatttccagcacgatgtcatacggtacttttgcttcagccagcaatacgttcatatgtccaggcaaacgccccgcgaccgggtggataccgaaacgcacattaataccacgagcgcgcaatttctcagtaatttcagcgacaggatattgcgcctgcgcgactgccatgccgtaccccggagtaatgatcactgaatgggagtttttcagcagttccgctgtctcttctgcggtgatttcgcggtgctcacccacttcctgatcatcgccagtagaagagccgtcggtgccgaaaccacccgcaataacgctgataaaggaacggttcatcgccttacacataatgtaagaaaggatagcccccgaagaaccgaccagcgcaccggtcacaatcagcaggtcgttgctgagcataaagcccgcagccgcagccgcccagccggagtacgagttcagcatcgacaccaccactggcatatctgcaccaccgatggaggcgactaaatgccagccgaataccagcgcaattgcggtcattatcagcaatgccagcacttgcaggccgacgctgtccgtgcgaacaaatacaatcagcagcaggaaggaaacgaccagagccgccaggttcattttgtgacggtttggcagcatcaatggtttagacgaaatcttgccacacagtttgccgaacgccaccaccgaacccgtgaacgttaccgccccgatgaagataccgaggaacacttccgtcaggtgaatattgaccagaatcggtgccattcccgcgtcataatgcagatagctgttaaagccaaccagcgctgccgccagacccaggaagctatgcaggatcgccaccagttgtggcatttcggtcatttcaactttcttcgccagacggataccaattgccccaccaatgaccttcgccagcaagatccagccaacattacccgtatccggtccaaaaatggttgcgattaacgcaatcgccatcccggcgatcaccgaagttgttac

SEQ ID NO: 26129 - DNA, 972 bp, Homo sapiens
  SIMILAR (1)..(270): 731254mologous to Escherichia coli pyridine nucleotide transhydrogenase,accession number X66086,Smith-Waterman Score=308.
atggcgattgcgttaatcgcaaccatttttggaccggatacgggtaatgttggctggatcttgctggcgatggtcattggtggggcaattggtatccgtctggccaagaaagttgaaatgaccgaaatgccagaactggtggcgatcaagcaaaacttcgtgggtctggcggcagaactggatggctttaacagctatctgcatcggggatactctaaagattcacccagggtaaaggccctattaataacccggcagttattcggcctcttgactttccgcaaaatgggtcacgacccctcgccaaccaatatattcaccacatcactcaaggtgggggattactttggcaagcgacacaaagacgttttgcgtgccatacgtaacctgaaatgctccgatgacttcacccagcgcaattttgcgcccattgatttcattgataaaaatggcgatgttcagcctatgtataacatcacccgcgacggatgcatgatgctagtgatgggattcactggcaaaacagctgccgcagtgaaggagtgttacatcaatgccttcaactggatgcgccgagcagctaaaccggcgcatggcgatgggtgaagaattgcagcatcgctacgccatcaaagaaacgcgctcaaagctgaaaggcacgatcgggaacccgtttgatgaacgagcggaagaaagagaagcgcgtcctggagctcgaacatgagcacatcatgcaggtaacacagccagaattgttgattggctgatcgcggcattacagcaggcattcactgagtgcctgtgataatgcaacagcccgtacaaaacgggcttggatttatctctttgttgcgttcatggtcacatggtaaacgaattggcttaattgggtatcccaccgccccttatgaataacctgcaactaattggcttaacggccgggtttaattgtgtggacaagaaagaattaaa

SEQ ID NO: 26130 - DNA, 452 bp, Homo sapiens
  SIMILAR (257)..(198): 1001254mologous to Escherichia coli valyl-tRNA synthetase,accession number X05891,Smith-Waterman Score=107.
cagctggcagaatgacatatttgccaatcagctcctttgtaacgcggatcttccgggttaaacggctacggccagtatcgcccagcagggtttctggacgggtagtcgcgaccaccagataatctttaccgtctgaggttttcgcaccgtcagccagcggatagcggatgtgcccacatcgaactttcaccgcatttggacaggccttcgtccatggtgaagcgttcacgctcccagtcgacggagttgccgagacgggcgcatctgacgggtaatggtgccgccagattccgctttccattcccagaatttgtcgatgcaagcttcgcgggcgtagtcgtgacgggtatataccttcttctgcggccatcttgcgctcaacgaccatctgggtagcgatcccggcgtggtcagtaccgacctgccacagggtgtaaaagcccttgcattcg

SEQ ID NO: 26131 - DNA, 2392 bp, Homo sapiens
  SIMILAR (778)..(1122): 1001254mologous to Plasmid F Protein D,accession number M12987,Smith-Waterman Score=584.
gtaccgcgccaggtgtgcgccagggtcctgtgtggatgccgggcgatgaagtgaaaaaagtgacctgtaaaaatggcgtagtgaacgaaatctggacccgcaatcacgccgatattccgctacgtccacgtttcgcggttctcgccagcggcagtttctttagtgtcggactggtagcggaacattgcccaacgcgcaggaggccaacaatgaatgacaccagcttcgaaaactgcattaagtgcaccgtctgcaccaccgcctgcccggtgagccgggtgaatcccggttatccagggccaaaacaagccgggccggatggcgagcgtctgcgtttgaaagatggcgcactgtatgacgaggcgctgaaatatggcatcaactgcataacgttgtgagagctgtccctgttgtaccctgtccagagaattggaggaatctgggcacagacacatgcacagagggagaatgccacctgaagatgaaagcagagatcggggcaaggcttctgcaagccaaaaacactgccagccaaccaccagaatctaggtcagagcatggaacagattcgccctcgcagccctcacaaggaaccaaccgtgccagtacctggatcttgggcttctagtaacagctgccttaatattaaaaaatattggtaaatattcagaatgtggtcgcagttggcccagggcttcccggtatcaacagggacaccaggatttatttattctgcgaagtgatcttccgtcacaggtatttattcgcgataagctcatggagcggcgtaaccgtcgcacaggaaggacagagaaagcgcggatctgggaagtgacggacagaacggtcaggacctggattggggaggcggttgccgccgctgctgctgacggtgtgacgttctctgttccggtcacaccacatacgttccgccattcctatgcgatgcacatgctgtatgccggtataccgctgaaagttctgcaaagcctgatgggacataagtccatcagttcaacggaagtctacacgaaggtttttgcgctggatgtggctgcccggcaccgggtgcagtttgcgatgccggagtctgatgcggttgcgatgctgaaacaattatcctgacctctacccttactacacataagagaattcatactggagagaaaccctacaaatgtgaagaatgtggcaaagccttcaagcggtcttcagaccttactacgcataagataattcatactggagagaaaccctacaaatgtgaagaatgtggcaaagcttttaagtactcctctaaccttactacacataagaaaattcatactggagagagaccctacaaatgtgaagaatgtggcaaagccttcaaccagtcctcaatccttactacacataggagaattcatactggagagatattctacaaatgtgaagaatgtggcaaagcttgtaagtgctcctctaaccttactacacataagaaaattcatactggagagagacaactacaaatgtgagatggcgcctggtggacagcagaggctttgatgaatacatgaaggagctagatggtgcattggttcagcatcaggagtgggatgggaaggaaagcacaataacaagaaaattgaaagatgggaaattagtggtggagtgtgtcatgaacaatgtcacctgtactcggatctatgaaaaagtagaataaaacaaattttgggagatacgaggaggggactggcacgaatcgtggaaactgatacgcgtgagctctacgcatcgatgttctgttacaatggacaacggccgtcttttctccgaatggatgggtaaattcggttatggtcattacaccggtatcgacctggcggaagaacgttccggcaacatgcctacccgcgaatggaaacagaaacgctttaaaaaaccgtggtatcagggtgacaccattccggttggtatcggtcagggttactggacagcgaccccaatccagatgagtaaggcactgatgatcctgattaatgacggtatcgtgaaggttcctcatttgctgatgagcaccgccgaagacggcaaacaggacccgctggtgctggaggagcagctgaccacagatgagatcctcatcagggacaccttccgcacctactgccaggagagactcatgcctcgcatcctgttggccaatcgcaacgaagtacctgccctgtaccattcgacatccctggcttccagtgcgaatatcgccttagtcccctgtgtcgatgggccggcgctgccccgctgcacggacaacccgtgcacttgctccaggcagcttcataccaccaatgacgcacacttgatcactctagcagccagcaatatgttgcatctcttcactctctag

SEQ ID NO: 26132 - DNA, 1837 bp, Homo sapiens
  SIMILAR (1669)..(1830): 981254mologous to Escherichia coli glycerol-3-phosphate dehydrogenase subunit B,accession number M20938,Smith-Waterman Score=273.
atgttcctggactattttgcactgggagtgcttatttttgtatttctggtgatcttctatgggatcattattttacatgatattccctacctgattgccaaaaaacgtaatcatcctcatgccgacgccattcatgttgctggttgggtgactggtgtggtgattgaagtgacggataagaaaaatacgctgattaaaaaagatagaactcgagcttgtacccttctggacaatgacaccaccgtcgatggcttaagcgccgttgagcaactggtgtgtgaaattgccgcagaacattggcgcagcggtaagcgcgtgctcatcgcctgtgaagatgaaaagcaggcttaccggctggatgaagccctgtgggcgcgtccggcagaaagctttgttccgcataatttagcgggagaaggaccgcgcggcggtgcaccggtggagatcgcctggccgcaaaagcgtagcagcagccggcgcgatatattgattagtctgcgaacaagctttgcagattttgccaccgctttcacagaagtggtagacttcgttccttatgaagattctctgaaacaactggcgcgcgaacgctataaagcctaccgcgtggctgatatcgaacagccgctttacgagcactgggaaaagcagggctactttaagcctaatggcgatgaaagccaggaaagtttctgcatcatgatcccggcgacgaacgtcaccggcagtttgcatatgggtcacgccttccagcagaccatcatggataccatgatccgctatcagcgcatgcagggcaaaaacaccctgtggcaggtcggtactgaccacgccgggatcgctacccagatggtcgttgagcgcaagattgccgcagaagaaggtatatacccgtcacgactacgcccgcgaagcttgcatcgacaaattctgggaatggaaagcggaatctggcggcaccattacccgtcagatgcgcccgtctcggcaactccgtcgactgggagcgtgaacgcttcaccatggacgaaggcctgtccaaatgcggtgaaagaagttttcgttcgtctgtataaagaagacctgatttaccgtggcaaacgcctggtaaactgggatccgaaactgcgcaccgctatctctgacctggaagtcgaaaaccgcgaatcgaaaggttcgatgtgggcacatccgctatccgctggctgacggtgcgaaaacctcagacggtaaagattatctggtggtcgcgactacccgtccagaaaccctgctgggcgatactggccgtagccgtttaacccggaagatccgcgttacaaaggagctgattggcaaatatgtcattctgccagctggtaccgcgccaggtgtgcgccagggtcctgtgtggatgccgggcgatgaagtgaaaaaagtgacctgtaaaaatggcgtagtgaacgaaatctggacccgcaatcacgccgatattccgctacgtccacgtttcgcggttctcgccagcggcagtttctttagtgtcggactggtagcggaacgtaacggcattcgagagccgattctcggccttgatgtgctacaaaccgccacgcggggtgaatggtataagggagatttttttgcgccgcaaccgtggcagcagttcggtgtaaccactgatgagacgtacgcccgtcacaggcagggcaaaccattgaaaacctgtttgccatcggttcggtgctgggcggatttgatcccatcgcccagggatgcggcggcggtgtttgtgccgtcagtgctttacatgccgctcaacagattgcccaacgcgcaggaggccaacaatgaatga

SEQ ID NO: 26133 - DNA, 790 bp, Homo sapiens
  SIMILAR (159)..(788): 941254mologous to Escherichia coli GlnQ (AA 1-240); gtg start,accession number X14180,Smith-Waterman Score=987.
caccgcacttggaccaacctgtggtcacccttaacatctatccaaaagctgatgaaagcagcagcctgaaggcatcacgtgggacaagaggagcagcgtacaggccagcgcgccaaaatctttattctgcgtcgtctggaaagaaggatgaaaatcctgtgattgaatttaaaaacgtctccaagcactttggcccaacccaggtgctgcacaatatcgatttgaacattgcccagggcgaagtcgtggtgattatcgggccgtccggttccggtaaatcgaccctgctgcgctgcatcaacaaactggaagaaatcacctccggcgatctgattgtcgatggcctgaaggttaacgatccgaaagttgacgagcgcctgattcgccaggaagcaggtatggtgttccagcagttttacctcttcccgcatctgacagcgctggaaaacgtcatgtttggcccgctacgcgtgcgtggcgcgaacaaagaagaggcggaaaaactggcacgtgagctgctggcgaaagtcggtctggcagaacgtgcacatcactacccttccgaactttctggtggtcaacagcagcgtgtggcgattgcccgcacgctggcggtgaaacacaaaatgatgctgtttgatgaaacgactttcgattttgacccggaacttgtccatgaagtgctgaagggtatgcaggatctggctgaagaagggatgacgatggtgatcgtgacccacgaaatcgggtttgccgagaaaagaacttcgcggctgatctttatcgacat

SEQ ID NO: 26134 - DNA, 636 bp, Homo sapiens
  SIMILAR (1)..(234): 1001254mologous to Escherichia coli leucine binding protein,accession number M29377,Smith-Waterman Score=397.
tcagcggaagggctgctggtgaccaagccgaagaactacgatcaggttccggcgaacaaacccattgttgacgcgatcaaagcgaaaaaacaggacccaagtggcgcattcgtttggaccacctacgccgcgctgcaatctttgcaggcgggcctgaatcagtctgacgatccggctgaaatcgccaaatacctgaaagcgaactccgtggataccgtaatgggaccgctgaccaaccaccgccatcagccatgacttgccgttgcggttaagtgtcgagaaaaagacatcgccgcctggtttcaccagttgcgcacaggctctgaccactgactgcggatcggggacgtgctccagcatctccatgcaggtcaccacatcatactgcccggcatgttttgccgcgtgctcttccacggtttccatgttagccaggatggtctcgatctcttgaccttctttagagcacagggcgaggatcccaatagtttggaagaacagtatctccggttgattgctttcaccccaaccacagtcatcgataatttcaacatagcgggtcggtctccagtaagtgtacccaacttcacctggaaaattctgatcttttagatttgcttctcccttttgccacat

SEQ ID NO: 26135 - DNA, 1667 bp, Homo sapiens
  SIMILAR (1058)..(1336): 971254mologous to Escherichia coli GlnQ (AA 1-240); gtg start,accession number X14180,Smith-Waterman Score=457.
atgacgaggcactacggtgctgaagcaacaaatgccctgcttccaggaaaagcctctaagcatcagattgtcggatgcggcgtaaacgccttatccgacctggatccccgtaggccggacaagacgcgcagcgtcgcctccggcataggagcggcgctactgcttcgcctcatcaaaacactggctgatgatctccagaacctgacggatctgagcgtcttcaatggtgagcggtacaaggatgcgcagcacgttgtaatacgggccgcaggagagaagaatcaggcctttatcgcgggcgcgagacacgatctcggcggggagttaggggtcggcctggtgtggatcccggcttcaaaggtcaatgggataatgggcccaagcccggtgtggctaacgtttcgcgtgtctaacattgcgggcgaatcagcggaagggctgctggtgaccaagccgaagaactacgatcaggttccggcgaacaaacccattgttgacgcgatcaaagcgaaaaaacaggacccaagtggcgcattcgtttggaccacctacgccgcgctgcaatctttgcaggcgggcctgaatcagtctgacgatccggctgaaatcgccaaatacctgaaagcgaactccgtggataccgtaatgggaccgctgacctgggatgagaaaggcgatctgaaaggctttgagttcggcgtatttgactggcacgccaacggcacggcgaccgatgcgaagagatattgcgccaacgtgaagggggtgaatcccgacacgcaggaaccaagtccctcgggcgttaaggttaacgatccgaaagttgacgagcgcctgattcgccaggaagcaggtatggtgttccagcagttttacctcttcccgcatctgacagcgctggaaaacgtcatgtttggcccgctacgcgtgcgtggcgcgaacaaagaagaggcggaaaaactggcacgtgagctgctggcgaaagtcggtctggcagaacgtgcacatcactacccttccgaactttctggtggtcaacagcagcgtgtggcgatttgcccgcgcgctggcggtgaagccgaaaatgatgctgtttgatgacccgacttccgctcttgacccggaactgcgccatgaagtgctgaaggttatgcaggatctggctgaagaagggatgacgatggtgatcgtgacccacgaaatcggttttgccgagaaagtacgttcgcggctgatctttatcgacaaaggccggattgcggaagatggcaatccgcaggtgttgatcaagaacccgccgagccagcgcttgcaggaatttttgcagcacgtctcttaataagacacattgcctgatgcgctacgcttatcaggcctacaggatatctggcaacttattaaaattgcatgaacttgtaggacggataaggcgttcacgccgcatccggcaaaaaagcccgcacgttgtcagcaacctgcttaatatcccttcctccctttcacccgaaagggaggcacaccagattcctatcatttaaaatcgcccctcctccagcatctatacttatctttttgctctattttctcactggaggagtcatgcggtggacctgttcatcctcttctgcctgctgggggacctgccacggggtatccataccggggta

SEQ ID NO: 26136 - DNA, 2187 bp, Homo sapiens
  SIMILAR (2187)..(1555): 1001254mologous to Escherichia coli paaZ,accession number X97452,Smith-Waterman Score=1056.
ctaaacttgatgctggtaaccctggctgaactctgcgcgaacaagcatcgtggctgctttgtgcatattgaacgtgttacacgacgtgtatagtcgaaaacagccggttgcgaagttggggtcgctttgatacacagtcgcggcaagttccgacggcagattgaactcgacataacgaccgcgacgatataactggaaattgcgctcgcgctcgccgtaggccatcgctttccgtcgctcgacaattggtaaataagcgtcggtgtagcctttgcctaccgcctgcataaaggcaaaacagcggtcgaaatctggcgtgttcaggtcatcaaagaacacggtggttccggttctactgctcaggaaatcaaagactccgtaagctacggcgtagtaaaaatgaacatcgataccgatacccaatgggcaacctgggaaggcgttctgaactactacaaagcgaacgaagcttatctgcagggtcagctgggtaacccgaaaggcgaagatcagccgaacaagaaatactacgatccgcgcgtatggctgcgtgccggtcagacttcgatgatcgctcgtcgcccagttgccacgtgctatagagtggacaattgccagccccagcccgcagccgccggttgagcgatcccggctgggatcgaggcgaacaaaaggttcaaagatatgttcgcggttttctggggcaatccctgggccatcatcctcaacaattaatgtcgctctattccccgacagtagcaggctggtttcaaccgttgaatggcagtaccgcagggcgttattgagcaaattatccagcacgcgctccatataagcagcatatacccaaatggctcgaaccctcatcaaggtggatacgttcattgagatgcccatcgccgaatcgttgctccgctggttgcagtttgaacatatgctgccagtgcggactgcatccagataattgaccggaaaggcgagggacatagccctaaaagcgatcggggcgatatccagcaatcgcatctgatggagataatggagatgaggaacaggaccaaatgccagcccgtatgggctgcgcgggatacgctgtaaaaacgtgtactgatcgtccagggcgagcatttggtcggccagcagaacgagcgctggattctcccagttgagatccgcctgttctggtgcaaagagatgcaaatagtactgttcgctttccgcatgccagcgccagcgcagatcctgccggggatattccgccaatctttggcccaggctgccggggctgatttggtgtacgtgggcgtcgagccaccgaagcccaaagccgaagtgattctggtggcagaatacagcccgatcaaaaccgtagccgatcttggctgccccctccacgtacaaaaggtgagcagatatcctccagaattcacacaagtcataacaccggtacaatgctatgtcaccattgacgcacttggtcagtacgcggcttggacacgtgcgaatatgacataccgccccggcagtaatatcattcaaaacctgggtaacgatatccggctgcggacagtacaataaggttggcgggaagaaggcacccgcagcagataaatccgcctgaccaccgaggcgaatctcgcatcctgcagccagcaatatgttcactttttcctgcacatcggcacgctgctcagcatttaccagtgcgcccattttcacgccttcctgagcaggatcaccgaccacgactttctgtaatcgcgcaaccagagcatcactgacagcattaaccaatgcctgcggcacaataatccgccggattgccgtacatttttgcccggcttttgtggtcatctcacgcacaacttcacgaataaacagcgcaaactccggttgatccggggtgacatcttcgcccagtacgcagcagttcagggaatcagcttccatagtgaaggggatagatttggcgacgatatttggctgaactcgcagcatctgtccggtcgccgctgaccccgtgaaagtcaccacatcctggctgtccagatgatccaacaagtcgccagcactaccgcagatcagactaattgcgccttcgggaacaagaccactatcgacaattgatttcaccatcgcctgagtcagttgggccgtcgcggtagctggtttgatgatggctggcat

SEQ ID NO: 26137 - DNA, 1352 bp, Homo sapiens
  SIMILAR (696)..(1349): 911254mologous to Escherichia coli putative aliphatic sulfonate binding protein precursor,accession number AJ237695,Smith -Waterman Score=1009.
ggcggacagcaccagaaacgccaaatcagcgccctgctacactcgattccggcattcttggcggctacattgcgcccgataatctcaccatcacgtttatcggtgggcactcattgtttgatgagcgcttttgccttgcgcacagatgccagaaagctgcagaagatgacgcgtttccccacgactcgcttgatgcggcctccttgctggaatatgcgcgggaaaaactaaatggcctggatgtagaggtttatcactggaatctgcaaaacttcgccccggaagatctactttatgctcgtttcgatagtccggcactcaagaccttcaccgaacagctgcaacaggccgatgggctgattgtcgccacgcctgtgtataaagccgcctattccggtgcgttgaaaaccctgctcgacctgctgccagaacgcgctttgcaaggcaaagtggtgctaccgctggcgacgggcggtaccgtggcccatctgctggcggtcgattatgcccttaaaccagttttaagcgcactgaaagctcaggagatcctgcacggcgtgtttgccgatgactcacaagtaattgattaccatcacagaccccagttcacgccaaatctgcaaacccgtcttgataccgcgctagaaactttctggcaggcattgcaccgccgcgatgttcaggttcctgaccttctgtctctgcgagcaccgaagcccaaagccgaagtgattctggtggcagaaaacagcccgatcaaaaccgtagccgatcttaaaggtcacaaagtgcctttcagaaaggttccagtcacacaaccttttactgcgtgcatgcgtcaggccggacttaagtttaccgatatccaacccacttacctgacgcccgctgatgcccgcgccgcgttccagcaaggtaacgttgacgcctgggctatctgggatccctactactctgctgcattattacagggcggcgtgcgggtgctgaaagacggcaccgatctcaatcaaactggatcgttttatctggcagctcgtccctatgcagaaaaaaacggcgcttttattcagggcgtactggcaacctttagtgaggccgatgcgttaacccgcagccagcgcgagcaaagcatcgctttactggcaaaaacgatgggcttaccggcaccggtgattgcctcttacttagatcatcgccctcctaccaccatcaaaccggttaacgccgaggttgccgccttacagcagcaaacggcagatctgttttatgaaaatcgtctggtgccgaaaaaagtcgatattcgccagcgcatctggcagcccactcaactggaaggaaaacaattatga

SEQ ID NO: 26138 - DNA, 1939 bp, Homo sapiens
  SIMILAR (436)..(981): 851254mologous to Escherichia coli putative aliphatic sulfonate binding protein precursor,accession number AJ237695,Smith -Waterman Score=719.
tactttatgctcgtttcgatagtccggcactcaagaccttcaccgaacagctgcaacaggccgatgggctgattgtcgccacgcctgtgtataaagccgcctattccggtgcgttgaaaaccctgctcgacctgctgccagaacgcgctttgcaaggcaaagtggtgctaccgctggcgacgggcggtaccgtggcccatctgctggcggtcgattatgcccttaaaccagttttaagcgcactgaaagctcaggagatcctgccacggcgtgtttggccgaatgactcacaagtatattgattcccatccaagccgcccatttcacgccaaatctgccaaaccgttcttgataccgcgctagaaactttctggcaggcattgcaccgccgcgatgttcaggttcctgaccttctgtctctgcgagggaatgcccatgcgtaacatcattaaactggcgctggcgggattgcttagcgtctctacttttgcggatgctgcagaatcctcgcctgaagcgttacgtataggctatcagaaaggcagtattggtatggtgctggcaaaaagccaccagttactggaaaaacgctatccggaatcaaaaatctcctgggtggagttccccgcgggtccgcaaatgttggaagcgttaaacgttggcagtattgatctcggcagtaccggggatattccgccaatctttgcccaggctgccggggctgatttggtgtacgtgggcgtcgagccaccgaagcccaaagccgaaaggattctggtggcagaaaacagcccgatcaaaacccggaccgatcttaaaggtcacaaaggtgcctttcagaaagggttcagttcacacaaccttttactgcgtgcactgcggcaggcccggacttaagtttaccgatatcccaacccacttacctggagccccgctggaggccccgcgccgccgttccaaacaaggggaaccgttgacgccctgggctatctgggatccctactactctgctgcattattacagggcggcgtgcgggtgctgaaagacggcaccgatctcaatcaaactggatcgttttatctggcagctcgtccctatgcagaaaaaaacggcgcttttattcagggcgtactggcaacctttagtgaggccgatgcgttaacccgcagccagcgcgagcaaagcatcgctttactggcaaaaacgatgggcttaccggcaccggtgattgcctcttacttagatcatcgccctcctaccaccatcaaaccggttaacgccgaggttgccgccttacagcagcaaacggcagatctgttttatgaaaatcgtctgcattattctgaatactgtcgccccatggtatctgtggggaactggttcctggacggcagccacagcgtcttcagttacgatgcgctggaccggctggtacagcagggcggctttgacgggcggacgcaacgttatcattatgacctgaccggaaaactcacacagaagcagtggcagtatgatggccacggctggctgacagacatcagccacctgagcgaaggccaccgtgttgccgtccactatggctatgacgataaaggccgcctgaccggcgaatgccagacggtggagaacccggagacgggggaactgctgtggcagcatgagacgaaacacgcatacaacgagcaggggctggcaaaccgcgtcacgccggacagcctgccgccggtggagtggctgacgtatggcagcggttacctggcgggaatgaagctgggcgggacgccgctggtcgagtatacgcgggacaggctgcaccgtgagacggtgcgcagcttcggcagcatggcaggcagtaatgccgcatacgaaatgaccagcggtaccgagctgattgatctatgtgtttataaaaattctagtatcccgtgtgggtaa

SEQ ID NO: 26139 - DNA, 1207 bp, Homo sapiens
  SIMILAR (893)..(925): 811254mologous to Escherichia coli 4-hydroxybenzoate synthetase,accession number X57434,Smith-Waterman Score=49.
aatttttttatccaacttatcgatcaggccttacgatcaacggatgatatgatcaaagcaaatgtttggcatctttataaagagtggattcgtagtgatgatgtttcacctatatttatagaaactgaagataatttaagaacctttaacacgaatgaattaacacgaaacgataatatctttatcctgttctcctcagtcgatgatgggccagttatggtggtaagctcccagcgcttacatgatatgttgaatcctacaaaagataccaattggaattccacgtatatctacaaatccagacatgagatgttgcctgttaatcttactcaggaaacacttttcagctccaaatctcatggtaaatatgcgcttttccccatttttactgcgagttggcgagctcatcgtataatgaataagggtgtttaagtaaaggaaaacatcaccgttcctggcatcctggacggtgatgccctacggttgccctcgcagcacgggcatcggtaaagcgtaaggttcaacatcgttttccacttcatgcgattgttgcgtttttgttgcgtattagatcacttaatttgctttacatctcccgtaaacacttttctgcgatacaatgcctttacgttatgtaacggagagttcggcatgtcacaccccgcgttaacgcaactgcgtgcgctgcgctattgtaaagagatccctgccctggatccgcaactgctcgactggctgttgctggaggattccatgacaaaacgttttgaacagcagggaaaaacggtaagcgtgacgatgatccgcgaagggtttgtcgagcagaatgaaatccccgaagaactgccgctgctgccgaaagagtctcgttactggttacgtgaaattttgtgtatgtgccgatggcgaaccgcggcttgccgggtcgtaccgtcgttcctgtgtcaacgttaagcgggccggagctggcgttacaaaaattgggtaaaacgccgttaggacgctatctgttcacatcatcgacattaacccgggactttattgagataggccgtgatgccgggctgtgggggcgacgttcccgcctgcgattaagcggtaaaccgctgttgctaacagaactgtttttaccggcgtcaccgttgtactaagaggaaaaaaatatggagtggagtctgacgcagaataagctgctggcgtttcatgg

SEQ ID NO: 26140 - DNA, 750 bp, Homo sapiens
  SIMILAR (3)..(416): 1001254mologous to Escherichia coli periplasmic protein (AA 1 -306),accession number X04477,Smith-Waterman Score=687.
tccagcagacgacccaactgctcgacccggctaaagcctatgccaagggcgtcggtaactcgatcccggatatccccgatccggttgctcgtcataccaccgatggcttactgaaactgaaagtgaaaacgaactccagctccagcgtgttggtaggacctttatttggttcttccgctccagctccggttacggtaggtaacacggcggcaccagctgtggctgcacccgctccggcaccggtgaagaaaagcgagccgatgctcaacgacacggaaagttattttaataccgcgatcaaaaacgctgtcgcgaaaggtgatgttgataaggcgttaaaactgcttgatgaagctgaacgcctgggatcgacatctgcccgttccacctttatcagcagtgtaaaaggcaaggggtaattacgccccacagtgctgattttgcaacaactggtgcgtctcctggcgcacctttttttatgcttccttcctgggatatgagcgattttttatagtaactcacttcttcttcactaagaatatccattatctcaatgccttatcagagattcttttcctttcgccgggagtgtctggacattcaggctacttttccagggtattttatttctggtatgcaaagggttttattgaaaagccatatcctaaattctgggcggaaaaacctctttgatgaaacaagaatggggggcccgggaaaccattaacaccccaccccccgggcgggccc

SEQ ID NO: 26141 - DNA, 748 bp, Homo sapiens
  SIMILAR (1)..(579): 1001254mologous to Escherichia coli, K12, Peptide, 378 aa AppB=cytochrome d oxidase, subunit II homolog,accession number S63811,Smith-Waterman Score=1024.
atgtttgattatgaaacattgcgcttcatctggtggctgctgattggcgtgatcctggtggtctttatgatctccgacggatttgacatggggatcggctgtctgctgccgctggtggcgcgtaatgatgatgaacgccggatagtgataaacagcgttggtgcacactgggaaggcaaccaggtctggttgatcctcgctggtggggcattatttgccgcctggcccagagtgtatgcagcggcgttttccggcttttatgtggcgatgatcctggtgctgtgctcactgttcttccgcccgctggcctttgattatcgcggaaaaatcgccgatgcacgctggcgtaaaatgtgggacgccggtctggtcatcggcagtctggtgccgccggtagtcttcggtatcgccttcggcaacttgttgctcggcgtgccgtttgccttcacaccgcaattacgcgtggagtatctcggcagcttctggcaactgctgacgccattccctttattgtgcggattgctcagccttgggatggtgattttgcaaggtggcgtctggttacaactgaaaactgttgccaatccacaaatccacacaggttttcggtccgataaacggtacgtcatcggcacaattctgcatcacggcagcagcgacgttaacgtcgatatgatcgttgtgatcgtgagtcgccagtaccgcgtcgatctggcgaatcgcaaacggatcaagaacaaacggggtg

SEQ ID NO: 26142 - DNA, 410 bp, Homo sapiens
  SIMILAR (285)..(151): 451254mologous to Sulfolobus solfataricus suppress-overlaps with RNA,accession number AL512966,Smith-Waterman Score=83.
aagaatcaaccgaaattcccccagtagcggcgagcgacggggaagcagcccagagcctgaatcagtgtgtgtgatagtgtaagcggtatggaaaggcgcgcgatacagggtgacagccccgtacacaaaaatgcacatgctgtgagctcgatgagtagggcgggacacgtggtatcctgtctgaatatggggggaccatcctccaaggctaaatactcctgactgaccgatagtgaaccagtaccgtgagggaaaggcgaaaagaaccccggcgaggggagtgaaaaagaacctgaaaccgtgtacgtacaagcagtgggagcacgcttaggcgtgtgactgcgtaccttttgtataatgggtcagcgacttatattctgtagcaaggttaaccgaataccgcacccgaa

SEQ ID NO: 26143 - DNA, 1819 bp, Homo sapiens
  SIMILAR (935)..(1090): 961254mologous to Escherichia coli positive regulatory protein,accession number M16487,Smith-Waterman Score=264.
atgacgtcagcgatatcactcggcagtagatgttccgggcgaatacccagcgacataattggctccaacctggacatcacggctttcaactggcagccagacttgctgacgatttggcatcggcagctccacctgcacttgactcgacttgacggtggcggtcacttttaccggcaggaagttcatctttggcgaaccgataaatccggcgacaaacgaaggccccaaggtgacccaaagactaccggcattacggctaaggtaatcaacgtgcggtctaccaagctagttggtctgccacaccgcatcacggcaaccaggtggaagagaaagcgtagccgaatgctacatacgaacacgggaaagttagttttcaataaccgcgatcaaaaacgctgtacgcgaaaggtgatgttcgataaggcgttaaaactgcttgatgaagctgaacgcctgggatcgacatctgcccgttccaccatttatcagcagtgtaaaaggcaaggggtaattacgccccacagtgctgattttgcaacaactgtgcgtctcctagcgcacctatcgcaggagcgcttgggaaaattacaggacagtatttatatctcgctaactgaccattgccagtttgcgattaaacgctttcagcaaaacgtgttgctgcccaacccgttgctgtgggatatccagcggctttacccgaaagagttccagctaggggaagaagcgttaaccattattgataaacggttgggcgtgcagttaccgaaagatgaagtgggctttattgccatgcatctggtcagtgcccaaatgagcggaaatatggaggatgttgcaggtgtcacgcagttaatgcgcgaaatgctgcaattaataaaatttcagttcagccttaattaccaggaagaaagcttgagttatcagcgactgggtaccacatctgaagtttttatcctggcgtattcttgaacatgcttcaattaacgatagtgatgaatcattacaacaagcagtaaaacaaaattacccgcaagcatggcaatgtgcggaacggatcgccatttttattggtttgcagtatcaacaattagggttaactcaaccggccgtcagtaaaatcattaacgatattgaagattattttggtgtggaattagtggtgcggaaaaataccggtgtaacattaacacctgccggtcaattgttactctcccgttccgaatccattacccgtgaaatgaaaaatatggttaatgagataagcggcgaaaagaaccccggcgaggggagtgaaaaagaacttgaaaccgtgtacgtacaagcagtgggagcacactgggaaggcaaccaggtctggttgatcctcgctggtggggcattatttgccgcctggcccagagtgtatgcagcggcgttttccggcttttatgtggcgatgatcctggtgctgtgctcactgttcttccgcccgctggcctttgattatcgcggaaaaatcgccgatgcacgctggcgtaaaatgtgggacgccggtctggtcatcggcagtctggtgccgccggtagtcttcggtatcgccttcggcaacttgttgctcggcgtgccgtttgccttcacaccgcaattacgcgtggagtatctcggcagcttctggcaactgctgacgccattccctttattgtgcggattgctcagccttgggatggtgattttgcaaggtggcgtctggttacaactgaaaactgttggtgtgattcatctgcgttcacgggttcgcatcccctgtgacttgcacatatacgcccagatggcctga

SEQ ID NO: 26144 - DNA, 1617 bp, Homo sapiens
  SIMILAR (1617)..(1354): 981254mologous to Escherichia coli ORF 6 (AA 1 - 109),accession number X56175,Smith-Waterman Score=500.
atgcacagctcagatacatcaggcagcagcatcagtcaggcaggcaatggcaacacaggtgcagcagcagaacagcatgcagcacagggcagcagtggacaccaaaagctgcatggcaggcctactaaactcgggttgcggcgcttccaaaacgcatccatggaacacgtgctattctccgagaaaggagaagatctccgtgctgacgatatgaagaacaccagaaatttgaaaaacacagtggcgcacacccgggcgtctttcatccaggaaacttttgctgtaggtcccctcttcagcgtcaaaccgcacaacgtaattccgaattcaaagtcaagtaataaacccaggccctccgggaattgcccaggaaacttcctcggaacgacccaaaatggggacacagacaacttgggcttcgtggacgtccccgatgcccaaaggaacacgttccatttccgcgtgtctccacttgcttcggacatacccctcaaatggatagaaaaaacctttgctaaccacgcgcttcgggcaccatcagcgccacagactctagactcaggctccaatgcccacatcacctactcgctgctgcctccccatgacccacaactggccctcaactcgctcatctccatcaacgcagacaatgggcagctgtttgcgctcagggcgctggactatgaggccctgcaggcctttgagttccatgtgggcgccacagatggaggctctcccggcgctcagcagccagtgcgctgtgtgcgcgttgggtggtgctgtgacgaacaatggacaaattggctgacccccttaccgtgctgtgacttacaggtgcgaccctaccatgccgtggcccagacgcccagtattatgttcgtggtaacaaatggcactagaaacattgattgtctgcgaagttttgtctacggatgttctgaggaatggcggctctatgaactgtgtaccaggaggctgctggagctggacctacacaatacgtggggaatgcttttcaaggtaccaggtgtatgggctgaggacaacccccccggacttgttctaaacagacccccggtggtagtagagcttaaccctcatgctaccctgcacaccccctacaccaaggagcaaccagagtgctttgttaagtggttcctggatcttgtgcatcctgacttggttggtgcccttctgggaacaggccttaaagaaactggccataaactggatttctgcagcaacaagaggacacatcgagctggtacctctatcccttcatttctgattgttacaaccctgtgctttgttcatgccggatgcggcgtaaacgctttgtccggccaacaaaagcacgtcagcgaatgggttgtacttcgcttcaccgacatctttctgcgcatcttcccctgcgataacggtcgtaccatactgatccgcttcggtatatttcgaatgctcatgatcgtggcaatagagacacaacaattcccagttactgccatcttccgggttattggtatggtcgtgatcaatgtggtgaacggtaagttcacgcaggttggaataaacaaactcgcgggaacagcgaccgcagacccacggatagatttttaa

SEQ ID NO: 26145 - DNA, 1272 bp, Homo sapiens
  SIMILAR (10)..(795): 841254mologous to Escherichia coli outer membrane protein Tsx,accession number M57685,Smith-Waterman Score=1185.
  misc_feature (1)...(1272): n = a,t,c or g
atgcagnctgaaaacgacaaaccgcagtatctttccgactggtggcaccagagcgttaacgttgtcggaagctatcacacccgtttcggaccgcagatccgcaacgatacctaccttgagtacgaagcattcgctaaaaaagactggttcgacttctatggttatgcggatgcgccggtattcttcggcggtaactccgatgctaaaggtatctggaaccacggttctccgctgtttatggaaatcgaaccacgtttctccatcgacaagctgaccaatactgaccttagcttcggtccgttcaaagagtggtacttcgcgaacaactacatttacgacatgggtcgtaataaagatggtcgccagagcacctggtacatgggtctgggtaccgatatcgacactggcctgccgatgagcctgtccatgaacgtctatgcgaaataccagtggcagaactatggcgcagcgaacgaaaacgagtgggacggttaccgtttcaaaattaaatactttgtgccgattaccgatctgtggggcggtcagctgagctacatcggcttcaccaacttcgactggggttccgatttaggggatgacagcggtaacgcaatcaacgggattaagacccgcaattatacatccggcgacaaccatacgctgagagaccctcactacgttgaagacaaaggccataaataccttgtattcgaagccaacacgggaacagaaaacggataccaaggcgaagaatctttatttaacaaagcgtactacggcggcggcacgaacttcttccgtaaagaaagccagaagcttcagcagagcgctaaaaaacgcgatgctgagttagcgaacggcgccctcggtatcatagagttaaataatgattacacattgaaaaaagtaatgaagccgctgatcacttcaaacacggtaactgatgaaatcgagcgcgcgaatgttttcaaaatgaacggcaaatggtacttgttcactgattcacgcggttcaaaaatgacgatcgatggtattaactcaaacgatatttacatgcttggttatgtatcaaactctttaaccggcccttacaagccgctgaacaaaacagggcttgtgctgcaaatgggtcttgatccaaacgatgtgacattcacttactctcacttcgcagtgccgcaagccaaaggcaacaatgtggttatcacaagctacatgacaaacagaggcttcttcgaggataaaaagcaacatttgcgccaagcttcttaa

SEQ ID NO: 26146 - DNA, 2076 bp, Homo sapiens
  SIMILAR (1929)..(1264): 991254mologous to Escherichia coli K12 putative histone,accession number AE000291,Smith-Waterman Score=1138.
tcaaccggtggttttgccgttgttgtttgccgtggcgtcatcaccgttaatctgcgtgccggtgccaccgttggtgatggcgctctcgccttcgttgttaacaaccgcctggtcgccgtcaacctggataccgatggactccggatcggtgacggtcatggtgcccttgttatccaccgttgcgctgtcgccggtgatatcaataccgtgaccgccgccgctgacatccagatcgccgtcctgaataacttttccgttattaccgttgatttccgtaccggtggaatccttgccgtcaacggtggttgggatccgttcaccacattgatcacgaccataccaataacccggaagatggcagtaactgggaattgttgtgtctcttattggcccaccgatcatgagcattcgaaatataccgaagcggatcagtatggtacgaccgttatcgcaggggaagatgcgcagaaagatgtcggtgaagcgaagtacaacccattcggccgcatccggcctatttgaaggctgcgttttccccggcattcgcgggtcgtctttatattcggcggtggcaatccacgccgcgcaaaacagcgtcaaacgggcgaagaagtagaaaaatgccatcagccccagcacggaaccaaatgctgcgccagagggggatttcatcaacgatggcagggtgtaggtcatcacgattttaatcacttcaaaaccaatagcagccagaaatgttccgcgaatcagggcttttttgcgcggacggtggcgcggcaaccgccagaagatccagaagaaaagcagatagttggcgaagatggaaatcgccaggccaatcaatcgccacgtcggtttcagccactcaatgctgttcaggtgcagggcgctaataatcatttgctgcgccgaaccggcaaccgaggtgatcgaaagcgtcacaatcagcgcaatcaacaaaccaatcagcgaaataaaatctcgcagatattttacccagaacttctcctgatcttgcggcgagcgttcccagacatcgcgcgactgggcacgaatcgcttcacgcaggttacccatccagttgatgccggaataaagtgccaccgccaggccgacaagccctacagtcgtacgctgctgaacggcggtgttgatggtgtttttcaacgtggcggctgcgcatccacagaacgaaacaggctttgggaccaactcaatccaggaggcatcattcccacagttcagaagaaatccagtcccatccgcacgggcaacagagaccacggtgtcacggacgacacgcagaaccgtgcgtgcaacagaggcaatacagacgctctccgccgtgtcaaatatccggtccaccgcaccggtaaactgttcacgggcctgagaccggacagattccgtgcgcagctcgtcctgcagtcgggtcatcaggggactggcggcatggtcgggaagcgctgtcatgagcgcactgaccagcgtatccagttcccagccggtgcgggccgatacggccacaaccggatgtacgggccggaacagacggaataccgcctccgttttttcgcgaatattctgtgcctgtgcaggagaaggctgaataccggccatatcccattcatggcagggctccgttttgtcggcctgcgtcaccacaaacagcacctgctgatgtccgcactgcaggatgtgtcgccagaaatactcatccacagacagggcacggtcatcggctttaatcagccacagtaccaggtcaagttcaggcagaatgtcacggtacccgcttacgcgagagcaataagtggctggccaccattctcgatacaaaactctgctgaatagcagcgattttcccagcgtggtgcgtcttttgcattttactggttctgagttatcaattatctgttcactaatgagatatgtacgctccggtttctccgcgctgtccatgtccagactgtctgcaacaattacgcccactgggataggctttaagtctggtgaatatgcgacacatttttcaacgattattgccccgacggctgtggctggcagggctgccat

SEQ ID NO: 26147 - DNA, 2107 bp, Homo sapiens
  SIMILAR (2103)..(1477): 851254mologous to Pseudomonas aeruginosa probable chemotaxis transducer,accession number AE004685,Smith-Waterman Score=827.
tcagctcatatgcctgctgaatttcctgcgctttctgttcgccatctccatcatctcaggcggcaaacctttcgccaccagcttatcgggatggtgttcactcatcagcttacggtaggcacgtttgatggtggtcgcatcatccgtcggcttcacgcccagcacattacaggcatcttccagcgttgggccctcggcgcttgcgttcaccacattgatcacgaccataccaataacccggaagatggcagtaactgggaattgttgtgtctctattgccacgatcatgagcattcgaaatataccgaagcggatcagtatggtacgaccgttatcgcaggggaagatgcgcagaaagatgtcggtgaagcgaagtacaacccattcgctgactaccaggtaaccaccccagccggtagagcgaacgttgaagttgccgttgccgaagttcagttctgcatcgtcgttccactgaccaccgtcgtgccagtaacgagctacgacagagtagtgccagtgatcgtagttcagagccagaatatggctggaagcgatagagttattagtacgggtcttaataccgttgattaggttaccgctgtcatcccctaaatcggaaccccagtcgaagttggtgaagccgatgtagctcagcgcagtaccgcttaatttattgttgttggtggcggaagtgatgctgtatccactggcaccggctgccgcggctttctcagccagtttcgcttccagggcatcgagggtggatgcgccatcggcagaaaccacgccgattttattcatgttctgtgcctgggatgccgttaccggttccgccgcgaacacgccaaatgacagagttgaaagagccatagcagcaacaacagtattgatagttttcataattaatgaccgtattctggcttcccgtatgggcgttacgctatcgatctgctgctggcaggttacggcggtcgttgtgtaggtatccagaacgaacagctggttcaccacgacatcatcgacgctatcgaaaacatgaagcgtccgttcaaaggtgactggctggaccggaaacaggaacgggttgatggaactgcgggcatagccttcttgctccattcgtgcgtccagtaccagagaggcgaggtcatctgctacggcttcgatttttggatctttttcctgatagagaattttcaggtaagtgtcgcagtcatcgcagctttcggctttaatcgcggcctgttcgtcatccagcgaccagtaatgcagtttgacgctctgctcgcagttggtgccgccctgaataatagtcgtcactttatcgaagtaacctgtacccacttcctgctggtgagatacgaaggtatagccatctttcgcggcggcaaattccggctgctgcactttctcaacgtagtgcttcataccctcgccctgggcataggcgtttgccaggtcaaacatgttgaaacacatgctgtggatacctgccagggtgatgaactggaacttgtagcccatatccgacagctgctgctggaagctggcaatagttttgtcgtcgaggtttttctcgtcggcgaccacggcgaaaccgcgcccggcctctccggcccgcgcagcctcgatggcggcgttcaacgccagcaggttggtctgctcggcgatccccttgatcacctggatgatcgaatggatctcgtccgacgactggccgagagcggtgatgctggtggaggactggttgaccacgtcggcgatgcggctcatcccttccaccacgttgaggatcacctgcccgccactgctggccagctcctcggacttggccgagatcaccctggcgttgtcggcgtggtcggaaatctgcgagatattggtgatcatctcttccatgctcgcggccatgctggtggcgctgtcggcctgttggatcgactgcgaggtctggccgatggactgggaggtgtcgtggagttcttcgctttcctggcggatgatggtgaccatctgccgcaggttctcctgcatctcgcccaacgcccgctgcaactggccggcctcgtcattgctgtcgacgccgatcggctcctgcaggtctgcc

SEQ ID NO: 26148 - DNA, 1851 bp, Homo sapiens
  SIMILAR (1201)..(1839): 951254mologous to Escherichia coli hexose phosphate transport protein UhpT,accession number M17102,Smith-Waterman Score=1023.
atggatttgtcaaccccggagcgaggttctccctacccgaggctgctgccgtgtggagatcccctgggtgaaaccattgtcgccattgaccaggaggcaaaaccttcaactgaggacttagggaataagaaggaaacaaaatacattaaactcaaagtcattagatgggataacagtgacttcaatttcctgtattctaattatgagaggattcgggcacgcacaacaaagaaagaggactctgcgactaatgtcccggtgacgtttgaaaaacacggttcccacgccgtcgtatatgcacggcgcagcgccacggtgctgaccgaccggaacaaggaggccccaagagtgccccaaggcggttatatggtttcttttgtggatatccctgaagcgttgacccagggcgaaactgtcgctgaagcgatggaagcggcaaaagatgctttactgaccgcatttgatttttattttgaagataacgagcttatccctttaccttcgccattaaatagtcacgatcactttattgaagtacctttgagcgtcgcctctaaggtattgctgttaaatgcttttttacagtcagaaatcactcagcaagagttagccaggcgaattggcaaacctaaacaggagattactcgcctatttaacttgcatcatgcgacaaaaatcgacgccgtccagctcgcggcaaaggcgcttggcaaagagttatcgctggagtgccttatggacattctcaatcttaataaacatatttccggacagttcaacgccgaactggaaagtatccgcacgcaggtgatgaccctgggcggcatggtggacaagcagctttctgatgcaatcaccgcgatacataaccaggacagcgatctggcgaagcgcgtcatcgaaggccacaagaacctcaacatgatggaagtggcgatcgatgaagcccgcgttgagccatcatcgccaaacatcagtcagacggcgagcgacactgagactggttatggtgatcataaaaccatcgccgagatggagcgtattggtcgacgtaggtcggaacaaaatctgccgtacagcgctggagaaattatcccaacagcatcagccgtaggtggtaagtgctggagtacgttggaccgtcataccatccagatgctgcacgacgtagtgaaagcgttcgcgcggatggacattgacgaaacggccaagtgccagatctttgttgagtatgtgctgaagcccaaagtgatctggctgctgtgcttcgccaacattttcctctatgtggtacgtattggtatcgaccagtggtcaaccgtatacgcgttccaggaactgaaactctttaaagcggtggcgattcagggctttacgctgtttgaagctggtgcgctggtcggtacgctgctgtggggctggctctctgacctggcgaacggtcgccgtggcctggtggcctgcatcgcgctggcgctgattatcgccacgctcggtgtgtatcaacatgccagtaacgaatatatctatctggcttctctctttgcgttgggtttcctggtctttggcccgcaattgttgattggtgtggctgctgttggctttgtacctaaaaaagcgattggcgctgccgatggtattaaaggcacctttgcttacctgattggtgacagctttgccaagttaggtctgggaatgattgccgatgggacgccggtattcggccttaccggctgggcaggcaccttcgccgcgctggatatcgccgcgattggttgtatctgcctgatggcgatagtggcggtaatggaagaacgcaaatccgccgcgagaaaaaaattcagcagttga

SEQ ID NO: 26149 - DNA, 1431 bp, Homo sapiens
  SIMILAR (1216)..(1428): 1001254mologous to Escherichia coli peripheral membrane protein U,accession number K01992,Smith-Waterman Score=372.
atggcgccagagcacctggtacatgggtctgggtaccgatatcgacactggccgccgatgagcctgtccatgaacgtctatgcgaaataccagtggcagaactatggcgcagcgaacgaaaacgagtgggacggttaccgtttcaaaattaaatactttgtgccgattaccgatctgtggggcggtcagctgagctacatcggcttcaccaacttcgactggggttccgatttaggggatgacagcggtaacgcaatcaacggtattaagacccgtactaataactctatcgcttccagccatattctggctctgaactacgatcactggcactactctgtcgtagctcgttactggcacgacggtggtcagtggaacgacgactcagaactgaacttcggcaacggcaacttcaacgttcgctctaccgcgcgggggtggttacctggtagtcagcgaatgggttgtacttcgcttcaccgacatctttctgcgcatcttcccctgcgataacggtcgtaccatactgatccgcttcggtatatttcgaatgctcatgatcgtggcaatagagacacaacaattcccagttactgccatcttccgggttattggtatggtcgtgatcaatgtggtgaacgccagcgaagaaacaaacagaagactacatcaccggtcgttacggttgattcaggagtgcgttatggacagtctcaatcttaataaacatatttccggccagttcaacgccgaactggaaagtatccgcacgcaggtgatgaccatgggcggcatggtggagcagcagctttctgatgcaatcaccgcgatgcataaccaggacagcgatctggcgaagcgcgtcatcgaaggcgacaagaacgtcaacatgatggaagtggcgatcgatgaagcctgcgtgcgcattatcgccaaacgtcagccgacggcgagcgacctgcgactggttatggtgatcagtaaaaccattgccgagctggagcgtattggcgacgtggcggacaaaatctgccgtactgcgctggagaaattctcccagcagcatcagccgttgctggtaagtctggagtcgctgggccgtcataccatccagatgctgcacgacgtgctggacgcgttcccgcggatggacattgacgaagcggtacgtatttatcgtgaagataaaaaagtcgatcactgaatacgaagtgtattgttcgtcaactgatgacctacatgatggaagattcgcgtaccattccgagcgtacttactgcgctgttctgcgcgcgttctatcgaacgtattggcgaccgctgccagaatatttgtgagtttatcttctactacgtgaaggggcaggatttccgtcacgtcggtggcgatgagctggataaactgctggcggggaaagatagcgacaaataa

SEQ ID NO: 26150 - DNA, 1050 bp, Homo sapiens
  SIMILAR (702)..(25): 941254mologous to Escherichia coli similar to,accession number D90889,Smith-Waterman Score=1054.
tcacgaaaccacgaagagaatcgaacagacgagacaacctgcacaggaattattgctgttaagccagacactgccccggctggcagccgtcaggtcggcaagcgtggtatcgacgccatttcccagagtcaatgtcgcgctatcggtaatccggaccgccccttcgagtttaactggcgtaacattatcccgtggcgtcattaacgacaggcttcctgtcgcgccactgaccgatgcatccgccagcgtacctgcgtagacgattgccgtaccgccagcgacctggagatcttctgcccgggccagagcctgaaactcatcttttgaccgcccaagggtatattgcccgccagagttaacctttgtggcggagtcctgacccaggttttgcattgccccacccttgccaaccgtggagtcgcgagcttcggtacctgctaataccaataaattaccgccattttccagcaacatattggtcgctaaattgccggaaatggaaaaagtaccgtactgatgagtaccgctgatttcaataccgttagccgtgctcgtctggagagcggcaccgctgttctggacgatatctgtcgctttgccattatcgttgactgtcagcgtaccgccttcattgatctttgtttttattgcctctccgttagctgaaacctcgacattgttcacgcgggacgtcgtgctgtcgcgggctttgtttgtgctggtacagccctgaatgttaccgcagcaccacgccgcaatcacggtcgggaactggaacagaccttcctgagccagtttttcgtcagacagcggcgcgtcagaggcaccaaaatcaacggtattagcgataatgccaccggaagaaccgataccctggtagttaactttattaccggtttctttctggtaagtgtcagcccatttggcatacaccggcgcagggaaggttgcacctgcacctgtcaggcttgcttctgcaaacacagagaaagcactcatcgataaggtcgcggcgacaacagttgcgacggtggtacgcataactttcat

SEQ ID NO: 26151 - DNA, 1716 bp, Homo sapiens
  SIMILAR (460)..(1185): 941254mologous to Escherichia coli peripheral membrane protein C,accession number K01992,Smith-Waterman Score=1152.
atgcggcaactgccatcagtgaaactgaacgcgctgggcgtcaaaggggtgatcctcaccggcgataatccacgcgcagcggcggcaattgccggggagctggggctggagtttaaagcgggcctgttgccggaagataaagtcaaagcggtgaccgagctgaatcaacatgcgccgctggcgatggtcggtgacggtattaacgacgcgccagcgatgaaagctgccgccatcgggattgcaatgggtagcggcacagacgtggcgctggaaaccgccgacgcagcattaacccataaccacctgcgcggcctggtgcaaatgattgaactggcacgcgccactcacgccaatatccgccagaacatcactattgcgctggggctgaaagggatcttcctcgtcaccacgctgttagggatgaccgggttgtggctggcagtgctggcagatacgggggcgacggtgctgcctgcttttaacccaccgggtaaaaagggcgacataattttcagcgtgctggtaaaactggcggcgctgattgtgctattgatgttgggtggcattattgtctctctgatcatctcctcctggccgagcattcagaaatttggtctggctttcctatggaccaaagagtgggatgcaccgaacgatatctacggggcgctggtgccgatctacggtacgttggtgacttcgtttatcgcgctgctgatcgccgtcccggtgagtttcggtatcgccctgttcctgactgagcttgcgcctggctggctgaaacgcccgctgggtatcgccattgagctgctggcagccattccaagtatcgtttacggcatgtggggcctgtttatctttgcgccgctgttcgccgtttactttcaggagccggtcggcaatatcatgtcgaatatcccgattgttggcgcgctgttctctggccccgcatttggtatcggtatcctcgcggcaggcgtgatcctcgccatcatgattattccgtacattgcggcggtaatgcgtgatgtgttcgaacaaaccccggtgatgatgaaagagtcggcctacggtattggctgcaccacctgggaagttatctggcgtatcgttcttccgttcaccaaaaatggtgtagtcggggtagatgaaggccgcgtgtccgcgcttggctcactggccgttcgcggatctttcaccaccattacgtcaactggcgttgtttccagcgcgctccctgatttcagcagctcgcctcattctccggctgcgggtatagcagccgttttcgaccaccatctccagctcgcgcgtccactgttgcccttgcggcaacggggaatgaatcacgttctgttccgcaatacggactttgttgccatgcaattgggtaatgatggcgacatggccagtgtctttaaattcaccgcctttatcccagataagaagcgcacccgcgaccggcgcacgcggcgagccgttaggaaatgcctgcaatggcaggatgttgtcattaaccacttctcgcaggaagcgcagcgagaaaatctcccacgccatacccacgtcagtaaagaccacaccgtaattcagaaagagaaaacggcgagcaaattcaacgcattgccacttgtggcccatatattcgtcgtcgatatagctacggaatacggcgtcatcttcgtattcctgcggatcgagagaactgtaatctga

SEQ ID NO: 26152 - DNA, 2941 bp, Homo sapiens
  SIMILAR (1890)..(1937): 1001254mologous to Escherichia coli peripheral membrane protein C,accession number K01992,Smith-Waterman Score=73.
atgggagggacccggagggagaaagaaaccggtaataaagttaactaccagggtatcggttcttccggtggcgtaaaacagattatcgctaataccgttgattttggtgcctctgacgcgccgctgtctgacgaaaaactggctcaggaaggtctgttccagttcccgaccgtgattggcggcgtggtgctggcggttaacattccagggctgaagtctggcgaactggtgctggatggtaaaaccctcggcgacatctacctgggcaaaatcaagaagtgggatgatgaagccatcgccaaactgaatccgggtctgaaactgccttcacaaaacattgctgtagtacgccgcgcagatggctccgggacttccttcgtcttcaccagctacctggcgaaagtgaacgaagagtggaaaaacaacgttggtactggctctaccgtaaaatggccgatcggtctgggcggtaaaggtaacgacggtatcgccgcgttcgttcagcgtctgccgggtgcaattggttatgttgaatatgcttacgcgaagcagaacaacctggcgtacaccaaactgatctccgctgatggtaaaccggttagtccgaccgaagaaaacttcgctaatgcagcaaaaggtgcagactggagcaaaaccttcgctcaggatctgaccaaccagaaaggcgaagatgcatggcctttttcctttacccacgttctttttattccacaaatttcagaagaaaccagaacaaggcacagaagtgctgaaattcttcgactgggcgtacaaagagcggggctaaacaggcgaacgacctggattacgccagcctgccggatagtgtagttgaacaggttcgcgctgcgtggaagcccaatattaaagccagtagcggtaagccgctgtactaataaaactccaggccgggtacggtgttttacgccgcatccggcattacaaaatgactttgtaaacgcgtttaactgaagagtaacttatggctgcaaccaagcctgcttttaacccaccgggtaaaaagggcgacataattttcagcgtgctggtaaaactggcggcgctgattgtgctattgatgttgggtggcattattgtctctctgatcatctcctcctggccgagcattcagaaatttggtctggctttcctatggaccaaagagtgggatgcaccgaacgatatctacggggcgctggtgccgatctacggtacgttggtgacttcgtttatcgcgctgctgatcgccgtcccggtgagtttcggtatcgccctgttcctgactgagcttgcgcctggctggctgaaacgcccgctgggtatcgccattgagctgctggcagccattccaagtatcgtttacggcatgtggggcctgtttatctttgcgccgctgttcgccgtttactttcaggagccggtcggcaatatcatgtcgaatatcccgattgttggcgcgctgttctctggccccgcatttggtatcggtatcctcgcggcaggcgtgatcctcgccatcatgattattccgtacattgcggcggtaatgcgtgatgtgttcgaacaaaccccggtgatgatgaaagagtcggcctacggtattggctgcaccacctgggaagttatctggcgtatcgttcttccgttcaccaaaaatggtgttatcggcggcatcatgctggggctgggccgcgcgctcggtgaaaccatggcggtgacctttatcatcggtaacacctaccagctcgacagcgcctcgctgtatatgccgggcaacagtatcacctctgcgctggcgaacgaatttgcggaagcggaatccggtctgcacgttgccgcactgatggaactgggcctgatcctgttctgtgattaccttcatcgtcctcgccgcatcgaagtttatgattatgcgccgtattgcgctgacgctctcgatggcgacgatggccttcggcctgttctggctgatctggattttaatgtccaccatcactcgcggtatcgacggtatgtcgctggcgctgttcactgaaatgacgccgccgcccaatacggaaggtggtggtctggcgaacgctctggcgggtagcgggctgttaattttgtgggccacggtatattgtgggcctctttcggacgatcgtggtgggattcgtcccactatctgacgaatggtgtgttgcgacgacgtgttacgattagtagcgggttgtacaactgcgacgaatctgaatcttgacacgtctcggctgcgactaatcttggcggcactagctctggtggaggagagacccgggtacgcgtttgtttgttggtcgctggctccgtggcggtggctgtacctatgttggtggagtgaacctggtgctggctgttgatgcttgctggtgctggatcgtggtccttgtctcccccacagcagcaaggtggcgtctgctgccggggcggtgggtcggtgttgtgcttcacggcctgggtggcgtcgttgtggggtctggcgtcccggtttggcggggtgggggtggtgcgggttgtgggttagtgggttgacgcccgaagtgtctgtgttggtgctggtgttgagcaggcacgggttaccgggatgggtgtcgtgtatagtttggatgcgtgctgccgtgtttgggtgtattgtgttgtggtgttggttgggtgcttggcgggctgtggtgttgtgtgcagggtggggcgccctagggcggtggggtgctcgcttggggtgttctgcgttggcgtctgtagactcgcccgttgtgttggaaattagctccgttgtggttggttgtgtgtttggacctcggtgtatggtgggtgcgtgctcgcactggtgttgaccattgtgtgcgattctggatcggtcgtgctccgtgctgcagtttgcttgtgtgcgggtgggcat

SEQ ID NO: 26153 - DNA, 2328 bp, Homo sapiens
  SIMILAR (1)..(723): 921254mologous to Escherichia coli baiF homolog(PIR:F37844),accession number D10483,Smith-Waterman Score= 1183.
atgcctgccttcccgtataccgccgattacttttctggcctgaccgccaccacggcggcgctggcagcactgcataaagtgcgtgaaaccggtaaaggcgaaagtatcgacatcgccatgtatgaagtgatgctgcgtatgggccagtacttcatgatggattacttcaacggcggcgaaatgtgcccgcgcatgagcaaaggtaaagatccctactacgccggttgcggtctgtatcaatgtgccgacggtctactatcgctagactgcgtacaccgtaggctcggcgctattgacccaatattgaacgagtgctttaaagatattggcctcgcacatctgcttggcacgccagaaatcccggaaggcactcagcttatccaccgtatcgaatgcccttacggcccactggttgaagagaaactcgatgcctggctggcgacacataccatcgcggaagtaaaagaacgctttgctgaactgaatatcgcctgcgccaaagtgctgaccgtaccggaactggaaagcaatccacagtatgtggctcgcgaatcaatcactcagtggcaaacgatggatggtcgcacctgcaaagggccgaacatcatgccgaaattcaaaaataaccccggacaaatctggcgcggaatgccctcacatggcatggacacggctgccattttgaaaaatatcggctacagcgaaaacgacattcaggagttgcgcccgcccaataacaaacgaacaaaaatggatagaggtgcaatggatatcattggcggacaacatctacgtcaaatgtgggacgatcttgcggacgtttacggtcataaaacggcgctgatttgtgaatccagcggcggagtcgttaaccggtatagttatcttgagttaaatcaggagattaaccgcacggcaaacctgttttatacgctggggattcgcaaaggcgacaaggttgcactacatctcgacaactgcccggaatttatcttttgctggttcgggctggcaaaaattggcgcgattatgcatgaagcggttattgctcttgcctcacccgataatatgaatgcattcgagctgacaccgcaggaagcggaggagtggtatcgcgggcgcgatgtttacccgcaagccgcgccagtggcggatgatgtattggttactttccagcatcaaccgattggtttagccaaacggattggttcgcgattgaaaaacagctatccgcgtgaactgaggtaccggctgattgtcctctttttcgccctgtgtttgcggatggcaccagcggaaaacatgaggcatcggttgccacaccgctttttttaccaggacgtaagagcggcgtcgtatcgcgccagaagccttcgattacgccgccctggtcagaaacgtccagctttagcgacccgtgggataaggtatagatggtcatccgctaactccttaatccgggaagttaatcacaactttcccgcatttgccgctcgccatcagcgcataggcatcacctgcctgttccagcgagaagcgatgggtaatggcgttacgcggccacagcttccagtccgtcagatcatgggcgcatttttccatatggaacagactggtcacccaggagccgataatccgccgttgatggtgcatcagatcggcgctgacctcgaattccacttttccggtttcaccaatgtaaaccacccgtccccagtcagcggtggattgcagtgccagcaagcgacctgcggcattaccggaacaatcgagcgcaacatccgcgccaccgtggtgatccacgagtcaatgcgcttctttattcgccatcaaccagaaaatctcaccctggtggtgttgtcacgcaaccttccgcaactgggcattgccaatctgcgtgttcgtgatcaactgctggaaattggcagtcagcaactggcatttacccatcaggaagcgaagcagttttttgattgccgtctgtcatcgccgattgaagccgcagaaagcagtcggatttgcgatgacgtttccggttgggcgacggcactacagctaatcgccctctccgcccggcagaatacccactcagcccataagtcggcacgccgcctggcgggaatcaatgccagccatctttcggattatctggtcgatgaggttttggataacgtcgatctcgcaacgcgccattttctgttgaaaagcgccattttgcgctcaatgaacgatgccctcatcacccgtgtgaccggcgaagaaaacgggcaaatgcgcctcgaagagattgagcgtcaggggctgttgggtaccgagctcgattcgtaa

SEQ ID NO: 26154 - DNA, 1022 bp, Homo sapiens
  SIMILAR (177)..(830): 941254mologous to Escherichia coli FimH protein precursor,accession number D90792,Smith-Waterman Score=1083.
tacacctggcaataacgtcgattcgattttcttagccttctttttaaatcaatttttaaccttaggatatatcatgggtaaaacaatcagtataaaggtcctgttcggcatttatcttctattaatggcagccaaagtttttgccttcagttgtaatgtcgatggcggtattatttattggagcaggtacaacctctgtttatgttaatctcgaccctgtaatacagccgggccagaatctgggtgtagacttggctcatcatataagttgctggaatggtgacgggggctggtacgacactgatcatatgaacctggtacaaggctcagctttcgcaggctccctacagtcatatataggatcgctgtactggaataatgtgacctaccccttcccgttgacgacaaataccaacgtattggatattggtgataagacaccgatgccattaccgtttaaactctatattaccccagttggggcggccggtggagttgtcataaaagcgggggaagttattgcccgtattgatatgtataaaattgcaacattaggaagcggaaatccgagtaattttacgtggaatattattacaaataacaatgctgttatgccaacaggcggctgcaccgttgatagtcgaaatgtcaccgtggatctcccggactttcctggaagcgcagaaataccccttggcgtatattgctcaagcgaacaaaagctctcattttatctttcgggtgccaccactgacagtagccgacaagtgtttgctaacacagcacctgatgcaacaaaagcatcgggagtgggtgtcactctaatgcaacgccagctggcgggaatcaatgacagccatcttttgcattatctggacgatgaggtttgggataacgactatctcgcaacgccccattttctgttgaaaagcgccattttgcgctcaatgaacgatgccctcatgacccgtgtgaccggcgaaaaaaacgggcaagtgcgcctcgaggagattgagcgttag

SEQ ID NO: 26155 - DNA, 714 bp, Homo sapiens; identical to SEQ ID NO: 16020
  SIMILAR (34)..(531): 1001254mologous to Escherichia coli K12 putative regulator,accession number AE000200,Smith-Waterman Score=868.

SEQ ID NO: 26156 - DNA, 977 bp, Homo sapiens
  SIMILAR (447)..(677): 421254mologous to Escherichia coli No definition line found,accession number U00006,Smith-Waterman Score=153.
agtacctgttcttcccgctcccacctccacctaattcaggcatccccaatccttccaaactatgtggccactgcagtagcagcacgcatcatagcagatgttcaaggaatctctgatacttgtgtgattgcgcagccttcaccaccacaccctggagctttgaggaccttagtattcaccacagatgaaccggagactcctcagcccccaggtgcagcaggattccagctggtccagaagaaacaagtgcagctgcataacgtactttatgtaatgacaccccatgcctttgcgcaaggaacggtgactatttatctgcctggcgaacaacagacactttccgttgcccccttgaaaaatgttgtccagttggtgacacaacagcatctgcgcgatcgcctctggtggcctggtgccttcctgaccgactttgcggcgaaagttaaagcgcttaaagacttcccaaccatgtcatggcacagcgtgcttccggggaagcagaagccgacgacgatgtggcggcaacgattaaatccgtgcgccagcagttactcaatctcaatatcactggtcgcttaccggtcaaactggaccctgattttgtacgagtggatgagaacagcaatcccccgttggtcggggactatacgctctataccgtacagcgtccgggtaccgagcaagggtcgttcaaggtgaagcgggcccgagctagagttcgtcaaacccgggcccctttatttggaccaaagtccccagctcctgagcacatggagtcagaactcgaatttgagcttatcggcccaagcaaatcaacaagtgggaatcctagagggcttcgttctgaaaggccagttctcttctgcctgtacccagagatgcccactgctgctgccagggctattttgattgcagaggagcagtcgcgtgaagtaaaaatcgcacttgttgtacttgaccggcttcaacgcgaataa

SEQ ID NO: 26157 - DNA, 1704 bp, Homo sapiens
  SIMILAR (10)..(1071): 671254mologous to Escherichia coli hemY,accession number M87049,Smith-Waterman Score=1096.
atgtgctggatccagaccgacaactacaatatcgataccagcgtcacgggcctggcgatcatattgattctggcgatggtagtgctgtttgccattgagtggctactgcggcggatcttccgcactggcgcgcacacccgtggctgttttgtcggacgtaagcgtctccgtgcacgtaagcagaccgaacaggcgctgctgatactggcggaaggcgattatcagcaagttgaaaagctgatggcgatatatgccgatcacgcggaacaaccggtggtgaactatctactggctgccgaagccgcgcaacaacgtggtgatgaagcacgcgccaacctacatctggaacgcgcagcggagctggccggcaacgacaccattccggtagaaatcacccgcgtacgtctgcaactggcccgtaatgaaaaccatgctgcacgccacggcgtggataagctgctggaagttacgccacgccatccggaagtattacgtctggcggaacaggcgtatatccgcacaggtgcatggagttcgctgctggatattatcccatcaatggcgaaagcccatgttggtgatgaagaacatcgtgcaatgctggaacaacaggcatggattggcctgatggatcaggcgcgtgccgataacggtagcgaaggtttgcgtaactggtggaataaaccaaagccggaaaacgcgtcatcaggtagccgttaccatttgctttggcatttaaccgccgagcagaacgttgaagtacccgccgtctatgctggtcttgagcggaaacagcgactgcttcgtgcccaggagttgctgcaacggctggggctggaagaccgtacagagtattatccggcacagctttcgggtggtcagcaacagcgcgtcagcatcgcgcgggcattgatgaacggtggtcaggtaattcttgccgatgaaccaaccggcgcactggacagccattctggcgaacgcaggccccaggccatcctgcaagaagtgctgggtaagcatctgcaaccactaatgatgcccctcaaggccctggtgctgctcagaggtggcgccgccagccctgaagcccctattcccatgctcctgggaacgtctatgatccgcagtatgaccgcctacgcccggcgtgaaatcaagggtgaatgggggagcgcaacctgggaaatgcgctcggtaaaccagcgttatctggaaacttactttcgtctgccggagcagttccgtagccttgaacctgtcgttcgcgagcgtattcgttctcgcctgacgcgcggtaaagtggaatgtaccctgcgctatgagccagatgttagcgcgcaaggtgagctgatcctcaacgaaaaactggctaaacagctggtaactgccgcgaactgggtaaaaatgcagagtgacgaaggggaaatcaacccggttgatattctacgctggccgggcgtgatggcagcccaggagcaggatcttgacgccattgccgctgaaattctcgcggcgctggatggtacgctggacgactttattgtcgcgcgcgaaaccgaaggtcaggcactgaaagcattgatcgagcagcgtctggaaggcgtcaccgccgaagtggtcaaagtccgctcccatatgccggaaatcctgcaatggcagcgtgagcgtctgtcgcgaagctggaagatgctcaggtcaacatga

SEQ ID NO: 26158 - DNA, 4053 bp, Homo sapiens
  SIMILAR (1798)..(2643): 931254mologous to Escherichia coli Citrate lyase alpha chain (acyl lyase subunit) (citF) homolog,accession number D90702,Smith- Waterman Score=1293.
  misc_feature (1)...(4053): n = a,t,c or g
ttatacgaagcgccgccgaaccaagccgttacggtcgagtttacaggcggcaaacggcccgtcgaacatcacaatgccggcggggccatccccgggctccatatgcatggagttaaggtcaaagaaggcacgcagttccgggtccatatccgggttgttctgcaagccgggtggtactaatacacgcatggcgcggatgatatccatcccgcctgccagcagcagttccagcatgtaatccttcgaagtgcagacacagcgggtttcgttagcgcacggtgcggcgtcgtgccgttcacgaataggcggtgtctgatcgtgggctatgtacctgctgaggtggccggcaatctgcttaagctctgttggtggtttgtctattgcgatggtcattcggggtaataaatccaacctctccgcaggggtaatgcaaacctttaccgttctgatgtcccatgtggcaccagaaattgagtggccggttcgcgtgatctccgcactgctgttgctgggtgttctggcgaaaatcgcctcctggattgttggtccttcggcggcgcatcgctggcggtaacccgtttcctgaagacaaaaatgcgtagccgcgatattcggtctgatttcgccatagccggaatccccgcgacaatggttgacctgcacgaaaaaggtttgatccgccacctgttggatgtgcagagctttgacagccatgctgcgcaatcgctggcccgtacccccaatcacatcgaaatcagcgccaaccagtacgctaactggggttcgaaaggcgcatcggttgatcgtctcgacgtggtggtactgagcgcgctgcaaattacaacccagttcaacgttaacgtgctgaccggctccggcggggaattgtgtggtgcatccggtggtccctgcgagtcccccagtgcctatgcgcattccatcatcgtcgctccggtggtacgcggtcgtatacgtactgctggcgataccgatcaaacgctcgaaggcgtgagcgatttccactgcgcgggtatccnccagcggagattcaatcgccgccagcaggccggtgctgccgggttcacgaccacaggctttttcgatacgcaggtcttctttttcaatatccagaacatcttgagcggtatcggttttcggcagacgcacaacgtccgcaccaccgcgaacgacggcttccaggtcgttaacaccccattcggaatccagcgcgttgacacgcacaatggtttcaatatcgcgatacagcggatgttgcagcgcgtggtaaaccatgcggcgggcggtgtctttttcacgcaatgctacggagtcttcgaggtcaaacatcagggcatcagccgggtagatgaaggagttgctgaccatcgcggcattggcaccaggcacaaacaacatgctgcggcgggtgcgagttttacgttgttgcagcgaagcggaaatcattggcaatccgctggcgcgtgccagcagggcttccagtcgtgcacgtaaaatgcagtccagtgcgcctttgtcatcgacattcagctgtacgccgcgcacgttgtagcgggcgagaacgtccagaatggtggtgcgaattgcatcgccaaactgtttctcaacgctgctattgatttgcaggtcgatatcctgcgtatcgagtggggcgatgcgtatcatcacatccccagactcaagggtgcgagctgccgcgtcctggcgggagtgctcaagcaggttctgcaaataatgcagcgtgtctgcagggaccagcggggtaccgagctcaaagccgaagatctgtcgcttaaaccgcataatccggcaagcattgagcaagatcaggttgttttgttcgtcaaagttgcccgcgtggccgatgctcaaaaaatcggcgctggcgcgacccgtatgaccattacccggcgcgacctgcttattgcccgtagcgctgcgnatgtgattgtcaactctggctactccaaagaaggtatctccatgcaaaccggcaccggcggcgcatcgctggcggtaacccgtttcctggaagacaaaatgcgtagccgcgatattcgcgccgacttcgcccttggcggtattaccgcgacgatggttgacctgcacgaaaaaggtctgatccgcaaactgctggatgtgcagagctttgacagccatgctgcgcaatcgctggcccgtaaccccaatcacatcgaaatcagcgccaaccagtacgctaactggggttcgaaaggcgcatcggttgatcgtctcgacgtggtggtactgagcgcgctggaaattgacacccagttcaacgttaacgtgctgaccggctctgacggcgtactgcgtggtgcttccggtggtcactgcgataccgcgattgcctctgcgctttccatcatcgtcgcgccgctggtacgcggtcgtattccgactctggtggataacgtactgacctgcatcaccccaggctccagtgtcgatattctggtcacagaccacggtatcgcagttaacccggcacgtccggaactggcagaacgtctgcaggaagcgggcattaaagtggtttccattgagaggatgcgcgaacgtgcgcgtctgctgaccggtgaaccacagccgattgaattcacagggggatcctctagagtcgacctgcaagccaaggagcaggatctttaacgccattgccgttgaaattctcgcggcgttgaatggtacgctgaacactttattgtcgcgcggaacccgaaggtcaggcactgaaagcattgatcgagcagcgtcgccgaagtggtcaaagtccgctcccatatgccggaaatcctgcaatggcagcgtgagcgtctggtcgcgaagctggaagatgctcaggtgcaactggaaaacatccgtctggagcaggatctggttctgctggcacaacgaattgacgttgccgaagaactggatcgcctcgaagcgcatgtcaaagagacctacaacattgcattgcggcgttgttgatttcgatcgatcgtcaggacgcgggcggggcaaattccgccgattcaggaagttgagcgtgattacggctgcaaagtgatctctatcatcacccgaaagccttgattgcttaccttcacagaaggccaggatctggcttgccagcagggtttcatcggtggtgtaaccttcaccctcacgcattctcttttcacgcaatacctggcgcagatgcgcttcaatacgctcgaacagctggttgatgcgcccttgcaggcgatcctgttcaaacattagcgcatgaccagtgaggatgcgggtcaggccaggattacgctcaccaaaaccgagaagcagcaactcaatcagacgcaggcgcgctgtggtgtctttctcatctttcagaatcaggttgatgcgagtaatcaggctatcttcgataaactcaatcaggctatcgaacatgcgggtcttactggggaagtggcgaaacagtgccgcttcggaaacgccgacagaggcggccagtttagccgtcgtgatacgttggggggatacctggttttcgcattgttcacgacgggtgttgtattcgctgccaaccagggtacgtttgaagttactgttgatgatgacgacagccacacctttgggcatggaaactgctttggtccccagtgagcggcaatcgatcagcaaggcatgatctttcttgccgagcgcggaaattagctgatccatgatcccgcagttacagcctacaaactggttttctgcttcctgaccgttaagcgcgatttgtgcgccgtccagcggcagatgataaagctgctgcaatacggttccgaccgcgacttccagtgaagcggaagaacttaacccggcaccctgcggcacattgccgctgatcaccatgtccacgccgccgaagctgttgttacgcagttgcagatgtttcaccacgccacgaacgtagttagcccattgatagttttcatgtgcgacaatgggcgcatcgagggaaaactcgtcgagctgattttcataatcggctgccat

SEQ ID NO: 26159 - DNA, 3273 bp, Homo sapiens
  SIMILAR (184)..(984): 951254mologous to Escherichia coli NikC,accession number X73143,Smith-Waterman Score=1312.
atggaatggcaccagcgtgtcatcagtcagtgcgatgctttcagcaacctgttgctcttcacgtaccagttcgatgaatgtgtcgttgaccggcaacccatagaactgcgggcccgtttacagacagaatgcttcaaagtgctgcaagcattcatttcttcaaagacggtagcgagcgcacgcgtgaactttttcctctcttcccgctggtcggtacgcctggcgctgatcattatcgccctgctggcgctgattgcgctcaccagccagtggtggctgccgtatgacccacaggcgattgatttgccgtcgcgcctgctttcgccggatgcgcagcactggctgggcaccgatcacttaggtcgcgatattttctcgcggctgatggcagcgacccgcgtgtcgctcggttcggtaatggcctgcctgctgctggtgctgacattagggctggttattggcggcagcgccgggttgattggcgggcgcgttgatcaggccaccatgcgcgtcgccgatatgtttatgaccttcccgacctcgattctgtcgttctttatggttggcgtgctcggcaccgggctgaccaacgtaattatcgccatcgccctgtcgcactgggcgtggtatgcacgcatggtgcgcagcctggtgatttcactacgccaacgcgagtttgtgctggcgtcacggctttccggtgcgggccatgtgcgggtgtttgtcgatcatctggcaggcgcggtgatcccttcgctgctggtgctggcaacgctggatatcggccatatgatgctgcacgtcgcggggatgtctttccttggcctcggtgtgaccgcgccgaccgccgaatggggcgtgatgattaacgacgcgcgccagtatatctggacccagccgctgcaaatgttctggccggggctggcgctgtttatcagcgtgatggcctttaacctgcttgattatatcgacctctacttaatgcactggcccgttcccgctggagaccattatgtcgaagcatggaaaggcatgatcgaattgcaaaaagagggattaatcaaaagcatcggcgtgtgcaacttccagatccatcacctgcaacgcctgattgatgaaactggcgtgacgcctgtgataaaccagatcgaacttcatccgctgatgcaacaacgccagctacacgcctggaacgcgacacacaaaatccagaccgaatcctggagcccattagcgcaaggagggaaaggcgttttcgatcagaaagtcattcgcgatctggcagataaatacggcaaaaccccggcgcagattgttatccgctggcatctggatagcggcctggtggtgatcccgaaatcggtcacaccttcacgtattgccgaaaactttgatgtctgggatttccgtctcgacaaagacgaactcggcgaaattgcaaaactcgatcagggcaagcgtctcggtcccgatcctgaccagaatgccaaatataaggacatcatcatgcagagccggaagctcttaaaagaacaactcatctatatccgggataaacgcaacggagagtcatataaaggatcgctgtactggaataatgtgacctaccccttcccgttgacgacaaataccaacgtattggatattggtgataagacaccgatgccattaccgttaaaactctatattaccccagttggggcggccggtggagttgtcataaaagcgggggaagtcattgcccgtattcatatgtataaaattgcaacattaggaagcggaaatccgcgtaattttacgtggaatattatttcaaataacaatgttgttatgccaacaggcggctgcaccgttgatagtcgaaatgtcaccgtggatctcccggactttcctggaagcgcagaaataccccttggcgtatattgctcaagcgaacaaaagctctcattttatctttcgggtgccaccactgacagtagccgacaagtgtttgctaacacagcacctgatgcaacaaaagcatcgggagtgggtgtcactctaatgcgtaatggaaaaatactggctacgggagaaaatgtctccctggggacagtaaataaaagcaaaccagacaggtatgccgccgacgcgtgcggaaatcgcgcagtattggggttccgttccccaaacgcggctgaagaacatctgaaggcgctggcacgcaaaggcgttattgaaattgtatccggcgcatcacgcgggattcgtctgttgcaggaagaggaagaagggttgccgctggtcgtgtggctgccggtgaaccacttctggcgcaacagcatattgaaggtcattatcaggtcgatccttccttattcaagccgaatgctgatttcctgctgcgcgtcagaggatgtcgatgaaagatatcggcattatggatggcttgtctgcatggcattcctcacttcatctgataaagcactctggcatctcgccttacccatgattttctccaatatcaccgttccgttgctgggactggtcgatacggcggtaattggtcatcttgatagcccggtttatttgggcggcgtggcggttggtgcaacggcgaccagctttctctttatgctgttgctgtttttacgcatgagcaccaccgggctgactgcgcaggcttatggtgccaaaaatcctcaggcattagcccgtacgctggtgcaaccgttgctgttggcgttgggggctggggcgttaattgcgctgctgcgtacgccgattatcgatctggcgctgcatattgttggcggtagtgaggcagtcctggaacaggcgcggcgctttcttgaaatccgctggttaagcgcaccggcgtcgctggcgaatctggtattactcggttggttactcggcgtgcaatatgcccgtgcgccagtaattttgttagtggtcggcaatatcctcaagtattgcttcattcattgccacggcgagttgaaagtctggcggccgagcggttatcccgtctctgtactatctagttacagctgcacttaccgggatttagcgctagtactgtactcggtttatcgcgacatctcggcgaatgggtttagtcatcacgtctctatcgagcattccttgctaacgctctctcgtccggctgacatgatcatccggatccaggacctcggcggctacatcgaccggctagactgtgcattatttctaatcggcttccaacacttccctgttgatcgcacgatagatggtcatatcatccgttaa

SEQ ID NO: 26160 - DNA, 2049 bp, Homo sapiens; identical to SEQ ID NO: 17911

SEQ ID NO: 26161 - DNA, 1533 bp, Homo sapiens
  SIMILAR (1119)..(454): 911254mologous to Escherichia coli o287,accession number L10328,Smith-Waterman Score=988.
ctaattcaggtaatacccgaagacttgggttgctcctgggaaatacctatactgggacttccttgaagtacagcccgtcatggccatgactgactctttcttagtggcctcatatggctgcacgatcccctggtagcgaagcctggttgcgtcgtctgtttttacgctataccggcaagacgccgaaagaatattacctcgatgcgcgtctggatctggcgctatcgcctttctgaaactgcgggatatcgccgaccaccagtggttcaggccgtagtagcgcacgcgcatctgtttgcgatcttgcagcccaacaatttgcgccatccggctttcaataccgattggcatgtcacagatgttgaggattttcgcattcgggcgcagacgacgcgtggcttctgcgacaatggctgccgggttggagtagttgagcatccaggcattagcacgtttcagctcgatggcggagtttgtcacttcggcattgatagacttcgacgcaagagtgttcgactcgcggttgaactcctgcatcataaaatccagacgacgaccaaccgcttcttttttcttcagaatgttgtaggtctctttgacatgcgcttcgaggcgatccagttcttcggcaacgtcaattcgttgtgccagcagaaccagttcctgctccagacggttgttttccagttgcacctgagcatcttccagcttcgcgaccagacgctcacgctgccattgcaggatttccggcatatgggagcggactttgaccacttcggcggtgacgccttccagacgctgctcgatcaatgctttcagtgcctgaccttcggtttcgcgcgcgacaataaagtcgtccagcgtaccatccagcgccgcgagaatttcagcggcaatggcgtcaagatcctgctcctgggctgccatcacgcccggccagcgtagaatatcaaccgggttgatttccccttcgtcactctgcatttttacccagttcgcggcagttaccagctgtttagccagtttttcgttgaggatcagctcaccttgcgcgctaacatatcctttcatcggattggttttcagcttgccgttttccaccagcttctgtagcgcatctaccagcgccacgcaggcacccgtaatcgacgcggtacgcgtgccaccatcagcctgaagcacgtcgcagtccagcgtaatggtgaactcacccagcgctttcaaatctactgccgcgcgaagagcacgggcgatcagacgctggatttccattgtgcgtccaccctgcttacctttcgccgcttcacgagcgttacgggtgtgggtagaacgtggcagcatgccgtactctgcggtgatccagccctggccctgacctttcaggaagcgcggcacgccttcttcaatagaggcggtacacaacactttggtatcgccaaattcgaccagcaccgagccttctgcatgttttgtatagttacgagtcagggtaacgggacgcacctgattattgctacggcctgctggacgcat

SEQ ID NO: 26162 - DNA, 4107 bp, Homo sapiens
  SIMILAR (2770)..(3492): 991254mologous to Escherichia coli yjdB,accession number U14003,Smith-Waterman Score=1293.
atgtacgatcatctgggtaaacgcaccagcttgccgggatcaactggtttgcgttttggcgcaaattcagtgttaaaaccggaaattaagcgcggattcgaatattctgactgttgggtagacgacgcccgtctggtactcgccaacgcccagatggtggtgcgtaaaggcggcgaagtgcttactcggactcgcgccacctctgctcgccgcgaaaacggcctgtggattgtggaagcggaagatatcgataccggcaaaaaatatagctggcaagcgcgcggcttggttaacgccaccggcccgtgggtgaaacagttcttcgacgacgggatgcatctgccttcgccttatggcattcgcctgatcaaaggcagccatattgtggtgccgcgcgtgcatacccagaagcaagcctacattctgcaaaacgaagataaacgtattgtgttcgtgatcccgtggatggacgagttttccatcatcggcactaccgatgtcgagtacaaaggcgatccgaaagcggtgaagattgaagagagtgaaatcaattacctgctgaatgtgtataacacgcactttaaaaagcagttaagccgtgacgatatcgtctggacctactccggtttctgccagcccttgttgataacccgcaagaatgtcgttcagcaggctcagccggtaaaattgttcacttttcactttccccagccacagccaggtaccgggcccagcaagcacaggtttcaccttgtggcccagcgccagcgcctcgtccacttcgtccagcagttgcgtccaggtcagtttgaactgttggcctttaacgaactccggcaccatgtagtgatagttggtgttaaaccatttggtcatttccgctgccgccgcaggttcgccagtcggcgcacgtccacgaccaatacggaacagggtgtcgatatctaccgaaccatctttgttctgatgacgcgccggaacgttacccagcagcagactggtggtcagtacatgatcgtaccaggcaaaatcgcccaccggcagcaggtcgatacccgcttgcttttgttgatcccaggtgacgagcacgcaattcacgccctaccgccagcagttcttcacgcgtggagttccccgcccaataactttcttgcgcttttttcagctcgcgacgcaggccaacgcgagggaaaccgaggtgctcgtaaagcggctgttcgatatcttgtgggttatatgtcttttccattatttccaggttgccgtattcaggttgaaaccagccacgcggtaggctttatagcgttcgcgcgccagttgtttcagagaatcttcataaggaacgaagtctaccacttctgtgaaagcggtggcaaaatctgcaaagcttgttcgcagactaatcaatatatcgcgccggctgctgctacgcttcctgcggccaggcgatctccaccgggcttaaatccggtgatggtcggggcgattcccttcgatccacgtcagccttcgtcgctgtatattcctgaatcctggcagtcgttctcccgtcaggaaaaacaagcttccgcacgccgtttcacccgcagccagtcgctgaatgtggtggaacgccaggcaattccggagcaaaccacgtttgaacagatggttgcccgcgccgccgcacttaccgccacgccgcaggtcgacaaagtggtgttgtcacggttgattgatatcaccactgacgccgccattgatagtggcgtattgctggaacggttgattgcgcaaaacccggttagttacaacttccatgttccgctggctgatggtggcgtcctgctgggggccagcccggaactgctgctacgtaaagacggcgagcgttttagctccattccgttagccggttccgcgcgtcgtcagccggatgaagtgctcgatcgcgaagcaggtaatcgtctgctggcgtcagaaaaagatcgccatgaacatgaactggtgactcaggcgatgaaagaggtactgcgcgaacgcagtattaacttgtgtatcgatgttcggtgtcatcgtccgtcgacatccgtgcggtccgcgtcgtcgtcggccgtgatagtcggcccccgcgaagccctgctcgacagcctgaaaaaactccagcttgattatatcgacctctacttaatgcactggcccgttcccgctatcgaccattatgtcgaagcatggaaaggcatgatcgaattgcaaaaagagggattaatcaaaagcatcggcgtgtgcaacttccagatccatcacctgcaacgcctgattgatgaaactggcgtgacgcctgtgataaaccagatcgaacttcatccgctgatgcaacaacgccagctacacgcctggaacgcgacacacaaaatccagaccgaatcctggagcccattagcgcaaggagggaaaggcgttttcgatcagaaagtcattcgcgatctggcagataaatacggcaaaaccccggcgcagattgttatccgctggcatctggatagcggcctggtggtgatcccgaaatcggtcacaccttcacgtattgccgaaaactttgatgtctgggatttccgtctcgacaaagacgaactcggcgaaattgcaaaactcgatcagcataatggggtcgaaataatactcttcggcgttagcggtagtgcaaagcatgccgctgccagtgagcaccatcggcaaacaacgtttgatgatgagcgccaactgtttcggtgtgcgtttatgtccctgcgactggcaaatctgccgctggtgcgaattggtgaagacgcgcaccgcaacccgttaatgcagaacgaaaaacgtaaaaatttgaccatcctgattgtcggcgaaacctcgcgggcggagaacttctccctcaacggctacccgcgtgaaactaacccgcggctggcgaaagataacgtggtctatttccctaataccgcatcttgcggcacggcaacggcagtttcagtaccgtgcatgttctcggatatgccgcgtgagcactacaaagaagagctggcacagcaccaggaaggcgtgctggatatcattcagcgagcgggcatcaacgtgctgtggaatgacaacgatggcggctgtaaaggtgcctgcgaccgcgtgcctcaccagaacgtcaccgcgctgaatctacctgatcagtgcatcaacggcgaatgctatgacgaagtgctgttccacgggcttgaagagtacatcaataacctgcaaggtgatggcgtgattgtcttacacaccatcggcagccacggtccgacctattacaaccgctatccgcctcagttcaggaaatttaccccaacctgcgacaccaatgagatccagacctgtaccaaagagcaactggtgaacacttacgacaacacgctggtttacgtcgactatattgttgataaagcgattaatctgctgaaagaacatcaggataaattttccgactcactcccggttaatggcgctatcccaccgccgccgaccacttcaccctcgctgactatatacttgatacagctcgtcaagattcggatcggcgacggtgtagcctttatcagcggtaagaccgtattcggcggatacctgacgaatgacgcgggcgatagcaggattatcctgcagcgtcaggcgacgcattacagcaaaaggctgatcatcagcggtcgcgagctattagtatcagatcagggaaatagtgtagccgcaaaaaaggttctgctcaccctgtgggattatatgtctacgcccgaccagattaagcggatgcaggacgtcattagcaacccaaaacgactggatggaattcccgtgcaaatgaatgctgtgcatatccgatttgacagcaactcccccgtgatggcagatgtgcaggaagaaggcaagccgcagctgtggaaccataaacaaaatgatgctttaggtctttaccttgatctccttatacaagcaatcaacactggtactattaacgctgaagattggcaaaaaggtgaccgattaaagtcggttgcgctgctgattgcttatctggataaagccaatttctatgttatggaagattcctga

SEQ ID NO: 26163 - DNA, 2091 bp, Homo sapiens
  SIMILAR (931)..(902): 1001254mologous to Escherichia coli bifunctional penicillin- binding protein 1C,accession number U88571,Smith-Waterman Score=53.
tcagggctgtgcctgggagcaagagggactcaaagacccagagcatctgtttgcttgctgttttgaattcacgccatcccgcttgagtttttcttctgtttgggtagctcgaaagagattagccgccagttctgttgaacccatatgatccaggatcttctgattctttttcagccccttccgctgatgaatagctttctgatctaatccaccatacagcccctggtaaccatgattctgaaatatggcgaaatcagtagctgtcgctaccccagcttgctgtgctgcctcaaccaattgtttgttatgttctttcaactcatttctcagaaacagacgcttttcgtcttcacgaagttgcttaaatgcttcatcgtcagcaagctcctgccgtcgggtagccactgtgtttgcttgctgttttgaattcacgccatcccgcttgagtttttcttctgtttgggtagctcgaaagagattagccgccagttctgttgaacccatatgatccaggatcttctgattctttttcagccccttccgctgatgaatagctttctgatctaatccaccatacagcccctggtaaccatgattctgaaatatggcgaaatcagtagctgtcgctaccccagcttgctgtgctgcctcaaccaattgtttgttatgttctttcaactcatttctcagaaacagacgcttttcgtcttcacgaagttgcttaaatgcttcatcgtcagcaagctcctgccgtcgggtccgcgcgaataattcaccgttcagatagatatcatggcgcatggctaactgactaatcgtccgcaggctcctcgaagaccatcctggggcacgcaatcggggctctggcacgtacataaactgcgtcagaactgggaaaatcctgctcacgggaccacacaccttgcacggcatccgttcgagcactttattacgcgcggcttcggcacgctccggccaacgatccgggcgaagacggctgggcgcttgcggcaaaaccgccagcattgccgcctcggaatagcttaaattcgcaggcgattttccgagataagcccaacttgccgcaccgatcccctgcaacgtaccgccaaacggagcgcggttaagatacaaggtcagaatttcacgcttagacagatgccattccagttgcaacgcgcgccagagctggcgaattttgccgccaaatgttttggggtgaggatcaagcagacgagcaacctgcatagtgagcgtgctgccaccggaaataacccgtcccgaagtgagatcttgccatgctgcgcgcgccaccgagaatggattcacccccggatgcttccagaaccagcgatcttcataattgatcagcgcttcaaggtaacgtggagaaacatcttcgattgttaccggataacgccagatgccgtcagcatcggcgaagcgccagagcggcgtaccatcctgcgccacgaccactcgtgcgggattgacttcatgcagcggtagaggccagagtttatctgctccccacgcatcagcgaatttcagccgggcccgttccccgccatgggggacatccttgggcccccaccggtgcgggaccggtacttcccggggcaccgccggaagcggaccccccggtatgcacacggaacccgccatcgctttcatcaaatcatagtatttgtcgaaaatagccttgtcgccgcccaccatcactgacagcgtaccgtcgatggctttcggttcaccgccgctcaccggagcatccagcatatcaatgcctttcgctttcagcgcttcgctgatttcacggcttgccagcggtgcgatagaactcatatcgatcaataccgtacctggcttcgcgccttcaataatgccattctcacccagcgccacctctttcacatgaggggagtttggcagcatggttatgatgacgtcgcactgttcagcgatcgctttagccgtagacgctgtttctgcacctgcagcaatcacgtcagcaatagcttctgggttacggtcagcaaccaccagcgagtaacctgctttcagaaggtttttactcattggtttacccat

SEQ ID NO: 26164 - DNA, 1914 bp, Homo sapiens
  SIMILAR (1290)..(1352): 611254mologous to Escherichia coli O157:H7 putative enzyme,accession number AE005531,Smith-Waterman Score=77.
tcaatcccaccaaacagccccttggtaaccatgattctgaaaatatggcgaaatcagtagctgtcgcaccccaagctgttgctgtgctccttcaaccaattgtttgttatgttctttcaactcatttctcagaaacaaacgcttttcgtcttcacgaagttgcttaaatgcttcatcgtcagcagctccctgccgtcgggtctggatagcaaaataagtctgccctgccgcaatgaccggtttcgcagggtcgccgttttgtactaccaggtaacaggcatagcgggagagtacgatgtcttttaatgctcttttggcatttgagccaattttgaccatatcgaggatctcctcgaaatggtcatcaattgtgtgaccacatgttattacacgctgtatttgacgcgcggtaatacaggtataaagtgacgatactctgaataacccagtagtttcccaagttgtcttgctgaccattgttctgctccgtttgcattaatcagttttatctcttcaaaaggttgatgatgttcgttcattgcccactccatgtgatatcaattgcaaagaaagtaaatctgtaactgtatttatatacagctgtgagtatctcacgttctcagtgtgctgggcaaaaaaacatcgcaaaatctggagcaggcacgcaaaacagaattgaatgttgcggggaagaaaaatgccgctctgtttgagtggcggcatttgtgaaggcggaaaagtaagaattggcgttacgagttattcgatgttctgaatctgctcgcgcatctgctcaatcaacactttcagctcgatggcggagtttgtcacttcggcattgatagacttcgacgcaagagtgttcgactcgcggttgaactcctgcatcataaaatccagacgacgaccaaccgcttcttttttcttcagaatgttgtaggtctctttgacatgcgcttcgaggcgatccagttcttcggcaacgtcaattcgttgtgccagcagaaccagttcctgctccagacggttgttttccagttgcacctgagcatcttccacgttcgcgaccagacgctcacgctgccattgcaggatttccggcatatgggagcggactttgaccacttcggcggtgacgccttccagacgctgctcgatcaatgctttcagtgcctagacttcggtttcgcgcgcgacaataaagtcgtccagcgtaccatccagcgccgcgagaatttcagcggcaatggcgtcaagatcctgctcctgggctcgccatcacgcccggccagcaactgttcatcaccattaagctttggaacgacgaccaccaagcgcccccgcgaagccttgctcgacagcctgaaaaaactccagcttgattatatcgacctctacttaatgcactggcccgttcccgctatcgaccattatgtcgaagcatggaaaggcatgatcgaattgcaaaaagagggattaatcaaaagcatcggcgtgtgcaacttccagatccatcacctgcaacgcctgattgatgaaactggcgtgacgcctgtgataaaccagatcgaacttcatccgctgatgcaacaacgccagctacacgcctggaacgcgacacacaaaatccagaccgaatcctggagcccattagcgcaaggagggaaaggcgttttcgatcagaaagtcattcgcgatctggcagataaatacggcaaaaccccggcgcagattgttatccgctggcatctggatagcggcctggtggtgatcccgaaatcggtcacaccttcacgtattgccgaaaactttgatgtctgggatttccgtctcgacaaagacgaactcggcgaaattgcaaaactcgatcagggcaagcgtctcggtcccgatcctgaccagttcggcggctaa

SEQ ID NO: 26165 - DNA, 794 bp, Homo sapiens
  SIMILAR (39)..(710): 381254mologous to Salmonella typhi BigA,accession number AF133185,Smith-Waterman Score=332.
cacggttagtcgctcaatcgaatagcacaattatcaatactgacagcggcatcattgatttgtatggtcgtggtagtgtcggcatgcttgctatagcagattcaacagcagaaaatcagggtatggcggcctatggcgccagcaatacagttattaaccaggggacgattaacctcgaaaaaaatggtaattatgacgatagtctggcagcaaatactctggtagggatggctgtttatgagcatggtactgctatcaacgaccagacgggtgttatcaatatcaatgttggtactggtcaggcgttttataacgatggcacaggaacaattgttaactatggtacaatctgcactttcggcgtgtgccaatcggggaatgagtacaataatacagatgatttcacctcactgatctataccggtggcgatacgattacacgaagcggagaaactgtaacgctaaataaatctgctgctgtgactgataagctggctgggaatgttgttaatagcggaacgctttccggtgatcaaattacggtatcaagcggtcttctggaaaataccagcggtggcatcatcaataacttagtaaaacttgacaagggtgccgtcattaaaaatgccggggtgatgacgaataacgtcgatgttagcggtggaatcctcaataatgccggagaaatgactgcgcaaattaccatgaatgctggtgctgatagttcgttagtgaacaacaccggaaccatcaataaaatcaccaatgcactccagcctgagcaacagagctag

SEQ ID NO: 26166 - DNA, 735 bp, Homo sapiens
  SIMILAR (735)..(460): 811254mologous to Escherichia coli K12 putative enzyme,accession number AE000364,Smith-Waterman Score=408.
ctattcaccttcctgcaaggctttggtgatatgttcccgctggcctgggcagggatcttcatgttctttatgcgcctttatgctcggcttctcggaagcgccatcattcccggcgaacgcccgaattgtggccgactggtgtccgacgaaagaacgtggtactgtcttcgccatttttaactcggcgcaatatttctcgctggcgcctctttcgccgctgcttgcgtagctggcttttgcctggggctggggacacgtctttaccgttatgggcgtggatgggtgttgggctaccgcggctgtgatccagttggttccatcatctacttcaccgcatgacaaaccgcaacaaacccaaaggtggcggtcaccatcggcgccgcgccaaatccagatgcacaatccatccgcttcggcccttctgccgtggctttcatcgcacacaccgtaccgtctgactttactgtttttcactacgccaaaatcgcttttcaggcgctcgcgcaacttcgccgccagcgggtcctgaatcgttttcgccagatcggtaacctgaatctgcgtcggatcaatctgcccacccgcgccaccggttgtgaccagtgggattttattgcgccgacaataagcaatcagcgccgctttgggccggtacactatgttatccggcgtcacgaaatcatccaccaccgatacacggcactccggggtaatctggcgaatacgctccgccat

SEQ ID NO: 26167 - DNA, 424 bp, Homo sapiens
  SIMILAR (97)..(423): 911254mologous to Escherichia coli O157:H7 orf, hypothetical protein,accession number AE005243,Smith-Waterman Score=537.
atgcttgctatagcagattcaacagcagaaaatcagggtaaaattacactggattctatgtgggtagatgcaaatgacactaccgcaatgcgagatatagctagcaacagcgccattgacttcggtacagccacggagctttccgcgattcatggtcactcaacgtcgcaatatcgccttggagaattttatcttcatggtagcgacggtaaaccactggattatacacaggcgagatactggtatgagcaatcagcggaacaggaaaatccacgcgcgcaaagtaaactggggtggatctacctcaaaggtctgggggtcaaacccgacacccgtaaagcaattctctggtataaggaagcagctgaacaagggtatgctcatgctcaatatactttaggtttgatctacagaaatggctcag

SEQ ID NO: 26168 - DNA, 1361 bp, Homo sapiens
  SIMILAR (1361)..(435): 1001254mologous to Escherichia coli put. IS30 transposase,accession number X00792,Smith-Waterman Score=1613.
gtcacatcaccgcaccacacctgatttgggttccgttacggcgaactgtcgctcaaattgtttcgggatagcaacgtgctcatgaccgccacgcttataccggtgagtcggctgctggcaactgaccagccccagctctttcatgagtctgccagcaagccagcgccccatctggtatcctctctgggttgccattgtggcgatgcttcttgctccgcagagccgtggctgatgccatgcagttcaagtacctgactgcgtaatacagcccgtctgccgtctggcttttcaggacggtttttccagtatttgtagctgctgcgatgaaccccgaacacatggcagagagtggccacaggataacgcgccctgagtttcccgattatcgagaactgttcagggagtctgacatcaagagcgcggttgtagattcaatctgtcaatgcaacacccctttcaattatctctttcggtgttttgaacttcagtgtctttctcggtctgttgtttagctgagcagcaaccagatctagttcatgttgagtatattgggcaagacatgtctttttaggaaagtactgccgaattagcccatttgtgttctcatttgttccccgctgccaaggactctgaggatcgcagaagtaaactttaacgccggtgctgacagtaaattctagatgtctggccagttccattcctctgtcccatgtcagtgattttctgagttctgacggtaaactcaggaatttgtcggtaagagcctgatttactgagacagaatctttgcccctgagtctaaggatgatcgtataacgtgattttcggtctacaagtgtggctatatgagagttttttgtacctgagactaaatcgccctcccaatgccctagagagcgtctgttatcgatatttcgggaacgttcgtgaattggtgttccgttcactatgttaatcgtacctctttcgcctttgcgggtatgacgcctgccatggcgaaggctatgcgaccgtcgcagatgctgtatattcaggtggtgtagcgcttcacggctacgaaagtacagcgttttataaattgtctcaggtgatattcgcagcgttttttgacgtggttttgttcgccttaaccatcctgatatttgctctggagaccatttcatctccagcttttccagaacaagctttcgcaatggtaaattttgatccagtaagcacggttttggccttttcgccattctgttggctcggttattagcatcaacagctttgtaatagcgtctgccccgattacgctgaacttcacgtgagatcgtcgaaggactgcgattcagcgcagtagctatcgcacgaatgctcat

SEQ ID NO: 26169 - DNA, 2895 bp, Homo sapiens
  SIMILAR (2640)..(1921): 831254mologous to Escherichia coli possibly rffE; (UDP-GlcNAc -2-epimerase),accession number M87049,Smith-Waterman Score=1039.
tcatcctgcagtcgcattagaggagccccttgctaggaatcgccgctgattcgggccgatcaggggattaacgtctgggaactgattcgcctggcgaatcgtcaccctcgcgttaatattcttcagcctggccctggcgtgggcggtcactgcattgctgttgatccgtggtttatcgtggcacagaacccccagcaggcgcggcttatccgtaccgcgcgcgaagtgaacgatcacaaaccgttctgggttatcgatcaggtgaaagcggcggtggctgattgcctggcggctaccgataaacgcgccagtgaactgaaaatcgcctgctttggtctggcgtttaaaccgaatattgatgacctgcgcgaaagcccggcgatggaaatcgctgaactgatcgcccagtggcatagcggcgaaactctggttgttgagcctaacattcaccaattgtcgaaaaaactgaccgggctttgtactctggcgcagcttgactaggcgctggcaacggcagacgtgctggtgatgctggtcgatcatagtcagttcaaagttatcaatggcgacaatgtccatcagcagtatgtcgtcgatgccaaaggagtctggcgttctcaccgcttcattcgccagcagcgcatcaccagtatcggaaagcactacatggccgttttccagcacgtagccgcgatccgccagctttagcgcctggttggcgttctgctcgacgagaaagatagtcatcccctgctcgcgcagctgctcgatggtgtcgaaaatttgctggatgataatcggcgcaagaccgagcgatggctcatcaagcaatatcaaacgcgggttgctcatcagcgcacgaccaatcgccagcatctgctgttcaccgtctgtctcatttatgatcatcgccgcgctgatgatgatgggcattgataccggctggctgctggtagctgcgggattcgtcggcgcaatcgtcattgccagcgccgcccggggcgtaactctaagcgcctgattgcactcatctctgcaatcggtatgtccatcttcctgcaaaactacgtcagcctgaccgaaggttcccgcgacgtggcgcctagctcggtacctttgacgcccgcttcgttgctcattgctggctcgccgccgcattaaacgatatcgcgcctgtccggccccctgctcagagaaataatgctcaagcagctgtaccattgcggaaagtccctgacgaatctgcccatcagagagattttgcggatgtgaggataactcacgggcgaggaaatcgagctggcgcgcggtgacttccacattagggacatttggcaccgtgccgttacgaatacggcgcataaaacgggcatcacgcaagcgcagcaccggcattaaacgcaccagatggcgtgcctgatcgttaatatcctcgacatcaatcggatgtccgtctttatcgagaaaactgcgcagtgtcatcacgctgccgtcttccgcactctccccttccagacgataaaaaatacggtgatagccatcggtgcatggcgtccagcacgcttccagcggccgataacggcgaacccgatgtcggcctggcagcgattcgcggaaggtcaaaataatatgcagatgatgttctcgcccgttgatatctcccggcgggaaccagaaatcgtcgcgctcaaaatggtagagatctgattccaccccgcggcagcagtggagggcgtcgccctcccgggccttccgacgcagaccctgccatccggatgctgcgggaagtagggcatcctcacgtccctgactcctccggctccgcgcgctcacggaacccaagtggagtgggaagcggtcacacaggcgtgtgccgtccccgaaatcgttgctcccaggcattatatggcatgacgacggatcatgccccggacggtcagcgacgaaggtgatcaggtcacgatagtgcgccacgccgtgcggcttgttcggagccagttcttccagcagctcgcaaatggtttccacaacatcgagattcttacgctcgttgtgaccaccaatattataggtttcaccgactttcccggtggtcgccacgcaatacagcgcgcgggcgtgatcttccacatacagccagtcacggatttgctgcccgttgccatataccggcagcgatttacccgccagcgcgttgaggatcatcagcgggatcagtttttccggaaagtggtaagggccgtagttattcgagcagttggtgataagcgtcggcagaccatatgtccgcagccaggcgcgcaccagatggtcgctgctggcttttgacgcggaataagggctgctcggcgcatacggcgtggtttcggtgaagaaatcatccgtcgagtgcaggtcaccatatacttcgtcagtggagatatgatgaaaacggaacgctgattttttatcttccgtcagcgcattacaaaaagcccgcgccgcttcaagcaatgtcacttctgtgagggagagctcagacaagttgtctatcagccctgtgcaacagagtgaggattcagtaaaagaagtccagaactccatggtggtttgaaggcaacagtctggtgtttgctcgaggtagggtttctcaacctcagcactactgacattttggaccagataattcttcatagctgccttaagctcaacttttcggcggggatccctctgcagacgtgcaggtggcgggagagcagaggtagccgcagtaagtgctgagagagcctgaaagaaacaccatgaattttcaaactctcccacatacattcccgaagcgcctgtctggcgttttcttgtttctgccaagtaattttcatacatccctgcaagtgactcacactttctgtcctccat

SEQ ID NO: 26170 - DNA, 1302 bp, Homo sapiens
  SIMILAR (656)..(129): 941254mologous to Escherichia coli argininosuccinate lyase,accession number U00006,Smith-Waterman Score=847.
gttatccggcctttccggctggtggggcccgcctcgcttttgcaagttgtgatttttcgccgtggggcccattgcggtgggtggacccttttttttagggggtaaattgcccgggtaaaaggagacagtattacacctcgagttcggataccatcacgcgccagcatctcaatataggccaggcaccagtgcgcgaacgtcaccggctgggcgcgttgcaggtgagtgtaacctggcattaccgcgtcctgatagttttgtgcggtttccaccagcgccgattgcagctgccggttagccgtcagtaactcgctaacggtatctttgcaccacagtttcaggtcagtcgctacctgatcattacggctacgcccggtatgcagctttttgcctaactggcccactttgtcgatcagtttgccttccacccagctatggatatcttcggcgtcgctttcaaggatttgttgtggcctggcgcgaacatcttccagcaacacgttcagcgcctcttccagttgcgcctgctcttctgcggttaacacgcctaccgtgaccagggctttggaccaggccacagagccaacaatatcctgctccgccagacggtaatcaaagcgcagtgagtcgttgaatggtttgaaccgttgatctgcgtgaatggctgggagagtaagtggcccgttttgctgtcggagtagtaacctgaaaccgtcggcacaaactgcgactcatcgaactgaatccctgcctctttaaacacgtcatacaccggtttaatggctttcgacgccatcatggtggcggtgccaacttcataaacctgcaaaatacgtcggcgcgttgccggtacgaaatgcggcaatccccgcgcttaaattctgttcgtagttgcctttataggtcggtacaattttgtaatccgggttttcggcgttaaaacgttgggccagagaatccacctctttacccggttccccttccatagaatgccagaacggaatggtcgtcactgcctgtgcattccccattaacgccagtccgagcgccagtgctgaagctgtataatgtaacggtttcatcgtttatctctcttgttgtaccgaatgcgcgaattcacgcgttttatgctcgcggggtaacatgacatgctcgaattacagaaaaataacttttttgttacatttgtaagatagtaaggtgtcagaaagatgacaaggcggtgacggcgtgggtgagggaaaatgggagatggggcacggataagcgggaaaatatagaaggtctgaatcaaactctaca

SEQ ID NO: 26171 - DNA, 3081 bp, Homo sapiens
  SIMILAR (1927)..(2328): 981254mologous to Escherichia coli similar to,accession number D90890,Smith-Waterman Score=661.
tactatttcgagctccgtccccggggatctggttgctgctcacctaaacaacagaccgagaaagacactgaagttcaaaacaccgaaagagataattgaaaggggtgttgcattgacagattgaatctacactgttgaaattcagaatttaggttttgcttttgttactggtgaaaatacaacaggtataaatagtggcacgatctcgttattacaaaatggtaaagatccggcaccgtctcccattgttttactggctactaacggagggagcgccactaatgcaggtacgatcacaggtaaagtgacggaacaacatagcgtatttaacaagtattcaacgggcacatcgaattcatttatttttaataacgatgtcagtagcataacagggttagtcgctcaatcgaatagcacaattatcaatactgacagcggcatcattgatttgtatggtcgtggtagtgtcggcatgcttgctatagcagattcaacagcagaaaatcagggtaaaattacactggattctatgtgggtagatgcaaatgacactaccgcaatgcgagatatagctagcaacagcgccattgacttcggtacaggtgtgggagttgggactgataggtatagggggggcaggaaaaatgccccagcctttaacccaattgggcggtgttataactatttataacgccggcgcaggtatggcggcctatggcgccagcaatacagttattaaccaggggacgattaacctcgaaaaaaatggtaattatgacgatagtctggcagcaaatactctggtagggatggctgtttatgagcatggtactgctatcaacgaccagacgggtgttatcaatatcaatgttggtactggtcaggcgttttataacgatggcacaggaacaattgttaactatggtacaatctgcactttcggcgtgtgccaatcggggaatgagtacaataatacagatgatttcacctcactgatctataccggtggcgatacgattacacgaagcggagaaactgtaacgctaaataaatctgctgctgtgactgataagctggccggggaattttgtttaatacgggaacgctctgcgggtgatcaaattacggtatcaagcggtcttctggaaaataccagcggtggcatcatcaataacttagtaaaacttgacaagggtgccgtcattaaaaatgccggggtgatgacgaataacgtcgatgttagcggtggaatactcaataatgccggagaaatgactgcgcaaattaccatgaatgctggtgctgatagttcgttagtgaacaacgccggaaccatcaataaaatcgtgcagagcgcgggggtattcaataatagtggcagtgtaacagggcggatgatgtcggctggcggggtctttaataatcaaactgacggggcgattatgagaggtcgtgcgctgacaggtactgcagtggcaaataacgaaggaccctggaacctcggaagtagtagtgagggtaacaactccgggatgctggagagttaataataattcagcttgcgagaaatatcgcgccgagttaaagatggcggaggcagtaccacgttctttcgtcgggaaccaggcggcgacaattcgggcgttcgccgggaatgatggcgcttccgagaagccgagcataaagcgcataaagaacatggagatccctgcccaggccagcgggaacatatcaacaaagccttgcaggaagcaaattgaaatggtggagtttgaggctgcagctgctattgatggcaacaccctatggcttggacacatgttgatggcttgccagcgctgctgtgatggtgtgtggtgggaatgtggtggacgctggatgaacaaatgtgtgcatcacaatggaaactacgctatggacgcagccattacgtctctggatggctatcgctggctgaagaacgatattattcgcggtaattttctaccggatgaaaaattacgaatgagtttgctgacatcgcgttatgcacttggcgttgggccgttacgggaagctctttcgcaactggtggcggaacggctggtcacggtggtgaatcaaaaagggtatcgggtggcgtctatgtcagagcaggagctgctcgatattttcgacgcccgcgccaatatggaagcgatgttagtgagtctggcgattgcccgcggtggcgatgagtgggaggcagacgttctcgcaaaagcgcatctgctgagtaagcttgaggcctgtgacgccagcgagaaaatgcttgatgagtgggatctgcgtcatcaggcgttccccacggatagtggatggatggatggacaaataaatgatgggatggatggatggatgcacaataaggatgaagggatggtcgcagttctcttccacgtctgcatgagcgcgtatcagcgggcgggcaccatgtccggcggtgaacagcagatgctggcgatggtccaaattttcgacaccatcgagcagctgcgcgagcaggggatgactatctttctcgtcgagcagaacgccaaccaggcgctaaagctggcggatcgcggctacgtgctggaaaacggccatgtagtgctttccgatactggtgatgcgctgctggcgaatgaagcggtgagaacttcagcactggcgctcggactggcgttaatggggaatgcacaggcagtgacgaccattccgttctggcattctatggaaggggaactgggtaaagaggtggattctctggcccaacgttttaacgccgaaaacccggattacaaaattgtaccgacctataaaggcaactacgaacagaatttaagcgcggggattgccgcatttcgtaccggcaacgcgccggctattttgcaggtttatgaagttggcaccgccaccatgatggcgtcgaaagccattaaaatttcaactttgaagtcttattatataagaaatacattttgtaacactatagctgccacagatagtgattcctctaatggttttcagcaaagtaaattgaaaatctctgaaagcattcattactttagatgtcattaa

SEQ ID NO: 26172 - DNA, 980 bp, Homo sapiens
  SIMILAR (863)..(255): 1001254mologous to Escherichia coli URF1 (aa 1-267),accession number X03966,Smith-Waterman Score=1072.
gcttgcaggatgcagtaatacttcctggcgtaaaagtgaagtcctcgcggtaccattgcaaccgactttacagcaggaagtgattctggcacgtatggaacaaatccttgccagtcgggctttaaccgatgacgaacgcgcacagcttttatatgagcgcggagtgttgtatgatagtctcggtctgagggcattagcgcgtaacgatttttcgcaagcgctggcaatccgaccggatcttcacggattttcccaccgcgtagcgtttccagcacatgctctttcagacgaaacccaatctggtcggactcttttaccggttcgcgatcccagataccgttactgttcgcatcccactgcacaatgacacagtcaccctgtccgacaatttccagcccttcgccggtacagatgccatgacaataacccgccctctggagatgcttcgcgacggtaaatacccgcagccagatttcatcttccagcgccagcttacgggtgctcgttaaactttcacgctgtaacgcaggcagaaagcgtgccgcccccagcaacaatacgctactgatcgccatagcaatcaacacttccagcagagaaaaaccttgctcttttacaggcatccttctgtttctccttgctgacaaagccggagtcttccccacggcgaaaccaccagccaccactcgcccgttgagtttttgaagcgaatatgcccggcccatgcggtattgcgcaggccaaagaaagcaagcgaaggtgtcaggtcgctcatttcgacttcgggccagcgtggcacaaagaccaatggtgaactgccatgacaggtattggccccagcagcggaactcacaaggcaccataacgtcccctccctgataacgctgatactgtggtcgcggttatgccagctggcatcttcacgtaaatagagcacatattcccgcgcctggctgtcggtttgcataaccgttgggact

SEQ ID NO: 26173 - DNA, 3678 bp, Homo sapiens; identical to SEQ ID NO: 10443
  SIMILAR (2770)..(3423): 871254mologous to Escherichia coli O157:H7 putative transport system permease protein,accession number AE005655,Smith-Waterman Score=914.

SEQ ID NO: 26174 - DNA, 3446 bp, Homo sapiens
  SIMILAR (481)..(1779): 991254mologous to Escherichia coli D21141 uses 2nd start; frame determined by Lac fusion,accession number U28375,Smith- Waterman Score=2275.
atgctgagcgcactggtcggatgggaaggatcggagtttggtggggaggatgggggggtagctgggggggtagaagccgctcgttgcctcgaatgtaaatacgtttgcagcaagtgtgtggatgtctgcccgaaccgcgccaacgtctccattgcggtcccaggcttccagaaccgtttccagacgctgcacctcgacgcttactgtaacgaatgcggcaactgcgctcagttctgtccgtggaacggtaaaccgtacaaagacaaaatcaccgtcttcagcctggcgcaagactttgataacagcagcaacccaggcttccttgtggaagattgccgggtacgagtacgtctgaataaccaaagctgggtgttaaacatcgacagcaaaggtcagtttaacaacgtaccaccggagctgaacgatatgtgccgcatcatcagccatgtccaccagcatcatcattatctgctgggccgcgtggagctacacccggcaaaagtgcaggaaggcgttgatatcgccatcgaaaacgatgtgattgtcgctatcggcgatgccctgacgcaacgctaccccgacgccagcttcaaagagatgcatggccggattgtgatgccagggattgtctgctcgcacaaccatttttactcggggctttcccgcggaattatggcaaacatcgccccttgcccggatttcatctcaacgctgaaaaatctctggtggcggctcgatcgcgcccttgatgaagagtcgctctattacagcggactgatttgttccctggaagcgattaagagcggatgtacatcggttatcgatcaccatgcctctccggcgtatatcggcgggtcgctctccacattgcgcgacgcatttttaaaagttggcctgcgcgcgatgacctgttttgaaactactgaccgtaacaacggcatcaaagagttgcaggaaggtgtagaagaaaacatccgtttcgcccgtttgattgatgaggcgaagaaagcgacaagcgagccgtatctggtggaagcacatatcggtgctcacgcgccgtttaccgtgccggatgccggtctggagatgctgcgtgaagccgtgaaagccacaggccgtggtttgcatattcacgctgcggaagacctttacgacgtttcctacagtcaccactggtacggcaaagacctgctggcacgactggcgcaattcgatctcatcgacagcaaaacgctggtcgctcatgggctgtacttgtcgaaagatgacatcaccctactcaatcagcgcgatgcgttcctggtgcataacgcccgttcaaacatgaacaaccatgtcggctacaaccatcaccttagcgacatccgcaatctggcgttgggaacggacggcattggttcggacatgtttgaagagatgaaatttgccttctttaaacatcgcgatgcgggtggtccgctgtggcctgacagttttgccaaagccctgactaacggtaacgaactgatgagccgcaactttggcgcgaaatttgggcttctggaagccggttacaaagctgatttaaccatttgcgattacaactcgccgacgccgctgctggcagacaatatcgccgggcatatcgctttcggtatgggctcaggcagcgttcacagcgtgatggtcaatggtgtgatggtctatgaagaccgtcagtttaacttcgattgcgattccatttatgcacaagccagaaaagccgctgccagtatgtggcgtcggatggatgcgctggcataaatgacagatgccctcttcccgcagggaagagggttaaataaggaaagaagatgattgaacaatttttcaggcccgactctgtcgaacaggcgctggaactgaagcgccgctaccaggatgaagccgtctggttcgccgggggcagcaaactcaatgctacaccaacccgtaccgataaaaagattgccatttccttacaggatctggaactggactgggttgactgggataacggtgcactgcggattggcgcaatgtctcgcttgcagccactgcgtgatgcgcgatttattcctgcagcgctgcgtgaagccctcggttttgtttactcacgccatgttcgtaatcagtcgaccattggtggtgaaatcgccgcccgccaggaagagtcggtgctgcttcccgtcctgttggcactggatgctgaactggtttttggcaacggcgaaacgctgtcaatcgaggactacctggcctgcccatgcgatcgcctgctaaccgaaattatcattaaagatccgtatcgcacctgtgcgacccgcaaaattagccgttctcaggcaggtttaaccgtcgtgacggcagccgttgcaatgacagaccacgacggtatgcgaatataccgcatgggccgggcatattcgcttcaaaaactcaacgggcgagtggtggctggtggtttcgccgtggggaagactccggctttgtcagcaaggagaaacagaaggatgcctgtaaaagagcaaggtttttctctgctggaagtgttgattgctatggcgatcagtagcgtattgttgctgggggcggcacgctttctgcctgcgttacagcgtgaaagtttaacgagcacccgtaagctggcgctggaagatgaaatctggctgcgggtatttaccgtcgcgaagcatctccagagggcgggttattgtcatggcatctgtaccggcgaagggctggaaattgtcggacagggtgactgtgtcattgtgcagtgggatgcgaacagtaacggtatctgggatcgcgaaccggtaaaagagtccgaccagattggatttcgtctgaaggagcatgtgctggaaacgctacgcggtgcgacatcctgtgaaggtaagggctgggataaagtcactaatccggatgccatcattatcgacacttttcaggtcgtacgtcaggatgtcagcggcttctcgccggtgttgacggttaatatgcgtgctgccagaatgagccaacaggatcgcagttttgcctctcgcgtgagcatggaaagtcagtcattgcgccgccaggccatcgttcagtcggcgctggcgtggggaaaaatgcactgctggcagacgcagccagcagttcagtgctcgcagtacgctgaaaccgatgcccaggtttgtttgcgtttactggcagataatgaagccttattgattgccggtattaaaggtgaagagtacgacgcggcgtggaacagcttcgtggtgaaatctctggtcgctcagcaggaaaaagctgcagctgacgtgcaattgcgtggcgttccggcgatgtttgttaacggtaaatatcagctgaatccgcagggtatggataccagcaatatggatgtttttgttcagcagtatgctgatacagtgaaatatctgtccgagaaaaaataa

SEQ ID NO: 26175 - DNA, 402 bp, Homo sapiens
  SIMILAR (351)..(154): 961254mologous to Cloning vector pSacBII SacB,accession number U09128,Smith-Waterman Score=332.
ctagtcagtgtagaataaacggatttttccgtcagatgtaaaggttgcagaaccgggccattcttgcgtctgatctttcaggatcggatcgttggcgtcgaacttatcgctgtctttaaagacacggcccgcgtttttccagctgtcgattgagttgtcgccgacatcaagtccttttgcagactcaatatttttaatcgttgattgatcgaattgaggcacttggtatttttcgttttgctgctgtttagggatctgcagcatatcatggcgtgtaatatgagagacgccgtacgtttctttgtatgctttttggttattttctttcgcgaaggcttgagtcgctcctccaagtttctcattcagttctgattttagctcagtagtgtgaaattcattcat

SEQ ID NO: 26176 - DNA, 885 bp, Homo sapiens; identical to SEQ ID NO: 5663
  SIMILAR (349)..(696): 761254mologous to Leishmania major probable levansucrase precursor,accession number AL160371,Smith-Waterman Score=463.

SEQ ID NO: 26177 - DNA, 585 bp, Homo sapiens
  SIMILAR (1)..(375): 991254mologous to Cloning vector pZC320 SopB,accession number U26464,Smith-Waterman Score=622.
atgaagcgtgcgcctgttattccaaaacatacgctcaatactcaaccggttgaagatacttcgttatcgacaccagctgccccgatggtggattcgttaattgcgcgcgtaggagtaatggctcgcggtaatgccattactttgcctgtatgtggtcgggatgtgaagtttactcttgaagtgctccggggtgatagtgttgagaagacctctcgggtatggtcaggtaatgaacgtgaccaggagctgcttactgaggacgcactggatgatctcatcccttcttttctactgactggtcaacagacaccggcgttcggtcgaagagtatctggtgtcatagaaattgccgatgggagtcgccgtcgaggagcgactcaagccttcgcgaaagaaaataaccaaaaagcatacaaagaaacgtacggcgtctctcatattacacgccatgatatgctgcagatccctaaacagcagcaaaacgaaaaataccaagtgcctcaattcgatcaatcaacgattaaaaatattgagtctgcaaaaggacttgatgtgtgtgtacagctggccgctgcaaaacgctga

SEQ ID NO: 26178 - DNA, 947 bp, Homo sapiens
  SIMILAR (3)..(632): 1001254mologous to Cloning vector pSacBII SacB,accession number U09128,Smith-Waterman Score=1113.
atcagacgcaagaatggtccggttctgcaacctttacatctgacggaaaaatccgtttattctacactgactattccggtaaacattacggcaaacaaagcctgacaacagcgcaggtaaatgtgtcaaaatctgatgacacactcaaaatcaacggagtggaagatcacaaaacgatttttgacggagacggaaaaacatatcagaacgttcagcagtttatcgatgaaggcaattatacatccggcgacaaccatacgctgagagaccctcactacgttgaagacaaaggccataaataccttgtattcgaagccaacacgggaacagaaaacggataccaaggcgaagaatctttatttaacaaagcgtactacggcggcggcacgaacttcttccgtaaagaaagccagaagcttcagcagagcgctaaaaaacgcgatgctgagttagcgaacggcgccctcggtatcatagagttaaataatgattacacattgaaaaaagtaatgaagccgctgatcacttcaaacacggtaactgatgaaatcgagcgcgcgaatgttttcaaaatgaacggcaaatggtacttgttcactgattcacgcggttcaaaaatgacgatcgatggaggagcgactcaagccttcgcgaaagaaaataaccaaaaagcatacaaagaaacgtacggcgtctctcatattacacgccatgatatgctgcagatccctaaacagcagcaaaacgaaaaataccaagtgcctcaattcgatcaatcaacgattaaaaatattgagtctgcaaaaggacttgatgtgtgggacagctggccgctgcaaaacgctgacggaacagtagctgaatacaacggctatcacgttgtgtttgctcttgcgggaagcccgaaagacgctgatgacacatcaatctacatgttttatcaaaag

SEQ ID NO: 26179 - DNA, 1063 bp, Homo sapiens
  SIMILAR (11)..(871): 791254mologous to Leishmania major probable levansucrase precursor,accession number AL160371,Smith-Waterman Score=1186.
  misc_feature (1)...(1063): n = a,t,c or g
nagaatccccattaaaaatattgagtctgcaaaaggacttgatgtgtgggacagctggccgctgcaaaacgctgacagaacagtagctgaatacaacggctatcacgttgtgtttgctcttgcgggaagcccgaaagacgctgatgacacatcaatctacatgttttatcaaaaggtcggcgacaactcaatcgacagctggaaaaacgcgggccgtgtctttaaagacagcgataagttcgacgccaacgatccgatcctgaaagatcagacgcaagaatggtccggttctgcaacctttacatctgacggaaaaatccgtttattctacactgactattccggtaaacattacggcaaacaaagcctgacaacagcgcaggtaaatgtgtcaaaatctgatgacacactcaaaatcaacggagtggaagatcacaaaacgatttttgacggagacggaaaaacatatcagaacgttcagcagtttatcgatgaaggcaattatacatccggcgacaaccatacgctgagagaccctcactacgttgaagacaaaggccataaataccttgtattcgaagccaacacgggaacagaaaacggataccaaggcgaagaatctttatttaacaaagcgtactacggcggcggcacgaacttcttccgaggagcgactcaagccttcgcgaaagaaaataaccaaaaagcatacaaagaaacgtacggcgtctctcatattacacgccatgatatgctgcagatccctaaacagcagcaaaacgaaaaataccaagtgcctcaattcgatcaatcaacgattaaaaatattgagtctgcaaaaggacttgatgtgtgggacagctggccgctgcaaaacgctgacggaacagtagctgaatacaacggctatcacgttgtgtttgctcttgcgggaagcccgaaagacgctgatgacacatcaatctacatgttttatcaaaaggtcggcgacaactcaatcgacagcttggaaaaacgcggggccgtgtctttaagacctgagtgtgcagacacccccctcngg

SEQ ID NO: 26180 - DNA, 915 bp, Homo sapiens
  SIMILAR (436)..(894): 961254mologous to Cloning vector pSacBII SacB,accession number U09128,Smith-Waterman Score=786.
atgctagaggatccccggaagggactggagacacctagtcctgtttcccacaaccttcattttcagttccaccttggaccgctgctgcctgggtcacccatgaagaagtggcctgccctggtagtcacaggttccaagtcgcccaagctggagagctacaagcacttccagaaaatctgggacatgcatggtgaaccatccaaacgggaagaaggagcagggctcacagtcaaccagcatatccccaacggagcttcaacttgcaatgaaggcccacagcgcctggaggccttgggggcccgaattccgatggctgccgggttttcctcttccaagcccaccttggtgaccccccgaagggcctatcgggctgaccttcgacttgagggctactggggttgccagggcgtgcccggtggaccccttgtggcccaaggaggagcgactcaagccttcgcgaaagaaaataaccaaaaagcatacaaagaaacgtacggcgtctctcatattacacgccatgatatgctgcagatccctaaacagcagcaaaacgaaaaataccaagtgcctcaattcgatcaatcaacgattaaaaatattgagtctgcaaaaggacttgatgtgtgggacagctggccgctgcaaaacgctgacggaacagtagctgaatacaacggctatcacgttgtgtttgctcttgcgggaagcccgaaagacgctgatgacacatcaatctacatgttttatcaaaaggtcggcgacaactcaatcgacagctggaaaaacgcgggccgtgtctttaaagacagcgataagttcgacgccaacgatccgatcctgaaagataatacccaagaatgggtcggttctagaacctttacctttgaacggaaaaattcctttattctacactga

SEQ ID NO: 26181 - DNA, 439 bp, Homo sapiens
  SIMILAR (439)..(2): 971254mologous to Escherichia coli phosphatidylserine decarboxylase,accession number J03916,Smith-Waterman Score=732.
ggctggcgtcgtgttctgcttcgatctcttcagcaggaagcggggcaggttcagcgtctggcgtaacaaaggtttcggtagatactgccagcggctggccaattttcgtgacagacaggctttccagttgctcaaccagattcactttacccggtgcaaacaggttgataacggtggaaccgagtttaaagcgacccatttcctggcctttcagcagtgccacagaaccgtcgttttccccggcaggccaggtccagcgcttgatgataccttcgcgcggcggcgtaatggtgcccgcccagaccgtctcaatgctgccaacaatcgtcgctccgaccagaatctgcgccattgggccaaattcggtatcgaaaaggcaaatcacgcgttcgttacgggcaaacagattctgcatgttctgagccgtgagatgggtaag

SEQ ID NO: 26182 - DNA, 1279 bp, Homo sapiens
  SIMILAR (769)..(990): 1001254mologous to Cloning vector pSacBII SacB,accession number U09128,Smith-Waterman Score=396.
atggtaattgctgccatggaaacacaactgtctaatgggccaacttgcaataacacagccaatggtccaaccaccataaacaacaactgttcgtcaccagttgactctgggaacacagaagacagcaagaccaacttaatagtcaactaccttcctcagaacatgacacaggaggaactaaagagtctctttgggagcattggtgaaatagagtcctgtaagcttgtaagagacaaaataacaggaggagcgactcaagccttcgcgaaagaaaataaccaaaaagcatacaaagaaacgtacggcgtctctcatattacacgccatgatatgctgcagatccctaaacagcagcaaaacgaaaaataccaatgtgacaatctaaaaacttgtcacacttcacatggatctgtcatggcggaaacagcggttatcaatcacaagaaacgtaaaaatagcccgcgaatcgtccagtcaaacgacctcactgaggcggcatatagtctctcccgggatcaaaaacgtatgctgtatctgttcgttgaccagatcagaaaatctgatggcaccctacaggaacatgacggtatctgcgagatccatgttgctaaatatgctgaaatattcggattgacctctgcggaagccagtaaggatatacggcaggcattgaagagtttcgcggggaaggaagtggttttttatcgccctgaagaggatgccggcgatgaaaaaggctatgaatcttttccttggtttatcaaacgaggagcgactcaagccttcgcgaaagaaaataaccaaaaagcatacaaagaaacgtacggcgtctctcatattacacgccatgatatgctgcagatccctaaacagcagcaaaacgaaaaataccaagtgcctcaattcgatcaatcaacgattaaaaatattgagtctgcaaaaggacttgatgtgtgggacagctggccgctgcaaaacgctgacggaacacccgaaagacgctgatgacacatcaatctacatgttttatcaaaaggtcggcgacaactcaatcgacagctggaaaaacgcgggccgtgtctttaaagacagcgataagttcgacgccaacgatccgatcctgaaagatcagacgcaagaatggtccggttctgcaacctttacatctgacggaaaaatccgtttattctacactgactattccggtaaacattacggcaaacaaagcctgacaacagcgcagagaaaggggatacttaaagataagcagctcagtatg

SEQ ID NO: 26183 - DNA, 1951 bp, Homo sapiens
  SIMILAR (34)..(633): 961254mologous to Escherichia coli GlxB6,accession number U89279,Smith-Waterman Score=1025.
atcaacttgcctggcagaaataaggagtcataaatgggatatttaaataacgtcgccggttaccgcgaagatttactggctaaccgtgcgatcgttaaacacggtaatttcgcactgttaaccccggatggtgtggtaaaaaatattattccgggctatgaaaattgtgacgcgacaatcctctccacgccaaagctgggtgcctcttttgttgattatctggtcacactgcatcaaaacggtggcaaccaacagggcttcggtgtcgaaggcattgaaacgttccggtatgtgatctctggaaatatcactgccaaagccgaaggcaaaacatatgccttaagcgaaggtggctatctttattgcccgccaggctccttaatgacgtttgttaacgcccaggccgaagacagccaaatctttttatataagcgccgctatgttccggtagaaggctatgcaccgtggctggtttctggcaatgccagcgaactggaacgcattcattatgaaggcatggacgatgttattctgctggattttctgcccaaagagttaggctttgatatgaacatgcatatcctctcttttgcaccaggtgccaaccacggttatatcgaaacgcacgttcaaggaacacggaggagcgactcaagccttcgcgaaagaaaataaccataaagcatacaaagatacgtacggcgtctctcatattacacgccatgatatgctgcagatccctaaacagcagcaatacgaaaaataccaagatacccacgatacgccatattgtgaaccgctgccgggcgaaacgcgcctgtggggcgacaccgatgtgattggtctgttcgacgctgaaaccgatatgaacgacgtggtggcgattctggaaaaccatccgctgctcggcgcaggcttcgcgcataaaatcgaacaactagaagataaagactgggagcgcgaatggatggataatttccacccgatgcgctttggtgaacgactgtggatctgccctagctggcgtgatgtgccggacgaaaacgccgtcaacgtgatgttagatccagggctggcgtttggtacgggtaccatccaaacactctctgtgcctgcaatgctcgacagctcgacgcatacccgacgaatgcgttctacgctgaatctctacgaaatcacgagaatgagcactgtgtccacatctgagcatagtatgacgtatactctcgttcaggtcgacatgaaagaggcgcaaaagccggacaccgccagctaccgcacctttaacgaattctttgtccgtccgctgcgtgacgaagtacgcccaatcgataccgatccgaatgtactggtcatgcctgccgatggcgttatcagccagttgggtaaaatcgaagaagataaaatcctgcaagccaaaggccacaactacagcctcgaagccctgctggcaggcaactatctgatggcggacctgttccgcaacggtacgtttgtgaccacttacctctccccgcgtgactaccaccgcgtacacatgccgtgcaacggtattctgcgtgagatgatctacgtgccgggcgatctcttctccgttaaccatctcacggctcagaacgtgccgaatctgtttgcccgtaacgaacgcgtgatttgcctttctgataccgaatttggcccaatggcgcagattctggtcggagcgacgaatggtggcagcattgagacgccagaaagtgagggagccacggttgatgagagctttgttgtaggtggaccagttggtgattttgaacttttgctttgccacggaacggtctgcgttgtcgggaagatgcgtgatctgatccttcaactcagcaaaagttcgatttattcaacaaagccgccgtcccgtcaagtcagcgtaatgctctgccagtgttacaaccaattaaccaattctgattag

SEQ ID NO: 26184 - DNA, 3286 bp, Homo sapiens
  SIMILAR (1974)..(1369): 941254mologous to Cloning vector pBACe3.6 levansucrase,accession number U80929,Smith-Waterman Score=981.
ctaaggctcggccttctttacggaagaaggttcgtgccgccgccgtagtacgctttgttaaataaagattcttcgccttggtatccgttttctgttcccgtgttggcttcgaaaacaaggtatttatggctcttgtctccaacgtagtgagggtctctcagcgtatggttgtcgccggatgtataattgccttcatcgataaactgctgaacgttctgatatgtttttccgtctccgtcaaaaatcgttttgtgatcttcccactccgttgattttgagtgtgtcatcagattttgacacatttacctgcgctgtttgtcaggctttggtttcccgtaatgtttaccggaatagtcagtgtagaataaacggatttttccgtcagatgtaaaggttgcagaaccggaccattcttgcgtctgatctttcaggatcggatcgttggcgtcgaacttatcgctgttctttaaagacacggcccgcgtttttccagctgtcgattgagttgtcgccgaccttttgataaaacatgtagattgatgtgtcatcagcgtctttcgggcttcccgcaagagcaaacacaacgtgatagccgttgtattcagctactgttccgtcagcgtttttgcagcgggcagctgtcccacacatcaagtccttttgcagactcaatatttttaatccgtgattgatcgaattgaggcactgggcatttttccgtttgctgcctgtttaagggatcccgcagcatattatggcgggtaatatgtaaaaacacccgacgtttttttagaatgctctttgggtgattttcttttccccaaagattgatgttcttcctcccttccacgagcaaaacacgtagccccttcagagccagatccttttgataaaacatgtagattgatgtgtcatcagcgtctttcgggctttcccgcaagagcaaacacaacgtgaatagccgttgtattcagctactgttccgtcagcgttttgcagcggccagctgtcccacacatcaagtccttttgcagactcaatatttttaatcgttgattgatcgaattgaggcacttggtatttttcgttttgctgctgtttagggatctgcagcatatcatggcgtgtaatatgagagacgccgtacgtttctttgtatgctttttggttattttctttcgcgaaggcttgagtcgctcctcgtatgtgcaagcaggtctccagcccatgcatccagagctgtttcatatccctcaggaagatgcaaggctttatcgtcttgcccgagcttcttcgagtgtgggtcccgcagcagcggtgcacccccaggagcttgtgggcaggtagcctcagccccacccagacctctttgatgttcattaagaagcttggcgcaaatgttgcctttttatcctcgaagaagcctctgtttgtcatgtagcttgtgataaccacattgttgcctttggcttgcggcactgcgaagtgagagtaagtgaatgtcacatcgtttggatcaagacccatttgcagcacaagccctgttttgttcagcggcttgtaagggcgggttaaagagtttgatacataaccaagcatgtaaatatcgtttgagttaataccatcgatcgtcatttttgaaccgcgtgaatcagtgaacaagtaccatttgccgttcattttgaaaacattcgcgcgctcgatttcatcagttaccgtgtttgaagtgatcagcggcttcattacttttttcaatgtgtaatcattatttaactctatgataccgagggcgccgttcgctaactcagcatcgcgttttttagcgctctgctgaagcttctggctttctttacggaagaagttcgtgccgccgccgtagtacgctttgttaaataaagattcttcgccttggtatccgttttctgttcccgtgttgggcttcgaatacaaggtatttatggcctttgtcttcaacgtagtgagggtctctcagcgtatggttgtcgccggatgtataattgccttcatcgataaactgctgaacgttctgatatgtttttccgtctccgtcaaaaatcgttttgtgatcttccactccgttgattttgagtgtgtcatcagattttgacacatttacctgcgctgttgtcaggctttgtttgccgtaatgtttaccggaatagtcagtgtagaataaacggatttttccgtcagatgtaaaggttgcagaaccggaccattcttgcgtctgatctttcaggatcggatcgttggcgtcgaacttatcgctgtctttaaagacacggcccgcgtttttaccatgctgcgctgttgtcaggctttgtttgccgtaatgtttaccggaatagtcagtgtagaataaacggatttttccgtcagatgtaaaggttgcagaaccggaccattcttgcgtctgatctttcaggatcggatcgttggcgtcgaacttatcgctgtctttaaagacacggcccgcgtttttccagctgtcgattgagttgtcgccgaccttttgataaaacatgtagattgatgtgtcatcagcgtctttcgggcttcccgcaagagcaaacacaacgtgatagccgttgtattcagctactgttccgtcagcgttttgcagcggccagctgtcccacacatcaagtccttttgcagactcaatatttttaatcgttgattgatcgaattgaggcacttggtatttttcgttttgctgctgtttagggatctgcagcatatcatggcgtgtaatatgagagacgccgtacgtttctttgtatgctttttggttattttctttcgcgaaggcttgagtcgctcctcctctgcctctggtagccaggaagtttatgcttgctagagcttccagctgagcagtctttcttctacctgaatttgtcaaggtacacagccaccttttgtactggaagcaccagatggcagggcaggaaacttcactcattccacctcctgtggccagatgggtcacattgctagtgcttccagcccagtggtcccacttctgcctaaactctgcaggcaggcagaaacctatgcttcccttgggcagtatggccattttcacgatattgattcttcctacccatgagcatgaaatgttcttccatttgtttgtatcctcttttatttcattgagcagtggtttgtagttctccttgaagaggtccttcacgtcccttgtaagttggattcctaggtattttattctctttgaagcaattctgaatgggagttcactcat

SEQ ID NO: 26185 - DNA, 3090 bp, Homo sapiens; identical to SEQ ID NO: 26092
  SIMILAR (1105)..(1812): 1001254mologous to Escherichia coli SERINE/THREONINE PROTEIN KINASE AFSK (EC 2.7.1.-),accession number D90880,Smith-Waterman Score=1208.

SEQ ID NO: 26186 - DNA, 833 bp, Homo sapiens
  SIMILAR (501)..(830): 1001254mologous to Escherichia coli K12 putative tRNA synthetase,accession number AE000389,Smith-Waterman Score=552.
gtaaccctttccgatattctattgatacgtcggaccataaagtcgctgtaccatatgatgaccgctcatgccagcgcttcacgcagcacgtttatagcgacgtgccgatctcgtgggggcccaaaaactccaggacctgccagttgcatcgcgccataaccaagacggttaacggattttgtaccgagattgtacgcatccagattcagcgaactttctttgctgctgtacttcacgccgacgcttgtcaggctattgatgccgccgcccttctgaccgtcatcgacgttaaagtgctgactgcctgcgcctgccaggcttgccgtacgctggctcttcgcgtagctcaggttcggcccgccttccagcgtagcgctagcgctccagccgtctttacctgcgtagtccagtttcagcccgacgatgctgtccaccgccgtttcgctgccactgttaattcagggcctacttttgctgtcgggatatgcagggaggaagcaatggaaaccgtggcttacgctgattttgcacgtctggaaatgcgcgtcggaaagattgtggaagtgaaacgccatgaaaacgccgacaagctgtacatcgtacaggttgatgtggggcaaaaaacgctgcaaaccgtgaccagcctggtgccgtactacagcgaagaagagctgatggggaaaacggtggtggtcttatgcaatctgcaaaaagcgaaaatgcgtggtgaaacgtcggaatgcatgctgttgtgtgcggaaaccgatgacggcagtgaaagcgtgctgttaacgccggagcggatgatgcctgcgggcgtacgcgtcgtataa

SEQ ID NO: 26187 - DNA, 3261 bp, Homo sapiens
  SIMILAR (457)..(1548): 971254mologous to Escherichia coli preprotease III (AA -23 to 939),accession number X06227,Smith-Waterman Score=1825.
atgctacgatttatgcccgtcattactgccggcactagatgccgtgccggctgcgggccttgcacggtgccgtacacggcattgccacgccttcgcctactgcgcgccctgccttacacccccacccccagccctaatcttgcccaaagccgcccgggattgtcctgggcccatgctgccactttgttagcttatgcctacctgtttgacaccgggtttaaactccccctggttagccctaaaaccaaagaaagtcctgctaaaacctgtcaacaaagtccaagggtccccacatatgaccacagattctacatcactataccattgttaacgcagagctgttctcaaaatgggtttagagcaacaaaaaccgccaaatttatcttacaaggaagaccagaagcccacagaatcatgaaaacaggggtacaggttttggtgtgctcacacgccccagtaagcggccccctttccgcgccctgctgcgctttttccaccaacgctaacaacggccttatggttaatgctaatggttacacccagcgtctgccgcagctgttccaggcattgctcgaggggtactttagctataccgctacggaagatcagcttgagcaggcgaagtcctggtataaccagatgatggattccgcagaaaagggtaaagcgtttgagcaggcgattatgcccgcgcagatgctctcgcaagtgccgtacttctcgcgagatgaacggcgtaaaattttgccctccattacgttgaaagaggtgctggcctatcgcgacgccttaaaatcaggggctcgaccagagtttatggttatcggcaacatgaccgaggcccaggcaacaacgctggcacgcgatgtgcaaaaacagttgggcgctgatggttcagagtggtgtcgaaacaaagatgtagtggtcgataaaaaacaatccgtcatctttgaaaaagccggtaacagcaccgactccgcactggcagcggtatttgtaccgactggctacgatgaatacaccagctcagcctatagctctctgttggggcagatcgtacagccgtggttctacaatcagttgcgtaccgaagaacaattgggctatgccgtgtttgcgtttccaatgagcgtggggcgtcagtggggcatgggcttccttttgcaaagcaatgataaacagccttcattcttgtgggagcgttacaaggcgtttttcccaaccgcagaggcaaaattgcgagcgatgaagccagatgagtttgcgcaaatccagcaggcggtaattacccagatgctgcaggcaccgcaaacgctcggcgaagaagcatcgaagttaagtaaagatttcgatcgcggcaatatgcgcttcgattcgcgtgataaaatcgtggcccagataaaactgctgacgccgcaaaaacttgctgatttcttccatcaggcggtggtcgagccgcaaggcatggctattctgtcgcagatttccggcagccagaacgggaaagccgaatatgtacaccctgaaggctggaaagtgtgggagaacggtgagcgcctgattgaagcctctgacggcacaggcaaaaacctttacgattgcggcgctctatttgcgcctgttacttggactaggcggttccgcgcctttccccgcccgctgaccgttgaagaactgctggtggtcacctttaccgaggctgccacggcagaattgcgcggtcgtatccgtagcaatatccacgagttgcgcatcgcctgtctgcgtgaaaccaccgacaatccactgtacgaacgcctgctggaagagatcgacgataaagcgcaagccgcgcagtggttgttgttagccgaacggcagatggatgaagcggcagtctttactattcacggcttttgccagcgcatgctcaacctgaatgcctttgaatccggcatgctgtttgagcagcagctgattgaagatgagtctctgctacgctaccaggcctgcgccgatttctggcgtcgccactgctacccgctgccgcgtgaaatagcccaggtcgtctttgaaacctggaaagggccgcagcgttgctgcgcgatattaatcgttatctgcaaggcgaacgaccggttatcaaagcaccgccgcccgatgatgaaacgctggcttcccgtcacgcgcaaattgtggcgcgttgatatcggtcagaccatcactgctattcgtactcaggcgggcattgttcagcggctggcggcagataacgccagcgtgaagcagagcgggcagctcatcgaacaactatcgctgggcgtttacgacgcggtgcgccgtttgttgggtcggttacgtccgcgccagttggatgatctcaccctggagcaggccatccgctcactgatgcgggaaatggagctggaagggcgcggtattgtcagccatctcgaatggcgaatcgatgaatcagcgttaagcgaaaaccagcgcgtgacgctgtttcgtgtctgccaggaagggctgaacaacattgtgaaacatgctgatgccagcgcggtcaccctgcaaggctggcagcaggatgaacggttgatgctggttattgaagacgatggcagcggtttgccgccgggtttgatgatgttgccgtttctgaaagcgcctgccgatgcgccattaatgactgataaatatgaaattgatgcccgctatcgctactggcgtcggcatattctgctgaccatctggctgggttacgcgctgttttacttcacgcggaaaagttttaacgccgccgtaccagaaatccttgctaacggcgtgctcagccgtagcgatatcggcctgttagcgaccctgttttacattacctatggcgtgtcgaagtttgtctccggcattgtcagcgatcgctcaaatgcccgttattttatggggatagggcttatcgccacgggcattatcaacattctgtttggcttctcgacgtcgctatgggcgtttgccgtgctctgggtgctgaacgcctttttccagggctggggttcaccggtgtgtgcgcgtctgttaacggcctggtattcacgtaccgagcgcggcggttggtgggcattatggaacacggcgcataacgtcggcggcgcactcattcccattgtgatggcagcggctgcgctgcattacggctggcgtgccgggatgatgattgctggttgtatggcgatagtcgtggggatttttctctgctggcggctacgcgatcgcccgcagcgttag

SEQ ID NO: 26188 - DNA, 2326 bp, Homo sapiens
  SIMILAR (1595)..(2323): 971254mologous to Escherichia coli secD protein,accession number X56175,Smith-Waterman Score=1133.
atgttcacatacccgcattcgaagttccgcgtcaaccgctttgtgggtcaagtactactgatcgagttttcgattttactagacgggggtcgtaccggcttgggtcattccttatctgtttggtgcatctccggcgatttgttcttctttcctgcaaggaaaaccaacgtcgctgccgtttgagaaaaccgagtgcgattatttgttctgatagtctttcaggatctgccgacctgctacgtaaatcataatttcgtctgtaccgccgccgatacgttcacaacggacatcacgccaaaagcgggagacgcgcgcctcatcggtatagcccagaccgtccgtcatctagaggatcccatgcgggcatggaagagcattcacaaaagttgtgaaatcctggacccgatccacagggctcctgtcaaggaaaacacccacccagcacgcaagattaatatatccgacccggctgctggcgctgtagcccgcattcggtacgaaggtgtgttatctgtatgtcgtgcatcagcatcagcttatgtgtcgcgctcacggacgattactgtcgcctgttggtacgttagcaacacaggggtgacgggcgctaccattggtgtaaaacgacagcatcgccacgcgcggctcttctccggtgatggcgcgccaggtttcggcactggcaagcgcgatatccgccagctgcgccgccttgtacgcatccagattcagcgaactttctttgctgctgtacttcacgtcccgacgccttggtccagggctattgatgccgccgcccttctgaccgtcatcgacgttaaagtgctgactgcctgcgcctgccaggcttgccgtacgctggctcttcgcgtagctcaggtgatcgaccggtgcagcaaccctggtgacatcatgtctagcgtcgcgcggaggtactggttcatctcgcgttggtctgctaagcgggactgcgcggtgagctacgatcaagaccctggtcaggcgcagcgttcatgtcggtcatgtctggtcgcggttgatcgggggctatggctgtccgcgtattgccggtcactcatgacgcagactctgctacctgacgatgtgccacgcatattgccgaatgcttcttcgccgagccgtttgcggtgcctgcagcatctgggtaattaccgcctgctggatttgcgcaaactcatctggcttcatcgctcgcaatttagcctctgcggttgggaaaaacgccttgttaaggatctcacgcgtattcaggacactgggcgtgcgaaagagattctgggtgcgacggcaacgctggaattccgtctggtaaacaccaacgttgaccaggccgctgcggcatccggtcgcgtaccgggcgactctgaagtgaaacagacccgcgaaggtcagccagttgtgctgtacaaacgcgtaattctgaccggtgaccatatcaccgactccacttccagccaggacgaatacaaccaaccgcaggttaacatctcgctcgatagcgctggtggtaacatcatgtctaacttcactaaggacaacatcggcaaaccgatggcaaccctgtttgtggagtacaaagacagcggtaagaacagatgcaaatggtcgtgcggttctggtgaaacaggaagaggtgattatcatcgccaacatccagtctcgtctgggtaacagcttccgtatcaccggcatcaacaacccgaacgaagcccgtcagctgtcactgctgctgcgtgccggtgcgttgatcgcgccgattcagattgttgaagaacgtaccattggcccaaccctgggtatgcagaacattgaacaggggctggaggcttgccttgccggtctgctggtttctattctgttcatgatcatcttctataagaagtttggtctgattgcgaccagtgctctgattgccaacttgatcttaatcgtcggcattatgtcgctgttgccaggcgcaacgctgagtatgccaggtatcgcgggtatcgtcttaacccttgcggtggcggtcgatgcgaacgtactgatcaacgaacgtattaaagaagagttgagcaacggacgtactgttcaacaggccattgatgaaggttatcgtggcgcattcagttctatcttcgatgcgaacatcaccacgctgattaaagtcatcatcctgtacgcagtgggtaccggggcaattaaagggttcgcgattactaccggtatcggtgtggcgacgtcgatgtttaccgcgattgtcggtacgcgtgccatcgtaaacctgctatatggcggcaagcgcgtcaagaagctgtcaatctga

SEQ ID NO: 26189 - DNA, 999 bp, Homo sapiens
  SIMILAR (31)..(132): 971254mologous to Escherichia coli DNA mismatch repair protein,accession number M64730,Smith-Waterman Score=159.
ttaaagcctacgacggtgagattttttatcatcttcgacctcctgttgccgcatctggaagcgttgcaacagagcgcgagcgcgctggcggaactcgacgtgctggttaacctggcggaacgggcctataccgatatttgggataccctgacgccttcgaacacttgcgatacactcactggttccactacgactaggtattccttggtggttgacacactttgttactaccggctcaccaacttcaccaccaaccactaccgactcgacggcgacctgaacacggaccacgggttgccgagaattgctatacggcctagcctctgcggagacaagccacacgcctacgacactgctttgccacacgactgacacaggcactttttgagggatcttagggtgggatcttatcgggtttctaacgacattcaaaaacacggggggagccatatttaccacggcctgttgtgaaccgacaaagggcaggatgggaacatcaagcatggtttggtcggggacccaattgggcccaaggtacttcgtgtgaaactctaaataaacggcgtttgtgtcctctatacaaggcgacctacaaaccatcgtatagcgccgatttgaagggggtgaccgtgaaacgccagcatgctgcagcgagcatgaacggacaatagcgagctgcgcagtagctaccgggagcgcaaacggggctatgcgccggtgcagcaacctgccgactgaccgaccgagcgactgaccgaccgagaccgaccgaccgaccgtgcgaccgaccgaccgacccagttcgctatcggaatcaggatgaccatgagccttgcagatgtcagcaggaaccagtttctcttccagagctgaagctccagcgtgctgcctggcttgaagctgctgccctctgtcccaactctcaccagctctcttgggttgttccctgctcttgatcctaatcagtgcgtgtttctcacaagcctcttcagtcatcat

SEQ ID NO: 26190 - DNA, 1365 bp, Homo sapiens
  SIMILAR (1275)..(895): 991254mologous to Escherichia coli Orf15,accession number L13279,Smith-Waterman Score=658.
atgaacggtcttttggatagtgatagtgactctctgagcagttgtcagcaacgtgtgaaggcaaggcttcatgaaatacttcagaaagacagagattttactgctgaagattatgaaaaggtggaaagcagaatatatcattttgcaagattatcagttggtggctatacggctgatagttctctgactttgaaagtttacttgcaattaatgaaagcacccaagaaaagaaggggagaggtgaatgtgggaactgtggttgctttcattaaaggtggttttcctgtagtgaagaaagattacttcagaccggcagcagatggcagcagtgcgctttgtcggttttttcccacgggaaatgttcacgaccaaagtgacccacaaaaggttacagacggagccgtcgtccccgtgcaacctaccgatggcccagggctccgctgcctccgccgtgcccggggctgcggagccgggagacaggggcgggagcaggcgcaggactgcggcgccgagatccaggcagaggccgccagccgagccagccgggtgcaggaaggatcttacccgaggcccccgaatggaccctttagtaccgatctaacaggcctaatgcagttcacaaaactgctggttctgaaggtagagagccagctgacaaggagaattagaaaatgccacaatctgcgtgaagccaacatcagagaggaacttcgctttttcaactgtacgaatgtcgcactgcgtactggcgtgcagttcaatcggcggcccgatagtccagggtattctagaggtgttctgtctcctgaacgtcatgttcgtactagattatattttaccagtgaaagtcatgtacattctttgctgtctattcttcgctatggtgccttatgcaatcgcggcggcacactctgctgtcgggcgatccacacgctccatcgtcataccatcgtactcaatggtgttaccgtcacgctcaacctcgtacagctcacgttttacggtaacgttagtgagatcatcagacatcaatgtcaacttacccggcacggcaatcacccgctgccactgacggcaatccagggtatcgccctctttagtgacaatcaggctgcctatcgcttccgggctgaccagcgcacgttgcggccctttggtctgccagtagcccgccagccagtccggcgcgggggttttcacgacattgttatagttttcgacttcggcacagcccgccagcaacaagagcgcgcctgcaattgcgagttttttcatcattcgtcctgcatgagaagaaaagaggattgtggcattaaagccctgatgtcgccagcctttcaaggttcagagagaaatttgatctaa

SEQ ID NO: 26191 - DNA, 1417 bp, Homo sapiens; identical to SEQ ID NO: 15874
  SIMILAR (575)..(1165): 821254mologous to Escherichia coli Collagenase precursor (EC 3.4.-.-),accession number D90783,Smith-Waterman Score=805.

SEQ ID NO: 26192 - DNA, 2652 bp, Homo sapiens
  SIMILAR (780)..(16): 991254mologous to Escherichia coli 2-oxoglutarate dehydrogenase,accession number J01619,Smith-Waterman Score=1325.
ttaacatcgattcggtaccaccgggcttacaatctcaaggtgagacgggttaaacgccagcgccaggtgcaccaggccgccatcggtctggaagtcagacgagaagcccatgtggtatttcacgtcacccgtgccgaggtgttctttatgtttaccggcgaactcgtcgaacaagtcttgcggttttttacccagcacgttcaccagcacgttcagacgaccacggtgcgccatcccgagaaccacttcgcgggtgccgctgttgccagcgtggcggatcatctctttaagcatcgggattaacgcgtcaccgccttccagcgagaagcgttttgcgccagggaattttgcgccgaggtaacgttcaagaccttcagcggcggtcagttcgcttaagaagcgttttttctcttcgctattgaaagtcgcgcgaccagactcgatacgctgttggatccagcgtttttcttcggtgctggtaatgtgcatatactcggcaccaatcgggccgcagtaggtttgcttgagggcttccagcagctcgccgagtttcatggtttctttgccgctggcaaatgaaccgacgttgaaggtctcctggaagtctgcttcggtcagatcgtggaaagacggatccagatcggccactttatcttgctgccacagtcccagcggatcgagattcgcatgctggtgaccacggaagcggtatgcgttaatgagctgcaggactttaacctgcttcacattggtgtcaggctcggagatcgttgaagagtacgtgaaacagccgatgatctgaaaggcaaaaaagtgggggtcggtctgggcaccaactatgaagagtggctgcggcagaatgttcagggcgtcgatgtgcgtacctatgatgatgacccgaccaaatatcaggatctgcgcgtagggcgtatcgatgcgatcctcgttgatcgtctggcggcgctggatctggtgaagaaaaccaacgatacgctggcagtaaccggtgaagcattctcccgtcaggagtctggcgtggcgctgcgtaaaggaaatgaggacctgctgaaagcagtgaatgatgcaattgcggaaatgcaaaaagatggcactctgcaagccctttccgaaaaatggtttggtggtaagctggaatttctcgcggcagatgctctgcgtgaaggtgccgatacgctgattactgccggggcgatccagtctaaccatgtgcggcagactgccgcagtcgctgcctaactcggtctgcactgcgtggcgctgctggaaaatctgaccgatcccaatgcccaactggaagagctggcgacgcgagtcgaagcacaaggctttcgcccgtatgtcattccggttggcggttctaatgctcttggcgcggccggactggctgttgggctggaacacctgatgcctgaaagcgaactgattggcgtgaccgtgtcgcgttccgttgccgatcaattgccgaaagtggttaacgacaggcgattgcgaaagaactggagctgaccgcatcagcggaaattttactctgggatgactattttgcacctggctacggcgtgccgaacgacgaaggcatggaagcagtgaaattgctggcgcggctggaaggcattctgcttgatccggcggtgcgcctgcgctgatcgccatgacggtcaggctcattctttgccctcggtaccggaataccaggaaatccagccccagcgcatccgctttttgcccgttctcgaaagcagtcagaattaatggatgcactaacgctccaccaatcaccatggcagtaaatggattaccgccgaagcgtttccccgcggtgtatcccaggattatcgggaagaaccaaaacaaggcatcactggcgctgaataaaattaaataagtaccactttgttcggtcgtccactgaaaagtgagcgccagagccagcatacctttcaagatcccggttgccgccatcaaaccgatcagaggcgtaaaaatacctgaaataacataaacaaagcggtttagcagattacctttatcatcattttccggtgcctgttgcgctttttcgtcaaggcctgccacactgttaaccgccaggaagacatcggccacatggttacctatgaccacctgaaactggccaccgctttccaccaccataataataccgggggtctttttcagtacctctgcttgcgctttgctttcatcctttaatttaaaacgtaatcgcgttgcgcaatgcatcagactcacaatgttatctgcgcccccgactcctgcgactatttttctggctaactccgtcataacttgccctctaccgctttgcggcaaaactccaaaaaaaaacgttgatactggaacccataaaatgggatcgttccgccttgcagctgggggtattcgttcccgcggcggaggatccccattgctggaatggctgcggatggctgtagaccgtattgatggtggataaatcagtagtgccggagaccaacaaacaagtggtcgatagttaacgtcatctcgccaaagagaatacatgactggctgggtgcaatggatcacatttgtaatcctaggcacttggggaggcaatgcaggaagatcatttgagaccagcgtgtgtgacat

SEQ ID NO: 26193 - DNA, 1674 bp, Homo sapiens
  SIMILAR (226)..(783): 1001254mologous to Escherichia coli DNA mismatch repair protein,accession number M64730,Smith-Waterman Score=938.
gaaataatgcagcaggtgtttttccaggaaactgagtttcttaattcagttattgattatgatcataaagtagaaacagaaaatctttgtctggacatcgcttatggaactgacaaaaactttctatttggttgcggaatttcgattgcttcaatattaaaatataatgaaggaagtcgattgtgtttccatatttttactgattattttggtgatgatgatcgcaaagcactggcactggaaaaacagctttatgaagagctgttcgacctgctgttgccgcatctggaagcgttgcaacagagcgcgagcgcgctggcggaactcgacgtgctggttaacctggcggaacgggcctataccctgaactacacctgcccgaccttcattgataaaccgggcattcgcattaccgaaggtcgccatccggtagttgaacaagtactgaatgagccatttatcgccaacccgctgaatctgtcgccgcagcgccgcatgttgatcatcaccggtccgaacatgggcggtaaaagtacctatatgcgccagaccgcactgattgcgctgatggcctacatcggcagctatgtaccggcacaaaaagtcgagattggacctatcgatcgcatctttacccgcgtaggcgcggcagatgacctggcgtccgggcgctcaacctttatggtggagatgactgaaaccgccaatattttacataacgccaccgaatacagtctggtgttaatggatgagatcgggcgtggaacgtccacctacgatggtggaaggctggtgcgctcagtttatataaatacgcaaatagtgactgtgttcgaccgcgtttggcccccacaccaattgagttccgcctgctggcggtgctgctcaacaatgccggaaaagtactcacccagcgccagctccttaaccaatcaggcgctggcgcggacggcattgtatgctgcaaaagagaccgtccctgaagagcggctggtacattcgtttcacagctactttcttcgccctggcgatagtaagaagccgattatttatgatgtcgaaattgctcgtatgaatcccagccctaccggacattatcagggaaaccataaccgctgcacgccagaacagacattacgttatctcaaccggctctcggggccctttctcgaccgcttcgatctctcactggagatcccattaccaccccccggcattttgagtaaaacggtagtgccgggagaaagcagcgccaccgttaaacaacgcgtaatggattcagccacgcctgcgctgttgcccacatcatcggatgtttgtcgggattttcccgcagccatccagtcggtgtttaccgttggcggctttggcttcagcggtcaggggcaaaacaacggcctggcgtttatcagtctcaagccgtggtctgaacgtgtcggtgaggaaaactcggttaccgcgatcattcagcgggcaatgattgcgttaagcagtatcaataaagccgtcgtcttcccgttcaacttacccgcggtggctgaactgggtaccgcgtcaggttttgatatggaactgctggacaacggtaacctggggcacgaaaaactaacccaggcgcgaatggcacatgcatacatatgtaacaaacctgcacgttgtgcacgtgtaccctaa

SEQ ID NO: 26194 - DNA, 3947 bp, Homo sapiens
  SIMILAR (2226)..(3128): 941254mologous to Escherichia coli DNA mismatch repair protein,accession number M64730,Smith-Waterman Score=1410.
atggtggtggaaagcggtggccagtttcaggtggtcataggtaaccatgtggccgatgtcttcctggcggttaacagtgtggcaggccttgacgaaaaagcgcaacaggcaccggaaaatgatgataaaggtatttttacgcctctgatcggtttgatggcggcaaccgggatcttgaaaggtatgctggctctggcgctcacttttcagtgcgtgaacaaaacaatgctacaggccagactggctgttgagctgcaaatcctcagggatgaattactctcaggccactaccagcccttgcccgccagacgggtttacatccctaaaagcaacggcaaactgcgaccactgggtatccccgcgttgcgggatcgtattgttcagcgggccatgctgatggcgatggagccgatatgggagagtgattttcatacgctctcatatggcttccggcctgagcgcagtgtccaccacgcgatccgcacggtgaaattacagctcacagactgtggtgaaacccggggacgctgggtgattgaaggcgacctgtccatttacttcaacgccgttcatcagggtctcctcatgaagtttgcactccgcaggatcagtgacgcaccgccagactggccatggagttacaggcagagcctattattcgatcgaattttgacgttctgactcgctgtacgaaagccttttttgtcgtgggtaacgcgcttgatgaaaatcccctgattcgggtgggcgtgctgaataagaaggaaatgcagacgtatcgggatttaggcgcagtaggtgtcatttgtggtcgcttctatgacaaggaagggatgcccgtcgtggctgatgttgaccagcgtattctgggaatcagtctggctcagctaaggcagattgaacggaagatcttccttgctgcgggaaaactatttcgcaacgtcgcgcttgtggctaaaatagccgccatttttcagctactggataagaatgtgaccgtatcttctcatcgacttgaaactgtttaagcccggcaaccgatgccgctattgccacgcgaagctaattttgcacggtgccgaatgctgtttatatcggcggccctggttttggtgcccgtcataatgccagtaatagcttgaaagatattgccgagctggtgccgtttgcccatcgttatggtgcaaaaattttcgtcacgcttaacaccattttgcatgatgatgagctggaacccgcgcaacggctgattactgacctctaccagaccggtgtcgatgcgctgattgttcaggatatggggattctggaacttgatattccgccgattgaactgcacgccagtacgcagtgcgacattcgtacagttgaaaaagcgaagttcctctctgatgttggcttcacgcagattgtgctggcgcgagagctgaatcttgatcagatccgcgcgattcaccaggctacggacgcgaccattgaattctttattcatggggcactgtgcgtggcctattcgggtcagtgctacatttctcatgcgcaaacagggcgtagcgccaaccgtggcgattgctcgcaggcgtgccgtttgccatacacattgaaagacgatcaggggcgggtggtttcctatgaaaaacatctgctgtcgatgaaagataacgatcagactgccaacctcggcgcgctgattgatgctggtgtacgctccttcaagattgaagggcgttacaaagatatgagctacgtgaagaatatcaccgcccattatcgccagatgcttgatgccattattgaagaacgtggcgatctggcgcgcgcttcatcaggtcgtactgaacatttctttgttccatcgacggaaaagactttccaccgtggtagcacagattattttgtgaatgcccgtaaaggcgatattggcgcgttcgattcgccgaaatttatcggcctgccggaagaaagtcactgttgttttatcgcatcgggctataacgaagatctggatgagtggcgcgcgctggctgacggcgcgaccgattatctggagcgtctggaagtccgcgagcgtgaacgtaccggcctggacacgctgaaagttggctttaatgcggtgcacggctactacattcaaatcagccgtgggcaaagccatctggcacccatcaactacatgcgtcgccagacgctgaaaaacgccgagcgctacatcattccagagctaaaagagtacgaagataaagttctcacctcaaaaggcaaagcactggcactggaaaaacacgctttatgaagagctgttcgacctgctgttgccgcatctggaagcgttgcaacagagcgcgagcgcgctggcggaactcgacgtgctggttaacctggcggaacgggcctataccctgaactacacctgcccgaccttcattgataaaccgggcattcgcattaccgaaggtcgccatccggtagttgaacaagtactgaatgagccatttatcgccaacccgctgaatctgtcgccgcagcgccgcatgttgatcatcaccggtccgaacatgggcggtaaaagtacctatatgcgccagaccgcactgattgcgctgatggcctacatcggcagctatgtaccggcacaaaaagtcgagattggacctatcgatcgcatctttacccgcgtaggcgcggcagatgacctggcgtccgggcgctcaacctttatggtggagatgactgaaaccgccaatattttacataacgccaccgaatacagtctggtgttaatggatgagatcgggcgtggaacgtccacctacgatggtctgtcgctggcgtgggcgtgcgcggaaaatctggcgaataagattaaggcattgacgttatttgctacccactatttcgagctgacccagttaccggagaaaatggaaggcgtcgctaacgtgcatctcgatgcactggagcacggcgacaccattgcctttatgcacagcgtgcaggatggcgcggcgagcaaaagctacggcctggcggttgcagctctggcaggcgtgccaaaagaggttattaagcgcgcacggcaaaagctgcgtgagctggaaagcattttgccgaacgccgccgcttcgcaaagcacatcagagcgcaaagttgccgaggtcattctggcttcgcccgataacgcgatccattcgagtattgctgctatggcactggaagccaatgttagcgaaccgacggtgaatcgtttctgtcgcagcatggacacgcgcggttttcctgattttaaacttcatctggcacagagtctggcgaatggcactccctatgttaatcgcaatgtcaatgaagatgacagcgttgaatcatacacagggaaaatatttgagtccgcaatggcaacgcttgatcatgtccgtcattcactggataaatctgccatcaaccgcgccgtcgacttgctcactcaggcaaaaaaaatcgcctttttcggattaggctcttcagccgccgttgcccacgatgcgatgaataagttctttcgttttaatgttccggtggtgtactccgatgatatcgtgctgcaacgcatgagttgtatgaattgtagcgacggagacgtggtggtgctgatttctcacactggaagaacaaaaaatctggtcgagctggcgcagctggcacgcgaaaacgacgccatggtgattgccctcacctctgcgggtaccccgctcgcccgggaagcaacgctggcaattaccctcgacgtaccggaagatactgacatttatatgcccatggtttctcgacttgcacagctgaccgtgatagatgtgctggcgacaggatttactttgcgacgcggtgcaaaattcagagataacttgaagcgggtcaaagaagcgctgaaggaatcgcgttttgataagcagttacttaatttaagtgac

SEQ ID NO: 26195 - DNA, 891 bp, Homo sapiens
  SIMILAR (272)..(376): 881254mologous to Mus musculus Doc2gamma,accession number AB046665,Smith-Waterman Score=167.
atatcgcccgatttttgggaggaaccacgcgtccgcccacgcgtgcgccccgatctgtttcctgcatttttatgcagggaagaaatctaaattcaaaaccgggggtcacaggaagaccctgaaccccgagttcaatgaggtgagccagggccaggcaggtcccagccaaccctggccttgacatgctgagccactaccctaccggggcctgcttcttaagctgggggagagccgaggctgcctccttcccgcctctctgcccttctccctgcaggaattcttttactcaggcccacgggaggagctggcccaaaagacgctgctggtgtctgtgtgggactatgacctaggcacggctgatgacttcattggcggcaagtgcgacccggctgaccaagatgtggtgcacacggccctgcgggaaaacccgggaggagctgggcctggcagtgcccgaggagcacgtgtggggcctgctgcggcctgtgtatgatccgcaaaaggccaccgtggtgccagtgcttgctggtgtaggcccactggatccccagagcctcaggcccaactcggaggaggtagatgaggtgtttgcactgccgctggcccacctgctgcagacgcagaatcagggctatacccacttctgccggggtggccacttccgctacacactacccgtcttcctgcatggaccacaccgggtctggggcctcacagctgtcatcactgagtttgccctgcagctgctggcacctggtacctaccagccccgcctggccggcctgacctgctcaggggctgagggtttggcccgccctaagcagcccctggcttcaccctgtcaggccagctccactccaggactgaataaaggtctttgacagctctaaa

SEQ ID NO: 26196 - DNA, 396 bp, Homo sapiens
  SIMILAR (363)..(265): 1001254mologous to Homo sapiens Human protein clone HP10563,accession number Y94867,Smith-Waterman Score=166.
ttattttcttaaacatctgcaagctgcagaattccttagtcctcagctatagtttctgctagatatcttaaagctgggacagttccactgtgactcctcctcagctatggggtgggtgcctagtcatccaaaatctggaatgtccatccataggagtacccacggtagcctttggatgcatagtaagcgatgcgcaggtggtaaaatccgggtaggaacaccagaatgcccaatgatcagcactggaacggcccggtctgccccctgaaggtcaatgtagccatcgtctgtgctggagagccttgaatatttcactttactactggggattccagtagccaggttggtacgggacggcatcataacacgctgacacaggttattctcctacccgtc

SEQ ID NO: 26197 - DNA, 960 bp, Homo sapiens
  SIMILAR (528)..(256): 961254mologous to Homo sapiens CDS2 protein,accession number Y16521,Smith-Waterman Score=473.
tcagattgtcagaatcagaaggccaaacaccacagtagcaaagaagcccccaatgaagccttcccaggtcttcttcggggacagcttgatgagtggggtccgaccaaagaaaaagccaaacatataggccatgatgtcattacagatcacacaagatatggggacaatgaaccagatcattccttcaaataggttgtggataacaagatgtgactgtgttacaacaatcagcaatgtcacatgggtccagccaaatttgattttaaaggctcgtttgaatccacttgcgaagaatcctccaaaggggccaatgaccgaggcaaaggtggagagagcgatgctgtgaatctggaaggggtacatccggaccggggtccagccaatgactgactggatcaccccaggaatgttgtactcctgcaggcgaaacaggtccgagggctcacagtccacagtgaagctgttggtgtcattgttgtactccacagggcagacaaagcatctgtacccggacatcacataggacagcttgaaggcagttgggtctgataatagtaccttcttccagctgagcgtcctgaaccagggcagatcatatgagtggtagacgttgtagccaatagtgattatctcatggaaacacttaatctgaacgcacatcacctgggagagctgcttcagtggaacaggtggggttgaagttgggttgttgtggtttgaggaatgatgcacagccagggaggggacatgaaatgtcgacagctcttcccagaggtttacccatgaagtggggaagaaagtgcattggttggatgagctgtcagaagttgtttgttgagcctgcctagatggttgtaagtagggctgaaggtcaatgtagccatcgtctgtgctggagagccttgaatatttcactttactactggggattccagtagccaggttggtacgggacggcat

SEQ ID NO: 26198 - DNA, 538 bp, Homo sapiens
  SIMILAR (327)..(154): 1001254mologous to Homo sapiens Human protein clone HP10563,accession number Y94867,Smith-Waterman Score=305.
  misc_feature (1)...(538): n = a,t,c or g
catctntgggaaggacccaaaaaatctggccattattttcttaaacatctgcaagctgcagaattccttagtcctcagctatagtttctgctagatatcttaaagctgggacagttccactgtgactcctcctcagctatggggtgggtgctagtcatcaaagtctggaatgtcatcataggagtaaccacggtagcctttggatgcatagtaagcgatgcgcaggtggtaaaatccgggtaggaacaccagaatgccaatgatcagcactggaacggcccggtctgccccccctttgctgatgtagcctgacagcaggagggagcctgaaggtcaatgtagccatcgtctgtgctggagagccttgaatatttcactttactactggggattccagtagccaggttggtacgggacggcatcataacacgctgacacagcggagcgccgcgccaggccgcccgcacacccagagctcgcccacggttggcagcgcccaaggttgcaggcgaattcgccacgtgtatgatatcataat

SEQ ID NO: 26199 - DNA, 2529 bp, Homo sapiens
  SIMILAR (1)..(282): 391254mologous to Homo sapiens HSPC274,accession number AF161392,Smith-Waterman Score=133.
atgcaaccttgggcgctgccaaccgtgggcgagctctgggtgtgcgggcggcctggcgcggcgctccgggcggggacagaaccgtcctctcgggctctgggcgtgtccgagaccgcgctccccgccgaaatcaagctccgagtcatccgtgtggggcattcgtcccccctggcacagttggcctctttccagaagcccgttttgtttgttttacgtctaaattcgcgtcggttcttatttctctccctggcaaggtctgaagacggggacgggggtctccagtgcagcccactcctcgtcatggtattactccagtacaactccaatctgacctacagttttggtgtttggcatggcaggggcgtgatccctactacatacaaccagccgggcacccgagggcccttcgcgctacccgggcccggggccgccgtcggctgcgacaaagggtcagagaacaagacgacccctctgcgcgcgtcccccgcaggcctcccggatgcgccgctgtcccggccgcgcccaccccgacgctgccgctaccttgtcctcgggtggcgcaaccggctcatgggccaccctctgcctcagctctgtcatcctgggaaaatcggccctgttgtcgccacgagctagcagcgaagccgccggagcaggcagctcggcgcgggcacgcgcggactcccacggccggccccgccccgcccgggaggcgcgcggctctgagcggctcacagttcccttagcagcccagcagccagccctggagctcggccccacccagtgccgtcaccgccctttcacccgggccgagcggggccaaggagcccagttcatgacctacctgtaccagctggcacaggagaacctcctgccactggtgtatgggcaggatgcagattctaaccagctgtgtcagcgtgttatgatgccgtcccgtaccaacctgggctactggaatccccagtagtaaagtgaaatatttcaaggctctccagcacagacgatgggtaacatttgacctttcagtttaaaggaaaacccctccttaaggatcccttataagggccatcgcacttgccactgtgctgttttttgattggcgcctttctcattattataaggctcccctcctgctgtcaggctacatcagcaaaaggggggggcagaccggggccggttccagttgctgatcattgggcattcttggtgttcctaacccggattttacccacctggcggcattcggttaattatggcattccaaagggttaccgtgggttaatcctaatgaatgacattccagacttttgaatgactagcacccaccccatagctgaggaggagttcacagtggaactgtcccagctttaagggtatctaggcagaaactatagctgaggactaaggaattctgcagcctgccagatgtttttaagaaaataatgggccagattttttggggtccttcccaaaggatgttaagtggaacctacagttaggctaattagggacaaggctcctatttttcatccctgggggccctggacaagttttttcccacagggaatatgtatcatggaaggaatagagggtttattcttgtgaatggaaaagttgttgccctgcccaccacccctcttgtaggagcttgaagccatttctttttaaatagtcttcaattggcaatttgttctttgtagcaaattgggaacaatgtgggtatggctaatttcttattattaagtaatttattttaaaaatatctgagtatattatcctgtacacttatccctaccttcatgttcccagtgggaaggaccttagtaaaatccaaggatcagtgagttccatctggtaatattttttttactggctttcttactgacagccaacccaggaattttttttatccctgcagagccaagttttccaaaaatggtaaaatacctcccctcggtttaaaacaggtcccttgggacccattcctggatcccaggttcacccagtagggttgggccagccatataattttgcattcattttggccccttggtaaatcaagatgttctggcagattattccctttaacgggccgggactttttggctgtttcctaatgaaacaatgtagtggttattatttagagtttatagccgtattgctagcaccttgtagtatgtcgatcattctgctcgatgattccaaggtatcagccgtggatagcctagaggactagccatcaccttagtttgattcatattttttagcttgcaaaaagtgacttatattcccaaagaaattaaaatgttgaaatcccaaatccctagaaataaaatgagttaaacttcaaacatttcagaaaacattttaatgattttatgatatctttaatcccagtacctaggatctaccttagtttctaggtagctggcattgtggggtcacacttcaacttttccctaaactctgtaggtttttgggacttgggcaactggaagcttgaacatgccatcagctgagttgcag

SEQ ID NO: 26200 - DNA, 1512 bp, Homo sapiens
  SIMILAR (250)..(462): 761254mologous to Homo sapiens FKSG58,accession number AF336885,Smith-Waterman Score=278.
tgttaggacagtggtttaaaatatataagagaatcagtattttcttttcttttttttttttttttaagtatatattgatcattcttgggtgtttctcgcagagggggatttggcagggtcacaggacaatagtggagggaaggtcagcaaataaacaagtgaacagaggtctctggttttcctaggcagaggaccctgtggccttccgcagtgtttgtgtccctgggtacttgagattagggagtggtgatgactcttaatgagcatgctgccttcaagcatctgtttaacaaagcacatcttgcaccacccttaatccatttaaccctgagtggacacagtacatgtttcagagagcacggggttgggggtaaggttatagattaacagcatcccaaggcagaagaatttttcttagtacagaacaaagtggagtctcctgtgtctacttctttctacacagacacagcaacaatctgatttctctatcttttccccacatttcccccttttctattcgacaaaaccgccatcgtcatcatgacccgttctcagtgagctgttgggtacacctcccagacggggcggctgccgggcggaggggctcctcacttctcagactgggcagctgccgggcggaggggctcctcacttctcagacggggcggttgccaggcagagggtctcctcacctcccagacggggtcgcggccgggcagaggcgctcctcacatcccagatggggcggcggggcagaggcgctccccacatctcagacgatgggcggctgggcagagacgctcctcacttcctagacgggatggcggccgggaagaggcgctcctcacttcccagactgggcagctgggcagaggggctcctcacatcccagacgatgggcggccaggcagagacgctcctcacttcccagaaggggtggcggccgggcagaggctgcaatctcggcactttgggaggccaaggcaggcggctgggaggtggaggttgtagcgagccgagatcacgccactgcactccagcctgggcaacattgagcattgagtgaacgagactccctctgcaatcccggcacctcgggaggccgaggctggcagatcactcgcggttaggagctggagaccagcccggccaacacagcgaaaccccgtctccaccaaaaaaatagaaaaaccagtcaggcgtggcggcgcgcgcctgcaatcccaggcacttggcaggctgaggcaggagaatcaggcagggaggttgcagtgagccgagatggcgggagtacagtccagcttcggcttggcatcagagggagactagggaaaggggagaggggagaggttagtattttcaaaaatcatcatatagtacgtggttacacaactctgaatatactaaaacacattgaattgtatactttaaaggagtgaactatatctcaatatataaggggtgagttatagctcaataaagctgttaacaacaaaacaaaaatgccatacc

SEQ ID NO: 26201 - DNA, 3372 bp, Homo sapiens
  SIMILAR (982)..(2463): 491254mologous to Homo sapiens ubiquitin-specific processing protease,accession number AF170562,Smith-Waterman Score=1250.
atgagaaaggggagagaacagtatgggccagagttcttagaaggacttcatatggaggaggccagtaatggtgacattactcaggcagtcagccttctcactgatgagagagttaaggagcccagtcaagacactgttgctacagaaccatctgaagtagaggggagtgctgccaacaaggaagtattagcaacaactgaagcatttaaccaagatgggaatcactgtaggtggagcagatttgagatggtagatgaagagatcagtttggggaatactaaatttgaaatgcctgttagacattcacggcagaagtgtcagaaagatggtggagacccaggtgcacagttcagaggagaggtccaggctggagaagttatagaccttactcatgataacaaagatgatcttcaggctgccattgctttgagtctactggagtctcccaaaattcaagctgatggaagagatcttaacaggatgcatgaagcaacctctgcagaaactaaacgctcaaagagaaaacgctgtgaagtctggggagaaaaccccaatcccaatgactggaggagagttgatggttggccagttgggctgaaaaatgttggcaatacatgttggtttagtgctgttattcagtctctctttcaattgcctgaatttcgaagacttgttctcagttatagtctgccacaaaatgtacttgaaaattgtcgaagtcatacagaaaagagaaatatcatgtttatgcaagagcttcagtatttgtttgctctaatgatgggatcaaatagaaaatttgtagacccgtctgcagccctggatctattaaagggagcattccgatcatctgaggaacagcagatcatacctggctctttgggggttgatgaaaatgcactatttttgcttttgaatgatgcttggattttatgtagcacatatcttaatccaaacaatccagaattgtctccttttcctaaaagcagcagtcccaggaacaaatctgaaaatccaatggtgcagctgttctatggtactttcctgactgaaggggttcgtgaaggaaaacccttttgtaacaatgagaccttcggccagtatcctcttcaggtaaacggttatcgcaacttagacgagtgtttggaaggggccatggtggagggtgatgttgagcttcttccctccgatcactcggtgaagtatggacaagagcgttggtttacaaagctacctccagtgttgacctttgaactctcaagatttgagtttaatcagtcccttgggcagccagagaaaattcacaataagctggaatttcctcagattatttatatggacaggtacatgtacaggagcaaggagcttattcgaaataagagagagtgtattcgaaagttgaaggaggaaataaaaattctgcagcaaaaattggaaaggtatgtgaaatatggctcaggcccagctcggttcccgctcccggacatgctgaaatatgttattgaatttgctagtacaaaacctgcctcagaaagctgtccacctgaaagtgacacacatatgacattaccactttcttcagtgcactgctcggtttctgaccagacatccaaggaaagtacaagtacagaaagctcttctcaggatgttgaaagtaccttttcttctcctgaagattctttacccaagtctaaaccactgacatcttctcggtcttccatggaaatgccttcacagccagctccacgaacagtcacagatgaggagataaattttgttaagacctgtcttcagagatggaggagtgagattgaacaagatatacaagatttaaagacttgtattgcaagtactactcagactattgaacagatgtactgcgatcctctccttcgtcaggtgccttatcgcttgcatgcagttcttgttcatgaaggacaagcaaatgctggacactattgggcctatatctataatcaaccccgacagagctggctcaagtacaatgacatctctgttactgaatcttcctgggaagaagttgaaagagattcctatggaggcctgagaaatgttagtgcttactgtctgatgtacattaatgacaaactaccctacttcaatgcagaggcagccccaactgaatcagatcaaatgtcagaagtggaagccctatctgtggaactcaagcattacattcaggaggataactggcggtttgagcaggaagtagaggagtgggaagaagagcagtcttgcaaaatccctcaaatggagtcctccaccaactcctcatcacaggactactctacatcacaagagccttcagtagcctcttctcatggggttcgctgcttgtcatctgagcatgctgtgattgtaaaggagcaaactgcccaggctattgcaaacacagcccgtgcctatgagaagagcggtgtagaagcggcactgagtgagcttaaagaagctgaacccaagaagcccatgccccaggaaacaaaccttgcagagcagtcagaacagcccccaaaggctaatgatgcagagtctactgcccagcctaattctgaggtctctgaagtcgagattcccagtgtgggaaggattctggttagatctgatgcagatggatatgatgaggaggtgatgctgagccctgccatgcaaggggtcatcctggccatagctaaagcccgtcagacctttgaccgagatgggtctgaagcagggctgattaaggcattccatgaagaatactccaggctctatcagcttgccaaagagacccccacctctcacagtgatcctcgacttcagcatgtccttgtctactttttccaaaatgaagcacccaaaagggtagtagaacgaacccttctggaacagtttgcagataaaaatcttagctatgatgaaagatcaatcagcattatgaaggtggctcaagcgaaactgaaggaaattggtccagatgacatgaatatggaagagtacaaggagctgaatgccaaagcagcttctctttttgaaacaaatgatgatcactccgtaactgagggcattaatgtgatgaatgaactgatcatcccctgcattcaccttatcattaataatgacatttccaaggatgatctggatgccattgaggtcatgagaaaccattggtgctcttaccttgggcaagatattgcagaaaatctgcagctgtgcctaggggagtttctacccagacttctagatccttctgcagaaatcatcgtcttgaaagagcctccaactattcgacccaattctccctatgacctatgtagccgatttgcagctgtcatggagtcaattcagggagtttcaactgtgacagtgaaataa

SEQ ID NO: 26202 - DNA, 529 bp, Homo sapiens
  SIMILAR (133)..(528): 621254mologous to Xenopus laevis ornithine decarboxylase- 2,accession number AF217544,Smith-Waterman Score=418.
agatggagctggcaaaggtggtaaagagccaccccagtgccaagatggttctgtgcattgctaccgatgactcccactccctgagctgcctgagcctaaagtttggagtgtcactgaaatcctgcagacactctgcttgaaaatgcgaagaagcaccatgtggaggtggtgggtgtgagttttcacattggcagaggctgtcctgaccctcaggcctatgctcagtccatcgcagacgcccggctcgtgtttgaaatgggcaccgagctgggtcacaagatgcacgttctggaccttggtggtggcttccctggcacagaaggggccaaagtgagatttgaagagattgcttccgtgatcaactcagccttggacctgtacttcccagagggctgtggcgtggacatctttgctgagctggggcgctactacgtgacctcggccttcactgtggcagtcagcatcattgccaagaaggaggttctgctagaccagcctggcatggaggaagaaaactgttccacctcca

SEQ ID NO: 26203 - DNA, 2580 bp, Homo sapiens
  SIMILAR (1755)..(1528): 561254mologous to Mus musculus ubiquitin-specific processing protease,accession number AF170563,Smith-Waterman Score=221.
ctagtaagtgttcattgagtgttccagaaagatgggaggaacacagggaagaaagagttggcgacggagaggcagcgagtctgggttatgccggagtgatgacgccgacaggactcgcgccctggcgtaggcgcatcggggatgagatgggtcgcgacccatgtcagtaaggatgggtgagacagacagaggggttcggaacggagacgcctcgtactggtcgctgcccaacggcggaccggtagtgggcaggactccatggagacgcggtgccaggcgatcgtcagtcccgcgcagggggcgcagtgttagcgccctgtcgcagagttgggcggccgggcggggtacgagagcggcgccgatgctcgcggcggcaggcacggctgccacgcagcgggcacggacgtcgggcgcaggcgcggcctcggcgcgcgctcggcggtgcggcgccgcgcgcgccgtgggcgcggctggcacgggcgcggcatcgaagcgccggtgagtgtcggcggtggctggccgccgcccgcgttcggctgccagagcgcgcgcggtgcgcgtcgtggtggcgcgcgaggcggcgtcgcgcggcgagcgcggcggcgtctgggcgccgcggctcgcgggagtcgcgcgcacggccgtcgcggcccggacgtgtcgccggagccacgtaaaaggcggtaagaggggttttcctttagttttggccattccatttcccctctcttgtccatacttcaccgagtgatcggagggaagaagctcaacatcaccctccaccatggccccttccaaacactcgtctaagttgcgataaccgtttacctgaagaggatactggccgaaggtctcattgttacaaaagggttttcctgtatgcagaatgctcttgaaggtcaggctgcaattctggacatcaaatggaaaagcatatgtctctaaactgcacgcagagaccacctggatgggcttatagttctcaatggtcccagatgagttcacataaacatagggaaggtcaggggatctttcaatgtccacactatatgaaacacaagagaacttggttgtcacagagaggatgttggtcatttcaaaacataggaactcattgatgatgatatcgggggcccagatggcacttagaggtagggagatctctctaatctcatcaaacatgctagaagggtcgaaggcgccgcgggctggggtcggtggcttagggagcccgtccggccatggtggccgcggctggtggttggcgcggctgcgctgcggcccggggcagtgcggagctgggacagtcgcggcgctgacgcccgcgggccccagctgcagatatgaagcggagccgctgccgcgaccgaccgcagccgccgccgcccgaccgccgggaggatggatttcagcgggcagcggagctgtctcagtctttgccgccgcgccggcgagcgccgcccgggaggcagcggccgccggggtgagtttaaccagagaattcaaccctctttgaaactcagttccctgctgttcctcagatgatcggaatgctccctttaatagatccagggctgcagacgggtctacaaattttctatttgatcccatcattagagcaaacaaatactgaagctcttgcataaacatgatatttctcttttctgtatgacttcgacaattttcaagtacattttgtggcagactataactgagaacaagtcttcgaaattcaggcaattgaaagagagactgagggtatctgtctgccagctttgtacgacaaatatagtttctcatctccaaactcgtatttgaacaactggcacagatttcccgttttctcgagccgtggccgtctgccgcgccggccgcgtcgtcctgctgcagctccgcagtcatggccgaggcgcccagccgcgggtcaccggtctcccgccgcagccgccgccggcccagcctctcaggacagacgtcggtcacgtgatcccggccccgcctgtcgctgttggtcagcttcacagccggtggaggctgcgggccgcgctgccagtgtccgggaactgggtttgcgaatcctgggagccgcgttcctgagtcttctccgctctctgccctcaaaacctcatttgtaggactgacctccggctccaccctccccacgggcgagttaaaactgttcccccgccgtgggaaactgccgaatgaccgtggaataaaggatttcccatcaggctttgtagccatttccaactccaatgacatgaagaagtgttcaccatcacccacaaacacgtgggaattatccaggtcacactgatgcaaaaggtgggttcccatggtcttgggcagctctgcccctgtggctttgcagggtacagtctccctcttggctgctttcatgggctggcattgagtgtctgcagcttttccgggcacacagtgcaagctgtcggtggacccaccattctgggctcgcgcggcaccgccgcgggcgccccggcccacacccgccggcggcacccgcagcggcgccgcggcggcggccccacacgcgtcccgccccccgcacgcgcgcat

SEQ ID NO: 26204 - DNA, 2213 bp, Homo sapiens
  SIMILAR (1550)..(1600): 581254mologous to Xenopus laevis ornithine decarboxylase- 2,accession number AF217544,Smith-Waterman Score=51.
atatgaagcggagccgctgccgcgaccgaccgcagccgccgccgcccgaccgccgggaggatggagttcagcgggcagcggagctgtctcagtctttgccgccgcgccggcgagcgccgcccgggaggcagcggctggaggagcggacgggccccgcggggcccgagggcaaggagcagccgcctgccttggcctcccaaagtgccgagattgcagcctctgcccggctgccaccccgtctgggaaggcttctgggattccagaaagcctgcaggtgttggagcctcaaccctcatatcctcatggccctgctgaggtctcttgtcccacctgacaagaaacacccacaggtgtggaggggcaggccaccccttcatctggcgcccaacgtggggcttttctctagggtgaaggtacgctcgagcgtggtcattgaggacaagtcaatgagagattcccgaagaggcctatctcaaagaagaagaaggagaaagaagaagaagagaggtagcagcagcaagaagaagaagaggaggaagaagagaaagaagaagaagaggaagaagaggaagaggaggaagaataggaagaagaagaagaagaggaagaacaagaggaagaagaagaggaagaaggaagaaaagaaagaagaggaagaagaaagaagaaagaaggaggaggaagatgaagaaggaagaggaagaggaagaaggaagaggaagaggaagaagaggaagaaaagaagaagcagaaagaagaaagaaacagcagcagcagcagcagctggagaaaggctgggaaaatggtggccaggagagtgtccggtagagtgtgttgcatactttctaaggcggcggctgcagcagcggctccatccagcccgtcagctcctcctgcaaggcatggctggctacctgagtgaatcggactttgtgatggtggaggagggcttcagtacccgagacctgctgaaggaactcactctgggggcctcacaggccaccacggacgaggtagctgccttcttcgtggctgacctgggtgccatagtgaggaagcacttttgctttctgaagtgcctgccacgagtccggcccttttatgctgtcaagtgcaacagcagcccaggtgtgctgaaggttctggcccagctggggctgggctttagctgtgccaacaaggcagagatggagttggtccagcatattggaatccctgccagtaagatcatctgcgccaacccctgtaagcaaatttgcacagatcaaatatgctgccaagcatgggatccagctgctgagctttgacaatgagatggagctggcaaaggtggtaaaaagccaccccagtgccaattttcacattggcagtggctgtcctgaccctcaggcctatgctcagtccatcgcaaacgcccggctcgtgtttgaaatgggcaccgagctgggtcacaagatgcacgttctggaccttggtggtggcttccctggcacagaaggggccaaagtgagatttgaagagattgcttccgtgatcaactcagccttgggacctgtacttcccagagggctgtggcgtggacatctttgctgagcttggggcgctactacgtgacctcggccttcactgtggcagtcagcatcattgccaagaaggaggttctgctagaccagcctggcagggaggaggaaaatggttccacctccaagaccatcgtgtaccaccttgatgagggcgtgtatgggatcttcaactcagtcctgtttgacaacatctgccctacccccatcctgcagaagtcttccaccaagagcctgcggaccactatcggcgaggccttcgagcggctgcaccggctgctgcgtgaacgccagaaggccatgctagaggagctggaggcggacacggcccgcacgctgaccgacatcgagcagaaagtccagcgctacagccagcagctgcgcaaggtccaggagggagcccagatcctgcaggagcggctggctgaaaccgaccggcacaccttcctggctggggtggcctcactgtccgagcggctcaagggaaaaatccatgagaccaacctcacatatgaagacttcccgacctccaagtacacaggccccctgcagtacaccatctggaagtccctgttccaggacatccacccaggcaggaagagcaaggaggttaacgtggctggagggagatga

SEQ ID NO: 26205 - DNA, 876 bp, Homo sapiens
  SIMILAR (424)..(678): 811254mologous to Homo sapiens TSA,accession number X82321,Smith-Waterman Score=358.
atgaagaaagaagatgcatttttgaaggcattctatattgttcatgggaagtggaactgtgtaaaaggctcattaaccaggactccatgctgctgcacaaattgcctggcaggagggatatggtgcatgagagtccaaatcttccagctggagaacaaggtgctgcctggctttccatgggcttgcagagtggacctctatggccagattggatttgatgctgcagctcagtgcctttctctgagtgtaagtaaggcagagccactggtaaagaaggctccaccggagttgagggagcagctggccagaaaaactctcagtagtgataaccttaaatacctgtttgacaacaaagatatcatgaaggtaaaacaaagcaagaagaaaaaagagcacagtttcagaaagaataatggatgcattaaaatcatcgcgttcagcgaccatgccgaggacttccgcaagctgggctgcgaagtgctgggcatctcagtggactctcagttcacccacctggcttggatcaacaacccccagagggagggagacttgggccccctgaacatccccctgcttgctgaggtggccagtggcttgtctgaggattacgccgtgctgaaaacagatgcgggcattgcctacaggggccgctttatcagtgatggcaagggtgtcctttccagatcactgttaatgatttgcctgtgggacgctccgtggatgaggctctgcggctggtccaggccttccagtacgcagaagagcacgcggaagtttgtcccgctggctggaagcctggcactgacacgattaagctcaacgtgggtgacagcaaggaaaatttatccaaacacaattaggctggctgacggatag

SEQ ID NO: 26206 - DNA, 1050 bp, Homo sapiens
  SIMILAR (468)..(704): 511254mologous to Homo sapiens Natural killer cell enhancing factor B,accession number W09794,Smith-Waterman Score=151.
cccacgcgtccggtcttggttcgggccgggcataaaaggcttcgcggcccagggctcacttggcgctgagaacgcgggtccacgcgtgtgatcgtccgtgcgtctagcctttgcccacgcagctttcagtcatggcctccggtaacgcgcgcatcggaaagccagcccctgacttcaaggccacagcggtggtctgatggcgccttcaaagaggtgaagctgtcggactacaaagggaagtacgtggtcctctttttctaccctctggacttcacttttgtgtgccccaccgagatcatcgcgttcagcaaccgtgcagaggacttccgcaagctgggctgtgaagtgctgggcgtctcggtggactctcagttcacccacctggcttggaataacaaccccccggaaagaggggaggcttgggccccctgaaacatccccctgcttgctgacgtgacccagacgctttgtctgaagattacggcgtgcttgaaacagatgaggggcattgcctacaggggccttctttatcatcgatgggcaagggtgtccttcgccagatcactgttaaatgatttgcctgtgggacgctcccgtggatgaaggctctgcggctggtccaggccttcccagtacacaagacgagcatggggaagtttgtcccgctggctggaagcctggcaagtgacacgattaagcccaacggtggatgacagcaaggaaatatttctccaaacacaattaggctggcttaacggatagtgagcttgtgcccctgcctaggttgcctgtgcttgggtgtccaccctgtgtccccacatctgggtgcccttatgcttgacccagggaaaggccaagaccctgcccctccaaactccacaagtaatgggaccctggaagggctaaggccaaaggctttctcatgcctccaacctaagaaagctgaataagttgacgcccctcccccaaagcccacccagcccgcacacaggcctagaggtaaccaataaagtattagggaaaggtgaataaaaaaaccaaaaaaggggg

SEQ ID NO: 26207 - DNA, 807 bp, Homo sapiens
  SIMILAR (612)..(686): 841254mologous to Rattus norvegicus alpha4 phosphoprotein,accession number AF000577,Smith-Waterman Score=132.
atggctgctgaagatgagttactgttgccgcggctccccatgctgctcgaaacaggcaaacagcttctggacgaagtagaattagcagctgaaaccaccggttaccagatagtccaggagaagcgggctcgagaacattttataaactacttaactcagtgccattactatcacattgcaaagtttgagctgctcaaaaccaagaacaactcagctgaaaatcacactgctaattcctccatggcttatcctagtctcgttgctatggcatctcaaaggcaggctaaaatagagagatacaagcagaagaaggagttggaccataggttgtctgcaatgaaatctgctgtggaaagtggtcaagcagatgatgagcatgagaggcctccagtgaaatccttcattctcacgcggaacacagcccaagccaaattatttggagctagttatccaagtctggcaactatgacagtgagtgactggtatgaacaacatcggaaatatggagcattgccagatcagggaatagccactgcaacaccagagaaattcagaaaagcagctcagcaacagaagtatcaagaagtgaaggagggagaggatgatgaacactctacagagttcgggagtgggataactggaaggacacccatcctgggggctatggcaaccgacagaacatgggctgatcttcccccaacacgacaggactgcagggtgcacacctcccccaccaaggaaaaccatgcagtgttcccctccctgggctcccgcttcagctgtgtacaacgaaggcaaagatgctaa

SEQ ID NO: 26208 - DNA, 1156 bp, Homo sapiens
  SIMILAR (663)..(806): 1001254mologous to Homo sapiens alpha 4 protein,accession number Y08915,Smith-Waterman Score=269.
  misc_feature (1)...(1156): n = a,t,c or g
aactacttaactcagtgccactgctatcatgtggcagagtttgagctgcccaaaaccatgaacaactctgctgaaaatcacactgccaattcctccatggcttatcctagtctcgttgctatggcatctcaaagacaggctaaaatacagagatacaagcagaagaaggagttggagcataggttgtctgcaatgaaatctgctgtggaaagtggtcaagcagatgatgagcgtgttcgtgaatattatcttcttcaccttcagaggtggattgatatcagcttagaagagattgagagcattgaccaggaaataaagatcctgagagaaagagactcttcaagagaggcatcaacttctaactcatctcgccaggagaggcctccagtgaaacccttcattctcactcggaacatggctcaagccaaagtatttggagctggttatccaagtctgccaactatgacggtgagtgactggtatgagcaacatcggaaatatggagcattaccggatcagggaatagccaaggcagcaccnnnnnnnnnnnnnnnnnnnnnnnnnnnnnnnnnnnnnnnnnnnnnnnnnnnnnnnnnnnnnnnnnnnnnnnnnnnnnnnnnnnnnnnnnnnnnnnnnnnnnnnnnnnnnnnnnnnnnnnnnaggaattcagaaaagcagctcagcaacaggaagaacaagaagaaaaggaggaagaggatgatgaacaaacactccacagagcccgggagtgggatgactggaaggacacccatcctaggggctatgggaaccgacagaacatgggctgatcttcccacaacaccacaggactgcagggtgcacaactcccctgccaaggaaaaccatgcagtcctcccctccctggtctcctgcttcagctctgtacaacgagggcaaagatgctaaatcttgctttgcattcagtaaagtgtcaagtgattaagtgtgtatttgtaccctagatgatatgaaccaccagtcttgttttggcatcatcctcatcatgttgtattccagcttcttaagtggaaggaaaagagtgctgagaaatggctctgtataatctatggctatccgaattctctgaaaaaataataaaagtcccctctattatatgagcctgtacagaaaaaaa

SEQ ID NO: 26209 - DNA, 587 bp, Homo sapiens
  SIMILAR (584)..(450): 731254mologous to Homo sapiens Human secreted protein, SEQ ID NO: 7131,accession number G03050,Smith-Waterman Score=160.
caggaaagccgagagaatccacagacgctttgaaggaagaggcttgctgctgtaggctttgtgagatagccaaaaaactgagtgcccaaagtgtgatatggggagtgtccacccccgaacacacatcctctgtggaaaacctgaaggtccagatcatgggagaaggatttgacctcacatgcagctgaggcaaatttacagccaagcaaaatataggggtagaggaagcagcaggacgagccctgtgggcacttgcagtccccagggaaaccattcctgactttgtcttgcagagatccttggggagggctgccagtgtaactggagaaagaccataggaagaagaaaagttccagctgaactttgtaaaaatttaaaccgaatacagtttcctggacagaaccctcgtggtgagcgttacagttcttaaaggtggtgtgtccagagtttgttccttctgatgttcggatgtgtttggagtttcttccttctggtgggttcgtggtctctctggcttcaggagtgaagctgcagaccttcgtggtgagtgttacagctcttaaggtggcgcatctggagtcgctcat

SEQ ID NO: 26210 - DNA, 3858 bp, Homo sapiens; identical to SEQ ID NO: 21559
  SIMILAR (1)..(525): 981254mologous to Escherichia coli coenzyme A ligase,accession number X97452,Smith-Waterman Score=914.

SEQ ID NO: 26211 - DNA, 1293 bp, Homo sapiens
  SIMILAR (714)..(773): 1001254mologous to Escherichia coli K12 putative sensory transduction regulator,accession number AE000159,Smith-Waterman Score=117.
atggctctttcaactctgtcatttggcgtgttcgcggcggaaccggtaacggcatcccaggcacagaacatgaataaaatcggcgtggtttctgccgatggcgcatccaccctcgatgccctggaagcgaaactggctgagaaagccgcggcagccggtgccagtggatacagcatcacttccgccaccaacaacaataaattaagcgaaagcccgcaacgtctcttccggcatccaattgccgcgctgcattacataggcctgccagcttccgcattcagtgaatcccctgcttctgcggtccggagcgtgttacagagcctgccgtgttgtgaggtacccggatattatcgtgaggatgcgtcatcgccattgctccccaaatacaaaaccaatttcagccagtgcctcgtccattttttcgatgaactccggcaccatctcgtcaaaactcgccatgtacttttcattccggtgggggacgacataatgcaggccttcacgcttcatgcgcgggtcatagatggcaaagtaccaggcatcttttcgcgtcacccacatgctgtactgcacctgggccatgtaagccgattttattgcctcgaaaccaccgagccggaatttcatgaaatcccgggaggtacgagtattgccggaagcgtggcctgtatccggatgcagagtcttatccgtggaaatcgaacgcgcattacagaacatgcgggccaatgcgctggctgacgcggaattacggcgcaaggctgccgatgaactgacctgtatgacagcgcgaattaaccgtggtgagacgatacctgaaccagtaaaacaacttcctgttatgggcggtagacctctaaatcgtgcacaggctctggcgaagatcgcagaaattaaagctaagttcggagctgatagtctgatcgacaatacaagtgggaccgtggtcccagaccgataatcagaccgacaacacgagtgggatcgtggtcccagactaataatcagaccgacgatacgagtgggacccgtgtcccagatgattaaatggtgctctactctgcctccttcttctagaacatcctgaaggatgcccttggcattctgtgtggtcaactggacattcgctagaacccatgcatttccgcttccccagttctcaagacttgcaactgctactccctctgcctggaaagctcgggtaccgagctcgaattcgtaatcatggtcatagctgtttccttcaaaggcgaaaaaccgtctatcagggcgatggcccactacgtgaaccat

SEQ ID NO: 26212 - DNA, 978 bp, Homo sapiens
  SIMILAR (840)..(595): 961254mologous to unidentified RED ALPHA,accession number A95106,Smith-Waterman Score=413.
  misc_feature (1)...(978): n = a,t,c or g
catgctgtcgcactagtgattttcccgggtcgacgatttcgtctttcagtggatttcggataacagaaaggccgggaaatacccagcctcgctttgtaacggagtagacgaaagtgattgcgcctacccggatattatcgtgaggatgcgtcatcgccattgctccccaaatacaaaaccaatttcagccaagtgcctcggtccatttttccgatgaactcccggcacggatctcgtcaaaactcgcccatgtacttttcatcccgctcaatcacgacataatgcaggccttcacgcttcatacgcgggtcatagttggcaaagtaccaggcattttttcgcgtcacccacatgctgtactgcacctgggccatgtaagctgactttatggcctcgaaaccaccgagccggaacttcatgaaatcccgggaggtaaacgggcatttcagttcaaggccgttgccgtcactgcataaaccatcgggagagcaggcggtacgcatactttcgtcgcgatagatgatcggggattcagtaacattcacgccnggaaagtaaattcaaacaagggttctggcgtcgttctcgtactgttttccccaggccaagtgttttagcgttaacttccggagccacaccggtgcaaacctcagcaagcagggtgtggaagtaggacattttcatgtcaggccacttctttccggagcggggttttgctatcacgttgtgaacttctgaagcggtgatgacgccgagccgtaatttgtgccacgcatcatccccctgttcgacagctctcacatcgatcccggtacgctgcaggataatgtccggtgtcatgctgccaccttctgctctgcggctttctgtttcaggaatccaagagcttttactgcttcggcctgtgtcagttctgacgatgcacgaatgtcgcggcgaaatatctgggaacagagcggcaataagttcgtcatccat

SEQ ID NO: 26213 - DNA, 2530 bp, Homo sapiens
  SIMILAR (743)..(976): 921254mologous to Escherichia coli NarW protein,accession number D90786,Smith-Waterman Score=363.
  misc_feature (1)...(2530): n = a,t,c or g
atgcagcggagactgaagcgccgcaatgcaggcttgccgtgttgtgaggtacccggatattatcgtgaggatgcgtcatcgccattgctccccaaatacaaaaccaatttcagccagtgcctcgtccattttttcgatgaactccggcaccatctcgtcaaaactcgccatgtacttttcattccgctcaatcacgacataatgcaggccttcacgcttcatgcgcgggtcatagttggcaaagtaccaggcatcttttcgcgtcacccacatgctgtactgcacctgggccatagccagatcggcctgttgatggagtatccggacgagctgttgtgggaatgcaaggaggacgcgctggcgttgatccgccgcgacgcgccgatgcttacggatttcacccacaacctgcttaacgcgccgctgctggataaacaggccgaatggtgcgaagtgtttgaccgcgggcgcaccacgtcgctgctgctgttcgaacatgttcatgccgagtcccgcgatcgcggccaggcaatggtggacctgctggcggagtatgaaaaggtcggcctgcagctggattgtcgggaactgcccgattatctaccgctgtatctggagtatttaagcgtactgcctgacgatcaggcgaaagaaggattgctcaatgttgcgccgatcctcgccctgcttggcggtcgcttaaaacaacgcgaggcaccgtgggacgcgttgttagatgctcttgtggcaactggggggaagctccctttcaagtgacaatgttaaaaaacaagtaaacagcgaagagcgcgatgacacccgccaggcgcttgatgcagtgtgggaagaggaacaggtgaagtttattgaagataacgccacggcgtgtgacagctcgccgcttaatcaatatcagcgacgctttagccaggatgtcgcgccgcaatatgtcgacatcagtgcgggagaaggccaaagttccttccaattagtttcctactgggagaaagatgttcagacgtgtttggagtttcttccttctggtggatttgtggtctcactggcttcaggagtgaagctgcagactttcacagaaacggacaacttggtcaaagatataacgttctttggcaaaatatcaacaagaagcttaaaaacctacctgaaggatgtcacagagaaaagggaacagagttgtgtcaacctggaattgaagtgatctggcacgggaccctccagcacagtgttccagcaggtcctgttggagatgatatgttccattggcaagcctacaataatggggccaaatgacagtcccctatccagggtggagtatttttcttgacaattcatttccccaacagattaccccttcaaacccacctaaggttgcatttacaacaagaatttatcatccaaatattaaccataatgggcagcatttggtcttgatattctacggttcacagtggtctccagcactaactatttcaaaaagtactcttgtccatctgttcctctgttgtgtgatcccaattccaggatgatcctttagtggcctgagatttgctcggatctacaaaacaagatagagaaaacgtacaacagaatagctcggggaatgggactcaggaagtatggcggatgtaatttaaaggaaattattggggataacctctacaaaataaaggtaggggggaactcttggaaagaggaaagtccttttttggattttccattttggacttgcttttctatggagcccacggcctcatcttcccctgtgcacatgtttacctgatacagcagtgctgccgtgttggtacatacttgggaaccaccaacctangaaatacttgtacttctggtaccaacattggcctcctagcagagaaagtgtgtggtgtgacaagccagttctacaggcattacctaggtgtgagactaaaagcttttcttattgacttaaatttgggataacagcaaggtgtgaggggggtggtgggtatggtgtgtgcttggatgggaaagaaaaggctccactcacctataggagattatttttaagtggaatccatttaaactcaaaacagttatgaaaagcaaggtgaagaagaacatgaagctgtgtcctgtattcattttattcccgaaggagcttaccgtcttaagggtgaaaagttatgaccaaccagattaaactctaccccacatcctgcattttaaggtctaaggtttaactggtcaacatttaaatgggattgggagctattagtacatcaagtgtgatggggccttgttcccaactctttttacatctcccttacccctttcaacctttgggccttttcagcccttcctttctctctttccatattctttggtttgtatgtggtttctcagttaatacatagctaatagctcttatttttcttatgtttttaaccgcttagggtctatttggatgtaagggtgaaaattcatttgatggaaatacttgtgtatatttaaagacccaattgctcctctg

SEQ ID NO: 26214 - DNA, 786 bp, Homo sapiens
  SIMILAR (505)..(765): 861254mologous to Homo sapiens GABAA receptor alpha3,accession number A28102,Smith-Waterman Score=389.
atggagcccaagagtcagtttaagtgtcacaccgtcccagttaatatagcccaagatgcctatacaacagctgaagtggtttattcttggactctcggaaagaacaaatccgtggaagtggcacaggatggttctcgcttgaaccagtatgaccttttgggccatgttgttgggacagagataatccggtctagtacaggatttgccggatttcgaaccaccatcaaacagattatcgctgctgggcaaaccagcgtgaccgctgctgcaactctctcaggcccagcggtgaagggcactcagctgtgcccgtctcactggaagcgccggtttcttcaccaagaaatgggaaaaaaggtggaatggaagaatgactttggaggaggtgaagagaaaaagggctttcacaccgatcaaatttattgtgaggaaagccagaagcttcagcagagcgctaaaaaacgcgatgctcagttagcgaacggcgccctcggtatcatagaggagtacactattgatgtattttttcggcagacatggcatgatgaaagactgaaatttgatggcaaaaagaagatccttccactgaacaatctcctggctagtaagatctggacaccggacaccttcttccacaatggcaagaaatcagtggctcataacatgaccacgcccaacaagctgctcagattggtggacaacggaaccctcgtctatacaatgaggacactagtcgtgttggatgaggggcccaccctactccagtacggcatgccctcatcttaa

SEQ ID NO: 26215 - DNA, 1817 bp, Homo sapiens
  SIMILAR (1330)..(1644): 851254mologous to Homo sapiens GABAA receptor alpha3,accession number A28102,Smith-Waterman Score=459.
tcccgggtcgacgatttcgttcaggagagtgacccagagagagaagaagcagccagaagccgagctctgtcagggctcaacctccaacttgtttcagttcattcatccttctctcctttccgctcagactgtagagctcggtctctccaagtttgtgcctaagaagatgataatcacacaaacaagtcacatgttacatgaccagccttgggattcttttcctgattaatattctccctggaaccactggtcaaggggaatcaagacgacaagaacccggggactttgtgaagcaggacattggcgggctgtctcctaagcatgccccagatattcctgatgacagcactgacaacatcactatcttcaccagaatcttggatcgtcttctggacggctatgacaaccggctgcgacctgggcttggagatgcagtgactgaagtgaagactgacatctacgtgaccagttttggccctgtgtcagacactgacatggagtacactattgatgtattttttcggcagacatggcatgatgaaagactgaaatttgatggccccatgaagatccttccactgaacaatctcctggctagtaagatctggacaccggacaccttcttccacaatggcaagaaatcagtggctcataacatgaccacgcccaacaagctgctcagattggtggacaacggaaccctcctctatacaatgaggttaacaattcatgctgagtgtcccatgcatttggaagattttcccatggatgtgcatgcctgcccactgaagtttggaagctatgcctatacaacagctgaagtggtttattcttggactctcggaaagaacaaatccgtggaagtggcacaggatggttctcgcttgaaccagtatgaccttttgggccatgttgttgggacagagataatccggtctagtacaggagaatatgtcgtcatgacaacccacttccatctcaagcgaaaaattggctactttgtgatccagacctacttgccatgtatcatgactgtcattctgtcacaagtgtcgttctggctcaacagagagtctgttcctgcccgtacagtctttggtgtcaccactgtgcttaccatgaccaccttgagtatcagtgccagaaattccttacctaaagtggcatatgcgacggccatggactggttcatagccgtctgttatgcctttgtattttctgcactgattgaatttgccactgtcaactatttcaccaagcggagttgggcttgggaaggcaagaaggtgccagaggccctggagatgaagaagaaaacaccagcagccccagcaaagaaaaccagcactaccttcaacatcgtggggaccaccctatcccatcaacctggccaaggacactgaattttccaccatctccaagggcgctgctcccagtgcctcctcaaccccaacaatcattgcttcacccaaggccacctacgtgcaggacagcccgactgagaccaagacctacaacagtgtcagcaaggttgacaaaatttcccgcatcatctttcctgtgctctttgccatattcaatctggtctattgggccacatatgtcaaccgggagtcagctatcaagggcatgatccgcaaacagtagatagtggtggcagtgcagcaaccagagcactgtataccccgtgaagcatccaggcacccaaaccccggggctccccttcgcgtatttcaggattctcctttttacccctctaccaagctgtgaccctcaattcatatttatgaatctctacgcaaaaaaaaaaaaaaaaa

SEQ ID NO: 26216 - DNA, 559 bp, Homo sapiens
tgaattatgcccgtcaggttaacgaaatttctttgtataccgcacttggtggcggttgacagcaatatactcgtcatacttcaagttgcatgtgctgcgtctgcgttcgctcaccccagtcacttacttatgtaagctcctggggattcactcgcttgtcgccttcctgcaactcgaattatttagagtatgacttttaactccaggagagaataaatgaaaaaagcactgcaagtcgcaatgttcagtctgtttaccgttattggctttaatgcccaggctaacgaacatcctcatgaaaccatgagcgaagcacaaccacaaattaatagcgccactggcgtggtaaagggtatcggatcttggaaagcaaaaaaatcaccatccatcacgatcccgattgctgccgtgaactggccggagatgaccatgcgctttaccatcactccgcagacgaaaatgagtgaaattaaaaccggcgacaaagtggcgtttaattttgtccagcagggcacgctttctttattacaggttattaaagtcaggaagccagcgcaga

SEQ ID NO: 26217 - DNA, 376 bp, Homo sapiens
  SIMILAR (28)..(138): 351254mologous to Phaseolus vulgaris basic protein,accession number L00625,Smith-Waterman Score=58.
atatgagggaacacagtatcattttagatcttagaaagcaatgagcatctgataagtctttggggaaataggaaaggaggaaattctaataaagccaaagttcagcaaaagaaaaacaaagagaggctacaaaatgcagttatctacctggaattataagagaggggctaaatgtagtcatctcctctttttggagatcagaaggtctgtgggaaaagagaagaaccaatttttcagaaaataactagggtcacagaatgaacaagtggaattagagagccagtgatggacgtgaggaaacagctgtgtaggttttgaccagtgagcaggtggtggtaatagtatcacagggttgttacttactgaatcattgcga

SEQ ID NO: 26218 - DNA, 622 bp, Homo sapiens
  SIMILAR (94)..(204): 1001254mologous to Homo sapiens V-ATPase G-subunit like protein,accession number Y14768,Smith-Waterman Score=174.
aagtaagcggtggggggtgggagccatctggtactttgacagcattcaaaacagcatcggccataacaacagaaatggccagtcggtcccataggtatccagcagcttctgcaagctgagaagcgggcagctgagaaggtggcagatgccagaaagaggaaggcccggcgactgaagcaggcaaaggaggaggcacagatggagagtggagcaataccgcagagagcgagagcacgaattccagagcaagcagcaggcggccatgggcttccaggggaacctgtatgctgaggtggagcaggctacaaggcgccaggtgcagggcatgcagagctcccagcagagaaaccgagagcgtgtcctggcccagcttcttggcatggtctgcgacgtcaggccccagagaccttctgatctccaaaaagaggagatgactacatttagcccctctcttataattccagctagggcctgccggttcctagtgcgtgcccagcagtcctcaggtcaccttcactaccgggccaaggaccccgtgggaactcgcagccttcgccacactcgttcctcgcgcatccacggaggggtgcctacagagaagacctgcgtggcaaaaacctaa

SEQ ID NO: 26219 - DNA, 187 bp, Homo sapiens
  SIMILAR (3)..(47): 531254mologous to Escherichia coli g15 protein,accession number J01611,Smith-Waterman Score=32.
ctctgctgcacaccaaaactggtttgaactggcaccgaaagcggccaatatcattgtaaaagacgaaaaatgggaccagagccaattatcaaaagtctctgggcgcgttctgacgaaccggtattctggggcctttcggggccggtggtatgtggagcgccatcattgcgccggtgatgatccgctg

SEQ ID NO: 26220 - DNA, 1129 bp, Homo sapiens
  SIMILAR (807)..(866): 901254mologous to Escherichia coli g13 protein,accession number J01611,Smith-Waterman Score=84.
atggctgtctggcccacgggcgcactcgcgctgacaccttcacctgccggcgacgccggcgcctgctccaccgcgggcggcccctgccagggtgctcgagggccgcggggcagcgggccacctgcctggggcccggatgccgtccttgaaccccttcgggggcaacgtaaaccgtatgtacggccaatgacgtccacctggtggaaaaaattgccgttttatcgcttttacatgctgcgcgaaggcacggcggttccggctgtgtggttcagcattgaactgattttcgggctgtttgccctgaaaaatggcccggaagcctgggcgggattcgtcgactttttacaaaacccggttatcgtgatcattaacctgatcactctggcggcagctctgctgcacaccaaaacctggtttgaactggcaccgaaagcggccaatatcattgtaaaagacgaaaaaatgggaccagagccaattatcaaaagtctctgggcggagcctgagatgattaatccaaatccaaagcgttctgacgaaccggtattctggggcctcttcggggccggtggtatgtggagcgccatcattgcgccggtgatgatcctgctggtgggtattctgctgccactggggttgtttccgggtgatgcgctgagctacgagcgcgttctggcgttcgcgcagagcttcatttggtcgcgtattcctgttcctgatgatcgttctgccgctgtggtgtggtttacaccgtatgcaccacgcgatgcacgatctgaaaatccacgtacctgcgggcaaatgggttattttacggtctggctgctatcctgacagttgtcacgctgattggtgtctgtacaatctaacgcatcgccaatgtaaatccggcccgcctatggcgggccgttttgtatggaaaccagaccctatgttcaaaacgacgctctgcgccttattaattaccgcctcttgctccacatttgctgcccctcaactaatcagcaatattgtgcatcgcacaattaccccgcttatagagcaacacaagatcccgggtatggcggtgccggtaatttatcagggtaaaccttattactttacctggggctatgcggacatcgcctaa

SEQ ID NO: 26221 - DNA, 894 bp, Homo sapiens
  SIMILAR (606)..(205): 411254mologous to Mus musculus Pro-Pol-dUTPase polyprotein,accession number Y12713,Smith-Waterman Score=291.
ttacatgggctttcctctgtgcatgtggtcagggggtggtggcggggctccaagcgtccggggagagcagaagggctgacgactgagttgataaccaatggccaacgatgttacccatgaacgtacccatcccactatcaggtaagtcttccgcaagatgactgtagcccatcctgtcacactctcacaagccatgacataggttgggctatggacatagccctgcgacaacactgtgaaagtccattgtcgcctttcccacatgaaggcaaactggtcccagctctctggagcgatgttgatggagaaaaatgcattggccaagtccactacataatggtattgtgccagttccatcaacaaatggtccattatattcatgattgacagcacagctgcatgcaaagggggtgttactttattcagttcccagtagtccaccattatctgcgaagttccatcaggcttcctaactgaccacactggagaattgtagggactatgggtgccacacactatctgcacctcctccagctttttaattgtctcagttatctctgtatgcccacccagcaaatggtattgacaggtggaagtaaccttctgacggaccactgggcgaccctgcaacaggggttcttcctcctcggtatcagactgagtggggagtctccggctgtactgcacctcagggactgggtgtgtacttttttgtagcacagtcaaagagccccatctgactctgccggcaaaggctccctccttctcagtgctgtgtgcttccagttgctccagcaccttctccatgcttgcaggagacccatctaccaccacccaggtatccaccggagcccatccaagcagcacagctgccaatgggtaccaccaacccat

SEQ ID NO: 26222 - DNA, 558 bp, Homo sapiens
  SIMILAR (165)..(293): 361254mologous to Euhadra herklotsi NADH dehydrogenase subunit 4L,accession number Z71695,Smith-Waterman Score=70.
cttgatcaaaattaagtcacagattgccagatacaaactgaccacaagcacgtacttcctataccatatgtacgtctaagtccctttctaagaatacattccaatttagtatgaatagaaattacatttatagtctttagaaatataatcagttaataacttgattatattttctgcatatattatatatatttggattaatatattggatattggattaatattttaccacaataattattttaactgtaatcctgtgtttattttggggaaaagccctttttttttcagttgggaatcacttttaatatttaaatacaaaaaatgaggcactggcttctctttttttaaacacacacacaaattctaacagccaaaatgtgcagaggaaatgagctcctgctctgtcttccccagtccccatcctgtggctgaagctgcagccagcctctttcctcttatacatagggattcatagtggccacattacaccacagttgtaatgcattttgtctgttttacattgtgtgcatgtccctccccaacagctccattctt

SEQ ID NO: 26223 - DNA, 2190 bp, Homo sapiens
  SIMILAR (1083)..(805): 641254mologous to Homo sapiens Human secreted protein, SEQ ID NO: 8061,accession number G03980,Smith-Waterman Score=314.
gtcgacatcatcatcatgatcgctcgacatcgaatacgactttttttttttttttttttttttttttttttttttgttggaatcatttttaatatttaaatacaaaaagtgagcactgacttctcttttttttaaacacacacacaggtctaacagccaaaatgtgcagaggaaatgagctcctgctgtcttccatagtccccattctgtggctcgaagctgcagcctgcctccctcctcttataccatggggattaataggggccactttacactacaggtgtaatgcattttgtctgtttcacattgtgtgcatgtcctgccccaacaactccattcttttaaaaaaaaaaaaaaaaaaacagtcgttaatggtcaggggcacatccctcccactgggcatcggttcctaccccacaaggggaaaagtgagatcttccagtttaggagcaatttgggtgaaaaggaggtccgggtgacccagagcatggaataacccgtctgcatggctggactctgggtatcagagtggagacagaagtaaggatagtgtggagggcacagttgcaaagttgaagtctttcccatgagacaaatgtggggataattctcccccacccaggtttagatagatcaatgtgcccaaagttaaaaaaaaaaaaaatcccaaattatcagcagttcaaacacttgaatttcaaacttatcccactgagacagctcaaacagcaataacaatctagatctttcccaggaagtgaaggaagagcccccttgcattcttcctgagagccctgtgttaggccctagaagtatctgctgctgctgcagttgctgctgttgctcggtttgcatcttctcagtctcaaagacaacgggaagaaccaggatcataaaggaagtggtcccaatccacacggctgccctgggaaaccggaccctcttcggaaacatctccatcaggccccatagtctctccgaccaggtctcatctagcttctcctcgtcgtcctcctccaactcctccttagtcttctccacgtcgccttttgggagcaattcctccggggataggggttcccccgttgaatgaatgaagataggtccatgtgcaggattgtctctgatcaactcagcagcatcctcactccgtctacttagggcaatcatctggaacttcttttccaagaatctctttccagtatagttctgggtcagttctccaagcgtccggggagagcagaagggctgacgactgagttgataaccaatggccaacgatgttacccatgaacgtacccatcccactatcaggtaagtcttccgcaagatgactgtagcccatcctgtcacactctcacaagcctgtagggcttgtgcctgctgaatagaccgcttggctgccaggaaggcggtctcagccacatcagcccaatcccggatagctcccattgtggtgggccggggacatgcctgaattttgtcaatgatggcttctggtatggcctttgtcttacctgaccagataactcccaagaatctggcagataatccaggaccttggaccttggattcgttgacggcccaaccacatgctgctaaatgttgccgcaagagggacgccactgcttctaaatctgtcggggttgtggcaggacccgaggctggtgatgcatatgtccatgcagcactggcttcatcacgtgcacctggagtctgaattccccagccatggtttgtaacaccaggccatgtaaaagtacacccccagaatgtattctgcttgcctaattcccgcaactcagttgcggtacaggcaatatatgaagtgtgttgtgttatagtgggcaatccctgagcccgcccttggggtcccaacagctgttcatgatctaccttctgacggaccactgggcgaccctgcaacaggggttcttcctcctcggtatcagactgagtggggagtctccggctgtactgcacctcagggactgggtgtgtacttttttgtagcacagtcaaagagccccatctgactctgccggcaaaggctccctccttctcagtgctgtgtgcttccagttgctccagcaccttctccatgcttgcaggagacccatctaccaccacccaggtatccaccggagcccatccaagcagcacagctgccaatgggtaccaccaacccat

SEQ ID NO: 26224 - DNA, 657 bp, Homo sapiens
  SIMILAR (287)..(517): 361254mologous to Bombyx mori chorion protein,accession number X66163,Smith-Waterman Score=78.
tcagggcagcaggatggagagcgaggttataattttaatgagggtggtgattagggatgtgcttgcggataaggtaacatttgagtcaggacttgaaggaggtgagggatccccagtgtggggatctgaggactccatgctccaggcagaggaaccagcacctgcaaagactcttggcaggagggttaggacatgttgaggaccaaggagactgtcctttgttacaggccataaagcatacaggggcctcggtattgtctctgggcccactgttcctcttgtctgcgcggtctgctgctcatactgggaccccggtgtccctcgtgtcgtgcgcctggttgttcgtctgtggccgctgtgccgctgcggtggtcggtctggtgatgcctctgttgccgcggccccgctcgtgtgtggcggcgggatatgagactgggaccactgccccttcgtgtgtgggccgtcgttgtgtgccctgcgtccctcgtgcggctgcggttctggcatggcgtgtcgtgtggtgttgttgctgcggtgtcccctcgcaatgtttgcctttacttcattcttctctgttacagaagtggggaaattttctcccttccccctacccgaattctttttctccggtttcgccttagatttgtcccttcccat

SEQ ID NO: 26225 - DNA, 404 bp, Homo sapiens
  SIMILAR (265)..(372): 881254mologous to Homo sapiens calpastatin,accession number U31345,Smith-Waterman Score=151.
  misc_feature (1)...(404): n = a,t,c or g
gagaagaaggcagcaggggccacttcaagcttccctgcttcctaagcttaggttgtcagaagcctttttagagatacatttttagaaaaagaaaaatagtgtggtaacagtttactacttgcttcnnnnnnnnnngttggtttaaagtattttatagtaatattactatagctttatgtctagcttaccaaataaggggtgaagtgtgccccaaaaaacgctgttactgtaaaaacgtgtcttagccccaatttccactcattggatacaatgagggatcaagcactcgaggctctgtcggtttcactgggcacccggcaagcagaacctgagctcgacctccgttcaattaaggaagtcaatgaggataaagatggaaaaccactattgccagagcctgaaga

SEQ ID NO: 26226 - DNA, 3165 bp, Homo sapiens
  SIMILAR (103)..(2127): 991254mologous to Homo sapiens adipocyte-derived leucine aminopeptidase,accession number AF106037,Smith-Waterman Score=3526.
gaaaagtggatcagccacatcttggcaaaactcacaatttcagttttgctttgtctcatccgtgttatcaatccacatatgccaaatgtggatttacagtgtattgtaaactttaaaatggtgaaatctgtgactgttgctgaaggactcatagaagaccattttgatgtcactgtgaagatgagcacctatctggtggccttcatcatttcagattttgagtctgtcagcaagataaccaagagtggagtcaaggtttctgtttatgctgtgccagacaagataaatcaagcagattatgcactggatgctgcggtgactcttctagaattttatgaggattatttcagcataccgtatcccctacccaaacaagatcttgctgctattcccgactttcagtctggtgctatggaaaactggggactgacaacatatagagaatctgctctgttgtttgatgcagaaaagtcttctgcatcaagtaagcttggcatcacaatgactgtggcccatgaactggctcaccagtggtttgggaacctggtcactatggaatggtggaatgatctttggctaaatgaaggatttgccaaatttatggagtttgtgtctgtcagtgtgacccatcctgaactgaaagttggagattatttctttggcaaatgttttgacgcaatggaggtagatgctttaaattcctcacaccctgtgtctacacctgtggaaaatcctgctcagatccgggagatgtttgatgatgtttcttatgataagggagcttgtattctgaatatgctaagggagtatcttagtgctgacgcatttaaaagtggtattgtacagtatctccagaagcatagctataaaaatacaaaaaacgaggacctgtgggatagtatggcaagtatttgccctacagatggtgtaaaagggatggatggcttttgctctagaagtcaacattcatcttcatcctcacattggcatcaggaaggggtggatgtgaaaaccatgatgaacacttggacactgcagaagggttttcccctaataaccatcacagtgagggggaggaatgtacacatgaagcaagagcactacatgaagggctctgacggcgccccggacactgggtacctgtggcatgttccattgacattcatcaccagcaaatccgacatggtccatcgatttttgctaaaaacaaaaacagatgtgctcatcctcccagaagaggtggaatggatcaaatttaatgtgggcatgaatggctattacattgtgcattacgaggatgatggatgggactctttgactggccttttaaaaggaacacacacagcagtcagcagtaatgatcgggcgagtctcattaacaatgcatttcagctcgtcagcattgggaagctgtccattgaaaaggccttggatttatccctgtacttgaaacatgaaactgaaattatgcccgtgtttcaaggtttgaatgagctgattcctatgtataagttaatggagaaaagagatatgaatgaagtggaaactcaattcaaggccttcctcatcaggctgctaagggacctcattgataagcagacatggacagacgagggctcagtctcagagcgaatgctgcggagtcaactactactcctcgcctgtgtgcacaactatcagccgtgcgtacagagggcagaaggctatttcagaaagtggaaggaatccaatggaaacttgagcctgcctgtcgacgtgaccttggcagtgtttgctgtgggggcccagagcacagaaggctgggattttctttatagtaaatatcagttttctttgtccagtactgagaaaagccaaattgaatttgccctctgcagaacccaaaataaggaaaagcttcaatggctactagatgaaagctttaagggagataaaataaaaactcaggagtttccacaaattcttacactcattggcaggaacccagtaggatacccactggcctggcaatttctgaggaaaaactggaacaaacttgtacaaaagtttgaacttggctcatcttccatagcccacatggtaatgggtacaacaaatcaattctccacaagaacacggcttgaagaggaaataaagatgaaattaaatatcaaaattctaatcgatgatatcagtggggtccgcagaccgtgggggtgcaaacgggccccgcttgagagctatcgcatagcggctgtaaaaacagaacctgagaagaagtcacagtcaaccaagccaaaaagcctacccaagcaggcatcagatacaggaagtaacgatgctcacaataaaaaagcagtttccagatcagctgaacagcagccatcagagaaatcaacagaaccaaagactaaaccacaagacatgatttctgctggtggagagagtgttgctggtatcactgcaatatctggcaagccgggtgacaagaaaaaagaaaagaaatcattaaccccagctgtgccagttgaatctaaaccggataaaccatcgggaaagtcaggcatggatgctgctttggatgacttaatagatactttaggaggacctgaagaaactgaagaagaaaatacaacgtatactggaccagaagtttcagatccaatgagttccacctacatagaggaattgggtaaaagagaagtcacaattcctccaaaatatagggaactattggctaaacccatagggccagatgatgctatagacgccttgtcatctgacttcacctgtgggtcgcctacagctgctggaaagaaaactgaaaaagaggaatctacagaagttttaaaagctcagtcagcagggacagtcagaagtgctgctccaccccaagagaagaaaagaaaggtggagaaggatacaatgagtgatcaagcactcgaggctctgtcggcttcactgggcacccggcaagcagaacctgagctcgacctccgctcaattaaggaagtcgatgagatgggccagtttctatcttcgactttcttggagggctcaccggccacagtgtggcacgataagctttgtgacggtgaacgcagaggagcaagagaagcagttcgtatcttccaggaccaagtaatgtattgggaagaagggaaacttgattacaacacaatgtga

SEQ ID NO: 26227 - DNA, 394 bp, Homo sapiens
  SIMILAR (281)..(379): 691254mologous to Homo sapiens calpastatin,accession number M28230,Smith-Waterman Score=92.
  misc_feature (1)...(394): n = a,t,c or g
cagcatgtgccttcagagaagaaggcagcaggggccacttcaaagcttccctgcttcctaagcttaggttgtcagaagcctttttagagatacatttttagaaaaagaaaaatagtgtggtaacagtttactacttgcttcttttttttttgtttgtttagagtattttatagtaatattactatagctttatgtctagcttaccaaataaggggtgaagtgtgccccagagaacgctgttactgtagaaacgtgtcttagccccaatttccactcattggatacaatgagtgatcaagcactcgaggctctgtcggcttcactgggcacccgggcaagcagaacctgagctcgacctccgctncaattaagggtagtcgntgtagggntaaag

SEQ ID NO: 26228 - DNA, 1637 bp, Homo sapiens
  SIMILAR (1)..(135): 971254mologous to Homo sapiens calpastatin,accession number U26724,Smith-Waterman Score=230.
  misc_feature (1)...(1637): n = a,t,c or g
atggatgctgctttggatgacttaatagatactttaggaggacctgaagaaactgaagaagaaaatacaacgtatactggaccagaagtttcagatccaatgagttccacctacatagaggaattgggtaaaaagagaagtccacaattcctccnaaaaatatagggaactattggctaaacccatagggccagatgatgctatagacgccttgtcatctgacttcacctgtgggtcgcctacagctgctggaaagaaaactgaaaaagaggaatctacagaagttttaaaagctcagtcagcagggacagtcagcaagtgctgctccaccccaagagaagaaaagaaaggtggagaaggatacaatgagtgatcaagcactcgaggctctgtcggcttcactgggcacccggcaagcagaacctgagctcgacctccgctcaattaaggaagtcgatgaggcaaaagctaaagaagaaaaactagagaagtgtggtgaggatgatgaaacaatcccatctgagtacagattaaaaccagccacggataaagatggaaaaccactattgccagagcctgaagaaaaacccaagcctcggagtgaatcagaactcattgatgaactttcagaagattttgaccggtctgaatgtaaagagaaaccatctaagccaactgaaaagacagaagaatctaaggctgctgctccagctcctgtgtcggaggctgtgtctcggacctccatgtgtagtatacagtcagcaccccctgagccggctaccttgaagggcacagtgccagatgatgctgtagaagccttggctgatagcctggggaaaaaggaagcagatccagaagatggaaaacctgtgatggataaagtcaaggagaaggccaaagaagaagacctggaaaagcttggtgaaaaagaagaaacaattcctcctgattatagattagaagagggcaaggagaaagatggaaagccactcctgccaaaagagtctaaggaacagcttccacccatgagtgaagacttccttctggatgctttgtctgaggacttctctggtccacaaaatgcttcatctcttaaatttgaagatgctaaacttgctgctgccatctctgaagtgctttcccaaaccccagcttcaacgacccaagctggagccccaccccgtgatacctcgcagagtgacaaagacctcgatgatgccttggataaactctctgacagtctaggacaaaggcagcctgacccagatgagaacaaaccaatggaagataaagtaaaggaaaaagctaaagctgaacatcgagacaagcttggagaaagagatgacactatcccacctgaatacagacatctcctggatgataatggacaggacaaaccagtgaagccacctacaaagaaatcagaggattcaaagaaacctgcagatgaccaagaccccattgatgctctctcaggagatctggacagctgtccctccactacagaaacctcacagaacacagcaaaggataagtgcaagaaggctgcttccagctccaaagcacctaagaatggaggtaaagcgaaggattcagcaaagacaacagaggaaacttccaagccaaaagatgactaa

SEQ ID NO: 26229 - DNA, 774 bp, Homo sapiens
  SIMILAR (398)..(502): 771254mologous to Homo sapiens calpastatin,accession number M33328,Smith-Waterman Score=132.
tcagtgcatcggactggcagctttaatgaacttgtacatttgttcagtatgtaatgcctgtagacttgttgaaactgtgcttcttgcctgaatgtgcttttcatctttccaaccgtcttccttctgtgcttctatgcatatcttgggtccaaatttcccctttttataaggacgcgcatcatattggagtaggcccaccctaatgacctcacctttacttgattctataaggaacctatctaaaatcaggtctcgttttgaggtactggggttaagacttgaacatatagtctcatttggtaccatgggaattggaaaagtgcattcttcatttgctagggttatgatccattcttccacttgagtgcttgccgtaagttacccatcactgtgcctgcttctttagaaacccatagggccagaagatgctatatacgccttgtcatctgacttcacctgtgggtcgcctacagctgctggaagaaaacaaataaggggtgaagtgtgccccagagaacgctgttctgtagaaacgtgtcttagccccaatttccactcattggtaagttcttttcctttctctcttttgcaaggtttcaaataaaattgcctttctccatcagctaggctgggggtgctggcaggcattgctgtcacaatgccccatctctgcttcacttcctgttctgagtcatcagggaaggggagtctccctgacttccacaacaatccttgagtctgggactgccctggcctaagatgggccagtttcat

SEQ ID NO: 26230 - DNA, 2495 bp, Homo sapiens
  SIMILAR (908)..(1363): 991254mologous to Homo sapiens calpastatin,accession number D16217,Smith-Waterman Score=762.
acattggtaaggtgttttcccccattgaaactaatattttctattttcaagaaaaaagcagcaagcctcggcagcagtcaatcctccagaacctatgctggtggaacagcctcggccaccaaggtgtcagcttcctctggtgcaaccagcaagtcttccagtatgaatcccacagaaaccaaggccattccagtcagccaacagatggaaggaccacatcttcctaacaagaaaaaacacaaaaaacaggctgtaaaaacagaacctgagaagaagtcacagtcaaccaagctgtctgtggttcatgagaaaaaatcccaagaaggaaagccaaaagaacacacagagccaaaaagcctacccaagcaggcatcagatacaggaagtaacgatgctcacaataaaaaagcagtttccagatcagctgaacagcagccatcagagaaatcaacagaaccaaagactaaaccacaagacatgatttctgctggtggagagagtgttgctggtatcactgcaatatctggcaagccgggtgacaagaaaaaagaaaagaaatcattaaccccagctgtgccagttgaatctaaaccggataaaccatcgggaaagtcaggcatggatgctgctttggatgacttaatagatactttaggaggacctgaagaaactgaagaagaaaatacaacgtatactggaccagaagtttcagatccaatgagttccacctacatagaggaattgggtaaaagagaagtcacaattcctccaaaatatagggaactattggctaaaaaggaagggatcacagggcctcctgcagactcttcaaaacccatagggccagatgatgctatagacgccttgtcatctgacttcacctgtgggtcgcctacagctgctggaaagaaaaactgaaaaagaggaatctacagaagttttaaaagctcagtcagcagggacagtcagaagtgctgctccaccccaagagaagaaaagaaaggtggagaaggatacaatgagtgatcaagcactcgaggctctgtcggcttcactgggcacccggcaagcagaacctgagctcgacctccgctcaattaaggaagtcgatgaggcaaaagctaaagaagaaaaactagagaagtgtggtgaggatgatgaaacaatcccatctgagtacagattaaaaccagccacggataaagatggaaaaccactattgccagagcctgaagaaaaacccaagcctcggagtgaatcagaactcattgatgaactttcagaagattttgaccggtctgaatgtaaagagaaaccatctaagccaactgaaaagacagaagaatctaaggccgctgctccaggctcctgtgtcggaggctgtgtctcggacctccatgtgtagtatacagtcagcaccccctgagccggctaccttgaagggcacagtgccagatgatgctgtagaagccttggctgatagcctggggaaaaaggaagcagatccagaagatggaaaacctgtgatggataaagtcaaggagaaggccaaagaagaagaccgtgaaaagcttggtgaaaaagaagaaacaattcctcctgattatagattagaagaggtcaaggataaagatggaaagccactcctgccaaaagagtctaaggaacagcttccacccatgagtgaagacttccttctggatgctttgtctgaggacttctctggtccacaaaatgcttcatctcttaaatttgaagatgctaaacttgctgctgccatctctgaagtggtttcccaaaccccagcttcaacgacccaagctggagccccaccccgtgatacctcgcagagtgacaaagacctcgatgatgccttggataaactctctgacagtctaggacaaaggcagcctgacccagatgagaacaaaccaatgggagataaagtaaaggaaaaagctaaagctgaacatagagacaagcttggagaaagagatgacactatcccacctgaatacagacatctcctggatgataatggacaggacaaaccagtgaagccacctacaaagaaatcagaggattcaaagaaacctgcagatgaccaagaccccattgatgctctctcaggagatctggacagctgtccctccactacagaaacctcacagaacacagcaaaggataagtgcaagaaggctgcttccagctccaaagcacctaagaatggaggtaaagcgaaggattcagcaaagacaacagaggaaacttccaagccaaaagatgactaaagaaatacaagttaaggtatctggtatctgcatgtaaaatcttcagctggtggatggtgacttttgaagaacaaaaggctttggcaacagaaaacaattgttctgggtgatttctagaatggtttttgttgagtctctgaacatcctaaatattggtttgttattctttccagaaagaaaatgaatttgactggttcggaattc

SEQ ID NO: 26231 - DNA, 2337 bp, Homo sapiens
  SIMILAR (209)..(571): 911254mologous to Homo sapiens calpastatin,accession number AF327443,Smith-Waterman Score=536.
atcactgcaatatctggcaagccgggtgacaagaaaaaagaaaagaaatcattaaccccagctgtgcccagttgaatcctaaaccggataaaccatcgggaaagtcaggcatggatgcctgctttggatgacttaatagatactttaggaggacctgaagaaactgaagaagaaaatacaacgtatactggaccagaagtttcagattccaatgagttccacctaccatagaggaattgggtaaaagaggaagtcacaattcctcccaaaatatagggaactattggctaaacccatagggccagatgatgctatagacgccttgtcatctgacttcacctgtgggtcgcctacagctgctggaaagaaaactgaaaaagaggaatctacagaagttttaaaagctcagtcagcagggacagtcagaagtgctgctccaccccaagagaagaaaagaaaggtggagaaggatacaatgagtgatcaagcactcgaggctctgtcggcttcactgggcacccggcaagcagaacctgagctcgacctccgctcaattaaggaagtcgatgaggggagtctccctgacttccagcaacaatccttgagtctgggactgccctggcctaagatgggccagtttctatcttcgactttcttggagggctcaccggccacacagaggaagtgataagctttgtgacggtgaacgcagaggagcaagagaagcagttcgtatcttccaggaccaagcaaaagctaaagaagaaaaactagagaagtgtggtgaggatgatgaaacaatcccatctgagtacagattaaaaccagccacggataaagatggaaaaccactattgccagagcctgaagaaaaacccaagcctcggagtgaatcagaactcattgatgaactttcagaagattttgaccggtctgaatgtaaagagaaaccatctaagccaactgaaaagacagaagaatctaaggccgctgctccagctcctgtgtcggaggctgtgtctcggacctccatgtgtagtatacagtcagcaccccctgagccggctaccttgaagggcacagtgccagacgatgctgtagaagccttggctgatagcctggggaaaaaggaagcagatccagaagatggaaaacctgtgatggataaagtcaaggagaaggccaaagaagaagaccgtgaaaagcttggtgaaaaagaagaaacaattcctcctgattatagattagaagaggtcaaggataatgatggaaagccactcctgccaaaagagtctaaggaacagcttccacccatgagtgaagacttccttctggatgctttgtctgaggacttctctggtccacaaaatgcttcatctcttaaatttgaagatgctaaacttgctgctgccatctctgaagtggtttcccaaaccccagcttcaacgacccaagctggagccccaccccgtgatacctcgagtgacaaagacctcgatgatgccttggataaactctctgacagtctagaacaaaggcagcctgacccagatgagaacaaaccaatggaagataaagtaaaggaaaaagctaaagctgaacatagagacaagcttggagagagagatgacactatcccacctgaatacagacatctcctggatgataatggacaggacaaaccagtgaagccacctacaaagaaatcagaggattcaaagaaacctgcagatgaccaagaccccattgatgctctctcaggagatctggacagctgtccctccactacagaaacctcacagaacacagcaaaggataagtgcaagaaggctgcttccagctccaaagcacctaagaatggaggtaaagcgaaggattcagcaaagacaacagaggaaacttccaagccaaaagatgactaaagaaatacaagttaaggtatctggtatctgcatgtaaaatcttcagctggtggatggtgacttttgaagaacaaaaggctttggcaacagaaaacaattgttctgggtgatttctagaatggtttttgttgagtctctgaacatcctaaatattggtttgttattcttttccagaaagaaaatgaatttgactggttcacctgtgtactgagtattgataaactttgaatttttttaattgccttcaattgggagagaaagctttatatttgtgtgaggacttctgcatcttacagtcagcacagaacacactgagacttgaatcaagtcagcaacagagcaaaataaaggttagataagtccttgtgtagcaaatttcgagcataagaaataaaatctaattaattcttagggt

SEQ ID NO: 26232 - DNA, 384 bp, Homo sapiens
cccaacccttgactcaacggggacaactccagaaggtcattccagatccagagatccccatcgaactgaaggatcactgggttgcagacacattgcaggtcagcttcttcctctgcccagtcctgccctcactccccagtgaatcctcaattttctgtctcgttgtctgtccagataattgattctaagacatgttaggtatataaggagtgtagataaggcttcagccatgagtcaccccccagtaagccccagagtatattgaatagaaattctgcatgtgtggggagaatggacaaggacttaggaaaaagtcctcatcaaagaacagcttttttgggacaagctttacatgggtggggagggaaaatgtgaaacacatta

SEQ ID NO: 26233 - DNA, 2349 bp, Homo sapiens
  SIMILAR (304)..(1674): 571254mologous to Homo sapiens PR-domain containing protein 9,accession number AF275816,Smith-Waterman Score=1384.
aatgtagagactatgaagaaattgacccaaaatcataaagcgaaaggtgagaattgttgagggagccggagggatgaagaggaagccaaggctccaggttcacctgaaaatgcttcagacattttttttttttcctgaagtgctggctcattttccagagaatagacatatattctcaggaatctatacaaagaagtgatgctggagaattacaggaatcttctctcattgggtaaggctgtgttctttcctttccttcattaattcagtagagatttactgatcacctaatatgtaccacaaagtcagcagttcctcagtcaacatgtacttcagatcttcctgggcttatgtgcagaaaatcacttccatccagggaattctagcccagggcattggaaacagcaggggcagcagtattcccatgtaagctgttggtttgaaaatgcagaaggtcaggagagaggaggtggctccaaaccctggtctgcaaggacagaggagagagaaacctcaagggcattccccagcccactccaaagacagtcagcaagtcctagaaaaggcaacatggtggtagaaacagagcccagctcagcccaaagaccaaaccctgtgcagctagacaaaggcttgaaggaattagaaaccttgagatttggagcaatcaactgtagagagtatgaaccggaccataacctggaatcaaactttattacaaacccgaggaccctcttagggaagaagccctacatttgcagtgattgtgggcgaagctttaaagatagatcaaccctcatcagacaccatcgtatacactcgatggagaagccttatgtgtgcagtgagtgcgggcgaggttttagccagaagtccaacctcagcagacaccagagaacacattcagaagagaagccttatttgtgcagggagtgtgggcaaagctttagaagtaagtccatcctcaatagacatcagtggactcactcagaggagaagccctatgtttgcagcgagtgtgggcgaggctttagcgagaagtcatccttcatcagacaccagaggacacactccggtgagaaaccctatgtgtgcctggagtgtggacgaagcttttgtgataagtcaaccctcagaaaacaccagaggatacactcaggggagaagccttatgtttgcagggagtgtgggcgaggctttagccagaactcagatctcatcaaacaccagaggacacacttggatgagaagccttatgtttgcagggagtgtgggcgaggcttttgtgacaagtcaaccctcatcatacacgagcggacgcactctggagagaagccttatgtgtgtggtgagtgtggccgaggctttagtcggaaatcactcctccttgtccaccagaggacacactcaggggagaagcattatgtctgcagggagtgtaggcgaggttttagccagaagtcaaatctcatcagacaccagaggacgcactcaaatgagaagccttatatttgcagggaatgtgggcgaggcttttgtgacaagtcaaccctcattgtacatgagaggacacactcaggagagaagccttacgtgtgcagtgagtgtggccgaggctttagccggaaatcactcctccttgtccaccagaggacacactcaggggagaagccccagatgaccttttcaggggtaacaccccagctgcttgagagaacagtgttgctgctggcagagatgcattccagagatgcactccgctctggaactcactctcagccacagggagctgcatgcaccacaggggcaatgcacctttgcaggggtaccttctggccccaacccttgactcaacggggacaactccagaaggtcattccagatccagagatccccatcgaactgaaggatcactgggttgcagacacattgcaggtcagcttcttcctctgcccagtcctgccctcactccccagtgaatcctcaattttctgtctcgttgtctgtagcatcaattacgcagtggctcctcagtcaggtctgatgagggaaaaggatgtgcatgtctgggagtgtgggcccccaccctttgccagaactgcccctataacaccaacttctgatcagaattggaggccactgagggaaaagtatatgcaggcatataatctctagggttttgaagagggaaggggtaggccctccccattccggacaatccccagaagaaagagagatgcaaattctccactccaggactatggctttggtgcctaagaaggaagagttcagtttttgtgtagagcttatttccaacatgagatgggtgttcaaatgcctgcagcatcc

SEQ ID NO: 26234 - DNA, 1173 bp, Homo sapiens
  SIMILAR (509)..(736): 271254mologous to Pseudomonas putida ferredoxine,accession number X80765,Smith-Waterman Score=83.
atgtccctacaaatcaccaaagatcttgttaagatgcagattccaattcaactggattggggcggtgcctcagagtctgcatttctaaccaactccagcaagcttgatgctgctgccagtccatggaccaccctgcagacagcaaaggcacaggagatgatgtggaagaaatttggacacacacagacaccggtgcacgcacgcacagaggaaagagcgtgtgaggacacggcagagagatgtcatccacaagcctctgagggaaggaagccctcgggagaatcccatcctgcccgcaccttgaccttggaatgcaccctcagaaacaaagatgttaacactcaggaagttggaggagtggtatttgagaatgctgtatcatttttacaactttgctgcgaaactctaaaactactgcaaaataaaaagttgaaacactttctgtttgacagccatgaagatcctctgcatgtggttttccaggtggcacagccggtgggtcggcatgcagggcccctcctgctgacctcagaggactttgtggatggccactctgtccagcactggcaggtcttgcgtccctgcggcatgtacacccgctccctgcggtcgaatctcagcagcaggcaggctgcgctgctctcagctccttcctcatgctcctgcgccagcggcttgctgcagctgcccctctgtacacatctcctttcagcccctctgacagttgagaacttccctctggactgtgcagatgaaaagccaggtaacacaaacacaagtgggcagccattcttctacttcccaggccagagctctgcagggccaccagcaagtgcagaagccagggtcaagaatcaggacaggaggagtgaagcctcaactcgagggacctggcagatggctgaaaatcaggttagagggacacagctggacatgcagacaataacactcaggaaagagggaggagaaaaagggtggaaacttcctggaagacatggagttctccaagggtactttggtctagcccatagacagagaggagttatgaagcagattggtcctcattccaacagggaccctacaaatgctcccacaaccagctcaaggcaacagcacagtcacttttttaaagtacagagaataaacagcgagactcgagataaaaactactag

SEQ ID NO: 26235 - DNA, 4514 bp, Homo sapiens
  SIMILAR (39)..(2117): 991254mologous to Homo sapiens dJ398G3.1 (ortholog of rat CPG2),accession number AL049548,Smith-Waterman Score=3475.
cttttatgaatgtcaagctattaattcaagacttggaggatattgagcagagggtgcctgtgatggatgcccaatacaagataattacaaagacagcacacctcattaccaaagaaagcccccaagaagaaggaaaagaaatgtttgcgaccatgtcaaagctcaaagagcagctaaccaaggtcaaagaatgttactccccactcctttatgagtctcagcagctgttgattccgttggaggaattagaaaagcagatgacgtccttttatgacttacttgggaaaatcattgaaattattaatgctattgagcgtgaggcacaatcgagtgccctttttaaacaaaaacatcaggaactgttagcttgtcaagaaaactgtaagaaaaccttgacacttattgagaaaggcagtcaaagtgttcaaaagtttgtgaccttgagcaacgtgttaaagcattttgatcagacgaggctacaaagacagattgcagatattcatgttgcttttcagagtatggtaaagaaaactggagattggaagaagcatgtggaaaccaacagtcgcttgatgaagaagtttgaggagtctcgagcagagttggagaaggtactgcggattgctcaggagggcctggaggaaaagggggatccagaggagctcctgcggagacacactgagtttttcagtcagctggatcagagggtgctcaatgctttcctgaaagcttgtgatgaactcaccgacatccttccagagcaggagcagcaggggctgcaggaagctgttcgaaagctccacaaacaatggaaggatcttcaaggagaagccccttatcatttgcttcatctgaagattgatgtggagaagaataggttcttagcctctgtagaagaatgcagaactgagctggatcgagagaccaagctgatgccccaggaaggcagtgaaaagataattaaagagcacagggttttcttcagtgacaaaggtcctcatcatctctgtgagaaaaggttacagctcatcgaggaactctgtgtgaaactcccagtgcgggacccagtaagggacacacctggaacctgtcacgtgactctcaaagagctcagagctgccattgacagcacctacaggaagctcatggaagacccagacaagtggaaggactacactagcagattctctgagttctcatcttggatatctacaaatgagacacaattaaaggggatcaagggtgaggccatcgatactgccaaccacggagaggttaaacgtgccgttgaagagatcagaaatggtgttaccaaaaggggtgagaccctcagctggctgaaatccaggctgaaagttttgacagaagtttcttctgagaatgaagcccaaaagcagggagatgagctggcaaaattatccagctctttcaaggctcttgtgacgctgctgtcagaggttgaaaagatgctaagcaattttggggactgtgtccagtacaaagaaatagtcaaaaattctctcgaagaattaatttctggctctaaagaagtccaggaacaagctgagaagatcttggatactgaaaatctgtttgaagcacagcagttacttcttcatcaccagcaaaagacaaagcggatctcagcaaagaagagagatgtgcagcagcagatcgcgcaggcgcagcagggagaaggggggctgcctgaccgaggccacgaggagctgcggaagctggagagcacactggatggcctggagcgcagccgggagaggcaggaacgccgcatccaggtcacattaagaaaatgggagcgatttgaaacaaacaaagaaacagtagtaagatacctttttcaaacaggttccagtcatgaacgcttcttgagttttagcagtttggaaagtttatcttcagaactggaacaaacaaaggagttttctaaacggacagaaagtattgcagtccaggctgagaaccttgtaaaggaagcttcagagataccgcttgggccccaaaataagcagctgcttcaacagcaggccaagtcaatcaaagaacaagtcaaaaaattagaagacacgcttgaagaagagtatgtgattgacaagtcctaaactttcttctctgagataaagtttcatacaatctttcctgtaccttgtattcaaaacactcttttaaaatctcaaagtgtctgtgtatttcagcatgttttgaggaaacaactcacagttcaaaagaaagtatcgctaatacagaaaccaatatctataacagagcccaaaaaatataaaggatgtgggttttgcatcttaaactgatcatgttcatgagaaagccatatctattctattctgtggcctttgtacattgtagagggaatcttgaaaaagaactaatatttaaaataatttttttactatattattctgctgtcaccatttagagcgaaaaggagatattttgttagtgtagattccaggcctaaatacacatcacatagaccatatatctccaacctgaagaagctcctggagcttgtttacagtgcctcggtattcaagttatcctgactaatatgctctttccagaaattaactttaaaatattttatttttaaacttttaatgtttgtttatctgaaaaaaaaaaactgcttggcctattgatatcctgttatatacccaaaatatacaaaaaagtttggaggggaaaaacatatgaggatacagccaatattattcaaaacaatatggctaaacatttctatttttaacataatttagtggcaaatcaatgatacataatagcatattattattaagggacaggccatcatttctaaggtgggttttaaaatgtaaaatgtgtttttaatactattaacagcttaaaattaacattttacatttgcctaaactttaaaatttgatacatattttatttaaaacaaattatgacttgaaattttgaggactttatattacattaaatattctctatcaagttatggaaatagtaaaacagagtttattagaaaggaatttacttctattaagaatagccattttaacctttatttaatttaaaaagttgcaatataacacagcttgcattacctgtactgctgacagcattaggcacattcagggtataaatttgagactgcaatattatttaatttgacagtcaatgatgccactctatttttcttgatgtcttcaagtgccttttggtaaacagggacattctttcactttttttttttttaacccaaggacttactagttcaattatatactgttagtttcttagtctttttctaaactgaaagccatagtcacctggttatacatgcatagctaatacaaattagaaatctatagttgaaattctgttcactagatttgttacaaataaaacctataagttgtctaaaagtagttagggtgctcatgtacaataatttataaatgtcttttggaatcaggaccataagacatttatgaaaatggctgaagtcacaaagattatacatcgcaggattagctctaataatagaaacagttcttgcccggcagcatgggattgagatcacgagctctgtcttgattgataagatgcagtttataaaggtatttctatagaaagcatcactgcagtgtctctcctttaagtgtaagaagaacatttctttggaaataggactattgaaaagctgtgtacactgaaatcttttctggcatagtttataaaaataagtcctggcaacaactggtcacatgcagagtttaattagattctacctggattcaaacccctttggacccagcaatgttttgttcaaagtgcagtttcactcaaagtgtagatactgcctcattaaatgttcattctcagagaagataggaaaacctgataaactactcagaacaactgtgcaattttttttttagcgtgaatagtttcaactttgaaatggtcacaaatgtcttcattatctcttcacctggtgatttcaaggaaaatgtgttgttgttctctattaaaatactgagttttatttacttaatttggttaattttagtattaaaaccatggaaatggtgaaaaccaagtgggatcattttggcagtaattttgagactctgtccgtctggataactgagaaagaaaaagaactcaatgccttggaaacttcgtcatctgccatggacatgcaaatcagccaaattaaggtgacctgctcacacattatatttataatccatgtctagcttttaagaactactttcttacatttcatcaaatgctgttcggtcccaggacaagactttcattgcaatgtgactattaaaattaaattcatacattttatcaagctaagaggtctggattaatactgggcaacatttatagttggaattatgtattcacattgtctgacttgtgcattcaaagttaatattgtgtgaaatatcattaaaatatttttatggttacattaa

SEQ ID NO: 26236 - DNA, 2256 bp, Homo sapiens
  SIMILAR (210)..(2234): 791254mologous to Homo sapiens dJ398G3.1 (ortholog of rat CPG2),accession number AL049548,Smith-Waterman Score=2583.
ggaatcgtcgaaagtttagtgtaagtattggattttatactgtgatggatgcccaatacaagataattacaaagacagcacacctcattaccaaagaaagcccccaagaagaaggaaaagaaatgtttgcgaccatgtcaaagctcaaagagcagctaaccaaggtgcgaaaataatttaatgcactcctttatgagtctcagcagctgttgattccgttggaggaattagaaaagcagatgacgtccttttatgactcacttgggaaaatcaatgaaattatcacagttcttgagcgtgaggcacaatcgagtgccctttttaaacaaaaacatcaggtgagaacaatccttttcaaatggtgtaattcaagccaaaaaatgaccctctgccttgtgctgggctcaatgatttccatgctgtctactgccaaaatcacaattgcaggctacaagtcagaggtggaggtgtctgtaagtcaccattgcatctaaaactgtaagaaaaccttgacacttattgagaaaggcagtcaaagtgttcaaaagtttgtgaccttgagcaacgtgttaaagcattttgatcagacgaggctacaaagacagattgcagatattcatgttgcttttcaggtaatttgctctccctgctgagattggaagaagcatgtggaaaccaacagtcgcttgatgaagaagtttgaggagtctcgagcagagttggagaaggtactgcggattgctcaggagggcctggaggaaaagggggatccagaggagctcctgcggagacacactgtgagtccaccctttagggatcagagggtgctcaatgctttcctgaaagcttgtgatgaactcaccgacatccttccagagcaggagcagcaggggctgcaggaagctgttcgaaagctccacaaacaatggaaggtgagtcaggacaggacggcttatcatttgcttcatctgaagattgatgtggagaagaataggttcttagcctctgtagaagaatgcagaactgagctggatcgagagaccaagctgatgccccaggaaggcagtgaaaagataattaaagagcacagggtacgtctcccacaccacagtcctcatcatctctgtgagaaaaggttacagctcatcgaggaactctgtgtgaaactcccagtgcgggacccagtaagggacacacctggaacctgtcacgtgactctcaaagagctcagagctgccattgacagcacctacaggaagctcatggaagacccagacaagtggaaggactacactagcaggtagcctcagaatggcctctggatatctacaaatgagacacaattaaaggggatcaagggtgaggccatcgatactgccaaccacggagaggttaaacgtgccgttgaagtaagttcagggtcattatccaaaaggggtgagaccctcagctggctgaaatccaggctgaaagttttgacagaagtttcttctgagaatgaagcccaaaagcagggagatgagctggcaaaattatccagctctttcaaggctcttgtgacgctgctgtcagaggtacagcatttactcacacattttggggactgtgtccagtacaaagaaatagtcaaaaattctctcgaagaattaatttctggctctaaagaagtccaggaacaagctgagaagatcttggatactgaaaatctgtttgaagcacagcagttacttcttcatcaccaggtaaaaatgcctctttcttcagcaaagaagagagatgtgcagcagcagatcgcgcaggcgcagcagggagaaggggggctgcctgaccgaggccacgaggagctgcggaagctggagagcacactggatggcctggagcgcagccgggagaggcaggaacgccgcatccaggtaggagccggaagttaggagcgatttgaaacaaacaaagaaacagtagtaagatacctttttcaaacaggttccagtcatgaacgcttcttgagttttagcagtttggaaagtttatcttcagaactggaacaaacaaaggtatattatggctccttggaaagtattgcagtccaggctgagaaccttgtaaaggaagcttcagagataccgcttgggccccaaaataagcagctgcttcaacagcaggccaagtcaatcaaagaacaagtcaaaaaattagaagacacgcttgaagaagagtatgtgattgacaagtcctaaactttcttctctgagataa

SEQ ID NO: 26237 - DNA, 586 bp, Homo sapiens
  SIMILAR (1)..(192): 791254mologous to Mus musculus testis-specific phosphoglycerate kinase,accession number M17299,Smith-Waterman Score=277.
  misc_feature (1)...(586): n = a,t,c or g
ggcacttctctgtttgatgaagagggagccaagattgtcaaagacctaatgtccaaagctgagaagaatggtgtgaagattaccttgcctgttgactttgtcactgctgacaantttgatgagaatgccaagactggccaagccactgtggnttctggcatacctgctggctggatgggcttggactgtggtctgaaagcagcaagaagtatgctgaggctgtcactcgggctaagcagattgtgtggaatggtcctgtgggggtatttgaatgggaagcttttgcccggggaaccaaagctctcatggatgaggtggtgaaagccacttctaggggctgcatcaccatcataggtaagcggtcctatacaaagctaatacccatataagctggcagaattctgatcagaggaaggtggaatggagaacttcttctatgtctctttattctgggtaaatgttaagaggtaaacaggtaggtaatttacagaggagcctcttggtaagatagagttgggggtttatcagctaccttttgggttggggagcacactgccttacagttttggtgccaatcccttttttt

SEQ ID NO: 26238 - DNA, 2253 bp, Homo sapiens
  SIMILAR (1128)..(2174): 601254mologous to Homo sapiens coding sequence,accession number V00572,Smith-Waterman Score=877.
ctgcagattcgaggcccatatccagtgcccttgacaggcatctcttgtcagctgtggtgtgcagtgtcctgtgcaattcaacagatggtcttcctttgatttccataggttttgcacccaccctgggcctctacaatcagcaggtggcaaagcaagtgaggcctgtattctttccttcagggcagcaaggttcctcaggccccagttgggtctggaagttgctctactacccccctgtggctgttctggtacctaagcccccttacttttctttctgcttttctcaagcagaaggaatttttcctggtaaccaaaggaatgtatattttacagtcatggaggcaaagaagtccaagattgacaagctacatctggtgagggccttcttgcaggcaggaactccctgaagagttccaaggtggcacagggcagcatgtgaaatgagacagcatcggctgggtgtggtggctcatgcctgtaatcccagcactttgggaggctgaagagagagggttgcttgcagcagggagactgatttgagtgataatgaaactctggtctcccgcacagcgctcagcgtgaattattctttcgccattgcaattcccgtcttcataaatcagctctgtctaggcagcggacaaggtgaacccattgggcggttacactttcgttttcaatacatctctgcttttattgcttcattcttcgaccctgggtctcgcacattcttcacgtccgttcgcagcgtcacccggatcttcgccgctacccttgtgggccccccggcgacgcttcctgctccgcccctaagtcgggaaggttccttgcggttcgcggcgtgccggacgtgacaaacggaagccgcacgtctcactagtaccctaatagcggctgctcagcagggcgcgccgagagcagcggccgggaaggggcggtgcgggaggcggggtgtggggcggtagtgtgggccctgttcctgcccgcgcggtgttccgcatcgggtcgttatgaggtaattctgcacgtttgcccgcgtgctctctgtgctctgtcgcaaacctctttggccggagccgtaatccttgggctgggtttaagatgtgtgtaggtacacaggatgaaatgttatgagccacctaggccggcctgatggtgtgcccatgcctgacaagtactccttagagccagttgctgtagaactcaaatctctgctgggcaagtaagtgccaggctctggtgctggtagactttgtggcgggggaagttgtcaagcacgttgttacgctgggtctgtcatcctgctggagaacctccgctttcatgtggaggaagaagggaagggaaaagatgcttctgggaacaaggtaggacctgtgattttgacattattgggggtgagggcctgagtctgtaagagactgtggttgaatgtcaatgatgcttttggcactgctcacagagcccacaggtaccaagaaccttgtagactaccacactgagaacagtattcctatttacttgagtagcccaagtactttgcaaaggccttggagagcccagagcgacccttcctggccatcctgggcgggtatgaagaactctttaagatcatgctttaagtattgtttgcctggtagtaggccataacttggattggtggtggaatggcttttaccttccttaaggtgctcaacaacatggaggtaggaaacaaatgccaagtggatgtgaaatagctctccatgataatagcaggttgtataaatgagaagaatggtgtgaagattaccttgcctgttgactttgtcactgctgacaagtttgatgagaatgccaagactggccaagccactgtggcttctggcatacctgctggctggatggtgagtcacttgagtgggttggtagtgtgagtgaacagaaactctgtggtgtcatttattcattttgtgtggaatggtcctgtgggggtatttgaatgggaagcttttgcccggggaaccaaagctctcatggatgaggtggtgaaagccacttctaggggctgcatcaccatcataggtaagcggtcctatacaaagctaatacccatataagctggcagaattctgatcagaggaaggtgcactgggggtggtgccagtttggagctcctggaaggtgagggtcttctgttttttggcttgtttgggataagggtggactgtgcagtgagaggtgggtaaagtctgaaaatgtctttattcgacc

SEQ ID NO: 26239 - DNA, 482 bp, Homo sapiens
  SIMILAR (168)..(326): 541254mologous to Schistosoma mansoni phosphoglycerate kinase,accession number L36833,Smith-Waterman Score=132.
gacacgccaagcttggcacgagggcccgcgcggtgttccgcattctgcaagcctccggagcgcacgtcggcagtcggctccctcgttgaccgaatcaccgacctctgtccccagctgtatttccaaaatggcgctttctaacaagctgacgctggacaagctggaccgttaaagggaagcgggtcgttatgagagtcgacttcaatgttcctatgaagaacaaccagataacaaacaaccagaggattaaggctgctgtcccaagcattcaaattctgcttgggacaatggagccaagtcggtagtccttatgaggccacctaggcccggcctgatgggtgtgcccatgccttgacaagttactcctttagagccagttgcctggtagaactcaaatctctgctggggcaagggatgttctgttcttgaagggactgtgtaagcccagaagtggagaaagcctgtgccaacccacctggtgg

SEQ ID NO: 26240 - DNA, 412 bp, Homo sapiens
  SIMILAR (24)..(209): 1001254mologous to Homo sapiens ribosomal protein S21,accession number L04483,Smith-Waterman Score=322.
agcaggcgcagcccagcctcgaaatgcagaacgacgccggcgagttcgtggacctgtacgtgccgcggaaatgctccgctagcaatcgcatcatcggtgccaaggaccacgcatccatccagatgaacgtggccgaggttgacaaggtcacaggcaggtttaatggccagtttaaaacttatgctatctgcggggccattcgtaggatggtgagtgtttccctgggctttgctcatcacttcgggacatcgtggactttaccgtgcgcattggagtgtgtgatggtgcctgagcagatctgctggcagagtagtttgagccagctggactgggctggccgcctgccgcttcttgagggtggaagaggggtgctctgagaagacactcaggcagcagactctgcctctcactg

SEQ ID NO: 26241 - DNA, 667 bp, Homo sapiens
  SIMILAR (383)..(547): 941254mologous to Homo sapiens ribosomal protein S21,accession number L04483,Smith-Waterman Score=264.
ctggtttatattattttccacaactgcctttacacttgctctgggtatggccgttttaagacaactaaagcctgaatgctttccatggggtccactcagacatgcttgctcattcaaactctgcgagtcctgaacgcttacccctctgctggcccaaatcctcaccagccgtctcaaatagcttcagccagctttgcacccttggaattctccaggctagagaaaggcacccagtctcatggagtgatacatcaaaatccgctctcggtagacgtcttcccttcgagatctgctttgagggctgccctaacttggcataagaggacaaaccctcggctttctctcgcgtgcgcggtgtggtggcagcaggcggagcctcgaaatgcagaacaacgccggcgagttcgtggacctgtaagttccgcggaaatgctccgctagcaaccgcatcatcggtgccaaggaccacgcatccatccagatgaacgtggccgaggctgacaaggtcacgggcaggtttaatggccagtttaaaacttatgctatctcctacttcttgaatcttttccttcaccactgactcattcaagctgtcttttcctctttcgtggatcatggcaatagcttcccagcctctattcttgtttctcttaaaaatatcctccat

SEQ ID NO: 26242 - DNA, 495 bp, Homo sapiens
  SIMILAR (90)..(266): 1001254mologous to Homo sapiens ribosomal protein S21,accession number L04483,Smith-Waterman Score=307.
cggacgcgtgggatctctgccgggtgactagctgcttcctttctctctcgcgcgcggtgtggtggcagcaggcgcagcccagcctcgaaatgcagaacgacgccggcgagttcgtggacctgtacgtgccgcggaaatgctccgctagcaatcgcatcatcggtgccaaggaccacgcatccatccagatgaacgtggccgaggttgacaaggtcacaggcaggtttaatggccagtttaaaacttatgctatctgcggggccattccgtaggatgggtgagtcacatgattcctttctccgaatggcaaaggccgatggcatcgtctcaaagtaaggttgggggctcacatttgggcagagtgagtggacttaggactgcttccagaggcgtggtctttaacgttgtccttttcccctggttctaggaacttttggacttggagagaatcacagattgtggaatatttgtcataaataaataatgaaaaaccta

SEQ ID NO: 26243 - DNA, 529 bp, Homo sapiens
  SIMILAR (115)..(336): 551254mologous to Homo sapiens ribosomal protein S21,accession number L04483,Smith-Waterman Score=149.
  misc_feature (1)...(529): n = a,t,c or g
cgccgatatctctgccgggtgactagctgcttcctttctctctcgcgcgcggtgtggtggcagcaggcgcacgcaagccctcgaaatgcagaacgacgccggcgcagttcgtcggacctgtaccgtgccgcggaaaaatgtccgctagcaatcgcatcatcggtgccaaggaccacgcatccatccagatgaaccgtggccgaggttgacaaggtcacaggcaggtttaatggccagtttaaaacttatgctatctgcgggggccattccgtaggatgggtgagtcagatgattccattctcccgattggccaaggccgatggcatcgtcttcaaagaactttttgactggagaggaatcacaggatgtgggaatattttgtcataaataaataaatgaaaacctaaaaaaaagggggggcccgggtaccccaatttcgcccttttagttgagtccgtatttacaatttcactgggccgtcgtttttacaaccgtcgttgantggggaaaacccnggggggtttacccc

SEQ ID NO: 26244 - DNA, 354 bp, Homo sapiens
  SIMILAR (76)..(126): 471254mologous to Drosophila melanogaster Kruppel homolog,accession number AJ005440,Smith-Waterman Score=46.
ggcacgagcttgatggatgatttgtggagtcaccgacctgctgctgtaaaaaccataaacctcaataaagtgatgtggaaatgtagtgtacagctgcagacttttaaaagtaagaagaggaaggaacacatgttcgtcttcctcccccagaagaaaaacaacattggattctaaaagatggcctcctcctttttgctcccactgaatgccacagctgttaatggacagtcttagaggagatgatggggtcatcagtctgtttctggagcattccgaggctttagatagggagcagcatgattctagcagtgctgcgtgttcttgggcagcgtgtccttctagtaggagtccaaa

SEQ ID NO: 26245 - DNA, 1473 bp, Homo sapiens
  SIMILAR (1341)..(1421): 551254mologous to Homo sapiens acetylcholinesterase,accession number M76539,Smith-Waterman Score=69.
gggcttttctgactctgcaaaggcattcactatggctacccccaatggcgagtcttcaagaagacgaaatttcattggcctggaaaaaccacttcctcctctgaacacagctctcatctggagccccgacgtgtcatattcctccacctttcctgtggacgtgcacatgcatgcacacagtgtgcacacagggtgaggcaccgtgaagctgaagccgcacttctgggctttcagccttggcattgtggtttccatcgctgggcctgctatgaagccacgctgcttttcagaaatacttttaaaagtctgcagctgtacactacatttccacatcactttattgaggtttatggtttttacagcagcaggtcggtgactccacaaatcatccatcaaggagtctggagacacatggtgtcttgtcaggaggatggagatgatgacagctgccctgctgcgggcgccaagagcccgcctcagccacatgtgggcttttagcctctgatcccccagtttcctctgactcttgtctgagcgcattgggcttctttcagcatcttccaacttgtgcatgctggggtggcctggcttgctgtctcttgagtaccgtgggaactgaggcgggctggccttgtctccccagcgcctgctcacagaaggtgccccatgatgtctgtcgtgcagatgaatgtgtccacgcgtgctgggctagtacagaagatcgtgtaggcaggggtcttcgtgggcctagggccctgaggaggaccgatagcctttgggactggttgggtttttgagagtctgttccggagagggcccctgagccaggctgtctgctgtggatggctctgccatggcgctatctccttcatccttatctatctcttcattgttagtggagggtgttgggcatctgttatttgctttattcgagtctaggccacgagctgccccccactggaaaggctgaacctctctggctacattgttgtagaaaagctcccaggcggggctctgctcaggctctctgcatttctgggagacatccttgctgtccctgctccgcccgtgacagccaccatgactgagcccacactggcctcctggactcccaccttccgcattgatatacgcctttcttgggcgctcttcaaggaataaacggagactgatgaagacgatgaaggtggaagcctgtgaggacctgtccgctcctaaatatctgaggatccagctccccacgggatccccaagaagaagatctgaagctcctgaagtttgcattttccaggggtcctcctctctctctagtgcacccaccacctttgctgagctatccctctgccaggagatagccccagactcctcctcgcccccctccacggcacccaagtctgcacccgctgcatcctccaagcgcccaaccttaattctagctttgaattgttgagtggaaatggccaagaaaaacat

SEQ ID NO: 26246 - DNA, 335 bp, Homo sapiens
  SIMILAR (284)..(246): 611254mologous to Homo sapiens put. HMG-17 protein,accession number X13546,Smith-Waterman Score=45.
  misc_feature (1)...(335): n = a,t,c or g
tacacagttatcaaaaatgcagacacttcacttngcatctccagcaccttcagctttctgggcctggtcttttttggcaactccattttctgtagggttattcccctccttgccagcatcagcttttccctttttcccttttgggtaccttctcagggncctttttaggctntgctctggctttngaggagcaggtttagcagacaactttgtggatcttctctgtggttcatccttcaccttgggctttcatctccntcagcatccccctcagccttttctcttgtggcatgctnggcaacaacagngacgggactaggttgctgggcacagtg

SEQ ID NO: 26247 - DNA, 1090 bp, Homo sapiens
  SIMILAR (387)..(641): 671254mologous to Homo sapiens put. HMG-17 protein,accession number X13546,Smith-Waterman Score=262.
atgatacatgaacaaaacgagaacatcaagaaaaacacaaaaactataaaaaagaaccaaacagaaatcctggagctgaaaaatacagtaacggaatggaaaaacttattagaggtattcaacaacagttttaggcagaatgaagaatcagtgaacttgcagacaagttatctgaaatcactgagcagaggagaaaaaagaaagaagaaatgtgaagagatgataagggatttaggacaatatcaaccaggtccatatatgcatgatgggtattccagaagggaaagtggcccgaatgtgccacgacgcgcccaagtcgacggcggcgacgcgcgcaagggtacccataggaggaaaagggtcttggaaagggggttatggctaaaaagggaagataaaaaggcccaagggtataagggacggacccacaagaggaagatctgcaaaggttgtccgctgaaacctggcttgtcctatagccagagcccaggccttaaaaggcccctgctaagaagggagagaaggtaccctaagggagaaagggaaaagctgatgctggcaaggaggggaataaccctgcagaaaatggagatgtcaaaacagatcaggcacagaaagctgaaggtgctggagatgccaagtgaagttgtgtgcatttttgataactgtgtacttctggtactcatatccattcttgggaagtgcagctcctattatgactaatcctcctgtagaagttcggaaaaacatggaagtttttcttccccagtcttactgtgcatttgattttgcaactatgcctcatcagctgcaagacaccttcttaaggaggcatgaactaggtgaaaagcttcaacggcaaacgccacctttcggaaaaggattccaggaaccaatgttatgtacaatagctacccaacatgagatacctaagattaacttaagtaacaaggataccgaagcaggagaaactcttaaaatggaacttctcaggttctctatgaagttctcatgcaagcatgcgcttaacagcaacagctgtgcaagaactcctaccagctgcataaggctagctagttttggagaatga

SEQ ID NO: 26248 - DNA, 663 bp, Homo sapiens
  SIMILAR (244)..(435): 431254mologous to Mus musculus Gag polyprotein,accession number Y12713,Smith-Waterman Score=147.
atgttgaaagtgaccttgggctttcataaaccaggagattataaaaatggatcttcgttctacaagagaagttctgaaaaactccttgcacatctcaggctattcttcatttctgcacttcatgaaggaacagagtgttccctgggaactctgggtagccttgtggagaatgagcttccctgggctgcttgtccttatgctacaggtcagaaatacaaagcattgcctgaattgccgatgtcacttgatgaaacccatttgtcctgtaggctcagacctgagatttctgaaaaccaagctcagagtatcatcctgcaagtggctaaactacaacacaaattgaatttcaaaccttgccaactgtcttctgttgaagtgactgcattgattgggaagaaatgggatcctggaaatgggaatggaacatatggagagattccgatgaagctggggacactgaacttctgccttcttctgagcttcatttaccaatactgtcttctaggttctggggatacaggagtaaatgcactaaatcctactcctccaatacacagaaaattaaagaatgccttacaagtcaataagaaaaggacagacaaccctatagaacaatggataagtgtcttgaacagacctttcacaaaagataatgtccggtaa

SEQ ID NO: 26249 - DNA, 1035 bp, Homo sapiens
  SIMILAR (283)..(735): 811254mologous to Homo sapiens 26S proteasome subunit p31,accession number D38047,Smith-Waterman Score=607.
  misc_feature (1)...(1035): n = a,t,c or g
ctaggaccccaggatttccaggtcaaacgaccccaaacctgcttttggagcctgtgcaacaccacttccagggtccttcctccagagggtggagcccatgactagagtgctccccactaggcctgagaagtggtctgcacgagagggagggaggcccacaccanttctggttaataacctgatgctgccagtgttactggctcctaagcgtattaagtggttaatggaagtgccttcaggaacctgcttctctccaggatctaagtcatgtggctgaggtacgacacactcagtgaaacccatatgcaccagctcttgggcctcaacctcctcttcctgctgtcccaggattaggtggctgagttccacatggagttggagtggctgcctgccacggacacacagaccaatgcctacatcaagcgccctgtgtccctggagccatacctgatggagggcggctacaacaaggtgttcctggccaagggtaacatccctgccaagagctacaccttcatccacatcctgcttgacactatcagggatgagatggctgggtgcattgagaaggcctatgagaaaatccttttcaccaaggccacctggatcctcttcctcaacacacccaaacagatgatggacaacaccaagaagtgagggtgggtcctgggccccaacaactactacagttttgccagccagcagcagaagctggaagacaccaccattccaagttgagtatgcctggcagcccaccaggcacctttttttttttactgactgaccatcaagtgacatcggcaattcaggcaatgctttgtatttctgacctgtagcataaggacaagcagcccagggaagctcattctccacaaggctacccagagttcccagggaacactctgttccttcatgaagtgcagaaatgaagaatagcctgagatgtgcaaggagtttttcagaacttctcttgtagaacgaagatccatttttataatctcctggtttatgaaagcccaaggtcactttcaacat

SEQ ID NO: 26250 - DNA, 487 bp, Homo sapiens
  SIMILAR (248)..(385): 971254mologous to Homo sapiens 26S proteasome subunit p31,accession number D38047,Smith-Waterman Score=235.
ctcagtgctttaaagatgttgattcaccaaatcctcacagttgacccagagaggtgtgtaattagggtcccagtctcaacacagagaaactgaggcacagagaggtgaagttacttgtcaagggtcgttgggcagagtacgattggtgagaaaagagagcataggacacgtgggcaagtgctggccccatagggtggggatggagcctttgtgatcactctactcgtctctaatccctcctttcctgcagcgagggtgggtcctgggccccaacaactactacagttttgccagccagcagcagaagccggaagacaccaccattccctccacagaactggccaaacaggtcatcgagtatgcccggcagctggagatgatcgtctgagccccccgggcactgggtggggcagggcacgagttatttaaaacagttacactgcagggtttcgcccaataaaggtggactgacattccctcaaaaaaa

SEQ ID NO: 26251 - DNA, 956 bp, Homo sapiens
  SIMILAR (3)..(497): 1001254mologous to Homo sapiens 26S proteasome subunit p31,accession number D38047,Smith-Waterman Score=852.
cgcagctccccgagtcagcctatatgcaccagctcttgggcctcaacctcctcttcctgctgtcccagaaccgggtggctgagttccacacggagttggagcggctgcctgccaaggacatacagaccaatgtctacatcaagcacccagtgtccctggagcaatacctgatggagggcagctacaacaaagtgttcctggccaagggtaacatccccgccgagagctacaccttcttcattgacatcctgctcgacactatcagggatgagatcgctgggtgcattgagaaggcctacgagaaaatccttttcactgaggccacccggatcctcttcttcaacacacccaaaaagatgacagactacgccaagaagcgagggtgggtcctgggccccaacaactactacagttttgccagccagcagcagaagccggaagacaccaccattccctccacagaactggccaaacaggtcatcgagtatgcccggcagcctggagatgatcgtctgagccccccgggacctgggtggggcagggcacgagttatttaaaacagttacactgcagggtttcgcccaataaaggtggactgacattccctcttccaaggcccttgtctccccagttgggacggcagagagacaaagttcttatatctgaagaacttggaggttttggggcattcaggagttggagatagcctccaactgggtcagcctctgtctggtgggcattgctcagggtctcaaacatggacgcccactgtggggccccagcagcactgtggcctgcaggagggcatggccccaggtgtagggggactgttctagccagctgtggacacataggaatgctggaccagggtaccagattttttcaacaaagggggtgaagtgtcctactaaaaagaataaatgttggcagtgaattaaacaatttttcaaatgaaa

SEQ ID NO: 26252 - DNA, 4810 bp, Homo sapiens
  SIMILAR (4717)..(2033): 931254mologous to Homo sapiens transportin,accession number U70322,Smith-Waterman Score=4242.
tgcttataaaaatggttattcagtatacattctgcaatgcaaaggtgacaaactaaaatataaaaaggctgttatggcttaacatttttgttgcagaataaatatgcagcattgaaaaatggaaaggcgtggcttcatctctgaccagcagagttaaaaagaaaaatctctccattttccttcatcatcatgggatacactgttcaggcaatccaaattaataaagacttgcactttcatatgaacacaagatcaagtgtaccagttaggttttcacattcacagtatataagaagatacacatggaaggagaagtaaagggttaacttaacaaggatttattcacaggaatacatgtaagtagagaaaaatcacagaaaagctaaacaaatgaaatcgaagaggatccaaaccaactttcactctgtaggcttttaaccttgcaccctggtgtgcatatatctaggggcacagaggggccaccaacatgcgcccaaaaataccagtgtaggaaccctgccattacatcccatttaacttaaacatatctttaagatccatgctttgaacaaaaaaaggggaagcttagaacggcagtactgttgagtgggaataaacattgaaatatagcaatcatttttcaaccttctacaattgtctttatgtgccaactaacattttattgcagccttttacaagatcttttaccacgtaatttaaattttagaagttttgataaaatccacctagtagtatataaccatgccagaaagcacatcacactggacagcacagaggcaaaggattttgcacaggtatatcagctttcccacattgtgcaggttacacacaatacaatatcaatccttattcctaacagatcctaaaaaagatatttcaaggcctacctgtaaactaccggtactttatatatcctatgtccttaataaaaataaaatcccacaaatccttaaaaaggaactttaaatgcagggctatattgaattggtaaactgcaacacaaactggcgcaacataggtaaatgaataccaatctcactctatgtgcatgcaagcatgctagctttcccactaatttaaattactttcaaccactatgagccagaatgcatgcctgaaccttaaactgcactttaaaaagtaacatcttggcctagaaattaaatctaatgaagtataatcatcaaattatatccgctacattaatgttcaatgcaaaattaagatgtcatctttagtttgatatgcccaaccccatttattcctccctccctgcccaccccaaaaaaggtaaaagaagtgacctcatttgcaatttcacaagggtgcttcaattgtttaatgtttgttttgttttaatttccaacttttttggggtaccttaaattgtaacttccaagaacctgcttctactacgggaaggcaagctgacttttaactatattagttttctttgtgtagttcttcatcaacatgcaaaacaaggccccatcatgtgggaaaacttacataaaaaaactttaaattaaaaaaaaaaaaaaagcttctttactatttgtaactcccattcttaggtttcctttattgtgcgctatagaattgttcctctttcttgtccctaggcatcatttatatggttcttgttttggtacaattccccataatattccacaatgtactgttttgtgagtagactgaatagattttttttttttttgcttcttcacatccactgcggagttgtaactggagacatatttccacccacaaaggctccagatgttaaaacgtttccccacaatcgacttaatacaggcgacggcaacacatccctcccgccccttccagtagggttgggattgtactgtattccctactggcttacccttcccccctgtaaagggtaacaattttccctggggtgcaagaggctcccttatagtctccaagactgaagggacccctaattttggggactgcagcttaagtgtattaggattaaacaccataaaaaggctggcaaggacgctcttttaaggggaaggagggaaactgggtcaggaggaaacgccttccaatttttcattcggccaacttggatttttttaaatccatggaggatcttacagaacatgtctctgtagatcatcttttggggttaattcactgatgcaacgggcatcacaaaaaaatataaaatcttggattacgcccactgggattcacaactgatcatggtacaaattccacggaatgctgaatccttttcctcattgtctcttatgtttctcagagaggtgcaaccaggggtcttataaactgctgtagcatgggggccacctctttgagaacaaacggtaccaggaggacaatttgttatggcggtattccctaacaacgtctttggtgtgttgggtctgttaatgatttctacaagctggtgcaacaccataggaatataaggctgcatctctatacccatttggatggagatttctccaattgcccatgtggcattgttgcagactgaaatgaattctggatttaagtcggtttccaatattggcatgaaatcagctatacaaggcttaacatgctgaaagcaagcttttgtgaggtcacctaacagggcaaaagaactctgtcgaacttctggcattttatcctgcatgcactgatacattagtgtcaggatgttacttcgggctaccagctgttcaatgttgcctccaagtccttcagccaggccactcagtaaatcaagagccactatcataaaatctttatctggagcttcatattgatctggttgagcattgtttagcatggcttgtgcaagagtcttctgtactaggtttacacaacgctgatacacaggttcacagtacggaaggaatccagactgcagtgctgtggcaactgaagataggcactcaagtaaagggaagagatctttatcttcatcctttaacatgttccatttctggatcagtggaggcattagcatctgaatatattctggtttgtttaaatgatgtcctactgaatctgctaatgttcctatggcatcgtaaagaatgagcaggttcttatgctggtatttactaaatgcaaagaccagggtatcaagtatataagcaaggtaaggaacaagttctgtacaagcctcctcttctagggtagcaaaggcactgcaggcagcttcttgtactctcttgttgctgtccaggatgcgctttagcaattctgtcattaatggcttcaggtacgtgtctggcggctggctgaccacccagtgtgcatagcggctaagagtccagcatgttatggaacgcacaagagcctttttatcagagaggcactgaataaggtgaggaataagctcaggcaagtatggaatcatgccctgcatgcaaccttcagcaattgctcctaaaaccaaaatgcctgattctttaacaacccattcatgatgaaaaagtaattctttcaaaaggggcaaaatatgtggcagcagttcatcacgatacacatttgcaagaacatccagggcagcagcagaacattttcttagattccagtctgaaattgtatcatcatcatcaatttcatcatcatcatcgtcttcctcttcaattccatcttcatcatgctgctgagccaccgtcctcgatcggtgaaaacgtggccgtatatcctgttcactatcaggaatcgtttcgtcttcttcaacatcacccttaagtaggataatatctatgtctgagtacttcatgccattcactaacacaggaatcaacttaggaagatgccttacgagtacatctttgcatattggctgttcagctaaagttagccaaaattcacaggcttctaaagccacattttcatcttgatcttgagtcctctgtagcatgtactcaactatattatgcatgtgaggaagcaggcgatccattcgaacttcgagcaacatcacaagtgctcggcacacatttttccgtacctctggttcttcatcaccagctaatgcaaagagattctcagtaaaagaatcaatgtgcaacattagagcttgagtcctactgatgataaactgattgacacatgcaacagcgtgagaccttatttttggactactatgcttgaagaactgtaaaaatttgggaatcatgatgttgagaggacgatctaaaacatcactgtctaaaatctcagcagaatcttcacaaatcttctgaagggcaccaaatgctccctcacaggtattataatcttcagaatccaacaggctacagagttttggtaagaggtcaggccaattctgcaattctcccttggaggctatagttgtgatcaaaataccaacagtggctctaatcagaggagaggagtcaccaatattatttaaacattcacttttaataaagtctgttacaccatttgggaagttctgaaagtgtgctttcacattattcttcaagataagaccactcaatgatcttgtgggttcatcttcagattttaattttgtaagaacaaaaatcaagtagttgttaaagtctggatactgattaagttgttccagtttttgttgcacggttctctggatggtggtgtctggggactgggactccttcaacagctgcaggatttgctgaagcccttgctcgtcaggtttccactcatactccatcttggtttgccggtcccacaccatcccagagccctcgggcggctcggccttcggccgaagcggcactgcctcctgtccggggcctgaaatgct

SEQ ID NO: 26253 - DNA, 408 bp, Homo sapiens
  SIMILAR (123)..(1): 871254mologous to Homo sapiens Human secreted protein, SEQ ID NO: 7420,accession number G03339,Smith-Waterman Score=179.
atgagggaaagtttggaacttcctagagccttgttgaacggttttgaccaaaatgctgatagtgatatggacaatgaagtccaggctgaggtggtctcagatggagataaggaacttattgggaactggaacaaaggtcattattgctatgctttagcaaagagactgcttagggacttggtgccctgcatcctagctgctttagctccagccttggctaaaaggggccaatgtacagctcaggtcattgcttcagagattgcgggccccacggctcagtggcttccacatgatgttgggtctgccgttctggatgttgggaagcagaagaacaaggtgccagcagatccagtgtctgtgagagctgctgtcagcttccagatggtgccttattgctacatcctttaa

SEQ ID NO: 26254 - DNA, 702 bp, Homo sapiens
  SIMILAR (159)..(1): 731254mologous to Homo sapiens Human secreted protein, SEQ ID NO: 7420,accession number G03339,Smith-Waterman Score=194.
atgtgggaaagtttggaacttcctagagacttgttgaatggctttgaccaaaatgctgataatgacatggacaatgaaatccaggctgaagtggtctcagatggagatgaggaacttgttgggaaccagagtaaagggacttggtgccctgtgccccagctgctccagctatggctaaaaggggccaagatacagtttgggccatggcttcagagggtgcaagccccaatccttgccagcttccacaaggtgttgagcctgcagggcagtgcagaaggaaaatgtggggttgaagcccccacacagagcccccactgggcactgcctagtggagctgtgagaagaggaccaccgtcctccagaccccagaatggcagatccaccaactgcttgcactgtgagcctggaaaagctgcagacactcaatgccagcctgtgaaagcagccaggagggaggttgtaccctgcaaagctaaaggggcagagctgcccaagaccatgggaaccgacctcttgcatcagtgtgacctgggtgtgagacatggtgtcaaaggagatcattttggagctttaagatttgactgccccactggattttggacttacatgggccctgtagcccctttggtttggccaatttttcccatttggaacagctgtatttacccaatgcctgtaccccccattgtatctaggaggtaa

SEQ ID NO: 26255 - DNA, 264 bp, Homo sapiens
  SIMILAR (159)..(1): 731254mologous to Homo sapiens Human secreted protein, SEQ ID NO: 7420,accession number G03339,Smith-Waterman Score=194.
atgtgggaaagtttggaacttcctagagacttgttgaatggctttgaccaaaatgctgataatgacatggacaatgaaatccaggctgaagtggtctcagatggagatgaggaacttgttgggaaccagagtaaagggacttggtgccctgtgccccagctgctccagctatggctaaaaggggccaagatacagtttgggccatggcttcagagggtgcaagccccaatccttgccagcttccacaaggtgttgagcctgcag

SEQ ID NO: 26256 - DNA, 955 bp, Homo sapiens
  SIMILAR (290)..(448): 711254mologous to Homo sapiens Human secreted protein, SEQ ID NO: 6395,accession number G02314,Smith-Waterman Score=185.
  misc_feature (1)...(955): n = a,t,c or g
caaagagtaagttttttgatatacttgtcgttgagagctagagagagaaagcagaacatatatgtcacagtgtagattttgacggctttatcgtctcagttaagagtttatcgagaggaagcatcggtaccgagaattgtatcatttaagctgcatgtatacaagcaacacagtaaattggtatgaatagagtggggcatggctgcaaagatacccgaaaatgtggaagtgactttggaactgggtaacaggcagagattggagcagcttgaagtgctcagaagaagatgaaaatgtgggaaagcttggaactttacatagaaacttggaggacttagaagacaggaagatgtgggaaagtttgcaacttcctagagacttattgaatggctttggccaaaatgctgatagtgatatggaaaatgaagtccaggctgaggtggtctcagcaatcattcaagaggtgcccgagcataaacgtttagaaaatttgcagcctgaacatgcagtagaaaagaaaagcccattttctggggaaaaattcaagctctgcatcccagctgctgtagccntggctaaaaggggccaaagtacagctcaggccattgcttcagaaggtgtaagtccccagccttggcagcttccatgtggtgttggtcctgtcagtacacagaagacaagaattgaggtttggaaacctccacttagatttcagaagatgtatggaaatgcctggatttccaggcagaagtttgctgcagaggtagagccctcatggagaacctctgttaggacagtgcagaagggaaatgtggggtcagagcccccacacagagtccccactggggcactgactaatggagctatgacatcctccttcccccagaatgatagatccacctacagcttgcgctgtgcccttggaaaagctgcaagcactcaatgccagccatga

SEQ ID NO: 26257 - DNA, 1917 bp, Homo sapiens
  SIMILAR (824)..(1204): 921254mologous to Homo sapiens apoptosis regulator BCL-G long form,accession number AF281254,Smith-Waterman Score=609.
ggcacgagggagagagactcaggtatagaaatatccttactgccacctgacctgaagcagaagaaatcacagacagcttccagaccaggcccaacatgtgtagcaccagtgggtgttgacctggaagaaatccccctagatgatgatgacctaaacaccatagaattcaaaatcctcgcctactacaccagacattcatgtctttcaagagcacccctgctctgcttctcaccaaagctgctgagaacaagaagtttgtcccagagggccatggggaattgttcagcaaatgagtcatggacagaggtgtcatggccttgcagaaattcccaatccagtgagaaggccataaaccttggcaagaaaaagtcttcttggaaagcattctttggagtagtggagaaggaagattcgcagagcacgcctgccaaggtctctgctcagggtcaaaggacgttggaataccaagattcgcacagccagcagtggtccaggtgtctttctaacgtggagcagtgcttggagcatgaagtgctgtacaaagcccagaagtgccctaggagtttgagcacaccaaccttctgtccaaaacgccactccattactgtcttcaagtcctgtgaattacctaatgttagtcttcaaatgttacatgctgtggaccccaaagtcatttccattgccaaccgagtagctgaaattgtttactcctggccaccaccacaagcgacccaggcaggaggcttcaagtccaaagagatttttgtaactgagggtctctccttccagctccaaggccacgtgcctgtagcttcaagttctaagaaagatgaagaagaacaaatactagcccaaaattgttgagctgctgaaatattcaggagatcagttggaaagaaagctgaagaaagataaggctttgatgggccacttccaggatgggctgtcctactctgttttcaagaccatcacagaccaggtcctaatgggtgtggaccccaggggagaatcagaggtcaaagctcagggctttaaggctgcccttgtaatagacgtcacggccaagctcacagctattgacaaccacccgatgaacagggtcctgggctttggcaccaagtacctgaaagagaacttctcgccatggatccagcagcacggtggatgggaaaaaatacttgggatatcacatgaagaagtagactgaaatatcagatttgtcatcaggaatactctttgtctactgtggtcctgtgcacgttggccctcagatggacctacaggagattacaacgtacaaggcagatggagcattgacgttttcaaaaccattattcctgtgactggagaggcatcaggagaggtctcgttcgtctccagctcataaaatgtagcagcatcatccttgacagtgatgtttttcaggccctccattgagaacctgaggaaatctgtaaagataagtggtgatgttgtttcaaacgttcagaacagataccatcatcctgcctttgttagctgctgtagggaaagtgcgttacagatgtctgctgacctcacaagagtgaaaagataaactgtgcatgtgtttccacttccgtttctagtactatttatttttaaactacacttggggtggcctaatacctaggaagatgttgctattcacgttagtaaacagcctaaagaaactcttaggtttactgctacatccatttgtttggagaggtaactgttgtctgtgcctttttgaaaaacttccatttggtacaaaatttttactccaacaccccctcaacccttttctcagggaccacacctcttcttcccaaggtccctgggacttcctcattctttgtggtagtacaatgattggtagcaggtaaaataaatacatagaaagactactgtcaaaaa

SEQ ID NO: 26258 - DNA, 508 bp, Homo sapiens
  SIMILAR (155)..(283): 761254mologous to Homo sapiens Human cardiovascular system associated protein tyrosine phosphatase 2,accession number Y92175,Smith-Waterman Score=173.
cttcgccgcctgggcatcacgcacgtcctcaatgcctcacacagccggtggcgaggcacgcccgaggcctatgaggggctgggcatccgctacctgggtgttgaggcccacgactcgccagcctttgacatgagcatccacttccagacggctgccgacttcatccaccaaaacaaaagggccatctctgccctgcacttgtgcagaaagtcagggatacggcaagcatgaatgcaatggtgtagagttgtgtgaaacccctagcatagagacagacagcgaaagagatggtgtgaaaagcttgcagaaccagacagagaaaccccacagtactttccactccaagcacaggaggaggtagctagcgtgtgagggttggcactaggcccacggctgctgcttgggccaaaaacatacagaggtgcatggctggcagtcttgaaattgtcactcgcttactggatccaagcgtctcgaggataaataaagatcatgaaaaagaaaaaaa

SEQ ID NO: 26259 - DNA, 1304 bp, Homo sapiens
  SIMILAR (146)..(556): 791254mologous to Homo sapiens Human cardiovascular system associated protein tyrosine phosphatase 2,accession number Y92175,Smith-Waterman Score=517.
  misc_feature (1)...(1304): n = a,t,c or g
ctcggtattaggcctcacgctgccagccccacggttcaagaccctgcgaaggcgatgggtccagggccagaaggtcctcaggaaagccccgtttgggaaaaagccccgggggtctttgaccttctggagggcctccaccagggtaagggacatggctaacaaccgccgggagcttcgccgcctgggcatcacgcacgtcctcaatgcctcacacagccggtggcgaggcacgcccgaggcctatgaggggctgggcatccgctacctgggtgttgaggcccacgactcgccagcctttgacatgagcattcacttccagacggctgccgacttcatccaccgggcgctgagccagccaggagggaagatcctggtgcattgtgctgtgggcgtgagccgatccgccaccctggtactggcctaacctcatgctgtaccaccacccttacccttcgtggaggccatcaagaaagtcaaagaccaccgaggcatcatccccaaccggggcttcctgaggcagctcctgggcctgggaccgcagcttgcggcagggtctggaagcatgaggggagggggagaaaagctcaggccagnccccgtgggtaggtccctggctcccagctggagataggaggcccaggtggcaggtagcaggaggcccagatcacccatcctcccctggggtacaggagaggccgagccccaggccactgttcactctttgttgggaggggacggggagtgaggttgggcagtgtggtggatgggcaccccaggaagggtttgaccagggaaggaggcagcttaggctgtagatggaaagatggtcctggggattcgaaacacccgcttgggatctgggcccagggtgctccccctgggaattccacagtccccttcccccctctttgtgcccccaagtgtttcccctctcctcccctcacccaaaacaaaagggcccatcctcctgcccctgcacttgtgccagaaaaagtcaggggattaccggcaagccatgaatgcaatggtgtagagttgtgtgaaaacccctagcatagagacagacagcgaagagatggtgtgaaaagcttgcagaaccagacagagaaccccacagactttccaactccaagcacaggaggaggtagctagcgtgtgagggttggcactaggcccacggctgctgcttgggccaaaaacatacagaggtgcatggctggcagtcttgaaattgtcacatcgcttactggataccaagcgtctcgaggataaataaagatcatgaaaaagaaaaaaaaaaaaaa

SEQ ID NO: 26260 - DNA, 1353 bp, Homo sapiens
  SIMILAR (644)..(1057): 361254mologous to Fundulus heteroclitus vitellogenin 1,accession number U07055,Smith-Waterman Score=130.
gctaaaaatttaccaaaatagtttgaacacataaaaatatttttaaaaaaacagaaccaaaaacccagcataaatttagttgtataggcattggttagaggacactgttttcactaaggattatattcaacaactttctcttgagttgttactaaaattctgattctgaaccttatagcttataatggtgccaactattagaaatgggaccctctaattcagtccaatcgcaacatgtattatgatataatagatgaagggtatgtctacactataataaaaaataaacatatttttggttatttaaagaccatcttcctaacctgtaactaaaataactgtatttgatttaaacttatttaagtgcagtgaattatggaaagctaacttaaaggtttgaataatcaattatgagtaaggaacacctgttgacagccccgtgacccttcagaaccaggcatttgctgaaaaaaagaaatcactagcattgaatatagcccttagtcacatgagagattaacttcatgagcaacccagcatgtagaggatgaggtggactttcccagccacccactccttgaggggacagtagtattcatagtgaaactgctcaaactctggtgtctggcggatttcgcataagaaggagagatcaatacctgactccaaaaggaggaggagcaggggaaatacaaagagcagcagtcccaggcccaccacaaggagcctggaaaaactcttgaccagtgggtcaccccgaatatggccagtcagaatgtcgtagctccacgacaaagcacggcgagcctccttcagctcctcttcttcagcaatcaaaaaggcgttttcatctgcttccagatcctcaaatgaatctgtgtcttctctttccaactcaagcctagaaggacagtcaaagagcatgtcaatctcatcgtcatccacaggggtggggagcaggctggcacttgggttgtacactagttcagagatggttaaaggttcttcttttattttatcttcctcttcactagggggatcttcatactcccgggctgccttcactggggagctggagatcaagggagcagaaatgttctcctctttaggcaatggaacaccagtgttacgagctgtgaccttggagccgagtctcagcagacgaacaaacacattactgttgcagtggttccccatgtgcaattggaggcttcgtcgagtctggatctagaccaagcattatgccatactggttattccaatcccctatggtctcctcggcctgcatggcccagggcagcctttccctaacagtccattctgttataaaggacctaggcacccacgcgtccg

SEQ ID NO: 26261 - DNA, 1338 bp, Homo sapiens
  SIMILAR (321)..(413): 961254mologous to Homo sapiens Human secreted protein, SEQ ID NO: 7726,accession number G03645,Smith-Waterman Score=177.
  misc_feature (1)...(1338): n = a,t,c or g
ctcctcgctttgcagactagagatgcttctagtccctgttggcacactcaggatgggggctacgggaagcccaagaattcaccctctctcctaaatgtcaactgttttccagtaacccacaggtcaggnatccccatacgtttcattctccctcccacagtgacccacaatatccatcgggtgtttatatatcccaaagaagaggctactcattcccatctggtaaacccaacatactccatgatttagtggaaaagagcccctggagtggcacagaagggctgccctcaatacacacttactgagcgtctaacaatgaaatgggtcaagcccttcgtaggcactggcaatgggaagatgaccaatacagacggctgaaccttgctttcaaggccttcataaagcactggagatgacaaacacggtccgatacaaagggtcgggttcaggactccaaccattattatcaaagagccacgggaatacaaaggaaggattactaggggggaagttccaggagggcatcacaaagagacctctgagctggatccagaaggacagatgagtttaagctgaaagtggggacggtcgttcccgctggtgggaaccgaaggagccgaggcagcgctgaggcggagaccaggtggcacccgcggcgctgcaaggacacacaagctgttgcgagggggtcaactctccgggccttggcttagaaacctgggacgattacaccctaaaagcgcttggaaaaactgcagaactcgtgctgattttcgccaaagctactcccccgccgtgagggcaggaagccctgcgaggcgcctgcgaggacgcaaacgccgcgaagcaagtcctccacgcctccatcccaggtttagtgaagtgtagactctgacccacagccgaaaggaaagcaagaccggagtcggggagggcccctccaggagcgggctcagcgggagtctgggccgaacttgcttgctgccacagtggttccgcggcctcgcgctgagcgccatccggcgatttccaccgagggccccaccggccctccggaaggctcggcaccttccgccacttcctcggtcgctgcggcgggtccggctcctcacagccgctaaacccaggcctattctgtgttagagtcgggcctactcggacctcttcgccgggacgaatcatcgcccggctgggaaagtatcaaaactcggggagttttagaggatccaatgggtcctgaaaaaaatccctgagtgtgctaagcatcaccgcatcttcactagaaggttattttttctaaagagggtcgggtggggcccggaaaaaaaaaaaaaaaaa

SEQ ID NO: 26262 - DNA, 5646 bp, Homo sapiens
  SIMILAR (4436)..(2865): 851254mologous to Rattus norvegicus Nedd4,accession number U50842,Smith-Waterman Score=2428.
gactgtgtcagaagattttaaaaagtcaaatagtttataatcaaaatgaattgtgtttaacttgatacttatatggaattgcttcagcattataaataaaaacccaaaacaaacgccatttaaatgtgagttctgatgaaatgcatttgtaatacaattttgttaaaaatttttaataagagattgtaggctaaagttatatgcttgtaatttctagaaacatatgatgtccttgctttatgaaaatgatcctactgactgtcccgcagtagaatgcatttgagacacttttctatctgggataaggggctgtgttgcttgatacatgtttcttccagaccatgagcccctagtgggagcacgaaggggatgaaggtctgcagctggggactggtggcagttgagtctggtctcatttaacatcatgttctatgagtcacagaatcatccaaatgagtatcagccagatacaaagaaagctttgtattttctcatgcttagatagttcacaaacataatatttaaataattgtggcaaaatcctgttttaacaaaaataattttcacattccattctacataatgaggacatttccaaaatgcattggcccacattactattactttgctgatatgaagaaaatgaattatgatggtaagatccatatacagatatacacatgtgtatccatattatttatatatttaatatcagaaatgttcctacttccttgtctcttagaagtcactttacttttaaatgattctttgggagtgtggtcaatttgcacacctgacttgacacaatctgacggtcagcacaaagcaccttctgattgtataacactttacaaagtactttttgctttctcatctgtctggaacttctgacaatctgccatgacaatgagggtgggcatgattactctcatttgacagatgaagaaatatgaatccagagaggttaagtaagctgcttcagttcacatggctggtgagatatcaaaccaggactatacctggtgctcatccttgactgctggttgacaatggtgaagacaaaacgcagggtacattaatctgtgaattgcttcccctaaaccatgctgatgctgtggtgtttggaaagtagaaagtggttttgctactgtcacatttcagatttctatcaggtgctaatgagtactcatcatgttataccccaacaaacttaaaccaagaaccagaggtactttttacagttctcacagggtgtgtatatatatatatttaagaagattcgtaacatatatttacaattattcctaaatcaccaagataccatactgagaaataggtttaatctttttaagagcattttctatataatcattccaatataaggatgaaacaatataagtatgaaatataaatacagtcttggcacactttatctttgcaggtgtgctggaacctagaacactttcccttttgccttattctgcttacgcctacttttgattgttttacaaattcatagacacatttgcaagttccttgaggatcaggactcagcttctctgaagctgacaactcttaccccagagcatagcacagcgctaggcacgcagcattcaataaacgtttgatgaatacatgtacatggtctttatgtacttcagtttggttaaaggaagatatgaactgtagcattttgcctacagaattctggatttgtaattaaaaacattgtcttcatagtaaacagtattttaaaaggcataagaaatagtaataaatttaatacaaattatgcattataacaactctttggttattttaaacaaattatttggtttttttactagagtgatactaaaaatataaaaatgcgactacagaaattagcttaatctgtaaacatgataaaccctgtaaacatacatttactacataattgtacaagtgtaaagaatatctagtaaaggcaagtgctatacacttcatttagttcttcaaggcatatttagaaatactgctttgtggatctttaatgtttgaagaaggaattcttctaactacactaaaatatgaaaaagtgatgactataccaatggtcaataggatatgcaggcaagagaaaggctttaatactttttacccattgcaaatatgaatttgcttcacatgtcttatgaaccatctgtttagtaaaactgcatattaacaaaagccaaatacttcgaaagtgaagaagtaaacagtttttctgtgagttagttggctagaaatataggtaacacactttccaaagttttttcccaaaaatctaggcagtaaggtgcataaggcaggtctacaaaataataaatagctgcgagtagcactaaatatattgtagtttactcaatagtaaagtatttctttttccaaatttcagttttccatctcaaaatgcatcaaacttttcacacatgacacgtatcacaaatatttcacagttatcatctcagtagtttaagaaaaaactgcctggcagatactatacaagaggtaaatgttaaggataaaattcactatttaagtcatacaggacttatatcctattgtgtgaactctaaagccaggtgtggtggtgcctggctttaggcaggcacctaactctaaagacagcatgaaacaactgtgtaaatgcaacacattatttaaaagtgattaaaaataagttgtcgtactatttcttcaaatgctttttatatgattttcttcaagatctgggaagactcagtggccacattttagtagttccccggaaaattttaagtcaagattttggttataaaactatggcagtaaaaacactacagattgttatttgtaatctaatcaactccatcaaagccctgggtgttttcaattgccatctgaagtttatcccataattcttcaaatgattcataaggtggcaagtccaggcgattaaaacaggtatgagctcttggcagcttttcaggcgtaccccactgttcaactgtaaatgactgtggtccatttgaaccgtatagttcagcaaatccattcataggcacccgagatgtgccagtgacaaactgaagtaatcttattcttttttctgaatccatcattaaaacagccttccaaaaccactgtataacctgatgatttgcactgtagccatttttatactttgtatgttccctccagtcattcacatcaacatctcccagtccacacataagaagctctagttcattttcatcaaaaattttgatgagatcctgtggtattagttcaaagaatccctctttaaaagcagccatttgcttctggattcggtttacaaatcgccattgtattacaagataaatatattcctttttgttcttattggtgacaactatttctgatccaccatttttcagctcatgttgatgtgtctgtccaaaaagttcttcatctatgataaacctgaggtccaattctgttgggtcattttcaagaatccatcttagggaattgtaatattcactatccacagattccatatcatgaagggttattggtttgtgaagcatcatcttgtaaaatgggcggatgaaaaaaccatccaacagtttgccatgataaactgccattccagctacccgaccaataaacttgaagtaagagaggtgatcttcgttacacaatccagagtttggatttatctgtagggtataattgtccgtagcagaatattcaaacaacccataataagggttaaacatttcctttgagatcaggaagaaccattctctggcaactcctccataatccaatcccttttcaccatcaaactcaatccacagtcgagccttcaggaagtctgctctcttgacacccataattctccggtaagagtcttcaagaacagttgctcggcgaagtttcatttcaaatttgtttggaatgtcattctgcttcttcaactttcttcggaagaactcatactttcttttgtaatccctggagtagggcactgctggtccagttattgctacattctccaaccgaggatcttcccattgtgttctttttatattgtgatttatgtagaagattcttccatctgtgtgagttctctcttcccatcctggaggtaaaggccctagatcattggaagtatcaagtgatgtctttcctctcagatgggctggaattttcaatcttggatcttcccaggtggtggttttagtgttgtggtcaataaagaaaggcctcccatttggtgcatgccggacttcccagcctttaggaaggaatccttgctcaatttcagatggctgggtcacctgctggcctgaatcactggtggaggcttgtgattgagggcctgcagaactctggcttgaggtcagctgactggtctccactgtggcctgtacagtgggctttgtccaagtagtcgttctggaattgtgatctacataatatgatcttcctctttcatcttgtttttcttcccaacctggtggtaatccagatgaagtaggcaaaagcacaggaagtgtaggttgttcctcaaaagtataggcttgtaagctgcctcttctgctggaatgatttgagctcgatgctggctggctcacggctgaatttccaaaaatggtgagtctggcattcaattcttctgcaagatgagttggaacatccaagttacttgacggtggaggtgatgggaaggcctggctgctatacatggtggcttcatcttctcttataatttcccagttctcggaagactcttggttgtcaacactttctgtttcctcggatatctgccgcctggtggtaaatgcacgttgtgcttgcagttgaatgttgccattctcagcatctgttaggttgtcctgaggggttggtcttttccactgtgttcttctagattcatggtttacataataggtccttccaaggatatcctgcctctcttcccaccctggaggtagaggagaaggttcttgttgttgctgcaaatggcaagcagcatctggttggtccaaaacaacccagccaggctctaattcctcagcctgttctgcattatcatcttctgagccactggttttaggtaaataagtcatttttagtctcagataacctttaactcttgatttgtgacttcttggatgaagaacaaaatccttaaatgtatatggtctctccaatcttggattttctgtcggtaatggataaagtggaacatccacttgacctaggaaatcatctcttgtcaatcggttttcgtcaaacacttcaaaaagaagccggtgctgctgaggatgaactctgaataatatttcttcattccactttggattcaaactctttttaatggtttttgtttgcacacttgtaagaactccattcattgggtcatataacgtcactctcacgtaaggatcactagctcccaatatatccttcttggcaaggcctattccggctataactcttactctcacaattcgtgaattttcctcgtcctccaggagcccgaacacctccaccgcgcaagttgccatttccgaacgcttccagcaaaccggacgcgctcgcccccgcccagggcaggcaactgtggaggaggaggaggagaagcgggag

SEQ ID NO: 26263 - DNA, 1452 bp, Homo sapiens
  SIMILAR (482)..(640): 451254mologous to Homo sapiens PRO1546,accession number AF116638,Smith-Waterman Score=101.
atggctgaaaggggccaacttagagctcagcctgtagcttcagagtgtgcaagccccaagccttggcagcgtccatgtgccattgagtctgcgagtgcacagaagtcaagaactggggtttgggaacctctgcctagatttcagaagatgtatggaaatgcctggatgcccaggcagaagtttgctgcaggggtggggccctcgtggagaacctctactaaggcaatgtggaagggaaatgtggggtcagagccaccatgcagagtctctactgggccactgcctagtagggctgtgagaagcaggccaccatccgccagactccagaatggtagatccactgacagcttgcaccgtgaacctggaaaagccacagacactcagcgccagcctgtgaaagcagagcttgcccagctcctcaggcttatggctgcacagggaacacctctcagcagctgcctttaccagctgaccttgctcagattgggggtggaggtccccgtggaacctgcagttggaggaaacctgggccctgtgatgctgcagtcactcacacaaggtgtcccaggaagggacatggatgaagctagaaaccatcattctcagcaaactattgcaaggacagaaaaccaaacaccctatgttctcactcacaggtgggaattgaacaatgagaacacttggacacagggattcaacccaggaacacataattcatttagcagtcacatagctttatgtcagctccaatctgggacagttactcagtcttttctggtcttccatgattttgacagttttgaagagatcggaggtggcccaagtctatcccaacagctcagggagcaaggtgggaaccaatcctggacaggacaccatcccaacacagagcgcacacgcacgctcactcatcctggccaactgagacatgcctattcacctaaagagtacacctttgggatgtgggaggaaagcagagtatccaaagaaaacccacacttacctgggaggggctgttacccagcagtgacgttatccacaggtgcaggggccagagctcctacagcttttggccttctagcacctagacgccaaagtgaagagcaacaagaggaccactttatagtgcaaggcacaggcagggtctcagcttccatgaccttcagtagggaacaccttcagtattgtggggaccacctcagtactgggtgggcgactttcagcaaaattcctgcctctataggagctacagtggcacactcagaaagtggagtgacttaccaagtagacatgagaagtgaaagcattcaggtggcaccggagtctgcagtgattaggggctggaaggactctgatttggaggggaaccaagggcacctgagtgagaaacatatgatgtccttgctttatgaaaatgatcctactgactgtcccgcagtagaatgcatttga

SEQ ID NO: 26264 - DNA, 2325 bp, Homo sapiens
  SIMILAR (1461)..(2105): 671254mologous to Homo sapiens putative p150,accession number U93574,Smith-Waterman Score=760.
gagcccaggagctggcggagggcgttcgtcctgggactgcacttgctcccgtcgggtcgcccggcttcaccggacccgcaggctcccggggcagggccggggccagagctcgcgtgtcggcgggacatgcgctgcgtcgcctctaacctcgggctgtgctctttttccaggtggcccgccggtttctgagccttctgccctgcggggacacggtctgcaccctgcccgcggccacggaccatgaccatgaccctccacaccaaagcatccgggatggccctactgcatcagatccaagggaacgagctggagcccctgaaccgtccgcagctcaagatccccctggagcggcccctgggcgaggtgtacctggacagcagcaagcccgccgtgtacaactaccccgagggcgccgcctacgagttcaacgccgcggccgccgccaacgcgcaggtctacggtcagaccggcctcccctacggccccgggtctgaggctgcggcgttcggctccaacggcctggggggtttccccccactcaacagcgtgtctccgagcccgctgatgctactgcacccgccgccgcagctgtcgcctttcctgcagccccacggccagcaggtgccctactacctggagaacgagcccagcggctacacggtgcgcgaggccggcccgccggcattctacaggccaaattcagataatcgacgccagggtggcagagaaagattggccagtaccaatgacaagggaagtatggctatggaatctgccaaggagactcgctactgtgcagtgtgcaatgactatgcttcaggctaccattatggagtctggtcctgtgagggctgcaaggccttcttcaagagaagtattcaagaacttccaacactatgttgaataggatggtactggtaccaaaacagagatatagaccaatggaacagaacagagccctcagaaataataccacacatctacaaccatctgatctttgacaaacgtgacaaaaacaagaaatggggaaaggattccctatttaataaatagtgctgggaaaactggctagccatatgtagaaagctgaaactggatcacttccttacaccttatacaaaaattaattcaagatggattaaagacttaaatgttagaactaaaaccataaaaaccctagaagaaaacctaggcaataccattcaggacataggcatgggcaaggacttcatgtctaaaacaccaaaagcaatggcaacaaaagccaaaattgacaaatgggatctaattaaactaaagagcttctgttctttgctggggtatctgaagactgaaaacacagcaaaagaaactaccatcagactgaacaggcaacctacagaatgggagaaaatttttgcaatctactcatctgacaaagggctaatatccagaatctacaaagaactcaaacaaatttacaagaaaaaaggaaccccatcaacaagtgggtgaaggatatgaacagacacttctcaaaagaagacatttatgcagccaacagacacatgaaaaaatgctcatcatcattggccatcagagaaatgcaaatcaaaaccacaatgagataccatctcacaccagttagaatggtgatcattagaaagtcaggaaacgacaggtgctggagaggatgtggagaaataggaacacttttacactgttggtgggactgtaaactggttcaaccattgtggaagacagtgtggcgattcctcagggatctacaactagaaataccatttgacccagccacccccattactgggtatatacccaaaggattataaatcatgctgctataaagacacatgcacacgtatgtttattgcggcactattcacaatagcaaagacttggaacccaaccccaaaatgtccatccaatgatagactggattaagaaaatgtggcacatatacacccatggaatactatgcagccataaaaaaggatgagttcatgtcctttgtagggacatggatgaatctagaaaccatcattctcagcaaactattgcaaagacaaaaaaccaaacaccgcatgttctcactcataggtgggaattgaacaatgagaacacttggacacagtaaggggaacatcacacaccggggcctgtcatggggtggggggagcgtggagggatagcattaggagatatacctaatgctaaatgacaagttaatgggtgcagcacaacaacatggcacattttatacatatgtaacaaacctgcacattgtgcacatgtaccctagaacttaaagtataataaaaaatattt

SEQ ID NO: 26265 - DNA, 1086 bp, Homo sapiens
  SIMILAR (15)..(239): 291254mologous to Apis mellifera ligustica NADH dehydrogenase subunit 4L,accession number L06178,Smith-Waterman Score=84.
tttcgttgctcaagctattattattttaaatattttttctgtttctttctcttctctttgcttctcttctctttcttgcatccccattatgtgtatgttatttttttttcatagttgtcgcacagttcttgaatagtctgtttcactttttcagcctctttgttctttgcttttctggcctggaagtttctattgatatatcctcaagcgtagagattctttcttcagccatgtccattacactcatgggcctatcaaaggcatttctcatcacttagaacagcgtttcctcatcttctagcccttttctttttattcttttcttaggattttccattctctctgcttcacaggttcttgcatgctgtctactttattcattagagcccttagtatattagttataattgttttaaattcccggtctgataagtctaacactcctgccatatctgagtctgggtctgatgcttgctctttttcttcaaactttgtgttttgccttttagtatgacttgtaattttcttcttgacatcagacatgaggtactggggtaagaaggaactggcagttagtaggcccttgattgggatgggggagcagttgatgccttgccttgactgatcaggactcctcagtgcaccttctcgcaatgaggctccctgctcagctcctggggctgctaatgctctgggtcccaagagccaaatatgtttcttgcgaagaaccacagagttgaaggcactgctgcgtggcttcctgggcggagcctgtgccactgggagtctcacaggaaagtaatgtcgcgagtagggctttaggtctgtaatcaccaaagggttagtgaagtccctgactcgactctctgtggacacatcccctggcaccgcagcctctccttccacgctgagaggcggagcttccttgagagctttatgtttggggccatcacactgtgcagggtcccagtgagtgttaggaggatgtgcagcatctccaggctccaaagtagtgtttgtgatggtgaaatccctagaattttggttagatgtgagtccctgcttgtgaataccttctacagacat

SEQ ID NO: 26266 - DNA, 805 bp, Homo sapiens
  SIMILAR (211)..(708): 861254mologous to Homo sapiens ribosomal protein L18,accession number L11566,Smith-Waterman Score=728.
tcagtcatacttacttgccaaactagagaatgcatctgtgttcaaattcctcagggcatccttaacaagctgtgttccactccactgaattggcttcccgtggattctctctgaagggcccctacatattgtttcctgaggaaacctgagtttacaccaacatatccttgtctgtaatgaccacttctgaagagtggttgcattagttttctcttgctgaggctgttggtcaaactgtacaggtttctggtcagacggaacaactccacattcaaccaggttgtgctgaagaggttgtttatgagtcgcaccaaccgaccacctctgtccctctcctggatgatccagaacataaagcttcctgaccgggaaaacagaaaggctgtggctgtggggaccataacggatgacgtacgggttcaggaggtgcccaaactgaaggtgtgtgcactgcgcatgaccagccaggcccgcagcggcatcctcggggccgggggcaagatcctcacttttgaccagctggcccctgatgccccgaaaggctgtggcaccgtcctgctctctggtcctcgcaagggctgagaggtgtaccggcattttggcaaggcaccgggaaccccgtacagccacaccaaaccatacatccgctccaagggccggaagttcgagcgcaccagaggccgactggccagccgaggctacaaaaactatagatcctatcctcttattaaagactgtctctagagccgtgctttccgatacagcaaacaagccacatgttgctcctgaatacttaagatctagt

SEQ ID NO: 26267 - DNA, 675 bp, Homo sapiens
  SIMILAR (455)..(541): 441254mologous to Human immunodeficiency virus type 1 tat,accession number Y16030,Smith-Waterman Score=60.
tcacataatattccaaggcagacattccagattgttggagtaggcgcagggagaaagttcggctctatgcgttccctcaggaaacaggctgatagtggctttgccatattccaatattaactggcttccaaagttgctatcaccattgtcattatcagtatagctcatgggacatttcctctctaggtacaccaataggtgcaacgcgtacccacataagatgtatttcttattgtggtctgtttcctggagattgctgtcgagggtctgtgacaaatcaacacagggccactgcggcttggcatacttagtttcctcatcatccaaatcaactattgcaaacaccttgttatcgtcattgccatgatctctgagcacactcttaagcagcagggactgcccattagcgaccatttcgaaacagttgagggtattggctagggggtgtgtcgtcaacaactgtttctgcaagcacttgctgaacacttgttcattagctggcactgtgcctgggtgaggggctagttctggaagacagaagttcaaactactggcaaagttcaaagtgttggcaaggctgtgctcctcaggaggctctagaggagaacctttttcttgccttttcctgtttctaggggccaccggcatccttcggctcatggcctcttcctccat

SEQ ID NO: 26268 - DNA, 1089 bp, Homo sapiens
  SIMILAR (256)..(498): 961254mologous to Homo sapiens Similar to CG11985 gene product,accession number BC000198,Smith-Waterman Score=421.
ctaagagacatagttgggaccagaactggcgcctgctgacttctgggtaatccatccccggttgtgaagggacggccgtgccgccacgacggctccgaaatacaccaagagtttattttcggggctgctcgtagtccagtcattcttgggtttcccatttcctatcagccccaagccacccacggatgctccccacctccagacatcgccctccactgcgtcctctgacctgagagcgaaggggaaagcggcgagatgactgaccgctacaccatccatagccagctggagcacctgcagtccaagtacatcggcacgggccacgccgacaccaccaagtgggagtggctggtgaaccaacaccgcgactcgtactgctcctacatgggccacttcgaccttctcaactacttcgccattgcggagaatgagagcaaagcgcgagtccgcttcaacttgatggaaaagatgcttcagccaccgcagtgcggggcacctctcccagcgtttctccggtttgccaatcctcttaagtattcctgtctccaaaggaccggctctccatggctcctgcgcctcgtgctttccgcgtacagaagtgcttgcccggggagtcccgcctgacctgccttcatgtggacccttagaacagcactgggcgtagcggcgtgcacctgtagccccagctgctggggaggaaagaaagaaatatttcttatagttatggaggctgagaagttcaaagccaaggggctgcatttggtaagaaccttcttgcttgtggggactctctgcagagtcgtgccgcgcggagtccgcgggccaggcgaggtagcctggccgaggctcctgcctgcgtcctgccggggatggcggtcggtgcttgggacaccggcggccacctttgtgcggcttggggcgcgcttcccttttctccgtcgtctgcagctcttcgcttctgcgattccactgctccagttccagtcttggttcaaagggccccaggtagagctccggctgtggctttggggagtgcaaggtgccataagccttagcagcttccagaagctgagcatatgtcagcaccat

SEQ ID NO: 26269 - DNA, 988 bp, Homo sapiens
  SIMILAR (407)..(661): 341254mologous to Hylobates klossii dopamine receptor D4,accession number AB032916,Smith-Waterman Score=91.
  misc_feature (1)...(988): n = a,t,c or g
atcgagttcgctaccccatgnggnggaattccgccattcttctgcgacggcgcggacctggagcttccgcgcggtggcttcactctcctgtaaaacgctagagcggcgagttgttacctgcgtcctctgacctgagagcgaaggggaaagcggcgagatgactgaccgctacaccatccatagccagttggagcacctgcagtccaaagtacatccgcactggccaacgccggacacaaccaaagttggagtgcttggtgaaaccaaaacccgagctcttactgcttcctacatggggccacttccgacctttctcaaactactttcgccatttgggaagaaatgagaagcaaagcgcagacgtccgctttcaactttgatggaaaaaagatgctttcagcccttgtggacccgcccaagccgaaaaaagccccgagggagaacctggagacctcctgcccttaaccccacccgaattgcggggccaccctctcccccagcggtttctcccgggtttggcccaatccctccttaaagtatttcctgttttccaaagggacccgggttttccatggggttcctgcggcttcgttgtttttccgcggtacagaaagtgcttgccccggggagtcccgcctgaccctgcctttcatgtggaccctttagaacagcactgggagacctagcgaggactcctgagaaactgtgctggttggagaggtcctagagccggcgagcgtttgagaaagagggcatggcgcgtacagaagtgcttgcccggggagtcccgcctgacctgccttcatgtggacccttagaacagcactgggagaccagcaggactcctgagaactgtgctggtggagaggtcctagagccggcgagcgtttgagaagagggcatggcgctggagtgagatgggatttggcgtctcgtttttggctaattgattgtcattggctttttccataaagtttagaaatcgttc

SEQ ID NO: 26270 - DNA, 708 bp, Homo sapiens
  SIMILAR (585)..(160): 851254mologous to Homo sapiens integrin associated protein,accession number Z25521,Smith-Waterman Score=615.
tcagtgctgcagatgctgtaaaccccagtagcatcctttgagaaccacccctctaagttcagtgttgatataacatttttctttcttgctaccattgcggttcccagggcttgtggttgcggaagagatgagggaagttgcagctcctgcagcagcagttagcgtgtgggagcggtcaaacccaggggcaacacgatattttagctcgatgatcgtttcaccttctctggttaattctgttacttcacaagtgtagtttcctgtgtgtgagacagcatcactcttatccatcttcaaagaggcatctccttttagtaattgtgagacttcaatttttgcactactaaagtcagtggggacagtggacttgtttagagctccatcaaaggtgtaaatatctcttcctttaaatttccactttacgtatacttcagtagtgttttgtgcctccatattagtaacaaagcatggaatgacgacagtgtcattacaaaacgtgaattctacagattttgttttattaaatagtagctgagctgatccagcaccaccagcttccatgtagccatccactttcagggggaaaaataaaagatcaacaggtggttttcctctcattgagtccctagagctctcataataaaactctgtactaggctcccaagaccaaccaaaggccacaggactaccctgaaggatgcaatgcat

SEQ ID NO: 26271 - DNA, 1050 bp, Homo sapiens
  SIMILAR (1)..(381): 1001254mologous to Homo sapiens Human secreted protein, SEQ ID NO: 6116,accession number G02035,Smith-Waterman Score=660.
atgactgctgctctggccgtcgtcacgacgtcgggtttggaagatggggtgcctaggtcccgtggcgaagggaccggggaagtggtcttggagcgggggcccggcgcggcctaccacatgttcgtggtgatggaggacttggtggagaagctgaagctgctccgctacgaggaggagttcctccggaagagcaacctgaaggccccgtccagacactattttgcactgcctaccaaccctggcgaacagttctacatgttttgtactcttgctgcttggttgattaataaagcgggacgtccctttgagcagcctcaagaatatgatgaccctaatgcaacaatatctaacatactatccgagcttcggtcatttggaagaactgcagattttcctccttcaaaattaaagtcaggttatggagaacatgtatgctatgttcttgattgcttcgctgaagaagcattgaaatatattggtttcacctggaaaaggccaatatacccagtagaagaattagaagaagaaagcgttgcagaagatgatgcagaattaacattaaataaagtggatgaagaatttgtgattaggattagctcggcatccacctatactaccctttttaatagatttaagtaccatggaccaaccagtactggtaaccattattttatcaagcttgaacataccagagatgagatgtcaaaaatatgtatcaatgtgattggtcagagaaattctgtaggtcagaagtccagtaggcgcagctggtttctctgtttcaagtctcacaagactgaaatcaaggcattcgctgagctgctttcccttccggaggctctaggggagagtccatttccagcccctgggtttgaccgctcccacacgctaactgctgctgcagaagctgcaacttccctcatctcttccgcaaccacaagccctgggaaccgcaatggtagcaagaaagaaaaatgttatatcaacactgaacttagaggggtggttctcaaaggatgctactggggtttacagcatctgcagcactga

SEQ ID NO: 26272 - DNA, 2077 bp, Homo sapiens
  SIMILAR (1141)..(1551): 291254mologous to Hordeum vulgare extensin,accession number Z98204,Smith-Waterman Score=131.
tttatcatcattcatttatccttttatttagtggcttagatcctagaagatagattccctataaaatcattttagccacgaaaatattccataagaaaacccaccttcaaatgttaatgaggaatactgaaagttttttttaaaccctaaaaaaagtgggccaattttaaggttaaccccataaaagctgaaggccaaaggccagtttggggttccttggaaaagaatccctgccctacccatcctccagtggccctctgggccacaaagccaccttatgatcactgccagaggtggagccaaggtaaaaggactgtgtccagccagttccatgttgtggacagcagcagcatcctgcagaaaaccgcaggtccatatacccttgggctttacacagggaattgcttatggaaaaatgagccaccagggtgggagcttttaacataggtaatgattagtgaaagcctcctagaaagtgagaatttgtaattatctgtattaaacattacattcagtgtaaaaggctttagaccatcataatcaccatgatataatatgtgagtatgtatatgtaaaaaaatacccattgaacataaaattatgttttgaaatctatgcaacatgaaatatagtttgatataaaaaaacccaactaatcagaaacatgaaaaccagtatgttttaataaaagcctgttagctggttctggaataactgtggcatgcatgttcctagtcatgttggacttctccttcaggctttgattgggagtagtgtgtgttccacaatgccaattctaatgtccatctctacagtttccttgcttcagttttgttaaggctctgtttaatcttcaccaaaggagcaccatcagccatgctggcggcccttttcttccatttccttgttttaccttttctaattcttccataacctcagagaggagtctgggtcctttcggtaattcttcattttccctggttgggatcgggtcctttgcctaactcagctggggattgagctgcaagatattcttggaaccaaattctcaagcctgattgttgatggaaattatcttcggctgctggaatctctttccaaaggtcctaggttaatttccattatggggagttttgtccaaaaatcccttcaggaatgtatgaatcaaaacttggatctcatactgataaaactccccacttcctcccagctcaaaaaactcgcagcacgccgagcccagcaacagcgccgctaccaggggccacatctccgcgcccgccgcggggtcgccgccgccgccgcaggtgtccggagcagcagccgccgccgccgttacaggcaggaccgaccgccgccgcgcgtcacaggcaggacccactgcccaggttttctcctctttgctttcactcccaccctcgcgcttcaggggccgggtcccgtcccgccccagcccgcgtctctccctggacccgacgtccggcagcgcccgtttcctccggacgcggccgtctagcgccgaagcggtccctgagcccgaggccgccacgcccagggcagggcggtggtcgggtacctgcccgcagggagcttccactcgcccctcgcgggctctgcgttcggctcgtctactcgctctgctcttccctatgcggttctcttccctctttctcacttggttctttagtgttttcatcctctgatcagggttaatcaaacaagttccattcacggtggtaaacattgttacagttctgtaggtcagaagtccagtaggcgcagctggtttctctgtttcaagtctcacaagactgaaatcaaggcattcgctgagctgctttcccttccggaggcttattctgagggccacgctctctccgaaggctcctaagaatccttccttcctagcctggcagcctttggcattccttaacttgagctgcatcacttcaggctctgccgctgtcttcacagggtcttctctgtttctgtgtgctctccttaatccatcttgaacagcccctgggtttgaccgctcccacacgctaactgctgctgcaggagctgcaacttccctcat

SEQ ID NO: 26273 - DNA, 750 bp, Homo sapiens
  SIMILAR (645)..(49): 951254mologous to Cloning vector pBACe3.6 levansucrase,accession number U80929,Smith-Waterman Score=1012.
ctattcctcggaaaaagcctctgttttttcatgtagcttgtgataacccacattgtgcccttgggcttgcggcattggaagttgagagtaagtgaatgtcacatcgtttggatcaagacccatttgcagcacaagccctgttttgttcagcggcttgtaaggcccggttaaagagtttgatacataaccaagcatgtaaatatcgtttgagttaataccatcgatcgtcatttttgaaccgcgtgaatcagtgaacaagtaccatttgccgttcattttgaaaacattcgcgcgctcgatttcatcagttaccgtgtttgaagtgatcagcggcttcattacttttttcaatgtgtaatcattatttaactctatgataccgagggcgccgttcgctaactcagcatcgcgttttttagcgctctgctgaagcttctggctttctttacggaagaagttcgtgccgccgccgtagtacgctttgttaaataaagattcttcgccttggtatccgccctctgttcccgtgttggcttcgaatacaaggtatttatggcctttgtcttcaacgtagtgagggtctctcagcgtatggttgtcgccggatgtataattgccttcatcgataaactgctgcacgctctggttacccaggccgtgccggcacgttaaccgggctgcatccgatgcaagtgtgtcgctgtcgacggtgaccctatagtcgagggacctaataacttcgtatagcat

SEQ ID NO: 26274 - DNA, 344 bp, Homo sapiens
  SIMILAR (3)..(248): 901254mologous to Cloning vector pZC320 SopB,accession number U26464,Smith-Waterman Score=354.
  misc_feature (1)...(344): n = a,t,c or g
gtgatgcacttcaaaaagcctttacagataaagaggaattacttaagcagcaggcatctaaccttcatgagcagaaaaaagctggggtgatatttgaagctgaagaagttatcactcttttaacttctgtgcttaaaacgtcatctgcatcaagaactagtttaagctcacgacatcagtttgctcctggagcgacagtattgtataagggcgataaaantgtctgggaccacggtcccactcgtatcgtcggtctgattattagtctgggaccacggtcccactcgtatcgtcggtctgataatcagactgggaccacggtcccactcgtatcgtcggtctga

SEQ ID NO: 26275 - DNA, 384 bp, Homo sapiens
  SIMILAR (1)..(261): 1001254mologous to Cloning vector pZC320 SopB,accession number U26464,Smith-Waterman Score=430.
acaccggcgttcggtcgaagagtatctggtgtcatagaaattgccgatgggagtcgccgtcgtaaagctgctgcacttaccgaaagtgattatcgtgttctggttggcgagctggatgatgagcagatggctgcattatccagattgggtaacgattatcgcccaacaagtgcttatgaacgtggtcagcgttatgcaagccgattgcagaatgaatttgctggaaatatttctgcgctggctgatgcggaaaatatttcactctgggaccacggtcccactcgtatcgtcggtctgattattagtctgggaccacggtcccactcgtatcgtcggtctgataatcagactgggaccacggtcccactcgtatcgtcggtctga

SEQ ID NO: 26276 - DNA, 1397 bp, Homo sapiens
  SIMILAR (996)..(145): 961254mologous to Cloning vector pSacBII SacB,accession number U09128,Smith-Waterman Score=1441.
tcagaccgacgatacgagtgggaccgtggtcccagtctgattatcagaccgacgatacgagtgggaccgtggtcccagactaataatcagaccgacgatacgagtgggaccgtggtcccagaccttgggtaaaaatttgtacccgaacaagtaccatttgccgttcattttgaaaacattcgcgcgctcgatttcatcagttaccgtgtttgaagtgatcagcggcttcattacttttttcaatgtgtaatcattatttaactctatgataccgagggcgccgttcgctaactcagcatcgcgttttttagcgctctgctgaagcttctggctttctttacggaagaagttcgtgccgccgccgtagtacgctttgttaaataaagattcttcgccttggtatccgttttctgttccccgtgtgggctttcgaataccaaggtatttatggcctttgtcttcaacgtagtgagggtctctcagcgtatggttgtcgccggatgtataattgccttcatcgataaactgctgaacgttctgatatgtttttccgtctccgtcaaaaatcgttttgtgatcttccactccgttgattttgagtgtgtcatcagattttgacacatttacctgcgctgttgtcaggctttgtttgccgtaatgtttaccggaatagtcagtgtagaataaacggatttttccgtcagatgtaaaggttgcagaaccggaccattcttgcgtctgatctttcaggatcggatcgttggcgtcgaacttatcgctgtctttacagacacggcccgcgtttttccagctgtcgattgagttgtcgccgaccttttgataaaacatgtagattgatgtgtcatcagcgtctttcgggcttcccgcaagagcaaacacaacgtgatagccgttgtattcagctactgttccgtcagcgtggggcagcggccagctgtcccacacatcaagtccttttgcagactcaggggatttctggttacccaggccgtgccggcacgttaaccgggctgcatccgatgcaagtgtgtcgctgtcgacggtgaccctatagtcgagggacctaataactgaaccttcatagctgagagaaggaggttctgctccaccaaaaagtgtctgctggcctgtgggggcttgcatcaagagattgtctagtatgtctagttctttttcttcctttcctttcatcaaacatgcacatgcctgttgcagggttttatcctgactgagcagcaaaaatgcttgaacgcatggtatttcatcccatgtttcatcccactggttacccaggccgtgccggcacgttaaccgggctgcatccgatgcaagtgtgtcgctgtcgacggtgaccctatagtcgagggacctaataa

SEQ ID NO: 26277 - DNA, 901 bp, Homo sapiens
  SIMILAR (1)..(204): 971254mologous to Cloning vector pZC320 SopA,accession number U26464,Smith-Waterman Score=338.
atgaaactcatggaaacacttaaccagtgcataaacgctggtcatgaaatgacgaaggctatcgccgttgcacagtttaatgatgacagcccggaagcgaggaaaataacccggcgctggagaataggtgaagcagcggatttagttggggtttcttctcaggctatcagagatgccgagaaagcagggcgactacccgcccccggatatggaaattcgaggacgggttgagcaacgtgttggttatacaattgaacaaattaatcatatgcgtgatgtgtttggtacgcgattgcgacgtgctgaagacgtatttccaccggtgatcggggttgctgcccataaaggtggcgtttacaaaacctcagtttctgttcatcttgctcaagatctggctctgaaagggctacgtgttttgctcgtggaagtctgggaccacggtcccactcgtatcgtcggtctgattattagtctgggaccacggtcccactcgtatcgtcggtctgataatcagactgggaccacggtcccactcgtatcgtcggtctgaccgggcagatagttcaccggggtgagaaaaaagagcaacaactgatttaggcaatttggcggtgttgatacagcgggtaataatcttacgtgaaatattttccgcatcagccagcgcagaaatatttccagcaaattcattctgcaatcggcttgcataacgctgaccacgttcataagcacttgttgggcgataatcgttacccaatctggataatgcagccatctgctcatcatccagctcgccaaccagaacacgataatcactttcggtaagtgcagcagctttacgacggcgactcccatcggcaatttctatgacaccagatactcttcgaccgaacgccggtgt

SEQ ID NO: 26278 - DNA, 697 bp, Homo sapiens
  SIMILAR (626)..(579): 871254mologous to Homo sapiens HDCKB03P,accession number AF068291,Smith-Waterman Score=71.
ggtcactccaggtgtggaattttagaaagtgagtccttggagtaaatggcaccgtggctctggcagcagatagaaaggaatgatgctctggagaggaggtagggacactctgcggtcggccagtggatacatgaggggcccggctggaagtgggatctttaattcttcggtttatcttccactgctcatgcctctgtcttcataaatggtaatttcaatctaaacagaactcgcagtcctcgctcaaatagggtctgttcaaggaggaggcccttgtggaagcataagatcttcctcaattctgctcttgaaatgtatttggagactttcttcaagaaccttctcaataatgagtttcccatgccataggaaagatggtaatatgctgttaaacaagccaaaacaaccttcgaagatatgactggccgccgagcttctctgcttctgcataaaggttatttagagttcgaactgtttcttcaaactgctgcctatcaatccggttctccagctccgcagggaacttggtctggaactggcagcgtgtgccactgctgtagtctcgctgaatgaacaccttttcggacaaccggcgcctgctgcggcctcatggcgaggacaggacacgcccgcgccgcctcaatttgccctccagatgctgtcgcaccgctttcgccgtcaccgaacgcgtggttcg

SEQ ID NO: 26279 - DNA, 1286 bp, Homo sapiens
  SIMILAR (8)..(562): 861254mologous to Cloning vector pZC320 SopB,accession number U26464,Smith-Waterman Score=777.
gtccctggagtatagggtcaccgtcgacagcgacacacttgcatcggatgcagcccggttaacgtgccggcacggcctgggtaaccagcgttatgcaagccgattgcacaatgaatttgctggaaatatttctgcgctggctgatgcggaaaatatttcacgtaagattattacccgctgtatcaacaccgccaaattgcctaaatcagttgttgctcttttttctcaccccggtgaactatctgcccggtcaggtgatgcacttcaaaaagcctttacagataaagaggaattacttaagcagcaggcatctaaccttcatgagcagaaaaaagctggggtgatatttgaagctgaagaagttatcactcttttaacttctgtgcttaaaacgtcatctgcatcaagaactagtttaagctcacgacatcagtttgctcctggagcgacagtattgtataagggcgataaaatggtgcttaacctggacaggtctcgtgttccaactgagtgtatagagaaaattgaggccattcttaaggaacttgaaaagccagcaccctgatgcgaccacgttttagtctacgtttatctgtctttacttaaagtccgtgggtaacagccagaaaagcataactggcctgaatattctctctgggcccactgttccacttgtatcgccggtctgataatcagactgggaccacggtcccactcgtatcgtcggtctgattattagtctgggaccacggtcccactcgtatcgtcggtctgattattagtctgggaccacggtcccactcgtatcgtcggtctgattattagtctggggaccacggtcccactcgtatcgtcggtctgattatgtagtctgggaccatggtcccactcgtatcgtcggtctgattattagtgacattaatcgtgccgatacccaggttaggcgcgctgtcaataactatgacatcatagtcatgagcaacagtttcaatggccaggcggagcatcaggtgtggatcggtgggcagtttaccttcatcaaatttgcccattaactcagtttcaatacggtgcagagccagacaggaaggaataatgtcaagccccggccagcaagtgggctttattgcataagtgacatcgtccttttccccaagatagaaaggcaggagagtgtcttctgcatgaatatgaagatctggtacccatccgtgatacattgaggctgttccctgggggtcgttaccttccacgagcaaaacacgtagccccttcagagccagatc

SEQ ID NO: 26280 - DNA, 4080 bp, Homo sapiens
  SIMILAR (1579)..(1355): 601254mologous to Homo sapiens hypothetical protein,accession number AL136844,Smith-Waterman Score=185.
ttttttagatctgacataaaacctcaagtatttttgctctaagattatgctctttacataagttagaatatatttaaacataagggggagctaaaagcaaatgggggtaaacaaaccagaaaaatcaaaatacaaatatacacagagccaaaatagtatttccgtcagcagcaaaacagaaacaattccaaaattaatgtgcaaatgaaaataaagtaggttaacagtcattcatttaataagcttgtgtatttgataatgaaaacgcttagctttccttttctgacctcggaaaagtaatcaccatctttagtaaggtattacttttaaaaggtatggactttaacaagtgaataaagcatgtttagagtatgtttatgtttagaaacaataccttgaacactacagaaaacaacaatattctgaaaatccagtttattttccatgtcggggacagatccagtcagggggatcagtttttctgccgtgtgtaaataatttatcaaaaataagttttctccacaagactcttttcccatcaactctgaaaaccctggtctgacaacataccccaataaagcttttgaaaatcacctcttgaaatttggaagaaaatgtgccaagtcttttcctgtaacatttactgcactacaaatggctaaagagcaatttatggtttaaaaggtgaatagtacaacaggtgagttcaggaaattgttttagtgcactttgctccagttttagccaacatgctacattttcctttttggtttttgttttgttgttgttgtttttttgggggaaggagagggagaccgcacaaagtggacttgaggatttccattgtacgaaaaagatatgactctgcaagcaaaacagtgtaagctgccttttttcttaagacctggacattttaagacagaagctttgcaaaacattacacaatttttttattattaaatgagaaaatctcatttgttacatcgtcacattgctagtcagagaaatgttgcagtgatggaaggaaagtcaatgttggaccaaccccaagtcctccattcctacaacattcatttacaaagaaataatcgttcaacacagcccaacaaaacattcttgggttttcttcatattgaaggtcccccaaaaaatcctcttctaatgggggtatttcacctacataaattataggttcttcatttttacaattcaccccaaactgtatggggaggtggtatcacacctaagatttctaaaggctgttaggggaatcccttcacacatcgtcggtcatctgatggtattcactggcttacttgtctctgtggtccattcattctcagttgtgggggttttgaaagtgctggttcttccacgggtccaaacttggaagtcacagatcaagcccattttccaaaatacccattttttcctcagaccattccttctgtaactgttcactaataacttggaattctctcatttcatcctcagttaagggagcacatgtttccaccatttcaactgtcctccctgcccagccccatttccctttaaacaacctgtgttctgccctcaagtgaacttgaaagaacatcagtttgtgggaaggttgaagaccgaatgatctgctgggaaatcactgaggcattgccattctcttgaggaatttcattttcatcgaagtttcggtttatatccctttcttggtgagtactattgctgttatgtaaattaaatgagtcgtcatccttctctgagccagcacggctttcatcttcatgttcctcttctactctgtctcttttcaatgctttcaaaaattccactcttcttatcagtgcgcattcgtgtccagtttggttagacgaggctgctgattaagtttgtcaacaggagaagaggaatttgagcgattacactctttccactgaaatttgtaagatggaacctaaaagttccttggccagttgatttaaaaagccattaaaagttgcccaacgcccaaatgtggactcatgagggaaagaagttcccaactttattttcttttgtttggcttttcccattgtgtaggttttgtaggtggagcagcaggtttagggactaaacctttataaacacttggaccagttccattcttaactggctgtgacggaagatttcctactactgggaatccagatagctgtaagtcttttgtattacctttcttaatgaccagcatccttggagctctagatttaggattcggaggatattcccacacacctgcagctaaagacttattgtgatttggttctctctcatactcaggatttaaagacggaaaatcctcagcttcaaactgtttgcgttctctcttgtcttctttcctcccggtttcattgtcaggtatgttgttttcatgtagtccttggctttttcctgcatggaaaatactgctacgagaacgggaacttccaccatggtatccacctcgatgatttatgttttctgtaccatttcttccatgtgtacgccatccatttttttctttccttccaaagttacctccattaggaccgtccaatagcagaatcaaagccatcatgaagagttgtgtccgtcgacggttcacatcataacgattcctctgtccatgcaaagttttcaagaatgcgtctcaaaattcaatgacgatttcaaactgctggtcaggacctttgttgatgatggtggagtagggaaattaagccaggctggagcaaagtcatgctgcgccatttaggtccagtctctccaactcagtgaaacaaggcttcaacacctcatggcaagtccaaattccaacaggactgcacaggaaggtgttggttttttctctgtaatctttattttccagtttgtatttttattttgtatcctctgaaataatatcgaagttctttgaagatacttaacctacgactatttgacatagagttacttcaagtcagctacccatacttctgttttaaagttttcatatggctatctcccgaattagccaagttctttagatttaagatcaaagtcttctttattattccatgtacttgccactgttgtacttgtccactccagatgaaatatccaatttacgagccaaaaagcaaaaacaaaaagaaaatttcacatctgaagagcattcctaaacatcgggcatatacagagacacacatagctatctcaatactaccatgctgccggaaaactgcaacatcttaaatttccacgtaaataaaagataaaaggaaaaaaactctgtattctttcaatctcttcattcagaaaaagtgtcccattgtgacatgaaagagctgaagtcaaaaatccctaaaactttcaataagggtaaaaataaaactgcccatgaaaccttcaggcaaatactcagtcatttggaaactggctgaaactactcagtacacaaatcaacgtctctcaagtttcggctgaagaaccccaacaacgggggtgggggaaaggggaggcaaaaattaccaccagctggaaatactgtaaccagttatataatccgtttgaaccaaaatactgaagaaatgctgcctggggtctctttataagtagcttgctgaattgttcactactatcaattcacttcacagacgattcttgccaattttaataaacttctggggcaaaattatccaaaaacactgtaaatccaaaatggccacttaaaatatccagggccttttacacaaaacctagatgatgatcttcatatctgagtaattcaatcacctagaggggcctatgtgcgcctctcccccctctcactccttgcttctcgccgcccctccgtcggcgggcagcctcacacctcgcgccaccaacgccgcttccgacccctcaaaccccaacacggacacgggcactcccctcctcccccgggctcgggcgtggagcctagaggacggtgttaccttctgccccaccagaggtgcccctcgcctgggggtgccgccgcgcctgatcccggaagaaggttttcggtactttgaataatccccttttgccgcttttcccacgaaa

SEQ ID NO: 26281 - DNA, 648 bp, Homo sapiens
  SIMILAR (586)..(8): 401254mologous to Rattus norvegicus glycoprotein,accession number L08134,Smith-Waterman Score=237.
ctaggggaccactgtcaggatgcggtcactggagtcactggggaccactgtcaggatgcggtcactggagtcaccggggaccactgtcaggatgcggtcactggagtcaccggggaccactgtcaggatgcggtcactggagtcactggggaccactgtcaggatgtggtcactggagtcactggagtcaccgatgaccacggggaccactgtcagatcactggggaccactgtcaggatgtggtcactggagtcactggagtcaccggggaccactgtcaggatgcggtcactggagtcaccggggaccactgtcaggatgcggtcactggagtcaccggggaccactgtcaggatgcggtcactggagtcaccggggaccactgtcaggatgcggtcactggagtcactggggaccactgtcaggatgtggtcactggagtcactggggaccactgtcaggatgtggtcactggagtcactggagtcaccggggaccactgtcaggatgtggtcactggagtcaccggggaccactgtcaggatgtggtcactggagtcactggggaccactgtcaggatgtggtcactggagtcactagagtcatttctgtgctgtggcattttaatgtcgttactttgagtcat

SEQ ID NO: 26282 - DNA, 957 bp, Homo sapiens
  SIMILAR (104)..(60): 801254mologous to Homo sapiens prostaglandin E2 receptor EP2 subtype,accession number L28175,Smith-Waterman Score=60.
tcacagaagcattcggatggcctgcaaatctggatttttactgacttctcgctccaaactggctgatataactggttgacgaatactcgcacctgtagagtgagatacacgctggttggttgtggccgcttctatggactgcctagtctgcgtcagtgtactgcacagcgtggtatctgctgagatcccgcagtcgacctgtgtgacctgtcttctaggagactgttgttctcgtgaagatatgttctcgtcatgttgtttagtataagtctggtttccttcgttttcatctcggtccatgtcatatgcaactacccttttgcattgttttttgtttgtgcttctttttgtgggggggccggcggtcttgtagaatttgtgctgatgattgttggagatgccagtgctgcgttgctgtgcatgccacgctgtgagtgctagttgatggccatgcacgggctgcactggcagccctcgctgtgccctgggggtgcccggcaatgccttcccatatgttcgggatcctctagagtcgagccttaagcatgcggctgccgttagtgtgtcacgaggtggacctcggggagtccgcttagttgcttgtattgctatttcgtttcgtttggtaccgtcaatgagcacgtgtggtacggtccctgcactcttctttctccttgtctctgtcttgctttttgtcgcaccgggaaaactgtcgcaccggttgttggtacaccagggatctagtaggttgcctaacggggcttgcaaatgatcaagtcttcccacgcagtcccctccaacctctgccacgggtttgcatagttgaattcttagtcgccatctaaacctgatgctgcgaaactgccctgacctgcaggtagatgcccagccatggccctgcagccgtgcccataagatgctgtggatcatcaggacatgagccaccatcccggccat

SEQ ID NO: 26283 - DNA, 2063 bp, Homo sapiens
  SIMILAR (593)..(1999): 991254mologous to Homo sapiens prostaglandin E2 receptor,accession number L25124,Smith-Waterman Score=2382.
cgggagcggaccgtaagcccggcagcccgagaggaagatgaacagccccaggccagagcctctgcgagagtggaccccgagccgcccccaggtagccaggagcggcctcagcggcagccgcaaactccagtagccgcccgtgctgcccgtggctggggcggagggcagcccagagctggggaccaaggctccgcgccacctgcgggacagcctcacacctgaacgctgtcctcccgcagacgagaccggcgggcactgcaaagctgggactcgtctttgaaggaaaaaaaatagcgagtaagaaatccagcaccattcttcactgacccatcccgctgcacctcttgtttcccaagtttttgaaagctggcaactctgacctcggtgtccaaaaatcgacagccactgagaccggctttgagaagccgaagatttggcagtttccagactgagcaggaacaaggtgaaagcaggttggaggcgggtccaggacatctgagggctgagggctggggggtcgtgaggctgccaccgctcgtgccgctacagacccagccttgcactccaaggctgcgcaccgccagccactatcatgtccactcccggggtcaattcgtccgcctccttgagccccgaccggctgaacagcccagtgaccatcccggcggtgatgttcatcttcggggtggtgggcaacctggtggccatcgtggtgctgtgcaagtcgcgcaaggagcagaaggagacgaccttctacacgctggtatgtgggctggctgtcaccgacctgttgggcactttgttggtgagcccggtgaccatcgccacgtacatgaagggccaatggcccgggggccagccgctgtgcgagtacagcaccttcattctgctcttcttcagcctgtctggcctcagcatcatctgcgccatgagtgtcgagcgctacctggccatcaaccatgcctatttctacagccactacgtggacaagcgattggcgggcctcacgctctttgcagtctatgcgtccaacgtgctcttttgcgcgctgcccaacatgggtctcggtagctcgcggctgcagtacccagacacctggtgcttcatcgactggaccaccaacgtgacggcgcacgccgcctactcctacatgtacgcgggcttcagctccttcctcattctcgccaccgtcctctgcaacgtgcttgtgtgcggcgcgctgctccgcatgcaccgccagttcatgcgccgcacctcgctgggcaccgagcagcaccacgcggccgcggccgcctcggttgcctcccggggccaccccgctgcctccccagccttgccgcgcctcagcgactttcggcgccgccggagcttccgccgcatcgcgggcgccgagatccagatggtcatcttactcattgccacctccctggtggtgctcatctgctccatcccgctcgtggtgcgagtgttcgtcaaccagttatatcagccaagtttggagcgagaagtcagtaaaaatccagatttgcaggccatccgaattgcttctgtgaaccccatcctagacccctggatatatatcctcctgagaaagacagtgctcagtaaagcaatagagaagatcaaatgcctcttctgccgcattggcgggtcccgcagggagcgctccggacagcactgctcagacagtcaaaggacatcttctgccatgtcaggccactctcgctccttcatctcccgggagctgaaggagatcagcagtacatctcagaccctcctgccagacctctcactgccagacctcagtgaaaatggccttggaggcaggaatttgcttccaggtgtgcctggcatgggcctggcccaggaagacaccacctcactgaggactttgcgaatatcagagacctcagactcttcacagggtcaggactcagagagtgtcttactggtggatgaggctggtgggagcggcagggcttgggcctgcccctaaggggagctccctgcaagtcacatttcccagtgaaacactgaacttatcagaaaaatgtatataatag

SEQ ID NO: 26284 - DNA, 1196 bp, Homo sapiens
  SIMILAR (774)..(1193): 551254mologous to Homo sapiens Human cyclic nucleotide- associated protein-1 (CNAP-1),accession number Y70473,Smith- Waterman Score=414.
ttgctttctttcctcatattttgcgggaatccctccagccctttgctgcagctttacagcagctggttcccagtgaactggagttttaaatgtgtccctctggtcaatctgttcattaaataggtggactttagaaaggagttcccgattgctcttactgtgaatgcaagggatggagcagagaaccctgaggctgcactggggatctgtctaatctcactgtgctcagtcttcctgtgtattaaatggggagcctgcctgcctcccccagggtggtttcccagccaagtggccacatgctttctgcagaagggctgataagtgggctgccccgtggagtaggcaggctttggctcccagctagatttgaggtggaattttggacaatggaagaattttcattgtcttcttcccctgacccctggtcctaggaaagccaggccaccctgtgctaacccccctcctatggctcccttttaggttgaaccatgattccggtgacagagctccgctactttgcggacacgcagccagcataccggatcctgaagccgtggtgggatgtgttcacagactacatctctatcgtcatgctgatgattgccgtcttcggggggacgctgcaggtcacccaagacaagatgatctgcctgccttgtaagtgggtcaccaaggactcctgcaatgattcgttccggggctgggcagcccctggcccgtagcccacctaccccaactccaccattctgccgacccctgacacgggccccacaggcatcaagtatgacctggaccggcaccagtacaactacgtggacgctgtgtgctatgagaaccgactgcactggtttgccaagtacttcccctacctggtgcttctgcacacgctcatcttcctggcctgcagcaacttctggttcaaattcccgcgcaccagctcgaagctggagcactttgtgtctatcctgctgaagtgcttcgactcgccctggaccacgagggccctgtcggagacagtggtggaggagagcgaccccaagccggccttcagcaagatgaatgggtccatggacaaaaagtcatcgaccgtcagtgaggacgtggaggccaccgtgcccatgctgcagcggaccaagtcacggatcgagcagggtatcgtggaccgctcagagacgggcgtgctggacaagaagtag

SEQ ID NO: 26285 - DNA, 371 bp, Homo sapiens; identical to SEQ ID NO: 16381
  SIMILAR (7)..(273): 971254mologous to Homo sapiens ribosomal protein S8,accession number X67247,Smith-Waterman Score=478.

SEQ ID NO: 26286 - DNA, 391 bp, Homo sapiens
  SIMILAR (98)..(334): 1001254mologous to Homo sapiens ribosomal protein S8,accession number X67247,Smith-Waterman Score=402.
ggctgaggaaggccagcactggggtgtgcagggttcgagaaagctcccagggcctgccttccttccctgagctcatatatttgtatccccttttcagactcctgaggaagaagagattttaaacaaaaaacgatctaaaaaaattcagaagaaatatgatgaaaggaaaaagaatgccaaaatcagcagtctcctggaggagcagttccagcagggcaagcttcttgcgtgcatcgcttcaaggccgggacagtgtggccgagcagatggctatgtgctagagggcaaagagttggagttctatcttaggaaaatcaaggcccgcaaaggcaaataaatccttgttttgtcttcacccatgtaataaaggtgtttattgttttgttcccac

SEQ ID NO: 26287 - DNA, 416 bp, Homo sapiens
  SIMILAR (2)..(415): 681254mologous to Homo sapiens ribosomal protein S8,accession number X67247,Smith-Waterman Score=452.
ccgagcgatgggcatctctcgggacaactggcacaagcgccgcaaaaccgggggcaagagaaagccctaccacaagaagcggaagtatgagttggggcgcccagctgccaacaccaagattggcccccgccgcatccacacagtccgtgtgcggggaggttgtactcgtaaaacaaggatcatcgatgttgtctacaatgcatctaataacgagctggttcgtaccaagaccctggtgaagaattgcatcgtgctcatcgacagcacaccgtaccgacagtggtacgagtcccactatgcgctgcccctgggccgcaagaagggagccaagctgactcctgaggaagaagagattttaaacaaaaaacgatctaaaaaaattcagaagaaatatgatgaaaggaaaaagaatgccc

SEQ ID NO: 26288 - DNA, 437 bp, Homo sapiens
  SIMILAR (156)..(365): 1001254mologous to Homo sapiens ribosomal protein S8,accession number X67247,Smith-Waterman Score=388.
gtggaggaattctgcatactcccgagtgcgcggtggggaagccaaccttggagagctgagcgtgcgaccggcccggcgcgggggtctccgggagctggcgagtcgctagcaccgagtcacagtggctcaagcttccttccccgcttccacatgcaggcatctctcgggacaactggcacaagcgccgcaaaaccgggggcaagagaaagccctaccacaagaagcggaagtatgagttggggcgcccagctgccaacaccaagattggcccccgccgcatccacacagtccgtgtgcggggaggtaacaagaaataccgtgccctgaggttggacgtggggaatttctcctggggctcagagtgtgagtgaggccctttgggagtgggtgggaaaacgcacctaaacggtcttaagattcaccaagtgggcctggcg

SEQ ID NO: 26289 - DNA, 2027 bp, Homo sapiens
  SIMILAR (898)..(1071): 981254mologous to Homo sapiens ribosomal protein S8,accession number X67247,Smith-Waterman Score=298.
ggcctcgtgccactttccgtgggacagatgcgcgttctttcttgggctctgatttatctgaagaagggcctgggggtcctgtccccctttaactgtgggataagtaagtaccaaagagggaatgctccctcaggcccccaaacctggagcttatgatttcagagagaaggatactgtgtggggacttgagcttctggagagggtggcgcctcgcgtcatagtcagaagcctagtcttgttttttttacagaggcttaattttcagcatttggggtcaggctttcctcttggaggcaagtagggtgatgaaaaagaatccttaagcgtggttgtggccgtcttggtcacctgtgtgccacttgccaatgcaaggacttgtcatagttacactgactgttgcctcctcccggcccaggttcctctccctcacttgccttgctctccttggtaacctagttcctgtaaccttgtgttttccagattggcccccgccgcatccacacagtccgtgtgcggggaggtaacaagaaataccgtgccctgaggttggacgtggggaatttctcctggggctcagagtgtgagtgaggccctttgggagtgggtgggaaaacgcacctaaacggttttaagattcaccgtgcccgacctgctctgatctttctgaactctgcagcctgagagattggggctggtaaagactgcgggttgccaaacataactagaaacgtgggttagggggttgtggaagacgaactgatgccccatggcttgtaaaggctgagagttccctttatttctccctaagggcctcatggggctgaagaacctggaggagtgtgccagggccatttgtcctccagtttacttgatgccaaatttctcctgtgagcaggttgtactcgtaaaacaaggatcatcgatgttgtctacaatgcatctaataacgagctggttcgtaccaagaccctggtgaagaattgcatcgtgctcatcgacagcacaccgtaccgacagtggtacgagtcccactatgcgcttgccctgggccgcaagaagggagccaagctggtgcgtgttacttccctgtaggggttgtggggagggcagcctgactccagccttctcgtgatgaaaactctgtccagttctgctactgaagggagagagatgagagccttttaggctgaggaaggccagcactggggtgtgcagggttcgagaaagctcccagggcctgccttccttccctgagctcatatatttgtatccccttttcagactcctgaggaagaagagattttaaacaaaaaacgatctaaaaaaattcagaagaaatatgatgaaaggaaaaagaatgccaaaatcagcagtctcctggaggagcagttccagcagggcaagcttcttggtgagaaggctgatgagttggaggtggggagtcgcagagattgagtgtgccgaggcacttttcccttgactcagttcctttgactgccagccatgcagtctaaagggttcactgataacaggctgcgagcacaaaggggaacgtttggtcaccctattcgtatgaagctgaaatgggaagcattgggtagaagagtctgcataggcccgtgcttggagtctttgtatttggggaagtctctgcccaggctggagggggctgtctcagtgatgaaaactttgtccagttctgctactgacagtaagtgaagataaagtgtgtctgaggagacagctggcttcatgcttgcccccagggtacctgaacccacagagattcttaagcgggtggagaggtttgggtagggccaccttgtcgttgtgctaaggatcacctactctcttgcagcgtgcatcgcttcaaggccgggacagtgtggccgagcagatggctatgtgctagagggcaaagagttggagttctatcttaggaaaatcaaggcccgcaaaggcaaataaatccttgttttgtcttcacccatgtaataaaggtgtttattgttttgttcccacattaa

SEQ ID NO: 26290 - DNA, 843 bp, Homo sapiens
  SIMILAR (57)..(542): 361254mologous to Homo sapiens ribosomal protein S8,accession number X67247,Smith-Waterman Score=113.
gtcacagtggctcaagcttccttccccgcttccacatgcaggcatctctcggtatcaactgggaccaggcgccgtaaaaaaccggggggccaagagaaagcccctaccacaagaagcgggaagtaatgaagttggggcgccccagctgcccaaacacccaaagattgggccccccgccggcatccaacacagtcccgtgtgccggggaggttaccaagaaatacccgtgcccctgaggttggaccgtggggaatttcttcctgggggctcagagtgttgtacctcgtaaaacaagggatcatcgattgttgtcttacaatgccatctaaataacggagctggtttcgtacccaagacccctgggtggaaagaattttgcatcgtggcttcatccgaccagcaacaaccgtaccgaccagtggttacgagttcccacttatgcgcctgccccctgggcccgcaaagaaagggagcccaagctggactccttgaggaaagaagagatttttaaacaaaaaaacgatcttaaaaaattgcggaaggaaatatgattgaaaaggaaaaagaattgccaaaattcagcagttcttcctgggagggagcagtttccagccaggggcaagctttcttgccgtgcattcggtttcaaggcccgggacagttgtgggccgagcaagatggcttttgtgcctaggaggggcaaaagagtttggagtttctatctttaggaaaatcaaaggcccgcaaagggcaaattaaatcctttgttttgtcttcacccatgtaattaaagggtggtttattgttttgttcccacaaaaaaaaaaaaaaagggcggccgct

SEQ ID NO: 26291 - DNA, 1522 bp, Homo sapiens
  SIMILAR (113)..(517): 321254mologous to Mus musculus proline-rich salivary protein,accession number M19419,Smith-Waterman Score=111.
tcatgcctgctgtgggcactgcccataaaccccattgtcctctggctttgcgtgtgcatgagcaaactggacagagccggatgacaccaagacgatgtggagactgagtgttcccttagacagaagcccccagacacagaactgcactggagagccactgatgcccacagggagacaggagctaccccagaggggtccagagcccatggaagccccagccccagccaggccccagtcacgccgtgtgccagcagcaggtcctgtggccagacaaccccacatgcggcccccacactcaaagcagggggagaagcagaagatgccaggcagcaggtggccagggcagcgtggccgtgggaggtggggttccccgctagagtctgcgtaatagacacggaaaatctttaccggcatacccatcttgcccctcttgccaggaacgccaggcaggcctgctcctgaggaaggaatgcagtctgcagacaaaaacagggtgaagaggagagggggtacacagaggaactcagccctagcgctggagttctgcgaactgctgttcgtctcttcaaagtggttttgtgctttgccttctactctccgactgaaagcgctttctgctgcggttgccttgctcgccggagatcccgaatttggagtgcggaacgtctgggtttgggtggctggaggggtgcggtgtaagagggtggcacatcggaccacggaggccggagcttttttccccgactggttcgtctgggtcttcgctgccacgaagcgtggagatggggagacctctggatgtgaacactcagagcccgtgtctggatcatccggtggctccccaccccgggggcagtacctgccaggtatgtgaccttgaccaagggcctcagttttcccatttgccgaaagggtttctcctaagagacactgcaaatagcgttgccagactgctgccccaggcatcaatgtacttacaatgaggccggggactccaggggggcctggcaggcccagttctccccatttggtggtggggagaaggtgtccacatctgtctgcctcatagaactctaagctctctgaaggcaggggcaagataatctgataaaccgaataggttttctgggcatgtctgtgaaactgaacaacaacagcagcagctggaactgaattttcctgggagcccaggataggaactagactcccgccatagagccagatcttgtgtggagagagaggatgcaggattccactgggtaggcaccgactgtccagttgacccacttgtggtgctgatgcctaggcagcagggctgtggtcgggcttgaacaccatggcctgcgcccctctggagatccagctttccataagcaggtacagggcagccatgtttgttctccagtgaagcagcaactgccctgctccctggtgcccaggctggatgctacccagaatgcactttcagtgaggtgttagctacaaggccagactataaccttgagttcagcctttggagact

SEQ ID NO: 26292 - DNA, 606 bp, Homo sapiens
  SIMILAR (12)..(323): 371254mologous to Homo sapiens Human secreted protein encoded by gene 70 clone HCHMX01,accession number Y41377,Smith-Waterman Score=103.
atgacgaaagaggaaacggccgcgcggggcgcgcagaccgcaggccagcggcacacccacacacgcgagacgcgaggagagcactacaggcagcacggagagaagcggcgacaagagcagcggcggccgcaaccgccagaggagcgcagacgaccaacgccgaggagacccgggaggagcaaacggaagcacgaggaagacgagcactcccaccgctgtggaacggaacacatcctggcgcattataacgaccctctgctcatgcgcgacagcccaggcacctgcgaacctagcaaagtcgagcatgaccacagcgccggatggacgtactttctatctctagacaaccgccgttacctaccgggaatggaagacatcctacgctgcttcatcaaagaaggcaatgctgaaatgatccgccagatagaattcatcatcaagcagctaaattccggtcagccaccgcgcgacccgtactaccccgccctgcccctcgtgacgggagccggcgctgatcgacgcgaccgcacgcgtcaactgagcgcgcagacgagcacgaggcggctgccatggatcgtcacctcacgctgtgcgccgtcaagatag

SEQ ID NO: 26293 - DNA, 1230 bp, Homo sapiens
  SIMILAR (974)..(738): 981254mologous to Homo sapiens Human secreted protein, SEQ ID NO: 7117,accession number G03036,Smith-Waterman Score=385.
agcggccgccctttttttttttttttttttcaaaatgaatgctttattttgaattttaaaaatacatacatcttacactgtaatcaaaacaaagcttaagaaagtcaattcccgcttcctttagccctgacttacactgggtacccgtttctgtggccgccgggggtgacgggcctttgcaggggctcatccccgctccactgcacattagccagccccttccgccttgtcttccccgtgttggtcatgaatccccaggttactctgtggtcaagaagcttctctcctgaagagttctcccaaagctggggcctggaatcagttcgtcctttgtccaagatcggctttcccatgatggtcatggtcctctttcatcatcttcatctttcatcatcatcagattcaagaacaccatctggtagctcttcggaatttagctgcttgatgatgaattctatctggcggatcatttcagcattgccttctttgatgaagcagcgtaggatgtcttccattcccattgctcttgcttcctcacgaatggatggaacagaaaggatgctgtacagagctccattcacatacggctgtatctcatggttttcatggccaagaagatccgaaaggactttgagcacgaggcctgccaccttggcacacatgttcttccctgtgctgcggaggcagaggttcatgagcaaagcctccgagtactccagcgtgtagtcagacaggcagtcagggtccttcagaacatcaaccagccagaagatgaggccgtcttgaatcatcgctgtctgcagcgggcgcctgagactgaacttctgcagggccccaagaacattctcccttttgattatatccttgtcctcctccttcagccttccctccagcatctgcagcacctttgtgttctgggcaaggtagaggcgaccttctgccagtgacgcaaaagcattgatgagcctggccatgtactgccgcaccacgtcgctcgtggagtgcagcacctgaagcacactcctctggttgtggctataacagctcaagaggtcattgctgatgtaggcttgcagaacggtctccctctgctctccaggatgggatgtggtcaagcgcccgcgcatagcctgcaactacaaggctttaagcgggccctcccccaacatcaagtcttcttcgtttctcataatccaggggtggagcaccgggaaattcttcgatttcggg

SEQ ID NO: 26294 - DNA, 332 bp, Homo sapiens
ttttgacagtggtgagtatatttcctggatgacccacagggaattaatgagaggccaagagcaattaacaaacatctaaaaattaagcagaaacactggagtcttcctggtggtttacaaagtagcccccgatccaggcaatgggcgagcagaaaatctgaagaacaaacccaggacttgctaaggtggctgaactccgaagacgggtgaacgctcagccaaggcaggtctgtcatgccaatgacaccagcccttatcactggctgccaggtagggtgaccaacagtcccagtttgctgagtgaattgcagtgctaaaagccggcgagtccc

SEQ ID NO: 26295 - DNA, 1288 bp, Homo sapiens
  SIMILAR (466)..(939): 981254mologous to Homo sapiens Novel retinoblastoma interacting protein 115392*,accession number Y06604,Smith-Waterman Score=815.
  misc_feature (1)...(1288): n = a,t,c or g
ccggagttagcggcaacgaccttgcagcctggacactagccaggcgctccctcttctcacagcggcccacgtctccttgcttgggagcccatcgtcctggctccggtggcctcgctgggtctcggggaagcagaggactgttcattcctgtggcgaaaagccggagtcggccctagacacccacgactcgcagggtccatggttccggaggccgtgagacctgccggggctgacaggtaaagaagctaagtggaagagtgtttcctcctctggccgtaaagcaggtactctctgcagcaccagctgtccccgccctactccggaccgccccaaagactccatgggatggacctgagtcagccgaatcccagccccttcccttgggcctgctgtggtgctggacatcagtgacagacggaagcaggagaccatcaaggctacgggaggcccggggcgcttgcgaagatgaagtttggctgcctctccttccggcagccttatgctggctttgtcttaaatggaatcaagactgtggagacgcgctggcgtcccctgctgagcagccagcggaactgtaccatcgccgtccacattgctcacagggactgggaaggcgatgcctggcgggagctgctggtggagagactcgggatgactcctgctcagattcaggccttgctcaggaaaggggaaaagtttggtcgaggagtgatagcgggactcgttgacattggggaaactttncaatgccccgaagacttaactcccgatgaggttgtggaactagaaaatcaagctgtactgaccaacctgaagcagaagtacctgactgtgatttcaaaccccaggtggttactggagcccatacctaggaaaggaggcaaggatgtattccaggtagacatcccagagcacctgatccctttggggcatgaagtgtgacaagtgtgggctcctgaaaggaatgttccagagaaaccagctaaatcatgacaccttcaatttgccatcatgacgcagacctgtatacattaggttaaatctgaatttccactgctttggagagtcccacccactaagcactgtgcatgtaaacaggttcctttgctcagatgaaggaagtagggggtggggctttccttgtgtgatgcctccttaggcacacaggcaatgtctcaagtactttgaccttagggtagaaggcaaagctgccagtaaatgtctcagcattgctgctaattttggtcctgctagtttctggattgtacaaataaatgtgttgtagatg

SEQ ID NO: 26296 - DNA, 3287 bp, Homo sapiens
  SIMILAR (385)..(477): 901254mologous to Homo sapiens Human secreted protein, SEQ ID NO: 7101,accession number G03020,Smith-Waterman Score=141.
  misc_feature (1)...(3287): n = a,t,c or g
acttgccacaaggagacgctgttcagtttaccggatcctgtcccgcgccagccaaccaggacaaggccggggagctcgagacaggcagcctagaccaagaaccggaaggaggaaaaggaaccggagggaggaagaggaggggcgggacgagaccaccaggcaagagtccaaactttcccgcggcgacctaactgcacctccagtgtcttcccccagagggcacagaagcagcaagaagggcgggaacacttgactggggtccatgcagctctaggctgagtcttgcagggctgagccccccaggcctgctctcctgtgtcctggccgctccgtcagtgcctgccagtggggtccagagggaccgtttttttaacgcctcttttgcagtctcccgcattgacttcataaccaagttctgggtccctgcctctggagtgcctgatgagacaaaacggctcctcgtcctgcatccccgctgctacttccagaattcaggcctcgtggtctggagcctgcactgttccatgagcctcctgagcaacctggagtcctctgtctttcttccctcagtgagatgcgcctacttctccctggagaagcttgaggaagcagaaatgctggagatgagacggagttttgctcttgttgcccaggctggtgcaatctcggctcaccactacctctgccttctgggctcaagcgattctccttcctcagcctcctgagtgctgggattacagagacctcgtccgcacaggggcttgttcttctgtgtctttgcagggctgttttggactcagtattcacctaagcactccaaattacccagcacaccctgcctgcatggcgctgcgctgcaccttcactctggtcacgggtctggcagtcagctcaccaattcctcctgcttccctgggacttgccggcttttagcactgcaattcactcagcaaactgggactgttggtcaccctacctggcagccagtgataaggtgagggccactcctgggagggaggacacctgtggggaaaattcttgtgttatttatttctccttcgggatagggtgcctgcagcgcttcatgggagggggtgggctgatgctgcgggctcagaagtttcaagggcatctggggagaccagatattcagagaccttctagatgtgcctgttccatgtatcagggacgcaggttttcccaacagggctggtgtcattggcatgacagacctgccttggctgagcgttcacctgtctttggagttcagccaccttagcaagtcctgggtttgttcttcagactttgctgctcgcccattgcctggatcgggggctactttgtaaaccaccaggaagactccagtgtttctggttaatttttagatgtttgttaattgctcttggtctctcattaatcccctgtgggtcatccaggaaacatactcaccactgtctgttctctgagttttcatttccaggcatccgccctgcctggatctcctcacctgccaggaacttcctctccacaagccggccatcccagcaaaagttctaacaccaaaggtctggcaactagcctgccatcttgtgcctggagccgcctgcgtgccacctactcccgaagatgggaaccttgttgccagttgggcagatgcggggcaatcctgtaccaagaccccattttaccacctgctttctcagaccactctggaacccactgtctcagattgtgtcctccaggaagcagaccatgagagggagttggcagggccaaagatttactggggctaactaacactcaggaaagggataggaaggaaacagggctggagagcaggttgagcccgacctgacagtctcgagcagcccaacagggaggtgtggagcaagggttgcccactagaggggcctgcattgggtacgggtgatggggtccacatggtacctggcatatagcaggctgtgcaatccatattaactgactggataaattaatgcccagaaaaggtgccctggagaatgggtgtgtgctgaacacaatagggaagggcccagcatctgccttggcataggcagaactgtgctgtgccctgcaacaggccacctgagagctgctttgatcttgtgtgtacattagatgactgccaggggcatgaaggggatgtgcttccagggcatttgctggcagggcgtctcgtgatctcttggtattggtgtgagcacagcctggcaggagagggcagatctccatgcaaagtatgtcagaaagcagatggaagccaggccccctcctgaaagaggctccttgaagagacagagaagagtccatgagaatcaacattttctgaggactccaactgtgtgccaagagagttcccctgctggtgcctcctctgtagtaaaggaaaggctcctgggaccacattatcattctcttcactcgagagatgaggacactgaaattcagagaggggaagtgatttgcctcagcttgtactaaagaaacatttcaacagagaacccagtggaaattatgacatgttatcttctcagagtcctgaactcccatccctacctcagaagagactcctctgttcacagaagctaaaggcagttccttcccaatggcaactatgtttggatgttggatctacactttctcaagcactgtgatcttcaaattttttcaggaagaaagagagaatcagcaacatggcattgaaggtacccgttgacagtgacgtgcatcacagcattaacaggagaaatgcttgtgtgtgcaaatgggagacaaaggaaagggaccaccacatccatggagtgcaccgcgtgagagaaatgctcaggaagggaattgaccagattggctgtggagagaaaagagaaggaacatgggaggcagagctgagcaaccaggctttcactgctgaatgtctgagccagctccatcgtacaacaggagtgagggaagtacctgcttcacaaggttgtcatagccatcaaatgggatcacactctaaaggcagttctggaggccagaaatcagaaatcaaggtgtcagcagttccaagctccctgcgaaggctctaggggataatccttccttgcttcttccagcttctggtggatccaggtgttcctttggcttgtggccgtatcactccaacctctggctccatcttcacccttacctacttccctgtgtatcttgaatctcctgccactctcttataatgacacgtcattggatttagtgcctatttggnnnnnnnnnnnnnnnnnnnn

SEQ ID NO: 26297 - DNA, 808 bp, Homo sapiens
  SIMILAR (699)..(800): 471254mologous to Homo sapiens Amino acid sequence of a human secreted protein,accession number Y10882,Smith-Waterman Score=74.
tcgtcctgcttccctgggactcgccggcttttagcactgcaattcactcagcaaactgggactgttggtcaccctacctggcagccagtgataaggtgagggccactcctgggagggaggacacctgtggggaaaattcttgtgttatttatttctccttcgggatagggtgcctgcagcgcttcatgggagggggtgggctgatgctgcgggctcagaagtttcaagggcatctggggagaccagatattcagagaccttctcctagatgtgcctgttccatgtatcagggacacaggttttcccaacagggctggtgtcattggcatgacagacctgccttggctgagcgttcacccgtcttcggagttcagccaccttagcaagtcctgggtttgttcttcagattttgctgctcgcccattgcctggatcgggggctactttgtaaaccaccaggaagactccagtgtttctgcttaatttttagatgtttgttaattgctcttggcctctcattaatcccctgtgggtcatccaggaaatatactcaccactgtctgttctctgagttttcatttccaggcatccgccctgcctggatctcctcacctgccaggaacttcctctccacaagccggccatcccagcaaaagttctaacaccaaaggtctggcaactagcctgccatcttgtgcctggagccgcctgcgtgccacctactcccgaagatgggaaccttgttgccagttgggcagatgcggggcaatcctgtaccaagaccccattttaccacctgctttctcaaa

SEQ ID NO: 26298 - DNA, 411 bp, Homo sapiens
  SIMILAR (268)..(203): 401254mologous to Bovine herpesvirus 1 UL36,accession number Z78205,Smith-Waterman Score=38.
tggggtggagctgtgggcggtgctgtaagaggagaagttggggacggacttgcaggaggaaaagctaggggtggagctgtgggtggagttgggggagggagctgaggcccttctgtgatgcacccttaggcaagagtccaaactttcccgcggcgatctaactgcacctccagtgtcttcccccagagggcacagaagcagcaagaagggcgggaacacttgactggggtccatgcagctctaggctgagtcttgcagggctgagccccccaggcctgctctcctgtgtcctggccgctccgtcagtgcctgccagtggggtccagagggaccgtttttttaacgcctcttttgcagtctcccgcattgacttcataaccaagttctgggtccctgcctctggagtgcctg

SEQ ID NO: 26299 - DNA, 383 bp, Homo sapiens
  SIMILAR (240)..(163): 551254mologous to Rattus norvegicus PDRP,accession number AF275266,Smith-Waterman Score=78.
aatacaggtctgggaagggggaaagcgatgacaccctctatgagctgcaggatcagcatgctcctgcagcggccagggggggtccttgtgggatgggacccggatgcagctcacccagtggggacttgaaggcactctgttgctcaacacaactgaatgccctggtagggagccgaagggatggggcaaccctgttgatggcatgggatgggcaccagtgatggtccaggcttgagtgacagtgaaaggcccgaattgtcacagcagacagtgaaggaagggtttcaaaggctaagcaaagtgagcttgctggacctggacagaagaggtgaggccagaagccacccaaaggatacaggtttcaggagaggacccagaggaca

SEQ ID NO: 26300 - DNA, 587 bp, Homo sapiens
  SIMILAR (151)..(336): 951254mologous to Homo sapiens Human secreted protein, SEQ ID NO: 7101,accession number G03020,Smith-Waterman Score=297.
cgacgatttcgtgcgggaggcacgtactcagccatgcatatagacagcaaacattatgaatctcgcattctcgaagacacgcactgacgacatcacgcacgtacgcacgccctggctgctaggagacgctattctctttacctggccctgatgcgcgccagccaaccaggccaaggccaggggacctcgagaccggcagcctcgacgaagaaccggaaggaggaaaaggaacgggagggaggaagatctcccgcattgacttcataaccaagttctgggtccctgcctctggagtgcctgatgagacaaaacggctcctcgtcctgcatccccgctgctacttccagaattcaggcctcgtggtctggagcctgcactgttccatgagcctcctgagcaacctggagtcctctgtctttcttccctcagagagatgcgcctacttctccctggagaagctcgaggaagcaggaatgctggagatgagctgctcctcactctcactcctgggtgtgctgggcagtggggtgcaatgtgcacgtaggtgcacactctccctgggcggcagcgagaagcagaggtctgat

SEQ ID NO: 26301 - DNA, 617 bp, Homo sapiens
  SIMILAR (138)..(320): 361254mologous to Bos primigenius indicus conecting peptide/transmembrane /cytoplasmic domain,accession number Y10560,Smith-Waterman Score=67.
tttcgtgacgggagctgtatgaaagcggaagagttatagaccgctaacacctgtcactggccactggtttcccggagttagcggcaacgaccttgcagcctggacactagccaggcgctccctcttctcacagcggcccacgtctccttgcttgggagcccatcgtcctggctccggtggcctcgctgggtctcggggaagcagaggactgttcattcctggggcgaaaagccggagtcggccctagacacccacgactcgcagggtccatggttccggaagccgtgagacctgccggggctgacaggagccaaggcccatgctgcgagagcctgtgtgctcagccttcttgcggacggtaaagaagctaagtggaagagtgtttcctcctctggccgtaaagcaggtactctctgcagcaccagctgtccccgccctactccggaccgccccaaagactccatgggatggacctgagtcagccgaatcccaacccccttcccttgggcctgctgtggtgctggacatcagtgacagacggaagcaggagaccatcaaggctacgggaggcccggggcgcttgcgaagataaagttggctgcctttccttccggagc

SEQ ID NO: 26302 - DNA, 3328 bp, Homo sapiens
  SIMILAR (184)..(264): 1001254mologous to Homo sapiens Human secreted protein, SEQ ID NO: 7101,accession number G03020,Smith-Waterman Score=137.
acggcctccggaaccatggaccctgcgagtcgtgggtgtctagggccgactccggcttttcgccacaggaatgaacagtcctctgcttccccgagacccagcgaggccaccggagccaggacgatgggctcccaagcaagcgccctggctgctaggagacgctattctctttacctggccctgatgcgcgccagccaaccaggccaaggccaggggacctcgagaccggcagcctcgacgaagaaccggaaggaggaaaaggaatgtctacccccatagggcacggaagcagcaagaagggcgggaacacttgactggggtctatgcagctctaggctgagtcttgcagggctgagccccccaggcctgctctcctgtgtcctagccgctctgtcagtgcctgccagtggggtccggaggaaccgtctctttacctccccttatctagtctcccgcattgacttcataaccaagttctgggtccctgcctctggagtgcctgatgagacaaaacggctcctcgtcctgcatccccgctgctacttccagaattcaggcctcgtggtctggagcctgcactgttccatgagcctcctgagcaacctggagtcctctgtcttgttttttctagtgagatgcgcctacttctccctggagaagctcgaggaagcaggtcctatgcatgctagcatcccctcctgggttccttccccacaagaatggttgccagcttctgccgaacaccccagaacctgcttagagtggtttcaaatcatgaatggggtgtgctgggcagtggggtgcaatgtgcacgtaggtgcacactctccctgggcggcagcgagaagcagaggtctgatctgtggtcggatgaggagaggaagtgcaagtctttttgtatttcagagacctcgtctgctcaggggcttgttcttacatcttttgcagggctgttttgaagtcagtattcactttgtccgccttttagctttacttttctgccctggactcacacagggtcatgtgaacgtgtggtgtagcaggaggagagaggtaaagtggaggaataggagctggaagggaggaggagggaagaaaaaaggagggggagggggaggagagggagtgggttggaggagggaaggaggaggagaaggagaggaggaggagatgagaccaaggacaagaggtgaaggaagagaggaggacacagaaaagagaagaaagaggagaggaggagacggagaagaggaggaggagcagcaaagaaggaagaagaggaagatcggctccctaccagggcattcagttgtgttgagcagcagagtgcctccaagtccccactggttgagctgcatccgggtcccatcccacagggaccccccctggccgctgcaggtgcatgctgatcctgcagctcctcgagggtgtcatcgctttcccccttcccagacccagcacaccctgcctgcatggcgctgcgctgcaccttcactctggtcacgggtctggcagtcggctcaccaattcgtcctgcttccctgggactcgccggcttttagcactgcaattcactcagcaaactgggactgttggtcaccctacctgctcctcacctgccaggaacttcctctccacaagccggccatcccagcaaaagttctaacaccaaaggtctggcaactagcctgccatcttgtgcctggagccgcctgcgtgccacctactttcgaagatgtttaaccttgttgccagttgggcagaggcggggcagtcctgtaccaagaccccattttaccacctgctttctcagaccactctggaacccactgtctcagattgtgtcctccaggaagcagaccatgagagggagttggcagggccaaagatttactggggctaactaacactcaggaaagggataggaaggaaacagggctggagagcaggttgagcccgacctgacagtctcgagcagcccaacagggaggtgtggagcaagggttgcccactataggggcctgcattgtgtactgctgatggggtccacatggtacctggcatatagcaggctgcgcaatccatattaactgactggataaattaatgctcagaaaaggtgccctggagaatgggtgcgtgctgaacacaatatggaagggcccagcatctgccttgtcataggcagaactgtgctgtgccctgcaacatgccacctgagagctgctttgatcttgtgtgtacattacatgactgccaggggcatgaaggggatgtgcttccagggcatttgctggcagggcgtctcgtgatctcttggtattggtgtgagcacagcctggcaggagagggcagatctccatgcaaagtatgtcagaaagcagatggaagccaggccccctcctgaaagaggctccttgaagataattctaacatctttgtcatcagtgttgacatctcttgattgtatcctgtcattccatttgagatcttcctgggttctggctggcatcctctgacatcactccagcagaagaaagggaaggaacacgctgcattactgcgtggctgggaacccctgaatgcctgtagtgtcacccactgcccctgtccctgtacccaccctatcttttcacctcatttccctcccaagcctcaggttttcagtttggggtatgtgccaccctaacaagtgagctgtggaactgcagcacaatcatcaaattcaaaaaaggcaaggacatcttgctcagtttttaagatacgcccatagatgggagtaaaccaaaacctttgattccagatcctttaaccctggatttaaaaacaacacaacccttcatgttgatttaaaacatcccttgcaaaagatggtttgaatattccaagttggaaatacccagtcttttaaagttacagcaccctttttgatacaaaaaatgtgcatgacagaaattgtacagtgagtagtgttataaaaataaccaaacacaccaaaagctgccacgggtaaatttgagaaagtgttgaaatgtaccgcacagcatgagaccttgctggctccgtctaatagatgacgctggggctgcaaatgatgtcccagccttccagggcctgtggtctccagaacagggctgaaacctgttctgagttgacagtgctttcccaaggagaccccaagttgagaggaccctcttacccactcatcaataatcaaagcagacttgatgcccatcagagatgcccaatgattctggtgagccgttcctccctctggctgtcagtactggggagtatggtggggactttcagatagctcagtggagct

SEQ ID NO: 26303 - DNA, 1208 bp, Homo sapiens
  SIMILAR (838)..(1017): 981254mologous to Homo sapiens gigaxonin,accession number AF291673,Smith-Waterman Score=321.
atggagagaggacgactgctggccagcggacccctgtttgtgcccgcgccaggtgccaaggatgaggatgacggaatttatttttcttttgaatattacagtttggtctgcttcatgtctgaggccttccgattctggcacagtcccattgatctgatgcaaagttcagacccattctctcctgagctgtggttcttggggatcggccggccaccttctccctgtgacttcctccagtcccgtcaccaaacccctgaggccgtcctggcatcagaccgcaggcctaaaagcgtccagcagagggcgccccaaacccacgagggccgcggcgaaaagaaggcaggtccggtgcgaagggatcgctggacactggcgatggtggagaggcatggtgggccgggtccccgcacccttcatggccctgactcggggctgcccgtgaccttcagcgcagagctcggtctggtccatgcctgccttggggaagctgcgccgcctctcacccacccagccacaacaaatccaaagaaggaaggaatcaaaggctcaggacagtcattagcaggtaacgatgtttcagtccgtgatggacagtatatacaacagtgtccccctttggcaaccagtaacctgctgttcgtcttaggaatgtgccagttctggacacatataaatgaagccacgcacctgactccgggtggaacctgcgtgcctgaggttcctctcaggatcagcgtctccaccgtcgacattcttatgagaatacgggtgggtcagcgccgggtaaaggtgctgacccagcagattgtggcacaggctgaaagcaaaccagttcagggtaccaattacgactacgtgcgtgagtttaaaagaagcacaggaacctggcaccacgctaaaccactccttccatccgaccttcgccgtacaggatgtgcagccttacgcattgcgaattgcaagcttttccgcctgcagcttcagcaaggcttattccgtattcgtgttcattccccttgaggaggaagcagagcagagtgcgagatcctgacccaagagcaccataacatagctccgaaagggagagcagagatggcagctgaaactcactctgtgctgggctttggtatggtaactctttggtggttttatgatgcttacaaacttgagctttagctccttgtttgggagaacacgtaactgttgaa

SEQ ID NO: 26304 - DNA, 784 bp, Homo sapiens
  SIMILAR (225)..(533): 341254mologous to Hordeum vulgare pZE40,accession number X68600,Smith-Waterman Score=90.
tgttgaggggcaggtggcactgtttgcaggaggctttatgggatgaggtctctgaggtttgaggactgaattggagcctcttaaagctccactccgccaaatgcagttgactacctttagccctgtccaaccccaagcaggaggtggtgtctgggagaggcggccaggttgacagccaggcagggctaaccatgacaggaagggcggtgtgctgcctgcagctctgcctgaatgctagcggggccggggatgctgaggccatgtctgcaggaccacctgggcctgggcccgctagagcagacaccgagcagctgccctccccatctctcccccaggtgtcctgacactggcgggggtcagcatctacatcagctactcgcacctggcctttgcggagacggtgcagcagtatggcccgcagcacatgcagggcgtccgcgtcagcttcggctggtccatggccctggcctggggctcctgtgccttggaggcattcagcggaaccctcctgctctcagctgcctggaccctcagcctgagccccccaatctgtggtcatctgagtccccagcagaccttggatgttgaaagtgaatacagtgcactgtcctcacaacggggaaaaggaggagaacggtatgcgggatcccctgtactagccttacaacttcctgtgaattttcatttcaaaataaaaggttacaatgtacagagaggatctatgaaagccttggggaggcaggtgtcagctccatatgacagcctttctgacaaagctgtctga

SEQ ID NO: 26305 - DNA, 612 bp, Homo sapiens
  SIMILAR (2)..(610): 991254mologous to Homo sapiens Secreted protein encoded by gene 95 clone HPWAN23,accession number W88628,Smith-Waterman Score= 1079.
cttcatcattatggtgtggtattggaggaggatcatcatgatgtcctgacccccagtgcttctggaaaaagtcatctttgcccttgggatttccatgacctttatcaatatcccagtggaatggttttccatcgggtttgactggacctggatgctgctgtttggtgacatccgacagggcatcttctatgcgatgcttctgtccttctggatcatcttctgtggcgagcacatgatggatcagcacgagcggaaccacatcgcagggtattggaagcaagtcggacccattgccgttggctccttctgcctcttcatatttgacatgtgtgagagaggggtacaactcacgaatcccttctacagtatctggactacagacattggaacagagctggccatggccttcatcatcgtggctggaatctgcctctgcctctacttcctgtttctatgcttcatggtatttcaggtgtttcggaacatcagtgggaagcagtccagcctgccagctatgagcaaagtccggcggctacactatgaggggctaatttttaggttcaagttcctcatgcttatcaccttggcctgcgctgccatgactgtcatctt

SEQ ID NO: 26306 - DNA, 1579 bp, Homo sapiens
  SIMILAR (600)..(238): 901254mologous to Homo sapiens Human transmembrane protein HTMPN-47,accession number Y57923,Smith-Waterman Score=596.
tcaaatatgaagaggcagaaggagccaacggcaatgggtccgacttgcttccaataccctgcgatgtggttccgctcgtgctgatccttcaatccctcttgaaatatgatttggtgtctgtgcaaactgaggagaccgggaaggtctgtatttcagagtaataggggttactaggccacctggacacattgccagctggaaagagccaggcccacattctctgatggttaacctgtattccatcatgtgctcgccacagaagatgatccagaaggacagaagcatcgcatagaagatgccctgtcggatgtcaccaaacagcagcatccaggtccagtcaaacccgatggaaaaccattccactgggatattgataaaggtcatggaaatcccaagggcaaagatgactttttccagaagcactgggggtcgggacatcatggtgatcctcctccaataccacaccataatgatgaagatgctgggcgtaaggaaggtcttcatggcaaaccacaccttggtgaagcctccattttggtggatccccaccaacccggatatccttatcctccccaaattccccacattgaattttcttcttctcattcacaggcagccggatgtttaaaaggtaaaacttatggccaacagacccaaatttccatgaaaggaaggacatcacattcatagtaaccggccctccatgctctggagtcttgggagatgtgaaggtgcatttgagtttccgtggtactctttcatgggccatttcagtccactcagcaaacgcgtcatcacggtaagccagggaaacgtcccatggagacttcctgcattttcccctgatttggttgtttagcttgaaaggcaatgtcccagctgccaggataaacatcatgaattggaaccaaggactcatctcccatgtgggggaggggaatgtgaacagaaaacacgatgtcattggcttcaatttcccttggaattgcctcttcaatgtctcggatcttgtcacaatgattgggtccccaaggcaacggaaccattttggtcttgtgatggttcttacgggcatccacacatttcaccgacatgtaggacactgccgttgtgggccctggagcaatcaagcctcccaccagaaaggcgatgatttggaacacgagcagaatcccaccaacaatgcacagcttcttggtgctcatgttttctataattgccccaggccatttttgcgccccccctttttcttttctccttgaaataaatgttttaggggtgagctttttgctccctcctctcaccacagcccctccttcctcgcctcctttttgggcgctgcaaaacttcagaggtgctggagcgcggcgaggatgggaccgggacggaaggcgcccgcacggattcccccggcgcagccggctcgggttcccccaatgcccggagctgtgattgtggccgctccgccgcctgtggacgctcctattgtaaggatttgtgtacacgtttgtctccaccactgagctgtaaactcctggggaatagggaccaagttttttttgttctttgtaccccccat

SEQ ID NO: 26307 - DNA, 330 bp, Homo sapiens
  SIMILAR (304)..(137): 981254mologous to Homo sapiens deoxy-5'- nucleotidase,accession number AF154829,Smith-Waterman Score=307.
ttcatgcagcaggtcagggacagctctcggagtaccggtgctggctgggcccgtacgatcagcgcttacgtatctgcctgctcactcagcggggcagaggcaccagcacgatgccggcccgactcggggtctgggggctatctaagatctccctccagttgtcactccaggagagcagccgtctccttgtcgggggcaggaccaggtgccgattgtggcagcaggtgaacaagatgtgctcccagcttggggtctcctcctggcctcgaactgtgtccttgtcatcaatgagcagtcccccaagaccaccgtcttgtcccttgtcaggat

SEQ ID NO: 26308 - DNA, 969 bp, Homo sapiens; identical to SEQ ID NO: 15233
  SIMILAR (745)..(960): 841254mologous to Homo sapiens deoxy-5'- nucleotidase,accession number AF154829,Smith-Waterman Score=327.

SEQ ID NO: 26309 - DNA, 751 bp, Homo sapiens
  SIMILAR (565)..(293): 641254mologous to Homo sapiens deoxy-5'- nucleotidase,accession number AF154829,Smith-Waterman Score=266.
tttttttttttttttttttagaaagccaaagtcttttattaaaggtcccgactggttttcccactgtatttccatgccagccagggtccagggacagcctctcgggaggtaccgggtggctgggcctggggcccggtagcacagcgcattaacggtatctgcctgctccactccacggggccagaggcaccaagcacgatgccgcccccgactcggctctgcggtggcccctgtgggcctgcccttccttttagctcccagcttgctgcccgcgggmatccccgctcattacccgctgcgcagctccgcgctttgctatctaagatctcccctccagttgtcactcccagagagcagccgtctccttgtcgggggcaggaccagggtgccgattgtggcaagcaggtgaacaagatgtgctcccaagcttgggggtctcctcctggcctcgaactgtgtccttgtcatcaatgagcaggtcccccaagaccaccgtcttgtcccttgtcaggataattcgttctacgaactggggccccaggtgctgctccacccagcggtactgtgtagaaagactcagtctgtgagtagggcctgatggaagccggaattcagggatagggagttggctctaagcccttgagagccccccacccccaccttctgggtttctggtggtttctttttaaaatcaggatttaggcagctccacgtgcggagtaggggcggggcagccacaccttctcaccca

SEQ ID NO: 26310 - DNA, 578 bp, Homo sapiens
  SIMILAR (227)..(454): 941254mologous to Homo sapiens Human RNA binding protein (RNABP)-2 (clone 1250374),accession number Y56850,Smith-Waterman Score=379.
  misc_feature (1)...(578): n = a,t,c or g
cacgaggatgcagcatccagctttcaagcagatgtgtccctaggcaatgatgcagcagtgcccctatcaggaagagggggtatcaacacttacattcctttaatcattcctggcttcccttaccctactgcagccaccacggcagccgctttcagaggagcccatttgaggggcagagggcggacagtatatggtgcagtccgagcggtacctccaacagccatccccgcctatccnaggggtggatatgcagcctacagatatgcacagcctgntactgcaaccgcagccaccgctgctgcagccgctgcagccgcttacagtgacggttatggcagggtgtacacagccgacccctaccatgcccttgcccctgccgctagctatggagttggcgctgtggcgagtttataccgaggtggctacagccgatttgccccctactgaagtgacgtgagacccctgcaaatgggacagccccccagttcatgaggcctggctattgcaatatttactagtagaggaactctatagcaagatgaagaggaaaaacaaacaaacaaacaaaaaaaaaaaaa

SEQ ID NO: 26311 - DNA, 1857 bp, Homo sapiens; identical to SEQ ID NO: 24012
  SIMILAR (217)..(1077): 961254mologous to Homo sapiens dJ41P2.1 (novel protein similar to APOL (apolipoprotein L) and TNF-inducible protein CG12- 1),accession number AL049748,Smith-Waterman Score=1391.

SEQ ID NO: 26312 - DNA, 396 bp, Homo sapiens
  SIMILAR (100)..(2): 1001254mologous to Homo sapiens Protein sequence encoded by clone p199-7 (PL mutet.rsT4),accession number P93369,Smith-Waterman Score=203.
atggacgatatcccgcaagaggcccggcagtaccggcataaccaagcctatgcctacagcatccagggtgacggtgccgaggatgacgatgagcgcattgttagatttcatacacgcggccggcaacgcagcaatctgtcggcggtggtcgcggcccccgggccctctcacggcaaccagctgcgggcctcccggggcaaaagcccatgggccaccaccatggccctcaagatggtgaagggcatcatcgactgcatgttcgacaagaacctgcaggacttggtccgcggctttctaaaccacacggaggatgagattgaagaagatggggatagtgaccaccaagcatctgtcttcattgatgctcatgcagcccttcggcagtggaagccttag

SEQ ID NO: 26313 - DNA, 2158 bp, Homo sapiens
  SIMILAR (360)..(581): 511254mologous to Homo sapiens dJ41P2.2 (RNA binding motif protein 9 (isoform 1)),accession number AL049748,Smith-Waterman Score=140.
gtcgccacctctgtcacggtcctcaaaccctgccaccgccctggcctaggagcctgccccaccgcagcggccggcaacgcagcaatctgccggcggtggtcgcggcccccgggccctctcacggcaaccagctgcgggcctcccggggcaaaagcccatgggccacgaccatctttatggcccggaaggtcattattcaggtgttcacttctgattccggatgttctctgcagctgctggagtttcctgattggagaacagcaaatgactgttcaatgaccattctagtggtggggataactttaattattttaaagtaattgtgtatatttttcattctttatttctttgcttagcagacagaaggtggagcacagacagacggccagcagtcacagacacaaagtagtgaaaattcagagagtaaatctaccccagaagataacaaaatatgtggataaaaacctgaccataagtaaacgtttttattttaccaagagatcagtatttcaatataacgatgtgcatgttttccccccttctcccgctgcatgcagggattcgggttcgtaactttcgagaagtgcaactttatgttccctaatgtggtccacttcttccctgcccttttttctccttgttatgacatgcactgatcatccctttcctcaaacagtcttaaatgcttaccttccattgttgtgactgtgcaccttctattgaatgcaagttgaaatttctgtcatattttgggtctccctttagttcctggcttcccttaccctactgcagccaccacggcagccgctttcagaggagcccatttgagggtttttgtatgattgttttccttccacagctgtgttttttgaacggtgtgtgtttttctgtacacctggggggagaggtatctgtaaagtcagttctcttctctcctgtagggtggatatgcagcctacagattaatccctttaatttttttagatcatacacttttctttatctgtctgattgtgtttcttctttccagttatggagtccaaatctttgcaaggctcaaaatgccacagaacctctcctcttctccccactccccatggcacacgtccttgcccggcctcgtcttatctcctaaactggtctccttgcctccaccttttctccgacagctctccatcgccgaagtttgttctctcgacagcctgttcaatcggattgtgacgtgcttttgtgcaaacttctttggctcaaggccctgtacaatgtgctcccctggtagtttatttggtgtctgtctttctgtactaaaatgcaggcacctggaggtcaaagactttgttctgttggctgctgtatctccatttgcctggtgcattgtaagcattcagtacctatttgttgaattactgctttccattttggatgtaaatgatgcacttttcagccctgccttcctccacattgccacccctagtaacaacagtggaaaaatacaaaaattagctgggcatggtggaatgctttctgagcctggatccgcgggtctcgcacagtttcacacaggtggaatgctttctgagcctggatccgcgggtctcgcacagtttcacacaggtggaatgctttctgagcctggatccgcgggtctcgcacagtttcagacaggtggaatgctttctgagcctggatccgtgggtctcgcacagtttcagacaggtggaatgctttctgagcctggatccgtgggtctcgcacagtttcacacaggtggaatgctttctgagcctggatccgtgggtcttgcacagtttcacacaggtggaatgttttctgagcctggatccacgggtcttgcacagtttcacacaggtggcaagttttctgagcctggatccgtgggtcttgcacagtttcacacaggtggaatgttttctgagcctggatccacgggtcttgcacagtttcacacaggtggcaagttttctgagcctggatccgtgggtcttgcacagtttcacacaggtggaatgttttctgagcctggatctcttgaatgctttggaccaggggtcaacccgctgtttctgaatgtcaccagatggtaaatattttaggttgcacaggcctttcggtctctgtcacagcttctcaacttggc

SEQ ID NO: 26314 - DNA, 1252 bp, Homo sapiens
  SIMILAR (509)..(670): 791254mologous to Homo sapiens dJ41P2.2 (supported by GENSCAN),accession number AL049748,Smith-Waterman Score=219.
gcggccgcgcacatggggaggcggcggccgacggtggcggcgggatgcagaacgagcctctgactccaggttatcatggattcccagcgcgggacagccagggtaaccaggagccgacaacaactcctgacgcaatggttcagccttttactaccatcccatttccaccacctccgtagaatggaattcccacagagtatggggtgccacacactcaagactatgccggccagaccggtcgagcataacctgacactctacggaagtacgcaagcccacggggagcagagcaggcaactcacccagcacacaaaatggatctcttacgcagacagaaggtggagcacagacatgacggccagcagtcacagacacaaagtagtgaaaattcagagagtaaatcttacccccgaaacggcttgcatgtctcttattatttcctttccggtttccgggacccttgacttccggcagatgtttggggcagtttggcaaaatcctcgatgtgggaataatctttaattaacgtggctctaaggtgaataatgctacagcacgtgtaatgaccaataagaagatggtcacaccatatgcaaatggttggaaattaagcccagtagttggagctgtatatggtccggagttatatgcagcatccagcttatcaagcagatgtgtccctaggcaatgatgcagcagtgcccctatcaggaagagggggtatcaacacttacattcctttaatcattcctggcttcccttaccctactgcagccaccacggcagccgctttcagaggagcccatttgaggggcagagggcggacagtatatggtgcagtccgagcggtacctccaacagccatccccgcctatccaggtgtggtttaccagggacggattttacggtgctgacctctatggtggatatgcagcctacagatatgcacagcctgctactgcaaccgcagccaccgctgctgcagccgctgcagccgcttacagtgacggttatggcagggtgtacacagccgacccctaccatgcccttgcccctgccgctagctatggagttggcgctgtggcgagtttataccgaggtggctacagccgatttgccccctactgaagtgacagtgaaacccctgcaaatgggacagccccccagttcatgaggcctggttattgcaatatttactagtagaggaactctatagcaagatgaagaggaaaaacaaacaaacaaacaaaaa

SEQ ID NO: 26315 - DNA, 1635 bp, Homo sapiens
  SIMILAR (1282)..(1425): 501254mologous to Homo sapiens Amino acid sequence of a human secreted peptide,accession number Y12961,Smith-Waterman Score=113.
atggtgcaaatgaaggatgtgggcctccggagcccgtcgtggccacgagctcttgggccgtgcaatgctgtggtccaggatgggaaggctgtgcgtcgtgatgcgcctgtccccctgagacctcgccttctgtgccaacaacatcaccatcctcaggcatcctgccgggattcgagtcctaccttggacaggcgccgtatctgtaggccgcttccctgtctgtgcaatggcgagagtacagtgtatgagatgccatggcaccgcactaagtcagtgtgtcttcgtgtgtctgagtcagctcaggctgaccacaacgccccacagactgggcggcttacacgggacgttggtcatccccaccagtgtgtcagtgtcctcatctccttaaaggacaccagtcctactaggagggctctgcaccacatcttcacctgcagcttccgtgtctgtacccccagcctctcctttcctcgtctgcatcccagcacctgtgacaacaaagggcttgtaagaagtgctgagggacagcagcacgctggtcacattcttctcgccttgcctttcccacgtaacaacaccccctggagacggtgccacggcagctcccagagacgctccctgcacctgactgcagccacatgtcctcgctgcaaggctgttacgcggcacacactgcaggctcctactgtgccacgaggtctccggcagaggggcttgcgggtgcaaggaaacccacaggcccacacctgcaatgctggtgtgggtgtggaggggcagctgcttgtttcctgctcctccccgagcatcaaagcacgcgggtggcacagcagggagagtaaccaagagcagtcccaccccctggggggcagtgcagctgtgaatgccaccatcggagatgggaaagcaccaggggcagctgtgtcgctcacatccacgctcgccttaccagcgtggatgcacagagtcccagggagcctggagaaagcccggcagctgcagcgacacttacagtacccatggcaaacagggacgcgtgtggaggctctggccagcaccagcaacagaatcccagtgcaggcctcgaggacttgggagcgcatccaggcccttctccgcagaatactggaagtcagaggttacccagaatataaaacctgccccaaaatggcaaatctatttgcataccagaggttaaaagcaatgtcagaggaggtgcttagaaacagaagtgtggaaactctcaaagctccaaatttccacaaaggcttcaaaccgacaggacaggtccaccttctcagccccacccaggaaaagtcaattgatgtggtaaacttcattgttgtcttattttcagaaattgccacagtcaccccagccttcggcaaccaccgctctcatcagtcagcagccatcaacattgaatcctcagccgtggcctggttcctgtcctgggggctgaccagccttctggggcctgggacctggggcatcgctgctgcctgccgtctggcctcagggcacctgcaaggccggaacctgctggacgtccgtgtgtcccactccatcaggcctggagacccgggaggccagcagcagagccacactctattctgtgtcctcatcaccaagcactag

SEQ ID NO: 26316 - DNA, 3252 bp, Homo sapiens
  SIMILAR (1413)..(844): 961254mologous to Homo sapiens putative nucleotide binding protein, estradiol-induced,accession number BC001024,Smith-Waterman Score=927.
tcatgctgttcctgaagcagcttgcatgctgcttgcaagaaccagggtaggcaataagaaaccagtcctccaagtatcagggatctctgtactgatagctgattgctgcttctgatcaaggtcaaaacagatgaccacagttcttggagcatggagctgttttgcttcctctatcaccacaatcttacaccaggaatagaggctgccatcttcaaggctgccactatgtacaaagtaataaaggtgcgcagatatattggagggatattgaagattgacccataaagacgtcacacccttgttttgaggaaggccaaatccttttttgaatccttcagtcactgtgccctgattgtcttgcccatcttcatcatcatcttcgtcatctgcttctcctttctgaacaaactcatttcttgttcgaaggtacaaatcccagagtttgcaagcggctttatattcaggagaaatctggcacgctgcttcgttagaaccccttttgcctgcctcacctgctgtagtctcctcagacagtgcctcccctgtctcttctgcagcaaacatgcctgagctgttttcatcaacttcttcatcaacagtttcatggtcactgtctttgtcatcctccctctcctcctgcttcctttctttccgttttggcaattcttcatgtatgtccttttcttctattattccatttgtcagaccggaagactggaaaaggatgctattggccaaatgagggcccttgatggctgggaaagaaagcaagcccatgtaaacaggtaagagctccactggcctgtcagctgatgaagacagcagcgacacacaattctcacctcttatgctctgtgcattgttcttttccagttcttccagattgaagccgcttttcatgtctaccacaatactctcattaaaatatggaggaggagtccaagatgtagggggatggcaatagtaagctaatgaggcacctgtccactcagaccacagcagtttggcagcaccttcaacatttgggattccacctttttggtgcatacctcttctctgagcaagcacagtaaaaaattccagagaattcctgtagcctgggacagtatatttcagtactacctgtcgagcatcagcctgggaaaggatggcactggcagcctccatcggttttactacttcaatacttgctggacttcgcagagcaagcgcagaggaggaattaagtggagatacgatgaagctcggactatctatgattgtgatctgtttgtccaaggggacaacttgcatgctccttgtaagccccatggatacaccaacattacacatctgttcttgttttaagctattgataatgctgcttttccccacatttgggaaaccactaataaaggataccttggttatcttccctttatcctttggttttgttgaggctctgaacaccactgttggcaattctttcttcaaataatttagccagctctccaaattctcctttggtaccagatctgatttatttaatataagtaccagctttttctgtccactctggacaatggcctcttctacctgaggacatctgcaaccaagaggatctctggcatccaacacctcaaggtggcggacattccacataggatcgatggtagagtgctgttgataaaatacgataagcagaggaggtgttgtgatgctaccagccagggttctgctatacagtccctcttctacattgagtttcatccatttttccagttggttagttatattctgtcgtttccattccgtcaggtttgcaacaaaaactccaggattaaatgagcaagtgctggctttcatggaaagcttacgaattctttcctttttatagtcaagatagccaatgtaattgtactgggttcctgctccacggatgacaactttagtagaggctgaatcacaatcttctgaaaatgcagctgcatgtcctggcttcagtgctgtattgtaaagggcaagaatatcaccttgcacaattacatcatcatccatgtatatggcaggtttcatggattccccctggtcaggatcctcctttacttttccttccaaaagtttagggtcaaaattgacaattttgtatctgatgcttttcagggaatcactgttgagccaggaccggagatggtctgctgtattgttgagagtaacaatgtagaaaatcacattggagcgagtgttgtgctgaatgctgtttatagctgcaatggcccccccaagcctgtcttcagatgcagcgatgaccacaggaatctcctcttgtctcccatctactgcatgtcggagagcatttgggacaaagtctataggttgaggccctacaattcctgaatcatcgcgctggcagcagaagggaggtgtgagcggtgatggcaggagcagctgcagaagagcagtggcaccactggaacctgtgccccgcgcccctgaagcagctgaccaggccacgcccaccttcgcatggtcgggacccgcccccaggcccggaccctccaccactccggacacctgcttcagccatggacaaatcagcaggtacttcctgccgtttaagtcccctaaaagccctgggctcagccagagcagaacagacaatgggacggccagctgcagagaggagctaccctctgctgagagctcaatactcatcaagatgagcggggctaaatactccacgagacaccctgtcttttccaagttaaaattgtcttcagctcgactgtcctctgagttgtctgtattcttctcatcatcacctttatctgcatttgcaaatacagaggccacgcgaaccacaggcagaggcacatcccgagggacaaacctgactgagctgatgggcatggtccacagtttaattttcttaaaagatttggttttggcagaataccgtgattcacagacaaaaacatcctcatctcggaagttttctgggcataacttaaagtattccttgacaaacatgaccacacacttgcctagaattttactaactggaactttgttgtaatagtcactcttaaaaacttctttttctagaaattttcgtgtagccaggtggaatgtttcatttggtcggtaaaaccaacagccatacaaccatttttcaccagctgaatcctcccacagtctttcaatacagacgatatgtggttgtaggttggcctctgcaggttccacatagacgtaatctccaacatggtacat

SEQ ID NO: 26317 - DNA, 398 bp, Homo sapiens
  SIMILAR (215)..(3): 1001254mologous to Homo sapiens Glycosyltransferase,accession number AJ271710,Smith-Waterman Score=360.
cggagatggtctgctgtattgttgagagtaacaatgtagaaaatcacattggagcgagtgttgtgctgaatgctgtttatagctgcaatggcccccccaagcctgtcttcagatgcagcgatgaccacaggaatctcctcttgtctcccatctactgcatgtcggagagcatttgggacaaagtctataggttgaggccctacaattcctgaatcatcgcgctggcagcagaagggaggtgtgagcggtgatggcaggagcagctgcagaagagcagtggcaccactggaacctgtgccccgcgcccctgaagcagctgaccaggccacgcccaccttcgcatggtcgggacccgcccccaggcccggaccctccaccactccggacacctgcttcag

SEQ ID NO: 26318 - DNA, 483 bp, Homo sapiens
  SIMILAR (321)..(482): 1001254mologous to Homo sapiens Glycosyltransferase,accession number AJ271710,Smith-Waterman Score=264.
  misc_feature (1)...(483): n = a,t,c or g
gggcccccgcgtctcccatggcgacggcctttttccctgcgaggaccccggcggcagggctgccccgcgggcctgcttggcgcgacgctcgtagcggttaccgctgcgggctggctgggcgtagtgggntgcgcggctgccacggagctagaggatccagcgtctgtgtgcaatttcgttttgagaattccttctaaccagatcaggaaagctctcttaccaggaatagccccaggaaagacaatatggattagacgtactccatgataactggcgttttgcatggttaaaaactaatatttatatgacagaagaaaaagatgtcattccgtaaagtaaacatcatcatcttggtcctggctgttgctctcttcttactggttttgcaccataacttcctcagcttgagcagtttgttaaggaatgaggttacagattcaggaattgtagggcctcaacctatagactttgtcccaaatgctc

SEQ ID NO: 26319 - DNA, 611 bp, Homo sapiens
  SIMILAR (384)..(437): 721254mologous to Homo sapiens Glycosyltransferase,accession number AJ271710,Smith-Waterman Score=55.
  misc_feature (1)...(611): n = a,t,c or g
gcgccgcgggacctttgaggggaacgacttgtcggagccctaaccaggggtgtctctgagcctggtgggatccccggagcgtcacatcactttccgatcacttcaaagtacagcagaccgaggacacggttgttaccaagaccaggctgttgccttggaagagcccagagcgtgtcaagggagacagccacatcacgccagaaatacatgacagctggattagccctggggagagggaggcccagatgtgggagctcaggggaggtgcagctcaacgtgggagtttgggaggaggctaccttgacctttgaatgccaagtggggagccagccagatgaaaggggttaaaaactaatatttatatgacagaaggaaaaagatgttcattccgtaaagtaaacatcatcatcttggtcctggggtnttgctctcttcttactggttttgcaccataacttcctcagcttgagcagtttgttaaggaatgaggttacagattcaggaattgtagggcctcaacctatagactntgtcccaaatgctctccgacatgcagtagatgggagacaagaggagattcctgtggtcatcgctgcatctgaagacaggct

SEQ ID NO: 26320 - DNA, 1333 bp, Homo sapiens
  SIMILAR (463)..(350): 1001254mologous to Homo sapiens Human prostate cancer- associated protein 69,accession number Y48372,Smith-Waterman Score= 204.
  misc_feature (1)...(1333): n = a,t,c or g
gctctaggaagctgctcagtaaatctgttccttagttgaatccgtaatctcgattaggtgattgcctgtggtctgaataaccattttcccnaacacagtatatgagcagtcttcccatgggctcnaatgtcattccaatgaagtacnttgcagccttacnnaactgaggtgaatatcgttttccagcactggacccttcatttgagacaaaaatagccacatcgttgcgccatgtgaatttgtgcagaanacttacttaaaggaaacaaagnatataccccatcccctggaggatagtcctttaggataccaattctttactagcttatgccactggttaattctacttaccaaggtggcggacattccacataggatcgatggtagagtgctgttgataaaatacgataagcagaggaggtgttgtgatgctaccagccagggttctgctatacagtccctctcttggtgggacagaaaacaaatgtttgttagtggaaaagtactgactaactccctgttagtcaagactcctaggaattggaaatacaacagtttttccacagctaggcccagttacatacttactcctacattgagtttcatcccatttttcccagttggttagttatattctgtcgtttccattccgtcaggtttgcaacaaaaactcccaggattaaaatgagcaaagtgctggctttcatggaaagcttacgaattctttccctttttatagtcaagatagccaatgtaattgtactaaaaacacaaataggatatatgtacttactgcttcaaacaaaatagatacaattttatagccagtagagagaagagctgttaaataaactgacttcttcagattagaaaataaatatttgaaattccaagttagaataggaacctagatgttgacataataaaccagatgttcaagaacaattaggctgtcaagtccatgaagaagtctacagaaaagcaggcttgagttttgggatgaaatgattggggagtgtaaattgcagcaaaagagttccctgaatttgcaacctcttcccattaaacaatattgtaggaagaggggtgtttggtaagcaatttacctggtttcctgctccacggatgacaactttagtagaggctgaatcacaatcttctgaaaatgcagctgcatgtcctggcttcagtgctgtattgtaaagggcaagaatatcacctgaaymagacaagatgttaygytttacatttccgttgccttgagagttccctgttactcccacttcrccctatggtgaccttttatagaagaccataaataayccactacagc

SEQ ID NO: 26321 - DNA, 2031 bp, Homo sapiens
  SIMILAR (1591)..(776): 531254mologous to Homo sapiens Glycosyltransferase,accession number AJ271710,Smith-Waterman Score=527.
  misc_feature (1)...(2031): n = a,t,c or g
ccaattcaatctcctttgtgattgaagtaggttatcctggaataaaaaaagaagataccctattgaaaaatgtaagttttatttacagatcaggccaccaggtttaccaaaattaaaacccaacagcagttttgaattatctgtaccagctagctgaactagccatatcagtttcttctttccagtcattcaggcattgtaagtaagaaaacacttcggtaaggcagatggagacatatttatagtctatagtctgtctgggaaggctgactgcccagacagggccagtttgtcatctttacctaggctgacacatctttttccatgggcttgctacccgatagggcattggaagcctaggcaactgttacttcccacggcatgctatcttccagggacttccctgagggaaatggcttggctttacagtttcaaatttctggttttcacttttatggtttgaggatctcgggtatattcttcgggatttagggttgaaatttgccctgttggggtctgggaatataccatttttccccaaacatcagtatatgaaagcagtccttccccatgggcttcaaatgtcccattccaagggagtaacttggccaccctttaacaaactgaggtgaaatatccgttttccccanccactggaaacccaaggtggcgggacattccccacataggatcgatggtagagtgcctggtggaataaaatacgaataagccagaggaggtgttgtgaaggctacccagcccagggttcctgcctatacagtcccctccttcctacattgagtttcatcccatttttcccagttggttagttatattctgtcgtttccattccgtcaggtttgcaacaaaaactcccaggattaaatgagcaagtgctggctttcatggaaagcttacgaaatcctttccctttttaataagtcaagattagcccaatgtaattgtactggtttccctgctcccacggatgacaactttagtagaggctgaatcacaatcttctgaaatatgcagctgcatgtccctggcttcagtgctgtattgtaaagggcaagaatatcaccttgcacaattacatcatcatccatgtatatggccttaatttgcgctgggaacccagaattggcaaagtagaaccttgcaaaaggttaaaaggtttccatggaattcccccctggtcaggatcctcctttacttttcccttcccaaaagtttacgggtcaaaattgacaattttgtatctgatgctttttcagggaatccgctgttgcagcccaggaccggagatggtctgcctgtgattgttgagagtaacaatgtagaaaaaaatccttggagccaggtgttggtgcctgaatgcctgtttatagctgcaatggccccccccaagcctgtcttcagatgcagcgatgaccaacggaatctcctcttgtctcccatctactgcatgtcggagagcatttgggacaaagtctataggttgaggccctacaattcctgaatctgtaacctcattccttaacaaactgctcaagctgaggaagttatggtgcaaaaccagtaagaataagagcaacagccaggaccaagatgatgatgtttactttacggaatgacatcttttttcttctgtactataaatattagttttttaaccacttttgaagtgatcggtaaatgtgatgtgacgctccgggggatccacagccaggactcagagacatctcctggttagggactaccgaccgaagtgcttcccctcaaaggctcgccgcggccgcccttactgcaggcaatggtaggagatgcagtagcggcccgcgccgacgcccgccgccctagccgctagcgcgcccgcgccagcggcggcagccaccggagcgccagcccgttgtctggccgcccgcgttccctgcacgctgggccgagcacacttgccctctagctccgtggcagccgcgcagccccactacgcccagccagcccgcagcggtaaccgctagagcgtcg

SEQ ID NO: 26322 - DNA, 423 bp, Homo sapiens
  SIMILAR (229)..(390): 941254mologous to Homo sapiens putative ribosomal protein L36,accession number AF155653,Smith-Waterman Score=261.
atggcgggccctgacggggccgccccccttgagcctggcgcagtggctgcgcccatgggcccgaaaagcagccgcgggagcccaggccgcgcggggaaagccgcagaaactcctttcagacaccaaaggaattctggggaagacaatttcactggaatgagtatgtttggggagcagaatttcagaagagtgatgcggggaaaccagtttgcaggaggagaggagggcatagtgggtgcagcccccgtggctgtggaacccggggcagaagtgcgctcacttctctcacccggcctcctgccccacctgctgcccgcgctggggttcaaaaacaagactgtccttaagaagcgctgcaaggactgttacctggtgaagaggcggggtcagtgtgcccagtcccatcgaccacccaagggctga

SEQ ID NO: 26323 - DNA, 668 bp, Homo sapiens
  SIMILAR (206)..(343): 451254mologous to Homo sapiens Amino acid sequence of a fragment of human collagen type 1 protein,accession number Y84546,Smith-Waterman Score=88.
gcggccgccccaagggtaaggaactggggaggcggagtagcgccacgttagccgctttccctagagagattgtgaagcacgttgcgcacggggccctttctggtcatggcttagcccaaggaggaaggggaaaaggcagaaatcacaactcataagccagcgtcttgagcgacacttcctcagcgggaagaaccggcaaaaaaggccttccaagatggcgggccctgacggggccgccccccttgagcctggcgcagtggctgcgcccatgggcccgaaaagcagccgcgggagcccaggccgcgcggggaaagccgcagaaacgtcctgaagccctggccggcagcccctgaacaaacgaggcctccacaggcgtacactattgtttctaatgtcggaaaagggtgccgcggtggaaacgacacaagggcaggaggtggggtttctgtggctttaaccgaaagaaacttgcgaaacgcaaacaaagcattatgtaaatggacgccattctttttaggaccacgtttctagcacgccccacaaacagcagagccgcgattcggcaggcggccgtgagtgggtttcggtctttctgcccaccggccgccgccggggagcaggagctggggtgggggatccatgcagggcgcccggacgccggggacgaa

SEQ ID NO: 26324 - DNA, 1075 bp, Homo sapiens
  SIMILAR (381)..(968): 301254mologous to Mus musculus proline-rich protein,accession number M12099,Smith-Waterman Score=120.
tggtggaattcgtgtgcctcaggtcacacagcacgcagagacatgctctattgaaagcttaatctcagtctgagctgctgtaaccaggcttagatccgggtactctgagaggatatggttcccccaaccctggggggatatggaggtagataccttgcttttatctcttaacttatcagaggtgtggtccagaaactcattcaaactgggaggcctactttaagaatacaaagttaccaaaaaaaccccacttacttagaatgagaaaagtcacacagatcactagagccttggacattcaggcctcttctgtctgagttccttaggcatcgtaccagaaattcttccagttgctgcctgactgcaacctggctccctctccccacccacaagtgccagcaactcccagcaccagctggggccatttaagcaagcccccgggagctttcagaaagcggcattcatcctcaagatgtccaaaagcgggccatcaatggggaggcgggcagagaaacacgcctacagcagcccatttcaggagactgagtgctgggtcactgcagctgtgtcctcagctcagggtgtctcccctcaccacaggctcattgccgcccagatccagggaacccccacggacacccgctccccccagtccttaccccaactgtcgacccctgcccaagtccacacggacgccttctgtgggctggagcggtcccccctcctgcggcacacggcttcaaagccatcctcaggaagccccagctggatagggcagtgtgcgccggcctttcctggggccataacgaatgccaagttaggcccttctgtagaagcacactggagggctctgaggccccccacacccaccgatgcccacaatgtgtcaaccaaaacaagcctcaaagctgcagcttttgaactgtccccagccaagccccagccagggtgctggtgccacaatgggaaatgtcggctagtgactggggcaacaaagggcctagtatcagcctacagcccaggagaaaaagatagtctaagtttacatgtggtgttcagatgcccccagaattga

SEQ ID NO: 26325 - DNA, 1395 bp, Homo sapiens
  SIMILAR (570)..(857): 761254mologous to Homo sapiens dJ1178H5.3 (novel protein),accession number AL049648,Smith-Waterman Score=353.
tgaaagatgggagccaccataatggctaaaatgaaagaagcaacttcctattgaaaacttgcagagagatgaaagtagggccacgtttaggtgcatccaatgagccaccatcttctgaagtcctgccaggcctaagtcggtacataatcattgaagcggactttgttttattggatatttatttagcagatttaaagttcattccacagatctagccatgaggtggcagcagtgagcaaatagaccaacactgccatctttgtcaaattttattctagtgggaggagacaaacagtctgtctccatttggggggaatacatatttagtactttaacttaaaaatatattcctctccttacccaggtccattaatataagatttgccactctcttggatactcctggtgtggaaaatcttgtcattgcctgcttacaaaaacattcatagccatatttttaagggtcttaaaatatatgcttatcttttcaggatggaacactttatcacaaaatgcatgccgtttgtttaaaatgcttgtagaaaccatcccttctgtctcttctgtaggacattgagtacatacggtcccattacaacattgaagatttcatctacttcagtcaccaccagcgcgaagaacacgggcacatgcatcactttgccctcaaccccattttccggcactacaccaagttctttctgaaggtgtatttgtaaagctgtacgcagacatctgtgctgagcctctctgacattctctcccctaaaatatagattgctgtctttcagttccagaacccctacgcccactccctgacatctgcccttcattacttggttcccgtgcgaccacgactcctgcctggtttggacgatcagtgtcccggccacaacaccttccccgtcgtttctattaattgacagcctaccccgcagcaggtcataaaaaagagcctagaaaacataaatgattttcatcatttgaaagcagagatttttctaaaataaaacctctgttagctttcctgcttcaccctctctaactcagcagcctcttgtggtcctgtgtggacatctaagagagctcaggtagcaaacaagatgcccatccaaatgcaggaggaaaatgggggactttctgtttttttaaagccaccagcaggttctttgtttgacccacctttagtaatattattgctgttaaaaagagctgccactgcttccaacagaaaagaaaaaattctaaggatttcctggatgctgatcgggttcttgccacaacccagtagggggaaaaaaaatgcattctcctccctgcagagccagggtaatgaatgccacagaggtccagaagtgcctccggacgcatcagctgcctgctgcagagctctgg

SEQ ID NO: 26326 - DNA, 574 bp, Homo sapiens
  SIMILAR (58)..(273): 541254mologous to Homo sapiens Human secreted protein, SEQ ID NO: 4718,accession number G00637,Smith-Waterman Score=170.
aaggctgataattttatagggttccgttgcatggatagaccacatttattcattcatttatttatttatttatttatttatttatttatttattgagacaatctcactctgttgcccaggctggagtgcggtggcatgatcatggctcactgcagtctgaatctcacattctcaagcgatcctgccgcctcagcctcctgagtagctgggactacaggcacatgacaccatgcctggatattcgtctttctgtgtaactggttgagaaacaggggagtaacagtgaagaaacggtcttagaataaatctggtgacagcagaagagaatatgagacagattgtgctcacacagccttgaagagtgtgacagtatttgagggccacgctgttgtcttagagtgaagtgaggagaacctgcactggtttggtagtcatgggaatggaaggaggaaagaaaatgtgaagctcatcggtggcagagtcaaaatggcttggtctttgtagtcaacgattaagtgagaaggaggaattactggctgacttagaagaagtaaaaaacgtgaaataccgataa

SEQ ID NO: 26327 - DNA, 3520 bp, Homo sapiens
  SIMILAR (1967)..(3268): 881254mologous to Homo sapiens alpha-enolase,accession number X16288,Smith-Waterman Score=1957.
  misc_feature (1)...(3520): n = a,t,c or g
ggcacgaggcggagatctcgccggctttaccttcaccctcggggtctgcagcccccttccgcttcctctcctaggcgacgagacccagtggctagaagttcaccatgtctattctcaagatccatgccagggagatctttgactctcgcgggaatcccacatgttgaggttgatctcttcacctcaaaaggtctcttcagagctgctgtgcccagtggtgcttcaactggtatctatgtaggccctagagctccgggacaatgataagactcgctatatgggggaaagggtgtctcaaaggctgttgaagcacatcaataaaactattgcgcctgccctggttagcaagaaacttgaacgtcacagatacaggagaagattgacaaacctttggggggaaaaatttggggggggaaaatttctggatggatggaacagaaaataaatctaagtttgggtgcgaacgccattctggggggtgtcccttgccgtcttgcaaagctgggtgccgttaagaagggggtccccctgtaccgccacatcgctgactttgctggcaaactctgaagtcatcctgccagtcccggcgttcaagtgtcatcatcaatggcggttctcatgctggcaacaagctggccatgcaggagttcatgatcctcccagtcggtgcagcaaacttcagggaagccatgccgcattggagcagaggtttaccacaacctgaagaatgtcatcaaggagaaatatgggaaagatgccaccaatgtgggggatgaaggcggggtttgctcccaacatcctggagaataaagaaggcctggagctgcttgaagactgctattggaaagcctggcctacactgataaggtggtcatcggcatggacgtagcggcctccgagttcttcaggtctgggaagtatgacctggacttcaagtctcccgatgacccccagcaggtacatctcgcctgacccatgctggctgaacctgtacaagtcctttcatcaatggactaccccagtggtgtctatcgaagatccctttgaccaggatgactggggagcttggccagaaagttcacagccagtgcaggaatccaggtaagttgggggatgatctcaccagtgaccaacccaaagaaggatcgccaaggccgtgaacgagaaagtccttgcaacttgcctcctgctcaaagtcaaaccagattgggctccgtgaaccgagtctcttcagggcgtgcaaacttggcccaggcccaatggtttggggcgttcatggtgtctcaatcgttcggggggagactgaaagatactttaatcgctgaccttggttgtgggggcttttgcaactgggcaagattcaagactggtgccccctttgccgaatctgaagcgcttggccaaagtacaacccagctcctcaagaattgaagaggaggtggggcctcaaggctaagtttgcccggcaggaacttcagaaaccccttggccaaagtaaagctgtgggcaaggcaaagcccttcggtcaacctgttggctatacancaccacctcccactcgtgtcaagatcaggcagctcgaggcccccgaccaacaacttgcaggggtccctgctagttagcgcccccacccccggtggagttcgtaccagcttccttatgaacttctacagaagccaagctccctggaagccctgtttggcagctctagcttttgcagtcgtgtaattggcccaagtcattgtttttctcgccccaatttccaccaagtgtcttgagtcatgtgagcctcgtgtcatctccgggagtgccacaggcttagatcccggagtggttttgtgctcaaaataaaaagcctcagtgacccatgagacggagatctcgccggctttacgttcacctcggtgtctgcagcaccctccgcttcctctcctaggcgacgagacccagtggctagaagttcaccatgtctattctcaagatccatgccagggagctctttgactctcgtgggaatcccactgttgaggttgatctcttcacctcagaaggtctcttcagagctgctgtgcccagtggtgcttcaactggtatctatgaggtcctagagctccaggacaatgataagactcgctatatggggaagggtgtctcaaagcctgttgagcccatcaataaaactattgcacctgtcctggttagcaagaaactgaacgtcacagaacaagagaagattgacaaacttatgatagagatggatggaacagaaaataaatctaaatttggtgcaaatgccattctgggagtgtccctcgctgcctgcaaagctagtgctgttgagaagggggttcccctgtaccaccacatcgccgacttgtctggcaactccaaagtcatcttgccagtcccggtgttcaatgtcatcaatggcagttctcatgctgtcaccaagctggccatgcaggagttcatggtcctcccagtcggtgcagcaaacttcagggaagccatgcccattggagcggaggtttaccacagcctgaagaatgtcatcaaggagaaatatgggaaagatgccaccggtgtgggggatggaggcgcgtttgctcccaacatcctggagaataaagaaggcctggagctgctgaagactgcgattgggaaagctggctacactgataaggtgatcgtcagcatggacgtagaggcctccgagttcttcaggtctggaaagtatgacctggaattcaagtttctcgacgaccccaccaggtacatctcacctgactgtctggctgacctgtacaagtccttcatcaaaaactacccagtggtgtctactgaagatccctttgaccaggatgactggggagcttggcagaagttcacggccagtgcaggaatccaggtagtggaggatgatctcagagtgaccaacccaaagaggacagcctcggccgtgaatgagaagaagtgcaactgcctcctgctcaaagtgaaccagattcgctccgtgactgagtcccttcaggcgtgcaagctggcccaggcgaatggttggtgtgtcatggtgcctcatcattctggggagactgaaaataccttcatcactgacctggtggtggggctgtgacctgggcagctcaagactggtgccccttgctgatctgagcgcttggccaagtacaaccagctcctcagaattgaagaggagctgggcagcaaggctaagtttgctggcaggaacttcagaaaccccccagccaagtaagctgtgggcaggcaagcccttcagtcacctggtggctaattagacccctccccttgtgtcaactccggcagctcaagacccccgagcaacatttgtaggggccgctgctagttagctacccttgcccaccgccgtggagttcgcacctcttccttagaacttctacagaagcaggttgcagtgagccgagattgcgccactgcacaccagtctggagacagagtgagagtccgtcccagaaaaaaaaaa

SEQ ID NO: 26328 - DNA, 1160 bp, Homo sapiens
  SIMILAR (639)..(67): 961254mologous to Homo sapiens Familial Cylindromatosis Gene,accession number AJ250014,Smith-Waterman Score=963.
tcactcaggtagcagtttattacattttccgatccttctaattaacaggaagggtttttcccccactgggatgatatcattgatgtgcaatagaattgtactttcaacacacgcaaaactacaaagctgcactccatcaaatcttccatcccagttgccaatagggttatccatgtccacaccaacaaaatatcgtaagctttcttttcctggcaaaacatcacagaatataactgttccagattctattgtttctccaaccttcaaagaaactctggagtttatttccaaaggaggaagttcgacctgcattgtgtccccaggacctgcgtaatcactttccaatgcagtgtcatcatcttctatgagttctagcttgtccaatgcaacaaacacgccacaatcttcatcacactgaaaaagctgtttcccttggtacaccccgtcagtgaaaccttgaccacgaccttcttccagcaattcaactccaaagaatattccggagactgtcctctctgctaacaggggtcctctgaagcgtacaactccaggaaatttttcttccccagatctcagctgtactttcacaggacagcccccgtctatttggaggcctttacttaaactggtttctggttttaaacaggctgaacctctcctcacaattggtaattgccaaaagtaactctgtgaacttatcatttatctctacaacatccttttcatcaacaaagagaactgcatgaggttgctctagaatttttaatccaatctgatttttcttgccttttgcagaaggaatccttgaatgccccacagaacgatcttgaatatactgtcctatacttcccttcggtactttaaggagcttttgtgtttgtttgtctgtaacgctgcattcttgaagaagcaagtaaaaaatccgctcttcccagtagggtgaagtgactttttcttggctccataagcctgaactcattgtgatattaacttcaaaatactaattcaaaaaagggaaactactaataactttgtcataaacccgcaaaagataaattcagtggcagtcccaaagcatgttttcagcaacgtggtgtccatgctgtcacagcagggcgcacctttcaaataaggaactccgggtggctgagtagaaccat

SEQ ID NO: 26329 - DNA, 2772 bp, Homo sapiens
  SIMILAR (1317)..(2306): 431254mologous to Lycopersicon esculentum extensin-like protein,accession number AF159296,Smith-Waterman Score=598.
ctacgtgcagagctgtcgcggagccggaacagcagcggtgaagcccctcggctcggccgagaccgccgtgcccattgctcgcctcggttgccgccgctttagccgcagccgctgctgccgccgccgggggagaggcagcctattgtctttctccgcggcgaaggtgaggagctgtctcggctcggcccgcgggggagccccgggagccgcacggtgagagcgcaacttagttggcggagttgggggaagttttgtgatttgaggaggggtcggggtgcggacgcggcccgtcccctgcggccgctcggtggggcgggcccagtaggagggtcgggggctgcgcggggcttcaggggcgggcggcacggatgggtagccgggcggcgcggggacctcagctttgcggacccctcctccctgcgcatcacccttctcccgcattgtctgcttggggctcggcgcgcctcccactccgcagcccaacttgggggccgtcgccgctttccggatggggggcgcgcccggcggcggatggccccgaacccttgccccgggtccccgggttggcgccgctggggcggactcactcctcccctggggcgggcggccgcggtgtggagtccgcgccgcgaacaagtgcttgattttatccttggttgaaggaagaacagcggtttcgttgagagagagtgtagaaggaggtggaggaggtgagaaagtaatgaaatgcatttcaaaggattctataagatgtgtccctgctattttggctcctatgccgtataagcgacttaaagtaggtttagggttggcagaagtggggataagaatagaaatttgcactttgatgagaatgtggtcactgtccgggctggtggtggtgaactggaaattcaaggggtggtgtatgtgccaagaggcctttagtcctcttgtcttcaggtggcatttttcaactccgctggagccagtgcccaggaggaacaaagtcccagaagaagccagaggtagcggccccagccccagagagtgggggtgagtctgtgtttggggagacccaccgggcccggccggcacgtgccgcatggatctggggcgtgcagccactcggcacactggggaccccggctggggcacaagagcaccaggggggtagggcccaaagggatcaggggaagcctctggcctgtgtgcgtcagggatgctctgcacctgcaaccaggtgtcgtccacgggcgggggcatggtaacagtggtcctgttgatgtcaccgatgatgctgagcgcctccttcagcgcgtggtgcatgtgcagcatctcgtcgtgctgctgtgcctgctctgccaactcctccatcagtgtgttctggttcccacatgagtacatattggccagcggctccgagatgatgaactccggggtcgagtacagcagcctctccctctccagcagcgtctcgagctcctcgtgccgcctctcctgttctaacagcttctccacctcttccagcagcctctccctctccagcagcatctcatgctcctcctgctgcctctcctgttctaacagcttctccacctcttccagcagcctctccctctccagcagcctctcctgctcctcctgccgcctctcctgttctaacagcttctccacctcttccagcagcctctcctgccctggcagcttctcctgttcacacagcctctcctcctgttcacgtagcctctcctcctgttcacacagcctctcctcctgttcacgtagcctctcctcctgttcacacagcctctcctcatgttcacgtagcctctcctcctgttcacacagcctctcctcatgttcacgtagcctctcctcctgttcacacagcctctcctcctgttcacgtagcctctcctcctgttcatgtagcctctcctcctgttcacatagcctctcctcctgttcacacagcctctcctcatgttcacgtagcctctcctcctgttcacacagcctctcctcctgttcacgtagcctctcctcctgttcacacagcctctcctcatgttcacgtagcctctcctcctgttcacacagcctctcctcctgttcacacagcctctcctcctgttcacgtagcctctcctcctgttcatgtagcctatcctcctgttcacgttgcctctcctcctgttcacgtagcctctcctcctgttcacgtagcctctcctcctgtctcctgttcaggagactcaacatctgattgttttccacctcagcctggagctgtcttcccacactctctagctccttccttaggtggttggtctcatcttgtagctgctctaccttagatggccctgctgggggctctggggccaggggttcagccgtctggtttttgagtttgaacaagctcctcccaagcttctgtaccagatgtatctcatgcttcttctcctccttagatgtgcgaaccagtgaattgatgttttcagtgagttgactgattattgcggagcttgaatccagggccactgctagttcttggtactggctctccagatcctccagggtagtagaggatgcacggccctccccgtagatacctgttgctgaatccccaggtgagtggtaaccaccagaagtggctgtgtcagggctactgccattgattttctttttcctgttagctcctgctggaatgccagggctcttcctctgccaatatgcttttaactttttcttggctgcggccaatttcccctgttgtgttttttctgacat

SEQ ID NO: 26330 - DNA, 822 bp, Homo sapiens
  SIMILAR (251)..(526): 371254mologous to Zea mays MSF14,accession number X67323,Smith-Waterman Score=99.
atgactggaaacctctgtctgcctcccagagcttcgattcctgcactggggtctttcaaactcaggttctatggatcccgagagcctacactgacaggtgcggatcccggaccttcttcgccgagcctgaaccggcagacccctccccaggcccctgaagacccaggagatcccctcaggctgcggcgtgatgggccgagctacgccggggacctcggggctcggagattcggttcgacgggtccggggtgcgatccccgctccgcggagctcgctcggccgtggctttacctgcgtgtgattgactacaggtgctcagctcgcccccagtctggttcctgcagctccccggctgccagcggcgctcatggatatacagccggaacccctggccagtgcagctcccgccgctaccggccccgcccaagtaactgccgccacgcccctgacgaccgcttctgccacgcccctaaccacggaaaccgcttgttcattgggcagttcagccgcttctccacttgccccgcgcgctcattgcgtctaggaggggatccattgatcagcgaagctgttcctcagagtggaggcgggattcttaggggagagctcctcagcaattggttacatttgacggctttagtccagggacccagacgctactggataaggccagcccggagtgggcggggaaaggggaggagggctagaaggtgggtcgtgtttgatgtcgatgggggcggggtgaagagacgggtaattgtgaccgcaaactgctttagagggctgggtaaggtcagctgtcgactgggctcagaggaatga

SEQ ID NO: 26331 - DNA, 1992 bp, Homo sapiens
  SIMILAR (434)..(1591): 431254mologous to Drosophila melanogaster ANON-23D,accession number U29170,Smith-Waterman Score=883.
cggattcggcacgaggcggggagctgactggccggggttccggctgtatatccatgagcgccgctggcagccgggtagctgcaggaaccagactgggggcgagctgagcacctgtagtcaatcacacgcaggcacagatgaatccttcatatttatctggatttagctggtagcatttgtctcctaagacttggtcacagaggaatccatgtgaccttcaggccttctgctctaaactggcaggagatcctgtttctactcacagcgtccgagcttttatgtttgtttgaataagagatctgacctgaccggcccaactgtacaactcttcaaggaaaattcgtatttgcagtgggaagaataagtaacattgatcaagatgaatgccatgctggagactcccgaactcccagccgtgtttgatggagtgaagctggctgcagtggctgctgtgctgtacgtgatcgtccggtgtttgaacctgaagagccccacagccccacctgacctctacttccaggactcggggctctcacgctttctgctcaagtcctgtcctcttctgaccaaagaatacattccaccgttgatctgggggaaaagtggacacatccagacagccttgtatgggaagatgggaagggtgaggtcgccacatccttatgggcaccggaagttcatcactatgtctgatggagccacttctacattcgacctcttcgagcccttggctgagcactgtgttggagatgatatcaccatggtcatctgccctggaattgccaatcacagcgagaagcaatacatccgcactttcgttgactacgcccagaaaaatggctatcggtgcgccgtgctgaaccacctgggtgccctgcccaacattgaattgacctcgccacgcatgttcacctatggctgcacgtgggaatttggagccatggtgaactacatcaagaagacatatcccctgacccagctggtcgtcgtgggcttcagcctgggtggtaacattgtgtgcaaatacttgggggagactcaggcaaaccaagagaaggtcctgtgctgcgtcagcgtgtgccaggggtacagtgcactgagggcccaggaaaccttcatgcaatgggatcagtgccggcggttctacaacttcctcatggctgacaacatgaagaagatcatcctctcgcacaggcaagctctttttggagaccatgttaagaaaccccagagcctggaagacacggacttgagccggctctacacagcaacatccctgatgcagattgatgacaatgtgatgaggaagtttcacggctataactccctgaaggaatactatgaggaagaaagttgcatgcggtacctgcacaggatttatgttcctctcatgctggttaatgcagctgacgatccgttggtgcatgaaagtcttctaaccattccaaaatctctttcagagaaacgagagaacgtcatgtttgtgctgcctctgcatgggggccacttgggcttctttgagggctctgtgctgttccccgagcccctgacatggatggataagctggtggtggagtacgccaacgccatttgccaatgggagcgtaacaagttgcagtgctctgacacggagcaggtggaggccgacctggagtgaggcctccggactctggcacgctccagcagccctcctctggaagctgcgtcccctcaccccctgtttcaggtctcccatctccctcagtgacctggatctgacctcacaccatcagcagggggcacccaccatgcacacctgtctcggagtaggcagctcttcctgggagctccaggctatttttgtgcttagttactggttttctccattgcattgttaggcatggtgacaagtgacagagttcttgccctctgtccagtttcagcatctggttgcttttaagccaagtacatctagtttccctattaaaaatgtgtctgaatccccccgaattc

SEQ ID NO: 26332 - DNA, 474 bp, Homo sapiens
  SIMILAR (455)..(351): 371254mologous to Homo sapiens Human neurofilament-M wild type protein fragment 45,accession number Y20703,Smith-Waterman Score=62.
aatacagtgcttgggcatgaatctgctcacatcaggaaacctgatgggaaagtaaataacttggcacttgggtctgatgatgctttccagatccttgggtctgtgatcaggaatcagcttcataaattttcccatggaagtgagaaatgattccatattaaaaactgagttgaatacaaccacatcagccaccaggcatgaaagaatttggttgtatccatattggaaatccctctcctgacatttcttgacaggatatatcaactggttctcgtgaaaatacagaatctttttcagtttcccaaggtcaggccgaagggcagccagttcggtcaggttaagcactgaacttgcaaagagggtcctaggaaacaagaaaattggggtttactgtcccaagtatgtttgaagggatcatgctttgctcttctctcctctttcctcttcccaccccaagaaaaacacatcccctat

SEQ ID NO: 26333 - DNA, 909 bp, Homo sapiens; identical to SEQ ID NO: 5685
  SIMILAR (404)..(631): 821254mologous to Homo sapiens putative p150,accession number U93564,Smith-Waterman Score=345.

SEQ ID NO: 26334 - DNA, 726 bp, Homo sapiens
  SIMILAR (636)..(502): 841254mologous to Homo sapiens Human secreted protein, SEQ ID NO: 7217,accession number G03136,Smith-Waterman Score=193.
atgtggaaacgactttggaattgggtaacaagcagaggttggaacagtttggagggctcagaagaagacaggaaaatgtgggaaagtttggaacttcctagagacttgttgaatgtctttggccaaaatgctgatagcgatacagacaatgaagtccaggttgagcctcaagaattggcggcctgtgtcccagctgctccagccatggctaaaaggggccaatgcacagctcaggctgttgcttcacagggtgcaagccccagccttggtagcttccacgtaatgttggtcccatgggtgcacaaaagtcaagaattaacgtttgaggccagcctggtggctgatgtggttgtattcaactcagtttttaatatggaatcatttctcacttccatgggaaaatttatgaagctgattcctgatcacagacccaaggatctggaaagcatcatcagacccaagtgccaagttatttactttcccatcaggtttcctgatgtgagcagggacatggatgaagctggaaactatcgttctcagcaaactaacacaggaacagaaaaccaaacactgcatgttctcactcataagtggaagttgaacaatgaaaacacatggacacaggaaggggaacatcacatactggggcctgccgggggaacccagaaggtgagggagtttagagtaaagggtaatacagatattggggcagttggacttgagtga

SEQ ID NO: 26335 - DNA, 626 bp, Homo sapiens
  SIMILAR (368)..(288): 851254mologous to Homo sapiens Human secreted protein, SEQ ID NO: 6395,accession number G02314,Smith-Waterman Score=110.
agcacccaagtggtgaaccaggtcacctctggaatgctttgctgcttagaaatttcttctgccagatacccaaaattatctctctcgagttcaaagttccacaaagctctaggatgggggcaaaatgcccaggggcaaaatgctgctaaacataacaagagttgcctttgctctggttcccaacaagctcttcatctccatctgagacctcctcagcctggactttattgtccatatcgctatcagcatttttgccaaagccattcaacaagtctctaggaagttctaaactttcccacattttcctgccttcttctgagccttccaaactgttccaacctctgcctgttacccagttccaaagtcgcttccacattttcaggtatcttttcagcaaagccccactctactggtgccaatttactgtattagtccatcttcatgctgctgataaagacatacctgagactgagcaatttacaaaagaaagagatttaattggactcacaattccatgtggctggggaggcctcacaatcatggaagaaggcaaggaggagcaagtcacaacttacgtggatggtagcaggcaaaaagagcttgtgcaaggaaattaccccttatag

SEQ ID NO: 26336 - DNA, 474 bp, Homo sapiens
  SIMILAR (342)..(187): 811254mologous to Homo sapiens Human secreted protein, SEQ ID NO: 7217,accession number G03136,Smith-Waterman Score=215.
atgcaaagccttctggaaatccacaagctgaagatgcttgcacaatggagaacaattgaaggagtgagtctgggcagtgagcagattggaggctatttcattattagcaatgtgctggaagagaactctagaacagaagttgataaaaattcaggagcttttattgaattaaagccacatttgcctgaagaagtcagcaaagtcactgactggaacatggatgaagctggaaaccatcattctcagcaaactaacacaggaacagaaaaccaaacactgcatgttctcactgataagtgggagttgaacaatgagaacacatggacacagggaggggaacatcacacactggggcctgtcgggggtgggaggcctagcaattcattagaattacctgtgaagcttttaaaatgtaaggtttggatggaatgctcagaccctaccttagacccaattaagcccacagctttgagg

SEQ ID NO: 26337 - DNA, 2048 bp, Homo sapiens
  SIMILAR (238)..(453): 971254mologous to Homo sapiens Membrane-bound protein PRO1056,accession number Y66680,Smith-Waterman Score=355.
ggcacgaggcgggactcggcgggtcctcctgggagtctcggaggggaccggctgtgcagagaacttcagccaaagcatctgagacgggaagcagaaaaaggagggacagtttggagaagaaaaacgcagctgtgtgtttgggccttgacgtggctgtggatgcagtcgttctgacccctggtggccgagaggtgaagtgcagtggcggctgcttgctcaaggccggaggaagacgccatggagttggtgctggtcttcctctgcagcctgctggcccccatggtcctggccagtgcagctgaaaaggagaaggaaatggacccttttcattatgattaccagaccctgaggattgggggactggtgttcgctgtggtcctcttctcggttgggatcctccttatcctaagtcgcaggtgcaagtgcagtttcaatcagaaaccctcgggccccaggagatgaggaagcccaggtgggagaacctcatcaccgccaatgcaacagaagccccagaaagcagagaactgaagttgcagccattcaggtgggaagcctctgggaacctgaggggcgggtgcttgaacctttgggatgcaaaatgtccgatgcttaagaaaaaccggtcacttcatcaacagccctttccccaggtataagccaagaaacttgtgtgtcccccaccctatcccctctaacaccattcctccacctgatgatgcaactaacacttgcctccccactgcagcctgcggtcctgcccacctcccgtgatgtgtgtgtgtgtgtgtgtgtgtgtgactgtgtgtgtttgctaactgtggtctttgtgggctacttgtttgtgggatggtattgtgttttgttaagtgaactgtggactcgctttcccagggcaggggctgagccacatgggccattctggctcctccctgccccccgtgggccctccatcaccttctgctcctagggaaggctgctttgttggcccgagaaccagccccctcccctgatttagggatgcgtaggggtaagagcacgggcaagtggtcttcaagtcgtcttgggacctgggaaggtttgcaagcactttgtcaatcattcttcaatggactcctttcaatcctttaacaaaaaacttggtttccttaatcccaactgattccaatctgaaaggtctcttaagcaaatggaagaatacaaagcaaggaagctgggtgaagcccagcgttgaaggtaaggaagggcaatgcctttccgtggttaatttcttcccaggggcttccacgaggagtccccatctgccccgccccttcacagagcgcccggggattccagggcccagggctttctactctgcccctggggaactgtgtcccctgcatatcttcttcagcaataaactccatggggctctggggacccctaaccccttccaaaccttcccctgctttttgaggactttcaatctacaagcccagctcatcccagatgcaagactaacagtccctgacaaattgggtcctcctggccaggccaaatagttgaaaggaactccctgttcccgttggggcccagcacacccgggaatggaatggaagggaagaagcagaggccctttgccttcctcctgccctacgtcccccttagatgggccagcagaggcaactccccgcatccctttgctcctgccctgttgggtggtcaaaaccggtaagcaaggtgggttggagactcagcaggctccgtgcagcccttgggaacagtgagaggttgaaggtcataacgacgagtgggaacctcaacccagatcccgcccctcctgtcctcctgtgttccccgcggaaaccaaccaaacccgtgcgctgtgagcccattgctgttctctgtatcgtgatctatcctcaactttcaacagaaaaaaggaataaaatatcctttgtttcctagtgactgatccgcagtcagtcgcttatcgcgagtcttaactatccattattgggggggtctgtttatatgtgacattttttcgggtgcttgctttccgtcct

SEQ ID NO: 26338 - DNA, 1494 bp, Homo sapiens
  SIMILAR (919)..(1056): 911254mologous to Homo sapiens CDA017,accession number AF267860,Smith-Waterman Score=212.
atgaatgaagcttatttccagcgttattcacagtggcatatcaagggcaggggggaagacagtggtctgctccaggtgtatgggcttcttctaaagcaggcagctcacatgacacttttcaacactctgtcctgtaccagcttggcatccggcgtctatcaaaaggggaatctttcatatgcaattatggcagaaaataaagaattgagttgtgatcaggctaggtttgttacgcgcggcgctaacacggtgcgaggacgcgactcaactggatccaaatgtctcaagtgtaaagcaccccatgagaggcgagcggcaacctcggggggtgagcgaggatctgagctgcactcgactataacaagagcgaaagaggaaatcaaccgccatgcgcagagaggtgttgtggtgacgttgtcccaaccgggttctgtgtatgcagctgatttcagttttctgaacagaaatgtaccattcaggaggaaattgggaagtactgacgatgagtcaaacatctcaaagccaactgagatcctggggaaaagcacaaacaaagcaattgatgaagcagtcctctgggaggatggactgaatgacccagtgagaatgagctcaaggctttgggttacacatcatcagcctggaagaggttttctgaacagcagtgggggctctcgctggggtcttcagcaccatcttggaggttgccatggtgaggggattgggagctgccaggggaacctggaggagactcttctcacaggccctttccaggccccatacccagggccccttgagcaggcagcttggacaggagtcagtggctgtggatgcccagatgtcctcaccttagagtcaggggcctgcactggggttgaaggaataaaaagaacatcaggcagccccccatttccaatctggagatgctttgttctgtacaagctgcccaacttgaaatttctggatgcccagaaagtaaccagacaagaacgagaggaggcgttggtcagaggagtcttcatgaaggtggtgaagcccaagcagtctgtgagagatgacaccctggttggccagtcagtttctgtgcctgcctggagcctaggtggagttggctccacagaactcagagatggagggagagtcctagcccaagcagtgtggactactggccactcaagctatcagggggaatccacgcaaccgccacaactccacaatggtctcgtgtatgggaactctggggacccagagaatgtgagtaacccaactggcattaccctgcaaggcaatgcggggtccaaggatggtcaaccatatcacccactaggcaccccagaagtgagagggaatgaaatcaaatggaacacaagttttggtgggaaggaagaatccggaccacaattgccaactctgatggttgccccactagccaaatggaatccgcaaagttactcatgccttaattgtccaacattaagtaaaagttcagaatag

SEQ ID NO: 26339 - DNA, 593 bp, Homo sapiens
  SIMILAR (457)..(392): 1001254mologous to Homo sapiens Secreted protein encoded by gene 127 clone HSUBW09,accession number W88660,Smith-Waterman Score =106.
aatggagagtctggctccagggaagctgctggagcctgagtctgtcgggttcctctgcctgccccacctcttctacgggtgcctcttgctgcttctgtgtccccggccatctgaactcagtgggcttcgctgtacttggttccaaggtgctctggactccaggagagagtccgttttgccagtagactccgggcagccgccagcaagggctggaaagcagtcccaaatcacagctgtccagtgagtactctcctagtactggatacaaaggaagaggccacggcccacgatcttctgaactcacaataggtggaggctggggctctggcgccacctctgcggaatcccaagcccgcttcacacagccaagaaaatgttgctccatccctcaagcctcagaccaacgtttgcgctgatcaaggagggagagtctctgcactaccatcagcctgagtatttatgctctgcagagcccgtgggcggaggccagtcagatattaagaaactcagtagtaacaaatgcacgaaaattagtagacaaatgaaaaacgataacattttagagagtacatagaaccaaaacgaaccgtaat

SEQ ID NO: 26340 - DNA, 1367 bp, Homo sapiens
  SIMILAR (427)..(558): 401254mologous to Mytilus edulis metallothionein 10 III,accession number AJ005454,Smith-Waterman Score=79.
tttttttttttttttttaacagatacgaatgaaatatttaatgaaataaatacaaatatttaaaatacaaggaaactgaaagtaataagcgacgcgaaacaagaaagaaacataagggaaaaagagaatttaaaaactgacaaccagcaatgaaagcacatcttaatgtatttttattttctaggtggagacgtttcggtaactgagaatcttttcaaggaggagaatccaaaaagccttctgcttgctatctaaggctgcgtagctccacagatccgtgaacagcacgctcagagtacagagaacgcggcaaaaccaacgcgaagaatccactccaggcagtctgagaaacccgggaggtggcgccacggctggagggcaggaggatggcggcgttccaaaagggcccccgctcgtcacagacctcggtgtcctgctgtctgtcccagggatggagaggactgctccagggaagctgctggagcctgaggtctgtctggttcctctgcctgccccacctcttctacgggtgcctcttgctgcttctgtgtccccggccaactgaactcagtgggcttcgctgtacttggttccaaggtgctctggactccaggagagagtccgttttgccagtagactccgggcagccgccagcaagggctggaaagcagtcccaaatcacagctgtccatctctggataagacacactacttctgccctgcaatcagcaaacctaggcgacccagagtcccgtgccagtcctggcaccagcaaccagccgccccgctcctatgccccgtccttaccttcatcagcaggaacccagagtcgatggtttcttggtgacggcgccattggctgcgtcaaaacgaatgttgtccttgacaaccccgccggctggcgtcactcgcaggctcccggcaccaccatttcgccagccgagctatggctgggcctagtcaagcctttccaggaagaggctatgaagttccaaccatcaaccttggaagagctgtcttggaggcaggcaggtccagagccccacacgccatgggacctgaaccaagagcaagcctgggcctgggcgctggataacttccctgtgcagagccgccactcctgccaatgccatcagctctacgggagctctgctccgggctggctgctgcactgcgattccaccgggcacgcagccctgcccggagatgagaggggccaaaaacagcctcgagactctcatgtcgatgagtcaatggctgaaaccacagacgggctccagtcccctcaagaagacacagatgctaccgacggtgagatccaaagcggcctgaagctgtctggagatgccagcgcctgtggaggttga

SEQ ID NO: 26341 - DNA, 378 bp, Homo sapiens
  SIMILAR (1)..(378): 1001254mologous to Homo sapiens lambda 1 immunoglobin light chain variable region,accession number AF124163,Smith-Waterman Score=659.
cagtctgtgctgacccggccatactcggtgtctggggcccccaggcagagggtcaccatctcctgttctggaaccagctccaacatcgggaataatgttgttaactggtaccagcacttcccaggaaaggctcccaaactcctcatctattatgatgatgaactggcctcaggggtctctgaccgattctctggctccaagtctgacacctcagcctccctggccatcagtgggctccagtctgaagatgaggctgattactactgttcaacatgggatcacaacctgaatgtcgtggtgttcggcggagggaccaaggtgaccgtcctaggtcagcccaaggctgccccctcggtcactctgttcccgccctcctct

SEQ ID NO: 26342 - DNA, 571 bp, Homo sapiens
  SIMILAR (40)..(570): 881254mologous to Homo sapiens immunoglobulin lambda light chain,accession number X57817,Smith-Waterman Score=826.
aagacaggactcaggacaatctccagcatggcctggtcccctctcttccttaccctcatcactcactgtgcagggtcctgggcccagtctgtgttgactcagccatcctcggtgtctggggcccccaggcagagggtcaccatctcctgttctggaggcacctccaatatcggaaacaaccctgtaaactggtaccagcagttgcccggaacggctcccaaactcctcatcttttatgatgatctgaagccctcaggggtatctgaccgattctctggttccaagtcaggcacctcagcctccctggccatcagtggcctccagtctgaggatgaggctgattattactgtgcagcatgggatgacagcctgaatggtgtggttttcggcggagggactaaggtcaccgtcctgggtcagcccaaggctgccccctcggtcactctgttcccaccctcctctgaggagcttcaagccaacaaggccacactggtgtgtctcataagtgacttctacccgggagccgcgacagtggcctggaaggcaaatagcagccccgtcaaggcgggag

SEQ ID NO: 26343 - DNA, 951 bp, Homo sapiens
  SIMILAR (150)..(686): 931254mologous to Homo sapiens immunoglobulin lambda light chain,accession number X57819,Smith-Waterman Score=865.
ggaattcccgcttcgacgatttcgtcgcatggatggactctccccctctcagagtatgaagagagggagagatctgggggaagctcagcttcagctgtgggtagagaagacaggactcaggacaatctccagcatggccagctggggctctcctcctcaccctcctcactcactgtgcagttccagggtcctgggcccagtctgtgctaactcaggcaccctcagcgtctgggacccccgggcagagggtcaccatctcttgttctggaagcagctccaacatcggaaataatcctgtaaactggtaccagcagctcccaggaacggcccccaaactcctcatctataggaataatcagcggccctcaggggtccctgaccgattctctggctccaagtctggcacctcagcctccctggccatcagtggactccagtctgaggatgaggctcagtattattgtgcagcatgggatgacagcctgaatggttcttatgtcttcggaactggtaccaaggtcaccgtcctaggtcagcccaaggccaaccccactgtcactctgttcccgccctcctctgaggagctccaagccaacaaggccacactagtgtgtctgatcagtgacttctacccgggagctgtgacagtggcctggaaggcagatggcagccccgtcaaagcgggaagtggagaccaacaaaccctccaaacagagcaacaacaagtacgcggccagcagctacctgagcctgacgcccgagcagtggaagtcccacagaagctacagctgccaggtcacgcatgaagggagcaccgtggagaagacagtggcccctacagaatgttcataggttctcaaccctcaccccccaccacgggagactagagctgcaggatcccaggggaggggtctctcctcccaccccaaggcatcaagcccttctccctgc

SEQ ID NO: 26344 - DNA, 1279 bp, Homo sapiens
  SIMILAR (576)..(1178): 711254mologous to Homo sapiens immunoglobulin lambda light chain,accession number X57817,Smith-Waterman Score=723.
  misc_feature (1)...(1279): n = a,t,c or g
agtgtggtggaattcgctgtgggcacaagaggcagcactcaggacaatctccagcatggcctgggtctcctctcctcctcactctcctcgctcactgcacagggtcctggggcccagtctgtgcttgacgcagccgccctcagtgtctggggccccagggcagaagggtcaccatctcctgcactgggagcagctccgacatcggggcaggttatgatgttcactggtaccagcagcttccaggaacagcccccaaactcctcatctttcgtaacagcaatcggccctcaggggtccctgaccgattctctggctccaagtctggcacctcagcctccctgggccatcactggggctccagggttgaggatgaggctgattattacttgccagttcctattgacagcagcctgagtggttccacagtgctccaggcccggggggaactgagacaagaacccacttcctcctctgccaggaggagtatgaagaaagggagagatttgggggaagctcagcttcagctgcgggtagagaagacaggactcaggacaatctccagcatggcctggtcccctctcttcctcaccctcatcactcactgtgcagggtcctgggcccagtctgtgctgactcagccaccctcggtgtctgaagcccccaggcagagggtcaccatctcctgttctggaagcagctccaacatcggaaataatgctgtaaactggtaccagcagctcccaggaaaggctcccaaactcctcatctattatgatgatctgctgccctcaggggtctctgaccgattctctggctccaagtctggcacctcagcctccctggccatcagtgggctccagtctgaggatgaggctgattattactgtgcagcatgggatgacagcctgaatggttatgtcttcggagctgggaccaaggtcaccgtcctaggtcagcccaaggctgccccctcggccactttgttctggccctcctttgaggacgcttctgacgatgaggccgaactgtagtgtgccataagggactactacccgaaagccgtgatggtggcctgaaagacaaatatcacccccctaaagcagggaaaggataccccctcgccctctctgttaacgccctcctctgacgaggttaaaagctataagaacctactgcctggtttcccgnnnnnnnnnnnnannnnnnnnnnnnnagcgcgctggtaggcaacaatgttttataaagggggcgtggggacccccaccccccctcccccccc

SEQ ID NO: 26345 - DNA, 861 bp, Homo sapiens
  SIMILAR (436)..(735): 731254mologous to Monodelphis domestica ribosomal protein S4 Y isoform,accession number AF051137,Smith-Waterman Score=379.
tcactggctgttaggcagaggtctctgtttcttatcccatgggtcgctccatgggctgcttgagtatgctctcaatatggcagctgacattccataggacaagtgatccaggaacaatactttgcatctttcaatccaatcaagttgactctcaatattgaccgtcacaatcacattgtaatgaaaggtagaacatctgattaaaatatttgctttctctattataagaacttcactgggtcctatattgggcactgcctgtgtactcaactcttcttttagacattgcctgctggattcacggatgtcatcagcattcacaagacgggagagaatttctgtctcatctgtggcatcaatggtcgctttgctgtacattgtattacactggaggaggccaagtacaagttgtgcaaagtaagaaaaatctggttccacgatgctcacaccatccactaccttgactccttcgtcaaggtgaatgacactgtttagactggcaagatcactgatttcatcaagtttgacactggtaacctgggaagaattggtgtgatcaccaacagaaagaagcaccgtggatcttttgatgtggttcatgtgaaagatgccaatggcaacagatttgccccttggctttccaacatttttgttactggcaagtgcaacaaaccatggatttctcttccccgaggaaagggtatccgcctcaccattgcttttcactctgataagtggttctgcagtgacatctctgtacagaatctgtgcaagcgtttttctcagggagataccgggataaagaatagcgaggccagaaggtgttctaatcttcaggtttagtcggcattgccggatcat

SEQ ID NO: 26346 - DNA, 1042 bp, Homo sapiens
  SIMILAR (1)..(141): 951254mologous to Cricetulus griseus Ribosomal Protein,accession number D26473,Smith-Waterman Score=247.
atggctcgtggtcccaagaagcatctgaagcgggtggcagctccaaagcattggatgctggataaattgaccggtgtgtttgctcctcgtccatccaccggtccccacaagtggagagagtgtctccccttcatcatttttcctgaggaacagacttaagtatgccctgacaggagatgaagtaaagaagatttgcatgcagcggttcattaaaatcgatggccaggtccggaactgatataacctaccctgctggattcatggatgtcatcagcattgacaagacgggagagaatttccgtctgatctaattgacacccaaggggtccgcttttgctgtaacatcgtattacacctgaggagggccaagtacaaagttgtgcaaagtgataaagatacattgtgggcaccaaaaggaatcccttcatctgagtgactcatgatgcccggcaccatccgcctacccccgaaaccccctcatccaaggtgaaatggataccccattccagattgaatttaagaagacctggccaagattaacctgatttccatccaaagttccgaacactgggtaaccctgtgtaatggtgacctggaggtgcctaaccctaggaagaatttggtgtgatcacccaacagagagaggcacccctggatcttttaacgtggttcacgtgaaagatgaccaatgtcaacaggtttgcccactcgactttccaacatttttgttattggcaagggcaacgaaaccatggatttctcttccccgaggaaagggtatccgcctcaccattgctgaagagagagacaaaagactggcggccaaacagagcagtgggtgaaatgggtccctgggtgacatgtcagatctttgtacgtaattaaaaaccattgtggcaggattaatagcaaacaaaaaaaaagggggcgccgtttaaaaaattacaactttaattacgccggtctgccgaggttaaagctttttaaagggggcccaatatatcatttacttgcccggggttataaagaccggagagggaag

SEQ ID NO: 26347 - DNA, 1332 bp, Homo sapiens
  SIMILAR (414)..(4): 771254mologous to Homo sapiens proteasome subunit p112,accession number D44466,Smith-Waterman Score=534.
ttaatcatcaatatactcaaatggttctgggggttctggctcttgttcctcctcctcgatttttgggccatgtgctgccacaggttccaccagctcctcaatgtcttcactggtatccttcagaatgatgatgcctccaatagagagtggtttgaaaggctggtatctacaggtctccggcatggttaggaccttaagctgggcaggcataactcgggctgggttatccaataactggaagtttggctcaggttcttttttcttctctttttcctcctttttctctgcctcatcaacctttctcttctgattcagtgatttcttctcctgtgttccagaagacttccaggaacctgaggaggagctgccactaacagccatatttcccaatggagactgtgatgaccttggaagggggtcaaaagcctgtgatggagtcgtacacactccattacctcccttgtcttctttgcctgccttggagaaatccagagtcttcggaatggcaaaggcagctcctggatttccctttagcctctgcccccggttctggtctgacccagcacatggcagctccaaagagcggacaaaaccttgaagcaaagccaaagggccaggccagcctcgtgctgagtagccgtaaaatctgtggtgtattgagcggagcgtgcgctgcgtgtcccggcggccctgccaggtaggtggatccagccatccctttccctttggcgggagaggctgggctcgagggacgcccgcggccacagcgctgcgctgcgaagtggcagagcagagatttgattcccgggctcccaggctccacgggcctgccttttccaccttatctccgtgcagcccaagaggcagtcgagctcgagtcttgacgggagaacggagcccttcatcctggaggagaaagtcgtgctcctgttggttctgatcatgctcctggctggctgtgaagagtggactgaagccttctggggctgtaagcaggaagtcaaggctgtaggaggctgtcgtggtctcgaggaggtttagagaaaacaatggtgttctctgtgtacccttccgcgagggctggggagtataccgccgcgcagaagacgcaggccaggggagaattcgcgccgggcgcaggcggggtggcgggcagccctgggcgtgcggggtcctggcgagaagcgagccggcggcctgaggaggcgactgactgagcagcgcacccggggagcaaggaggcgcggtgaactgagcggcccctgagctgacagatacactgcgcagctggaacggcgagcgagccgacgggcgagtgaggggcgcagccat

SEQ ID NO: 26348 - DNA, 3255 bp, Homo sapiens
  SIMILAR (1311)..(1138): 361254mologous to Arabidopsis thaliana F24O1.6,accession number AC003113,Smith-Waterman Score=71.
  misc_feature (1)...(3255): n = a,t,c or g
aagatatcaacgaggtacttcttgattttattagatatagagaattatcaattcaagtcagaagtgccacaaccactgccatattagaaagattagtacccgagagcccagactgtcacccggctggaggcctctcgccgatggctcccagggaccactgacctaatcaagggcctcctccttcacacgccaccctccaccccaacccctttatgccttcttaaagtccttcagggaggggaaccccacccatcaaggattgtccctttcctggcaccctaaactccttctgtctgctaggaaggacaggcaatgaggactgttccctacaacggatggatggcttatggggggggccacattttcaaaggaagctgaagagggatctcagcccccgtattgtccacttggggagggcagaaccccaaatcttagtaaatgaagactttctctcttgaaccattcacaggaatactgaaggtaatgaaaaaataatgtgtaaaccatcctttggagcagaggctacaaactcacatgcccgcctggaccagcaccgggcagacgtcttacatgagtgaagtgcagtgggggatgggaagggcgggggagggggtaaaggtggtgggggtgagccgcagcagacttgagatgacagcatgccccatcctccacccagaaaactaggtattttttatacgtaatctcccaagtttcaaatattggcaatacatacaaaaggttatgaagccttataacttctgccttaggcaaattccaaacttaaacaaagctccctctcccactaaaataagaaaactttaaataagatgattacaaagaaattaataaagaaatagaaaatggatagcagcttcaaaaataccagtctccctgttttaaaacaaaatcaataaaatcagtgaatccacaattcattgaaactcattcttcggctacaaggaagcagctgggatagatccactgggcaggcagccctgcagggattaaaatgagggcccactgccaaaaaggccccaaatgaggatgccgtcctcctcatcctcacaacatcctcatcagggcaggggaagggattaggggttaggactcccctaattatggggggaatagggttgagggcaccagaggcagggaaggggcccctttcttaaatatccataggaggcccctctgttgggggtcaggaccaggaactgggggggcagagggcttaaagggtgaggacccacttgctgttcccaggaaccaagggggctggggggtaggggggctacctgggggcaggccggggagttctgggagccagtgatcttaggagcccccccagcaaaacaggtttccccattgcaaccatttggcactatccctggagagagcttgaaattaacaaatcaaagttaggcagccaccttgcagggcaccgagcaaattagtaggcgccagtttgtgtgtctgctgcgtaaactgtgcatcattgaaatgaaagggagcctacttcccctcaagctagtgccctccccttcccagggaaaatcccaggagcttgcctttgcccattcccgaaagactctggatttctcccaaggcaggcaaaagaagacaagggaggtaaatggtgagttcccccccgtgaaataaacacactggatttccccagctcctaaggnaaccatcatcgattcctgtccagactcacggaacacagaggaagggattcccagaacctcacagaaaacaagagaagccggaggggctgtgtttgccattgaactttgggcttaggacctgagagctagagcaaagtccctaataaccccagtaagtcccaagccccttagctttccttctgtttggtgccctaataggaaaacccctaacaacccttaataccccaaagggacttggcaacagaaaatcggatgttcaacatgaagaaagaaaagaggctctttgttcctcaccggccatgtgtggctaatttctggtccctggccctgcagcacgccagaccgtccttggcccctggccccgaaaaagcccccaaggcaacagtgtaagtctttattttggcttgctctgggaacccaaggtcccagggaagcctgaccctctctgctctgggggactctgacagggagaaggcattggctcagccagaatgtctcaaaggtactacaattggcattgaatggaccaattctttgctgtcagagactgttctgcacattgtggggatgccccactagaatgccaggggggtgccccccacagtcactgtgaccccctcaacacacacacatttccaatgctgcctggagggacaacctgcccctggtttaaagccactgggctgtgtggccccctcatgcatttgtgaaacagaagccccagagactgagtgacatgttccaaggccatgcctcagctctgatgacttctggttcagagttcttcccagctgcactctcaacgatgggtgcccatgcatgtgcccagaacactgcagacacaccatggggtgccacagctctgcagagcctcaaagcggacagccatctgtctcagtggctcagagaaaccgagacagagagacaaaataacctccctgtgatcagacttagcaaatgctgggtggggagtaggttcccaggggagacactgttttaggtcctgcttgtcttagtaagccccactgtctagctggtaactgtgggtggggagtaggttcccaggggagacactgttttaggtccctgcttgtcttagtaagccccactgtctagctggtaactgtgagtgtggcaaggcctccaagcaaggcgggggtttctgcaaattctcccatggtagaccctgggggccaagttaagacggaacccaggcccccagtctgtaggttagagcccagggacagcgcaagggtccagccttcatcttgaagtctccggtgggctcagcaggagtgtgtacgactccatcacaggcttttgacccccttccaaggtcatcacagtctccattgggaaatatggctgttagtggcagctcctcctcaggttcctgggaaatcttcctgagcttgagcttctgcaggcagcaacatcctggttcttcctccggctccagggaccccagggaaaagcaggctagcagtccggggaggcctggcctctcccaggctccttccactggttgcccggctccggcgacatgcagggccctgcaggcggccgc

SEQ ID NO: 26349 - DNA, 682 bp, Homo sapiens
  SIMILAR (224)..(400): 421254mologous to Human adenovirus type 7 URF 11.5K,accession number X03000,Smith-Waterman Score=82.
tcaaatgtcccctgtggtgctgaatgtctggaaattgtccccatagggcacagtggggaccatggccatagacctgtttgaggcagtataaatgccctctgacccctttagcagcttaactcctcttcttgcttcaggtctcagattcagcgcctctctgtttggaaaggcttgctgacctcccacgtccctgatcagagtctcttgcacttccaccagcacatccctgtgcacctcttggctctgctcttctttgagctggctgtattcttgggcaggccctttcttcagtggcaaaatgactgcgtcttgcaggggaagtggacagataaacagggagattgtgctgatgctgctgttgaggtcataggtgtttgtggtcatttctcctttggagggtggttcagaaacaagtccattcatggatctgtgaaaaaattcttctctggagaggtccagtaggaattggaaagtgagggaaagaggctggatgaacaaagggtcacaggtgtaggtttgggacacattgtggggcctgaaatttggaacctgcaactgcccgtgcccgaacacagatgcctcgatctccccataaccgggcaatggacccctgctcttgggagctactaggggcctgtgaccaacctcatcttgtgtcacaccaccagcatccagccagatc

SEQ ID NO: 26350 - DNA, 499 bp, Homo sapiens
  SIMILAR (407)..(499): 831254mologous to Homo sapiens ESP-2,accession number U15158,Smith-Waterman Score=149.
ttttttactcttacttggttttaataatacagttaggatgggttgccaggtctggcattgggcctagatgcccaggcatcgtggagtgcctccgtggtcactgggcacaggccaccagctcctccagggcttgctctcggcggttgccatggaccagcagcacctccttgatccggtcctgctggaagcccatgtcactgaactgcttgccctcttgcaggaaggtcctagtgggtgactggaagtaggatagggatggggagttgggtgtggctggaaaaagcgatgacaccagctctgagccatgaagcatctttctaattccaagatggagctggatggggtggggtagggtggagcagagcaggggccttccggtccagtgcccctcacccttccttcttcccaggactgccggaagcccctgtcgattgaggcagatgacaatgggctgttccccctggacggttcactgctctgtcggaagtgccacactgct

SEQ ID NO: 26351 - DNA, 588 bp, Homo sapiens
  SIMILAR (465)..(7): 361254mologous to Mus musculus ubiquitin-associated protein NAG20,accession number AF275549,Smith-Waterman Score=229.
tcactgggcacaggccaccagctcctccagggcttgctctcggcggttgccatggaccagcagcacctccttgatccggtcctgctggaagcccatgtcactgaactgctcccagaggcgcaggaactcccctgcctggctctcggagaactggaacatctccatggcctcatccaccaggccttcctcatatccctgacgtaacaggcggtcacaggcactgaggtagctgagaaactggctcactctctgcctccctgtcttctgcagagctatgatggcccttcgcaggggatatcccagggcgaccactggcccaatgaggtcttgctcctcctggctcagggcggacagcaggtcagccgcagtatcagggtgtgacttgtgggggttgagaggttggggtgcccccccaagaggtggcagacaggtgtacgggctgagggacttggtgacagatgagcaggggtaggtcttcccaaccaggccctccttcttgaatttggttgggctggggtttggcagggcatggagcaggggaggacctcggcacaccaattgaaacacaccttgtaaatctgtactcat

SEQ ID NO: 26352 - DNA, 1987 bp, Homo sapiens
  SIMILAR (409)..(188): 481254mologous to Mus musculus ubiquitin-associated protein NAG20,accession number AF275549,Smith-Waterman Score=168.
ctttcaactctttcagcagattctgctgctgttaactgtcacccttgggtattatttgtgtttttacaataagtatgcatcactttgttactcttacttggttttaataatacagttaggatgggttgccaggtctggcattgggcctagatgcccaggcatcgtcggagtgcctccgtggtcactgggcacaggccaccagctcctccagggcttgctctcggcggttgccatggaccagcagcacctccttgatccggtcctgctggaagcccatgtcactgaactgctcccagaggcgcaggaactcccctgcctggctctcggagaactggaacatctccatggcctcatccaccaggccttcctcatatccctgacgtaacaggcggtcacaggcactgaggtagctcgagaaacttgggccggaagcgggcagagagggagggagggtaagaggagcagccgggggcagcagacagggcagagaggcactccaagggcctgagctgagggccaggcaacagggcaagccaccacctgcagcgtggccccagagagcccgtgaacccacagaagggggatagaggctttctctgagtgcctggcgataggcagacaatgggtcttcaccaactatgccaagctgggggctggactccaggaaaagggctgtcagggtgggctagggtgttcatagaacctaggtggggagcaggacaggcttcaaacacagacatcccacctaccacccaacgcaattcaacattcatgcaccacccacccctgtctgggagcacccattcgtgtgaaggtgcctcctcatccgtccacacctgtgcacccctactgtgcccccagatgcatctctctcatccaggactcctgagccactactatgcaactcctgcaccagtgctggagaaggggtgtggggtaggcaaagaggaggattccacaggcaggaaaaactgttcaggtcaccccacggttacgtcatcaggggcccaggataaaatgctggctccttaccaggcagggctcaaaggcctgctccctgtctatggccttggcccctccctcaccctccaggtctctgcagatgcagctccctcagccaaggctggcctccttccctggtccgtgggaagcttcctgccccctctatcttcctgggtgccgtcccttgtgcccccatagcaccctatgcttccctgttacagcacatataactttgtaattgcttcactcaatctttctcatccacgaagtttttgctccatgagggaggggctgtgtcagtctcattcaccacagtgtccccatcatccagcatggtggcagaaggagctcaataaatgtgtgctgtgtttataaaatgaatgaagacctgccttcaaggaactcacagcttagtgggggagataacaccagatacaggaccacatcagtgccaggcaaatcaaagcaggatttatggggtgtaggtgccaaatgaaggctccagactacaggaattatgagtatatgtggagaagggagagtggggtttccgtagaccttcagagctgggatgaaagtgcacatcatctagactaacagttgtcaaattgtttttggctcctgaagtgtttgtcttagcacaaggaggcttcagcaataacaggctaagattagagctgctctgggagaaccagggccaggggcatgggggcccggagtccagtgctcctggccgaggtactgcccagtacagctagacctgctctgagcacgttttgaaaaccaggcacccatgccctccttccacagttgaggaaactgaggttcaggcaaggcaggtgccttgtccggggtcccaggactaggtccccgattatgtaacctgtcatttaatgccttgtccatcagagggatcagctgctagaggacgggcttttagctgtcttggtggatgacagggtttccaaaggtgaaagcgaattcc

SEQ ID NO: 26353 - DNA, 507 bp, Homo sapiens
  SIMILAR (112)..(312): 371254mologous to Caenorhabditis elegans similar to splicing factor SC35 (SP:SC35_HUMAN, Q01130) and other proteins necessary for the splicing of pre-mRNA,accession number U28738,Smith-Waterman Score=85.
gtgtcccccaaactcctcccgtcttacgcctccaggccctacctggttcccaacgccctctcatcccccagcgtcccacctgcactttccgcctcttcagcgccgccgcgtccagccacacgccgcaggcctcctcctcggggcctgtccgcctcatggccgctgaggagacgaagccggcaggacgccggcgcaggctcccggcgcctcagggaacgccagaaccgcggccggcgacgttcggatctcgcgccaacgctgggggcggggctacgtcgcgaccgccccgggcgccagccccgccccggcaaggccctggccccgttcgctgtgccccgcccacgcactaactttcgcggccggtcccttgagtgcgtgcggcatatttccctgcgcggaggagtgcgtgttctttgtgatccgctctttcaagagcggattcggaagctgctgtgtgaacggttctcgacagcctcagaaatgtacattttctttttgctgtattga

SEQ ID NO: 26354 - DNA, 1347 bp, Homo sapiens
  SIMILAR (154)..(516): 1001254mologous to Homo sapiens Human secreted protein vc34_1, SEQ ID NO:44,accession number Y95002,Smith-Waterman Score= 648.
atggagtgggggtgggattctgatgacccgtggagcttgcagctttatgaggaagaggagccccggaaggtggagagacattggaaagacaaaggagacaattcttctagaactggatttcccacaaatacagcccagggttgggtacattgtctcatcatccatgaaggaccctcggtgtaccgcatctttaaacggtggcaggctgtcaaccagcagtggaaagtgctgaactatgacaagacaaaagacctggaggatcaaaaggcaggaggcaggaccaacccccggacctcctcatccacccaggccaatatcccctcctcggaagaggagaccgcaggcacccctgcccctgagcagggccctgcccaggctgccggccacccctcaggccctctgtcccatcaccactgtgcttataccatcctgcacatcctgagtcacttgagacctcatgaacagcgaagtcccccaggcagcagccgagagctggtcatgagagtcacgacagtaggcagtcaggctgatgctcagtgctttgtgctccctgctccttcccgcgtagccaggtgggcccaagggtgcctggcagggagcactacccctggacccctcctgctcgctctggggaccctgccagggaaggccactgggtgttcacctgcaaagtttctggttgtcactgcacagtggtcgcgtcatccatggaatagaatatggaaactaggcaatccttggggtgctgtggacagtagagtgaaactccggaatgactccaagtgtgaggaactggcctcgttcagggtctgggctgccttggctggtggtcagtgggctagctcagtacctactcatcccaccatgggcccccatcatgggtcctccctcctcccacatctactcctcacacagcccatcacagcgctgagaatccactggctttcttcctgcccaagccaaccagttgaggactgcagcattcaatatcctcctggctcccaaccacagttggtcgaggttagagttgggataccagctcttatgtcccaggcagtgatccttccaaagggtgacttgttgagaggggaaccctctgcaccctccaacacaggctgctatccctcttccaagaagaaatgcagaaatcgtagagctgccactgccctgagcatgctgagaggatacacctgtctgctgaattatggtgactttattccccccaacatgtgccaccttactgctactattattgtttttcctggattaaataagctaccatgggtgtctgactttaaaaatggggacctatggaagcagtcagaaccaggtcagaatcccttgtga

SEQ ID NO: 26355 - DNA, 1102 bp, Homo sapiens
  SIMILAR (649)..(696): 811254mologous to Mus musculus Ig heavy chain precursor,accession number M37679,Smith-Waterman Score=80.
tggtagggaaagaagttttattttcaagcttttaagagaatattacaaacaacaagagagttttaaaaaaccctaaaaactaagtttaaaaaagtacttgacaagtgtccttttaatacccatggatgacgcgaccactgtgcagtgacaaccagaaactttgcaggtgaacacccagtggccttccctggcagggtccccagagcgagcaggaggggtccaggggtagtgctccctgccaggcacccttgggcccacctggctacgcgggaaggagcagggagcacaaagcactgagcatcagcctgactgcctctttggggagggttccaaacagggagggttccaagcagcaaggaatacttagattgggctctactccactccttggggcacactggtcaagctcctcccaaccactgcagctgctctcttggaagcccgtaggtcaggggtgccctacccgtgaggggactgggtctgtgcatgtgccaagacaagaaagggctggcattgcacatgccctggccatggtggggttgggtagttgggaaagtttgctccgggattgacagcttccaaagctgaagccacagcagcagaactgtgcttgaaatatccactggaaatctgtacttttctctaggggtgtgtgtgtgtgtgtgtgtgtgtgtgtgtgtgtgtcctgtaaacatctttgaaccaaatcactataaaataaattaacaagggcacagaaggacacccttttccaaacctaagccctcttttagcccacctgaaatcgggagttccatttggaagttccttcaggaaggagacacactctccctctggctgctcacaccagcatatccctccctgagcatccctccctgaccatccaccccaccatccccacagccatttgtcagcgaatcttgcccatccaaatgagcccaggagccccaaaggcagtgtgtccctgccagctcacccgtgcctcctccttttctggctgcctgcagaacacagccccaggagaaacaaaaccaaacagggtgagagcagggcagaccacagatgcttttcctcttggcccccttggcctccggcactgcca

SEQ ID NO: 26356 - DNA, 491 bp, Homo sapiens
  SIMILAR (190)..(411): 341254mologous to Homo sapiens Human normal pancreas tissue derived protein 5,accession number Y59897,Smith-Waterman Score=86.
  misc_feature (1)...(491): n = a,t,c or g
gcgggggcaatgcgaacctagtncgtgtggtggaattcgaggattgctttaaggcactgatttggataaggaataactccatcaccacagaagggaatatcattgtctatgggaatacaattgatacttacaccaccgtggagacgctcttaaaccttggcgtgagcggcagccgcatccacctcgtgcagcccccgcccgcccccaccatcacctgcatcaacaactactcggtggagagcgccgtggcggacgcgctaggagccgccggagtcactatgtaccgggatgcgatcctggcccagtggaatgacggcctgcacccagaccccatctacagcgcctccttcaccacacccaccaagcctttcagactccagtgctctatgttcttcagcttctgtgagaagaatgtggattatgaaacgtttaaagccctcaatgatgcatgtcttgtgtatgacagtcgacttgtgattgataccaacttc

SEQ ID NO: 26357 - DNA, 2187 bp, Homo sapiens
  SIMILAR (956)..(1177): 341254mologous to Homo sapiens Human normal pancreas tissue derived protein 5,accession number Y59897,Smith-Waterman Score=86.
atgggggagcggtctgtaggagccttggaggcccagctcccaccccagtgtgtccagaagcacagcaccatggctggaaccaaacccttgactgtacacccagtctttgtggaactccaagaatcaggcttcaattgtactttgagccagctacactgggccccttcaaccctcagccttctctccaggcaagtccataactgcagctgtgggcaagagcttaatgtgccacagagtaaagctgcaggggcagctgggcacacatgggcagatgcccgaggctctgggcagctggctgggtcttccactcagtttccaaagtacgcagtcgtggcagcagctggaacctggcaggcagaggctgatattagtcaacacctgacaaacagggaggttcccaacagcagtcagcggcggtacacggggaaagttccttgcaaccatttcactctcaacgaggaagaggattgctttaaggcactgatttggataaggaataactccatcaccacagaaggtgattttctccaggtctggtgcttaatgactcccccaggcacctctcagcatcactggatcacagtccaaatctcagagcagaggaggcctaggacagaaagcccgtccccacctgagccaagaaccaacaaccacagacagaattatacccacagaggctcccaggaaatgcagcaaagagtaggatccagtgtgagaggaggcctcgagccactgctagcttatttccaagtcagcgatgagatggtggtgttgcagggcttttccgtagttcagctaaagatggggtccttgtccgtcccgtggccacgaaaacgtagcctcgcagacggtttgaaggggaatatcattgtctatgggaatacaattgatacttacaccaccgtggagacgctcttaaaccttggcgtgagcggcagccgcatccacctcgtgcagcccccgcccgcctccaccatcacctgcatcaacaactactcggtggagagcgccgtggcggacgcgctaggagccgccggagtcactatgtaccgggatgcgatcctggcccagtggaatgacggcctgcacccagaccccatctacagcgcctccttcaccacacccaccaagcctttcagactccagtgctctatgttcttcagcttctgtgagaagaatgtggattatgaaacgtttaaagccctcaatgatgcatgtcttgtgtatgacagtcgacttgtgattgataccaacttccacaccaacgacatagccatcagagctgctggctccctcaccaaattctccaatagatactactcaaatgagtggactcacagcaacttcagttccaaagaaattggctttcagctggcagcagctatgctacatctctttgatccaacccttgagcctgtgaccgagccaccagctaatcttgaccggctcatccccatgtacaagggagccaagattcaaggcctagcaactactgatcttcatactgtctcagtcactttgccttttccagaatgtgatatagttgcagtcatacagcctatcgtcttttcagatcctgtgagtcaggaatttggacagggcacagtgggcacagattgtctctgctccacactattcacagccttagatgggaagactagagggttagatcaatggtccagatcatctgaaggcttgtttactaaatccgaaagcttgttactcagctgggctgggatgactcaaggaccggaagtgttcaccacagcctccccacctgggctgtcctcaagtgcctgggcttcctcacagtatggtggcctcagagtagccagactgctcacgcagtggctctgggctccaagtgcaagtgttgttactagcaagctggaagctgcgttgccttttatgacccaccctcaaaagtcccacagcatcacttctcccactctctctgttggagcagtcacagcaaccaccgagattcaaggggtggggaatagagaatccatctctcaaggcagagagtgtcagggtcatattgcgggacgcctgcagcctgcagggctcctcaaggacttgacaagtcaccaccaactaagtgactgtgaccctcgtcttgaggtgcacagcctcggccacgtacatggaatccaagtcagccctcctaaacacaaagaagtcctt

SEQ ID NO: 26358 - DNA, 1403 bp, Homo sapiens
  SIMILAR (1374)..(1204): 1001254mologous to Homo sapiens Human secreted protein, SEQ ID NO: 6857,accession number G02776,Smith-Waterman Score=298.
taaagataaaataggtgatttattttgtaactgtgaaaactatgtttattttgaatacaaatcttgaattatctatggatgagtttgaaataaatcatagaagagaatcactttttggatttttaatccaggtccttgtgtgtgtatgaaatacacacatgatcttccttaattagccatggaagggcaaaagtggaccaaaaacaggtcagctaagacaggcatgtctggcttctgggctgtagctcagcatgttgtaggctagagtccagtgaccttcactggcaggctgcctacagtccatgagaccctaggcagtcaggccactgagcctctgtcctccagctgaaaataatgaagagccacacggccttctccccggtccatccgtcagggtgacctccaatccctgcctggaaaaccctgaggggccaacatgagagaaatgccttttccaagggagcccaaacttgatcctataagccttatcctcagggtatagtccaaataacacttatgactccaagcataggcagccatgcttactactctctaaagaagccagtacttctgatgaggaattgaaagtcaagatgggagctctgcttttgtatcccattccccaataaatagagttcagcttatatgttaaatgaattttcacataaatttgtccacttgaacttctgcttctttttgatagttgcctagagatggttctggagagtaggttcttttcccatcgtgatcagcaactgctcttcaaagtacaggagctggtccacttcaaaacagtcgctggcttgaggcaccactttttccaaacactcgcggatctctgcttcgctagcattctgatgccttgctctctttgaggtaattatagacctctttcaaatacttctgtccccagcttctgcatggctgattccctcatgcgtttcatcttggtcctggccaatcggcaactgttgaaaaattgggtgggtcctggggacatgtccttcagccatgggtggtgatggtctttgtgtctagagaagtgcaaacccaggacattttcccaaacacctggccaacgcttcgatatcaactgtcctgttggtttgttctgtaagcaggctgggatccctcattcctgatttctttctctggtctttctaacgctatttcttcttcctcctcatcactctcttcacaataggaatcaaatgcatcagcgtagtactcttcagccacaagtgggtcttctgggatctcatggtatccaaggtcagatgtggcatcctctacaattgattcaagttcgtggaggtccatggaaggaataggctgagactcaggcaggttctctaaagttggttcatcagattcctcttccctgccttgccacctctcttcat

SEQ ID NO: 26359 - DNA, 484 bp, Homo sapiens
  SIMILAR (12)..(74): 521254mologous to Homo sapiens Human secreted protein, SEQ ID NO: 7613,accession number G03532,Smith-Waterman Score=64.
  misc_feature (1)...(484): n = a,t,c or g
cattcattcagcacggggcaggggggccatgccaccagcctgggggctcaccaggcccctggatgcacacaactcaggcagggcacctggcttcaggctttggatgtctccaaaccaaaaacctcccactgaaaatccaggtgtgannnnnnnnnnnnnnnnnnnnnnnnnnnnnnnnnnnnnnnnnnnnnnnnnnnnnnnnnnnnnnnnnnnnnnnnnnnnnnnnnnnnnnnnnnnnnnnnnnnnnnnnnnnnnnnnnnnnnnnnnnnnnnnnnnnnnnnnnnnnnnnnnnnnnnnnnnnnnnnnnnnnnnnnnnnntccaggcatggccaagcgattcatggctgggcaggcccagtcccgtcccgctgcacgctgaccaccgtgccctgcgctcacgcctgcaagccactcagctggaacctcgcctcctcggatatgccganctgttccagggaattacgccgctctatcaggtaatctt

SEQ ID NO: 26360 - DNA, 1516 bp, Homo sapiens
  SIMILAR (328)..(642): 971254mologous to Homo sapiens Human secreted protein, SEQ ID NO: 6782,accession number G02701,Smith-Waterman Score=523.
  misc_feature (1)...(1516): n = a,t,c or g
atggggtctcgctatgttgcccaggctggagtgcagtggtgggatcatggctcactgcagcctcgacattccgagctcaagcgatcctctcgagtagctgggcctacagggaacccccggtccgcgtcggccgccgccctcaaccgcctctactcctcaccagagcccaaggccgcgttatctcctcctcgtttcgccacctccacgacttcgtttggcgaacggcgggcaaagaaagcacttccggggcaaatgagacgggccctctgcctgagcggggacggcggccgggagggcgcggcccgggttcccgttccccgcggagccatgcggtacaacgagaaggagctgcaggctctgtcccggcagccggccgagatggcggccgagctgggcatgatgtgccccatgaagggcagcgtgctgaagcggcggctggtgaagctggtggtgaatttcctcttctactttcggacagacgaggccgagcccgtcggagccctgctgctggagcgctgcagagtcgtccgggaagagcccggcaccttctccatcagcttcattgaggaccctgagaggaagtatcactttgagtgcagcagcgaggagcagtgtcaggagtggatggaggctctgcgtcgggccagctacgagttcatgcggagaaggctcatcttctacaggaacgaaatccggaaggttgacgggcaaaggaccccctgggaacagtttcggcattatccgaggaggccaggttccagctgagatggcttgcaggcgtgagcgcagggcacggtggtcagcgtgcagcgggacgggactggccctgcccagccatgaatcgcttggccatgcctggatctgttttgttttggtttttggtttttgggtcagggtttcactgtgttgcccaggctagagtgcagtggtgccacagctcactgtgaccttgaccttctggactcaagtgatcctccttgccctcagcttcccaaattagcggggattcaccaggcatgagccgccacacccggcccatcacaccctggatttttcagtgggaaggttttttggttttggaaaacatccaaagccttgaagccaaggttgggttttgggcaggggcctgcatttttattgaaaactgcccagcaagctgcngctccactggggcccccaggatcccacctaactggggctgggcacctggtgccacggtgctgctgccgccaggataaggcgcctttcccacagggtgccctgcctgagttgtgtgcatcccaggggcctggtgagcccccaggctggtggcatggcccccctggccccgtgctgaatgaatgtacagagccagacaaagctgtgaatggcctaggggctgagtcccacaccatctgtgaattctcctgcagacanggaagggccctggctgtgcacctggggaaagtggttgccctgggggccagggtgcttgttcttgttcaaataaaggtacctcttttccacaaaaaaaaaa

SEQ ID NO: 26361 - DNA, 466 bp, Homo sapiens; identical to SEQ ID NO: 19025
  SIMILAR (370)..(92): 961254mologous to Homo sapiens HDCMD11P,accession number AF068296,Smith-Waterman Score=449.
  misc_feature (1)...(466): n = a,t,c or g

SEQ ID NO: 26362 - DNA, 1719 bp, Homo sapiens
  SIMILAR (1)..(573): 991254mologous to synthetic construct chloramphenicol acetyltransferase,accession number A02739,Smith-Waterman Score= 1038.
atggagaaaaaaatcactggatataccaccgttgatatatcccaatggcatcgtaaagaacattttgaggcatttcagtcagttgctcaatgtacctataaccagaccgttcagctggatattacggcctttttaaagaccgtaaagaaaaataagcacaagttttatccggcctttattcacattcttgcccgcctgatgaatgctcatccggagttccgtatggcaatgaaagacggtgagctggtgatatgggatagtgttcacccttgttacaccgttttccatgagcaaactgaaacgttttcatcgctctggagtgaataccacgacgatttccggcagtttctacacatatattcgcaagatgtggcgtgttacggtgaaaacctggcctatttccctaaagggtttattgagaatatgtttttcgtctcagccaatccctgggtgagtttcaccagttttgatttaaacgtggccaatatggacaacttcttcgcccccgttttcaccatgggcaaatattatacgcaaggcgacaaggtgctgatgccgctggcgattcagatttttgcactgagtggccagccgcactggacagtgacgagaaatgtgagaagcattttccaattgaaattgacagcactgattatgtttcatcatggaccatctgttcggaaccccagagcacgagtagtagtcttaagatggctccgaatcaccctgcatgaatctgctgcagtggagggtctggccgttttcccaccagcccggaggcacagagagccagaatacagcattccctctccatcacaggcattcacaccagcagtgctggctacacgtgtgacaggacagcttggcggtcacacccaaatccagaatccaacagtggcaccaacaatcctaggaaatacacccaccttccatttaacttgtttcagaatcttttcccttccaagacatctttttcccaaagataaatggcgaaccctgggagcgcccttcctccggacgttactacttgtaggaacagagtcatccgtccatttgtctggtatagatccggatttgctggtttttgaacaatctcccacatatctaaatactcgttcttcatccaatagatgggacagactaaggattctaaaagctatgaatttagataaacaaaccaccacgataaatggtatgctgccatccacagaggctccatcctcaaccacgcatcaagatttggttgtaaacacaaacagtaccagttattctaaggaattaaccacagatttttgggcaagatttacttccctgaatgagtccattaccacaaagataaataaggtgtcaccaagtactgatttcatcagcaatccagataataagactatttctcctttctttgaacccatagacacaaaactttctcatatgcctgttccacctggactcaacagtagcaaacaattactaaacaaaaccaaaggatacaatagcagaaaccacacatctgcaaatgaagatgaggtatctgtgacttcaaagacttggctggtttctgtggccctttgcacctctgtcatctttctcggctgttgtatagtcatcctggcatctggatgctgtggaaagcagcagggccagtataaaccaggacagagaaaatcaggatccttgcaaattaaaaaccgtaaccatatgaaggagaactcttcatag

SEQ ID NO: 26363 - DNA, 911 bp, Homo sapiens; identical to SEQ ID NO: 19026

SEQ ID NO: 26364 - DNA, 756 bp, Homo sapiens
  SIMILAR (356)..(754): 481254mologous to Homo sapiens MDS023,accession number AF182422,Smith-Waterman Score=214.
ctgacactgaacgccgcttgtcccctccggcttgccgtcctcgcagccatggcggccgccgcgctccccagaatggctgtctctgcagtcgagggcaaggactctgcacgcgttctcctcgtgacgtctactaggtcattacgatcctgacacctatgctggcggatagaacacgcagaattgagaggccacccaagaagaaaggcactacctccttaggacagagaaaatggctgttgacccaggactggcctagtgtttacccagttgcagcacccatttaaaccctctgcagtaccttcttcctgttccgaatgggttatccagtaaaaaaagggcgtgcccatggcaataggagggaaatcgtagaacttttaaagatttcccaatttttctggattttgacttcctgtaggcaattaaaaaagcacttgtgaagcccttaaagattttttgcactgagtgggccagccgcactgggacagtggacgaggaaatgttgaggaaggctttttccatttgaatttgacagcactgattatggtttcatcaggaccatcctgttcggaaccccagagcacgagtaagtagtcttaagagtaaagctttctcagtttgaatttagcatgatcacgcaaagaagacactaattacacttgtaggagagcgatactgcaagacaccagatgtgcttaccatcaaacagaataggtggcctttaaggagccagatcaccataatgccagtgtatctatt

SEQ ID NO: 26365 - DNA, 3073 bp, Homo sapiens
  SIMILAR (1457)..(2149): 841254mologous to Homo sapiens MDS023,accession number AF182422,Smith-Waterman Score=940.
tttgagaactaacatgtttatttagctgtatgtatatatgcttaactacacccgaggaagctgtagagttagaaaaacatgaaccattaacagatgtggcctccctgcagaacttttactttgaaaaagaagtacgtctgaaccagattcacatgtttgatatttggatgcagagaaaatggggcagaaagcatcgcaacagttggctctgaaggacagcaaagaggtgcccgtcgtctgtgaggtggtcagtgaagctatagtccatgcagctcagaaactgaaggagtaccttggatttgaatatcctccaagtaaactctgcccagctgcaaatactctgaatgagatcttcttaatccatttcatcactttctgccaagaaaagggagttgatgagtggctgaccaccaccaagatgaccaagcaccaagccttcctgtttggtgcagactggatttggaccttttggggatccaacaagcaaataaagcttcagctcgcagtacagactctgcagatgtcttcacctcctcctgtggaatctaagccttgtgacctttccaatccagaatcaagggtagaggagtcttcctggaagaaaagtagatttgataagctggaagaattctgtaacttaataggagaggattgcctgggtctgtttatcatctttggtatgccaggaaagcctaaagacatcaggggagttgtcctggacagtgtcaaaagtcagatggtgaggagccatctgccaggagggaaggctgtggctcagtttgtcctggaaactgaagattgtgtgttcatcaaagagctgctcagaaattgtctgagtaagaaagacgggctgagagagggcggtgccagcccagggagcctgcgcttagcggccccaggcccgcccctgacactgaacgccgcttgtcccctccggcttgccgtcctcgcagccatggcggccgccgcgctcccagcatggctgtctctgcagtcgagggcaaggactctgcgtgcattctccactgccgtctactcggccactccggtcccgacacctagcctgcgcgttgatgacctccatttaacagagattgtagggatgcttgatagcgtgcttaccccggaggactctagtggaaaatacagatttattagcggagaagtgctatgtaggatcactggctgctttactggggtaagagtggaagccaaagatctgtttggaggctgttgcagtaatccaaatgaggtgatggtgacttggattaaagtaatagtggagaaggaggtgtggttgtatttgcgatatattttgaaggcactacctcctaggacagagaaaatggctgttgaccaggactggcctagtgtttacccagttgcagcaccatttaaaccctctgcagtacctcttcctgttcgaatgggttatccagtaaaaaagggcgtgcccatggcaaaggagggaaatctagaacttttaaagattcccaattttctgcatttgactcctgtagcaattaaaaagcactgtgaagcccttaaagatttttgcactgagtggccagccgcactggacagtgacgagaaatgtgagaagcattttccaattgaaattgacagcactgattatgtttcatcaggaccatctgttcggaaccccagagcacgagtagtagtcttaagagtaaagctttccagtttgaatttagatgatcacgcaaagaagaaattaattaaacttgtaggagagcgatactgcaagaccacagatgtgcttaccatcaaaacagataggtgccctttaaggaggcagaattacgattatgcagtgtatctactaacagtgttataccatgagtcttgggaatactggaaggaatggggaaaaaagtaagactgaagcagacatgggaagagtatatatggggaaaatagctcatcagaaaggaaatatcctgggaaacgcttctccagatgaaagctgctgaggaaaaatatggggaattaattaaagaagagctccttgggtactaaagaaattgaagagtacaaaaagtctgttgttagtcttaaaaatgaggaggaaaatgaaaattccatttctcagtacaaagaatccgtgaagagactattaaatgtgacatgaattatgggagtagaaaaaatctgcttggatttattaattttatggatatatgtgatccagtatcctaatttggatataaaattgaaaatgttaaaaaatcatttttttttcctcagggtttaaaattattttccctccatactaatgcttaatggcaatgattactcccagagttttttaatttttacactggggcaatagactaggaggtctctgatttcttcttgggtctgaagtgttttgattttatttctacataatagctttggtattcatgtatatacatgccatttaattgtgatttgatcacctttcccatttctttcccccacaggctggcatttccagtagtggctttggaataatgggttttgggttacccctgggaaggcaggccccagaaccccatttcccttgacttggcaggttccgggctgtgttccacatgactgctgtctaggcggatgcattttttcacatttgtccaactcctggttaggaaaccagggtccctcagggggtattcctcctaaccctgatattttcctaaaaagatatgttggattccaactttgtttagccatccctactttcctagattgtggggccccatttttccccgggcccaagcctacccagaaaagtagaagtgggagattaccctggtatgtatctcctccgggtgccccagttaagagctgccacagctcacggaaaaagatgaggcataacggaccttgaatgtaattggagtaagtgacaaaataagaactaccctgggaaaccctgcattcaatgtagctgtcaattcagtatttttaaggtacccctgtcaggctgtttcttaccacttcgatggttgtgattaatttaaaatcaaaataaaggaattacctgagtttaaaaaaaaaaaaaaaaaaa

SEQ ID NO: 26366 - DNA, 1253 bp, Homo sapiens
  SIMILAR (216)..(839): 781254mologous to Homo sapiens Keratin 8,accession number X74929,Smith-Waterman Score=796.
ctcctgcttccaccatgtccatcagggtgacccagaagtcctacaaggtgtccacctctggcccctggttcttcagcagctgctcctacttgagtgggcccagtgcccacatcagctccttgagcttctcccgagcgggcagcagcagcttccagggtggcctgggcagaggctatggtggggccagcggcatggaagtcatcactgctgtaatggtcaaccagagcctgctgagccccttcattgacaaggtacagttcctggagcagcagaacaagatgctggagaacaagtggagcctcctgcagcagcagaagatggctcagagcaacctagacaacatgttcgagagctacatcaacaaccttaggtggcagctggagactctgggccggaagaagctgaagctggaggcagagcttggcaacatgcaggggctggtggaggatttcaagaacaagtatgaggatgagatcaataagtatacagagatggagaatgaatttgtcctcatcaagaaggatgtggatgaagcttacatgaacaaggtagagctggagtatcgcctggaagggccgactgatgagatcaacttcctcaggaagttgtatgaacaagagatccgggagctgcagtcccagatcctggacatgtctgtggtgctgtccatggacaacagccactccctggacatggacagcatcattgctgaggtcaaggtgcagtacgaggagatcgctaaccgcagctgggctgaggctgagagaatgtaccagaactagtatgccaagctttcccagctggaggctgccctgcagcgggccaagcaggacatggcactgcagctgcatgagtaccaggagctgatgaacttcaagttggctcaggacatcgtgatcaccacctacaggaagctgctggagagcgaggggagctggctggagtctgggatgcagagcatgagtatccatatgaagaccaccagtggctatgcaggtagtctgagctcggcctatgggggcctcacaagccccagcctcagctacagcctgggctccagctttggctctggcgctggctccagctccttcagccacaccagctccaccagggccgcggttgtgaagaagattgaggcccagaatgggaagctcgtgtccaagtcctctgacgtcctgcccaagtgaacagcggtggcagcccctcccagcctgcccctcctgcggctgcctcagagcccagaggcaggctgc

SEQ ID NO: 26367 - DNA, 1282 bp, Homo sapiens
  SIMILAR (361)..(585): 921254mologous to Homo sapiens cytokeratin 8,accession number M34482,Smith-Waterman Score=341.
  misc_feature (1)...(1282): n = a,t,c or g
ctgcctgcgccaagcttggcacgaggaaaatctgtcttcctccctagacagtaagctctctgaagtcaagaaccatagttgttttgttcactactgtatactcagcacctaatagtacttggcacataagtactcagggactatttgtcaaatgcaagaacatatgcccctaaagcagaagtcaggaaaaccagaaaaaatgcctttaagtattacagaaatgccacaggcctccacttaaattgaaaagcaagctaacccctcttgataaaaatgtggattgagatcaagaagcagcttctctgctccttctggaatctccacctggtttagcctgctgcctccactcctgcctccaccatgtccatcagggtgatccagaagtcctacaaggtgtccacctttggcccccaggctttcagcagccgctcctacacgagtgggcccggttcccgcatcagctcctcgagcttctcccgagtgggcagcagcaactttcgcggtggcctgggcggcggctatggtggggccagcggcatgggaggcatcaccgcagttacggtcaaccagagccctgctgagcccccttgtccttgaggtggaccccaacatccaggccgtgcgcacccaggagaaggagcagatcaagaccctcaacaacaagtttgcctccttcatagacaaggtacggttcctggagcagcagaacaagatgctggagaccaagtggagcctcctgcagcagcagaagacggctcgaagcaacatggacaacatgttcgagagctacatcaacaaccttaggcggcagctggagactctgggccaggagaagctgaagctggaggcggagcttggcaacatgcaggggctggtggaggacttcaagaacaagtatgaggatgagatcaataagcgtacagagatggagaacgaatttgtcctcatcaagaaggatgtggatgaagcttacatgaacaaggtagagctggagtctcgcctggaagggctgaccgacgagatcaacttcctcaggcagctgtatgaagaggagatccgggagctgcagtcccagatctcggacacatctgtggtgctgtccatggacaacagccgctccctggacatggacagcatcattgctgaggtcaaggcacagtacgaggatattgccaaccgcagccgggctgaggctgagagcatgtaccagatcaagtatgaggagctgcagagcctggctgggaagcacggngatgacctgcggcgcacaaagactgagatc

SEQ ID NO: 26368 - DNA, 614 bp, Homo sapiens
  SIMILAR (287)..(532): 871254mologous to Homo sapiens dJ281H8.4 (Ubiquitin-Like protein SMT3 LIKE),accession number AL031133,Smith-Waterman Score= 366.
tccaagtctgcttaaaggttaattgattaaagtgggtgggtcctcatgtttactaatgtgtgttgcagctcttttggtacaccagaaggccagaatggaacgacttcaaagagaacttgagattcaaaagaaaaagctggataaattaaaatctgaggttaacgcaccctctccctcatccaccgctgtcacctcctgctgctcttcctgctgctcgtgtactcgttaggtgcggacccgccacctcttttgtgaagcagcagctgaggagactccggtgttcaccatggccaacgaaaagcccacagaagaagtcaagactgagaacaacaatcatattaatttgaaggtggcgggacaggatggttctgtggtgcagtttaagattaagaggcagacaccacttagtaaactaatgaaagcctattgtgaaccacggggattgtcagtgaagcagatcagattccgatttggtgggcaaccaatcagtggaacacagagaaatctttcatgaaagaaagagtcagtcgatgcagccagcttcattgttgtcttattttaagaaattgccccagtcaccccatccttcagcagccaccaccctgatcggtcag

SEQ ID NO: 26369 - DNA, 1415 bp, Homo sapiens
  SIMILAR (680)..(549): 481254mologous to Macaca mulatta transmembrane activator,accession number AF227558,Smith-Waterman Score=98.
tcaccgcgccgtatgctgagcaccagcgaacgccaggcccgtgcacgtccaagcgcggtctctgtccggatcccccatggcccccaggtcccgctttctgttcccggccccggacgcccgcggccagttctccgcgaccctgagaatcaagagccaagcatcgggtaggagctgctcaccttggtctgggcctggcggcgcccgcagagccggtccgccgggtctctcgggtacccaacaccgctcttcggcccaacgtgtcgctggggcaaccacccagacgaaggaagtgacatcaccttcctgggtctttggagaggggctcattattggtcgcttgtgtgcatgtgctgttgcccttcctgggtgccactcttgtctgcttgccaagatgtcttgatctggctttatcagcatagaacaaataaagggcctctcccaggaaggtttggcaaaacactctccatttagaagcaggggcagtgacaagacccgaggtttgccactcaagcagcaagaagggcaaggagccagtttcatgtcctcatcctggaaggatggccagggctccacagggtcctgtggggggctggcaggagcagatctgccctcctcttgaggaagcaggccaccaccaccaggaagcaacagatggtagcgtacaggtagagcccccacgtgcagctgccccgcagccccagacaccttggaaaatcctgaagatgtgcttttaattgaaagaattctgggtttaggtttcatttttattttgtctttttcaaattcctcatccttattttgagattcagagaaagattttacaacaatgtcttcacacccatcaggtgccatttcctcttcatttttgatggcacacactggctcatctttggttatgttaccgtttgatttattggttttcaaaaacaatagttttgaaggattcttttcttcatcatctgatatatgaaagtcattcatttttttattaactgaattttcatctgctgaagtgtcagaaaaatcacctaaagaaacaatctcatcactgtcaaagtcatctgagtattcagaactcctttgtctggctgagcgagctgtaattgctcttattagctcatcctggaaagtagttcttttggtaacttttggactctttgtatatgccaaagtggtgctaaaaacttcatcagacatagtgtattttttctcgttacctttataaaatagctaattattagaattcaccttctgatagtagcttggtctgggcctggcggcgcccgcagagccggtcctggtccgagcgaggaggaggggctaataacagaggcggagggcggttgctaggaaacagcgtcttcgggaggaagtgacttccccaccgccgggtctctcgggtacccaacacgaaa

SEQ ID NO: 26370 - DNA, 585 bp, Homo sapiens; identical to SEQ ID NO: 22928
  SIMILAR (1)..(582): 1001254mologous to Homo sapiens Nip1 isoform s1,accession number AF083956,Smith-Waterman Score=946.

SEQ ID NO: 26371 - DNA, 1104 bp, Homo sapiens
  SIMILAR (7)..(36): 901254mologous to Homo sapiens Nip1 isoform s3,accession number AF083958,Smith-Waterman Score=48.
cccaacatggcggctccccaagacgtccacgtccaggatctgtaaccaagagattgtcaaatttgacctggaggtgaaggcgcttattcaggatatccgtgattgttcaggacccttaagtgctcttactgaactgaatactaaagtaaaagagaaatttcaacagttgcgtcacagaatacagccagttctctatcaaagggcatttatttggactgcttccacatttttttttaagctaacttattccctgacagacttttcttcaactcagcatgacttcaactctccaactacacctgttaccttcagtgacctggagcagttggctaaagagcaagacaaagaatcagagaaacaacttctactccaggaagtggagaatcacaaaaagcagatgctcaggaaaaccaccaaagagagcctggcccagacatccagtaccatcactgagagcctcatggggatcagcaggatgatggcccagcaggtccagcagagcgaggaggccatgcagtctctagtcacttcttcacgaacgatgctggatgcaaatgaagaatttaagtccatgtcgggcaccatccagctgggccggaagcttatcacaaaatacaatcgccgggagctgacggacaagcttctcatcttccttgcgctagccctgtttcttgctacggtcctctatattgtgaaaaagcggctctttccatttttgtgagatcccaaaggtgccagttctggccctttcagctcctgtttcaggatctgtcctggttcctgagctctaggctgctaagctgagccacacacccctccgtttgcaccagttgcctgcaggttggatggaacacagtgccccacttttctgcaagtagctggcttgtaaagggtgaacagagccatgggaggaaggtctggcattgggatgccgccctggggacatacgaaccgcctccaggaccggatgcccctcctgtctcccgctcccatcgtgcccttaaaggccagatgtggtggagggaagagagaagaggtaggaagaaaggtgatgaaaactcctggtcattccttgaataaacttgattttatttaatagaaaaa

SEQ ID NO: 26372 - DNA, 798 bp, Homo sapiens
  SIMILAR (72)..(251): 381254mologous to Arabidopsis thaliana putative protein,accession number AL031326,Smith-Waterman Score=82.
atggcttggttcatgtttgtccccgaaaagggaaatcgtgaacgttcgcttggagcgaagaaggtacttcgcccccgtcaattcaatcttcttgggatcccaggtgtcctcacaggaacacccctgcgcaaactggaaaaccaccaaagagagcctggcccagacatccagtacatcactgagagcctcatggggatcagcaggatgatggcccagcagtgtcacctccttaaagctacagccagtatccctggcctgagggactggatgtgtgagggcttacggcagagcccgggacacccttgcccttttgagacctgcaaagtgccggtctggccagcagatgtcctggaggccgcacctcataggtggaaggttctggtgcatttggctgctgccccaacacagacctcacagtgcctgcccacgatccctgggttgattttgtggctggtggtttccctgagcagcgtccatctgcttcagagagctgaggaggtggctggctgccccatcatgagcctggatgtgaggcctgagatcctcaccccactggcagagtctgggttctgctcagcgcggcctggagccattctgtctgcatcttactggagagacatccacagtgtggcgggctctggcttcaggaacactcccccattcacaatagggttctcgccctatgagaatctcatgccgctgctgatccgacagtgggtagagctcagcggtaatgctcgctggcggctgacctcctgcagggccacccagttcctacaggccatgaattggtactga

SEQ ID NO: 26373 - DNA, 2244 bp, Homo sapiens
  SIMILAR (1561)..(1887): 981254mologous to Homo sapiens DNA-binding protein,accession number M88374,Smith-Waterman Score=613.
  misc_feature (1)...(2244): n = a,t,c or g
atggtgacaggcaagggagcggcaccagatgccgaaaccacaagggaagatgcctgggaagctggggactgtgtggaggctggggccagcgccaaggagcaagtggaagctgcccgcaaagacctggaccaagccaaggaggaggtgttccgcctaccccaagaggaggaggaggggccgggggctggggatgagagttcctgtgggactggtggaggcacccaccggcgcagtaaaaaggccaaagcccctgagaggccggggactcgtgtcaccccagatcctgctctggagctcccatccaccccaccaccgtccagccttttacgcccccgcctcagtccctggggcttggccccgctcttccgttccgtccgctccaagctggagagctttgctgacatcttcctcacgcccaacaaaaccccacagcccccacccccctcccccccaatgaagctggagttgaagatcgccatctcagaggccgagcagtctggggctgctgagggcactgcgtctgtcagcccccggcccccaatccgccagtggcgaactcaggaccacaataccccagcacttctccctaagccctctctgggccgaagctactcctgccctgatctggggccccctggcccangggagcctcccttctctaccacatttgctcttcacgcattcactttcttctcggaccagcagaaccaggtctccgatgatgacctcgacccatcctttactgtctcaaccagcaaagcctcgggcccccacggcgccttcaatgggaactgtgaagcaaaactctccgtggtccctaaagtgtcgggcctggagcggagccaagaacagcccccggggcccgacccgctgctagtgcctttccccccaaaggaaccaccgcctccaccggtccctcggcctcctgtctcaccccctgcacccctgccggccactcccagtctgccacccccaccccagccccagctgcagcttcgggtctcacccttcggcctccgcacttctccatatggcagcagcctggacctcagcactggcagttgtctgggccgctggggtcgcctccacgggcaggagccacggccaggacgtgcaggccgccccctgctggtccgtttcggaaccgggcgggtggccgcggcgctgcccgggttgggggcatggctttacaacggtgccgagagtgaaaacgaagaggagagccctcggcaggaaagttctggggaggagatcatcatgggagacccggctcagagtccagaatccaaggactcaacagagatgtccctggagagatcctcccaggacccctctgtcccccagaaccccccaaccccactgggtcactccaatcccttggaccaccagatccccctggaccccccagccccggaggtagtccctaccccatctgactggaccaaggcctgcgaggccagctggcagtggggcgctctcaccacatggaacagccccccagtcgtccccgccaacgagcccagcctgcgggagctggtgcagggccgcccggcgggggcggagaagccctacatctgcaacgagtgcggcaagagcttcagccagtggtccaagctgctgcggcaccagcgcatccacacgggagagcggcccaacacctgctccgagtgcggcaagagcttcacgcagagctcgcacctggtgcagcaccagcgcacgcacaccggcgagaagccctacaagtgccccgactgcggcaagtgcttcagctggagctccaacctggtgcagcaccagcgcacgcacacgggagaagagccctacaagtgcacggagtgcgagatagccttcacccagagcaccaacctcatcaagcaccagcgatcccacaccggcgagaagcctncaagctcctctagcctgttgaagcccctgacagtgccaccaggctacaccttccctcctgctgctgccaccaccacttctaccaccacggcaactgctaccaccacagcagtgccagctccgactcctgcaccacagcgcctcattctatctcccgatatgcaggctcgcctgccctggctagaagagctcttccaaagccccttgagagagtccccatccttccaaccaggatccttccaaccactgctgtcacaggaccttagcaatgccgcattgcaggatccaggaggtctcggctggctctcagcagaggccatccagggtcactcagcctga

SEQ ID NO: 26374 - DNA, 10902 bp, Homo sapiens
  SIMILAR (293)..(2131): 1001254mologous to Homo sapiens transcriptional activator SRCAP,accession number AF143946,Smith-Waterman Score=3202.
caagcatgaggccgagaccgagactcggattgttgagctgcggaaggagggtttctggtcactgaagaggctgcctaaggtgccagagccccctcgccccaaaggtcactgggactatttgtgcgaagagatgcagtggctctctgctgactttgctcaggagcgccgttggaaacggggtgtggcccggaaggtggtgcgcatggtgatccggctccacgaggagcagcggcagaaagaggaacgggcccggagggaggagcaggccaagctgcgtcgaattgcttccaccatggccaaggatgtcaggcagttctggagcaatgtggagaaggtggtgcaattcaagcaacagtcccggcttgaggaaaagcgcaaaaaagccctggacctgcatttggacttcattgtggggcaaactgaaaagtactcggaccttctgtctcagagcctaaaccagccattaacctccagcaaagcaggctcttccccttgcctcggctcttcctcagctgcctccagtcctccaccccctgcttctcgcctggatgatgaagatggggactttcaaccccaagaggatgaggaagaggatgatgaggaaacgattgaagttgaagaacaacaggaaggcaatgatgcagaggcccagaggcgtgagattgagctgcttcgccgtgagggagaattgccactggaagagctgctccgttcccttccccctcagctgttggaagggccttccagcccctctcaaaccccctcatctcatgatagtgacacccgagatgggcctgaagaaggtgctgaagaagagccccctcaggtgttggagataaagcccccaccctctgctgtcacacagcgcaacaaacagccttggcatccagatgaagatgatgaagagtttactgccaacgaagaggaagcggaggatgaagaggatactatagcagctgaggaacagttggaaggggaggtggatcatgccatggagctgagcgagttggctcgagaaggtgagctttccatggaggagctattgcagcagtatgcaggagcctatgccccaggctctgggagcagtgaagatgaggatgaagatgaggttgatgctaatagctctgactgtgaaccagaggggcccgtggaagcggaagagcctcctcaggaggatagtagcagtcagtcagactctgtggaggaccggagtgaggatgaggaagatgaacattcagaggaggaagaaacaagtggaagttcagcatcagaggaatctgagtctgaagagtctgaggatgcccaatcacagagccaagcagatgaagaggaggaagatgatgattttggggtggagtacttgcttgccagggatgaagagcagagtgaggcagatgcaggcagtgggcctcctactccagggcccactactctaggtccaaagaaagaaattactgacattgctgcagcagctgaaagtctccagcccaagggttacacgctggccacgacccaggtaaagacgcccattcccctgcttctgcggggccagctccgggagtaccagcacattgggctagactggctggttaccatgtatgagaagaagcttaatggcattcttgctgatgagatggggcttgggaagaccatccagaccatctctctgcttgcccacttggcttgtgagaaaggtaactggggtccccatttaatcattgttcccaccagcgtgatgttgaactgggagatggagttgaaacgttggtgccccagctttaaaatcctcacttactatggagcccagaaagagaggaagctcaagcggcagggctggaccaagcccaatgcctttcatgtgtgtatcacatcttacaagctggtgctgcaggaccaccaggccttccgtcgcaagaactggcgctatctcattctggatgaggcgcagaacatcaagaacttcaagtcacagcgctggcagtcactcctcaacttcaacagccagagacgcctgctcctgacaggaactcccttgcagaacagcctcatggagctgtggtccttgatgcactttttgatgccccatgtcttccagtctcatcgcgagttcaaggagtggttctctaatccccctaactggcatgattgagggcagccaagagtataatgaaggtctagtcaaacgcctccaacaaggttttgaggccttttttactgcgccgagttaaggtggacgttgagaagcagatgcccaaaaagtacgagcatgttatccgctgcaggctctccaagcgtcaacgctgtctctatgatgacttcatggcacagaccacaactaaggagacactagccacaggccatttcatgagcgtcatcaacattttgatgcagctgagaaaagtttgcaatcatccaaatctgttcgaccctcgaccggttacctcccctttcatcaccccaggcatctgcttcagcaccgcctctctggtgctaagggccacggatgtccatcccctccagcggatagacatgggtcgatttgaccttattggcctggaaggtcgtgtctctcgatatgagagcagacacatttctgccccggcaccgcctctctcgccgggtactgttagaagtggctactgctcctgaccccccaccccggcccaagccagtcaagatgaaggtcaacaggatgctgcagccagtacctaagcaagaaggccggacagtggtggtggtgaacaacccacgggcgcccctgggccctgtcccagttcgacctcctccaggtcctgagctctcagcccagcccacccctggcccagtcccccaagtgctgccagcatcactgatggtttcagcctcacctgccgggcccccgcttattcctgcatctcggcctcctggccctgtcctcttgcctccactgcagcccaacagtggttctctcccccaggtgttgccatcccccctgggggtcctgagtgggacctcacggcctcccacgccaaccttgtccctaaagccaacaccacctgccccagttcgcctgagcccagccccacctccaggctcctctagcctgttgaagcccctgacagtgccaccaggctacaccttccctcctgctgctgccaccaccacttctaccaccacggcaactgctaccaccacagcagtgccagctccgactcctgcaccacagcgcctcattctatctcccgatatgcaggctcgcctgccctcaggcgaagtggtcagcatcgggcagttagcctcactggcacaacgtccagtggctaatgcagggggaagcaaacctctcaccttccaaatccagggcaacaagctgactttgactggtgcccaggtgcgccagcttgctgtggggcagccccgcccgctgcaaagtagtgccaccaaccatggtgaataatacaggcgtggtgaagattgtagtgagacacgcccctcgggatggactgactcctgttcctccattggccccagcaccccggcctccgagctcttgggcttccagctgtgttgaatccacgccccacgttaacccctggccggctacccacacctactctgggtactgctcgagcccccatgcccacacccactctggtgaggcctcttctcaagctggtccacagtccttcacctgaagtcagtgcttcagcccccggagctgcccccttgaccatcttttctcctctccacgtgccatcctcactccctgggccagcctcttctccaatgccaattcccaactcctctccccttgctagtcctgtgtcctctacagtctcagttccattgtcatcttcactccccatctctgtccccaccacacttcctgccccagcctcggctccactcaccatccccatctcagcccccttgactgtttctgcttcgggcccagctctgttgaccagtgtgactccaccattggcacctgttgtcccagcggctcctggacctccctccttggcaccatctggtgcttccccgtcagcatcagccttgactttaggtttggccacagctccatccctgtcttcatctcagacacctggtcaccctctgttgttggctcccacctcttcacatgttccagggtattgaactcaaccgaggccccagcatgctcacctgtcctggtgccagcttcggctctggccagtccttttccggcagcaccaaatccagctccagctcaggcttcccttctggctccagcatcttctgcatctcaggctctagccacccctctggctcctatggcggctccacagacagcaattctggctccttctccagctcctcctctggctcctcttgcggtcctggcaccatcgccaggggctgctcctgtcctggcttcatcacagactccggatccagctatggctccatcgtctactccaggaacctctttagcctcagcttcaccggtaccagctccaacccctgtggtggctccatcatcaactcaaactatgctaccagccccggttccgtcacctctcccgagcccggcttctacgcagacactggccctagccccagctttagcacccactcttggaggctcatctccatctcagacactctctttgggaacggggaacctccagggaccctttccaactcagacattgtcattaactccagcatcatccctggtaccaactccagcccagacactgtctttggcaccaggaccaccactgggtccaactcagacgctgtctctggctccagcaccccctctggctccagcttctccagtgggcccagccccagctcacacgctgactttggctccagcatcgtcatctgcttcactcctggccccagcttcagtgcagacactgaccttgagccctgccccagttcctaccctgggcccggccgcagctcagaccttggcgctggccccagcctccacacagtccccagcttcccaggcatcttcccttgtggtttcggcatctggtgccgctcccttgcctgtcaccatggtatcccggctgcctgtttccaaggatgagcctgacacactgacattgcgctctggtccccccagccctccctccactgctacctcgtttgggggcccccggcctcgacgccagccccccccaccacctcggtcccctttttatctggactccctggaggaaaagcggaagcggcagcggtctgaacgcctggaacggattttccaacttagtgaggctcatggggccctggcacctgtgtatgggactgaagtcctggatttctgtaccctgccccaacctgttgccagccccatcggccctcgttctcctggccccagccaccccaccttttggacttataccgaggctgcccaccgggctgtactgtttccccagcagcgactagaccagctgtcagaaatcattgagaggttcatctttgtcatgcctcctgtggaggcacctcccccttccctgcatgcctgccacccacctccttggctggccccacgtcaggcagccttccaggagcaattggcctctgagctctggccccgggctcgtcctttgcaccgtattgtgtgtaacatgcgcacccagttccctgacttaagactcatccagtatgattgcggaaagttgcagacgttggcagtgctgttgcggcagctcaaggcagagggccaccgagtgctcatcttcacccagatgacccgaatgctggatgtattggagcagtttctcacctaccatggccatctctacctgcgcctggatggatctactagagttgaacagagacaggctcttgatgtgtcggttcaatgcagacaaacgcatattctgcttcatcctttcaactcggagtgggggtgtgggcgtgaacctgacaggagcagacactgttgttttttatgacagcgactggaatcccaccatggatgctcaggcccaggaccgctgtcaccgaattggccagacccgggatgtccacatatataggcttatcagtgaacggacagtggaggagaacatcctaaaaaaggcaaatcagaagagaatgttgggggacatggccattgagggaggcaacttcaccacagcctatttcaaacagcagaccatccgagagctgtttgatatgcccctggaggaaccttctagctcattctgtgccctctgcccctgaagaggaggaagagactgtggccagcaagcagactcatattctggagcaggcattgtgtcgggcagaagatgaagaggatatccgtgcagccacccaggccaaggctgaacaggtggctgagcttgcagaatttaatgagaacgatgggtttcctgctggtgagggagaggaagctggcctgcctggggctgaggatgaggagatgtcccgggctgagcaggaaattgctgccctcgtagaacagctgacccccattgagcgctatgccatgaaattcctggaggcctcactggaggaggtgagccgagaggagctcaaacaggcagaagagcaagtgggagcttggccgcaaagacctggaccaagccaaggaggaggtggtccgcctaccccaagaggaggaggaggggccgggggctggggatgagagttcctgtgggactggtggaggcacccaccggcgcagtaaaaaggccaaagcccctgagaggccggggactcgtgtcagtgagcgtcttcgtggagcccgggctgagactcaaggggcaaaccacactcctgtcatatccgcccatcaaactcgcagcaccaccacaccaccccgctgcagtcctgccagggagcgagttcccaggccagcacctaggcctcgacccactccagcttcagctccggctgcaattcctgcccttgttcctgtcccagtttctgccccagtacccatttcagccccaaatccaataaccattctccctgtccatatcttgccttctcctccccctccttcacagattcctccttgttcttctcctgcctgcacccctcctcctgcctgtacccctccaccagctcatacaccgcctccagcccaaacctgtcttgtaactccttcctctcctctcttgcttggtccaccttctgtgcccatctctgcctcagtcactaatctccccttggggcttggagggctgagggaggagctgtgtgcccagggattgggcatcttccagagtccctggagctggcttctgtggccagttcagaaacctcctcactttctcttgtgccccctaaagatctgttgccagttgctgtggagatcctgcctgtgtcagagaagaacctttctctcaccccttctgcacccagcctgaccttggaggctggcagcatccccaatggtcaagagcaggaggcaccagattctgctgaggggaccacccttacagtgctgcctgaaggtgaggagttgcccctgtgtgtgagtgagagcaatggcctggagctcccacccttagcagcatctgatgagccacttcaggacccactggaggctgacaggacctcggaagagctgacagaggccaagaccccaacctccagcccagagaagccacaggaactcgttacagctgaggttgcagctccatccacctcatcttcagccacttcctcgcctgagggtccttcacctgcccgacctcctcggcgtcgcaccagtgctgatgtggaaattaggggtcaagggactggtcggccaggacaaccaccaggccccaaagtgcttcgaaagcttccccagacggctggtaactgtggtagaggaaaaggaactggtgcggcggcggcggcagcagcggggagctgccagcaccctagtgccctggggtctctgagactagtgccagcccgggaagcccgtctgtccgcagcatgtcagggccagaatcctcccctcccattggtgggccctgtgaagctgctccttcatcctcactgcccactccaccccagcagcccttcattgctcgccgtcacattgagctgggggtgactggtggtggcagccccgagaatggagacggagcactgctcgccatcaccccacctgctgtgaaacgtcggagggggaggccccccaagaagaacaggtctccagcagatgctgggagaggtgtggatgaggcaccctcatccaccttgaagggaaaaaccaatggggctgacccagtccctgggcctgagaccctaattgttgcagatcctgtcctgggaaccacagcttattcctggggccccagccttcttgggaccccagccagttcacagacccaattcccctcctgttcacctgtggagaaaagaaggcgaggacgacccccttaaagcacgagatttgcccatccctggggaccatttcctctgcaggggatggcaactccgaaagtcggacacagccacccccacacccatcacccctaaccccactcccaccactgctagtttgtcccactggctactgttgccaacactgtcaccactgtcaccatttcaacgtccccacccaaacgggaagagggggccgacctcccaaggaatcctccatcacctcgggcccagccaggttccccgtcttgggaccgtgacagcacttctgttctcgagagctgtggattggggaggcgacggcaaccccagggccaaggggagagtgagggtagttcctctgatgaggatggaagccgccccctcacccgcctggcccgccttcggcttgaagcagaaggaatgcgaggacggaagagtggagggtccatggtggtggctgtaattcaggatgacctggacttagcagatagcgggccaggcgggttggaattgacaccacctgtggtctcactaaccccaaaactgcgctcgacccggctgcgtccagggtctctagtccccccactagagactgagaagttgcctcgcaaacgagcaggggccccagttggtgggagtcctgggctggcaaagcggggccgcctacagccccccaagtcccctgggggcctgagggttcagtagaggagtctgaggctgaagcctcaggttgaggaggaggaaggggatgggaccccacgccgacgtcctggccccccgccggcttgttgggaccaccaaccaaggggaccagcgcatcctgcgcagcagcgcccctccctccctggctggccctgctgttagtcacagaggccgcaaggccaagacgtgagtggggctgcccctccacctaggctttccaccgtggccactccctccatgaccaggcctgactctgttaaccactacttgaagtcttgagggggaaagcctccagggagacataggggccttctcccttcttcccaccaaagtagggggtaggcaactggttgtcatggaaatggggatcatcacagtccccttccccttcaccccacgtggctgggcagtgttaagggtggcaagatagtctctgtccccacccccttgtacttgattccccagctgtctttcacacagccccccacccttaggggaagggggaggggcttctctacaatgaggtttttttcttttttttttttttttaagaagaaaaaataataaacttagtttctgtatgagcatccgcgtaaggaggcttctgattttctggtggtggtggagggttgggtgggaacttgggcatcgtttttctcctccctcttgttcttgcaaagatcctagcacctgatctctagcccaggactatatgttccaggcagaaatctacccaagaagagggaagattggtgaatttgatgtggtagggtgcctttccccagtcagtttgaagtcacagatatccttttcctctcatttcttttccctcggttcctaaacgttcctcggagctctttgatgcctcagacctttcccttttatccctcttgctcaggagcttcctttcacaactttttccagagggcaggcgtcctatctccagttgctccatcccttgggccctcccctggctcttcatctagccaaactggtttgagtcagccacaccccttcccagctccctgggctcttcacgtggtggctggccactcaaccccacccctgggcttggcttggagccctgagtcagctccatcaccacccaagccaaaccaaagctgaggtatggagccgaaactcacagtccttcaaggcctatagccaggtgatggaggacgaggagaaggcagtggagatcttgggcaacacggaagctgctcatcctccatcccccatccgctgctgctggctccgcctccgctgcttggcagctactagcattatctgtggctgctcttgcctgggagtcatggctctggtgtttgccatcaaggcggaagagcggcataaagcaggccggtccgaggaggcagtgcgcctgtggggcccgggccggtaaactcatcctggccagctttgctgttctggcttgctgtccctcattctgggtccccttgctgctgtggttgctctcctacgccatcgctcaggctgagtgacccctggatggccctctgctaagagccaagccaaaaccccctggatcctgcaatgcggcattgcctaaggtcctgtgacagcagtggttggaaggatccctggttggaaggatggggacctctctcaaggggctttggaagagctcttctagccctttataaaaggagggcagcagctgagactgatgagaggagggcagcctgctctgttctttcagggccccccccacccccatctcccctaccctagcccaccctagggcctctacccagcgggaggggttgaagaccaggcctggttttattagaattcattttgtaataaaagccttttttagtggtg

SEQ ID NO: 26375 - DNA, 951 bp, Homo sapiens
  SIMILAR (142)..(879): 911254mologous to Homo sapiens dJ569D19.1 (similar to mouse Ras, Dexamethasone-induced 1 (Ras-related protein, RASD1, DEXRAS1)),accession number AL022334,Smith-Waterman Score=1137.
gactgccaagataaagtgccacgaagaaaagaacccagcatgtgttcaggtttgctgcgggtcaagagctgggtcagcctccagacttattggaaacccagggccacacagggggtttatgtcttaccattaacagaggaacgcatggtggtgctgggtgcctctcgggtgggcaagagctccatcgtgtctcgcttcctcaatggccgctttgaggaccagtacacacccaccatcgaggacttccaccgtaaggtatacaacatccgcggcgacatgtaccagctcgacatcctggatacctctggcaaccaccccttccccgccatgcgcaggctgtccatcctcacaggtgaggcccactggtgcctgggctggggcggcagggccagggcatgggtgcggagtgtgctgggcacttagcagatcctggaggtcaagtcctgcctgaagaacaagaccaaggaggcggcggagctgcccatggtcatctgtggcaacaagaacgaccacggcgagctgtgccgccaggtgcccaccaccgaggccgagctgctggtgtcgggcgacgagaactgcgcctacttcgaggtgtcggccaagaagaacaccaacgtggacgagatgttctacgtgctcttcagcatggccaagctgccacacgagatgagccccgccctgcatcgcaagatctccgtgcagtacggtgacgccttccaccccaggcccttctgcatgcgccgcgtcaaggagatggacgcctatggcatggtctcgcccttcgcccgccgccccagcgtcaacagtgacctcaagtacatcaaggccaaggtccttcgggaaggccaggcccgtgagagggacaagtgcaccatccagtgagcgagggatgctggggcggggcttggccagtgccttcagggaggtggccccagatgcccactgtgcgca

SEQ ID NO: 26376 - DNA, 478 bp, Homo sapiens
  SIMILAR (8)..(478): 991254mologous to Homo sapiens brain acyl-CoA hydrolase,accession number D88894,Smith-Waterman Score=792.
ggaattcaccatcctgaagatgatcgaggaggcaggcgccatcatcagcacccggcattgctacagccagaacggggagcgctgtgtggccgccctggctcgtgtcgagcgcaccgacttcctgtctcccatgtgcatcggtgaggtggcgcatgtcagcgcggagatcacctacacctccaagcactctgtggaggtgcaggtcaacgtgatgtccgaaaacatcctcacaggtgccaaaaagctgaccaataaggccaccctgtggtatgtgcccctgtcgctgaagaatgtggacaaggtcctcgaggtgcctcctgttgtgtattcccggcaggagcaggaggaggagggccggaagcggtatgaagcccagaagctggagcgcatggagaccaagtggaggaacggggacatcgtccagccagtcctcaacccagagccgaacactgtcagctacagccagtccagcttgatc

SEQ ID NO: 26377 - DNA, 1168 bp, Homo sapiens
  SIMILAR (609)..(1025): 501254mologous to Homo sapiens dJ202O8.3.3 (HBACH (Brain Acyl -CoA Hydrolase (Acyl Coenzyme A Thioester Hydrolase, EC 3.1.2.2)) (PUTATIVE isoform 3)),accession number AL031848,Smith-Waterman Score=262.
actaccaccaagatgcagagaccggtagtgtccccgaatgcctggctgtgctgttatttattggatacaaggcaaaaggggaggggtaaagagtgtgaatcatctccaatgataggtaaggtcacgtgggtcacatgtgcactggacagcacatggccagtgcttatgtagggagggtaaacgtcctcagaaaggaagtcgacagggcctgttttggggagaaggccaaacagtgagttgggagctgagaggaactatgggctatttggggtcaggggagggaagtgtgtttgggaatcgaggaggcaggcgccatcatcagcacccggcattgcaacagccagaacggggtaagggtctgggccccatacctctgggccctggaggccgcaccagtgtgagttcaggacaggagttccccggggagccaggcctgcagccttccctccccttgtgcactgaccatgggcacgggcataatgccactctatcaagaggccaagtggaagccacgtcagagaccagggaccagcggaggcactgtgagctctgagccacactgttgagatgcaggaagtggctgctggctctgtcagcctgggctgcgtgaggtggcgcatgtcagcgcggagatcacctacacctccaagcactctgtggaggtgcaggtcaacgtgatgtccgaaaacatcctcacaggtacttctgggagcgacagtgttgactggagcagtaagggccgtggctacacagctgcttccctcctgagggcagaggacgctccagggcctggccccaaggtcctcgaggtgcctcctgttgtggtaaggtgccctttctacttctctcttgggggcagatggcagagatcaggtcacctcacctgattggagaccaagtggaggaacggggacatcgtccagccagtcctcaacccaggtaagagccgcggacaccagcagcaggtgccactcctcaccggggacgcataggaggcaggagccctgcacggctttgtgcacggaggtaagaaggaagcgccctggccactccattcctgtcccttggctcattgttgcttctctggcaggtacaataggccaggtgcagtggcacatgcctgtaatcccagcactttgggagatggaggcgggaggattgcctgagc

SEQ ID NO: 26378 - DNA, 445 bp, Homo sapiens
  SIMILAR (68)..(244): 861254mologous to Homo sapiens dJ449O17.1 (novel protein similar to TPTE (transmembrane phosphatase with tensin homology)),accession number Z98749,Smith-Waterman Score=233.
  misc_feature (1)...(445): n = a,t,c or g
gcggtcaccccaatacggataacgngacacgagcggagcagccctggggtcacctatcagtaaaagactatttgtttttttcctcgtcttactggatgtcactctcgggcttgccgacctaattttcactgacagcaaactttatattcctttggagtatcgttctatttctctagccattgccttattttttctcatggatgttcttcttcgagtatttgtaaaagggtgttggagcgggccggagagaagtagagtgggctgcgaggagaaggaaacaggcctttcggaggctcctcatccctcggagggcatcccttactccagcaagagtgagccatggagctacgtgtggggaacaagtaccgcctgggacggaagatcgggagcgggtccttcggagatatctacctgggtgccaacatcgcctctggtgaggaagtcg

SEQ ID NO: 26379 - DNA, 364 bp, Homo sapiens
  SIMILAR (364)..(275): 931254mologous to Homo sapiens dJ449O17.1 (novel protein similar to TPTE (transmembrane phosphatase with tensin homology)),accession number Z98749,Smith-Waterman Score=137.
gtaaaccttaaaacacttaaaagttccaatattaatatcaaagttgaattaaaagcaaaaatattaactatgaacatgactcattttttatcaatagaaggtggaagctacatgacactaacaagaccatgtttaatgaaatgggatttgtattgaaggcaggtgctatctctcccactggacacatttttctcttgtgcagactctgggggtagggaggtggccatgatgaaaagcacgaaaaacactgtagtgactctggtcttcctgctccctctagatcgcttttactgataggtgacaccagggctgctcctttaaattcacctgtgtgtgggctttctttcgcaggtgcctcctcggt

SEQ ID NO: 26380 - DNA, 727 bp, Homo sapiens
  SIMILAR (677)..(186): 481254mologous to Homo sapiens tensin, putative protein- tyrosine phosphatase, EC 3.1.3.48,accession number AL163201,Smith- Waterman Score=316.
ctcttgttgctcagactggagtgcaatggcgtgatctcagctcactgcaatctctgcctcctgggtacaagcaatgctcctgcctcggcgtcccgagtagctggggggctcgaacccagaaggcacaggttgaagtgagcgaagattgtgccattacgctccagcctgggtgacagagcaagaatccacctgcacaaaaagggcaggcaggaaggcagtaaagaaatgagcagggcccaaaccaggagagtgtggcatgccacaatggagactgaacagaaacaaaactacgggcgactgtagtgttgttccccttctacaaatactcgaagaagaacatccatgagaaaaaataaggcaatagctagagaaatagaacgatactccaaaggaatataaagtttgctgtcagtgaaaattaggtcggcaaggatgagagtgacatccagtaagaccaggaaaactccaaatagtctttcactgataggtgacacccgggctgctcctttaaattcacttgtgtgtgggctagaggatgataaaagaatacagtcagcagcactttctttcgcaggtgcctcctcggttgctcctttaaattcacttgtctgtggactgtcattggggccgagctcaatgatgactcccgccaggtcagtcggatcaggaccattgtggtcatagttgtcaagagcatacagtagaatctggtagtgaatccataact

SEQ ID NO: 26381 - DNA, 1179 bp, Homo sapiens
  SIMILAR (220)..(408): 871254mologous to Homo sapiens dJ449O17.1 (novel protein similar to TPTE (transmembrane phosphatase with tensin homology)),accession number Z98749,Smith-Waterman Score=256.
cgaattcccggggcgacgatttcgtagcagctgctccctgaacactttctgatccatcagtcccccagcgccggacgcgccgcgccctggcggctctagggaccccccccgcgcctgcacttagccccgcgcccgagtccacagacaaacgaatttaaaggagcaaccgaggaggcacctgcgaaagaaagcccacacacaggtgaatttaaaggagcagccctggtgtcacctatcagtaaaagactatttggagttttcctcgtcttactggatgtcactctcgtccttgccgacctaattttcactgacagcaaactttatattcctttggagtatcgttctatttctctagctattgccttattttttctcatgggtgttcttcttcgagtatttgtagaagggcccgtctataccattgggctgcccccttcagacctccgggcaggaaaagaagagactgtactggtcagagaaagacatcagcaggagagccagagattcctcctcctctccatcatcaccatcaccattattctcatcaccatcaccgtcaccgtcatcatcatcatcaccatcatggacttcaaagaagttcaaagaatttcctcctctggccagagtgaatcctgttctgtggaagcaggaggctgggtagagctgccctcttccttctccgcagcttttctcatcctgcaaagcaaggagctgagagcctgctggggaaacagtcctagaaacacctcgctagcacccagtgtggacccagaggaaggggctcctaggagaagtggcccagggcccaactcggaaggaagcagccttcagaatcagccgctggagctgcgggactcgcccacggccctcaggactccctggtgttggagcgggccggagagaagtagagtgggctgcgaggagaaggaaacaggcctttcggaggctcctcatccctcggaggtcatcccttactccagcgctccccagcggagtcctcacctgcaggcacaggtgtgcgcacttcgcatctcgaaggccggccagcaagcttcaggtgagcgccagcagcagctggggaaaggacttggaccaactgaaggtattgagggaccagagaacgggaagtgctggggagagaaggacggggatgagctcttgggaaaacccccagaatga

SEQ ID NO: 26382 - DNA, 453 bp, Homo sapiens
  SIMILAR (351)..(280): 871254mologous to Homo sapiens Human secreted protein clone yk84_1 protein sequence SEQ ID NO:200,accession number Y73489,Smith -Waterman Score=116.
  misc_feature (1)...(453): n = a,t,c or g
ttaagaggcctgctcccgctttgcctccaccatgagtaaaagcgccctgaggcctccccagaagcagatgctgccatgcttcctgaacagcctgtggaaccgtgaaccaattaaaccgcttcttanggggtctcctgagagctgttctgtcactcaatgaagctcctctctgccttgctctccctccagttgtccacatacctcattcttcctggacgcgagacaagaacccaggacctgccgagtggtgggactgaaagagctgtaacagaaacagggcttgccacattgcaggtgacaagaaagagagaagagctgcagcccttcaggaagcccagacctaggggctccccaacccagggctgtgacaccctctttggggctctgcagttcctggcatctccaagcttccaggcgccactgcactccccggtgcccacagtggaaacgaaa

SEQ ID NO: 26383 - DNA, 630 bp, Homo sapiens
  SIMILAR (8)..(535): 271254mologous to Caenorhabditis elegans contains similarity to Plasmodium falciparum glycophorin-binding protein homolog 2 (GB:X69769),accession number AF024496,Smith-Waterman Score=126.
agggatcccaagtgccacacacataaccattgaagacaaaaatgaaaccatgtgcacagctctgagtcaaggcatcagtccttgctccacactaacaagcagcaccgcatctcctagcaccgatagcccctgctcaaccttgaatagctgtgtcagcaagacggcagccaacaaaagtccctgtgagaccattagcagccctagttccaccctggatagcaaggacagtggaattatagccacaattacaagttcatccgaaaatgatgaccggagtggctccagtttggaatggaataaagatggaagcctaagattaggggttcagaagggagtgcttcatgaccgcagggcagataactgctccccagtggcagaagaggagaccaccgggtcagcagagagcacgctgcccaaagcagaatcctcagctggagatggtccagtcccttattctcagggctccagctcactaataatgccacggcccaactcagttgcagcaacaagctcaaccaaattggaagatctgagttatttagacgggcagagaaatgctcctctacggacgtcaattagattaccatggcacaatacggccggaggtagggcacaggaagttaaagcacg

SEQ ID NO: 26384 - DNA, 1394 bp, Homo sapiens
  SIMILAR (570)..(541): 601254mologous to Drosophila hydei testis-specific RNA,accession number X58114,Smith-Waterman Score=45.
atggcccctgttctcaaggacgcagccagcgttagttctaacagtggggcagtggcagataactgctccccagtggcagaagaggagaccaccgggtcagcagagagcacgctgcccaaagcagaatcctcagctggagatggtccagtcccttattctcagggctccagctcactaataatgccacggcccaactcagttgcagcacgatttgctccctacaagccacaagacattttgttgaaacccttgttgtttgaagtaccaagcataacaacagactctgtgtttgtgggaagggattggctctttcaccagatagaagaaaacttgaggaacacagaactggcagaaaacagaggcgcggtggtggttggcaatgtgggatttgggaagacggcaatcatttccaagttggtggccctgagctgccacggaagccgcatgaggcagattgcttccaacagcccgggttcatcacctaaaacctctgaccccactcaggatcttcatttcactccgttgctttcaccgagttcttccacaagtgcttccagcacagctaaaacacctcttgggtctatcagtgctgaaaaccagagaccaagagaggatgcagtgaaatatcttgcttctaagaaccagccccatgaggtcgctcctacaccacccctatggtatagtgttaaaagaagcaccctgataagaatgaatgtgatgactgagcagttccaaagtagtcagcttgtaagtgtgggctgtttagagcagaaaattcctgaagaagaatacattattttgatagatggcttaaatgaagctgagtttcataaacctgattatggagatacgctttcttcatttattaccaaaattatttctaaatttcctgcctggttgaagttgattgtgactgtaagagcaaattttcaggaaatcataagtgcgctgccatttgtcaagctttccttagatgacttcccagacaacaaagacatccacagtgacctgcacgcctacgtccagcacagggtgcacagcagccaggacatcctcagcaacatctccctgaatggcaaggccgatgccacactcattggaaaatgcaacatgaagttcatgacccagtccgcctttgagagggcacttccgattctcaacgtggccctcgcatccctccaccccatgacagacgagcagatctttcaggctattaatgctggccacatccagggggagcagggatgggaagactttcagcagaggatggacgccctctcctgcttcctcattaagaggcgagacaaaacccgcatgttctgccacccgtccttcagggagtggcttgtatggagagcagacggggaaaacacggccttcctgtgtgagcccag

SEQ ID NO: 26385 - DNA, 3431 bp, Homo sapiens
  SIMILAR (2373)..(205): 961254mologous to Homo sapiens KIAA1728 protein,accession number AB051515,Smith-Waterman Score=3634.
tcacacttttaaccaactccgatagggcatccccttccagaaattagggaagcgtagccctggggagccgccagcgtcctgtgcatgaagcatggggctctgggtgtgctggcgaccttctttcaaacagaaggacctctgaggaggtgaccacgacagggcaggacgactgccagagaccagcatgaggacacagcacacccaggctgtttctccccacaatgtgtcggtgccattgacttctacttcatgttccttctccatccccagcaagcactggaccaccgagctgtggcccatgctggccgccgcggtcagcgcctgctgcagggcgtggctcttcctcagggtgcctggctggggaggacccggcgaccactcacaagtcagcaggtactggagaatgtcaccgtggccccgtagggcactgtggacaagcgcacactggcccttcttatccaagtggtccaccagcttcatgtggcccagcagcttctgcggtaaccagaggccagtcatgccgttctctgacgttccgtccaggcaggcaccaaattccaggagcagagtgacaacttcctcgtggccaaggtgagactggacgcacaggattggggcattatttaacacttctgtcctgtagttcacgttggcccctcccaaaatcaggagacggctcaccttcacgttgggagtatagagattcctgagagaggccagggcggcggacagcccctcggtgctgtagccgatccacagggcttggagatggcttgaagaaattcccgtcttcttactgaggcccttgaaaatgtgcgccttcaggatgtggtggccaagctccatggtctgctggcggttcaacttgccctcctgacgcgagaacatgaatgccaagagcgcgtgcccgttcctgggctcacacaggaaggccgtgttttccccgtctgctctccatacaagccactccctgaaggacgggtggcagaacatgcgggttttgtctcgcctcttaatgaggaagcaggagagggcgtccatcctctgctgaaagtcttcccatccctgctccccctggatgtggccagcattaatagcctgaaagatctgctcgtctgtcatggggtggagggatgcgagggccacgttgagaatcggaagtgccctctcaaaggcggactgggtcatgaacttcatgttgcactgaagcaaatagagctcagagagagacacgggcaccaccttgtagctggcactcttaatgaccaagtggcccctctggaaaaggtccagggtgagcttgaggtacaggtaggagccgaggctccgcagcaccaggtggctgctcacttttccaatgagtgtggcatcggccttgccattcagggagatgttgctgaggatgtcctggctgctgtgcaccctgtgctggacgtaggcgtgcaggtcactgtggatgtctttgttgtctgggaagtcatctaaggaaagcttgacaaatggcagcgcacttatgatttcctgaaaatttgctcttacagtcacaatcaacttcaaccaggcaggaaatttagaaataattttggtaataaatgaagaaagcgtatctccataatcaggtttatgaaactcagcttcatttaagccatctatcaaaataatgtattcttcttcaggaattttctgctcatttctcaggtttgtgagtggctccagcactcccctcttgaaagctgccaccgggtcctgcacacaggatcggaggctcagcatgctctgtagttggggctcctttatcagaaggtctctgtaggcggccagctgatgggaccggcagagcaaagctgcgatgctgtgcacaaactcgggcaccaggcaagtgtacgtgttgtcagcctggcagtagtggtaggccaccaccttagaagcaagatatttcactgcatcctctcttggtctctggttttcagcactgatagacccaagaggtgttttagctgtgctggaagcacttgtggaagaactcggtgaaagcaacggagtgaaatgaagatcctgagtggggtcagaggttttaggtgatgaacccgggctgttggaagcaatctgcctcatgcggcttccgtggcagctcagggccaccaacttggaaatgattgccgtcttcccaaatcccacattgccaaccaccaccgcgcctctgttttctgccagttctgtgttcctcaagttttcttctatctggtgaaagagccaatcccttcccacaaacacagagtctgttgttatgcttggtacttcaaacaacaagggtttcaacaaaatgtcttgtggcttgtagggagcaaatcgtgctgcaactgagttgggccgtggcattattagtgagctggagccctgagaataagggactggaccatctccagctgaggattctgctttgggcagcgtgctctctgctgacccggtggtctcctcttctgccactggggagcagttatctgccctgcggtcatgaagcactcccttctgaacccctaatcttaggtttccatctttattccattccaaactggagccactccggtcatcattttcggatgaacttgtaattgtgggctggctgcgtccttgagaacaggggccatgtccaccgatgcctctttccctatctggattccagtcacctaggccctcaactccacgccagagttcaggatctgattttgggtgcccatcgttatgattcccagcatttgccagtgttccatcagcagtattaaaccatacctccacctctttggaatcaatcacagccttccttgtgtttttaaatagaccatttatatgaacataggcatagcaagtatgactctttctgtgttgcgcaaggcatgctctgctatgacatgcagcaaggccaggggcccgagccgcacattcccagccacattcatcaggctcttcaactaaggaaacacctataattccactgtccttgctttccagggtggaactagggctgctaatggtctcacagggacttttgctggctgccgtcttgctgacacagctattcaagggtgagcaggggctatcggtgctaggagatgcggagctgcttgttattgcggagcaaggactgatgccttgactcaaagctgtgcactgcaagatgaatggaaggaggagataccacggcttacacaggatgcttcgacacatgcttttgtttttgtgctaaaacaataaaactaataacaggaaaacggaagttctaatacaaaaatctaaagagatatgtgtgtatagatatggactcatggcgctgctgataaataaacgtaaattgggccttccccaatgctagaaagcaatttccttgtcccagtggatgtcggtaaggacacatccctgccaggttcctgtcg

SEQ ID NO: 26386 - DNA, 1743 bp, Homo sapiens
  SIMILAR (1743)..(1042): 921254mologous to Homo sapiens putative p150,accession number U93574,Smith-Waterman Score=1085.
ttagtaataaatgctggtatatccagtgcattggcggcaccatgtgaccagaaggcggttacccccctggacccagctttcactatcttgtgtgtgtctattatttctcgacctgccgatccacctgggaacaaagagagagccccagtgcattgcaggctgctggccagatcccgcaatagtttcttttgctgtgcagaagatcttcagtttaattagaacccatttgtcaattttggcttttgttgccattgcttttggtgttttagtcatgaagtccttgcccatgcctatgtcctgaatggtattgcataggttttcttctatggtttttatggttttaggtcttagctttaagtctttattccatcttgagttaatttttgtgtaaggtgtaaagaaggggtccagtttcagttttctgcacatggctagccagttttcccaacagcatttattaaataggaagtcctttccccattgcttgtttttgtaagggttgtcaaagatcagatggttgtagatgtgtgatgttatttctgaggcctttgttctgttccattggtctatgtatctggtttggtaccagtaccatgctgttttgattactgtagcctcgtagtatagttggaaatcaggtagcttgatgcctccagctctgttctttttgcttaggattgtcttggctatatgggctttttttggttccatatgaaatttgaagtagtttttcctaattctttggtctttgatgttagggacgtttggatggggtttttgcatggacatcctttttgttgatgttgatgctattcctttctgtttgttagtttttcttctaacagttaagcccctctgctgcaggtctgctggagtttgcttggaggtccactccagaccgtcttttcttgcaagctcttcctcagcgtcctcagattgggacaaggcagaagatctaaaaagctcatagaaatgctgaggtgcttggcagttttgaaagtgacagatcaaaaacttgtactctttcctggatttaccatttatacaaagaaaattcttacccagcttgggcagtatggccattttcacaatattgattcttcctatccatgagcatggaatgttcttccatttgtttgtatcctcttttatttcattgagcagtggtttgtaattctccttgaagaggtccttcacatcccttgtaagttcgattcctaggtattttattctctttgaagcaattgtgaatgggagttcactcatgacttggctctctgtttgtctgttattggcgtataagaatgcttgtgatttttgcacattgattttgtatcctgagactttgctgaagttgcttatcagcttaaggagactttgggctgagacgatggggtttgctagatatacaatcatgccatctgcaaacaaggacaatttgacttcctcttttcctaactgaataccctttatttccttctcctgcctgattgccctggccagaagttccaacactatgttgaataggagtgatgagagagggcatccctgtcttgtgccagttttcaaagggaatgcttccagtttttgcccattcagtatgatattggctgtgggtttgccatagatagctcttattattttgagatacgtcccatcaatccctaatttattgagagtttttagcatgaagggctgttgaattttgtcaaaggccttctctgcatctattgagataatcat

SEQ ID NO: 26387 - DNA, 1758 bp, Homo sapiens
  SIMILAR (742)..(1755): 991254mologous to Homo sapiens p40,accession number U93564,Smith-Waterman Score=1726.
atgcacaagtatgttcgttacagcactgttcacaatagcgaagacatggaatcaactcaaatgtccatcaatgatagactggataaagaaaacatcatacatatacatcgtggaatactatgcagtcataaaaagaaacaagatcatgtcctttgcaagaacataggtgaagctggaaaccattatcctcaacaaaggaacactggaacagaaaaacaaatacagtgtgttctcacttataagtggaagctgaacaataagaacacatggacacagtcagaagaacaatatgcagtggggcctgttggagggcggatcggcaggttgacaaataatagacacacacaagatagtgaaagctgggtccggggggtcaccgccttctggtcccgtggtgccaacaatgcactggatataccagcatttattattaagtttagtgagggcaggggtagcctccacactcacgatggcccccctggtcccacttcttctctcaaactgtctttttctcattcctttgactccactggactttgtcgcccccacgacctggtgttgggtctgatcatcccaacaatggttaatattacaagtcaacttgactggcttgaggatgcccagatggctggtgaagcactgttcctggaaggaaaactaacaaccagaaaggacatctacaccgaaaacccatctctacatcaccatcatcaaagaccaaaagtagataaaaccacaaagatggggaaaaaacagaacagaaaaactggaaactctaaaacgcagagcgcctctcctcctccaaaggaacgcagttcctcaccagcaacagaacaaagctggatggagaatgattttgacgagctgagagaagaaggcttcagacgatcaaattactctgagctacgggaggacattcaaaccaaaggcaaagaagttgaaaactttgaaaaaaatttagaagaatgtataactagaataaccaatacagagaagtgcttaaaggagctgatggagctgaaaaccaaggctcgagaactacgtgaagaatgcagaagcctcaggagccgatgcgatcaactggaagaaagggtatcagcaatggaagatgaaatgaatgaaatgaagcgagaagggaagtttagagacaaaagaataaaaagaaatgagcaaagcctccaagaaatatgggactatgtgaaaagaccaaatctacgtctgattggtgtacctgaaagtgatgtggagaatggaaccaagttggaaaacactctgcaggatattatccaggagaacttccccaatctagcaaggcaggccaatgttcagattcaggaaatacagagaacgccacaaagatactcctcgagaagagcaactccaagacacataattgtcagattcaccaaagttgaaatgaaggaaaaaatgttaagggcagccagagagaaaggtcgggttaccctcaaaggaaagcccatcagactaacagcggatctctcggcagaaaccctacaagccagaagagagtgggggccaatattcaacattcttaaagaaaagaattttcaacccagaatttcatatccagccaaactaagcttcataagtgaaggagaaataaaatactttatagacaagcaaatgctgagagattttgtcaccaccaggcctgccctaaaagagctcctgaaggaagcgctaaacatggaaaggaacaaccggtaccagccgctgcaaaatcatgccaaaatgtaa

SEQ ID NO: 26388 - DNA, 886 bp, Homo sapiens
  SIMILAR (743)..(856): 421254mologous to Odontella sinensis 30S ribosomal protein S14,accession number Z67753,Smith-Waterman Score=79.
  misc_feature (1)...(886): n = a,t,c or g
tgtaaatacaaaattgcatacaggattgtgtaaagacaaatgccaggttgggctgccagaatgagccaacagcatgtgatgtgcttccgccnnnnnnnnnnnnnnnnnnnnnnnnnnngtcagggaggtttcacataaccaagattcctatcccagaaaagcagatgtccatagctctgggaatggaatgcgacccttgtggacagcttacaaatgaccttaaatccctcactaacctaccaacactctcactaaacttaataataaatgctgatatatccagtgcatcggcggcaccacaggaccagaaggcagtgacccccatggacccagctttcactatcttgtgtgtgtctattatttctcgacctgccgatccacctgtggctagtagctcccttattggccaggtcagtctaaccaattgtaacaatccatttcctactttcccagactcctcttcagcaagaagtggacatgtgacccagttctgaccaatgagctgaaaagggaggtcagctgggccttctggaaaagcttttgctttccgtatgatgctggaccaggaactcagccgagcgtcccagttttcctggtcattagctactggtagcactgaataaatggtgtcatcctgtctaaacctccacttcctcctatcagcaccacccccatagcaggtgctctccttctccctctcaccaaagagcaaaggggtgacttttaaaagccatctagaaacatgaggaccagctgttggaagaccccagagagccgtgccaactttcttaaattcaggccccggagtcattgcctgaccaggatgggttcctcttgtctgctgccaagtaagacgtgcctttcctcctcctccaccttccaccat

SEQ ID NO: 26389 - DNA, 415 bp, Homo sapiens
  SIMILAR (400)..(230): 981254mologous to Homo sapiens FLJ00038 protein,accession number AK024448,Smith-Waterman Score=312.
ttcaatggttgtgcacggtttatatgaatattagtgattacaaaatattatcaatagaccttgtcacaactgttattgaagaactaatcatctattgcttatttaggtctttctctcctgccagaatgtgcgctccaggtggagaggtatgttgccttatccgtggctggatatatagagattcccacactgccttgcacacgagcactgctgggtaaatatttgttggctgctgaagatgtctccagagaccttctgcaggtactgcagggcatccgccatctgctggacggcctcctctcgccgcaggtctggctggatgaagggcacggcataggtctgacctgccagggagtgctgcatcctcacaggagtcatggtgcctgcgagccgccctcccggaagctcccgccgc

SEQ ID NO: 26390 - DNA, 883 bp, Homo sapiens
  SIMILAR (112)..(2): 911254mologous to Homo sapiens FLJ00075 protein,accession number AK024481,Smith-Waterman Score=182.
  misc_feature (1)...(883): n = a,t,c or g
cctcggctacctcagtgtgaaaggtgggcagttctggaatggtgccaggggcagaggggcaaatgctggggcccagttcggcaatgtacatgaggtcgttggcaatgccgggccaggtcaggcaggtaggatggaacatcaatctcaggcacctggcccaggtctggcacatagaagtagttctctgggacctgcaagattaggcagggacatgtgagaggtgacagggacctgcaggggcaagccaacaagaccttgtgtgcacctcccatgggtggaataaggggcccaacagccttgactggagaggagctctggcaaagccctgggccactgcacctgtctccacttctgtcccacccctcccacntgctgttccagctgctctctcttgctgatggacaagggggcatcaaacagcttctcctctgtctctgcccccagcatcacatgggtctttgttacagcaccagccagggggtccaggaagacatacttcttctacctacagaggcgacatgggggtcaggcaagatgacacccgctgtcctgagcccatgttcctctcccacatcatcaggggcacagcgtgcactgtggggtcccaggcctcccaagccgagccaccccagtccccccctggctcctgggctatgtgctgtacctgtgtctgatgccctgggtccccactaagccaggccgggcctcccgcccacacccctcggccctgccctctggccatacaggttctcggtggtgttgaagagcagcaaggagctgacagagctgatgttgctgggaagacccccaagtccctcttctgcatcgtcctcgggctccggcttggtgctcacgcacacaggaaagtccttcagctctcctt

SEQ ID NO: 26391 - DNA, 898 bp, Homo sapiens
  SIMILAR (661)..(726): 951254mologous to Homo sapiens Extended human secreted protein sequence, SEQ ID NO. 164,accession number Y35915,Smith- Waterman Score=116.
atccagaagtggcacaaaacgcctctgctggctcgtgtgtgcaactgagactgtcagagcatggctagctcaggggtccagctctgcagggtgggggctagagaggaagcagggagtatctgcacacaggatgcccgcgctcaggtggttgccgaagtcagtgcccaggcccccccacacagtctccaaaggtccggcctccccagcgcggggctcctcgtttgaggggaggtgacttccctcccagcaggctcttggacacagtaagcttccccagccctgcctgagcagcctttcctccttgccctgttccccacctcccggctccagtccagggagctcccagggaagtggtcgacccctccggtggctgggccactctgctagagtccatccgccgagctgggggcatcggcaaggccaagctgcgcagcatgaaggagcgaaagctggagaagaagaagcagaaggagcaggagcaagtgagagccacgagccaaggtgggcacttgatgtcggatctcttcaacaagctggtcatgaggcgcaagggcatctctgggaaaggacctggggctggtgaggggcctggaggagcctttgcccgcgtgtcagactccatccctcctctgccgccaccgcagcagccacaggcagaggaggacgaggaccactgggaatcctagggggctccatgacaccttcccccccagacccagacttgggccgttgctctgacatggacacagccaggacaagctgctcagacctgcttccctgggagggggtgacggaaccagcactgggtggtgaccaccttcaaggaacttaaggctggcttgagggcacacagctggttcgggtgacttcgccgcgctgtccttcatggggtgacccg

SEQ ID NO: 26392 - DNA, 478 bp, Homo sapiens
  SIMILAR (449)..(3): 981254mologous to Homo sapiens FLJ00038 protein,accession number AK024448,Smith-Waterman Score=814.
ataggccctccaatgggaggaaaagcacgagttgtgagagcagagcctccacaggaaaccaggaggctaagtggggcggaagggagtgagctctcggactcccaggagtaaaagcttccaagttgggctctcacttcagcccctcccacacagggaagccagatgggttccccaggaccaggattccccaagggggctgctcccagagggtgtgttgctgggattgcccaggacagggatggccctctcatcaggtgggggtgagtggcagcacccacctgctgaagatgtctccagagaccttctgcaggtactgcagggcatccgccatctgctggacggcctcctctcgccgcaggtctggctggatgaggggcacggcataggtctgacctgccagggagtgctgcatcctcacaggagtcatggtgcctgcgagccgccctcccggaagctcccgccgccgcttccgacgaaa

SEQ ID NO: 26393 - DNA, 1940 bp, Homo sapiens
  SIMILAR (1896)..(1732): 981254mologous to Homo sapiens FLJ00038 protein,accession number AK024448,Smith-Waterman Score=307.
  misc_feature (1)...(1940): n = a,t,c or g
ctaggccagtaagtagtgcttgtgctcatctccttggctgtgataggtggccggccctcgctccagcagctggacccctacctgccgtctgctgccatcggagcccaaagccgggctgtgactgctcagaccagccggctggagggaggggctcagcaggtctggctttggccctgaggctgaggagggagaaggggatgcactgttggggaggcagctgtaactcaaagccttagcctctgttcccacgaaggcagggccatcaggcaccaaagggattctgccagcatagtgctcctggaccagtgatacacccggcaccctgtcctggacaagctgttggcctggatctgagccctcgcggaggacaaagccaccttgggttctgccattgctgctgagtggaagatcactcctgccttttcctttccctagagcctccaccaccccgagatcacatttctcactgcgcttttgtctgcccagtttcactagaagtaggcctcatcctgacaggcagctgcaccactgcctggcgctgtgcccttcctttgctctgcccgctggagacggtgtttgtcatgggcctggtctgcagggatcctgccttgcgcctcatgaccagcttgttgaagagatccgacatcaagtgcccaccttggctcgtggctctcacttgctcctgctccttctgctgcttcttcctcccactttcgctccctttcaatctgcgcaaccttgcccttgccaatgcccccagcttggcggatggactctagcaagaatggcccagccaccggaggggtcgaccacttctctctgggagctccctggactgaaggagcacgcgctgctgctgctgtccgtccctccctggcgccttgccctaacaggggccgcggttgaagggtgggaagtgggggttgcaactggcccaacaccttcagaaactgggggtggtggtgggcccggtggacctggtggtggtgctgtttaagtaaccccatcttgtaaggtctgccttgagtggctcgggctaacctcagtgtggaaggtgggcagttctggaatggtgccaggggcaagagggggcaatgccggggccccaggtcggcaatgtacatgaggtcggttggcaaatgctgggcaggtcaggcaggtaggatggaacatcaantcttcaaggcaccttggccccaggtcttggcacataggaaagtagttcttctgggacctggtgttccagctgctctctcttgctgatggacaagggggcatcaaacagcttctcctctgtctctgcccccagcatcacatgggtctttgttacagcaccagccagggggtccaggaagacatacttagagctgatgttgctgggaagacccccaagtccctcttctgcatcgtcctcgggctccggccttggtgctcacgcacacaggaaattccttcagcttctcctgcagggcccgctcgtccacgggggcggtgcttgctctggatccttgtggctgggggcggtntcatgcaaggccagggtcctgggcgccggtgaagatggagccatattcctgcaggcgctctggagcagggtacttggcacatggagaacaccttgatggccttcttgctgcccttgatcttctcaactcttggcctgggccaaggagaccttctctccaatggcctgtcacctggctccggctctgctctacctgctgggagatcctgctgaagatgtctccagagaccttctgcaggtactgcagggcatccgccatctgctggacggcctcctctcgccgcaggtctggctggatgaggggcacggcataggtctgacctgccagggagtgctgcatcctcacaggagtcatggtgcctgcgacccgcctcgtgccaagctaggcgtaatcgagggtcacagagagtaatcg

SEQ ID NO: 26394 - DNA, 903 bp, Homo sapiens
  SIMILAR (730)..(608): 871254mologous to Mus musculus zinc finger protein,accession number D10631,Smith-Waterman Score=198.
  misc_feature (1)...(903): n = a,t,c or g
gtgggggnnnnaatcgagtccctagtcagtgtggtggaattccgaactgcagatgtcacgttctgtggctgagagcctcagtgtgcatctgtagtaggaggatgtcagtgaggactgtcctgtcgctgctgagctggcaccgactgtgcctggtctacactccaggtctgccaaacgacccagcaaggtccttcacaactcttctgatccaggatcacacatcacttgtgctttgatgcctgcttctgaacaattttacctcctgagatgtccatttttgggagtgtgagccctcctctcctggtgacagctggctgaggccgtccagcctcaggacacacagggaacggctgcataaggagatctggggcagggggcccaccaggatgttctgccctgtggggggcaacaccggctgtggtctgccggcggcatccagggacagtctgtctaggtgaaggctgaggccgcccccactcgctccctcacccccatgctgacagcagtgagctgaccacagactgtagctggggtggcccctccagtgcgctccccagagcagaacaccccccaggcaacacgtctgatgaaggccaacagcgtcagtcctctggtgtttggtgacatcaaagctgtgccgaaaggccttccctcactgctaacacttgaagggcttctgtccggtgtggaccctctgatggcgaatgtggtctgtcttatgcttaaagatccacctccattaactgcactcttagggtttcttcctctctccacgctcccagtgcgggactgacactctgcaccgggaggccaagggccaccatcgtcttgctggtaccgtaaaaaccctatcctctttgttgggccagcagtgtagaagtgttccctgttcatcgcatccat

SEQ ID NO: 26395 - DNA, 1007 bp, Homo sapiens
  SIMILAR (404)..(120): 831254mologous to Homo sapiens Secreted protein 33-54-1-B9- FL1,accession number Y59712,Smith-Waterman Score=399.
cctgaccaaagaagcagagctgctctgacaggtgggaaaggagttcttccacggatagagcagtatccacccagggcaccgcggtcagtcgccaccttattcagctcattatgcaatgaagtatagatggtgcggatggaatccttcctgttgaagaaaggctggccccctagtttctgccccaggtaggtgaggctgtgatagaccttctcggccgcggccaggtgcgccaaggccgccagcagcgacagccagctgccccccgcgctcttgttggcctctcgttccttctccacattgtccttagccttgtcgtaagagaagatacccaggtgagagaagaacgtctccagcaccgcctgttccaccgggaccggggcggccagcgggatagactcccccatgcgagctgcgccccagctcgacccacgtggctctcctcggcctcgcacttccgggttctgagggaacgggcttgcgcacaagcgtgcgtgcgcgtgaccgcctccaccggcggactcgtgagcgcgccgctgccgggaccgctcctgggccttagagaagacgcggataagggccaaggaaagagggaggtagcggttgctgagctccttcggcgcttcggctcctgtagctctgactattcggaccgtcaaggtagaataggaggcggccagttccccgctctaagaagttgcctgcgctctgaggtgagctgacaggcccctctctgtgtggttcgtcagcgctggtgacgtcatgcaaacgtgacgtcagccctggccagaacatctggcctgggctctccaggcacctcgctgggccggctgggagatggggaagtgcctggagttgtgcccacactcacagcagggaccctagtcagccctgacaccttctacaccaactcatggaagtgatttgctgagattagaagactgacgggtaaaggttgatctccttcccattgcctagttttcatcacatcacacaccaccggttaactg

SEQ ID NO: 26396 - DNA, 1581 bp, Homo sapiens
  SIMILAR (39)..(170): 401254mologous to Drosophila melanogaster Mst84Db,accession number X67703,Smith-Waterman Score=79.
atggtggcaatccacaatgctgatgatgccaaatgctggggggatgtggagcaattggagctctcattcactgctgctctgcctgtgctgcctcacccttctctccctggagaaaggcccctccaagaggctgttgcttttctttgttggcttctggtagatgtgctcctgaaggcaactgtctcaaaggtgggaggaggcagcgcacttgccagtgtggctcgggttatgaaagcacaggcttttagtcccctgctgaggatcctgcacaaagcctctacttccagcttcagggccaggaaagactcagcccacacacccagttgcctcttgaccccttcagggccagagagagcaggtccactcactcaggactcatgtcagccttctccccacgactccttcagagccccagctctccttgaacccagctccgcactgagcacagcagtagcctcccttagaagaagggaagagagactagagccagagcagagggtaggtgagctaggttcactgggggagcgccagcatgaaccctcagacaatcacgacttccaaccaaagtccaagcaggagcagcttcagaaaacactccagccttctggtggtccacattgttcttccttactgttgatggtattttggtggaaacagtggagaaaaactgaaccactgaaagctgaaagaacaggttacaaagaaaaagaaatttcaaccaaatgtagcagtagtccgagcggccagctttctcagtcaagtgcagcaggacccgcctggccagaggatgccagaccagaggccacctggtcagcaaccttgttgtcttttgacccaagatgcaaaaacgatagcatagaagagccatgttctgtgcacatctcctgcacagcatacagtgacccgcttaagatccacaactcctatagagaatgtggcctctgcccggaagtgaaccttgaggtggctgacccttcttcatcaagcagggagctgtggttcagggcaggagcccagggagcaggggcgatgcagggtgtcactgagctcagacctcctgagtttgtgaagtccaggaagccccaagttggcagcggccacatgggcaattgtctgagcaaggggaagaggtttctgggccactgtcagtacaaacaggggcttcctcaaaggcatcagctgcaggccgaggaacgggagagcgggatgaggcacaccaccggtggcgcatatgctgtgctcaccacgggagtcagtccctggtggatctggatctgggagcgaaggtggccctgtgccttccctggaaagaatgaagaacccgccgggaaggtgccctttcccagtgagctcgtgctcactctgcagcgatgcagagcccagagaggaggacctagggctcacggcagcatcttacgagtcaaggcctcagatgtcagcgaaggctcaggcagtttattcttgcacaaaccacagtcagccttggagacatggagaaagagtcaggtgaccctgaaaggagctggagtttcaacagttcacttgtctttaccacagtcagaaaaataccttttatggtga

SEQ ID NO: 26397 - DNA, 805 bp, Homo sapiens
  SIMILAR (98)..(205): 581254mologous to Homo sapiens Human secreted protein sequence SEQ ID NO:195,accession number Y87156,Smith-Waterman Score =99.
tcaccccactttcccctgctcctccttcacctctttcttctttaccatgttatatgcactctctgatggcttaaaaattatttggtgtagtgcttcaatcaggatcccatctttggtctttgatgttggtgaccttcgggtggggtctttgagtggacttgctatttctttctgtttgttagttttccttctaacagtcaggcccctctgctgcagatctgctggagtttgctggaggtccactcctgaccctgtctgcctggatatcaccagtggaatctgcagaacagcaaagattgctgcctgttctttcctctggaagcgttgtcccagagggtcatctgccagatgccaggcagagctctcctgtatgatgtgtctgtcagccccggcgctgcacttgatttcacgccggtccttagctgccttcccgcggggcagggcttgggacctgcagcccgccatgcctgagcctcccatcccctccgtgggctcctgtgcggccggagcctccccgatgatcgccgccccctgctccacagcgcccagtcccatcaaccacccaagggctgaattgtgcgggcgcagggcacgggactggcaggcagctccaccggtagccccggtgcgggatccactgggtgaagccagctgggctcctgagttctttgggtccactctgcttttatgagctgtaacactcaccgcgaaggtctgcagcttcactcctgaagccagtgagaccacgagcccaccgcgaaggtctgcagcttcactcctgaagccagcgagaccacgagcccac

SEQ ID NO: 26398 - DNA, 2027 bp, Homo sapiens
  SIMILAR (1635)..(2027): 831254mologous to Homo sapiens dJ323M22.1 (protein kinase C and casein kinase substrate in neurons 2),accession number AL022476,Smith-Waterman Score=556.
agcatagatgagaccttgtgttaccaacattgtaagtaatttatgtgatgtggacgtgcttgggaagcatggactttctttcaccttgggcccaaacattggcttagaataaatcgttatttcccaaccactgaagaatctccccccagatagtgaagaggcatttctcaaccctgagcttggcgttcctaccctgccaaggcctgtctccagcactggcgtttttaggtggttttcttctcctggtgcacacctggctgctctcttccagcacgtcctccaccatgggcggtgcgggaacatcagaaatgagttcccagattggccatggttgtacaatcagttgggttttctttgtggtgcagattcttgtcccccaggtcctcccctttacctgcattccttgtgactgtgtggcctcccaaagtgctgggattacaggtttgtctacagattttgagcgttcgaagttgacccctgactaagtatactttgctgctccctcagcctacgacgtggtttggaggtgcccctggaatagtgctagaattcaggactgcctttgcccccgcttgcaggtacaggttcacagtaatcaggtcccgtgccatgacccgggccctgggctaagtcctgggcaccccatatgagagcccagcctcgggcctcctagagccagcgttgtatggagagcagttaggaggcggcagagcagtgccctgagcgcaagcacgaagcgagcgaatgtcaataccacctcatgctcagcagcagtgactggctctgtctgctgcccagccgcctccacgcacgccgaccccaacggacttttccgggagccagccgggcagtttattttggctggctgctgcaggccgtcgaatctgtcatttttgttttcagctctttcatgccctttggtgtatgacatctacaacattgtcttcggcctgcgtgctcagccattcccgatgtgcaccgtcgcaggtcaggctcagccagcagtgatggcctgctgctgttctgtgatgggctgcccaggccagggacagcacttgctggtagttgggcactgggccagcggcaccaatgagcctgttgacacccagagtttattttgtctgaggtcacaggacacctgcatggcaaggccaagtctaaatgactcccgagcccgagtggtctctgagttcaccactatatccctagggcctcgtggcccttcacacacagtggatgttccttaaatacctctcagtggcaagagagtgttgccagacgctcagaaatggagtgatgaatgcttcagtggggagccagccagctggtggcatcagcagactggaaactgctccctctgcaccacggagaggaagggccaggggcgagccagctggtccgagctgaaccacggaaggaagacgcatcatggcccccagctggaccagatggcaggagtcctcagatgagtctcccctgtctgtgggtgcaggtggtgtagactgggttggtgctccacgctggtgctccagcaaggacgagcctcagggacagcccttcctccagccatttgtgccacagccaaggacaggctgccccaagccccctgcctcccagctggttctctctcctaggtcgggaactacaagcggactgtgaagcggatcgacgatggccaccgcctgtgcagcgacctcatgaactgcctgcatgagcgggcgcgaggtgtgagcagagcagaccccaccatggccggcgctgagtgacccgcagcttctctcccctgcacagggccccagtacgggaccgtggagaaggcctggatggccttcatgtccgaggcagagagggtgagcgagctgcacctcgaggtgaaggcctcactgatgaacgatgacttcgagaagatcaagaactggcagaaggaagcctttcacaagcagatgatgggcggcttcaaggagaccaaggaagctgaggacggctttcggaaggcacagaagccctgggccaagaagctgaaagag

SEQ ID NO: 26399 - DNA, 504 bp, Homo sapiens
  SIMILAR (223)..(504): 1001254mologous to Homo sapiens dJ422F24.1 (PUTATIVE novel protein similar to C. elegans C02C2.5),accession number AL031010,Smith-Waterman Score=497.
accatgtatttcctgactcccatcttggtagccattctctgcattttggttgtgtggatctttaaaaatgccgacagaagcatggagaaaaagaagggggagcctagaaccagggccgaagctcgcccctgggtggatgaagacttaaaagacagcagtgacctgcaccaagcagaagaagatgctgatgaatggcaagaatcagaagaaaatgttgaacacatccccttctctcataaccactatcctgagaaggaaatggttaagaggtctcaggaattttatgaacttctcaataagagacggtcagtcaggttcataagtaatgagcaagtcccaatggaagtcattgataatgtcatcagaacggcaggaacagccccgagtggggctcacacagagccctggaccttcgtggttgtgaaggacccagacgtgaagcacaagattcgaaagatcattgaggaggaagaggagatcaactacatgaaaaggatgggacat

SEQ ID NO: 26400 - DNA, 1215 bp, Homo sapiens
  SIMILAR (573)..(1124): 961254mologous to Homo sapiens dJ422F24.1 (PUTATIVE novel protein similar to C. elegans C02C2.5),accession number AL031010,Smith-Waterman Score=928.
tccagaccatgtatttcctgactcccatcttggtagccattctctgcattttggttgtgtggatctttaaaaatgccgacagaagcatggagaaaaagaagggggagcctagaaccagggccgaagctcgcccctgggtggatgaagacttaaaagacagcagtgacctgcaccaagcgggggcaggtgggaatgcagtggaaggcgtggatcagagtaaagttaatggaagagcaacagggtttgctagtaaattggatattgggaaaaggaggagagagggagagttggagactggaagctatcccccaaagactcatgcctatgctctgaaaaagagtggtccatggaatccagggacatggcagcacaggaaaatcgtcagaggtttacaattttacactgtcttcttccctcactcctcagttttggcatttttagctccagtgattgacccttctgttgcatcttcatcttctctaagatcttcaactactgataatgagcttgcagaactttctgaatttgcagatgctgatgaatggcaagaatcagaagaaaatgttgaacacatccccttctctcataaccactatcctgagaaggaaatggttaagaggtctcaggaattttatgaacttctcaataagagacggtcagtcaggttcataagtaatgagcaagtcccaatggaagtcattgataatgtcatcagggtgacaggaacagccccgagtggggctcacacagagccctggaccttcgtggttgtgaaggacccagacgtgaagcacaagattcgaaagatcattgaggaggaagaggagatcaactacatgaaaaggatgggacatcgctgggtcacagacctcaagcttcacagaaccaactggattaaagagtacttggatactgcccctattttgattctcattttcaaacaagtacatggtttcgccgcaaatggcaagaaaaaagtccactactacaatgagatcagtgtttccatcgcttgtggcatcctgctagctgtattttagaatgcaggtctggtgactgtcactaccactcctctcaactgtggccctcgactgagggtgctcctgggccgccccgcacatgaaaagctgctgatgctgctccccgtggggtaccccagcaaggaggccacggtgcctgacctcaagcgcaaacctctggaccagatcatggtga

SEQ ID NO: 26401 - DNA, 420 bp, Homo sapiens
  SIMILAR (102)..(194): 381254mologous to Homo sapiens alpha-1 type II collagen,accession number X00339,Smith-Waterman Score=57.
cgcgcccaggggagatggcgtgcaagtatccgctgcggtgttctggtgctagagtggagaggctggcaaagaagaaggcacacgcatgtttgctatggacagcaaccatcaaagtaattacaaactcagtaaaactgagaagaagttcttaaggaaacagattaaagccaagcatactttgctgagacatgaaggcattgagacagtatcctatgccactcagagcctggttgttgccaatggtggtttgggtaatggtgtgagtcggaaccagctgctcccggttttagagaaatgtggactggtggatgctctcttaatgccacctaacaagccgtactcatttgcaagatacagaactacagaagaatctaagagagcctatgttaccctcaatggaaaagaagtagtggatgattt

SEQ ID NO: 26402 - DNA, 852 bp, Homo sapiens
  SIMILAR (160)..(252): 381254mologous to Homo sapiens alpha-1 type II collagen,accession number X00339,Smith-Waterman Score=57.
aaatgtagtgcagttttctccaacatggccgcgcccaggggagatggcgtgcaagtatccgctgcggtgttctggtgctagagtggagaggctggcaaagaagaaggcacacgcatggtgagaatccggcctgagccgaagcggagtttgctatggacagcaaccatcaaagtaattacaaactcagtaaaactgagaagaagttcttaaggaaacagattaaagccaagcatactttgctgagacatgaaggcattgagacagtatcctatgccactcagagcctggttgttgccaatggtggttagggtaatggtgtgagtcggaaccagctgctcccggttttagagaaatgtggactggtggatgctctcttaatgccacctaacaagccgtactcatttgcaagatacagaactacagaagaatctaagagagcctatgttaccctcaatggaaaagaagtagtggatgatttaggacaaaagatcactctgtatttgaattttgtggaaaaagtgcagtggaaggagttgaggcctcaagccttaccaccaggactcatggtagtagaagaaataatttcttctgaggaggagaaaatgcttttggaaagtgttgattggacagaagatacagacaatcaaaactctcaaaaatccttaaaacacagaagagtaaagcattttggttatgagttccactatgagaacaacaatgtagataaagataagccattatctgggggtcttcctgacatttgtgaaagctttttggagaaatggttgaggaaaggttacattaaacataaacctgatcaaatgaccataaatcagtatgaacctgggcaag

SEQ ID NO: 26403 - DNA, 924 bp, Homo sapiens
  SIMILAR (508)..(642): 771254mologous to Rattus norvegicus ribosomal protein L21,accession number M27905,Smith-Waterman Score=170.
tcattcttgggatacacttatgttattgctgtcaggttcatctgccatacacctatccctagcccttcttgggggctccagaacttctaaagtgaatctttggtgttggtgtggtgtggtcgtgtgtcgtgtgtgttgttctgtgtctgtgatgtgtgtgtgctggtgggtggtagtggtgttgctgttcggtgttttggtgggcgtggttgtggtccgcgtcgggttggtcgtcgttggtcgtgttggtgtggttggtgtggtgctgtactcattcgccgtgtgtgtctcgctgttatgttcggtctcgcgctgtgtgtacatcctttgctctatcctcgcacgcttttgctccgtggacaaaaggtagataggtttaagacaaacctttcttcgggagagtctttggttactctggttatatttcccgcccatggactcgccaggtccagatttttgaaccttgatgtattgttcggtgtccactttattgccgtggagttctggcatgctgttggccttattgtaaacaaacaagttaaaggcaagattcttgccaagagaattaatgcgcttattgaacacattaagcactctaagagccaagatagtttcctgcactgtgcgaacgagcagcgccagacgtagcaatgtgctggaccatgtatggggccggaacctaggcaagcgtgcctgaacacatgcatccggtcctagaacgctaggcatactgtttctagaaacgcaatgaaatcctgggcatgcagtatttaaaacagcaacatgtctgacagctccgagaaatgaaatacgtccatttcttttggcaaggagcagaaggcaacataaagcagctgcaagaattaattcatggagatagttgacattttcgagctgactgcctcttagagaaaatgatgtcat

SEQ ID NO: 26404 - DNA, 363 bp, Homo sapiens
  SIMILAR (38)..(325): 1001254mologous to Homo sapiens ribosomal protein L21,accession number X89401,Smith-Waterman Score=509.
ggcacgaggaaccgccatcttccagtaattcgccaaaatgacgaacacaaagggaaagaggagaggcacccgatatatgttctctaggccttttagaaaacatggagttgttcctttggccacatatatgcgaatctataagaaaggtgatattgtagacatcaagggaatgggtactgttcaaaaaggaatgccccacaagtgttaccatggcaaaactggaagagtctacaatgttacccagcatgctgttggcattgttgtaaacaaacaagttaagggcaagattcttgccaagagaattaatgtgcgtattgagcacatttaagcactctaagagccgagatagcttcctgaaacgtg

SEQ ID NO: 26405 - DNA, 1277 bp, Homo sapiens
  SIMILAR (933)..(989): 421254mologous to Streptomyces ansochromogenes SanE,accession number AF228524,Smith-Waterman Score=40.
cagccatcccattaacccctttcctggaggcaaccatttttaccagtttctggggtttcctactagaggtattcagtgcacagaaacatatctattatgtgtgtgttccatacatacatatttatgtaaaattttttctactgttctgtatcttggtttttaaacgtaatatatctttgagctaatttcatttaagcaagcatagagctcccccatatcccgtgacagccccaccgaggacctcctggggctccctagtcaaacaggttaatgagtctaatggctcaaggcttctgagaacctccctggtgcatgaggaccttgagggggtctcggtggtcagtggcatgaactgtgacagtgcccttgcacggtacatcatcatcctggagaccctcatcatttatttaatcagccctcgttgttggataattgattcatcaggggcctgctctggcctggccatgtatctaccacttctaggtgatgatggggtgctgctgtgcacacccaactttatggcttggcggtcaaatcgcacccagttcatgatgagaagctcaagtcacatggtagacgcatcgccccgaggtagacacatgtcccctagggaagaagccttcggctactcctcacgtgcaagtcacatgctcctctccctgctggcaccaccatggccacagctgatgggcaggggactcggctgccagcagcaggagcggccacaagaatgtgtacccctggggatgacaagaagcccctacagtgaaatccacttcggctcttcacgggccctggggtcttcacctgggtcctgtgcccacgaggtcttgggccccagcatcctcacagtaaacccctttatcccggggtcctcagtgcacgtctggcccagcaacggcaatgaaaccaacaaactgccacacactagagctgggtcctgcggctctgccacctgctctgtcaaacgctggggtccccagaagccacggcccctgccaaagcccccactggtgccccaggctctcctgctggtcagaggccctgctgcggccagggaggaagccgtccagccaccgaaggaagaagtcacacagcgaccgggcggtcactcttccccaggtgtgtttgcacatctgaaggggccacgttctgtggtggaaatccggatggagtatggggaagagtattcaggggtgtattgggggcagatccctcgtaagtggtgtcactggctggtggcaccctcagttactggctgcaaatgggtgggttga

SEQ ID NO: 26406 - DNA, 382 bp, Homo sapiens
  SIMILAR (45)..(218): 411254mologous to Volvox carteri extensin,accession number X65165,Smith-Waterman Score=92.
tttcgtacaagttgccggcagctgagcgccgcgcctcctcctgctcgcagccccctacgcccacccggcggcggtggccagcgccaggacgcacatcccgcggacaccgaccccagatgtaaagcgggaccccagcccctcgccccccggcgcgatcgacagtctcgccagcgtctcctctgccaaaacccagggctggaagatgtggcagccggccacggagcgcctgcagcactttcagaccatgctgaagtctaaattgaatgtcttaacactgaaaaaggaacctctcccagcggtcatcttccatgagccggaggccattgagctgtgcacgaccacaccgctgatgaagacaaggactcacagtggctgcaaggtt

SEQ ID NO: 26407 - DNA, 1578 bp, Homo sapiens
  SIMILAR (1150)..(848): 311254mologous to Homo sapiens Human breast tumour-associated protein 57,accession number Y48596,Smith-Waterman Score=91.
ctaagtgtcaactgattggattggaggatgcaaagtattgtttctgggtgtgtctgtgagggtgttgccagaaaagattaacgtctgagtcagtggactggaagaggcagacccacactcagtctgtgtgggcaccatccagttggctgccagcaaggtgaatcttctggccttcatctttctcctactcttttcatccaggaagtatgcttcctgcccctgaacatcagaatccggttctttggcctttgaactcttggatttacaccagcggttcgccaggggctcttgggcatataactctgccataataaagacgctcatgtttccatttgttgcctttgggttgccaattttcttctctaccttttttggaaaattacattctgattttcttttgcggaatgggctccacctcattgaatacagttggatggaacagttacccaaggtgccttgtgctctcacagactgtccctgcagcaatggcctaggactgtactcatcagccactgtggacgaggaaattccaaacagcggaccctcatgctcattaaagtgtcttgctgtctcacttgcttgctcagatgaaagccaactgccacgttttgagttgctccaggaaaggcttttgtggtaaggaactgagaaatctctggccaacaggcagcaagaagctgaaaccatcagtccaacaacccctggagccatatccactttctctcctgactccactggaacaaggaggttaggagaatgagcactggacagggtgaagagggaggagcaaggctgagcgtggcttaagttcctgctggggacgaggagattcctccggttttcaaaatattccttttccattgattctgctaggtccttggtcccgggtcggtggccagcgccaggacgcacatcccgcggacaccgaccccagatgtaaagcgggaccccagcccctcgccccccggcgcgatcgacagtctcgccagcgtctcctctgccaaaacccagggctggaagatgtggcagccggccacggagcgcctgcaggtaaggggcacccgggagccgggggccagcctttcccagaagaactccttcagtgacacgttgggccttgggattgccctggttgcaaggtttgaggactgccttttgctggcaaatattgtcaagagtcacggcagctactctgccagataaaatccactgaatcctgcagttaaacttttggcaagctaggagccacattgtttcgtagtaaactttgaagacgtgtttaacttcatgaataacaaataaagcttcttggggaaatagccttttcctccttttctgtcttcttgctgtcctgagcatagatgtgatgtctagcattgcagcagccatattgtgattcgggtggtactggtactgtgggttgtcccgcagttctggagactggaagtcttgtgttggaaacagaaccaggtccttggtcttctgactcttaaaggccaaggtggtaactgattttacttgtttagcaccattcattgctctccaagtacagctctcgcagcccacctgcaggtgcat

SEQ ID NO: 26408 - DNA, 1722 bp, Homo sapiens
  SIMILAR (1002)..(1331): 751254mologous to Homo sapiens dJ333H23.2 (Synaptogyrin 1A (SYNGR1A)),accession number AL022326,Smith-Waterman Score=389.
agccgcacaccatcctgcgcgtcgtgtcttgggtaaggacggactggccgacggctctgccaggccggggtggtgggggtgtgagcaaaggcggcgcgccggagccagggtttaaggtggccttttttggggggtggatcagggcgtggaccatctcggtggggtgcatgccgcgcctgcgatggacgttggaggaggagagggccgggaaccgggttcgtattgacagctgtgaccttcagtaagtgtcccctccccaccctctgtgcctcagtcttcccacccgaactgggctgggctgggtcagagcctccccgatgagcaccaccccctgctccacggcgcctagtcccatcgaccacccaagggctgaggagtgcgagcgcacggcgcgggagtggcaggcagctccacctgcagccccggtgcgggatccactaggtgaagccagctgggctcctgagtctggtggggacgtggagagtctttatgtctagctcagggattgtcttgaagtcagtgagaccaagaacccaccaattccggacacaagagcagagcagacggcatcagctggagcctggaagggcagtcatgccctgtgtttctgggacaaacgtcccttcacagatagagttttgctcatctccccgctgctggtggagcaggggccaggtgaaggggacctggagagaggggcggctgcgtagctgggacagccccaagctgtcaaacccaagctctggcagccgtgaggggtttatgcatcctcccttgaatccaaacggctgcagaatgtggacgccctcaccccgctcgaggagcaggcccggatgtgaggcaggttccccatctgctgtgggtcagcgagaggcagggcctctctgagccttagcctcccttctcctccagcccccggaagcatgtgtctgttagtaagtgttcgagaggggccttcctggtgttattcctcttttctggggccttgagagaggaaatgaaaggagttctgcatctacaaccgcaaccccaacgcctgcagctatggcgtggccgtgggcgtgctcgccttcctcacctgcctgctgtacctggccctggacgtgtacttcccgcagatcagcagcgtcaaggaccgcaagaaagccgtcctgtccgacatcggtgtctcgggtgagccccacccagcaggtaccccctgcacagagtctacagagggctgtcccggccataggaggcgcaaggacaacccactgaacgaagggacggacgcagcccgggccgccatcgccttctcctttttctccatcttcacctgggtgagtacagccaccgcgcaccagcccacactcgtcccctttccccactgagcccctggatgggtggtgttccctgcctcggcacagccgtaggcctccccggcttgcagaggccggcagccctgtatcacccctggcagtgaggtggcaggagcacccagcactttgggaggccaaggcaggcactacatggaccccagccaggactccagcatgccttacgcgccctacgtggagcccactgggccggatcccgccggtatgggcggcacctaccagcagccggccaacaccttcgacaccgagccccagggctaccagtcgcagggctactgagccacagtgaccgcctgcccccgcccctccccatctgtcccctctctccacacccagcccctgctcc

SEQ ID NO: 26409 - DNA, 628 bp, Homo sapiens
  SIMILAR (301)..(594): 361254mologous to Plasmodium falciparum merozoite surface protein 2,accession number AF217039,Smith-Waterman Score=95.
tttctccttcttagttttcttcccaaatggttcctcagccccagtgctgggccctgaaataggcccagctccctgtatagttcccacagagctggccacaccataagtcaggggcaaactggaactgtgggaaggagctgcagcctgtacttccccttcagttagagcctgaagctggaggagcttctttagcaagtaccttctttcttctttttgctttaagaaatttttcctcaagacgagcaatttcatcacaaatagcagcattttcaaacaccgtggccttggccgctttgcgcagccgcaggtacttcagccggtacttctcattctggctcttcttcgggagctttttcatcctggccttgctggactgcagcggagcccgcggcgaggaagcgaggccgtccagcaggctcatggtccagccccgctacgggggccccagggcgctgccggcatcggatcctaagtcggggagcgggcgggagcgctggctttgtctgttccgggctacgcggaatcgggcctctaggaatctagctctccgggacgttcccagggctgaccgcaggaccagagacacccgcaaccgaacgggctcccggcgcctcccagcacttccgtg

SEQ ID NO: 26410 - DNA, 1599 bp, Homo sapiens
  SIMILAR (1290)..(1565): 291254mologous to Pseudomonas aeruginosa similar to E. coli protein PolB/DinA, Swiss-Prot Accession Number P21189,accession number U15370,Smith-Waterman Score=83.
  misc_feature (1)...(1599): n = a,t,c or g
tttttttttttttttttgtaaatgatgactcaatctatctccccaagcaccaatcctgaagggaaatgctgaatctgaatgnccccccataggtggaacttcaaactcctccaatgttcaaaaacaacatcgctttttccttcacaaaatcttcattatgtatttgatggaaccaatatcctttgaaataacataaattccaagctttagggtaccctttggacggtataggggataaaagaaagggaacagtcaatcagatgctaagttctcttagttttacttttcttgtttctctncccccttttcccttttttcagtgcaaataggcaaggcaatacacataggcaagtgctggaataggtgcttttgggaatgtgttattctaatttctggacctttcccttatggctttcccaaaatgctgagagacggttcaggcttttgggtagagagaagagatgaactggttgacttgggatgtgggggggacaatttgaggaactcccacccctatttccaagcactggaggcaagcccaaactattccaatataaagttatggctggcaagctatattaagtttattcactccaataaatccagtgcttctaccaataaaagaaaggaagaaacacttggaacactcaaaggttagagggggggaaattactgacagtttcatgtacctctttgggcaaagggtcagttatggggatttgaggggcctcaagaaaataggtctgtgtactggaagtcttaaaaccggaatcaggtttatctaagttggaggtcaggggctctgacaccagtacccttgggcaaaatcaatctctctgggcttccagtgttcctccattttaacaaataatgcctaattctcaagggctgtatctcgagaatcaaaacacatttcctaagagtcctgcagtaacaacgatgactaaaatttattggtatgtcttttacgcaccaagcacttttctttactcatttaatattcattattctgcaagacagttactagctcatttacagatgaggacacagagaaattacgtaatttgtccaaggccacagggcttaaaaagtagtaacgtatacggaaaagccaccactgtattaatactgtcacactgggaagggggaacagcttggggaaagattttgtgagggagtctccaggaggggaccggctgaacgtgggtcagactcacaaacaccgtggccttggccgctttgcgcagccgcatggtacttcagccggtacttctcattgtggctcttcttcgggagctttttcatcctggccttgctggactgcagcggagcccgcggcgaggaagcgaggccgtccagcaggatcatggtccagccccgctacgggggccccaggacgctgccggcatcggatcctaagtcggggagcgggcgggagcgctggctttgtctgttccgggctagcggaatcgggcctctaggaatctagctctccgggacgttcccagggctgaccgcagggccagagacacccgcaaccgaacgggctcccggcgcctcccagcacttccgtgtctgtcctcgtccgcatctctcgca

SEQ ID NO: 26411 - DNA, 766 bp, Homo sapiens
  SIMILAR (504)..(286): 931254mologous to Homo sapiens Human secreted protein, SEQ ID NO: 6849,accession number G02768,Smith-Waterman Score=337.
tttttttttaggcccaggacgctcttcattccctttgcacaccacccaccaaccactgcctgccccactccctgtcccccacttcacagagtgcccccagggccagcaggtggtacgggtgtctagcccgtgaccttgttggcacagtccagcagggcggtgtgaatgtccttggcacaggaaatctgggctttgatgaccgccaggtactgtgggtaggggaggctgtcaggctgcactgcgtcgggcttggtggctgtgggcacccaacgttggagagtgcttggcactgtcacaactctgtgacaggcactcatgcgccaggcgcaggcacagctccagctggtcacagagtgcatagaactcttccaggcacttgtcaaagcgctgtatgggtccatcactgctcttttgtccattgtcgatgttagtgttctgaatcaagttgtgggccgcaaccttcatcaaggtctgtagactctccttcagctgcgggatgagcatcttataacgctgcacaggatcgaagtcctgttgctgttgctgcaggaggccgctctgggcagggcccaccagttgtgctggcggttgcggctgctgctggggacccgggccgccagccgaactaggacccgatacaccagcagctgaggaagccgctgaagcttgctgctgggatgcagccatcttcctcgcgtagaccgccggaagtgcgttacgactgcgtctctccccgttgcttttcagcatccctatttctagtccc

SEQ ID NO: 26412 - DNA, 576 bp, Homo sapiens
  SIMILAR (350)..(436): 891254mologous to Homo sapiens lysophospholipase homolog,accession number U67963,Smith-Waterman Score=141.
attttgaaacacttgatggaaaaggcatcaagaatgttaaagttttggattccacgtcctttttgggtccttgctgcgaaagtgctcaaccttgtgctgccaaacttgtccctcgggcccatcgactccagcgtgctctctcggaataagacagaggtcgacatttataactcagaccccctgatctgccaggcagggctgaaggtgtgcttcggcatccaactgctgaatgccgtctcacgggtggagcgcgccctccccaagctgactgtgcccttcctgctgctccagggctctgccgatcgcctgtgtgacagcaaaggggcctacctgctcatggagttagccaagagccaaggacaagactctcaagatttatgaaggtgcctaccatgttctccacaaggagcttcctgaagtcaccaactccgtctttccatgaaataaacatgtgggtctctcaaaggacagccacggcaggaactgcgtccccaccctgaatgcattggccggtgccggtcaatgggtctggggggatgcaggcaggggaagggcagagatggcttctcagatatg

SEQ ID NO: 26413 - DNA, 828 bp, Homo sapiens
  SIMILAR (516)..(725): 321254mologous to Urtica dioica agglutinin isolectin I precursor,accession number AF059541,Smith-Waterman Score=87.
atgggggagccatgcaggggctcctctctcctgagctggatccaaggctctctcaatgctcctgtaggactattcgaggattttgaaacacttgatggaaaaggcatcaagaatgttatgttttggattccacgtcctttttggctcaggatggaggttgtgggagagcaggagcagcagtcatctggtcgacctcgacaatgtgatccatctggtgccaggaccacctgtgtgcgcattcactgggaaaagtctgcagaatctacaccaggccttcctggagggcgtgttcctccatctacattcgtgatggaacaaccagttattgtcgccgggacaccagtgcctcatgcacaccatcagccacgggagttttactgttacaagcttgtcctcttaggcacattccctcatcctgaacctgctggcagcagctcctttaggggagcgagggcccaggtccctgcagaatcaggtgatgggtccccaaaacacaaatggtggcacaatgagaaatctggtggtgggcttggacgaaatggtgtggatgctgggtggtctcttgctttcacctctgtggcaggcactgctgaggtacctgctggagcagcgagacgtggaggtgaatgtgcgggacaagtgggacagcacccccttgtgagtgctggagagaggggaaggacgactgtggaagagacagacccatggaaacacatggttgctgtagctcattctcgatcagcagccccagagcaggcaaggatgctaccactggcacatgatgagcatgaacttctgcagattcttctagctctgatcagatcctaa

SEQ ID NO: 26414 - DNA, 2430 bp, Homo sapiens
  SIMILAR (1059)..(1274): 511254mologous to Plasmodium lophurae histidine-rich protein,accession number M15317,Smith-Waterman Score=244.
tcaaaagtcaattccacgaaggcgcaggcttggggattcctttgtcagagaacgattgtctaggtccaagtcgcgcagaggaagtttgtccttggcaggctgtgtgaggctgtgcagcacactgtctttctccagcctccagggtgtccggaggcatcctggtgtcagccgccaatccaaaagttgtctctcaaagctccaggggagggaaagagaggcaggaggcacatggctgaaatcaggatgagtgacagcagttctggcagatcgggcaggaaaatggctcaaagttagttcttccacattcagaacgactgtttttacctgaaaatgcccaggcaccttaagggcctgaatgaagtctttggagaagagggaggtggccagcacatgggacatgagtctctgacactcagtttccacactgatagaatgggaaaaatcatctgtcaacatcagaggaacgtcccaagccctaaatgggcgggtatctggtgtggctcttccctctactgcatggtagttcatgccccattgcaggcccatatgctttgtgcattgaatgtgtgtttttcttgaatctttctcgtaccttcttccctctgtaaacttaagcctcggagaaatattttctttccctgagtctgtttcctctttcgactttcttggattagatgagctggtaaagagggatgttaaggggagtgggggtgaccgcaggtccccatatgctctgggtaaggccacacatacacaccccttcagcaggattgcagagcccctaattagctttgtgatttttaagagccacttccccttctggccaccacttttcttatcatctctggatctggataagccttcgctcctttttgtgtaatgaatgcagcgagtcctgttgcctactgaattcgtccatgtggcaggctcctgggctttctcactattccctcctattgatatggttatggttagtcttccaaacactgaatccacggcatcttctgcatctccttccttcacctctgaatgtcgtggatcgcctctgcagctgccagcatcatcatcaccaataatgtcatcatcttcatcataatcttcattaaaatcattctcatcaccggcatcatcatcaccagtaacgtcttcctcttcattatcatcttcatcaacatcatcatcatcaccaaaatcattgtcaacagcatcatcatcgttatcaccaacatcattaccaacaccatgaccaccattatcgtcatcatcatccttggctggctggagcccgtgccctctgtgactccaacgatgcgggctgcccaggaagcactggtgatggatggcgcccttactcagctgactctgactcgctggacgctctttcctttcctcgtcctcttccttttcctgattgccaatctctgaggggcttggcatctgcagtgattcagggctataactggctggttctgactgaaaatcacattctttttcatctcttttgatcagtttggtaagcctgtgcttgactttcctcatccggagttccttcaggcgacacagataaccgatgggtgataaagtcgaggaccgggtctggtgccagcttttcctcttcccactgctgactttctgtgagttttcctctatcatggcttcttgaataaatggccagtggcttctaaagcttgcacctataggagtcacgtgctcgtaggggtgaagactatcactgatggaattctgtcccaaaatcctgctaacagatggcataaagagcgtctgtaagaactgaggtggagcttctagaacgagaggattggagagcgaggagagcagatggaagcatccttgatccattggagtactgagccttgtgagaagtgtaaccaccctgctaaggaaccatgtggggagattgtggtagagcagaaacctaggggagctgtgagagggggaactggaatctagtactgagagcttcttaaagggattcttccctaattcagagactttgtcttgagacttgaagagtgggttctgcaaggctgctccatgaacattaggctgagaacagcaaggaaaatgccatttggaagcattccactcagaacggatgtccagctgctcatttagatcatgaaccatatatttgagctgcttgttgtgggctttaaggtcgttagtaagctccaagaaggccctgttttgataagagagagcagtgctgtcccctttgggcacggcccttcccctggaagaagaactggaaatctcagatgactcacatttcctgtgctgtaactccaggattttcaaacatctgacactttcatcccggttatcgaggaaataatatgttagctccgtcagactgctttgaatggtcatgcattgcttaacgacaaggatacgttctgaaaaacgcat

SEQ ID NO: 26415 - DNA, 1347 bp, Homo sapiens
  SIMILAR (487)..(296): 351254mologous to Homo sapiens TGR-CL3C,accession number A27282,Smith-Waterman Score=77.
atgcatgctacgaattcgagctcggtaccccaggagatccaagtggaagctctgtgtcctcttctgacccagcctcagaagtcaccgagcatcacttctgccatgctctgccagttgaagaagccacagccctctagatccaaggagagggaggcagaccccatctcatgtgggccggagtgtcaaggaaactgggatctctgtgttgaagctgccacagggctgtatggggatggccatctgcgcgattcttcacgcacacgcgtgctcatgaccactggaacttacagggatctgcagggtcttgagggcagggcgggacacgtggctgagctccacgttctgcctgtctgggcaatccaggacaggggctatgttctgtggtgctggactgcttctctgcaccctagggatgtagctagggagcagggcttccctaatgactgcacgtgggctctgggatgcacgctgactgcagagtctacccatacacattcagcagcactggcaaggcaagcatattcccagctcagcaagaaacccacactcctgaatgaaccggagcacattactgagaaaaagttcattaaccttgctagatttgaagcactcaatagccgcacgtggctaggggttctatactggatcgcacagatacaggatgtgcctgtcaccgtggaaagcactactggacagcgtgctgccagaatttctcccagggaggcagaccgaacactagttaaaggacaagtccagggaataaggcaaactgtcattatgtcagtaccaggaaggaaagagggagataagctcaaagaagtctctgatgggagggaagcagctaaccaagcagggatgaagtggggtaaggagtgtaagagcagttcgggcacagagaatgccatgagcgggaaggaagttgggatacttcaggaggagaaaggagactggagtcatggggtagtaagagggtggcaggagaagtggatgacatacaacttttgggcatgtggaagaggtaagaatgctacttgcaggcttgaaatgaccagaacttctgagaatgaccttaagcataaccaggaaggactatggcatggcagagagagggccatgctgggtgacacacacaccctggcgtggagggaagaggaaatggagcaaaagcaggctctccgcattcacagcttatatggaaagacaagtggacaacgagctctaggaagctggtgggtggagcgattcatgggaatgaggagtgggtcttcgtcagactgcaatgggctggttacagaagggaagaagcaacaccagcctgtggcaacttggaatctccgaaggttttaa

SEQ ID NO: 26416 - DNA, 387 bp, Homo sapiens
  SIMILAR (232)..(351): 801254mologous to Homo sapiens Human secreted protein sequence SEQ ID NO:103,accession number Y87064,Smith-Waterman Score =151.
atggagagtacagaaataggcccacatatttatgagcaatttactttaacaaagatgacaaggaaatttaataaagagcaacttgtcctaatatcccttgcattattggactctggccatactagcaattccctggcctggccatcctgtcttattgtgtctggagttggttcctgccggtgggtttgtggtctcactgacttcaagaatgaagccttcgaccttcacaatctgctggagtttgtaggagatccactccagaccctgtttgcctgggtgtcacgagaggaggctgcagaacagaaaagattgctgcctgttccttcctctggaagcttcgtcccagaggggcacctgccagatgccagccagagctctcctgtatga

SEQ ID NO: 26417 - DNA, 582 bp, Homo sapiens
  SIMILAR (1)..(249): 1001254mologous to Leishmania major probable levansucrase precursor,accession number AL160371,Smith-Waterman Score=421.
atgaacatgaacatcaaaaaaattgtaaaacaagccacagttctgacttttacgactgcacttctggcaggaggagcgactcaagccttcgcgaaagaaaataaccaaaaagcatacaaagaaacgtacggcgtctctcatattacacgccatgatatgctgcagatccctaaacagcagcaaaacgaaaaataccaagtgcctcaattcgatcaatcaacgattaaaaatattgagtctgcaaaagggggatcctctagagtcgacctgcaggcattaatgttgccacgtccaccggaggacgaaggccccggggcagagaagagtcggcaggcagcacgtggtgagtgcgggaaaccacaggcatccgcacaagggggatcctctagagtcgacctgcaggcatgcaaccgttactggacaaggtctgctggagtttgccggaggtccacttcagaccctgtttgcctagatatcaccagcggaggctacagaacagcaaagattgctgcctgctccttcctctggaagcttcgtccagagagacacccaccagatgccagctggagctctcctgtatga

SEQ ID NO: 26418 - DNA, 1527 bp, Homo sapiens
  SIMILAR (1343)..(1188): 1001254mologous to Homo sapiens glucocorticoid-induced TNFR- related protein ligand,accession number AF125303,Smith-Waterman Score=281.
tcaataatgctgtgctttttccagactcgtagaggtaccaccttggttgtcttggataaaatctggaataattatctgggttaccaggagagacccttgttcttttcgcttactttctccaaaacatatgaagcctctctctctgtgctgaaccacctggaaaggggtgagtgtactctcttctgcaagtgaggatgtagcaagaagacccacaacagatgccagcaccttaatcttgggttttccagatcccaagactatgagaaataaatttccgttctttataaggtacacagtctgtaatattctgtcacagcagcacaaatgaactaagacagaaattggtaccaggagcataaatgaactaagacagcaattatttgctacaacaaatacctttttttttccaagcatctttggtgaatctaatacaacatccacgagcctcactttgaaaaactctgccatttggtgccccactggaacaaagcttccagaaggaagaacaggcagcaatctttgctgttctgcagcctctgctggtgatacccaggcaaacagggtctggagtggaccttcagcaaactttagcagacctgcagaagaaggtcctgttagaaggaaaactaacaaagggaaaggaatagcatcaacatcaacaaaaatgacatccacacaaaaatccaacagtaaggtctcacaaagctctacgtgagggttcggaatgactcctttgataaggctttttaaagcaccctgcatcctgaggaagataaaaccaagagaaatttccagatagcgtacattccattttatgccacttgtacctctattccaatagttctcagattgttctttatcttctaacaccaccatatcccagtatgtattattttttagaacctgatgctcagagttgaatatcaagtctatggtgtccccaacatgcaattcataagtccctcctacattttggattttagatttgtttgttagagtttgtatcatgtctttgtttttatacagccgcacctcaaaaggagctacatcattgtagtttgcattgggagccacttggccataaattaaatataagccattctgaagtatctccagcttccagtcagacaccttattcacgcaaggaggttcagaagatgccatttgccattttgagggtaatggtcctctaattggagaaaaataaagattagccaactgaaggagcaaagaaatagcaacataactattgagcaaaagagccacagcttccaggatgatctctgagctccttgagttcttgaatggcttaaaggcatattttccaagtggctcaaacacatttttggagaaatgagagctgctctgtggccttaggcatgttacttgagttctctgagcttcagtttccttcacaaaaatttcttgagactgcttcttatcttggtttctaggatatgattctcttttggttctctcccttctttttgccttatcattaggcatctttatggagtcctttcccat

SEQ ID NO: 26419 - DNA, 1192 bp, Homo sapiens
  SIMILAR (332)..(33): 801254mologous to Homo sapiens keratin associated protein 9.2,accession number AJ406946,Smith-Waterman Score=546.
atggtggttctcttggaacgtgatcagcagcaagaaggctggcagcagctggacacacagtacacaggtgcacaggagctgctctggccacagctggacccacagctggtttggccacagcagctggacccacagcaggtgggctggcagcagggtgtgctgcagcaggaaggctggcagcagctggtcacacagcaagttgggcggcagcaaggctggcagcagctggacacacagcaggcgggctggcagcagggtgtgctgctgcaggtggtcacagtggtgggcttccagcaggtggtcctgcagcaggtggtcctgcagcagtcaggcccctcttctgcaggtctgctggagtttgctgaaggtccactccagaccctgtttgcctgggtattgctgcctgctccttcctctggaagcttcgtcccagacgggcacccatcagatgccagccggagctctcctgttgcataaggtgtctgtcgccccttgctgggaggagtcaggaggcatgtgggtcagagacccacctgaggaggcagtctgtcccttagcagagcttgagcgctgtgctgggagaacagtcgatctcttcagagcccgcaggcaggaacgtttgagtctgctgctgaagctgtgcccacagctgccccaccccacaggtgctctgtcccagggagatgggagttttatctgtaagcccctgaatggggctgctgcctttctttcagagatgacctcccgagacaggaggaatatagagcggcagtctggccacagtggctttgctgtgctgaggtggttccgcacccagttcgaaattcccggcaactttgtttacactgtgaggggaaaactgcctactcaagctttggcagtggtgggcgcccctccccgcaccaagctcgagtgtcccaggtcgacttcagactgctgtgctgccagcgagaatttcaagccagtgaattttagcttgttgggtgccttgggggtgggatctgctgaacaagaccactcggctccctggcttcagcccctttccagggtagtgaacagttttgtgccgctggcattccaggcaccactaggatatgaaaacaacaacaacaacaacaaagcaaaacaaaaacacaaaactcctacagctagcttggtgtttgcccaaacagccacccagttttgtgcttga

SEQ ID NO: 26420 - DNA, 662 bp, Homo sapiens
  SIMILAR (375)..(205): 771254mologous to Homo sapiens Human secreted protein sequence SEQ ID NO:195,accession number Y87156,Smith-Waterman Score =207.
atgagggaccgtgctgtaagggatggtgctgtccagcccagatactatgcttttcccacggtcttcataacctgcagaccaggagattcccttaggtgcctacaccaccagggccctaggtttcaagcacaaaactggtcagccatttgggcagacatcaagctagctgcaggagttttttcccataccccagtggtgcctggaatgcaggagagctctggctggcatctggcaggtacccctctgggatgaagcttcccttccagaggaaggagcaggcagcaatctttgctgttctgcagcctccactggtgatacccaggcaaacagggtctggaatggacctccagcaaactccagcagacctgcaggagaggaggctgactgttagaaggaaaactaacaaacagaaaggaatagcatcaacatcaacaaaaaggacgtccacacagaaaccccaatcaaagttcaacaacatcaaagaccaaaggtagataaatccatgaagataaggaaaaaccagcacaaaaaggctgaaaattccaaacaccagaacgtcaattctcctccaaaggatcacaactccttgccagcaagggaacaaaactggacagagaatgggtttgaggaattgacagaactagacttcagaaggtgggtaa

SEQ ID NO: 26421 - DNA, 1798 bp, Homo sapiens
  SIMILAR (1798)..(1139): 961254mologous to Escherichia coli similar to E. coli yeiG,accession number U73857,Smith-Waterman Score=1125.
ccagtggcctcttggtgttcccgggatgtaggtccccctttagcccgtcccattcctcccccggcccctcatactccactctcttcagccggcccatctgcggcagcacctgggccagctcggcagctgcctcatccccgaggagattccaggacagcctcccagacatcccacagggaagcagctcatgttcactgagcactgacgggatggctggtcctacatgaagtcccaggaaagacctgtgcatgaagtcccagggaagaccctgacccgctcccagtttcttgacagatttaagttgcttttcttctaagccttctttagcagtctcttcaaaaagtttgatgacaccattaaggtccacaggcttcaaaacaccagttccacatggcgagggaggcttgctgcaggtgatccctgtcctcgtgggctctacaccctggcaggtcaacacagaagtagggcggctgggaggctggaactggggaacagggagcagacgttctgcaagtagggagcacttcatgagtggcaagtgtggtgtctctggtggtgttccaacggacactccctctggaatgtcatgagaattaaaaactggggcataagggaagaagatggctgagaatggagcctcggtttctatgtctgtaaaacagtaagtactggaccccatctggtcctcctcccagacttgcatctggtgcaatctacggaaacagtctatctgtctgagcagcgggagctccatacagaaacgcaggacccctccagccaggttgttttccgccaagctgatctcttccaaatggggggatccatccagggcctgggccaggctcagggccccacctgggcccagatggctgaatggtaggttctcaggttcagcatgacaacgaactatatttttgtgaccggcggggtcgtatcctctctgggtaaaggcattgccgcagcctccctcgcagccattcttgaagcccgtggcctcaatgtgaccatcatgaaactggatccgtacatcaacgtcgatccaggtactgatgtccaagcggaagagccactgcagagtggagaagcaccgaaccaaacccaacacggcatccagggacaaaccgttctcactgaggccaatcttttcagatttggagtcgcagctgtctgcgtaaaaatcatcactcaacccctgatcaaccatgatttccgcaacgcgttgaccttgtgaaataagactcaccgggtcgtaatccaaccaggcatctttattttcagcaagatatgcagcaaaggcttgctgtccccacggcacttgcgatggggagacaatgggcgaaaacgccgagacgctgacatattcatctgggttacgtaacgccagcaccagcgcgcccagcccgcccatagaatgaccagagatagactttttggccgttgccggaaaatgatgcatcactaaatccggcagctcgttgcggatatagtcatacattttgtaatgttcattccacggcgcttgcgtcgcgttcaggtaaaacccggcaccttgcccgagatcgtaacggtcagcatctgcgacatgactgcctcgcggactggtgtccggcgcaacaacaataatgttgtgctcagccgcgtaacgctgcatccccgatttagtaatgaaattctgctcgttgcaggtcaggcctgaaagccagtacagcaccggcaatttttcattcgcggcttttggtgggagatagacgccgacattcatttcacatttcagtgattgggaataatgccgatacat

SEQ ID NO: 26422 - DNA, 1836 bp, Homo sapiens
  SIMILAR (1136)..(1026): 561254mologous to Homo sapiens Human secreted protein sequence encoded by gene 33 SEQ ID NO:155,accession number Y91434,Smith-Waterman Score=113.
ttttttttttttttttttgacgtggaataccattgtgtttattgatcaaacctggcttcgagtgtgacagagccattcttggttctccttggaagtaacaagaacactgggtaacatgtgaagtgcatggagactcacctgaatcccaccaaagtagtagctggacccagtagcctagcttattgtcttggcagtgccccctacccagtaccattaaacctggctttgtcccttacataggacaaactgggcttttccactcccgtggggctgtgttcctacctccacctgtccttggaagctagtatgtaagtaagggaggagtcatcaagtttataagatgggtaggctgaggattgagcgcaggaggggacttcatggctgagtccctggcttgttccagagccctggcccttgagcccctggactggtcagtgcatggacactctcccctcccagctcgggcggaagacttttcctgacttagctgctccatacacacaatctataaatatgtatttgctttaaaaattaaataaattagatcttgggccagcctgagggtcatctggccagccatggagtcctgtgacatggacatttgtcatgtgtcatatatagaccaaccaatcatgtatcctgccacttgggatgccagcacccatgccacagaacacgtgccacactgactttcatgtaacgccacatgtcaaggggtcacactgccacatataaccgtacgtgtcatgcattgtcatgacaccctcattgtgtgtcgcatgtccccaattgatcacacatatcccacgtaatgcagggtactcctttgtccagacccagctcctggttcccaaaaaagttctccctgaggactgcagcaggacacacgtatccttcctcctgggtggagtgcagagcgccctgccgaggctcttctttcctgagtcatttatcccagtgggcgaaaggtggatcatttgggtgcatcacttggctggattccaaaggtcttgagggggccatcaagtaccccaaggggcctggggctggttgtcaaaagaaggcaaagtccaacctgggctcctggcttcttcaggtgctgggccattgtcgcagggaatggggttattccagaggctgcctcctgagtcctccaactcaaccttcctgggccagtggcctcttggtgttcccgggatgtaggtccccctttagcccgtcccattcctcccccggcccctcatactccactctcttcagccggcccatctgcggcagcacctgggccagctcggcagctgcctcatccccgaggagattccaggacagcaagattacttccagggcagggcagctcgtgaagctggaggtgaggagcttggcagtctggttgtcaatcttacaggaaaccaggtctatctgtctgagcagcgggagctccatacagaaacgcaggacccctccagccaggttgttttccgccaagctgatctcttccaaatggggggatccatccagggcctgggccaggctcagggccccacctgggcccagatggctgaatggtaggtgtaggaccctcaggtgctggggcagctcctgagccagccccagggctgtgggatcccccagggcattgcagccaagcatcaactcctccaggcgcctgcaaagaacgagagactctgccaactgcactcccccggctgagctgatgctattccctgagaggctgaggctttgaaggcaggtcatttggtttagtttgtgagtaaccaaggccaaggtggacctgttcaccaaaaggtaactgaggcgaaaatgcccttttgccat

SEQ ID NO: 26423 - DNA, 1438 bp, Homo sapiens
  SIMILAR (5)..(259): 961254mologous to Homo sapiens HSPC304,accession number AF161422,Smith-Waterman Score=415.
agtaggcaagatggcgtccagcggcggttagttatggagtttatttgatcaccacgtacagagggcggtatgcgactcacgggccaaatatcgagagggacgacggcctcgcgctgtgaaggtatatacaatcaatttggaatctcagtacttattaatacaaggagttcctgctgtgggagtcatgaaggaattagttgagcgattcgctttatatggtgcaattgaacagtacaatgctctagatgaatacccagccagaagactttactgaagtttatcttattaaatttatgaacttacaaagtgcaaggacagccaagagaaaaatggatgaacagagtttcttccggtggattgcttcatgtgtgctatgctcccagaattttgaaaccagttgaagaaactagaaaaaaactacaaatgcggaaggcatatgtagtaaaaactactgaaaataaagaccattacgtgacaaagaagaaattggttacagagcataaagacacagaggattttagacaagactgtcctctacgagatgtctggattttgtaaagctgctttgaacacttctgcagggaactcaaatccttatcttccgtattcctgtgaattgcctttatgttatttctcctcaaaatgtatgtgttcatccgggggacctgtagacagagcaccagactcctctaaggatggtagaaaccatcataaaacaatggggcattataaccacaatgactctttgcggaaaacacagataaactctttgaaaaactcagtggcctgccctggtgcacaaaaggctattacgtcttcagaggcagttgacagatttatgcctaggacaacacaactgcaggagcgcaaaagaagaagagaagatgatcgtaaacttggaacttttcttcaaacaaacccaactggtaatgagattatgattggacctctgttaccagacatctctaaagtggatatgcacgatgactcattgaatacaacggcgaatttaattcggcataaacttaaagagttaataaggttcaatttcagctatgatgtacttgtagcaggacgagctgcagacaaaaccccgcagacaccaggttatagaaagaagaggctttattcggccaggagcgtcggcagacttgtgtctcaagaaccgtgctccctgaagaaaaagttcctggtccttttaagggcttacaactcaagccaatataccctggatttggtttgggaaatacaccatacttacaggaaacaggaattgtctattgctaaagaggttaaaagctcaatggaagtcttgaatatagttactgaaataatcatgaatgtcttcttggggcccaaatgccaggatggggctgaactctcaatgattgccttgacttcagcagtgggctgcagcccaacagaggagagtgtctag

SEQ ID NO: 26424 - DNA, 2461 bp, Homo sapiens
  SIMILAR (1027)..(1680): 861254mologous to Homo sapiens dJ667H12.2.1 (novel protein (isoform 1)),accession number AL035414,Smith-Waterman Score=996.
agttctaattatgtttaatattcggtttgctgcttggattgaataatctacatttgcttttaaaaaaaggaaattcacttaactgcatgtcagtcacccaagttttaagtgtacaaatgaaatggaaaacatttattacacaaatttaattacaattctaagaaataaacatgcaaattagatagagttcaatttgcagattgctaatcctcatccttgatcttgttccttcctcccttgattttcaagtctgtgcgtcttccttgattcctagggagccaggcagccagaggtctggtttttcacagtcggaggatcacctgggggcatcctgcagaacctctcctcggaaatccacggggaaatggcaaacaggattgacggggtttcacacgctcctcgctagacagagccgctcattaccataaaccgtctgcagcgacggcggcgcagcgccccagtcgcggcggcgggacctgccgggacccttgcccgccgcgcacccgcagtcaccgccgagcgggcggccgggccgggacccgcgagtgtgcaccggcggccgggctggcgccgagcccagagcggaccagcagcagctcaagcgctgcggccgccgcctccccgctgaccccgcgattctgcgagcccattgtctcggaaggagctgctgaaattgctgggtaccaaacactatgggaggctgacagctacggaggcccaagccccccagggccagcacaagctcctttgcagggagaccggggagctggtcccccactgggcaggatcacattacaggggaatttcaaatcctattaacaacatccaagatcacatactttaaggagggaagtatgtgggaagaagagggatttttcaccccaccacttcaggcagctgtaggccataaaaccatctcaatttttgaggaacgagcccacatcctttatatgtccttagaaaagctaaagtttatcgatgatcctgaagtgtacctccgaagatctgtccttataaacaatttgactgaaaaggatccatggagaaattatcatgcagaataactggtgcttccctgcctgctctttcaatggcacctctgcccaagagtggtttatggctcaagactgcccttaccgaaaacgaccacggatggccaaagaggaatgtgaaaagtttcatgcctgctgcttttaccaagaatgtggtggccactacctaaatttacccctttctgtcaatgctaatgttggaagtgcctccactgctgcctcctctccctccgcctcttcttcctcctcatcttcctcttcctctccccctttgcctttaccgagttgttcccgccaggtggattttgatgtaggtagtgcatctatttacaagagtgatggccagatacctgccaatgaaatctttgtcactaatgtcagatcacttggtgttcaggaaaaggccaaattaaatgatgagaaagcaaatgatgacaccaacagagatggtggccccctcagccacgaacctgtgggaaatgaccttgcttttgagtgcaaagggccaattttatgattattttgagaccggatataatgaaagaaacaatggtaaatgaatcttggaaaaagtccttacggaaaaaggaaggcttcaccaccaagtaacaaactgtgctgcagccaaagggaagtaaaatatgagccatcttctcaccgaactttgaagcatgcacagcatgatcagttagctctcggtaaaattttatttttgaatggattttgtagttttgtacaacagataaaaattatgccatgaacatgccatgtcgttttaatgcctggagagcagattgcgtaaaacatctgtatagcaggcatcagcgagcttctttataaatgtggtgatttttaccaaggaaacgattgacttaatgcttaaaagtatatcatagttttcttacggaaaagatcagtagatgagattgggggacaatgtgcccttgcaatatttccattgccccccaaggagcctgtcactagctaagaaatttctacatgtttgccagttaattagggagttatttggtaagcaaatcaatataaccagcaaagatacctgcttcttctatatgatacaatattttttttaaataaaagactaaagacagggagctagatgaaatggcttaatggtgctgttaagtatttgtacctaacagtcttgtgtgacagatgaaaataggatgtaacataatgaaacacacctgtctaggggcggcaatcaacagtcttacacagagagggtattccctgcaagtttctggcttgcctgtgatgggtgatgaggcttttagagaggtgttatacagggcgatttttggtgccttacttttatcttaatttttgccaatgtgaaaattaaggataaatccagagttacagcagggatttaacaaacaggacaa

SEQ ID NO: 26425 - DNA, 614 bp, Homo sapiens
  SIMILAR (129)..(485): 301254mologous to Bos taurus annexin,accession number M82802,Smith-Waterman Score=100.
cacaacctggtggagaacccaaccctttctgccagaaggaggcagagaagggaataagaggtcaaggaggttcggtccttctattattacccccaccatgcgcacaacagccccctcctgcgtaagtggggcaaaacagcgcaaaatacatatctggggccaaaacccatgtgaaaggcaaaatctggaagggagggggcctaaggacaccgagcctgctcccgggaagggaggggggaagggaaaacgttgcctcgacgccagcaagggatttgtattccctcctaaatttgcccacccagcgtcatccccgtcactccaagtaccaattcagaggtaaggggcggctcacgtcaccgctgggccgatatcgcccacatttgccccaagcagttgccctgggcctgaggtttgcccccccctgcagtcggcgaccggcagcgctgcctccccgtccgccattagagacccagccaaacaatacgtgcggagcaagagccgcgcagcgcagcgccgaggaaaagaagaccgaaggaggggtgtcggcggagcagaggcagcagccctctcgccgacaatcttggggacctcggctccggtggacagggtgggag

SEQ ID NO: 26426 - DNA, 1206 bp, Homo sapiens
  SIMILAR (115)..(498): 271254mologous to Rattus norvegicus inducible carbonyl reductase,accession number D89069,Smith-Waterman Score=90.
atggtaaccactgtcgccggcaatacagggatgcccagtaatggccatgagaagcaggcaggtattcctcatgtgcaggaagtgcacgcctgggcaaagccaagggcagcaggtcctcagggagtgatgggaaacgagagagaagcaggcgagcacaagagttcaagaaatatttgcattccaagacttcaagataaaaaagccacacaggccctgaagcagagcttacgtctcctggagcgaaaaaagaaggctgttcacagtgacaccggatggagggcatccacagtaaaagtcaagaagtttgaagtgacttcttcaggggacagatattttagaaataattcaagggccagtggtggagcagaagaaaacagctgtattgaagcagctgtggcacagctccatgactgtcctacagagcagggctaccccacaggcagggaggggcagctcagggcagttctgcagtcatatttagttccgcagattgaggggcagtttttgccgaaatttctagggaaaggggcagtcatcaagggtacttctggttcatcaggtcattgtcatggaaaggggtgtctttggctggctcttcccacatcccatgtgagagcagcaaggttcacctactgcagcccaggacacagcactaacgtaagagggcgtctagcatctctgtcccctgatatccagacctgctctgtagcctcagagatgtggggatccggaaaagagggagatttgggccatggtttaatacaaaagctccttcttcctagatttttcagatcttgctttccctgttcacctgccggcaactctttctatgatctttcccctaagaattcctttcagctaaaaagtgaaggtcttttttcttcaccagttaattattatgagatgagtctgaagtcagaccctgatagctctcttgagggctttgcactgccaatgcagatgtttccaatgttcaggaaaaactttgaaaaactagagtgtctgggcagggagagaggacagtgggatcagaacatgcagcagctgcctctcatctggtttaatggactgactttaagggcatcttctaaggaaggatgtatagaagaaccaggtcagggactctctgctaaaattgtagaaaggggctcatgggatggtgccctggagagacaagagcctttctggaatgggctctggttctag

SEQ ID NO: 26427 - DNA, 553 bp, Homo sapiens
  SIMILAR (80)..(451): 321254mologous to Homo sapiens Human neuroendocrine-specific protein NSP-A mutant fragment 39,accession number Y21472,Smith- Waterman Score=105.
tgagcagctgcagaagcccgtcgtctggttgctgaggttggtattgcagcagcaggagcgatgtctgcagcggtggaaacagcagcgcccactcccagctgcctcaccagccattacccaggcttcgccctgggggcagctgccacccaagggaaagctcctccccctcaaaacaacggggagggccagtcggcgaccggcagcgctgcctccccgtccgccattagagacccagccaaacaatacgtgcggagcaagagccgcgcagcgcagcgccgaggaaaagaagagcgaaggaggggacccggcggagcagaggcagcagccctcaccccgaaaaacttggggacctcggctccggtggacaggaagtcagaccctgatagctctcttgagggctttgcactgccaatgcagatgtttccaatgttcaggaaaaactttgaaaaactagagtgtctgggcagggagagaggacagtgggatcagaacatgcagcagctgcctctcatctggtttaatggactgactttaagggcatcttctaaggaag

SEQ ID NO: 26428 - DNA, 822 bp, Homo sapiens
  SIMILAR (119)..(265): 351254mologous to Homo sapiens gamma-glutamyltransferase 1,accession number AJ006854,Smith-Waterman Score=78.
atggaggcagaactaagtcagagagcagaggagcttgcacctacctcccaccgggaaggctctgggaggagacctcatggagtgctctgcaccaaggtgatgttctacctcaaaggagaaatggcagtgcggccttcgggcagaatgctctcccgtgtttccagcaacagaagttcccgaatactcctgctaaggaaggaagccatcgcatctgtcttgccacagggcacctactttggaagaagcagcaaacaggaaatggccctgtacacagtacgatgcaattcagaatgcttgttattacaacgattccctggttcttcgactctcttgagtcttagtgcacgggctggaggaggtgcccatggcagatgccctggaaggggtcggcagcacggctcaaacagcaacacacactggtgcaacacgtcggatgatgactggggtgaccaccgcagaacttatgaagtgccacaaactggtgcaacacatcggatgatgactggggtgaccactgcagaccttatgaagtgccacagactgagtgctttctgcaagtgggcgttcacaggagactcccaatacctgtgcagaccaggtctgctcggatgcagaaggcggccttctagtcaggaggacagcagctgccagcccaggagttgggacctggccattaaggactttgagaatggtcgccgtttccgtgacagctcctccgctgccatcacggcctctatgccaccactgatccacacgcgtagaaaggagcccaagagggctcgcactcaccttggggctacaatccccaagttctccacatag

SEQ ID NO: 26429 - DNA, 846 bp, Homo sapiens
  SIMILAR (624)..(758): 361254mologous to Mus musculus SPR2I protein,accession number AJ005567,Smith-Waterman Score=63.
tcaagcaacactggcctgcattccaccctccatggcaacagtcagctggagtggcagcagctctacagccttgcacagattggcactctgcagccagccaaagtccccaccgccctgagttgccgctctcttggcccccgtagcatgtgatctacaacccttgccccgtgtctcatgtgtatggctggttttccagggcccggatggctccagcccctcctctccctgatcagtgaatgtggcccagcccatccaactctcccccacagccaggaggccagctccaagggcaacacacctggaagctgcaacacggatcagtccacttcccttgtcctggagctcaggagccaaagcaggtggggaggtaagagaggagtaggggagggccagagacagagaggagacagcagctagagcacccgtcctaataacaagggaccaatacatgggtaccacactgggtgctgagacttggccttcttcacacaagtcctcctgagggcatcgctgagctgccccgctcccttccctctctaaccgaacaccaagcctgtcagcttgactgtgttcttgtggccattggcactgccatccttgtggctcagactgccaccacttctccacccatctgtggagaagctgatgctcaccctgcctccactccacttcctccatcctggcctccacaggggaggcagctctcctgctgaaaccctccacttggcccatggccctctggtagagttcagactccctaatgtgggccatgaggccttctgccacctggccctggcccctctctgcccatctcatgccacctccactcctccgtggccagcccat

SEQ ID NO: 26430 - DNA, 637 bp, Homo sapiens
  SIMILAR (113)..(190): 571254mologous to Homo sapiens super cysteine rich protein; SCRP,accession number U63332,Smith-Waterman Score=109.
atgattttacccacagcccatggacactgtgccatagaggctgcttcctttggagaactgctgcctgagcagcgcctcaggaacctgtgctcaccaggcacccttgcttctatgttcttgcccaaactgctaatcttgctgttgctgtcaccactgttgctgtccatgtggctgctgctgctggcactgccacaggccctcaaccaagggcaacagcgctacttttacagcattatgaggatttacaactccaggccccagtgggaggccctgcagacccgctacattcacagccttcagcaccaacagctgcttggctatattactcaacgggaagccttgtcttatgctcttgtacttagagattcaaccaagagagcctcagccaaggtagctcctcaaagaaccattccccgggaaaacttcagccatgacaagaagatgtccatcagtactacctgtatctgtggttctacctagggcccaaagtaaaaggcgccaagtgctcaggaactgagacttggcagcattttcagaaacaggaagtttgcccatgtatccctggtatctagtgggtgctttgtgcatatttgttgaatgacagtgaataatttctaatataaacaacatcctaaaa

SEQ ID NO: 26431 - DNA, 1580 bp, Homo sapiens
  SIMILAR (441)..(262): 481254mologous to Xenopus laevis 4g2,accession number AF182319,Smith-Waterman Score=180.
  misc_feature (1)...(1580): n = a,t,c or g
ctaattcttcttgggtttcgtttttgggttctctatggttctcccacgcttgatcaccaccttccatgttctgaggtcccataggcagcttcctccttggtcttgaggaatactctcatgctcagaggggcatcctttcagctgcttttttttttctccttcccccctgttccctcggctgggctgacagatcagagtgagaggcgctggcaatggactaggaagctcgctgccgctgctactgctccccctgggctccggcgagagcctttccctacgatcctctgatttggggatggggttggtgcagcgttggctgttatacttggccacatattcacattgcttgaagggggcagtcttgtcctccagaacgtgtctgatacagaaggcgtagccgttgagtcgcctctgcttgcacagtttggggctatatgagcacaagggcttattgtcaacctcagagaagtgtatatgtttcccttcatacatcacgtgactgtattccttgtgaacatcagctgattttaaatcttctgcgccatagcaatgttaagagaacccccaaggataccacagtttggaatgccgcagaatcaggatgaagcagattgtcctttcattctccgcccggggcctggcgtgggccggcgaatccccggcctcacatcagagtgagaggcgctggcaatggactaggaagctcggctgccgctgnctaactgcttcccccctgggctccggcgagagcctttccctgtcaagcaagaggggtgaggatcatatttttattttggaaactaaaaagtgcctcccagggtcggtgattattaaggggaaatccctgaatatactctccagccaagaaggcagggctgccggggctgtacaagaagaggcagcagtctccctaacagcaccactacaggcactgcgaggacataacaccagagagctgctcctctgccctccgaaacgacaactttcctaccatcttggaggcagagcaaaggggggccagggggaaaagtgcacccgctcccgataaagtacaaatttttacttctcatctctggaaaaaagtccacaccggccgtctacacccgcgcctgggggagaaagcagggaagaaacggggggtgcatgagaaacgttttcatttgctccagggggaaaaatgtttctgcatcttctgatggaaagaaatctttacaagacacaggttttccggtggttattgttttttattttctgtttttaatttttttcatgttagtgacagtgatattttaatatttttttaagccagtaataatttttctccattacagggctaagttctgtggctggtggtcagtttgtaaatttatacttaaagagacttaatagtaacttcatttatttgtctggttatgttattgtatatataaatatttatgttttcatatattgcatataaaaatttgtgttacatgttactctcagaacagattgctgtaagacaattgtaaaaaaacatgtctttcgtctgtttctcaaagcaatgtaaataaaccctatggactgtccagaaaggcaaa

SEQ ID NO: 26432 - DNA, 494 bp, Homo sapiens
  SIMILAR (49)..(201): 941254mologous to Homo sapiens ribosomal protein L35,accession number U12465,Smith-Waterman Score=219.
cggcccgtgaattcccggctcgacgatttcgtggcggcttgtgcagcaatggccaagatcaaggctcgagatcttcgcgggaagaagaaggaggagctgctgaaacagctggacgacctgaaggtggagctgtcccagctgcgcgtcgccaaagtgacaggcggtgcggcctccaagctctctaagatgtaagtgaggcggccggatcacagccctcgtgggtggggagcacgtgtgcatcgggatcgtcggaggatttcaaagttggcttaaggagctggccgcttagatgcccactccgtgcatcctggcgcgcatgggagacccgttgtgtgcttagcctcttacctgccttgacgcttgcggtccttgtgcctggaatgcatacccggagacccatcttaatgctgccttcaaagcctacccggaccccttccttgcgcttcccaccaacacttgagtttttaacccccttggcaggtgggtggcttgca

SEQ ID NO: 26433 - DNA, 366 bp, Homo sapiens
  SIMILAR (157)..(345): 731254mologous to Gallus gallus ribosomal protein L35,accession number AB046395,Smith-Waterman Score=231.
atggtggtggtgcgcagtactcggaaggctaagcgagcgggggcggcggcctgtgcagcaacggccaggatcaaggcccaagaccttctcgggaagaaggaggaggagctgctgaaacagctggacgacctaaaggtggagctgtcccagctgcgcgtcgccaaaactcagaaagaaaacctcgggaaattctacaagggcaagaagtacaagcacctgcacctgcggcctaagaagacacgcgccgtgcgccgcccgctcagcaagcacgaggagaacctgacgatcaagaagcagcagcagagcgagcagctgtccccagtgcggaagtgcgcggtcaaggcccgagtggcgcgttgtcaataa

SEQ ID NO: 26434 - DNA, 905 bp, Homo sapiens
  SIMILAR (752)..(865): 781254mologous to Rattus rattus ribosomal protein L35 (AA 1- 123),accession number X51705,Smith-Waterman Score=141.
tttttttacaattttttttttttaattagccaagcatggtggcacacacccgcaatcccacctactcaaggaagtgaagatgggaggatcacatgagcccaggccgcgaaggcgccagtgagccaagacagcgccactgcattccagcctgagtgacagagtgagaccctgtctcaaaaaataataatctgctataaatatttttgtacacatttgttgaagacatatattttcatttttttctgggcatgtacttgccgtatcattaggtaagtttatatttgaatctacgctctttccctcggagcgggcggcgcggcggcgtcggcgggcttgtgcagcaatgagccaagattcaaggctcgagatcttcgcgggaaataagaaggaggagctgctgtaaacagctggacgcacctgaaaggtggaagctgtccccagctgacgcgttcgccaaaggtgacagrgcggtgcggtcctccaaagctctctaagatccgaggtcgtccggaaatccatttgcccgtgttctccccggttatttacccagacttcaggaaagaaaaccttcagggaaattcttacaaggggcaagaagtacaagcccctgggaccttgcgggccttaaggaaggacacgtgccatgcgcccgcccggttcaaacaaagcacggagggagaaccttgaaggacccaaggaagcaggcagcggaaagggagcggcttttacccgttgcgggaagtaacgcgggtcaagggccctgagggggcgcctttgtcaattaaagcacaaggagaacctgaagaccaagaagcagcagcggaaggagcggctgtacccgctgcggaagtacgcggtcaaggcctgaggggcgcattgtcaataaagcacagctggctgagaaa

SEQ ID NO: 26435 - DNA, 1191 bp, Homo sapiens; identical to SEQ ID NO: 11927
  SIMILAR (531)..(611): 511254mologous to Hepatitis C virus core protein,accession number AF233721,Smith-Waterman Score=62.

SEQ ID NO: 26436 - DNA, 1521 bp, Homo sapiens
  SIMILAR (397)..(519): 391254mologous to Aedes aegypti=mosquitoes, Rockefeller, female, Peptide Partial, 92 aa vitelline membrane protein homolog {C-terminal},accession number S54556,Smith-Waterman Score=77.
ggcgcactttttttttttttttttttagcatttttaaattttattatgacttcatttgtttaaatatatatatatatatatatatatatatatatttatttatttatagctctatgtccccaccgaccccggccccctccccggcccctagtttttccccctggctttctgtctagtggctgtgtagggcagaaccgtctgcgtgctcttctccagacacccgccggcatgctgctgttcctcgtgacccttcgaagtctgttcaggggccaaggtagagcctgagtggcggctggtcagtggagagcgccgtgacttgtagggggctggggagggctttgggggggcctgcatgggcctctgtatgggcaggctcagggggcaagcccacttcttcctcctccacctcctgctcaccgtccccctcctcatcgtcacagcacagagcatggggtagagcaccctttggtcacttgaaccgcacccctctccccgtgtcccctggggttccggctggggcagctggctcttcaccgtggggccagcaccaaaggcctcctcactggaggagtctggggtctccactcgtggcccattggggatgggcgtgccaccattcatgaggcggtagtcagggccagcccctggccgagtcgactcgggaccatccacggagtccgagggggtagagacgtccaggaaggagcagaactcccagctgtctgagaggatatcggctgtcatgaagtccaggtggcccaggtcaaaggggccacccatgcccgccttgtcactgctagaggtgctgctcacagtggccgtggtccagtcgtccggctccagttcaaagtcgaagtccgaggttagcttatcgatctggctcaccaccgctacatccccagctcggcacagggatcggcacattctcaccagctgctgtggagctccgacgagatggtgactgtgaaagcacttgacaaactgaaggcactggacatgccttgtggtcagtgtggcctcaacccagatgtccagtgatttccagggcacagggggtctgagaaccaagggtctgagcccctctatcagccccaggaaatcctcagccatttggtgctgatcagcgatagggctctggttcacaggatgagtgccaggggctcctctggggagaggggccagctgcattccgccccacccttctttgctgtcagagtgtttcagaggctgcagggctctgggcatgtcggggctaggccctgtgctggagctgagcacacggatggatagcacttgattcttgcccttgaggaaccagccagccagcaggaaggggagagatttacggaactgatgctgacggtaggcaaaatgaatcaggagtgtgtagacgtctttttcttccccttcccctaaatctttacttctctcttgacctgactccgggactcccagccagacacccaccagtaactgctcgataaaacttgcccactgggtcattgaagcagggccttccat

SEQ ID NO: 26437 - DNA, 441 bp, Homo sapiens
  SIMILAR (237)..(410): 361254mologous to Lycopersicon esculentum extensin (class II),accession number X55687,Smith-Waterman Score=65.
attcgtacttcaggtcctgttgtcagcgtcagttttctgacacaggtcacagtatagctcaaaaatgtctgtggagccagcatgcaccttcggaaacaattgatgtactctgccccagaatatgcagccacagtggagtcaccagagtgagacgaaggggccctcaattatcttaaagaaatcctgtagtagcgcaggggctcctctgtgcctgcagaatgtttaaagtggggaatagaaccccttcctcctcggcagagtggccgagttcttttgcccccccaaaaaaagggccgctcccaaaagccacatcggagcctttgtttcctcatccaaaaaggagacactagcaagtgttccctcacaccgagaatgtcggccccctttaggagcctcaaaaaccgcccccagggattgagtgtttgccggcccacgcgtcct

SEQ ID NO: 26438 - DNA, 456 bp, Homo sapiens
  SIMILAR (281)..(349): 601254mologous to Variola virus D4L,accession number U18339,Smith-Waterman Score=73.
ccagtggtgacgggcccgcgctgctgagcgcaagggctctgaagttccagcttagccctgaggtttggtgatagcagccattgtgttctttctacctgtggagccagcatgcaccttcggaaacaattgatgtactctgccccagaatatgcagccacagtggagtcaccagagtgagacgaaggggacctcttgtatcttgaagaaatcctgtagaatagaacaaatcttaaatgtcttcttcaagcaaagaagccagtcccagagcaataaataaagtttatttattgctatatatatatatatagcaatatatatttatattatttatttgttatatatatatgtaagaatgtaggtatacatacatgtgtctgtgtgtacatgaatgaaaatgtatgtaaatcatgtaaatctcctaataaaggctggaaaatccaaaaaaaaaaaaaaaaa

SEQ ID NO: 26439 - DNA, 2237 bp, Homo sapiens
  SIMILAR (1214)..(1477): 351254mologous to Arabidopsis thaliana arabinogalactan- protein,accession number AF082302,Smith-Waterman Score=98.
atgggtatagaccaacctgaagagtcttccatatttggtgataagtttactgtgcttgactttcagattgatgtaagaagattccagaatgttaaggaagaggaatgccttagacatcatctcatcaagtcccccaatttgagaatgagaaactccagttcggagatttttccaaagacacaagaagctgccccggcagtcgctcgttccctgtgtgtggttgctgtggctcctaaagtgtcctgtcatcctccttctgaaagaacacttgctagtgtcgacatctggatgaggaaacagaggctccgatgtggcagttgggagcggtcctttgtcagaagcagcaaaggtactgatttgctgttggaagggtggaggcaattcgtggacaggggctctggtagcttagaggtggctgaggaactcaacagcctgtgcgaggaggaaggggtacgattccccacttcagacaagcagcagccacagaccagcccctgcgctactacagccccaaaggagtggagccagggtggctgcatgtggccatgcaggttgggcactgtgagcctcaggggcaccattcacgtggacagcagtggaaccccctggagttccaaaaaaggtggccctgccctgcactctcttgctttgttaggacttctagatacgaggcatccgactgctgccctggagggagggcaaaggatttcttcaagatacaagaggtccccttcgtctcactctggtgactccactgtggctgcatattctggggcagagtacatcaattgtttccgaaggtgcatgctggctccacagggactccaggatgatggagtggagcgtgtgggtgaggatgcaggggcaaaactgtgggagggagaggtggtggtggagcaggtggagcagcggcttcggttcttggcaggcctgcagtcgtggtctctccagcccagcttatcctcctgctccttgctagagacactaaggaagttcacgtctatgaagatgagggcaagtatagtccagatcctaagaagaatcatatggccttctttctgttccttcagtgacaggttccttgttgcttcaagacctacacaaattgggctgccaccaatttggtcattcgaagaaaaggcgggtctcaggaatatggatggctgtcctccctttccccttcagatgtcagccgcatctactcctgcttttggaaaaccccagggcaaacggacctgccaggcagccaaccaaccaccagcccccgtgaaaggctggaacccagctgcccaattcggttgctcctgtccaaagccagacaggtttcccaccgacgcccgctcggaaggcgagagcccccacgtggcccggcgcggcgcggcccccggggaccgcgagcaacaaaagcccggcccgcagcccctgctcctcgccttccttttcaattctcccctgatctcaggtggaattaggaggattaaagcagcaagctctgatgtggcacttggctctagacaagtggagaaggttctggctggtgatacaactcgaaaatctgagttgatagcgacaggggttaagtctccgcattgtgaggttctattgacttttcctgcaggcttgccctttatccttgtctgtattttagtttttaagaagccttcaaaaggttatattatgcagtgtgacaagtgctgtggagagcaaatgaaaggcaaggtttcagcacgagcaaagcttacgttacaaagagggagtgttttgaaatggccttatgacagagcaaagcactatgccagcatcaacaattacctctatgtggtcccagctgcttttatctctcttcgtgagacagacctctctccttccggagcatccaatttttctttgcctgtgacacctcattcttctgggtttctccatgactccttcttctgttcagagagctggtggactctagccagcttccttatcatgagtacaaatgagtctgtttccacgaggacccgcatcatcctctctgcgctgttggctttcattggagatgaccccacagacctgttaccattctgatgttggacctgaaatctagcaaaggtaataaatttgttctggtgcagtatcggagaggtgaccatctatctcaagccctcatttgcagaggaggatgtgggagccatgaggttaagagagaggacaaggacatggagcttatacaggggcaaagccagtattag

SEQ ID NO: 26440 - DNA, 681 bp, Homo sapiens
  SIMILAR (210)..(67): 871254mologous to Homo sapiens Human secreted protein, SEQ ID NO: 7102,accession number G03021,Smith-Waterman Score=221.
tcactgacttcgaatgaagccgtggaccctcgctgtgagtgttacaactcttaaggcggcgcgtaccttctgatgttcggatgtgttcggagtttcttccttttggtgggttcgtggtctcactggctcaggagtgaagctgcagacctttgtggtgagtgttacagctcttaaggcggcgcgtctggagttgttcgttcctcccagtgggttcgtggtctcgctggcttcaggagtgaagctgcagacggaggccgcaggtggagctgcctgccagtcccgcgccgtgcgcctgcactcctcagcccttgggtggttgatgggactgggcgccgtggaaccaggggtggcgctcgttggggaggctcgggtgcacaggagcccacggaggaggggaggctcaggcatggcgggctgcaggtcccgagccctgcccctcggggaggcagctaaggcacggtgagaaatcgagtgcagcgccagtgggccggcactgctgggggacccagtacaccctccgcagctgctggcccaggtactaagccgctcattgcccggggccggcagggccggccagcccctccaagtgtggggcccaccaagcccacgcccacctggaagtccagctgtcccgcaagcgccgcgcgcagccccggttcccgctcgcgcctctccctccat

SEQ ID NO: 26441 - DNA, 387 bp, Homo sapiens
  SIMILAR (4)..(135): 811254mologous to Homo sapiens Human secreted protein, SEQ ID NO: 7102,accession number G03021,Smith-Waterman Score=184.
atgaacaactccagacgcgctgccttaagagctgtaacgctcaccgcaaaggtctgcagcttcactcctgatctagcgagaccacgaacccaccagaaggaagaaagtccgaacacatccaaacgtcagaaggaacaaactccggacacgccgcctttaagaactgtaacactcactgcgagggtccgcagcttcattcttgaaggaggggagaccttggcggagcggcggaggcgcccagcggaggtgaaagtattggcggaaaggaaaatacagcggaaaaatgcagagctggagtcgtgtgtactgctccttggccaaggtgagggccgagtaggtgaggtcgtgttgagccagaggcacggaaggtcccgctcagtgggtccg

SEQ ID NO: 26442 - DNA, 2958 bp, Homo sapiens; identical to SEQ ID NO: 24000
  SIMILAR (1)..(888): 1001254mologous to Cloning vector pZC320 SopA,accession number U26464,Smith-Waterman Score=1548.

SEQ ID NO: 26443 - DNA, 790 bp, Homo sapiens; identical to SEQ ID NO: 19472
  SIMILAR (313)..(402): 701254mologous to Homo sapiens Human secreted protein, SEQ ID NO: 7131,accession number G03050,Smith-Waterman Score=97.

SEQ ID NO: 26444 - DNA, 777 bp, Homo sapiens
  SIMILAR (328)..(477): 921254mologous to Homo sapiens Human secreted protein, SEQ ID NO: 7141,accession number G03060,Smith-Waterman Score=252.
atggtatccagtataattgattcattagaaatactgtttaacaaaggagagacgcattctgctgttgttgattttgaagcattaaatgttatcgtaaggctaattgaacaagccccaattcaaatgggagaagaggcagtgaggtgggcaaaactggtcatacctttagtggttcattcagcacaaaaggtacatttgcggggagcaactgctctggagatgggaatgccattattgcttcagaaacagcaagaaatagcatctattacggagcagcttatgactactaaggtctgcagcttcactcctgaagccagtgagaccacgaacccaccgggaggaacgaacaactccagatgcgccgccttaagagctgtaacgctcaccgcaaaggtctgcagcttcactcctgagccagtgagaccacgaacccaccagaaggaagaaactccaaacacatccgaacatcagaaggaacaaactcaggacatgccgcctttaagagctgtaacactcactgcgagggtccgcagcttcgttcttgaagtcactaatttacaacatggcctcaaaaccaagccaccggaaggaggtagttggggtaaggaggttagaaaagaggaagatgaaaagagaggagaggaagggagaagaagaaagaagaagaaaaaagaagaagaggaagaagaggaggaagaagaagaaaaaggaggaggaggaggggaagggggaggggaaggggaaggggaaggagaaggggaagcagaagattcctga

SEQ ID NO: 26445 - DNA, 662 bp, Homo sapiens
  SIMILAR (397)..(320): 841254mologous to Homo sapiens Human secreted protein, SEQ ID NO: 7102,accession number G03021,Smith-Waterman Score=119.
tttcagtctgaactcccacctgtctttccacctcagcattcaggatagttgttgatataaggaaagtacttggatacttgtagtcaaggacatacctcatgctgagaggggggccatggtggtgctgaaggctgccagatgcatgaagccaccagaatgcgtcagtgggatcagcgggaggtaaaagttctatttttgtgaatgtgaaatcagtgtgtccggaattggtgggttcttcgtctcactgacttcaagaatgaagctgcggaccctcccggtgagtgttaacagttcttaaaggtggcgtgtctggagtttgttccttctgatgttcggatatgttcgcagtttcttccttctggtgggttcgtggtcttgctggctcaggattgaagctgcgggaccttcgcggtgagtgttacagctcttaaggtggcgcatctggagttgttcgttcctcccggtgggttcgtagtctggctggcttcaggagtgaagctgcagaccttcgcgtgcagcgctgggctgaaggactcctcaagtgccgccaaagtgggagcccaggcagaggaggcgccgagagcgagcgagggctgtgaggactgccagcacgctgtcacctctcaagctgacatcggcagctgtgaggacccacctgttag

SEQ ID NO: 26446 - DNA, 1020 bp, Homo sapiens
  SIMILAR (498)..(142): 291254mologous to Mus musculus Pro-Pol-dUTPase polyprotein,accession number Y12713,Smith-Waterman Score=112.
ctagccatgtccagttcttaacagaagcaggatacgcgttccagggcaaactctccgcagctgctgctggaaggtggagcagatccaacagttggagacattggtcacctcagcgtaggtgtgggcccagtccacaatgctgttggagcatgtcaaccctgctattgggttagtcatctgcacagcgactgcaacccttcctgtcaagctctcacaggcctgaacagcagcatatacagcagctaaatgcttctctatcagtgaataccggagctcagctcccttccacagctggaaccaaaaacctattggcgttctaaagtgctccgtgtgctgctgtaggccccagctgaaaccatctgtggttacaagtacatcaacttcaaatgggtgcccctgatcaattacttgtaagtctggtgcttgctgaatggcctgcttggcagccagaaagcctgtttcagcctcatcatcccaatcccacgtagctcccaaccgcacgctgccaactcttgccacaagaggggcattgctgcttcttaatctggtcaggagagctctgtcaaaggtgagcacagcggttttgtcacagccagtggagatgctcaagctcgagagcagtcttggaagagaaccctgcgccgcttgacaccacacccctttcagggcggagcaaatcctctgggcgaggatgcctggtgtctctcgggctctgatagccaccatccacgaggaggagctctcatctgtgacagccttcctctccctgagcatccacctttctacaggtgaggatgacagcccccagtggcctctaaccccaaaggccagcataaaagcttcgatccagtcctctgctactgaccaagaatcctttcccagaggctgctgctttctaaagtaggggcccccctgtgtctttgaaggatacagcctctctccaagctgctttcctgggctggccttgagggtctgcagcttttccaggtgcacggtgcaagctgtcagtggatctaccat

SEQ ID NO: 26447 - DNA, 1633 bp, Homo sapiens
  SIMILAR (231)..(659): 281254mologous to Homo sapiens pancreatic ribonuclease,accession number X79235,Smith-Waterman Score=186.
gacgtgggcgttccagggcaaactctccgcagctgctgctggaaggtggagcagatccaacagttggagacattggtcacctcagcgtaggtgtgggcccagtccacaatgctgttggagcatgtcaacctgatcaaacaactcccaagcatttggcagacaatccaggcccttggaccttggatgcattgacataccaaccgcacgctgccaactcttgccacaagaggggcattgctgcttcttaatctctgatgataataatggtgataattttcttggtgcttctgttctgggaaaatgaggtgaatgatgaagcagtgatgtcaactttagaacacttgcatgtggactaccctcagaatgacgttcccgttcctgcaaggtactgcaaccacatgatcatacaaagagttatcagggaacctgaccacacttgtaaaaaggagcatgtcttcatccatgagaggcctcgaaaaatcaatggtatttgcatttctcccaagaaggttgcttgccaaaacctttcggccattttctgctttcagagtgagacaaagttcaaaatgacagtctgtcagctcattgaaggcacaagataccctgcctgcaggtaccactattcccccacagaggggtttgttcttgtcacttgtgatgacttgaggccagatagtttccttggctatgttaaataactcaagatcagctcccgagtctgagatctcttctctcaatggcattggagctggctgtgcctgaagcagacctgaaccgtggacatgtggcaactgctcttgagcggaaggggaagccactgaagagattacactacatctgagatggagacctttcctctgctgctgttcaccctgggcctggatcttgcagaagcatcagaaagcacaatgaagataattatagaagaatttacagactaagagatgccctatgacatggcataaagtggccaagaaaaacagaccattgagatattaatgaacccgatcctgttagttaaaaataccagcctcagcatgtccaaggatgatatgtcttccacattactgaccttcagaagtttacattataatgaccccacgggaaacagtttgggtaatgacaaagagtgttgcaatgacatgacagtctggagaaaagtttcctaatcaaacggatcgcgcaagtggagcaataacttcattcgcagcttcaccaaagtgatgcgcaggggccacagggcccccagctgcgagttttgacagaaaccctggcataagctgctggggggagccctacaaatggaaaaataccgtggggccctttcaataaaaggcaaacaattccccaggtgccaataccatagtgttacctcattagagaagatattgacagtgctgacaggtcattctctgatgagctggttagtttgtggctctaagttgtaaatcccacagagctttaggactagggtcttactaaagaaggacctcttcttgttcattcttgtttaaacctttccttaatatctactctttagcactatagtgaactcctgattatttattctaactggaggagtgaaaaatccaaaattgtggataattcaattaaaagttatgactgataaaaa

SEQ ID NO: 26448 - DNA, 483 bp, Homo sapiens
  SIMILAR (5)..(430): 971254mologous to Homo sapiens Human foetal brain secreted protein fh3_6,accession number W82002,Smith-Waterman Score=695.
tttcgtggccagaaaggctctcaagcttgcttcgaggaccagcatggctcttgctgcctctggcatctacgtctacagtaacaagtacttggaccctaatgactttggcgctgtcagggtgggcagagcagttgctacgacggctgtcatcagttacgactacctcacttccctgaagagtgtcccttatggctcagaggagtacttgcagctgagatctaaggtgcaccttcgctctgccaggcgtctctgtgagctctgctgtgccaaccggggcaccttcatcaaggtgggccagcacctgggggctctggactacctgttgccagaggagtacaccagcacgctgaaggtactgcacagccaggctccacagagcagcatgcaagagatccgccaggtcatccgagaagatctgggcaaggagatccatgatttgttccagagcttcgatgacacccctctggggacggcctccctggc

SEQ ID NO: 26449 - DNA, 1044 bp, Homo sapiens
  SIMILAR (343)..(867): 1001254mologous to Cloning vector pSacBII SacB,accession number U09128,Smith-Waterman Score=937.
atggccccaagatggctcatgcacatggctggcagttgctatgggctgttggctggcaacacaacaggggtcattgaccagggtgcctgttgcaacttcgggcattcaaggctgtcaggcagctccctcacctatgtgggctgcctggacacatgggtgggcttcctgctacttcagagctgccctccagttgcccctaccacctggttctacagggaatggttctatgagtacctctactgcttacagtgccagctcacctggctttatgacacaaaagcgcagggcgagaggtcagatcacaaggagaatgtgttctatgtacagcatcagaagtatgttggaggagcgactcaagccttcgcgaaagaaaataaccaaaaagcatacaaagaaacgtacggcgtctctcatattacacgccatgatatgctgcagatccctaaacagcagcaaaacgaaaaataccaagtgcctcaattcgatcaatcaacgattaaaaatattgagtctgcaaaaggacttgatgtgtgggacagctggccgctgcaaaacgctgacggaacagtagctgaatacaacggctatcacgttgtgtttgctcttgcgggaagcccgaaagacgctgatgacacatcaatctacatgttttatcaaaaggtcggcgacaactcaatcgacagctggaaaaacgcgggccgtgtctttaaagacagcgataagttcgacgccaacgatccgatcctgaaagatcagacgcaagaatggtccggttctgcaacctttacatctgacggaaaaatccgtttattctacactgactattccggtaaacattacggcaaacaaagcctgacaacagcgcagcacctacaacagtacctgacatacaaaagatccttcagcattgtggtggacgctataatagcgttgcctccgctgaagagagctgcctggcccaagtcacggcatcctccccaggttggactgatggaggtccagcatctgtttccaattccgaacaactttgaggagcacgtctag

SEQ ID NO: 26450 - DNA, 736 bp, Homo sapiens
  SIMILAR (61)..(141): 1001254mologous to Homo sapiens Human foetal brain secreted protein fh3_6 (alternative sequence),accession number W82003,Smith- Waterman Score=137.
  misc_feature (1)...(736): n = a,t,c or g
cattcgacngcccgcaggtactcggtctcggatatcgccgccgcgacccacgcgtccgatgagctcatcctgcgtgtgaaggggttgaagctggctgaccgggtcttggccctaatatgctggctgttccctgctccactctgagtggaattgctctccctgccccattctggtgtctttccactcctcagcccctcatcttgcctccacccagctgctccatttttgccacatcgtggcccgcagccccagagtcactgtccatgtcaccatccttctcctcctttggaaaccctctccgcaaaactgtggcccttgtctcagggccccacaaggctgaactgtgggcatagctctctcttcttctcccaagaaggactcagcagcctacattccccattccctggtatgtgcccattgggttggatgtccccgactacttccgttaacccttcccattgtcaagatgtgccacggggtgccactgggggcacactggaacttgtagggagtgtgattttgttggaggtgcacatggtctctgaatttgacagagaacaccttccctttccttgccatgtcaccctccagaggaagtcacacctcagcagaggtggtttggcatctggggccaactccattacagctatgagctcactgctgtcagtgacgtttggtgttttctgtactgtgtttcaataaaaactccttcaaggttgcaaaaaaaaaaaaaaaa

SEQ ID NO: 26451 - DNA, 2577 bp, Homo sapiens
  SIMILAR (1570)..(1683): 581254mologous to Homo sapiens Human foetal brain secreted protein fh3_6 (alternative sequence),accession number W82003,Smith- Waterman Score=99.
ggctcttgctgcctctggcatctacttctacagtaacaagtacttggaccctaatgactttggcgctgtcagggtgggcagagcagttgctacggtaggtttttcccttttgggggtagcagagaagctgcaggatgtcccttatggctcagaggagtacttgcagctgagatctaaggtaagtaacccatgggacccatctgagccaggccaggactgtctacggagagcttgcaggctcggacacaggggcaaggcctctgctttacggaatctgcagaggaggcaggcgatgggtgtcaaaaagacagttgcctgtcacgtgtcacatgtaagtcatctgaaaggcagtgacactgtagctcctagatacttagaggaggaaggagctgaaaatcaatgctttgcagataagcagatcccaaacagagaggagagaggaaggggtgagctgagcaaactctgtttcttctcctaaattccttaatatgtgggctgcctggacacatgggtgggcttcctgctacttcagagctgccctccagttgcccctaccacctggttctacagggtaagtggagcaggcacaacacccagctccacagagaaggttgccaaccggggcaccttcatcaaggtgggccagcacctgggggctctggactacctgttgccagaggagtacaccagcacgctgaaggtactgcacagccaggctccacagagcagcatgcaagagatccgccaggtcatccgagaagatctgggcaaggaggtacccacctttgcaggggggatgggccttggttgggatgccccaggtacgcagcatccattcaaaggtgtcccacttctcagtgatcgtatgctgcaggtgctctgtgttcttgatgcaccatctgactggagtttcaatgagaatgaaggagagagaaggtgcaggggtaccgttgtgcaacgggtagaataattcatatccagttgttttgtaagagcctgtggcaccttgaatcctggtgtcaccatgttctatgtcatcctgggtaagttttgtgattttgctgagccttggtttcctcatgttatgcaggaacaactgagggttgtcggaaaaggcctttggggttttgtgagggtgagcttgtcaggttttagaattcacggccctcatcagaagacggcctccctggcccaggtccacaaggcagtgctgcatgatgggcggacggtggccgtgaaggtccagcacccaaaggtgcgggctcagagctcgaaggacattctcctgatggaggtgagagccctccctttctccttcctgtgtcctcagtctacgtttatgtggcttgtggatgaagccaagaagaacctgcctttggagctggatttcctcaatgaagggaggaatgctgagaaggtgtcccagatgctcaggcattttgacttcttgaaggtaggtgggacgatgcaatgcagggtatggtggtctggtggcctgatggagtttgtggatggcgggcaggtcaatgacagagactacatggagaggaacaagatcgacgtcaatgaggtgaggtcaagagctcagggctgctgtgccggggaacgtggcgtcaatggcttcgtgcactgcgatccccaccccggcaatgtactggtgcggaagcaccccggcacgggaaaggcggagattgtcctgttggaccatgggctttaccaggtagaagaggcctttgttacccagccctggggcctctgggggcagtctctgatctggactgacatgaagagagtgaaggagtacagccagcgactgggagccggggatctctaccccttgtttgcctgcatgctgacggcgcgatcgtgggactcggtcaacagaggcatcagccaagctcccgtcactgccactgaggtagggggcccctccaggccctgcctcttcctaaatgcagagatcagccatctcctcaaccacgtgccgcgccagatgctgctcatcttgaagaccaacgacctgctgcgtggcattgaggccgccctgggcacccgcgccagcgccagctcctttctcaacatgtcacgttgctgcatcagagcgctagctgagtgagtgtgggctcctccctctcctcccctcctagccccctagatctctttcagcgaggccttcaacttatggcagatcaacctccatgagctcatcctgcgtgtgaaggggttgaagctggctgaccgggtcttggccctaatatgctggctgttccctgctccactctgcactgtccatgtcaccatccttctcctcctttggaatcctctccgcacactgtggcccttgtctcagggcccacaagctgaactgtggcatagctctctcttcttctccaagaagactcagcagcctacattcccattcctggtatgtgccattgggttggatgtccccactacttccgttaagagcctctcagatatgtaagtgtagatgtcctggcttatgatacagtgctcataagcctgtgggcattaggcagcacctctttgagattaggagaggctggctactcccaa

SEQ ID NO: 26452 - DNA, 1383 bp, Homo sapiens
  SIMILAR (501)..(584): 281254mologous to Rattus norvegicus mitochondrial capsule selenoprotein,accession number X87883,Smith-Waterman Score=51.
  misc_feature (1)...(1383): n = a,t,c or g
atgctgtgctccatggcgaactcgggctgcctcctgctgtccaactccggcagcatgctcccgcactccgtgccctgcccgcccgccttcctctacctccaacagaggtggatgtcacaagctgagtttcacagaggggacaccgaggccagcagctatgtgttccgtgagcaggaaagcccctcaccccctccccacgatctgggacacctcagacttcctggacgcgtctgccacattcccagtttgaatgcggttggaacacagacgtgtgaaagtctgcagttcggaaaaattttagacgtggagatcatttttaacgagcggggctccaaggtgggtgccgcacggagctgccgccttacagcgccggctgtaggtcccgccaggctaacgtgtgaaatgcgcccaggccgaccatcctcaggcttcccctgcgccgtgaggacagtgtgcagcttggcagcagcgctcccaggacaaggagtgagctcacagtctctggttgcagctgtgcttggccgcgccagccgagccttcatcgacaatactcgtgctttccgcagagcagacctttctgcccaccctgngaagatccccgtatgggacaagaactatatgcggacacctgtgcaggacactggggataccgaggtggcccatccctctgcagaggtgctcactgctcgctgcctagaggagaccaggactgagatcaccggacgctggagaaggtcatggaggatgactctctcctctgggtccctggatgaaagatctgcagaccatgaccctgaaccctctgccagacctgagagaaccccacctgaagaaaggaaggtcaagggccgtctgtccatcctctgggctctgggtgcttcccacctggacacgctttctgggaggctctggaggctaatacctgggtgccctgtgttcgactctaaagaaccccagtttcagcagagctgctgggactggctccaggtggacgctggcgtgcagttaacagggataggggccgtgtcgctgctgccagcagcctgggagagccctgctactcatcccctgcggatgcctccttcccacgctcagactccggggggctggacagacagggaggcagctgcagataccccaaggagctcttcgggagtcatccccaacgtgcacgatgtacagaggggtccctgcaggtactctaaagccagagaccttggtgcatggccctgtttcagcagaggtgctattgcaaatgcctcatgccagagtgaggctatgatcacagtgaagaaacctctggtggtgctttgccacctgagcccacctgaactttccagaacctcagcagtggagggtagcaccccagaccccgagacctga

SEQ ID NO: 26453 - DNA, 962 bp, Homo sapiens
  SIMILAR (689)..(961): 791254mologous to Homo sapiens dJ913G4.1 (PLCB1 (1- Phosphatidylinositol-4,5-bisphosphate Phosphodiesterase Beta 1, EC 3.1.4.11, Pospholipase C Beta 1)),accession number AL049632,Smith- Waterman Score=341.
cggacgcgtgggttaatttcataataaccaccttctttgtcttattgcattcaggagttaaggagaagaatagagatgtttcattgcaatacacaatttatgggatgattgaaggaaatagagaaccatgacacataaaaatgtgtgataggatcacagaaagagcacttaactgcaggctatagtcttgagccagaaattgtctctccactacctctgggcaagttgcttcatctctctaggccatttgtggaatgggagccttaaactcctacaattttctagtaagaataaaagcaactttgttttgaaatcattctaactcaacagaagttgaagttatgctatcacgttggaatctctagttatagactaattattttcaatatttattacccaggaccccaaattacgtgaacttttggatgtggggaacatcgggcgcctggagcagcgcatgatcacagtggtgctaaaagcatgtgtctaatgactgtgcagtatttaagctaatgcaagtgttatttacatttttcaggaatggacaaatgatcatctgttagtgctgtgatccatgtgccatttaaacctctctcctttgttgtgttcacttcacagcatatatcgcaacagggagggaggaagctggggaaggaaaaagaccatttgctgactccgttgttttatttcccagaatgattcaatacctcaagaagatttcactccagaaatgcaaatattagaatgaaacttagtttaaaaaattcttattgcttggtttttcattgtttttagtggtgcaaaaagcaaaccatatcttaccgttgatcagatgatggattttatcaaccttaagcagcgagatcctcggcttaatgaaatactttatccacctctaaaacaagagcaagtccaagtattgattgagaagtatgaacccaacaacagcctcgccagaaaag

SEQ ID NO: 26454 - DNA, 1104 bp, Homo sapiens
  SIMILAR (498)..(373): 851254mologous to Homo sapiens Human secreted protein, SEQ ID NO: 7263,accession number G03182,Smith-Waterman Score=191.
atggatgcaaaaaaaagaaaactgtacaagtatgcctctacagattcccctgcttttgccattactttcataattatgccatatatggaaaatcaggcagctaaattagcattcgagaggctctcgctaaatgaattagtgttttcttcagaagccttgacacattcagaaacatttctacctcaaccagacaaccggcatcaaaatatgtcatcaaccatccatactgctcccatcgacactgctcttggtggaaatccagcctttctgtatttatttctccaagactttcagcccacgcaggacaactcgctggcgtcggtcacaccttccgcaggagtttccgcgcgcctggcacccccgcccacccccgggccatttaccgatgtggttgtcctcgatgtgctcgatgaggtcggccagggtggggaagtggagtccgcagcccccgaatcggcaggtattggagaagaaggaggcggcggcgatgcctgtcatggtgctacatcgagagcccccctgcgcgcggacccaggcctcacctgcgagccctgccaccaactttatctcgctaggcctgccctttacggcttgccatccgtgccatctgtttggagcctccttggttatgtatatgacgttcttaatacacccacatcgattaattacacctacctccctgcgaggagaactcagggagttaccctggtccctctcagggacatttttttgtactcagccacctgtctaggtgtgacacattcacaggggacccaggaaagccactgcagaaaggacagtgcattggttaaggctagaaggagcggaaacaacggcaagggacatagtgactcttcatttaaaaaggaagcgatttcatcctgtgagcatttaaagcataatgttgaccagcatgtccagtgccctcgagatggggcagctgccggaaggtgtgaatccactggtctaatggagccaactgaagacactgaggatcctgcttcatacagctgtctgtcctccacatacaggaattggtttattttggcatacactgataatcaaaaccgtgcacttcctgtgtcctgtgtggacatctgttaa

SEQ ID NO: 26455 - DNA, 457 bp, Homo sapiens
  SIMILAR (214)..(456): 871254mologous to Homo sapiens protocadherin Fat 2,accession number AF231022,Smith-Waterman Score=393.
  misc_feature (1)...(457): n = a,t,c or g
nttgagatcgatnacactaggccangtggtggaattccggacagcaccgccaggctcagcatcctaaccccgcggcaccacctgcagaggagctgctcctgcaatggtactgctacaaggttcagtggtcagagctatgtgcggtacagggccccagcggctcggaactggcacatccatttctatctgaaaacactccagccacaggccattcttctattcaccaatgaaacagcgtccgtctccctgaagggctttgaaggctgcctggatgctgtcgtggtcaacgaagaggctctagatctgctggcccctggcaagacggtggcaggcttgctggagacacaagccctcacccagtgctgcctccacagtgactactgcagccagaacacatgcctcaatggtgggaagtgctcatggacccacggggcaggctatgtctgcaaatgtcccc

SEQ ID NO: 26456 - DNA, 1722 bp, Homo sapiens
  SIMILAR (1)..(1719): 1001254mologous to Homo sapiens MEGF1,accession number AB011535,Smith-Waterman Score=3132.
aggttcagtggtcagagctatgtgcggtacagggccccagcggctcggaactggcacatccatttctatctgaaaacactccagccacaggccattcttctattcaccaatgaaacagcgtccgtctccctgaagctggccagtggagtgccccagctggaataccactgtctgggtggtttctatggaaacctttcctcccagcgccatgtgaatgaccacgagtggcactccatcctggtggaggagatggacgcttccattcgcctgatggttgacagcatgggcaacacctcccttgtggtcccagagaactgccgtggtctgaggcccgaaaggcacctcttgctgggcggcctcattctgttgcattcttcctcgaatgtctcccagggctttgaaggctgcctggatgctgtcgtggtcaacgaagaggctctagatctgctggcccctggcaagacggtggcaggcttgctggagacacaagccctcacccagtgctgcctccacagtgactactgcagccagaacacatgcctcaatggtgggaagtgctcatggacccacggggcaggctatgtctgcaaatgtcccccacagttctctgggaagcactgtgaacaaggaagggagaactgtacttttgcaccctgcctggaaggtggaacttgcatcctctcccccaaaggagcttcctgtaactgccctcatccttacacaggagacaggtgtgaaatggaggcgaggggttgttcagaaggacactgcctagtcactcccgagatccaaaggggggactgggggcagcaggagttactgatcatcacagtggccgtggcgttcattatcataagcactgtcgggcttctcttctactgccgccgttgcaagtctcacaagcctgtggccatggaggacccagacctcctggccaggagtgttggtgttgacacccaagccatgcctgccatcgagctcaacccattgagtgccagctcctgcaacaacctcaaccaactggaacccagcaaggcctctgttccaaatgaactcgtcacatttggacccaattctaagcaacggccagtggtctgcagtgtgccccccagactcccgccagctgcggtcccttcccactctgacaatgggcctgtcattaagagaacctggtccagtgaggagatggtgtaccctggcggagccatggtctggccccctacttactccaggaacgaacgctgggaatacccccactccgaagtgactcagggccctctgccgccctcggctcaccgccactcaaccccagtcgtgatgccagagcctaatggcctctatgggggcttccccttccccctggagatggaaaacaagcgggcacctctcccaccccgttacagcaaccagaacctggaagatctgatgccctctcggccccctagtccccgggagcgcctggttgccccctgtctcaatgagtacacggccatcagctactaccactcgcagttccggcagggagggggagggccctgcctggcagacgggggctacaagggggtgggtatgcgcctcagccgagctgggccctcttatgctgtctgtgaggtggagggggcacctcttgcaggccagggccagccccgggtgccccccaactatgagggctctgacatggtggagagtgattatggcagctgtgaggaggtcatgttctag

SEQ ID NO: 26457 - DNA, 739 bp, Homo sapiens
  SIMILAR (141)..(737): 411254mologous to Drosophila melanogaster CG13384 gene product,accession number AE003621,Smith-Waterman Score=383.
  misc_feature (1)...(739): n = a,t,c or g
tgcncgtntcgttagcccgtcccggtccggaattcccgggtcgacccacgcgtccggacaactttaaacaggtgatagaagcggccaatgggaccaccaataactgccacaacaatgagacggtgattctgacgcctaccatggactcgcgactctacatgctctccttcctgcccttcctggtgctgctggttttcatcaggaacctccgagccctgtccatcttctccctgttggccaacatcaccatgctggtcagcttggtcatgatctaccagttcattgttcagaggatcccagaccccagccacctccccttggtggccccttggaagacctaccctctcttctttggcacagcgattttttcatttgaaggcattggaatggttctgcccctggaaaacaaaatgaaggatcctcggaagttcccactcatcctgtacctgggcatggtcatcgtcaccatcctctacatcagcctggggtgtctggggtacctgcaatttggagctaatatccaaggcagcataaccctcaacctgcccaactgctggttgtaccagtcagttaagctgctgtactccatcgggatctttttcacctacgcactccagttctacgtcccggctgagatcatcatccccttctttgtgtcccgagcgcccgagcactgtgagttagtggtggacctgtttgtgcgcacagtgctggtctgcctgacatgcatcttggccat

SEQ ID NO: 26458 - DNA, 551 bp, Homo sapiens
  SIMILAR (366)..(1): 471254mologous to Drosophila melanogaster CG13384 gene product,accession number AE003621,Smith-Waterman Score=324.
ttctatcacctgtttaaagttgtcagccagaaacacaaaatagacacagcagaatcccagctgggtgacaatcaggaagaagtccacaacacgtcttccccagtgtgcgtggttccggagccaggagcaggggctggattctagtccatccatcacagtatcaccataatccacaaaggatttattcagcctgcggcagaagtggtgagcacatttcaccaggatacccatgcagtgcacggccacgatgcctatgatcagcaggctgatgggacccatcacgatgcctgcatttttcaccgccagagggagtcccaggagtcctgtgccaatgttgccttttaacaggtggatcaaggtctggaaccatctggagcatctgccacgccgggaggaaggcgaggtgggtcctgcccaaggcggcgagcgccgccagccggaactcgtcagtggaggaactcactgctcgggttctggccccagctccggctccggctctggcttcagcacagcccacccttcccgggttcagtatcagcccctcgacgaaa

SEQ ID NO: 26459 - DNA, 1771 bp, Homo sapiens
  SIMILAR (587)..(811): 401254mologous to Mus musculus alpha-1 type 1 collagen,accession number U38544,Smith-Waterman Score=118.
caccaatgaaacagcgtccgtctccctgaaggtaaggcactgccagcctgagagatttcatgtgggtgtcccaggctggggaggtagggggtgaggcatgaggaatgtcaggaagcccatttctgccaaagaaatccctgcacagttttcagggattctgggtgtgactgttgggccacatgattatcctgtcctggatggccacagccacccaacctggagatatacgtccaaggacggtcacaagtggggctgcttactctcttgctgggcggcctcattctgttgcattcttcctcaatgtctcccagggctttgaaggctgcctggatgctgtcgtggtcaacgagaggctctagatctgctggcccctgtcccctgatgaggatgatgacagtcaccacctcagggtcatcgtgaggatcaaatgagccaacacaggaagatccttgaacagtgactagcactaagttagtgtctatggttgttatcctgtttatactgttctttaggtgactgttgtctctggtgggctgtaagtgttctttgtcaagtgtctgctccacgtcaggcactgtgctttgcaccgggggaaaatggtgatggagggcaacaaggactccgaggagcaccaccaggcccgggccccagaggtcccgctcctcagcctggcccagggtatccaggtgccaggcagaggggttccccacagcaaccctgactttcctcagagcctggaccatacctgaggctctccaggagcggtgggagatgagggccagggcgctgctgctcacggagcccaccagggagatgaccggtccaggcgggggatgaggatggccaagatgctggctctcacatctgaactcagccacgggtgagcgaggaaggaggaactgacgaagaccaatggtcactgccgcaggaggtgccatcggcttccgtgccataccagccattgtcacactgccagacagtgccagcttcactacaaccacattgtcttttctcatgaaagcctgcagactgggtgccagtgctcgggcgctcggacacaaagaaggggatgatgatctcagccgggacgtagaactggagtcgtaggtgaaaaagatcccgatggagtacagcagcttaactgactggtaaacccatcggtgatcagcaccaatggcttcagcagaaggctctacatgaattccccaaaagaatgcagtccagggcagccagtgagggctggcagtggcaggggatgggggcagcagttgggcaggttgagggttatgctgcctggatattagctccaaattgcaggtaccccagacaccccaggctgatgtaaggatggtgacgatgaccatgcccaggtacaggatgagtgggaacttccaggatccttcattttgttttccaggggcagaaccttttaacaaatccaagttctctaaaggaagaaagtctaatacctgaacaatgaactggtagatcatgaccaagctgaccagcatgtgatgttggccaacagggagaagatggacagggctcggaggttcctgagaaaaccagcagcaccaggaagggcaggaaggagagcatgtagagtcgcagtccatggtaggcgtcagaatcaccgtctcattgttgtggcagttattgtggtcccattggccgcttctatcacctgcggcagaagtggtgacacatttcaccaggatacccatgcagtgcacggccacgatgcctatgatagcaggctgatgggacccat

SEQ ID NO: 26460 - DNA, 364 bp, Homo sapiens
  SIMILAR (18)..(308): 821254mologous to Homo sapiens Similar to PTD015 protein,accession number BC002752,Smith-Waterman Score=395.
  misc_feature (1)...(364): n = a,t,c or g
cgatagacgcccgtatcacgcgtccggagcactgcgccgtttgggaacgcaactttgaggagacagtgcggtggcattctcctggtgtgcagcctgcatatgtgaaggaagttgttgagaagggtgtacagactcttgtgattggccgagggatgagtgaggccttgaaggtgccttcatcaactgtggagtacctcaagaaacatggcattgatgtgcgggtcctccagacagagcaggcagtgaaggagtataatgccttggttgcccaaggggtcagggtgggaggtgtcttccattccacctgctgatggagccttaagaggagaataaatcactaagtgcctnnnnnnnnnnnnnnnng

SEQ ID NO: 26461 - DNA, 519 bp, Homo sapiens
  SIMILAR (430)..(329): 941254mologous to Homo sapiens Similar to PTD015 protein,accession number BC002752,Smith-Waterman Score=161.
  misc_feature (1)...(519): n = a,t,c or g
aaatgtgtccaataaaagaaaaattagaagtgctataaaatattctatgaggatataaagtattattaaaatataaaggaccaaatagtgatccttgtagaacttgagggattctgagaaatagttgaaatgacactgtctcagggttaggtagactggagagcccaacgctgatgaggcagaggaatgtgtgcagccactgctatcctgggtcagcaaaatgagggtacatgatatataaagatgccctcccaagaaggacaagtctgtaagacaaaggcccaagagatccccacctgtcctcaggaatgctgtgcataccaacacctaccttcaaggcctcactcatccctcggccaatcacaaaagtctgtacacccttctcaacaacttccttcacatctgcaggctgcacaccaggagaatgctggatgtggaaagagaaagttagacagatggagtctcactctctcacccagagctcacattctagtaaaatgaaacnagaggccactgact

SEQ ID NO: 26462 - DNA, 603 bp, Homo sapiens
  SIMILAR (280)..(423): 771254mologous to Homo sapiens ribosomal protein L21,accession number X89401,Smith-Waterman Score=176.
atgggaagaaaacacatattcatggattggaagatttaatattgataagatgccaatacctttaagttgaagtacagattccacagattcactctccatcaaaattccagctggcttctttgcagaaattgacaagttgatcctaatactgtcctcaggaatgctgtgcataccaacacctaccttcaaggcctcactcatccctcggccaatcacaagagtctgtacacccttctcaacaacttccttcacatctgcaggctgcacaccaggagaatgcatggcaaaactggaagagtctacggtattacccaacgtgctgttggcattgttgtaaacaaataagttacaggccagattcttgccaagagaattgtgcctattgagcacattaagcacactaagagccaatagagcttcctgtgagagttgaggccctctcccgtggctagctagaattgcagaaatccacggtgggaacatggaccgctgagctctcacttttccttttaacacattggggagtttctcctggctcccatttgatgggggttgagcaggttgccttctttctccttccttgccgtagatgtttcctgtcat

SEQ ID NO: 26463 - DNA, 543 bp, Homo sapiens
  SIMILAR (113)..(259): 591254mologous to Homo sapiens PTD015,accession number AF092136,Smith-Waterman Score=116.
  misc_feature (1)...(543): n = a,t,c or g
acatgcgccgtttgggaacgcaactttgaggagacagtgcggtggttctggaggctgggaagtccaagaccagttggctcgcatctgacttcagtgaagttccttatgactttcccctgaaaattgccttcccttatccatgggggccaaatgaaagtaaaaggctcctaatacaaccctataaggactgccnaagtatggccagggggcaagtcggacttgggattggagagaaacaggaactgagcattctcctgggtgtgcagcctgcagatgtgaaggaagttgttgagaagggtgtacagactcttgtgattgggcccgaggggatgaagtgaaggccttgaangggtgccttccatcaactgtggagtacctcaaggaaacatggcattgatgtgcagggtcctccagacagagcaggcagtgaaggagtataatgccttggttgcccaaggggtcagggtgggaggtgtcttccattccacctgctgatggtagccttaagaggagaataaatcactaagtgcctaaaaaaaaaaa

SEQ ID NO: 26464 - DNA, 927 bp, Homo sapiens
  SIMILAR (665)..(787): 391254mologous to Canis familiaris D4 dopamine receptor,accession number AB030234,Smith-Waterman Score=57.
gaggatctgtggttgggtattttgtgtttttttcttctgccaaaacaagcttgctaacttctttgcttctctgtttccttaaaatgtaaatccgatgttttctggttatctacgactgcataacaaatcatgccaaaatgcagtggctttaaacagcagtctttcattacttcttgcagttcctgtaggtcagaaattcgagaggagcagggctgggcggctgtggctcaggatctctcatgcgctcagtcctcatggagggctaggttggggtcagttgtgccaaactgagtaaaccactcaccctctctggtcttcagtttctcacttggtttttcagatgtaaatcccatctacatgtatttcacttggtatcttcggaagacacgggcagagctggttttgacagtgatgcagttgctggcaaatccgtttgcatccaacattgtcttgaaatttgggtcacctcttcacaaatcctgtttggaaaaatttttccctcggctgctcaacgtcaaggctacacaacccgtcaagggagtgtcagcggtgcgcacgggtttgacaaatcatagttcgctgaaagaacgaggacccatcattagcccaaaccgcggtggaaaggagcgctcggttgcagagctagaacagcagttaccagccggggctgcctggcaccctcccgccgccgccggcgccttcctggccgccgagctgcctcgcagccaggtcccaatgccgaccccaaggcgtgccgcccctggaacccgcgggggtcccaggtccacgccaaaagaaacgcgctctgcttctcccgggcgtcagatgcaccgcctcggccggacgccagccctggacaaatttttccgggaaggcgacgtaaagaatgtcagacttgcaaaaccagagtgcgcctcggttgcttaa

SEQ ID NO: 26465 - DNA, 415 bp, Homo sapiens
  SIMILAR (146)..(382): 321254mologous to Lycopersicon esculentum cell wall hydroxyproline-rich glycoprotein,accession number M11759,Smith- Waterman Score=75.
acttttacatcggttcttaataaacgcttattcatctctgggaataaagttaaacggagccaatgagcattggcaaggaagttgcccactaacttccagtgggtaaagaaaatcgatgcatctccgggctccccaatccctctaaacgccccctagccctctccaagtgtccagaccacccccaccacggggcacccagggcgagccctgagcacagtctccgaggtccccggagctggagctcggcttacataccgcgtcccattcacgcgctgcaaacgcagcctcatccttccatctccggtttgggtttcccggattccatccacggccaagtcccctattttaatcagcagccccggaggcgcacacgccgcctccgtgtctgcgctaacgttggtcagcggctacgaaa

SEQ ID NO: 26466 - DNA, 714 bp, Homo sapiens
  SIMILAR (132)..(230): 391254mologous to Homo sapiens H-chain C-region MAL protein mRNA,accession number M31607,Smith-Waterman Score=55.
atggggtgtattggaggagaaggctccaaggcatactgctacttgccgtataagcctatagaaggtggtgtcagtattttagttgagggatcagatactaactgtgccatggcttttaccatgcatatcttggcttcaggagaagaactagcagccctctccaagtgtccagaccacccccaccacggggcacccagagcgagccctgagcacagtctccgaggtccccggagctggagctcggcttacataccgcgtctcattcacgcgctgcaaacgcagcctcatccttccatctccggtttgggtttcccggattccatccacggccaagtcccctattctaatcagcagccccggaggcgcacacgccgccaccgtgtctgcgctaacgttggacagcggctgacggctgctcctctgccacaggcagccaaaaatgtcaatttgcacactcctccccctgtcgcccgcccccgtccctctgcaaccccctcccgcggagtcagtgggcttcaggaagcctctgcagaagctgcctgtgttttagagtcttcttcgctcgccgtacctgaagggcatctcccacgactgcaattagctgccaagatttcattgtcggctgcaaagtgcctcctgtttcctcaccgggaaaacacagcacgggagaagtccgaggcaacagcaaacggcacccacgtgctagcaatgtaa

SEQ ID NO: 26467 - DNA, 455 bp, Homo sapiens
caggctttgtaacatcatcattctttctgggctgtctctcttttccagatgcctatgatttggtatttctcctggccagagagtagcactggaaacattgaacacaaagtattctaacccttattgctcaatgtgtttttccagagcagcccaaaaggttatgctgggtttcatgagctgcagaggatgactgactggtgccacctagaaagacaaacagcagaaactgcagagcttggactgagctcagacaaaaatctctgctgcttgtacccagcttgaatattatggccaacacttgaagaatagaaagcatcacttaaaacattttaattatccccacatgtaacatgggccctaaatgttctgaactgaaaacctcactatgtagttgaaggtcaatgacacaagtttcagatattaaaggtttatcactgtttcctgtctaacctatt

SEQ ID NO: 26468 - DNA, 1591 bp, Homo sapiens
  SIMILAR (545)..(751): 431254mologous to Homo sapiens Human secreted protein, SEQ ID NO: 7214,accession number G03133,Smith-Waterman Score=126.
atggccagcctgaagacaggaaacagtgataaacctttaatatctgaaacttgtgtcattgaccttcaactacatactcggcacagacaaggaaaaggtaatgcacgaggcaactcatgtccttccttgtctcagaagtatgaactgaggatcaaggaggggcaggcagttagcactagggaaacaagagcaggcaaaaatggacagctgagccagtcaatcagtggacttaagagaggaggggagatctgccatctcctggaactgagggtgcactgtggcttttcaggtggtcaccaactgaactatgggagcaaacaagccatggttagatgtaataaccacatttctaatgacagagaagagtctgcaaaagagccagaaagacggctagagggttgggaagcagccgtccagaaacatagaaagggcccaagattattcttcctgaggccaatgagggacagtttaattacgcagtggcctgctgctttcagacctgtatgtggaaaaagaaaacgtctcaaatccaagttaagagaaggaagttcctacattattggactgctgtgcagctctaggacagtagaaatgcaaaatgatacagctactttggaagatggtttagtcgttttctacaaagctaaacatcctgttaccaaacaatccagcagttgtgctccttggtattcacctaaaggagttgaaaacttacgtccttacagaaacctgcacactgatgtttatagcaggatcccaaagaaacctgagagactacttcaggccatgatgggaaaggcaagtttggacatgcctccttttaccctgctgcaaaagggcgaggaatgtgccaccctcagccaaacctcagcagttgtcccatcttcaaacctgactcatggggaactgagagaaaaggaactgacattcactgcacacctgacacagcgttccttcccactggaggatgcagcaataagagtcatcttggaaacagaggacagccctcaccagacaactgaacctgccagcaccctgactgtggacttccagcctttagaactgggtcttcaagctggctggcatcagctgtttcgctggaatttggcgtctgaaaaacattttaagcaattcttaaaaagccttacgactcttaacatcagaaagcctatctatagggacaacgggatacaaatgtactatctagctctacccgactttcgggttacaaggaagcctgggcacgtgggcagccgccgaccctctgcgccctggccccgcggcccgttgtctggacctgctgtctctgccccgcagcgcctgcctgtggaacgtactcttccctttatcccgagggtaccctcagtatctggcccttccgaaggcttctgcccaggcacctggagcactgcgccaaattttctcccttacccgtttttgggctgccttcccaggggttggctggcagctgctctccgagcagcctattcggttaggaactctctgcgccccttatcttggagggccacagtctgtccctgcagacgaggcaaggaggcagtgctcagcgctccctaccctgggtctctag

SEQ ID NO: 26469 - DNA, 1476 bp, Homo sapiens
  SIMILAR (742)..(1110): 1001254mologous to Homo sapiens Human skin cell protein, SEQ ID NO:327,accession number Y76072,Smith-Waterman Score=668.
aggaagaagagaaatctaaaagtctggaaaacatatttgcgctaataatcgatgaaaatttccttggctttgttagagatctagacatccaaatccaagaagctcaaagaacacctgggaaattcatcacaaaaagaacaccctctaggcacataatcatcaggttacttaaagtcaagacaaaggaaagaatcttaagagttgtgaggcaaaagcatcagctcaacgctgttcggcaggaagtaaaatctctttgtggcttggaagcctctcatgttcctgcagaggaagctctttctggggctggtgagccctatgacatcatcgacagcagtgatgagatggatgcccaggaggaaaacatccatgagagaactgtctccagaaaaaaagaaaagcaagagacacaaagaagaactggacggggctggaggagaagagtatcccatggatatttggctattgctggcctcctatatccgtcctgaggacattgtgaatttttccctgatttgtaagaatgcctggactgtcacttgcactgctgccttttggaccaggttgtaccgaaggcactacacgctggatgcttccctgcctttgcgtctgcgaccagagtcaatggagaagctgcgctgtctccgggcttgtgtgatccgatctctgtaccatatgtatgagccatttgctgctcgaatctccaagaatccagccattccagaaagcacccccagcacattaaagaattccaaatgcttacttttctggtgcagaaagattgttgggaacagacaggaaccaatgtgggaattcaacttcaagttcaaaaaacagtcccctaggttaaagagcaagtgtacaggaggattgcagcctcccgttcagtacgaagatgttcataccaatccagaccaggactgctgcctactgcaggtcaccaccctcaatttcatctttattccgattgtcatgggaatgatatttactctgtttactatcaatgtgagcacggacatgcggcatcatcgagtgagactggtgttccaagattcccctgtccatggtggtcggaaactgcgcagtgaacagggtgtgcaagtcatcctggacccagtgcacagcgttcggctctttgactgtcaggcaccgtgtatgaaatctaacaatgcgctcatcgtcatcctcggcaccgtcaccctggatgctgtaggcataggcttggttatgccggtactgccgggcctcttgcgggatatcgtccattccgacagcatcgccagtcactatggcgtgctgctagcgctatatgcgttgatgcaatttctatgcgcacccgttctcggagcactgtccgaccgctttggccgccgcccagtcctgctcgcttcgctacttggagccactatcgactacgcgatcatggcgaccacacccgtcctgtggatctacccactagtcaattcaccatcttgttga

SEQ ID NO: 26470 - DNA, 2329 bp, Homo sapiens
  SIMILAR (1487)..(1212): 411254mologous to Homo sapiens Human skin cell protein, SEQ ID NO:327,accession number Y76072,Smith-Waterman Score=111.
acaattattaagccaaatttatttcaccccctttttaaaggtactcctaagcggggaacaatgcaccaagacactcctgctccatggcatctttagttcaggcaacctggcagggactgtgcttctctcctcctgcctcaaagaggaacttttaattgtagagatctgcaaagtgctcattgtccttaggttgtctgttatcactcaaatgcccaaattctgtttttgactgacccaggctcactctgcatttactggtgttataggtacagtcactaattccgttttctcaactataaaatgggaataatatcaccctactttgcaaagacctgtgagaaagtagagatactatgtaaagttcctagtatagtaccaagggtataaagtcatcatcaccattatcagcctcatgcaaaaaaatacctaaaatccaaaactgccaaaagaaaatgtatgcaataaatatcacaaattattttttaaaaaagatacacaagtcaatatggtaagattctgaaaaccctgtcacctgctttatttctggagaaagggtaaagggagaagggaaaatattcacttgaatttgaggggcagctaaactggaagcaaccaatttcaggcctctaaggttcctctgatccataagggaatgctgaaacttccttgtttcggagattcaaagaagtttaatttttccctacagcaagatcaacaattttcactgggataaaagaaataagaaccaaactcaatagcaccaaatgggggttttaacacaggaaaacagggccacgtccttttaaatgccaaatttttaccatttaaaatatgtttataaaaccataagtagttgttttccctcttcgattcaacatttctccctccccctaaacaggagcccctagaacctggaagagcatgtacattactaacgagatataccatcccaggcaccctggtccaaactgggaatctggattactaatgggactacactcgagggctgccccccaaggggatgggggaggcaggtaactacggctctcaggggagaatggggtactggaggatgcccaccagttcaaagaggccgaacggctgttgcactggggtccaggggtgactttgcacaccctgtttcaactgccacaatttcccgacccacccaaggaacaggggaaaccttgggaaacacccagtcctcaactccgatgaatgcccgccatgtcccgtgcctcacattgaatagtaaacagagtaaaatatcattccccatgaacaatcggaataaagatgaaattgaagggtggtgacctgcagtaaggcagcaagtcctggtctggatttggtatgaacatcttcgtacttgaacggggaggcttgcaatcctcctgtacactttgctctttaacctaagggacctgttttttgaacttgaaagtttgaattcccacattggttccctgtctgttccccaacaatctttctgcaccagaaaagtaagcatttggaaattctttaatgtgctgggggtgctttctggaatggctggatttcttggagattcgagcagcaaatggctcatacatatggtacagagatcggatcacacaagcccggaagacagcgcagcttcctccattgacttctggtcgcagacgcaaaaggcagggaagcatcccagcgtgtagtgccttcggtacaacctggtccaaaaggcagcagtgcaagtgacagtccaggcattcttacaaatcagggaaaaattcacaatgtcctcaggacggatataggaggccagcaaatagccaaatatccatgggatactcttctccctcccagccccgtccagttcttctttgtgtctcttgcttttcttttttctggagacagttctctccatggatgctttccttcctgggcatccaatctcaatcactgttgtccattaatgtcaacagggttcaccagccccaagaaagagctttcctctgcaggaacctgagaggcttccaagccacaaagagattttacttcctgctgaacagcgttggctacggctttcttgactcgtccagacctcacgaccgccggatccgagttgggcgtaatccgccacggtcactcggccggagcaggcgtcgtgggcccggaacttgagtcgctttcctctcttgggcatggcgaccgtatcggggcgaggcctgcctagcgggccgggcccccgggccatgtctccggccggagagccggccccgggagccgcagagccagctccgcccggctccgcggccatcccacaccggaggccgctcctcggccaagc

SEQ ID NO: 26471 - DNA, 1213 bp, Homo sapiens
  SIMILAR (780)..(944): 301254mologous to Homo sapiens codes for truncated alpha Ig mRNA of alpha heavy chain disease patient HAR,accession number Z14962,Smith-Waterman Score=64.
attcccggttcgacgatttcgcgcattatagcatgaggcatgcacgtgtctggagattggatttcgggcagagcagatgatgagcgcagaggccctgggcgtgggcttggcgggcaggaagagcaaggaagctgtgtggctgcagcagaaaaatcaggtgggcaggggtactggaggtcacggcaaatggacacaagcatctgcctgccccagcaacagagtcctgcttcccacagaaaccggttccaaagccggcagagacggcgctttgaacttgctcaggccttttgaccatcaccatgctgcatattgtgactctggcctcaatcaagcatcccaacagctgctccccagggagcctgcctgcctgcagccctccctctcaagtggcagtaagacacgtgggaagtcaaaaggcccccaacaagctcctgagaatgttatgggcagagcaggcacaaaggggcatgctgcattggcagacatcgcagcatcatgggctgtgctaaaggaggagactggcaatgagttggttgggcatcaaggcccaggggcttcaatgagaaggtacagggagtgtcacccagtggagacagaaggccgtggaccagaaacccagctccaccacttggctgtggggccctggaaacctaacctctctgcatctgtttgcacacctatgaaagagataacaccttgcagcactgttatgattcagttaaataactctcctgggcttatccctcatcccactgatctccagactgccctggactcagtcttggggccccctgtcttttctatctacacccacttcactgctgatttcatctactcctctgattttaaataccatcaattcactgatgactctcagatttctacctcctggtggagctttcccatgaactccagagccttgcatcccgcctactcagcatccccacctggatgtctcgttaacgggcatctcaaacttaccgcgtccgcaaagctgctttcattgtcttcatctcagctgacggcaactctcttcttccagttgctcaggctaaaaccttgcatcattcttttcttgtctctctcacaacctttatccaatccatcagcaaatcctattaactcttatcttcaaaatatgtccagaatccaacttgtcacaagctctgctgctgccaccctagtctggcccaccttcattttgtccggatga

SEQ ID NO: 26472 - DNA, 553 bp, Homo sapiens
  SIMILAR (150)..(251): 381254mologous to Saccharomyces cerevisiae HRC131,accession number Z34288,Smith-Waterman Score=91.
atgtgctatcaggtcactgagtcagtgacaagcactaagattgagggagaacatcttacaatcaggttgccatcatgcacgaaaaagaatcgcactagtgcttatgtcagaacaagctgggagaagggagagacgacaatttcacctcttggcaaagctcagcttgctgaaccttttgctttctgctggctgttgattcagcagaaactactgctgcagaatcataatgctgctgctgctgctgctgctgctctgctgcaggaggctggaggcggctggtgcattaaaggcgaggctcctcccaaccgcgtcagcagccccacgactctttcccagcagcagtggtggccgaggcagaggctgcggctgctctttgctgcagtggggcgcatgcagccgcgaatcggcacctgggcagcaagcgactagcttgcaggttcaggtggaacgcatagacgcgctcttccaacctcctcccctctcgcgccactcagctaagggccacgtctaaactagcacccagagcccctagctccctgtctttctcacgaaa

SEQ ID NO: 26473 - DNA, 450 bp, Homo sapiens
  SIMILAR (281)..(448): 1001254mologous to Homo sapiens bK415G2.1 (synapsin III),accession number Z83846,Smith-Waterman Score=289.
ggaattcccgggtcgacgatttcgtggcagaggctgagctcccgggacccggagcggatctactggcgggcgccgcgccgaggcaccaccgggcgccgagttcctggcggctcgcacgcaggtaaataaaggcagctaaagctgactgctggttgcgcaaaatccccctggctcttctggctaaagtcctaccactccctgtacctggcagcagcctgtcttctgggcctcacctacacacgtctgggtaggagccagtcatctccacccatccacagccatgaatttcctccggcgacgtctctctgacagcagcttcatggccaacctgcctaatggctatatgacggacctgcaacgcccagatagctccaccagctcacctgcttcccccgccatggagaggaggcacccccagcccctggctgcctccttctcctctccaggaac

SEQ ID NO: 26474 - DNA, 672 bp, Homo sapiens
  SIMILAR (331)..(275): 721254mologous to Bromheadia finlaysoniana extensin,accession number Y13141,Smith-Waterman Score=80.
atggggcgccgcggcgcggggaggccgggccgccgggcgggggcgctcgcgcgcgttgaggggcagaggctgagctcccgggacccggagcggatcgactggcgggcgccgcgccgaggcaccaccgggcgccgagttcctggcggctcgcacgaattttatcctggaatgaaggagggccgtggaagaattctgatcagtgatcaggtccctctggcagctctggggacaatggatggaggccggagcatcagaaagctgagcacatgtgtccgtagtactacggaggaggagaaggaggaggaggaggagaaagaagaggaggaggaggaggattctttagagaagagatttcaaagttccacactgcagtctcttactgcagtctctccttgccaccggggacgggcacagccccaggtccctctgaatgaattgctaaactgccacctgcttctgagcattgttcaacctggcagaatccttagaaccaggagaggtagaaaggagttggacttgctgatttttgcagcccttctaggtctggccacctgggcttcagattactataagcctttggaatttgaatatgttgatgaagtgggctcagtggtatgccgcactaaccttgtaggggcatctttagagtatgagaaggaggagaagcagtag

SEQ ID NO: 26475 - DNA, 1116 bp, Homo sapiens
  SIMILAR (468)..(569): 621254mologous to Homo sapiens super cysteine rich protein; SCRP,accession number U63332,Smith-Waterman Score=146.
  misc_feature (1)...(1116): n = a,t,c or g
ttagaatatctttgaagtgttcctggttggggatggggggtggggtggaatcttggctggcaggaaaggacacaggccttttaatctcagaaccaaaaagactctgcgctctgatttctccaacttcatttcactatgaagggcattctgctcctccaagtcggtgtgacatatcacagggcactcgcgagtgcttctggaagccctgccgcggaggtcgactcttttaccagagacagaaggtcgggaagatgcagcgagtacagcgttcttattataactcgcctcctcacaggtttctggggcttgggaaagggtcagtgccgccaagccactctgcctttgccatccactttcagagctattcacctggtgcttttcaagaatattacccttcccacaaatgattgataaaagatgaatccgccccccggactccccaaacggtgctcgcttctgcacagttctgcctgctgtgccgctgagctcgatgttgccgcggcggaagctgctgctgctgctgctgctgctgctgctgctgctggtggtggtgctgctgctgctacttcggaaacgattaggaggaggacgcccaagcacgacctgagcctgcgagccacccaggaccaatgtgcaacctgctcgagggatccgctcggcacccgatgcaccacatctatgcaccacagctacacccaggtctctgcaaacaggagagcacagcaagccttcgagtccatgcctgagtctccccccaactccgtgggctcctgtgtggcctaagtctccctgacaagcaccgctccctgatccactgcccagtcccatcgaccgcccaagggcgagggacggcagcagctcactgcaccggggcaggacactagtgaagcactggctccgactaaggggattgggaacttttgctacaaggatggtatgccccccacatttgggatccaagggtgggatcccccaccaggaaattggaatcttccaacaaccgtctaatacctgcagagaggacagccaggaagtatatccttgctgtntacaattttgtgacacagtttcttcatgaaactgtggagtcatgagcttaaatggaataatgcacat

SEQ ID NO: 26476 - DNA, 264 bp, Homo sapiens
  SIMILAR (190)..(2): 931254mologous to Homo sapiens FLJ00105 protein,accession number AK024497,Smith-Waterman Score=307.
  misc_feature (1)...(264): n = a,t,c or g
tgaggacgacgccattgaactttanagccgtgtgcatccgcctnacgttggactggtccggcttcatgctgaagaggtctttgaaaccggataggctggtgtctctgctcctgtacttctcagcgatcagcttctccctggnccaggtcatctgcaccttgtctggcgtaggcggcgcttgggtcctgctgccgccgcggtgtgggacgcggtgttcctgtcgtggatcagctgggcctctngctcctgctcgttcttggacag

SEQ ID NO: 26477 - DNA, 2297 bp, Homo sapiens
  SIMILAR (1449)..(1580): 1001254mologous to Homo sapiens FLJ00105 protein,accession number AK024497,Smith-Waterman Score=227.
ctgtgcagcctccgtgcgtggaagctggccgcctggctgcagcggctttggctccgtgggtaactgtaggctgctgaggacgtctgggtgtatccatctgagttatactggcctgggccccatggccactgtgagaccccaagggcaggcgtctttgtggtcacttcgcacgaggagggaccgggagcgggaacagcaagctcgagctcgaagggcccctcctgggccaggtgggggttggaggtgtcaccgctacggtggccctcgggccaggtgggcggcgctggctctgccgagagcgggcagcccttgggctctggtttcacgttcaaggccatgggaaatttaggcgagtcccgggcccgccaggcccagctgatccacgacaggaacaccgcgtcccacaccgcggcggcagccaggacccaagcgccgcctacgccagacaaggtgcagatgacctggaccagggagaagctgatcgctgagaagtacaggagcagagacaccagcctatctggtttcaaagacctcttcagcatgaagccgtgagtgtccgtgcgtgtggcctgggccagccctgaagtcagccctgcggccaggcctgctttgctcaggcaagcctcactgcagcaggcagatgggtctgttccatggaggcgaggaggcttgtgccgctgggcacagaattcctggccttcaccctgtgggtagttcaggctgctgtcgggccctagggcctgccctacgccaaggctcccacctgtggccttgggctgcgaacaccagggctgtacagggtccttgcgggtgtgggtttggttctgcagacgcagccttgtgacgtccccgggagcacacttaacggatgtctgtttgtgtgcgtgctcgcatgtacctgtcagcgcacctgccggtggacgtgtacctgcttggttggggagcctcctgtggggctgtggccgggcccaggccgccagggacgctttgagacatggaccggccacagcagcttcagagagcagacaggtagggtcgtggagcagagctgcgttgtgagaccgaagtcggggctggacggccacacgttggaagtgctggtcctttagccctgtccttgtcaggcctgggagcttcagcagcaacggctgcacaggccggtgtgggggactctgggcctttccttcctgagcttccggccccttggacccagttgtatcaggaccctcggagaggaggccatgtgtgcccagcctgacgggtctgtgtttggcagtgtctgacgtggggtttaggggcgatgatgtagatgtcaagagaagcgtgtcagccttgaaggcgtcaggcacatgggccacccagacggcttccactgttctgcctgctttgcagatgtagatgtagttaggaaagcgcttgcggtttgtgttgtgtgactcccctgcagggaccagtccaacgtcaggcggatgcacacggctgtgaagctcaatggcgtcgtcctcaacaagtcccaggatgcgcagctggtcctgctcaacatgccaggtcctcccaaaaaccggcagggagacgagaactgtatcctttcttgcagtgtgcctgctgagcgtgcgggcaccccctggtggcttctcgctaagacggggtgaagccgcccccagcaccagtgcagccaaagctccggctccttgggcgagctggcagctgttccccctgcgacagatcctactgacgtccaggagagtcgcaggccaccacagcgaagtgtccctctggctctcaccttcttcttttgtgttgtccagagcctcgcccatcgtccttgtcctcccaggtggtatccactgaggagggccagtcgtgtctgaaaacaccaacagcagcactttcccagacaggtgtgtctctgcacccccgacgtggctctccctggcgactctgcggagcgccacactttgcttttggcgggacccgcacggcttcatcaccgagtgtccctgaagggccagggccatgggatcactggtgacggtgccgtgaaggtctggagagtggattgtgagggatccggagtccctgtcctctgtgggtccagagagctggatgtggcagtgggatgcccagttcttggtcagtgggagcagtttcttgtagaagatcctggaaaattcttcatggcatctcccagtgcctccagcttcccatgctgaaaggcgctgcccgatgtaaggaggtcccagaacctgggaaccacccaccaggccccggaggaggggccactgcctcagctccat

SEQ ID NO: 26478 - DNA, 975 bp, Homo sapiens
  SIMILAR (692)..(850): 401254mologous to Ovis aries small proline-rich protein with paired repeat,accession number L77967,Smith-Waterman Score=107.
atggcagctgggaagggagccccgttgagcccatcggctgaaaacagatggcgacttagcgaacctgagctgggccggggctgcaagccagtgctgctcgagaagacgaaccgcctgggccctgaggctgctgtgggcagggcgggccgggatgtgggcagtgcggagctggcactgttggtagccccaggcaagccccgacctggcaagccgctgcccccgaagacacgtggagagcagaggcagagcgccttcacggagctgccgaggatgaaggaccggcaggtggatgctcaggcccaggagagggagcacgatgaccccacaggccaacctggtgccccacagctgacccagaacatccccagaggcccagctggcagcaaagtcttctctgtgtggcccagcggagcacgaagtgagcaaagaagcgcctttagcaaaccaaccaagcgaccagcagagaggcctgagctaacctcagtcttccctgcaggggaatctgcagatgccctgggggagctgtctggactcctcaacccactacagaccttcgcttgttggggtcgactttcaactcccaagcttttggttggtgatttgtggaacttgcaagcattgccacagaatgctccactctgtagcacttttctgggtgcccctacactgtggctggagcatacccaggcccaggtgcccccaccctcatcatcctccaccacttcgtgggccctcctgccacccaccctcacctccctgggcttgtccacccagaactggtgtgcaaagtgcaacctgtcctttcgcctaacgtccgacctggtctttcacatgcgatcccaccacaaaaaggagcatgcggggcctgacccacattctcagaagcggagagaagaggcccttgcctgccctgtgtgccaggagcacttccgggagcgccaccacctctcccggcacatgacttctcacagctag

SEQ ID NO: 26479 - DNA, 223 bp, Homo sapiens
  SIMILAR (1)..(219): 431254mologous to Plasmodium falciparum glutamic acid-rich protein,accession number J03998,Smith-Waterman Score=146.
atgggcgcagttcagaaggcttataacctgcaaaaaaaaagaagaagaagaagaggaagaagaggaagaataagaggtagaagaggaagaggaagaagaagaagaggaagaagaagaagaaagaagaagaagaaggaagaagaagaagaagaagaagaagaagaagaagaagaagaagaagaggaagaagaagaagaagaggaagaagaagaagaagaaagag

SEQ ID NO: 26480 - DNA, 341 bp, Homo sapiens
  SIMILAR (28)..(321): 541254mologous to Homo sapiens Human follicle stimulating hormone GPR N-terminal sequence,accession number W03627,Smith- Waterman Score=259.
tgctgtgtttcctccgtgggctatctcatccatctggtgtctcaggaggcaaaggaagggggcccagaaggaggaggagaagaagaggaagaggaagaggaagaagaagaggaagaggaggaagaagaagaggaagaagaagaggaagaggaagaagaagtagaagaagaagaaagaagaagaagaggaagaagaagaagaaggagaagaagaagaagaagaagaagaagaagaagaagaagaagaagaagaaagaagaaagaagaagaagaggaagaagaagaagaagaagaacaagaagaagaagaagaggaagaagacagaagaaacaacttagcatg

SEQ ID NO: 26481 - DNA, 354 bp, Homo sapiens
  SIMILAR (112)..(351): 801254mologous to Homo sapiens Human thyrotropin GPR N- terminal sequence,accession number W03626,Smith-Waterman Score=326.
atgcaggtccgtgacttcattcttgaagtcagcgagaccaagaacccaccggaaggaaccagttacggacacattaagagaatgattctttctataatgatctctaggcaacacaaagaagaagaagaagaagaagaaagaagaagaagaaaggagaagaaaggagaagaaaggagaagaaaggagaagaaaggagaagaagaagaagaagaagaagaagaagaagaagaagaagaagaagaagaagaggaagaggaagaggaagaggaagaggaagaggaagaagaagaagaagaagaagaagaagaagaagaagaagaagaagaagaagaagaagaagaagaagaagaagga

SEQ ID NO: 26482 - DNA, 330 bp, Homo sapiens
  SIMILAR (66)..(317): 591254mologous to Homo sapiens Human thyrotropin GPR N- terminal sequence,accession number W03626,Smith-Waterman Score=241.
atggtagctcacgccttggtcccagccacatgggaagctgaggtgggaggatcgcttgagcctaggagaaagaagaagaagaaggaagaggaggaggaagaggaggaggagaggaagaggaagaagagtaggaagaggaggaggaggaaggaggaggagaaggaagagaaaagaagaaggagaagaaggagaaggaggagaagaagaagaagaagaggagaaaaaaagaagaagaggaagaagaagaagaagaagaagaagaagaagaagaagaagaagaagaagaagaagaagaagaagaagaaaggaaatttgtccgttgagcattaa

SEQ ID NO: 26483 - DNA, 246 bp, Homo sapiens
  SIMILAR (41)..(208): 261254mologous to Plasmodium falciparum glutamic acid-rich protein,accession number J03998,Smith-Waterman Score=94.
atggggaagctgcagcaagtcatccagaagatcttgctaagaaatagaattgaagaagaagaagaaagaaaggactgtgaagaagaaagaaagaaggactgcgaagaagaagaagaaagaagaaagaagaagaagaagaagaagaagaagaagaagaagaagaagaagaagaagaagaagaagaagaagaagaagaggaaagaaagacggactgccaagcctaagagttggtgtcctgtggcataa

SEQ ID NO: 26484 - DNA, 349 bp, Homo sapiens
  SIMILAR (3)..(191): 681254mologous to Arabidopsis thaliana putative protein,accession number AL162506,Smith-Waterman Score=200.
aggaagaggcggaagagaaagaagaggaagaagaagaagaagaagaagaagaagaaggagaaggagaaggagaaggagaaggagaaggagaagaagaagaagaagaagaagaagaagaagaagaagaagaagaagaagaagaagaaatactaataatgaaacaggagagtaagtctaagagaagggaggattaacctgaacttgacagatcaactggccccacccagatcaataaactggctcatgtgatcttgtggcaacccccgcccaccccggcaacccaggaattaactcagtgcagtaagacagctttgactccctaggatttcatctctgaactgaccaatca

SEQ ID NO: 26485 - DNA, 282 bp, Homo sapiens
  SIMILAR (10)..(276): 461254mologous to Homo sapiens Human follicle stimulating hormone GPR N-terminal sequence,accession number W03627,Smith- Waterman Score=206.
atgtgtatagagtcagagagagaagaagaagaggaagaggaagaagaggaggaggaggaagaggaagaagaagaagaagaaagaagaagaggaagaggaagaagaagaagaaagaagaagaggaagaagaagaagaaagaagaagaggaagaagaaagaagaagaaagaagaagaggaagaagaaagaagaagaggaagaagaagaagaagaaagaagaagaggaagaagaagaagaagaagaagaggaagaagaagaagaaaaagaaaagacagtcattaa

SEQ ID NO: 26486 - DNA, 399 bp, Homo sapiens
  SIMILAR (109)..(390): 681254mologous to Homo sapiens Human thyrotropin GPR N- terminal sequence,accession number W03626,Smith-Waterman Score=308.
atggtgccccctggatggtgccccctggatggtatcccctggaaggtaccccctggatggtatcccctggatggtgccctctggatggtgccccctggatggtatcccttggatggtatcccctggatggtgccccctggatggtatcccctggaggatcgagaagaagaagaagaagaagaagaagaagaagaagaagaagaagaagaagaagaagaagaagaagaagaagaagaagaagaagaagaagaggaggaggaggaggaggaggaggaggaggaggaggaggaggaggaggaggaggaagaagaagaagaagaagaggagagaggaaagagagagggaagagagagagcgagagagcaagagagagatgcaaggagcagacagcctttctaa

SEQ ID NO: 26487 - DNA, 255 bp, Homo sapiens
  SIMILAR (127)..(252): 731254mologous to Homo sapiens Human secreted protein HCHPF68, SEQ ID NO:163,accession number Y86248,Smith-Waterman Score =163.
atgttgtggctcccgcagccggcgctggggacgcgcgcggccgagactctggcctgcagtcgccgccgccgccgccagctctacaactgctgcctttaccttagaagaaggaagaaggaagaagagaaggaaaaggaggaggagaaggggaaggagaaggagaaggagaaaaaagaagaagaaaagaagaagaagaagaagaagaagaagaagaagaagaagaagaagaagaagaagaagaagaagaagaaatag

SEQ ID NO: 26488 - DNA, 393 bp, Homo sapiens
  SIMILAR (5)..(286): 471254mologous to Saccharomyces cerevisiae gene required for phosphoylation of oligosaccharides/ has high homology with YJR061w,accession number D83006,Smith-Waterman Score=258.
atgaagaagaagaaagaaggaagaagaaggaagaaggaagaagaaggagaagaagaaggagaagaagaaggagaagaagaagaagaagaagaagaagaagaagaagaagaagaagaagaaggaggaggaggaggaggaggaggaggaggaggaggaggaggagaaggagaagaaggagaagaagaagaagaaggagaagaaggagaagaaggaggaggaggaggagaagaagaagaagaagaagaagaagaagaagaacaacaacaacaacaacaacaacaacaacttgaaaaattaagatcaaggaaaaattattccttaatccatgagctacagaatggatattgttttagcaggcatgaaaatattaatctcctcatacatctccattag

SEQ ID NO: 26489 - DNA, 423 bp, Homo sapiens
  SIMILAR (8)..(196): 311254mologous to Plasmodium falciparum glutamic acid-rich protein,accession number J03998,Smith-Waterman Score=111.
atggaggaggcagaggcagagagaaaagaagaagagaaggttagagaaaagaagagaagagaaggagaaggagaaggaggaggagaaggagaaggagaagaagaagaagaagaagaagaagaagaagaagaagtcaaatatctggagaagaagaagaagaggaagaagaagaaaaggaagaagaagaagaagaggaagaggaagaaagaagaagaacaagaagaagaagaagtcaaatatctggagaagaagaagaagaagaggaagaagaagaagaagaggaggaggaagaaggagaaggagaaggagaaggagaaggagaaggagaaggagaagaagaagaagaagaagaagaagaagaagaagaagaagaagaagaagaagaagaagaagaaaatacaaatatctggagccgggatttga

SEQ ID NO: 26490 - DNA, 167 bp, Homo sapiens
  SIMILAR (3)..(161): 731254mologous to Arabidopsis thaliana putative protein,accession number AL162506,Smith-Waterman Score=210.
aacaacaaaaagaagatgaagaaaaagaaaaggaggaggagaaggaagaggaagatgaagaagaagaaagagaagaagaagaagagaaagaagaagaagaagaagaagaagaagaagaagaagaagaagaagaagaagaagagaaacacaagaggcagagaccatag

SEQ ID NO: 26491 - DNA, 510 bp, Homo sapiens; identical to SEQ ID NO: 5343
  SIMILAR (4)..(354): 511254mologous to Homo sapiens Human thyrotropin GPR N- terminal sequence,accession number W03626,Smith-Waterman Score=336.

SEQ ID NO: 26492 - DNA, 621 bp, Homo sapiens
  SIMILAR (269)..(595): 351254mologous to Plasmodium falciparum glutamic acid-rich protein,accession number AF251290,Smith-Waterman Score=193.
atggcgccactacccttcagcctgggtgacagagtgaaacactgccttcaaaaaaaaaggagaaggaagaagcagcagaagaagcaaaagaggaagaggaagaagaggaagaggaggaagaagaggaggaagaagaaggaggaggaggaggagaagaaggagaagaaggagaaggagaagaaggagaaggagaaggagaaggaggagaaggagaagaagaagaagaagaagaagaagaagaagaagaagaagaagaagaagaagaagaagaagaagaagaagaaggaagaagaagaagcagaagaagaagaagaagaagaagaagaagaagaagaagaagaagaagaagaagaagaagaagaagaagaaagtatccaatgtgggttgcatctgagactctgggagaaatctagaccgaaagaagaagaagaagaaggagaaggagaaggagaaggagaaggagaaggagaaggagaaggagaagaagaaggaagaagaagaagaagaagaagaagaagaagaagaagaagaagaagaagaagaagaagaagaagaagaagaagaagaagaaggagaaagtatccaatgtgggttgcatctgagactctgggagaaatctag

SEQ ID NO: 26493 - DNA, 294 bp, Homo sapiens
  SIMILAR (64)..(252): 391254mologous to Plasmodium falciparum glutamic acid-rich protein,accession number J03998,Smith-Waterman Score=143.
atggtgcccgtatctgcttctggtgagagcttcaggaaacttttgatcatggtggaaggtgaagaggatcagggatcacatgataagaggaaggaaggtgaagaagaagaagaagaagaagaagaagaagaagaagaagaagaagaagaagaagaagaaggaagaagaagaagaagaaggaagaagaagaagaagaagaagaagaagaagaagaagaagaagaagaagaagaagaggaagaagaagaagaaggaatactttcaaacttattctgcatggctagtattatgctga

SEQ ID NO: 26494 - DNA, 155 bp, Homo sapiens
  SIMILAR (16)..(135): 871254mologous to Homo sapiens Human secreted protein HCHPF68, SEQ ID NO:163,accession number Y86248,Smith-Waterman Score =180.
tctatagacatttaccaaaaaaaaaagaagaaaaagaagaagaagaaaaagaagaagaagaagaagaagaagaagaagaagaagaagaagaagaagaagaaggagaagaaggagaagaaggagaagaaggagaaaatatgaaaagaaatgtctag

SEQ ID NO: 26495 - DNA, 1413 bp, Homo sapiens; identical to SEQ ID NO: 7287
  SIMILAR (256)..(789): 591254mologous to Homo sapiens Gag-Pro-Pol protein,accession number AF164614,Smith-Waterman Score=570.

SEQ ID NO: 26496 - DNA, 842 bp, Homo sapiens
  SIMILAR (631)..(837): 181254mologous to Arabidopsis thaliana putative protein,accession number AL162506,Smith-Waterman Score=80.
tcagcctcccaaaatgctgggattacaggggtgagccacttcgcctggcttccagattcagggtgggggacagaacatacgtgagagcagccctttgcctgctgctgtcctcctcccagtgccccagcgggtttagcagccacagtggctgtgcctgccaagcacttctgctgagcccttcccactgtttaatagagcctgctgcccctggctgtcttcctggatgtgctgtggccacgaccaggttaacacatccgaaccaaactcagtattttacaacccccctgacaacttacccctaatttataaagaattgcataatttgtaaagaacaaaaatatatttctcacagtctggatgctggaaagtccaggatcaaggcactagcatctggtgtctggtgagggccttcttgctgcgccctcacacggatcaaggcgccagcatctggtgtctggtgagggccctcttgctgcgccctcacatggatcaaggcaccagaatctggtgtctggtgagggccctcttgctgtgccctcacacggatcaaggcgccagcagcaggagaatggcgtgaacccaggaggcagagctggcagtgagccgagatcacgccactgcactccagcctgggcaacagagcaagactccatcagaagaagaagaaagaagaaagaaggagaaagaagaagaaagaagaagaagaaagaagaagaaagaagaagaagaaggaagaagaaggaagaagaaggaagaagaagaagaagaagaagaagaagaagaagaagaagaagaagaagaagaagaagaagaaggaagaagaaggaagaagaagaagagga

SEQ ID NO: 26497 - DNA, 471 bp, Homo sapiens
  SIMILAR (142)..(459): 511254mologous to Homo sapiens Human thyrotropin GPR N- terminal sequence,accession number W03626,Smith-Waterman Score=235.
atgccaggaacaatccagctgacagcaaaatatatcctctaccggctgcaagcatccaaggccaagtgcattgtggccagtgaggaggtggtcccagtagtggagtccattgcactggagtgtcctgactttaagaccaaactcctggtgtctccacaaagccggaacagaaaaagtttgccaactcctgccctaaaccgctatagggagatgaagcttaaaaaaagaagaagaggaaggaagaaggaagaagaaggaggaggaagaggaggagaaggagaagaaggagaaggagaaggggaagaaggagaaggaggaaaaaaagaagaagaaggaggagaaggagaaggagaagaggaagaggaagaggaagaagaagaagaagaagaagaagaagaagaagaagaagaagaagaagaagaagaagaagaagaagaagaaaagaaagaagaagaagaactggactgttaa

SEQ ID NO: 26498 - DNA, 777 bp, Homo sapiens; identical to SEQ ID NO: 6948
  SIMILAR (389)..(721): 261254mologous to Homo sapiens Human follicle stimulating hormone GPR N-terminal sequence,accession number W03627,Smith- Waterman Score=176.

SEQ ID NO: 26499 - DNA, 357 bp, Homo sapiens
  SIMILAR (159)..(296): 671254mologous to Plasmodium falciparum glutamic acid-rich protein,accession number J03998,Smith-Waterman Score=150.
atggtgagaccctttctctacaaaaaaataaaagaagaagaagaagaagaagaagaagaagaagaagaagaagaagaagaaggagaagaagaagaagaagaagaagaagaggaagaggaagaggaagaggaagaggaagacaaagacgacgaagaagaaagaagaagaaagaagaagaagaagaagaagaagaagaagaagaagaagaggaagaagaagaagaagaagaggaagaagaagaagaagaagaagaaaaaaaacattctttataggatccagatctgggagagaaagaaaacaaaggacaaaggaaaagaaaacttgcccgtgggacttcccagccatccctttcacctg

SEQ ID NO: 26500 - DNA, 295 bp, Homo sapiens
  SIMILAR (31)..(162): 721254mologous to Homo sapiens Human secreted protein HCHPF68, SEQ ID NO:163,accession number Y86248,Smith-Waterman Score =176.
aactctatcgagagagagagagagaaggagaagaaggaggagaagaagaagaagaagaagaggaagaagaagaagaagaagaagaagaagaagaataagaagaagaagaagaagaggaagaggaagaagaagaagaaggaggaggaggaggaggaaggggggaggaaggagggacaaacactctagaattttcaaggcagaagactgtccgagttgctggcagtccctgtcaacacagggccccactttgaggataagttcacctgcccaagttttcctttaagtgatggtttga

SEQ ID NO: 26501 - DNA, 771 bp, Homo sapiens
  SIMILAR (524)..(763): 481254mologous to Saccharomyces cerevisiae gene required for phosphoylation of oligosaccharides/ has high homology with YJR061w,accession number D83006,Smith-Waterman Score=221.
atgcaagagcaaataaatgacttaaagttggaacatatatttacacaagaagcagagtgtaagagtttgggaaatgtgcagcgcagccatatggcagagaaagaaaaagctttttcaggaaaggaattcaagcaggttttggagcagccacttactagagaaatttgtataactaaaggagacccaagtgctaatagtcaagactatcgggaaaaggactccaaggcatttcagagaactttgtggcagcctctcccatcccagacacttctccccaacatccctgccactctagcttcagcctcaggtcaatggggctcagctacagctggggctgcagctccagagggtgcgagccataagctttggcagcttccacatggtgttattcctgtgggcatacagagtgccgaagttgaggattggcagcctccacctagatttcacaggatgtatggaaaagcctggatggccagaccaaagtctgctgtaggagaagagccctcacagaggacttctactaaagcagtgagaacaaaagaagaagaagaaggagaagaagaagaaggagaaggagaaggagaaggaggaggaggaggaggaggaagaggacgaggaggaggaggaggaagaggaggacaaggaggagaagaagaagaagaagaagaagcagaagaagaagaagaagaagaagaagaagaagaagaagaagaagaagaagaagaagaagaagaagaagaagaaacactgaaaaatgaggagttagcataa

SEQ ID NO: 26502 - DNA, 429 bp, Homo sapiens; identical to SEQ ID NO: 3963
  SIMILAR (196)..(411): 551254mologous to Homo sapiens Human secreted protein HCHPF68, SEQ ID NO:163,accession number Y86248,Smith-Waterman Score =162.

SEQ ID NO: 26503 - DNA, 282 bp, Homo sapiens; identical to SEQ ID NO: 2959
  SIMILAR (116)..(232): 841254mologous to Homo sapiens Human secreted protein HCHPF68, SEQ ID NO:163,accession number Y86248,Smith-Waterman Score =168.

SEQ ID NO: 26504 - DNA, 798 bp, Homo sapiens
  SIMILAR (448)..(768): 291254mologous to Homo sapiens Human follicle stimulating hormone GPR N-terminal sequence,accession number W03627,Smith- Waterman Score=200.
atggctgacacttgggctggagttcccaagctgcaaggctataaaaaggtcctccccaggactgcccctgaaagcctccagattccaatgaattttgactccattggaagtgaaaggaaaagaagagcggggaaggaaaggaggaaaaacaacaacaacaaaagccacgacagagaacgggaaaaggcagagactgaaagcgaaggaccgtcggaggaggagggcgagaggtctggagaggagggctcgccggaggaggcgggcggggcgggctgtgcggagggtgcggccagcgcgagttccctgctcgctcggacaccccagcgccctcacagagacccctcggactccctgggccccagcccctcacgcagcccctcagactcctcaccgaagctgccgtcactcccgcagttccccacccctcccgtggaagacccatcccttaaccgagccttcctctcctcgctgcaccgtcagtcccttttccagcctgggcgacagagtgagactaggtctcaaaaaacaaaagaagaagaagaagaagaaagaaggaaggagaaggaggaggaggaggaggaggaggaggaggagaagaagaagaagaagaagaggaagaggaagaagaagaaaagaaagaagaagaagaagaaagaagaagagaagaagaagaagaagaagaagaagaagaagaagaagaagaagaagaagaagaagaagaagaagaggaaagaagaagaagaagaaaagaagaagaactctgaggagcatatgacagggaatcacagtctgaaatga

SEQ ID NO: 26505 - DNA, 642 bp, Homo sapiens; identical to SEQ ID NO: 6956
  SIMILAR (367)..(630): 591254mologous to Homo sapiens Human follicle stimulating hormone GPR N-terminal sequence,accession number W03627,Smith- Waterman Score=276.

SEQ ID NO: 26506 - DNA, 1167 bp, Homo sapiens
  SIMILAR (747)..(1136): 611254mologous to Homo sapiens Human follicle stimulating hormone GPR N-terminal sequence,accession number W03627,Smith- Waterman Score=399.
atggctccgcgccctcaggccgcccgcctgcccagctgcgggacccgttctcagggagcagcgcggccgccgcccctcgggaccgccgccgcctaccggcctctcagcagccggctgctgacggggccaccgccggcttcctcctcctggctcgcaatccacttccggatccgtgttggaagttctggccagggcaatcagagaataaaatacctaggaatccaacttacaagggatgtgaaggacctcttcaaggagaactacaaacgactgctcaatgaaataaaagaggatacaaacaaatggaagaacattccatgctcatgggtaggaagaatcagtatcgtgaaaatggccatactgcccaaggttcaagcgattctcatgcttgtattgttcttgcacctgttctgcaagtacaacattgtgggaatggaaaatgcaggaaatgggcacgattggtctttggataggcacctgatgcaagcttcagccaatcaacaggccactcagctggccatcagtaggccatccaatcagagcaaagcccaggactttcttcgactcttaagaaaagagaagcaaactgccctggacacctttgccccattgaaggagcaggctcagaagtggaatgaggatggaataaggagcagtgttataccaggaattcagcaccagtcgctattgctggcagttcttacattcaacagcagcaaaactagcttgggtgacagagcaagacctgtctcgaaaaagaagaaagaagaaagtaggaagaagaagaagaagaagaagaagaagaagaagaagaagaagaagaagaagaagaagaagaagaagaggaagaggaacaagaacaagaagaagaacaagaagaacaagaagaagaacaaggagaacaagaagaagaataagaagaagaaggagaagaagaagaaggagaggaagaagaagaagaggaagaggaggaagaggaggaggaggaagatgaggaggaggaagcagaagcagaagaaaaagaaagaaaagaaagaaagagaaagaaagaaaagggaaggagggaaggaaggaaggaaggaaaaagggaaggaaagggaaggagagggagagggagaaggaagaacaaagaagaaagaaggagaagcagaggcttgtgctggatag

SEQ ID NO: 26507 - DNA, 690 bp, Homo sapiens
  SIMILAR (1)..(183): 1001254mologous to Homo sapiens interferon-omega 1,accession number X58822,Smith-Waterman Score=315.
  misc_feature (1)...(690): n = a,t,c or g
atggtaaaagggagccagttgcagaaggcccatgtcatgtctgtcctccatgagatgctgcagcagatcttcagcctcttccacacagagcgctcctctgctgcctggaacatgaccctcctagaccaactccacactggacttcatcagcaactgcaacacctggagacctgcttgctgcagagctactccattcagcatttcaatagcattgacctgaatgacatggatgtgaacttacatggcaactttgttcacattgactttcacggtttgagtaggggtccaaggagcaacatgatgtctgcttttgtggttgctctaactcactcctcagataaaggatcttgcataaatccttcaggaagctactctgcaaaggaagcttttgcagtactagaagtcctaccagagaaatcagatcaaaaaaaaaggaagaagaagaagaagaagaagaagaagaagaagaagaagaagaagaagaagaagaagaagaagaagaagaagaagaagaagaagaaggaagaagagaaagaggaagaggaagaggaagaagaagacgaagacgaagacgaagaagaagaagaagaagaagaagaagaagaagaagaaganagaagaagaggaagaagaagaagaagaagaagaaataaaaggcatccaaaggggaaaggaagaagttatctctaa

SEQ ID NO: 26508 - DNA, 708 bp, Homo sapiens; identical to SEQ ID NO: 3967
  SIMILAR (7)..(189): 1001254mologous to Homo sapiens steroid receptor TR2- 9,accession number M29959,Smith-Waterman Score=304.

SEQ ID NO: 26509 - DNA, 2334 bp, Homo sapiens
  SIMILAR (82)..(1950): 811254mologous to Homo sapiens peptidylarginine deiminase type III,accession number AB026831,Smith-Waterman Score=2645.
atgaaggtggagctgatgggatttgctgaggggctggctgtgcgagtgagggaacaagaggaggtgaggctgaattggaaggtggagctgctatggacagacttgcgtgatgtgcccaagggtgccaacagcttcagggtctctggaagctccggggtggaggtcttcatggtctacaaccgcacacgtgtgaaagagcccataggcaaggcccgttggccgctagacactgatgcagacatggtcgtatctgtgggcacagccagtaaggaattaaaggacttcaaggtgagggtctcctactttggggagcaggaagaccaagctctgggccgcagcgtgctttacctcactggcgtcgatatttcccttgaggttgacacaggccgcacaggcaaggtgaagaggagccaaggggacaagaaaacctggcgctggggccctgagggctatggggctatcttgctggtgaactgtgaccgggacaatcacaggtccgcagagcctgacctcacccacagctggctgatgtcgctggctgacctgcaggacatgtccccaatgctgctgagctgcaatggccccgacaagctcttcgacagccacaagcttgtcttgaacgtgcccttttctgattccaaaagagtgagggtcttctgtgccaggggtcctgaggatgtgtgtgaggcctataggcatgtgctgggccaaaataaggtgtcctatgaggtaccccgcttgcatggggatgaggagcgcttcttcgtggaaggcctgtccttccctgatgccggcttcacaggactcatctccttccatgtcactctgctggacgactccaacgaggatttctcggcatcccctatcttcactgacactgtggtgttccgagtggcaccctggatcatgacgcccagcactctgccacccctagaggtgtatgtgtgccgtgtgaggaacaacacgtgttttgtggatgcggtggcagagctggccaggaaggccggctgcaagctgaccatctgcccacaggccgagaaccgcaacgaccgctggatccaggatgagatggagctgggctacgttcaggcgccgcacaagaccctcccggtggtctttgactccccaaggaatggggaactgcaggatttcccttacaaaagaatcctgggtccagattttggttacgtgactcgggaaccacgcgacaggtctgtgagtggcctggactcctttgggaacctggaggtcagccctccagtggtggccaatgggaaagagtaccccctggggaggatcctcattgggggcaacctgcctgggtcaagtggccgcagggtcacccaggtggtgcgggacttcctccatgcccagaaggtgcagccccccgtggagctctttgtggactggttggccgtgggccatgtggatgagtttctgagctttgtccctgcccccgatgggaagggcttccggatgctcctggccagccctggggcctgcttcaagctcttccaggaaaagcagaagtgtggccacgggagggccctcctgttccagggggttgttgatgatgagcaggtcaagaccatctccatcaaccaggtgctctccaataaagacctcatcaactacaataagtttgtgcagagctgcattgactggaaccgtgaggtgctgaagcgggagctgggcctggcagagtgtgacatcattgacatcccacagctcttcaagaccgagaggaaaaaagcaacggccttcttccctgacttggtgaacatgctggtgctggggaagcacctgggcatccccaagccctttgggcccatcatcaatggctgctgctgcctggaggagaaggtgcggtccctgctggagccgctgggcctccactgcaccttcattgatgacttcactccataccacatgctgcatggggaggcatacagcttagaatgtagacaacactgggggaaaaacttgtactttcgagttggtctgaagaagaagaagaagaagaagaaaaaggagaaggaagagggacaagaagaagaagaggaggaagaggaagaggaagaagaagaagaagaagaacaagaagaagaaaaggaagaagaggaagaggaagaagaagaagaagaagaagaagaaaaggaagaagaggaagaggaagaagaagaagaagaagaagaagaagaagaagaagaagaagaagaagaagaagaagaagaagaagaagaaagaagaagaggaagaagaattgatgtttgtcaggcagttcctccatccagtcagagctgtagtggtcttggttgtaaatccaagtcatga

SEQ ID NO: 26510 - DNA, 993 bp, Homo sapiens; identical to SEQ ID NO: 3922
  SIMILAR (698)..(519): 351254mologous to Homo sapiens adlican,accession number AF245505,Smith-Waterman Score=81.

SEQ ID NO: 26511 - DNA, 248 bp, Homo sapiens
  SIMILAR (13)..(240): 821254mologous to Homo sapiens Human thyrotropin GPR N- terminal sequence,accession number W03626,Smith-Waterman Score=311.
atgacagcaaagtgtgtgtgtggttggggggtgggggagagagagcgagagaaagagagagaagaagaagaagaagaagaagaagaagaagaagaagaagaagaagaagaagaagaagaagaagaagaagaagaagaagaagaagaagaagaagaagaagaagaagaagaagaagaagaagaagaagaagaagaagaagaagaagaagaagaagaagaagaagaagaaaaatttaaagaatctatgaa

SEQ ID NO: 26512 - DNA, 1104 bp, Homo sapiens
  SIMILAR (7)..(576): 711254mologous to Mus musculus homeobox protein NKX2- 6,accession number AF045150,Smith-Waterman Score=672.
acccccgttggcaacagcggcgacagcgtgcggggtggccgctcggagcagcccaaggcgcggcaacgacggaagccgcgcgtgctcttttcgcaggcgcaggtgctggccctggagcggcgcttcaagcagcagcggtacctgtcagcgcccgagcgcgagcacctggccagcgcgctgcagctcacgtccacgcaggtcaagatctggttccagaaccgacgctacaaatgcaagagacagcgccaggacaagtcgctggaactggctggccaccctctaacgccgcgccgagtagctgtgcccgtcctggtgcgcgatggcaagccctgcctgggccccgggcccggcgcacctgccttccccagcccctacagtgcagcagtgtcgccctactcttgctacggaggctacagcggagcaccctacggcgcaggctacggcacctgctacgcgggcgcgccctcgggtcctgcgccacacacaccactggccagcgcgggcttcggacacggtggccagaatgccaccccgcagggccatctggcagccacgctgcagggtgtcagggcctggcttccccaaacccctaagcagccgcagaagcgctcccgagctgccttctcccacactcaggtgatcgagttggagaggaagttcagccatcagaagtacctgtcggcccctgaacgggcccacctggccaagaacctcaagctcacggagacccaagtgaagatatggttccagaacagacgctataagactaagcgaaagcagctctcctcggagctgggagacttggagaagcactcctctttgccggccctgaaagaggaggccttctcccgggcctccctggtctccgtgtataacagctatccttactacccatacctgtactgcaagaagaaggagaaggagaaggaggaggaggaggaggaggggaagaagaagaagaagaagaagaagaagaagaagaagaagaagaagaagaagaagaagaagaagaagaagaagaggaggaggaagaagaagaaggagcagcagctggaaatatttgggtatagctttgatgtgaagattaaatgttaccatgtatag

SEQ ID NO: 26513 - DNA, 843 bp, Homo sapiens
  SIMILAR (352)..(807): 531254mologous to Homo sapiens Human follicle stimulating hormone GPR N-terminal sequence,accession number W03627,Smith- Waterman Score=404.
ggctggggcaaagttctccagaaggctgtgtatgctctgagccagcttccaatatacggtactgcttttcccatagccaggatatgcagagtccaggaatcaggggtggaagtggaagtggcacctcttattatcacccctagtgacccactagcaaaatttttgctacctggacacttggggttcctcctacctttaagtcaacaggctaagaagggagttacaatgttggctggggtgactgacccagactatcaagatgaaaccagtctactactccacaacggagagtgtcaacttcaacttaagtgtggccttcctgtgaaggaaagtcagttgacgagtagcaagaaccgcttcatacttcaggcacatccaacatgggaggggagaaaggaaagagaaggagagagagagagagagaaagagagagagaagaagaagaagaggaagaagaaggagaagaggaagaagaagaagaaagaagaagaagaagaagaagaagaagaagaagaagaagaagaagaagaagaagaagaagaagaagaaagaaagaaggagaagaaggagaagaaggagaaggagaaggaagaaggagaagaaggagaaggagaaggaagaaggaagaaggaagaaggagaaggagaaggagaaggagaagaagaagaagaagaagaagaagaagaagaagaagaagaagaagaagaagaagaagaagaagaagaagaagaagaagaagaaaagagagagagagagagagagagaatgaacatgaaccaaagaagaaagaggaagagtcattctgagcatccaatatatgtgtcctcctattacatcacatag

SEQ ID NO: 26514 - DNA, 684 bp, Homo sapiens
  SIMILAR (207)..(311): 611254mologous to Homo sapiens Ndr protein kinase,accession number Z35102,Smith-Waterman Score=99.
aaaatagaaatcacagcttagtggtcacccttagctagcttaggtgtgaaaatcccatttcttcccatgtgggccatgtgggtgtatctctggcacacacaagaggtctgtttagccgccttattttggcagatagggaagacatatctgaaaattggtgctcactcgtatgttgtgtgtgtgtgtgtgtgtgtgtgtgtgtgtggtggctttgtatctccctgtttccaggggacatgatgaccttgttgatgaaaaaagacactctgacagaagaggagactcatgttttatatatcagaaacagtattagccatagactctattcaccaacttggattcatccacagagacatcaaaccagacaaccttcttttggacagcaagggccatgtgaaactttctgactttggtctttgcacaggactgaaaaaagcacataggacagaattttataggaatctgaaccacagcctccccagtgatttcactttccagaacatgaattccaaaaggaaagcagaaacctggaaaagaaatagacgtcagctagccttctccacagtaggcactcctgactacattgctcctgaggtgttcatgcagaccgggtacaacaagctctgtgattggtggtcgcttggggtgatcatgtatgagatgctcatcggtaagttgcatggt

SEQ ID NO: 26515 - DNA, 520 bp, Homo sapiens
  SIMILAR (144)..(272): 1001254mologous to Homo sapiens Ndr protein kinase,accession number Z35102,Smith-Waterman Score=233.
aaatcaaaagcattgatgatacctcaaacttcgatgagtttccagaatctgatattcttaagccaacagtcctgtcttcagcaccgtgagcagtccattggaggcaaggcagtgaatcaactctcacatctatttctttcccagtggccacaagtaatcatcctgagactgactacaagaacaaagactgggtcttcatcaattacacgtacaagcgctttgagggcctgactgcaaggggggcaataccttcctacatgaaagcagcaaaatagtactcttgccacggaatcctatgtggagcagagttctttgtataacatcatgctttttcctctcacactctttgaagagcttccaagaagttgatggaacccaccaatatgtcatagtaaagtctcctgaaatgtggtagtaagaggattttcttccataatgcatctgaaaaactgtaaacaaagacaaccatttctactacgtcggccataaacagctatcctgctttggaagagaagcatcg

SEQ ID NO: 26516 - DNA, 405 bp, Homo sapiens; identical to SEQ ID NO: 6890
  SIMILAR (66)..(218): 311254mologous to Arabidopsis thaliana gene_id:F1D9.26~unknown protein,accession number AP002460,Smith- Waterman Score=120.

SEQ ID NO: 26517 - DNA, 417 bp, Homo sapiens
  SIMILAR (48)..(173): 851254mologous to Homo sapiens KIAA0383,accession number AB002381,Smith-Waterman Score=177.
atgggcctgggggttggctctccctcagtcccttggtcctgtgagctctggaaagctgaaaggaagaagaagaagaagaagaagaagaagaagaagaagaagaagaagaagaagaagaagaagaagaagaagaagaagaagaagaagaagaagaagaagaagaagaagaagaaggaggaggaggaggaggaggaggaggaggaagaagagggagaagaagaagagttgggtagactgcacggaggaagtggcaaagtacgtgggcttggcttcactgagaatcagcagggttccaccaacagacagcaccaaagagaagacaatagaaaaagtaaacagaagaaaataaacaacacgaagcctgaggccacagaaagcctcattgttaatggaataacaatcacagcacctgcctga

SEQ ID NO: 26518 - DNA, 1446 bp, Homo sapiens; identical to SEQ ID NO: 5346
  SIMILAR (732)..(1409): 291254mologous to Gallus gallus avena,accession number AB017437,Smith-Waterman Score=146.

SEQ ID NO: 26519 - DNA, 693 bp, Homo sapiens; identical to SEQ ID NO: 10044
  SIMILAR (108)..(482): 531254mologous to Mus musculus retinitis pigmentosa GTPase regulator,accession number AF286473,Smith-Waterman Score=266.

SEQ ID NO: 26520 - DNA, 711 bp, Homo sapiens
  SIMILAR (160)..(534): 741254mologous to Homo sapiens deleted in azoospermia 2,accession number AF248480,Smith-Waterman Score=483.
atgagtgcgacagatgtatggctgtgttgtcgtcgataccgagagctcagtgcagtctatgatcccatgctggaggaggagaaacgtcataatactttaaatgaaggaagtaatgatcatgtcctagtcctcagccagcaggtggcgctcaaagctaacaaggcatttcctgcttatccaagttcaccatttcaggtcaccactggatatcagttgcctgtatataattatcaggcatttcctgcttatccaagttcaccatttcaggtcaccactggatatcagttgcctgtatataattatcagtttcagaacgtctggcggaatccaaacactgaaacctacctgcagccccaaatcacgccgaatcctgtaactcagcacgttcaggaatatcctacttatcccgattcagcatttcaggtcaccactggatatcagttgcctgtatataattatcagccatttcctgcttatccaagttcaccatttcaggtcactgctggatatcagttgcctgtatataattatcagaataaagaagaagaagaagaggaagaaggggaagaagaagagaaggaagcagaagaggaagaagaagaaggagaagaggaagaagaagaagaagcagaagaagaagaagaggaggaagaagaagaagaagagagaaaagcatgtttttcaggttaccctcaagaagttggtgtctag

SEQ ID NO: 26521 - DNA, 1233 bp, Homo sapiens; identical to SEQ ID NO: 3966
  SIMILAR (960)..(1214): 361254mologous to Plasmodium falciparum glutamic acid-rich protein,accession number AF251290,Smith-Waterman Score=147.

SEQ ID NO: 26522 - DNA, 369 bp, Homo sapiens
  SIMILAR (78)..(296): 321254mologous to Rattus norvegicus cyclic nucleotide-gated channel beta subunit,accession number AJ000496,Smith-Waterman Score =123.
atgtcttacgtggcagcagttatgttcttctgttcagtattaggaaagttccagatgaacttggaggaggaagtggaaaaaagaagaaggaagaagaaagacaaaaagaaagagaaggaggaggaggaggagaaggagaaagaaggagaagaaggagaaggagaagaagaagaagaagaagaagaagaagaagaagaagaagaagaagaagaagaagaagaagaagggaagaagaagaagaagaaggagaagaagaggaagaagaagaagaagagaagaagaagaaaaggaggaggacactttattgcatgtaaattaaaatacttatggacagtgagtggccacatcttatgccctaatacgaattag

SEQ ID NO: 26523 - DNA, 1206 bp, Homo sapiens
  SIMILAR (52)..(579): 301254mologous to Rattus norvegicus cyclic nucleotide-gated channel beta subunit,accession number AJ000496,Smith-Waterman Score =219.
atgagcaaagaggggaacaatagacactgggaccgacttgagggtggagggtggaggagggtgagggtcgaaaaacgacttttcagagactacccttcctcacaccccagaggtgcagaggccttcacatctcctgacagcattggcaggtgcacgttgagatttccgggcctccagatggggctgcaccaaccggccctaattgccattttgagaagcggagcagacctgtctcatctggaagggcccatgctggaagcgggagcgtctgcgtgtgccccagctgtctctcctggtgatcaagcattacaacagcacccaggagagggcaggaaggtgccgggaaaaagaagaagaagaaaggaagaagaagaagaggaggaggaggagaagaggaagaagaagaagaagaaagaagaagaagaagaagaggaagaagaagaagaagaggaagaagaagaagagaagaagaagaagaagaagaagaagaagaagaagaagaagaagaagaagaagaagaagaagaagaagaagaagaagaagaagaaacaaacaaacaaaagggccaccgtgcaaaaatctaatgttggtcttctgccctcagaacaaagccccttctccctgtctccaaattgcagcagagttcagctgggcatgggcaaggtagctgatcgcagaagcagagtgggaaggctagtcttctcttccttcagtggtgcagaaatccagaagactgtaatggattctgctccaggctcagtcctcatgctggttgtaagccagctcattgcagttctggctgataccaaggtagatgccacaagtaccagaattttcaaggccctggagctgctggaggggcttccgcagactccagggatgttgcagaacggagctgaggcctctcgtggccagttttctgttctgtcatcaaggtcatacaagacagaagctgatggactgaacttacagcacatttctgtctcctggctgggatggaggatggaggatggagggaaagtggaggaaggatttgagagcctctgcttccatggagctcataaatcacagctgacaaagcaggggctctccgctgtgtacaccttttgtttcaggtgcaaatggtcactggaatatgcatgtggactttgtgtggttaagaaactacatacgcacagtggagtagttactgggccagagagctga

SEQ ID NO: 26524 - DNA, 990 bp, Homo sapiens
  SIMILAR (801)..(962): 771254mologous to Plasmodium lophurae histidine-rich protein,accession number X01469,Smith-Waterman Score=325.
atgtcagcggtatatgggcatgtcagcggtatatggacatctcagcgatatatgaacatgtcagcggtatatggacatgtcagcagtatatggacatctcagcggtatatggacatgtcagcagtatatgaacatctcagcggtatatggacatgtcagcggtatatggacatctcagtggtatatggacatctcagtggtatatggacatctcagtggtatatggctcataaagagctctcacaatcagtgtcccctcatcactcagaatcatcctgtggcctcgatatcactattgtccacatttgcagaacaggaccactcttctcctcaacccccatgtcaatggcagaatgggaattaatgcccacctacgggttgcaagtgcttacaggagctgggcaagcaacgaagctattacatgatgatgatgaagaagaaagaagaggaagaggaagaggaagaggaagaagaagaagaaagaagaggaagaagaagaagaagaagaagaacaagaagaagaagaagaagaagaagaagaagaagaagaagaagaagaagaagaagaaggagaaggagaagaagaagaaaaaaaaaacccaccagcagggtactgcccagctttccccccacaccctgcatgcccccaactctgtacctctgtgcctagatgaggctgtttgcttctccctgtctgtcctcatcatcttcccccctttccaaatcctgttagataaggtagcaaaattccttcagaggtctcctccttttcccctctcctcctcctccttcttgttcttcatcactaccaccccgaccaccactctcaccaccatcaccatcaccaccatcatcaccatcatcaccatcaccaccatcatcatcgtcaccattgccaccatcatcaccatcaaccccatcatcaccatcaccaccatcagcaccatcaccaccaccaccacatcaccattatcaccaccaccaccataa

SEQ ID NO: 26525 - DNA, 591 bp, Homo sapiens; identical to SEQ ID NO: 6325
  SIMILAR (103)..(420): 631254mologous to Homo sapiens Human follicle stimulating hormone GPR N-terminal sequence,accession number W03627,Smith- Waterman Score=323.

SEQ ID NO: 26526 - DNA, 1407 bp, Homo sapiens
  SIMILAR (262)..(468): 811254mologous to Homo sapiens putative p150,accession number U93574,Smith-Waterman Score=288.
atggagatgatatggccatctaaagggatgccattcacatccacgtcctacagcaacaaggaaagcagcctcttgtccgtggtccagactagttcatacagtcacacgcacactcggggctccagtgaagaagttgaatctctgaatagaccaataacaggctctgaaattgtggcaataatcaatagcttaccaaccaaaaagagtccaggtccagatggattcacagccgaattctaccagaggtacaaggaggagctgagaataaaatacctaggaatccaacttacaagggacgtgaaggacctcttcaaggagaactacaaaccacccctcaatgaaataaaagaggatacaaagaaatggaagaacattccatgctcatgggtaggaagaatcaatatcgtgaaaatggccatactgcccaagattattgttgaagatgccctgcagatttactatgatatggttttggtctgtgtcggtgttggtgtatcttgtcgaattgtaatctccagtttggaggttctagaaagcagacgtgggcagcgcattttcttccttgttcaggcagagcaagttttgtgggcttttaaagaggttagctctaactgtaatgacaaatctacactgagaggatctgttgtgaaattgcaatgcacttcaggaacatcagcatttgacatatttcaagttggcagcagagtcttgggggagcacagattacccagtgttcattcagcaacttatatgagccttacatattttgagcttgcaggtcttctggagaaatcaagtcagttggttggctctacaggtgtagaagacatcgtggccataatgattcctgagccaaaagggaaggagatagtaagcctgctggaaagaaacatcaccgtgacaatgtacatcaccatcggaacccggaacttgcagaaatatgaaagatggaaaaagaagagaaccaaagggctagagtatcaagaatttggatttgacgatgttaaatttagaagccttttagatattgaagcagagatgccagaccttcacaggctacccagaaacatgcatgcttccagtccctccaagagaactgctcgtggaaggaataaaaacaagagcagcagattaaccatgtttggagtggaaatccaagaagaagaagaagaagaagaagaagaagaagaaaagaagaaaagaagaaaagaagaagaagaagaagaagaagaagaagaagaagaagaagaagaagaagaagaagaagaagaagaagaagaagaagaagaagaaggagaagaagaagaagaagaagaggaggaagaagaagaagaagaaaacatttccatcatattggttcctagcaaagctaaagaaagagctttatcagttcaggagctacaataa

SEQ ID NO: 26527 - DNA, 552 bp, Homo sapiens
  SIMILAR (1)..(255): 401254mologous to Pongo pygmaeus fertilin alpha protein,accession number Y15491,Smith-Waterman Score=162.
atgctgttgctacttctgcttttgctgttgttgttgttgttattgctgctgctattgctgctgttttggattcccagccagcaccttctcaggggcagcatccatccccctgcttcctcatccccagcattatcacgtaaggaagaagagaaaaaaagaaagaagaaagaagaagaagaagaagaagaagaagaagaagaagaagaagaagaagaagaagaagaagaagaagacgacgacgacaatactaacagcccaactccagatgcttatcaagtcaatccagatgtaccgtgccctagtgaggtgaagagaagcactaccttagaaagagagaaaagcagtgatgatttccaatttgccaccaaggaagtgtgtgtttctcccagggtgcttgttggctctgctaaccttggtgtggaaggagcccgtgtgtggagtccctgtggggaaggccctgaagaacaagagctggagagaaacggagtgaagggaaacggtgtgctgagcagctgtgggaggctgaggagactggaagcggccagaggaaaa

SEQ ID NO: 26528 - DNA, 1684 bp, Homo sapiens
  SIMILAR (1204)..(1545): 361254mologous to Arabidopsis thaliana gene_id:F1D9.26~unknown protein,accession number AP002460,Smith- Waterman Score=295.
atgggtctggccgtcgagcagcttgtccccaccatggagctatgggcactgggctgtcacttgccgagtgccctggacgtgctagggctgaatggccccacctctaacactggggatcacatttcaagcactgccggatccggcttgcgcgccgggaaggctcccagcgaagtgagagcgaagcctccggcgaggctggaaatagcgccgcgcccgcccggcgccccgcccccggcccgtgccccgccccgccgtggtggcggctacggcggtggccgggccgggcggggatcgctccagcgatgcactcggccctcccgggggctcgcgggcgccgcgcccacgcgcgctctgcggctcccgcggcccctctggcagcgctctcagaaagagtcgctgctgggcgcggtccggcggccgcgggggtgggagcggtcgtggctggggctgcgccggtctcccggttcaggagagccggactccggcctgacgctaggctccagaccgcggccagtgctgccactgcctcggtgggtcgcacgcggcgccaacccgggaaaaggaccaggcgtcaccggggcgggccttgaccacagcggggcaggggcgcgcgcccaggacccgatgctgcgggggcgcagggccggtgaaaggcggaagattgatcctgaggaagattctgggatatccctgggcttcagctcgcgtggaattcggtcaaggccgcgagctgcctcaggcccgggtgtccgcatccatcctcaaatccctggggctctagattctgctgaaagtgccctgcgaacaggtgctcccttcaggacttcatcctggaagtttgtgtcgggtcaccagcctgagagcggggccaaccgaccctcttcatacacactcgggaaaacagcgtggagggtggaaccggcccacggccacacagcaccgggacagagtagggacaggaacacggggccctggattcgggtccttgttcttcctaagaagaggcagccccagcctgcaggggacaagcaggccttgggaaggggggcaactgctttctcacaggagctggaggaaactgtgcacacagtcaccttcaggtgcagattggaggagctgagtgcaagggccagggactcaagtgtcaggaaaaacagggcagtggaacccttattcatcctacatcccaaagctgttggagcagagcaggagagaagaagaaggagaaggagaaggagaagaagaagaagaagaagaagaagaagaagaagaagaagagaagaggaagaagaggaagaagaggaggaagaggaggaagaggaggaagaagaggaagaagaggaagaagaagaagaagaagaaaagaagaggaagaagaggaaaaagaaggaggaggagaagaagaggaagaagaagaagaagaagaagaagaagaagaagaagaagaagaagaagaagaagaagaagaagaagaagaagacgaggaagaagaagaagaagaagaagacttgttccacagaggagtttgggagccatctatactggcagagggacatccgagagcagcagacctggaatgccagccccatgtccagcacccgacctgggcccctgaaggtccacagaggtgaaggagaaactggaaaaaccgagatgcacaaaattttttccaaattggaagcag

SEQ ID NO: 26529 - DNA, 297 bp, Homo sapiens
  SIMILAR (1)..(288): 571254mologous to Homo sapiens Human thyrotropin GPR N- terminal sequence,accession number W03626,Smith-Waterman Score=261.
cctactcagtgtgaagaggatgaggatgaggatgaaaatctttatgataatccggttccacttaaggaagaaggaagaagaagaaggaagaaggaagaagaaggagaaggagaaggaggagaaggaggagaaggagaaggagaaggaggagaaggagaaggagaaagagaaagagacgaagaggaggaggaggaggaaaaagaagaagaagaggaagaagaagaagaagaagaagaagaagaagaagaagaagaagaagaagaaaaagaagaagaagaagaagaagaaaggctatga

SEQ ID NO: 26530 - DNA, 462 bp, Homo sapiens
  SIMILAR (107)..(33): 361254mologous to Schizosaccharomyces pombe putative glucoamylase,accession number AL031262,Smith-Waterman Score=40.
atgacaagctataagttcacagagcccaagaacgggatctggcaacttcatgaagcagcacaactagatacaacatataacaagttaaacaaaaaagaagaggaagaggaagaaggaggaagaagaagaggaagaagaggaagaagaaagaagaaggagaaggagaagaagaagaagaagaagaagaagaagaagaagaagaagaagaagaagaagaagaagaagaagaagaagaagaagaagaagaagaagaaggagtcatacttctatccccaaagaatctactcttctccagtctcaatctgtgggcttaggatgagggtccctgactttgttccagaagaacaacaagtgaagcaagagagaggcctgagacaatcaaggtattccatccttctagttcatctggggttggacagacacatgactcacaccagatcaagcagtcctaaacagatctaa

SEQ ID NO: 26531 - DNA, 1620 bp, Homo sapiens; identical to SEQ ID NO: 6503
  SIMILAR (952)..(1137): 571254mologous to Arabidopsis thaliana putative protein,accession number AL162506,Smith-Waterman Score=147.

SEQ ID NO: 26532 - DNA, 338 bp, Homo sapiens; identical to SEQ ID NO: 11269
  SIMILAR (95)..(331): 671254mologous to Homo sapiens Human follicle stimulating hormone GPR N-terminal sequence,accession number W03627,Smith- Waterman Score=251.

SEQ ID NO: 26533 - DNA, 801 bp, Homo sapiens
  SIMILAR (268)..(552): 751254mologous to Homo sapiens Human thyrotropin GPR N- terminal sequence,accession number W03626,Smith-Waterman Score=347.
atggttgaccagaggcatctggtactcacctcctccaccaagaaaaaccaaaataacaacttccaagtttttgttattgaaaatgtggggagagaaccacagacagacaagatagcatcaccaggagctggtcagagctgcacagcctcggtcaccgcagacctgctgagccgggatctgcattttaccaaggttcccagctggtcttcagatggtccaccatactatccccctgcctgtcacttgatgtcagagccctacttctgggggtcctgctgctatgatacaccgatcaaaaccaagactaccaacgaagaagaagaaggagaaggagaggaagaggaagaggaagaagaagaagaggaagatgaagaagaggaagaagaaaaagaagaagaagaagaggaagaggaagaaggagaaggagaagaagaagaagaagaagaagaagaagaagaagaagaagaagaagaagaagaagaagaagaagaagaagaagaagaggaagaagaggaagaagaagaagaaagcctagaggcggaaggtgaacaagtgtccttggagttgccaataggggggaatttgcacagatttggcagctgtttctggtggtcatcattagttcccagtgcatctatgggatctgaggaaaccaatgctaaaagaggagatgaggacacagacatgcacagagggagggtgcagggagaaaaagccatctgcaagccaaggagaggggcctcagaagagaccaacccccctgacaccttgatcttggacttccagcctccagaactgtga

SEQ ID NO: 26534 - DNA, 1218 bp, Homo sapiens
  SIMILAR (732)..(1160): 411254mologous to Homo sapiens Human follicle stimulating hormone GPR N-terminal sequence,accession number W03627,Smith- Waterman Score=299.
atggctcacaacctcctcctcatttctgaagacctcaggagcgtccgatgtgggaggatccatcagaatcggccaaacagtgctgagagattcaacttggcaggtgctgtcctgggctcccctggtttcacctctggccgccactactgggagaccaagataccagtgaaatatccccctcagtcttctgccccaggaaagccgaccttccctgttgtcgttcagggcaccctgagtggggcagcagtgctgcagctggccaccttcagggaggtggaacccaacctggaggaggaaggccctgcagaaccctggacaggggatgagggagacctaaaggtgaggttctgcctttctgtgcccacatgggaagtacggttcctagggtccaggtcttcagccgtgagtcggaaccccagctgggagggaggtacagcgtcagaggctcccctcgcctgcatggcagcagaggaaacttgcatcgaaggggccagtactgtggatgcgagggagccattcttggaggtccttgtcctgctcaggtatccatttcctcagggtccatttgagggccctcagagggccttcaaaaccaaaaacaaaacacagggtctgcagtatcttaggatgttgtctccaagaggctctaagaaaagccagtgtaaagtcactgaattcttggagttggtccaggaccaaggtaaagacaatcacagagcaattagtcctcaaagaggaagaagaagaagaagaagaagaagaaggagaaggagaaggagaaggagatggagaaggagaaggagaaggagaaggaggaagaagaagaagaagaagaagaagaagaagaagaagaagaagaagaagaagaagaagaagaagaagaagaagaagaagaagaagaaggggaagaaggggaagaaggggaagaaggggaaggggaagaaggagaagaaggagaagaatgagaagaagaaagaagaaggaagaagaaggaagaagaaggaagaagaggaagaagaggaagaagaggaagaagaagaagaagaggaagaagaagaggaagaagaagaaagaagaagaagaagaagaagaagaagaagaagaagaagaagaagaagaagaagaagaagttgttgttgttattgggccagagaaatgctccaagaattcactacaaaatgtggtcttgttctttggcacaacccactaggcagctga

SEQ ID NO: 26535 - DNA, 571 bp, Homo sapiens
  SIMILAR (19)..(381): 611254mologous to Homo sapiens Human thyrotropin GPR N- terminal sequence,accession number W03626,Smith-Waterman Score=366.
atgcagatcccatctctacataaattgaagaaagaagaagaagaggaagaggaagaggaggaagaggaagaaagaagaagaagaataggaagaggaagagagaagaaagaagaagaagaagaagaagaagaagaagaagaagaagaagaagaagaagaagaaggagaagaagaagaaagaagaaaagaagaagaaagaagaggaagaagaagaaagaagaagaaagaaaaagaaagaaagaaaagaagaagaagaggaagaagaaaggaagaagaagaaggagaagaaggagaggaagaagaagaggaagaagaagaagaaagaagaaaagaagaagaagaggaagaagaagaaggagaagaggaagaagaagaagaagagtcgtgcctcatggtgcacacctgtaatcccagctactcaggggatcgcttcacccaggagtttgaggctgcagtgaggtccctcacttgggctctgcttttggtggaaattgaacttaaacacccacctaaacactcaacaggaaatctctgcttctccatcaaagagaataaaaagtctcatccttccc

SEQ ID NO: 26536 - DNA, 1365 bp, Homo sapiens
  SIMILAR (1)..(549): 721254mologous to Homo sapiens ORFII,accession number X52235,Smith-Waterman Score=697.
atgaaacaggatcctcatctctcaccttatacaaaagtcaactcaagatggatcaacgacttaagtctaagacctgaaaccataaaaattctagaagataacatcagaaaaaccctcctagacattggcttaggcaaagacttcatgacaaagaacctaaaagcaaatacaacaaaaacaatgatgaatagatgggatttgattaaactaaaaagcttctgcacagcaaaagaaataatcatcagagtaaacagacaacccacagaatgggagaaaatcttcacaaactatgcatccgacaaaggactaatatccagaatccacaaggaactcaaacaaatcagcaagaaaaaaccaaaccatcctatcgaaaagtgggctaagaacatgaatagacaattctcaaaagaagatatacaaatggcaaacaaacataggaaaaaatgctcagaatcactcgtgatcaggaagatgcaaatcaaaaccacaatgggataccatctcataccagttagaatggcaatcattaaaaagtcaggaaacaacaggctgtctcttcttcctccaccctgtctcttcctcctcctttctcccatgcgatgcgaatatccaggaaaaattggaaactgctgctttttaggtccctcttctgcaggtctgctggagtttgctgaacgtccactccagaccctgttttcctgggtatcaccagtgtgggctgcagaacatcaaagattgcttcctgctccttcctgtggaagcttcaccccagaggggcacatgccagatgccagccagagctctcctagctggcagtcaggaatgtctaagtctgttgaagctgcacccacagccaccctttcccccagagataccttgcccagtaaggaggaatctagagatgcagtctggctaaagtggctttgccatgctgtggtggattctgcccagtctgaaattcctggtggctttgtttatactgtgaggggaaaaccacctgctcaagctgcactaatggtagacgtccctcctcccaccaagctcaagcatcccaagtcgacttccatctgttgtgctgtcagtgagaattttaagcctgtggatcttagcttgcttggctccatggcgttgggacctactgagaaaggccagttgtctccctgccttcagtctgcttttgagtggagccaacggttctttctcactggggttccaggcactactgggaagaaaggaggaggagaaggaggaggaggagtaggagaaggagaaggagaaggagaagaagaagaagaagaagaagaagaagaagaagaagaagaagaagaagaagaagaagaagaagaagaagaagaagaattttaa

SEQ ID NO: 26537 - DNA, 539 bp, Homo sapiens
  SIMILAR (120)..(269): 721254mologous to Ovis aries CENP-B protein,accession number U35655,Smith-Waterman Score=161.
atgagggagctacagggccttgagggtccgaagatcctgagacagatgcttacatggacgttgagacaggaaagaatggtcaagacagactgggcgacagagcgagactccatctcaaaaaaaaagaaggaggaggaggagaagaggaagaagaagaaggagaagaagaagaagatgaggaggaggaggaggaagaagaagaaggagaagaagaagaagaagaagaagaagaagaagaagaagaagaagaagaagaagaagaagaagaagaagaaggaagaagaacaagaacaagaacaagaacaagaagaacaagaagaacaagaagaagaacaagaagaagacaacagagatgaggacaggggactccaaccatcctcgggcatctggaggcaccgcagcttccaaaccagcgccatttcaagggacatcgacacagcagccaagttcattggagctggggctgccacagttggggtggctggttctggggctgggattggaactgtgtttgggagcctcatcattggttatgccag

SEQ ID NO: 26538 - DNA, 646 bp, Homo sapiens
  SIMILAR (141)..(590): 981254mologous to Homo sapiens Ndr protein kinase,accession number Z35102,Smith-Waterman Score=804.
  misc_feature (1)...(646): n = a,t,c or g
ctgggtacaaaggtgggccccgtttccnnnnnnnnnnnnnnnnngaaaaaagaaaaaaaaagccatagaattttattaaggagagtaatctcggtcagattcaaagttctggagtgtaaaagctccgaagttccttttttattacaggctacccacctttctgttctgagacccctcaagagacatataagaaggtgatgaactggaaagaaactttgacttttcctccagaagttcccatctctgagaaagccaaggatctaattttgaggttctgctgtgaatgggaacatagaattggagctcctggagttgaggaaataaaaagtaactgtttttttgaaggcgttgactgggaacatatcagagagagacctgctgcaatatctattgaaatcaaaagcattgatgatacctcaaacttcgatgagtttccagaatctgatattcttaagccaacagtggccacaagtaatcatcctgagactgactacaagaacaaagactgggtcttcatcaattacacgtacaagcgctttgagggcctgactgcaaggggggcaataccttcctacatgaaagcagcaaaatagtactcttgccacggaatcctatgtggagcagagttctttgtataacatcatgc

SEQ ID NO: 26539 - DNA, 487 bp, Homo sapiens
  SIMILAR (282)..(485): 1001254mologous to Homo sapiens Ndr protein kinase,accession number Z35102,Smith-Waterman Score=343.
accgcaattcccgggtcgacgatttcgtccgcggcgggggaccgggctgccttggcccctcagcgctcgcgtcttttccggcaggtgggaacgcttgctgttgtcctcacccgtaaccgcctgttgccccctgtctcagagtccctcacgcgtcccctcccgtctttggctcgttggctgccgccgccggggcttcgccagccttcaagtcgagactactggccgaaggggcgtctgcggctctccgccgtccccagccctgcctctccctgggctctgccatggcaatgacaggctcaacaccttgctcatccatgagtaaccacacaaaggaaagggtgacaatgaccaaagtgacactggagaatttttatagcaaccttatcgctcaacatgaagaacgagaaatgagacaaaagaagttagaaaaggtgatggaagaagaaggcctaaaagatgaggagaaacgactccggagatcagcaca

SEQ ID NO: 26540 - DNA, 2482 bp, Homo sapiens
  SIMILAR (726)..(755): 801254mologous to synthetic construct galactosidase fusion protein,accession number A04190,Smith-Waterman Score=40.
tctaatgctggtggttatattcaatgggactgagagaatagaggatcttaggaaacctccatcctttgatgccattcttggtggggggcttagagtcctcttcttccagaacgaagcacatccccctttcgccagctggcgtaataacgaagaggcccgcaccgatcgcccttcccaacagttgcgcagcctgaatggcaaatggcgcctgatgcggtattttctccttacgcatctgtgcgaaacgctggtgaaagtaaaagatgctgaagatcagttgggtgcacgagtgggttacatcgaactggatctcaacagcggtaagatccttgagagttttcgccccgaagaacgttttccaatgatgagcacttttaaaggtctgctatgtggcgcggtattatcccgtattgacgccgggcaagagcaactcggtcgccgcatacactattctcagaatgacttgggtgagtactcaccagtcacagaaaagcatcttacggatggcatgacagtaagagaattatgcagtgctgccataaccatgagtgataacactgcggccaacttacttctgacaacgatcggaggacccaacgagctaaccgcttttttgcacaacatgggggatcatgtaactcgccttgatcgttcggaacccgagctgaatgaagccataccaaacgacgagcgtgacacccgatgcctgggacaatggcaacaacgttcgcaaactattaactggccaactactactctagctcccggcaccattaataactggatggaagcggataaagtctcacatccaggtcatgctgatataagaggtgggttcacagtcttgggcagctctgcccttgtggctttgcaagaaatacaaaaaactgtcagagactattatgaacacttctatgcatgcgagctagacaacatagtagaaatggaaaaattcctggaaacatacaaccacacaagattgaaccgagaagagattgaatccctgaacagaccaataacaagttccaaaattgaatcattaataaaaaccctacaaactagaaataacccaggaccagatgaatttacagccaaattctaccagatgtataaggaagagctgggcaatgaacagcatttatcaattctctcttccaaagagaaagaagagctaaaccatggcaaatctccaaatacaacctcctcaggagtaggaggagcagaaggagaaggagaagaagaagaagaagaagaagaagaagaagaagaagaagaagaagaagaggaagaagaggaagaagaagaagaagaagaagaagaagaagaagaagaagaagaagaagaagaaagaagaaagaagaaagaagaaagaagaaagaagaagaaagaagaagaaagaagaagaaagaagaagaaaagaagaagaaaattagccgggtctgtgggtcagacctcagcaggtggtgcctcgtgtgaggaacgctgcagcggcctggtgattgtgacgtatcccttgacatcgaaggtgaaaagggctgtgcagtcatcttcacaaccggcagaccaggagactccctctggtgcctatgctaccagggccctgggtttcaagcacaaaactgggcagccttttggggaagccactgagctagctgcagaaggatcacaactccttgcagcaagggaacaaaactggatgaacaatgagtttgatgaattggaagaagtaggcttcagaagaataaccagtttagagaagaacataaatgacctgatggagctgaaaaacacagcaagaaaacttcatgaagcatacacaagttgcaacagccaaatcgatcaagcagaagaaaggatatcagagattgaagatcaactcaatgaaataaagcaagaagacaagattagagaaaaaagagtgaaaagaaatgaacaaagtctccaagaaatgtgggactatgtgaaaataccaaatctaggtttgattgttgtacctgaaaatgatggggagaatggaaccaaattggaaaacactctgcaggatattatccaggagaacttccccaacctaacaaggcggatcaacattcaaattcaggaaaaacagagaacaccacaaagatactcctcgagaagagcaaacccaagacacataattgtcagattcaccaaggttgaaaagaaggcaaaaatgttaagggcagccagagagaaagagagagacagagagagagaagaagaagaagaggaagaagaagaagaagaagaagaagaagaagaagaagaagaagaagaagaagaagaacaagaagaagaagaggaagaggaagaggaagaggaagagaggaacagagaaagagagagagagagggagagagggagacttgctatgttacccagacttaagtgcagtcatgtgatcatagctcactgcagcctgaaattcctgggctcaagtgatccagttgccccagcctccgag

SEQ ID NO: 26541 - DNA, 1129 bp, Homo sapiens
  SIMILAR (632)..(1126): 941254mologous to Homo sapiens diubiquitin,accession number Y12653,Smith-Waterman Score=790.
taagggagatgtgggtgagtggctgtcagcaggaaaaggtgagagttcagctatgtttgcatctgagcaggaaatttccaaggatgagcagggaactccagtgctgggctcattttactgggaggtagatagccccaggaaggaatccagtcaggcctgggcaccaggccaggagtggataaagctagaaagagacaccacagaagagaagatgtttgaacagctgaagccaatcgaacctgtacagaagacgctcccatgggtgggcgaggtagctgccaccctgcaggaagccatgaagagagattgctggagggaggcacgggtgaagaagaagccagtcacctttgaggatgtggcagtgaatttcacccaggaagagtgggactgtctagatgccagccagagggtcctttaccaggatgttatgtcggaaacctttaagaatctaacatctgtggcctgggtccgaaaaaaagaagaagaagaagaagaagaagaagaagaagaagaagaagaagaagaagaagaagaggaagaggaagaagaagaggaagaggaagaggaagaggaagaggaagagggagaggaagaagaagaagaagaagaagaaggagagaacaacttggctatggggaaatcctttaacgtgattactgtgcatgtccgttccgaggaatgggatttaatgacctttgatgccaacccatatgacagcgtgaaaaaaatcaaagaacatgtccggtctaagaccaaggttcctgtgcaggaccaggttcttttgctgggctccaagatcttaaagccacggagaagcctctcatcttatggcactgacaaagagaagaccatccaccttaccctgaaagtggtgaagcccagtgatgaggagctgcccttgtttcttgtggagtcaggtgatgaggcaaagaggcacctcctccaggtgcgaaggtccagctcagtggcacaagtgaaagcaatgatcgagactaagacgggtataatccctgagacccagattgtgacttgcaatggaaagagactggaagatgggaagatgatggcagattacggcatcagaaagggcaacttactcttcctggcatcttattgtattggagggtga

SEQ ID NO: 26542 - DNA, 1072 bp, Homo sapiens
  SIMILAR (743)..(1063): 831254mologous to Homo sapiens Human follicle stimulating hormone GPR N-terminal sequence,accession number W03627,Smith- Waterman Score=436.
aaatcactgcatgatcttgagccagccattcaacacacttccccatctgcaggagtaagtgatgggaaatggagtctttctccctcacacagaggttgaagaatggtagtaaatggctgattatggtctctgagtaacctcttttttttttttttttttttttcatttttttccgcccatcaataaggctttccagtacaacatggtaacttgcttttttctttttattcctttgcatcattcatatattatactatgcctttaatgaatatggattttcttttttctttgttggttatttagttttaaccaagattgacaactacatcttcttagtcttcttagaatttgagttttcacctgatacactggtctttctctctcttttcccacagggtgtattctacccactggaaaacctcaccgacccccccttctcaccagttccttttgtgctcccagaacgcagcaactccatgctctacattggaatcgccgagtattctacattttccctgaaaagacaatccacgtaaaatcctaacagtgacataatggtaaccttgtgatctcccttcaccaactcacgcctcacaatctttatttctttctcggaatgtgggcagattgcagagatctacatcttgtcccagcccttcatggtgaggatcatggccacagagcctcccataatcaatctacaaccaggcaatttcaccctggacatcctgagccgagatcacaccactgcactctagcctgggcgacaagagtgaaactccatctgaaaaagaagaagaaagaagaagaagaagaagaagaagaagaagaagaagaagaagaagaagaagaagaagaagaagaagaggaagaagaagaggaagaagaagaggaagaagaagaagaaggagaagaagaagaagaagaagaagaagaagaagaagaagaagaagaagaagaagaagaaggggaggaggaggaggaagaggaagaggaagaagaagaagaagaagatgaggaggaggaggaggaggaagaggaagaggaagaagaagaagaagaactgctctag

SEQ ID NO: 26543 - DNA, 2370 bp, Homo sapiens
  SIMILAR (1441)..(2367): 1001254mologous to Homo sapiens BC85395_3,accession number AC005255,Smith-Waterman Score=1602.
agcttccatctccaccaacaaccattcagggaggaattcacacttccacatggaggcttttctttcagaaaaccagtcaaggattttcagagaaacaagaattgcagcccttcctctttgggctgttcctgtccatgtacctggtcactgtgctcgggaacctgctcatcatcctggccgcaatctcagactcctgcctccacacccccatgtacttctttctctccaacctgtccttcgtagatatctgttttgcctccaccatggtcccaaagatgttggtgaacatccagacacagagcaaagtcattacctatgcaggttgcatcacccagatgtgcttttttgtactctttatagtgttggacagcttactcctgaccgtgatggcctatgaccagtttgtggccatctgtcaccccctgcactacacggtcatcatgagccctcagctctgtggactgctggttctggtgtcctggatcatgagtgtcctaaactccatgttacaaagcttagtgacattgcagttgtccttctgcacagacttggaaatccctcactttttctgtgaacttaatgagatgatccaccttgcctgttctgacacctttgtgaacaacatggtgatgcattttgcagctgtgctgctggacggtggtcctctcgttgggatcctttattcttactgtaggatagtttcctccatacgtgcaatctcgtcaactcaggggaagtacaaggcactttccacctgtgcatctcacctctcagttgtctccatattttatgacagagcttcagtttccatcatcaaccatccagggaggaattcatacatccacatggacgacaccttccttccagaaaatccatcaggtcacatcaacaagatgaaaccagggaatgatacacgaatttcagaatttcttcttctaggactttcagcagaaccagaattgcagcccttcttctttgggctgttcctgtccatgtacctggtcaccgtgctcgggaacctgctcatcatcctggccacaatctcagactcccacctccacacccccatgtacttcttcctctccaacctgtcctttgcagatatcagttttgtgtctaccactgtcccgaagatgctggtgaatatccagacgcagagcagagtcatcacctatgcaggctgcatcacccagatgtgctttttcctactatttgcagtgttggacagccttctcctagctgtgatggcctatgatcgcctgggcaacagagcaagactctgtctcaaaaaaaaaaaaagagaagaagaaagaagaagaagaagaagaagaagaagaagaagaagaagaagaagaagaagaagaagaagaagaagaagaagaagaagaagaagaagaaaagaagaggaagaaaagaaaaatgccaaagtcacatcacaagatgaaatcatggaacaatacaataattttagaatttcttctcctgggaatttcagaggaaccagaattgcaggccttcctctttgggctgttcctgtccatgtacctggtcactgtgctcgggaacctgctcatcatcctggccacaatctcagactcccacctccacacccccatgtacttcttcctctccaacctgtccttcgtagacatctgttttgtctctaccactgtcccgaagatgctggtgaacatccagacacacaacaaagtcatcacctatgcaggctgcatcacccagatgtgctttttcttactctttgtaggattggataacttccttctgaccgtgatggcctatgaccggtttgtggccatctgtcaccctctgcactacatggtcattatgaaccctcaactctgtggactgctggttctggcatcctggatcatgagtgttctgaattccatgttacaaagcttaatggtgttgccactgcccttttgtacacacatggaaatccctcattttttctgtgaaattaatcaggtggtccaccttgcctgttctgacacctttcttaatgacatagtgatgtattttgcagtagcgctgctgggcggtggtcccctcactgggatcctgtactcttactctaagatagtttcctccatacgtgcaatctcatcagctcaggggaagtataaggcattttccacctgtgcatctcacctctcagttgtctccttattttatggtacatgcttaggggtgtaccttagttctgctgccacccacaattcacacacaggtgctgcagcctcagtgatgtacactgtggtcacccccatgctgaaccccttcatctacagtctgaggaataaacacataaagggtgctatgaaaacattcttcagaggaaagcaatag

SEQ ID NO: 26544 - DNA, 2037 bp, Homo sapiens
  SIMILAR (931)..(1932): 991254mologous to Homo sapiens leukocyte antigen F,accession number X17093,Smith-Waterman Score=1782.
atggcgccatattgtagcaggacgagccgcagacaaaactcctcagacaccgagttaaagaaggaatgggtttattcggccgggggcatcggcaagactcctgtgtcaggagccgagctcccccaccagccaacagtagtagctgaaaagcgagagcacactgatgaagaacactgcgggcacaaagaaaaggaaaaaacgtggcgttctcaggaattgacgtcctccaggcccccagatgagggtagtgagcaccctgagagccagctggactcccctcttggtgtgttactgcacagccacagcctctggagtggaatgatagctgatgacatcattttaaaagtcacagtactacagagatgtttggacactcatcagaggcagacctgctgtgggaaagtcaaggccttggctgatgcaaaaataattgcagtttttgccattacaataattcttaccaagaactattcacattggaccaaagccaattgtaatgatccatgtgatggagagagccagaatgctatgaaagtggccttgaccagaaataggtcatttgatccttggctcattgacatctccatagattttcggtgtacaatgttcggtctgatgtgcaaggtacaacttttccagagaagaagaggaggggggcggggaggagcaggaggaggaggaaagaaggaggagaaggagaaggagaaggagaaggagaggaagaggaagaggaagaggaagaggaagaagaagaagaagaagaagaagaagaagaagaagaagaagaagaagaagaagaagaagaagaagaagaagaagaagaagaagaagaagaagaaaaggaagaagaagaaactgtctctacaccttcattctcaggacaagttcattgtctggcaccaagctccttgggacgcggaggttggggtcatggcgccccgaagcctcctcctgctgctctcaggggccctggccctgaccgatacttgggcgggctcccactccttgaggtatttcagcaccgctgtgtcgcggcccggccgcggggagccccgctacatcgccgtggagtacgtagacgacacgcaattcctgcggttcgacagcgacgccgcgattccgaggatggagccgcgggagccgtgggtggagcaagaggggccgcagtattgggagtggaccacagggtacgccaaggccaacgcacagactgaccgagtggccctgaggaacctgctccgccgctacaaccagagcgaggctgggtctcacaccctccagggaatgaatggctgcgacatggggcccgacggacgcctcctccgcgggtatcaccagcacgcgtacgacggcaaggattacatctccctgaacgaggacctgcgctcctggaccgcggcggacaccgtggctcagatcacccagcgcttctatgaggcagaggaatatgcagaggagttcaggacctacctggagggcgagtgcctggagttgctccgcagatacttggagaatgggaaggagacgctacagcgcgcagatcctccaaaggcacacgttgcccaccaccccatctctgaccatgaggccaccctgaggtgctgggccctgggcttctaccctgcggagatcacgctgacctggcagcgggatggggaggaacagacccaggacacagagcttgtggagaccaggcctgcaggggatggaaccttccagaagtgggccgctgtggtggtgcctcctggagaggaacagagatacacatgccatgtgcagcacgaggggctgccccagcccctcatcctgagatgggagcagtctccccagcccaccatccccatcgtgggcatcgttgctggccttgttgtccttggagctgtggtcactggagctgtggtcgctgctgtgatgtggaggaagaagagctcaggtgattggattgtggctgcccacagcgagagaggattttccccgctcagtcactcacatgccaatcccttccagaaacaccctcgcaggcacacccagaaataa

SEQ ID NO: 26545 - DNA, 1896 bp, Homo sapiens
  SIMILAR (416)..(1078): 811254mologous to Homo sapiens Ndr protein kinase,accession number Z35102,Smith-Waterman Score=874.
cccatggggaagggagaagaagaagaagaagaagaagaagaagaagaagaagaagaagaagaagaggaagaagaagaagaagaaaagattagctgggcatggtggcacgtgcctgtagtcctgtagtcgtaaccgcctgttgccccctgtctcagagtccctcacgcgtcccctcccgtctttggctcgttggctgccgccgccggggcttcgccagccttcaagtcgagactactggccgaaggggcgtctgcggctctccgccgtccccagccctgcctctccctgggctctggtgagttgcttgctgccgccgtcttcatcacaggaaaaggcagggaaaattcttaagaagagagtggaaaagcaacagccagaggaaaaagtcggtaagggcttagaggaaagtctgtgtccttgctcatccatgagtaaccacacaaaggaaagggtgacaatgaccaaagtgacactggagaatttttatagcaaccttatcgctcaacatgaagaacgagaaatgaggtaaagaattttgtttgaaaaaattgaagaagaaggcctaaaagatgaggaggtaattaatattggcaatgttttccttcggaaggaaacagagtttcttcgtttgaagagaacaagacttggattggaagattttgagtccttaaaagtaataggcagaggagcatttggtgaggtaaaaatcacagctacttgtcaagtgggacatgtgtatgcaatgaaaatactccgtaaagcagatatgcttgaaaaagagcaggtaaagcacagttgtagcagtgctttcattctagtggaggcagacagtttgtgggttgtgaaaatgttctatagttttcaggataagctaaacctctacctaatcatggagttcctgcctggaggtaattacttgacgatgaaaggtcataaagacactctgacagaagaggagactcagttttatatagcagaaacagtattagccatagactctattcaccaacttggattcatccacagagacatcaaaccagacaaccttcttttggacagcaaggtattgggggggcattggcatgaactgcccttccaggagcccagacttaggggcttcctgagccagtgctgtgacaccccctttagggctctgcggtttctggcatctccaagcttccaggtgccactgcattcccctcgtccagatctttgcacaggactgaaaaaagcacataggacagaattttataggaatctgaaccacagcctccccagtgatttcagtaagtggtaacaattacgttagcctaaagcagaaacctggaaaagaaatagacgtcagctagtaagtaatatctgtggcttctgaaagaatgcagaaaatgtttctcttggtcaggtgcggtggctcacacctgtaatcccctacattgctcctgaggtgttcatgcagaccgggtacaacaagctctgtgattggtggtcgcttggggtgatcatgtatgagatgctcatcggtaagttgcatggtttcagaggacttcctcaagagacatataagaaggtgatgaactggaaagaaactttgacttttcctccagaagttcccatctctgagaaagccaaggatctaattttgaggtattagagaacatccctccaccttcaaatcaaaagcattgatgatacctcaaacttcgatgagtttccagaatctgatattcttaagccaacaggtaacaccaccagcattgtctcctgcgactacaagaacaaagactgggtcttcatcaattacacgtacaagcgctttgagggcctgactgcaaggggggcaataccttcctacatgaaagcagcaaaatagtactcttgccacggaatcctatgtgg

SEQ ID NO: 26546 - DNA, 929 bp, Homo sapiens
  SIMILAR (739)..(801): 421254mologous to Homo sapiens Human opsonin 35 kDa protein P35 fragment (VI) residues 39-95,accession number R94182,Smith- Waterman Score=45.
cgtcccggaattctcgggtcgacgatttcgtgggagagctgccgtccctgacctcgacctgagacgtggaggagggacagggaaaaagccttcttctcgcagctgcaggttgccccaccgagggcatttttccgcaccgagggggcggggggcagaatgcacgccagaaaacctaagtgcgctgggtttaaaatagcaacaacaacaaaaattacaaataaccaaaaaacagcataagaattaaaaacagttatattccaatgtttttaatacttggttcacattttggatgctctccccagggatccgacggcgctgcggaggcggcagcgatgtttgggatcctaaagaaagcatcagaccagactcaggtctggacgtccctcaagtggccccggaggtaccgatattagtgtcaccgccgtcagtgcccctgcccagaaataaaacctttgttctgagagaaattgaaaagctggaaaatatggagtaggcgatgtgaagagaaactacagggaatgtagaggtcgggttttaaatgcgtatttcctcaaggatgttgtggaagcagagacaaggtggctggcctggagcaggctggaggacctccaaggatctccacagggaggcagttacatttaacaccctacctagcaaaagaagaaaagaacaaccccatcaaaacatccctggggttttaacaaaggaatccctgacaaaacgtgactgataactaggacagaactgaaaagtggaagtaaagtcaatcccgaccccccaggacgcctgggaactcagggaagcgcctccagaagggaacagctcagaaaccctgaccagacctggcggacaagaaccgtgtgggcgggggacaggaacgcccacccagaggccgggagagcatggtccaggactggcagccactaaca

SEQ ID NO: 26547 - DNA, 408 bp, Homo sapiens; identical to SEQ ID NO: 808
  SIMILAR (372)..(271): 581254mologous to Homo sapiens reverse transcriptase homolog= pol {retroviral element},accession number S61070,Smith-Waterman Score=96.

SEQ ID NO: 26548 - DNA, 1059 bp, Homo sapiens; identical to SEQ ID NO: 806
  SIMILAR (328)..(459): 881254mologous to Homo sapiens calbindin D28K,accession number S46006,Smith-Waterman Score=211.

SEQ ID NO: 26549 - DNA, 346 bp, Homo sapiens
  SIMILAR (319)..(2): 741254mologous to Homo sapiens neutral protease large subunit,accession number M27826,Smith-Waterman Score=401.
  misc_feature (1)...(346): n = a,t,c or g
ggataactaaaaaggagtgcataaaagaatattgtccaagttggcaccagaattggggagttttaaggggtttagaagcctggccgtcaatacccacaacagttatggaggcaagggaaacaggcccttgaaaataaggtaatgtggagtgagtagcctccataatgattaagaaggggacggatttaccctccactgtaagagttacccgaagcttggcctccatcatggtccagggggctttcgaggctattgggcagtgtcagtcttcagccactaagccgagaagatctgggaaggagtcaatcagagccttgggccagttggacagtccagtttccagtgn

SEQ ID NO: 26550 - DNA, 602 bp, Homo sapiens; identical to SEQ ID NO: 9698
  SIMILAR (192)..(524): 341254mologous to Bovine leukemia virus gag polyprotein,accession number M10987,Smith-Waterman Score=144.

SEQ ID NO: 26551 - DNA, 1812 bp, Homo sapiens
  SIMILAR (895)..(1539): 721254mologous to Homo sapiens reverse transcriptase homolog= pol {retroviral element},accession number S61070,Smith-Waterman Score=738.
ccaaccagatttcagtggagtgaagttcaggaggcatggagctgacaaccatgaggcctcggcagccaccgccaccaccgccgccgccaccaccgtagcagcagcagcagcagcagcagcagcagcagcagcagcaagagtaactctgactggcagccactcccagagcccctggaactctggcccaaggctctctgactccttcccagatcttctcagcttagcggctgaagactgacgctgccggatcgcctcggaagcccccagaccatcacggatgccgagcttcgggtaactcttacagtggaggctcccttattaggtcgagacattttaactaaattttctgcttctctgactattcctgggctacagccacacctcattgctgccttttcccccagttcaaagcctccttcacctcctccccttgtatctccacaccttaacccacaagtatgggatacctctactccctccttggcgaccgatcatgcaccccttaccatctcattaaaacctaatcacccttaccctactcaacgccaatatcccatcctgcagcacgctttaaaaggattaaagcctgttatcactcacctgctacagcatggccttttaaagcctataaactccccttacaattcccccattttatctgtccaaaaaccggacaagccttacagctccttcaggtatgtatactcactctttgttgagtctcccacaattaccattgttcctggtccagacttcaatctggcctcccacattattcctgatactacacctgacccctatgactgtatctctctgatccacctgacattcactccatttccccatgtttccttctttcctgttcctcacccttttcacacttggtttattgatggcagttccaccaggcctaattgccacacaccagcaaaggcaggctatgctatagtatcttccacatctatcattgaggtcaccactctgccccactccactacctctcagcaagccgaactcattgccttaactcggaccctcactcttgcaaagggactatgcgtcaatatttatactgaccccatatcctgtaccaccatgctgttttatgggctgaaatgtttcctcactatgcaagggtcctccatcattaatgcctctttaataaaaactctactcaaggccgctttacttccaaaggaagctggagtcatacactgcaagggccctcaaaaggcatcagatcccatcgctcaggacaacacttatgctgataaggtagctaaaaaagcagctagcgttccaacttctatccctcacagcagtttttctccttctcatctggtcactcccacctactcccccactgaaacttctacctatcagtctcttcccacacaaggcaaatggttcctggaccaaggaaaatatctccttccagcctcacaggcccattctattttgtcatcattttgtaacctcttccatgtaggttacaagccactagcccgcctctcagaacttctcatttcctttccatcgtggaaatctatccttaaggaaatcacttctcagtgttccatctgctattctgctactcctcagggattgttcaggccccctcccttccctaaacatcaagcttggggatttgtccccacccaggactggcaaattgacttcactcacatgcctcaagtcgggaaactaaaatacctcttggtctgggtagacactttcactggatgggtagaggcctttcccacggggtctgagaaggccactgtggtcatttcttccttctgtcagacataa

SEQ ID NO: 26552 - DNA, 853 bp, Homo sapiens
  SIMILAR (271)..(384): 501254mologous to Phascolarctos cinereus pol protein,accession number AF151794,Smith-Waterman Score=109.
atgcagcaagaagaccctgaagaaagtaccaaaagccccaacccaacgaccaataaaaaacaagaaaagaaacttagcctgtttggtggtctcttcacatggacgcgtgtgaaattcggtgccgtgactcagattgggggacctcccttgggagatcaatcccctgtcctcctgctccttcaacgtttattctccaaaggatatcgggtatccccatccaaagctcaaatttcttctccatccgttacctacctcaatagtgtctccttaataaaaactcttctcaagaccactttacttccaaaggaagctggagtcattcactgcaagggccatcaaaaggcatcagatcccattgctctgggcaacacttctgctgataagggattgttcagaccccctcccttcccttcacatcaagctcggggatttgcccctgcccaggactggcaaattgactttactcaacatgccccgagtcagaaaacaaaaatacctcttagtctaagtagacactttcactggataagtaaaggcctttcctacaaggtctgagaaggccactgctgtcatttcttcccttctgtcagacataattcctcggtttggccttcccacctctatacagtccaatagcagactggcctttattagtcaaatcagccaagcattttttcaggctcttagtattcagtgaaacctttatatcccttacagtcctcagtcttcaggaaaggtagaacagactaatggtcttttaaaaacacacctcaccaagctcagcctccaacttaaaaaggactggacagtacttttacctcttgcccttctcagaattagagcctgtccttga

SEQ ID NO: 26553 - DNA, 1046 bp, Homo sapiens
  SIMILAR (466)..(350): 791254mologous to Homo sapiens Human secreted protein, SEQ ID NO: 5576,accession number G01495,Smith-Waterman Score=151.
ttaactaacaatcttagactcaagattatcagcaatgcatttctgccagtggactgattttgctggaggaatgtgtaatatgtgctgagattcctggggcctcagagtgggaagacagtcactcagggccaaggggacctggagccagaagagctcaggatcatatgtgtgtgaaacttggtgtttaatcacctgtgcattccttttgtgatattcactgaaagactgttggcctctctcactatccctcaaccactttctcctttcaatcttggcgtcacccttcaatctctcccttctcttaatttcagttcctttccttttctggtagagaacggagacgcgttttatctggcagccactctcagagcccctggaactgtggcccaaggctctctgactccttcccagatcttctcggcttagtggctgaagactgatcctgcccaatcgcctcggaagccccctcttagtctgggtagacactttcactggataggtagaggtctttcccacagggtctgagaaggtcaccgcggtcatttcttcccttctgtcagacataattcttcggtttggccttcccacctctatatagtccgatagcagaccggccacaaaatcttccttcagcttaatctctcccactctaggttcccacgacgcccctaatcccactcgaagcagccctgagaagcatcgcccattatctctccataccatcccccaaaattttcgctgtcccgacactttaccactatttcgttttattttttttgctttcttctcaaataccttgcacataatgggaaagatggctgctgaaggtcccaagtccacattatactgccagttcactgaaaaatagtcttttttggcaactataaataagaacaatctatttaaagttcctaatttcggagaataaggtacattgatttgattaacctgggtgaagtatgcatctttgtatgagggaatgcagaaaagagccaggtatgtcacattcaacccatagagcatggctttctccaacagaaacagga

SEQ ID NO: 26554 - DNA, 416 bp, Homo sapiens
  SIMILAR (110)..(181): 831254mologous to Homo sapiens Human secreted protein, SEQ ID NO: 5576,accession number G01495,Smith-Waterman Score=97.
cgtggtatggagagagaatgggcgatgtttctcagggctgcttcaagcgggattaggggcggcgtgggaacctagagcgggagagattaagctgaaggaagattttatggggacttccgaggcaatcgggcagcatcagtcttcagccgctaagccaagaagatctgggaaggagtcggtcagagagccttgggccagagttccaggggctctgggagtggctgccaggggcccaaggaccagtgtacaagggcccatcactgtcagtaactctgcccactccagtagtaaagcagccaaatgctcacatacccacacatgggcacaaggaccagtctggttggggcttgctgtggcagctatccccactcagtctagtggttgggatgccacatgaccaatccagaggcccatga

SEQ ID NO: 26555 - DNA, 1280 bp, Homo sapiens
  SIMILAR (921)..(1280): 801254mologous to Homo sapiens neutral protease large subunit,accession number M27826,Smith-Waterman Score=476.
atggaggagaaggaggagaggaaaaggagaaggaagaggaagaggaggagggaagagggaagagatggggaaagaaaaagaatggagaagcaaaaggagaaccaggatcctaaagatccacctacgacctcaggtcctcagaccgaccagcccaagaaacatctcaccaatttcaaatccgagacaaaggagacacgttttatccgtggacccaaaactccggcgccagtcacggactgggaaggcagccttcccttggtgtttaatcattccagggacacctctctgattattcacccaggcttcagaggtgtcagaccacgcagggacgcctgccttggtccttcacccttagcggcaagtcccacttttctggggaaggggccagctgctcctcgccagaccgagctaggtcccaattcttcctcagcctccgctcctccaccctataatccttttatcgcctcccctcctcacacctggtccggcttacagtttccttccatgactagccctccccctcctgcccagcaatttactcttaaaaaggtggctggagctaaaggcatagtcaaggatttaattaacctcaccttcaaggtgtacaataatagaaaaaagttgcagttccttgcctccactgtgagacaaaccccagccacatctccagcacacaagaacttccaaacgcctgaactgcagcagccaggtgttcctccagaacctcctccccgaggagcttgctacaagttccagaaatctggccaccgggccaaggaatgcctgcagcccaggattcctcctaagctgagtcccatctgtgcgggaccccactggaaatcggactgtctaactcacctggcagccactcccagcgcccctggaattctggcccaaggctctctgactgcttcccacatcttcttggcttagcggctgaagactgatgctgcccgatcgcctcggaagccccctacaagaccatcacggacgccgagcttcgggtaactttcacagtggaaggtaagcccgtccccttcttaatcaatacagaggctactcactccacattaccctcttttcaagggcctctttcccttgcctccataactgttgtgggtattgatggccaggcttctaaacctcttaaaactccccaactctggtgccaacttagacaatactcttttaagcactcctttttagttatccccacctgcccagttcccttattaggctgagacactttaactaaattatctgcttccctgactattcct

SEQ ID NO: 26556 - DNA, 2453 bp, Homo sapiens
  SIMILAR (1461)..(1523): 611254mologous to Plasmodium lophurae histidine-rich protein,accession number M15317,Smith-Waterman Score=104.
tcagtctccttttgacccaagacttcttgtcagcactggtttctgcagtgactgtgggttcatctggggtctccctctgtctctggtgtctctcagtgtgttatttctctccctgtggctgtctgttcctccttgcagcttcctgtgtctctttatctgggtacctttccttctttgtcccttgctcagacttcttgtctggtactcagtctctgtgtttgtggatctgtaattggggttccccgcaatgagactgggttctgggccccctgtgtgtccctggcccccaggactgctgagctgtttccagtgtggggagagaatttcatgggctgtcatcaccaaacccatctgcctccggatgtcccactcttcttttgccaagaagaaggtatctctgttttcattggacaaggacttgttcttcagtcgccagatacctagattctctgctgggacctgttcaaccctccaggtagccaactggatcctgaacgtcttaacaggtacccatacattgatggataggttgattgatgaggtctgctctagtctgaaggcaaaggttgagattactgccagtcttgctgctgtcagtgagtatccccaaccaacgttatccctttgtaagacatcagctgtcacttgtgaatcaaccaggagtctctctccctttctacaacatgcaatgaatcccaaagcaggaacaacaaccacagaaattaactgtgaactgtgcttctttttatgttctgttggcaaggctaaagtgcaaagctctataccttgctcctcttctgctgtgttccctttgggtttcctatagaggcagtggctgccatttacaactcccccagaatttctgtccccatcatcatctatccagctctctggcaggggtacattctgctcccccgaggtaaccttgaagctagtgtcaatgatggatttgcacaacttcacttctgagttctgaatacattttttctgcatgacacttcgtgagtgaagatgacatgcctggaagcccatgccttcacgaatgtatgccagctttcttctaaaaggtccagtcttagatgaacacttcctgcatgtgcatgggcatgtgtgtagatctgtaggtgcaggctgttcccatggctctacaattaaaatatctgccaacatcaactcccctaagaacctgattgaatttcctgtggcttcatctctgaggccctcctgtaggaaggccctgctcccagtggctgctgggccacgtcttaacacaatctctggcttcagggtggaatggcaattatttaaaattggctcaggtctgcatactccactggattcttttttatcccactttaagtctttcccttgggacagcttaaacagctttatctttttaatgacaaaatgcccatcgataggactgccccccttcccccattgcattccctcaatgtactcatcaacatcatcatcatcagtatcactaccatcatcgtcatcaccatcgtcatcatcattatcagagatagaaataaaatccaggtcttcctttgtttgtatattgctactttcaaaatcattaagcctgtcactgttcgtggggtaattctgagcatatgacaattgcctctgagtcacaggctgtacccctacagcctccccaagattcacagggtttcttcgaggacttagagctacactattttttcggagacccaagtgaaaccaggccaggaaaacagccaaaagtttcagtccaacagattctttaaaagttttggtatggttctttgagtctttgaaaggtgatttgtggaggacaagaaaggctttgtaggcactccctgccctcatccttggaatatcccttccccgatcttctcctgatgccaggaattccattagcgagtccgcatgtgtgttgatgcacggattagcaggcagatgcatgcaggagaggtcgacatgaggccctggaaataagtctgccttgcttggaccatttctgtgatacaaagtggtaaaagatgatgaaacatcaggggatttaactatatcaacatgattggcattgctgctggtgctattattaccatgaatatagggtcttttcttgtgttgcctgagttctgctgatttgcttctatttgttcctctccacattggtctgcattcagctggtgagtcccttatatcaaagcccttgtcactctctgcataaaatccctcatttttgctgatactgtcattaatgttcaattcatgtaacttagcattgagaaggaaactcgcaagatgctttgccattatggaagggaaatcattgccattaatatctgtgtctaagacactctcatctgcagcaacatcccccatactggtaaatttcagcacatcccagaataaggcattaatttgcttcctctttttaccattttgatgctctcccc

SEQ ID NO: 26557 - DNA, 1122 bp, Homo sapiens
  SIMILAR (463)..(666): 551254mologous to Homo sapiens putative,accession number M18679,Smith-Waterman Score=146.
ctatctccttggtgcagtgggccccgagatttgtagagtgtgctcatccctctggctggagccgtggcgccaagcatgtccacgcagtgaggcctgggtctctctcctgtcctcaggactggagtttacacgaagtcggtggccttgggaaaccaggtgcacagacacggatttcctcgtggctggcgaagacaatgtccttcccctggggaaagcagcccacgggttctggagcggaggtcttggctggggtctgtgggacccgctgcccctgcccgccccttcccccggcttggacgattgcagcggcgctagatgaatgaatagaatttcctgggagtccaggaagcctgaagacacctgcgacctcaggaacgcgcgcctgcgccctcggggtcggtcccgtcccgcccgggttgtagccaggctcctggtgggctgctgcgagtcggaagaggtgggatgctgctgcccggctgtgctgcagtcgcggatcttcaggaggaggtcccgggcttcagctgggacgcgtgggctgtcaagggggagcagaggcagggcgggggcggggttgtgaagcactgagacgccatcccggggcagcgggtctcggatccgggacccccagagccgctcgcctctgccccagggcagctgtctccctctacacccgagtaccgccggcctcctggcgagtcccgccgtcaccggcggccagacctggcgcaggaccaacgtggcgccgccgtgctgttgctggcgggcgccagaggcctcagtcccctgcccaggattccggctctcggggcggcctcctttccgcccacgctccagttcttcctccagctccccagctccggagcttccaccacatctgccggcttctttctcctggttctccatcaacctctttggctgctccttcttgatttcctttttgacaatctgctgctgctccgccattctcttttcattcctcatggatttctcaagtgtgtttctattcctgcattttaaactttccttgtttttcctgatacctctccttgtctgaacctcccctgttctaaggcaggtgttccatccgtgtgcgcttttggcatcctgggatgctcccagcat

SEQ ID NO: 26558 - DNA, 597 bp, Homo sapiens
  SIMILAR (200)..(262): 471254mologous to Mus musculus WDNM1 protein,accession number X93037,Smith-Waterman Score=51.
atggggagcacagttgctcctgcgctggctgtggctgtgggggaaggaagagccgctccattcctgcgtttgatcaggttgtcacgaggactgagggtcgacgcaggtcctctgggcagcatggggtggtgccgggtggaccccacggtggcctgtgttcgccacgtggccgtgggtgcaggacatgtggccacagcaggcctggcccctgccccagggagtggacattccctgagcctgccccccacccccactgagaacttagtggctatgagagaacaggaaagcaggaagctagacagggcacagacccccgacggtggagaccctgacccggagcactgtgcagggccgggggaggagcctggatctgaggagtgcagttccagttgtggctttgccgcggcgtccccatggcatgctgttggggaccgtgagactgtgggcggcctagctgtattgcagcctgaggccagaggagagccaccgggcatcctggagtgcagccctcatgccccgaggccacctgccatcgcccaggatgactcaagatgccacctggctccgatggctgatgacgggggccctggcagctga

SEQ ID NO: 26559 - DNA, 428 bp, Homo sapiens
  SIMILAR (309)..(344): 581254mologous to Xylella fastidiosa hypothetical protein,accession number AE003966,Smith-Waterman Score=41.
aaggcttctgaaaagaggggcaagagccactctgcgccacaaaggttgggtccatcttctctccgaggttgtgaaagttttcaaattgtgaaaaaaagataaaatgtgacttcccctgctctgtgcagcagtcgggctggatgctctgtggcctttcttgggtcctcatgccaccccacagctccaggaaccttgaagccaatctgggggactttcagatgtttgacaaagaggtaccaggcaaacttcctgctacacatgccctgaatgaattgctaaatttcaaaggaaatggaccctgcttttaagtatgtacaaaagtatgtctgcatcgatgtctgtactgtaaatttctaatttatcactgtacaaagaaaaccccttgctatttaattttgtattaaaggaaaataaagttttgtttgtta

SEQ ID NO: 26560 - DNA, 1365 bp, Homo sapiens
  SIMILAR (1330)..(1277): 881254mologous to Homo sapiens Human breast tumour-associated protein 21,accession number Y48476,Smith-Waterman Score=101.
ttttttttttttttttaacaaataaaactttattttcctttaatacaaagttaaatttcaaggggttttctttgtacagtgattaaatttggaaatttaccagtaccagacatcgatgcagacatactttttgtacatccttaaaagcagggtcccatttcctttgaaatttagcaattcattcagggcatgtgtagcagggaagtttgcctgggtacctcttttgtcaaacattcttgaaagtccccccagattgggcttcaaggttcctggggagctgtgggggtgggcatgagggaccccaaggaaagggccacagaggcatccaagcccgacttgcttgcacagaggcagggggaaggtcacatttttatcctttttttttcagattacatcccgatattttcatcttacctttctttacaaaggagctcaagggggccatcattttttggacctttttcaagccctcacaacatcccctgtgaaggtagacaaaattcagaaacacctccatggccctcactggggaaaagatctaagaaaagcagcctttaccccctccccaaagccccacagcccaagtccagggcccccagccctattagtaacaatttgaaaaactttccacaaccctcggaaaagaaagatggaccccaacctttgtggccgcaaaagtggcctcttgcccccctcttttccagaagcccatcctaggatgacagtggtccatgtactgaatattgtaggagagcaaggaggtttaaaagctttgaggacatggctcatataggacccccaaaaaaggtcctctacaaaattgccctggggaaattctgggaattggctgatgcaaagaagaagagaaaaaaaggtacatcagaaacagaaacgtgcttactatccagggcaactgagcttttgccaaaggggaagaggcattgtcgggggatcttgtaagtcatttgtctcctggtactgtcaagtgtgtaatcaccgcacaagtgcatggcaagagacagcaacagaaagctctatgtaggctagagtgaaatgaaatctattatgtggggctccagtatctgatccttggtaggagcaaaatgctctctaaggagtttccaagatctatgatctaaccctggaggaaaagtgataacccaggtcatttgccagacataatacaaacccagaagggaactctaaactcaaataaaataaaggaaccaataggattttcagagtccagtgactcgacatgattgactggaatagcaactcttctccagtgtcctccatcacagaacaaaatacaagacgtaaactgattttaagaggttccttccaggccaggtgtggtggctc

SEQ ID NO: 26561 - DNA, 983 bp, Homo sapiens
  SIMILAR (563)..(378): 371254mologous to Aedes aegypti=mosquitoes, Rockefeller, female, Peptide Partial, 92 aa vitelline membrane protein homolog {C-terminal},accession number S54556,Smith-Waterman Score=86.
cagggaagcctcttcgtatctggtgaaatggactggggatgaaatatctcagctactatgggaagagtgtttcagggccctagattttctctatgtctggatctttcctggccactattgactttctccttttgcaagcagatgtcttcaggatccttgcttaggtcagctccaaggaaggaccctttcttactgggataccaggactactggtcagccccagagacctgaattgtgaggaccagcgaagatgagggggagggtgtctctagtcagtcctcccccgctgctgacctgtgccctgcccaccaggacagcataggacttaggattgcatctttctttacttcataggagcagaagtcagaagaggaaagagggctttttaaatgaggtagtggcagaactgacaagggggtatcagaatgagagtgcacacaagagtctaagttgggaaagtgacagggtgaagctggaggggctggtaggccatgaggcatgctgttcagaggctctggtgcatgtaggagaggaggcaggacaggaggctctggtcatgcatgggagaggcagcactgagattagagatggaaagatttcaggggatgagtttcgaggtgtggccacaaatacggtcaactgatgtgaatgtgggcgatggacatgggagatgaggaagcaaggcactgtgaagctcatccacagtgacttgattaatcacttagatgctgaacttcacagtggtaaagtgtgcatttttaaagaaggtaccgaagtaaaccaggtgctgagggatttctttgaggagtacatggccccatggatatgcatggaaagatgttgatagagtgtaagtggtgtctaaaagcagagagcagaacagtgggacaggaggtatatcaaggtcagaagaaaatgccaacatttctaccttcctcttcccaaattcttcagttggtccaaaactatacctgtttgtgatg

SEQ ID NO: 26562 - DNA, 890 bp, Homo sapiens
  SIMILAR (273)..(317): 601254mologous to Lycopersicon esculentum extensin,accession number Z46674,Smith-Waterman Score=49.
atgctatttaccaaagaaagaggatcccctggggaccagaggacaaggcagagaccttcgatttgggagggcgacgcagacaagcggcgcaggatgtctgggctggaggggacaaaagccaagttctcaatacctttggcgctcttcatgtctggatgggttctcccgactccggtgcttcagagcagcagagccaggtccctctctggctcctcccacaggcaggtgacagcgcccccgtgcgggaagcttcccgcctcctggccctccagcctccagcgcactctccgccaccgcctgaaccttcctactccagctcgcagctgtctggagcgcagatcgagtgcgtgaggcgttacgcccagcgctgtgggattggcgctcagctgtgcctcacccgtcgcctcaaggaccaaccggatagcgcggcgtgggcgtgcacccggcggcggcgagtagagggggcgagagttctcaccccacagccttcgaccggagtccgcctccgcccaagcccctgcggatctgacctgagccttcagcccgcagcggcctcccttgagcccaagcactgggaacacacagacgcagtgggagacactggccataagccccccttgggtgctgacatgaaacctgtaaacagttgcatcaggagattgttcaggagactatcttgcgttttcttcctttgctgcttaccaaagcagtctaggcttggactccaagaatcaagacgtcagaggtatactttggttcatgagcatcttgataagactcttgcctgtcatcctgttactggtagaaggtgtccaggttcttggcatcttgaagaaagaattgaagaaaacgcacaaacaaagcaaggaaggaatgaaggggtttattga

SEQ ID NO: 26563 - DNA, 819 bp, Homo sapiens
  SIMILAR (597)..(475): 421254mologous to Homo sapiens Type 5 sodium channel protein designated PN5,accession number Y16577,Smith-Waterman Score=98.
ttacttgtcttccaagttcatcagtgcctgcactgcaaactcttgtaacttcttacgttcctctaggttatactgaagcttttctagcaactcaaaatatcggaagagtgagtctctgggccaaacacggtcatcctgatccatttccattagcccgggcagattttcgtgcacaagagtctcccagtccaaacgacccatcatggctactatgatacttcgaaagataatggagccaagcaacaaccaaaggatgaaatagatgctgctgaagatgcgactgacttcaggcaccttccagacgtcctgaagcagtgcataccaatgatccaaggtgaagagaatgaacactgttaccagggaattcgggaggtccgagaagaacacatggtactccaggtcctgacgaggtgaacgggtgtactctgagaagacgtagacaccagtcacagcaaaaatgtagaagaagatgagcagcaacatcaagaggaaggtcatgctcaacatggtaacaacaaagtcaaagacattccaggcactcttccagaaaacagaaaagttggatagccacttaagaaggatctccaggatgaaaataagcaagataaaccaagctgccacctccaaggtcagcttcaatggccatagtttggtatttgtggattccagcaattcaagtaactccctgatagtgtgccgcggcacagcttggctcaagccttgcaaatgctcaatgagagagaaagtatcgatgagacgtgaacgaatggcatcagctcggggaagctgcatctgctcttcttgttggtaagcggccat

SEQ ID NO: 26564 - DNA, 698 bp, Homo sapiens
  SIMILAR (281)..(3): 321254mologous to Homo sapiens ribonucleoprotein,accession number M18465,Smith-Waterman Score=95.
gcaggggctagggccgggtcccggggtgagccgaaacctgggggtcgggcggggcgggaaatggggcgcagtgaggctgggagccggccctgagctcgtcctgcgtaggggtagccgggctcagggggcgcctgagctggaggtggaagcgtgaagtcaggactgagtgggcgaagagaacctgggctgagacatggccgcttaccaacaagaagggcagatgcagcttccccgagctgatgccattcgttcacgtctcatcgatactttctctctcatcgagcatttgcaaggcttgagccaagctgtgctgcgacacactatcaggagttacttgatccttcccgccagaagaaacttatgttgggagatcaacaccagctagtgggcgtctctataaagcctcaacgtatagaacagatttcacatgcccagaggctgttgagcaggcttcatgtgcgctgcagtcagaggccacctctttctttgtgggccggatgggtccttgagtgtatcctttcatgtcactcatttttatcctggctgttgatcatctgcctaatgacttattttttgcttcccaaactccattgtctcattctcactgcttatgttattgctcttattatttcagctgcataaatcagaaagaactccactctgtatgtttccttaagagacaacaggtcctctcttca

SEQ ID NO: 26565 - DNA, 2301 bp, Homo sapiens
  SIMILAR (1665)..(1204): 781254mologous to Mus musculus creatine kinase isoenzyme, ubiquitous,accession number Z13969,Smith-Waterman Score=631.
ccattttgctttgcccatggctgcccgtggttcctcaggcccaagtcctgggtctcctgcaaatagtgtcaggcagtccttaaagtctgagagctccatctcagcaatctgggttgcagagcaggctgctgggaatgtccctcgtacatctgcacaatttggcacaggttctggaagatcctcagcagctggtcgcaccacccctgctaccagggctgctttcttggcagcaagctgtggctccctacacagctgtccaactctgctctgctcccagctctgctgcttttctagaagccgctccagggtctctggacccaaggcctccctggggatcaaggaaattgcctcagtagacagagtgaatactaggcgtccagcttgctctacttcatcctggctccacaactctggtttcctggggtcctgcattcgttcccggatctggtgggtgaggttttcgatcagggcaaatacctgatcacagaccttcacaggattctggatgatagtcatggagttgagcagggaagtacttctggtgggagccagctccacagagaactcctggtatggctggatgacctcctcagggatctcttcagctgagctgccaacttctacaagggtttcctggaccaagctaccaaccccattgccatggttctccaggcattgctgtctgatgtcagggaccttctgacatggctggctgagcgcctcagaaatgtcctggcatggctgactgatgttaaggaccttctgacatggctggctgacctcctcagatggctggctggttaccataggtggcacctgtggagactgatttggttcaaaaagctcttgctccccttctatggagagctcttgtgctccactctcaggtagctgctggagcagcccaaggccttgatgttcttcagacacgtgtgaatttagggagggttgatcactgaagccaaattgagagttaccatctacctgagcagatagatcaaatgctgcaatgtcggtgcccgactctagagtgatccccgggatcatgagaagcagaggcaggaaataacagggcttcagacttgggtgcagaatggaggtggaggacacagcacagatggcataagaattaatatttccttggttcctcccagggagtcctttctcaactttgtaaggcgtgcacagaggtggcaaggaagcaccttgctcctcttcctggctctctttgaggcctcggcagaatctttcaaacactctcttcatgttaccacccttgtccatggagatcacccgtgtatgatcctcctcattcacccagatcaggaagctcttctcattgatgtgccaaaatccacgagcatatggccagactcgagccattcctgctgcagtcagcaacggggacacatgcttatcaaacagaaagtggttatcaataagctgctgctgttcagcctctgtcatctcactgagcctatagtaacgtccagccaggtcacccttcaggccactcagtgcatccaccacaacacgttgcacctctcgtcgctctgctcgagtgcaagctggaggcagactgagtcctcggatgcttacgccagttctgactttaatctctctttcacagctggtctcccagtagtgcttctttaactggttgctacttctcagattaaagagttgccattgagggatgccttgggccttggcttttggccaggaaggcacatcaaactgcccatctcggtgcttcagactggcaggtggtagctttttgccatggctgcgggcgtagtcctgaagattcggggcactggaggagccacccagcactgtggtgctgaacagccctgtgcactgtgagccctgtatatcaattcgagctcggtacccatctaggggctcagacactatctgggtgggatgtgtgtgttttgggggttgtgtattgggcccttgtgggcattgtaaaaattctgtttcatgtttctgttttgctttgcccatggctgcccgcagttcctcaggcccaagtcctgggtctcctgcaaataatgtcaggcagtcctcaaagtctgagagctccatctctgcaatctgggttgcagaccaggctgctgggaatgtccctcgtacatctgcacaatttggcacaggttccaacttaatcgccttgcagcacatccccctttcgccagctggcgtaatagcgaagaggcccgcaccgatcgccctttccaacagttgcgcagcctgaatggcgaatggcgcctgatgcggtattttctccttacgcat

SEQ ID NO: 26566 - DNA, 1667 bp, Homo sapiens
  SIMILAR (1339)..(1422): 891254mologous to Homo sapiens protein disulfide isomerase,accession number Z49835,Smith-Waterman Score=128.
caagaatgaaatgacacttgatgcttacattttcttagcagacatggccgcttaccaacaagaagagcagatgcagcttccccgagctgatgccattcgttcacgtctcatcgatactttctctctcattgagcatttgcaaggcttgagccaagctgtgccgcggcacactatcagggagttacttggtcagcagcctatttcttcactaatttaaatttaagactcctatccacatcctctacatttaagagtggaaaattctggggaggccggtttagttgctggtttaccaaacttgataaatcaagggcttgtaaataaaactaaggagatagaatccacgtctttcacttttaggcctaggatagccactagccgtggatgatacggaacagtttctgtcaaagactcttaaaactttgagagtgaacctgctgcttttgtgggcatggacagtgttggtcataagcaatacatttgctctcactccaaacagaattcttagttgctgaaagatcctcagcagctggtcgcaccacccctgctaccagggctgctttcttggcagcaagctgtggccccctacacagctgtccaactctgctctgctcccagctctgttgtttttctagaagccgctccagggtctctggacccaaggcctccctggggatcaaggaaattgcctcagtagacagagtgaatactaggcgtccagcttgctctacttcatcctggctccacaactctggtttcacactgtcgttggctaacagggatggtgggaagcgcatcaggtcagagacagccaagaaagggatgagtggtgacaggtcaatgaagagctgggaggtgaggcgtgggtaccgctggagcagcagggctgtcaggcgacccagggcctgctcctcggatggtggtacccattttgctttgcccatggctgcccgtggttcctcaggcccaagtcctgggtctcctgcaaatagtgtcaggcagtccttaaagtctgagagctccatctcagcaatctgggttgcagagcaggctgctgggaatgtccctcgtacatctgcacaatttggcacaggttctgagtccgcgaacacagctgcgcgactgatagagaaactacttcgggctgagctagataaaccggaaatacgtgacgagaggattgtgggatggtggacgacgtttgggcgcccacagctaggaagtcgagtcggtttctgcgcatgctcattggctgcccgcatgtcctctacgtcgcagaatttggaagcagcttttggcgggaaattttgcttcctttgggctttgctgttaggactggacgacactttcgagagtcgcatctccgacacgggctctgcgggcctcatgctcgtcgagttcttcgccccctggtgagtccattctgagtccgcgaacacagctgcgcgactgatagagaaactacttacggctgagctagataaaccggaaatacgtgacgagaggattgtgggatggtggacgacgtttgggcgcccacagctaggaagtcgagtcggtttctgcgcatgctcattggctgcccgcatgtcctctacgtcgcagaatttggaagcagcttttggcgggaaattttgcttcctttgggctttgctgttaggactcat

SEQ ID NO: 26567 - DNA, 452 bp, Homo sapiens
  SIMILAR (283)..(191): 701254mologous to Homo sapiens Human secreted protein, SEQ ID NO: 5576,accession number G01495,Smith-Waterman Score=118.
  misc_feature (1)...(452): n = a,t,c or g
ctctgtgagacaaaccacagccacatctccagcacacaagaactccaaacgcctgatccgcagctgccaggggttcctccagaacctcctcccacaggagcttgctacaagtgcccacagcccaggattcctcatgagccatgtcccatctgtacaggaccccactgaaaattggactgttcaactcacatggcagccacttccagagcccctggaactctggcccaaggccgtctgactccttcccagatcttcttggcttagcagatgaagactggcactgccgatcgccttggaagcatacaggaccatcacagacactataagtaactctcacagtggaaagtaagtccatcccctttttagtcaatacggaggcaccctccccgttagtttgaaagggctgtccctgcttnntccnngnntcncaagtatcaggtctagtnntaccc

SEQ ID NO: 26568 - DNA, 357 bp, Homo sapiens; identical to SEQ ID NO: 443
  SIMILAR (148)..(279): 481254mologous to Human T-cell lymphotropic virus type 1 Gag,accession number S74562,Smith-Waterman Score=143.

SEQ ID NO: 26569 - DNA, 627 bp, Homo sapiens; identical to SEQ ID NO: 15040
  SIMILAR (91)..(327): 961254mologous to Escherichia coli RecC1004,accession number AF176618,Smith-Waterman Score=406.

SEQ ID NO: 26570 - DNA, 1464 bp, Homo sapiens
  SIMILAR (1200)..(31): 1001254mologous to Homo sapiens bG153O3.1 (similar to C.elegans hemicentin precursor),accession number AL133515,Smith- Waterman Score=2035.
tcaggaaatataactagatgtatcatttaccttggaccagatgacagacggtttgggatttccacttgctttgcatggtaaagttactggaatgccttcaattgtactgagtatctgctgcccatgctgaatggttggcagaacatgcacaaccacagaggtagttttgttattggtcccagcaacgttactggccacacaagtatattcaccaccatcctgaagctgaactctttcaatatggaggctcccatcactgcgcacagtgatgtaaggattttggagcaacatagctgaattcttaatccaccgacgttctggaatgggatttccagctaacagagtacagggcaaagtaagctgctgtccttcaataacattggccactgaagggctgattccaataagtggagcaacaagtccggtcactgttactgttgtctctgactggatctttccaaactggttttcagcttcacaaatataggttcctttatcacttgcccataagtttaaaataaagagagctcctgttcttagttggctgatggaactaactgaaaaaggtcttgagaaaattggcatgttgtctaatcttcgccatttgattgttggttctggataaccctgaacataacaaggtaatgtcacatttgagccaatttccatagacacatcagcaggttcttgtatgaaaactggaggtgagccaacatccagagttatcttgccagttgctcttccagcctcattgatggctacacaggtataatcgccagcatccagatcttgtgtttcttgaatcttcaaaagtcccaagagagggtcaataatgaggaatgttgagggcctcaactcaagatctcctttgaaccatttaacttgaggtggaggaataccagaggttttgcattccataacggttatatccccaagggcaaccaagagctcactctgaactaccatcaacttaggggcttttgctaggcaaccatagatccctgcatctttgggagctgcatttttgataaataaggtaccatctgaggtcatcctatacctgtgtgaacccacgataaacatatcgttaacggtccaggcaatctttggtttgggataacctgttgcagaacacatgatggagacctcagaccctcctgtgaaagactgattcttgggcatcacagtgactttgggtggttcaatttcaaatccagtaagtggcctctttttactctcttctccaacctccctatccttcaacctctttctcctttcaatcttggcgccacacttcaatctctcccttctcttaatttcaattcctttcattttctggtattttctggcagccactcccagagcccctggaactctggcccaaggctctctgactgactccttcccagatcttctcggcttagcggctgaagactgacactgcccgatcgcctcagaagcccc

SEQ ID NO: 26571 - DNA, 411 bp, Homo sapiens
  SIMILAR (303)..(190): 861254mologous to Homo sapiens Human secreted protein, SEQ ID NO: 5576,accession number G01495,Smith-Waterman Score=172.
tcatgggcctctggattggtcatgtggcatcccaaccactagactgagtggggatagctgccacagcaagccccaaccagactggtccttgtgcccatgtgtgggtatgtgagcatttggctgctttactactggagtgggcagagttactgacagtgatgggcccttgtacactggtccttgggcccctggcagccactcccagagcccctggaactctggcccaaggctctctgactccttcccagatcttcttggcttagcggctgaagactgatgctgcccgattgcctcggaagtccccataaaatcttccttcagcttaatgtctcccactctaggttcccacaccgcccctaatcccgctcgaagcagccctgagaaacatcgcccattatctctccataccat

SEQ ID NO: 26572 - DNA, 696 bp, Homo sapiens; identical to SEQ ID NO: 18554
  SIMILAR (480)..(370): 831254mologous to Homo sapiens Human secreted protein, SEQ ID NO: 5576,accession number G01495,Smith-Waterman Score=154.

SEQ ID NO: 26573 - DNA, 1046 bp, Homo sapiens; identical to SEQ ID NO: 26553
  SIMILAR (466)..(350): 791254mologous to Homo sapiens Human secreted protein, SEQ ID NO: 5576,accession number G01495,Smith-Waterman Score=151.

SEQ ID NO: 26574 - DNA, 1107 bp, Homo sapiens
  SIMILAR (940)..(806): 731254mologous to Homo sapiens Human secreted protein, SEQ ID NO: 5576,accession number G01495,Smith-Waterman Score=153.
tcacagaaggcttgctgtctgtaagccttgtaagtcacctgtcccaacatcttcagttttgttagtgatcagaatctctaatgcccctggagtgagggtggggagacagcagatggtaaaggcaaataagatagaaggtctgccagaagcatagaatacaatagtggtttccaggggttggggactgggaaagtggagagttgttgttcgatgggtgtaaaattttagttctgctcgatgattaagttctagggatatttccctcaagagagaacctgttgggatgatgactgttagctgatggccttcatctgccacacccctggaaatcacttgtgtcctcttggtggccacagtgtcttcaggctcatgtaccatgtcatcagaatctttctcaacacagccacacagactgccactgcaagttgtgaggaaaacatttttgccatccagaacacaatgatcattcactcttcctcctagatctatattcttttctttgtctttcatgatgttgaaattgtgggcaaacacaagccatttattttgcaaagtgtcctttaatatggatttgtctgatgtttccttgtgcttagattcagactgtgcatttgtaacaggaatatcacagagtgatactatatctttccttccagccttctgccatgggatgaccctcaccagatgccagtgccacgctcttgaacttagcagctctagaactatgagctgaaaaaaactttcttttctctgtaaattacccagtctgcggtattcagctatcataatagaaaatggactaacatagcaggccatgggccttccctggcagccactcccagagcccctggaactctggcctaaggctctctgactccttcccagatcttcttggcttagcggctgaagactgacactgcccgatcgccttggaatcgccctcttcagtgcttctttcagcgctatgaagtaaaaccaggtactgtgagtgttcacctgatttttggttcttatgaaggtgcttggctgtgtatagataattgttacattggtgtcgttgtggggaagacaatcagtggagacttctattctgccatcttgctccat

SEQ ID NO: 26575 - DNA, 433 bp, Homo sapiens; identical to SEQ ID NO: 21038
  SIMILAR (268)..(351): 821254mologous to Homo sapiens neutral protease large subunit,accession number M27826,Smith-Waterman Score=116.

SEQ ID NO: 26576 - DNA, 679 bp, Homo sapiens
  SIMILAR (104)..(226): 701254mologous to Homo sapiens Human secreted protein, SEQ ID NO: 5210,accession number G01129,Smith-Waterman Score=155.
atggacacatatagaggaacaacagacactggggcctacctgaagacacgcatgaaatttggtgccgtgactcagatcgggggacctcccttgggagatcaacccctgtcctcctgttctttgctccgtgaaaaagatccacctacaacctcaggtcctcagacccaccagcccaaggaacatctcaccaattttaaatccggagcttgctacaagtgccagaaatctggccaccaggccaaggaatgcctgcagcccaggattcctcctaagccgcgtcccatctgtgcgggaccccactggaaatcggacttttcaactcaccttggcagccactcccagagcccctggaactctggcccaaggctctctgactccttcccagaccttcttggcttagcagctgaagactgaagctgcccgatcgcctcagaatcccccttttcctcctctgtgctctacctctagacacaatgcactcaagacctggcatgtctgctaccttgctcagcaccttgcagagaatctgtccatgcaactcttgcctttcacctccacgctgctgaaaccttgccacattcccaagctgtggcttgttttgcagctgtttcaaatggggatgccatactgagaagtaatacctctgagctgccttgtgctttttctctgacccgatcat

SEQ ID NO: 26577 - DNA, 2477 bp, Homo sapiens
  SIMILAR (2336)..(1635): 851254mologous to Mus musculus protocadherin,accession number AF281899,Smith-Waterman Score=1033.
tgctctgagtatgaggactcctccccagctccagtaccagccacagatctcagctcaacactctcgagctctgtaccacaaccccaggatacagggaccagccagcagcttcatcccctggacccttggcatgagctgcttcgtgcccaggagctccaaggtgccaccaaccacaagggctacagccatgcagagcatgagcatgcaggcctaggtgtccagggtgggaatggggctctggctttttcgaacagtgggcacaggcatgctgttcccaccatcagctcaggcactggcaggaggaggactccaagttcttcggcttttggactcttgaacttacaccagtggtttgtcagtggctttcaagccttcagcgacagactgaaggctgcattgtcagcttccctacttttgaggtttggggactcagactggcttcctagctcttcagcttgcaaatgtcttatgctgggacttcactttgtgattgtaggtaacatctgtgctacactcaaggagaaatactcctcaatgctccatttagatgtgaccatgaagaaaaatggggagaaaagaacaaggctccaaaaaagaaagaagggaatgcctccacatccggcttatgaggacctaaacatagctgccatcactctccctgccaatgttgtccttcatcagccaagtggcttcagaacttcagggcagctggaccccgtttggtggtctcttgacacggacgcgcatgaaatttggtgccaagacccgggacttggatcaggggacttcccttgggagatcactcccctgtcctcctactctttgctccatgagaaagatccacctacgacctcaggtcctcagaccgaccagcccaagaaacatctcaccaatttcaaatccaagacaaaggagacaggttttatccatggacccaaaactccggcaccggtcacggactgggaaggcagccttcccttggtgtttaatcattgcagggacacctctctgattattcacccatgtttcaagggtgtcagaccacgcagggatgcctgccttggtccttcacccttagcggcaagtcccgcttttctggagaaggggcaagatttaattaacctcgccttcaaggtgtacaataatagaaaaaagttgcaattccttgcctccactgtgagacaaaccgcagccacatctccagcacacaagaacttccaaatgcctgaaccgcagcggccaggcgttcctccagaacctcctcccacaggagcttgctacatgtgccggaaatctggccactgggccaaggaatgcccgcagcccgggattcctcctaagccgcgtcccatctgtgtaggaccccaccgaaaatcggactgttcaacttacctggcagccactcccagagcccctggaaatctggcccaaggctctctgactgactccttcccagatcttctcggcttagcggctgaagactgacactgcttgatcgcctcggaagccccctgggtatattgcatgatgttgaggtttggggtatgattgattctgtcacccagatactgagtatagtacacaatagttaatttttcaattgtctcttctccctctctccctccatagtagtccccagtgtcttttgttgccatcagcagctgtatgacactgtccccaggtctcatgtctgtataaacatacacatcataggatatttcagggaaggttggcgtgttatcatttgcatccatcacttgaatattgacgatgactggctcactttcttgtacaccatcaaatgctgttatcgaaaaggtgtaagtttgctgttcttccctgtccactggttgaagtaaggtgaggtagcgagtaataccagtctgtgtgacggtgaagactgaggtgtagtcattcagaaaaaggtgaagctctgggtcttttgtatcttctatgtccttgtccagagctactattcttaaaggtgaagtcaaattgagactgtccgaaatggttgctcccactggggcagattccaggatatagccttgataactgggcattgtaaaatatggactttgattgttttcatccagtatttcaatgtgtagaccggcaaaggcaggaagaggatgaccattgtcttgttcagccttaataaccaaatcaaatttctggtgaaagtctctgtttactggctccaggagactaagttctgctgtcctaggatgcatatggaaaaatcgtgggtaatcctcaggagtccctttgctccagttaccaacaagttcctcatctctatctgagaccacctcagcctggttttcatcattaatatcattatcagcattttggtcaaagccattcggtaagtctctagagagttccaaactttctcgcatcttcctatcttctacagagccctgcaaactgttccaatctctgcctgttacccagttccaaagtcgtttctgcat

SEQ ID NO: 26578 - DNA, 380 bp, Homo sapiens
  SIMILAR (278)..(165): 811254mologous to Homo sapiens Human secreted protein, SEQ ID NO: 5576,accession number G01495,Smith-Waterman Score=150.
tcttgagtgtccggaagaagaaaggctagaaacaggcaagtgtggacagatgctggctgaggagaaagaggagttgaatgtggtcccagccatttggatgatggagacttatcggggtgaccaagtggaattgccttgggctgctgtagacaggagcccaaggctggcagccactcccagagcccctggaactctggcccaaggctctctgactccttcccagatcttctcagcttagcggctgaagactgacgctgccggatcgcctcggaagcccccagaccatcacggatgccgagcttcgggtaactctcacagtggagggtaagtccgtccccttctgggctgtactgccgcaaagcttcacagacagcccccat

SEQ ID NO: 26579 - DNA, 774 bp, Homo sapiens
  SIMILAR (773)..(687): 721254mologous to Homo sapiens putative p150,accession number U93564,Smith-Waterman Score=107.
ttattttattctctttgtagcaattgtgaatgggagttcacccatgatttggctctctgtttgtctgttatttgtgtataggaatgcttgtgatttttgcacattgattttgtttcctgagactttgctgaagttaattatcagcttaaggagattttgggctgaggcgatggggttttctaaatatacaatcatgtcatctacaaacagagacaatttgactttctcacttcctatttgaataccctttatttctttctcttgcctgattgtcctggccataacttccaacactatgttgaataggagtggtgagagagggcatccttgtcttgtgcctgttttcaaagggaatgcgtccagtttttttccattcagtatgatattggctgtgggtttgtcagaaatagctcttattattttgagatatccatcaatacctagtttattgagagttttcagcgtgaagggctgttgaattttgtcgaaggccttttctgcatctggcagccactcccagagcccctggaactctggcccaaggctctctgactgactccttcccagatcttctcggcttagcggctgaagactgacactgcccgatcgcctcggaagcccccacccctcaaaaggccccattgtgtgttgttccccctcaggggtccatgtgttttcatcattaagctcccacttataagtgagaatacacagtgtttggttttctgttcctgcattagtttgctgaggataacggcttccagctacatccat

SEQ ID NO: 26580 - DNA, 357 bp, Homo sapiens
  SIMILAR (318)..(205): 841254mologous to Homo sapiens Human secreted protein, SEQ ID NO: 5576,accession number G01495,Smith-Waterman Score=165.
ctagtgagttttatatgctgatttatatcctgcaattgactcaattagtttatccattctaacagttttttggtggtctgtacgtttagctatatttaagattatgtcatcatcaaaaagggacaacttgacttgctcttttccaatttggatgccttttatttctttttcatccctgatttctctagctaggacttgtggtactggcagccactcccagagcccctggaactctggcccaaggttctctgactccttctcagatcttcttggcttagcagctgaagactgacgctgcccaatcgcctcggaagcccctgggctgtactgccgcaaggcttcacagacagcccccat

SEQ ID NO: 26581 - DNA, 1156 bp, Homo sapiens
  SIMILAR (384)..(503): 921254mologous to Homo sapiens calbindin D28K,accession number S46006,Smith-Waterman Score=205.
atggcatcatctgctcagcttctggggagctctcaggaaacttacaatcatagcaaaaggcaaagagggggtgagatgtctcacatggctggagctaggaggaagagagagagaggagagatgctacacacttttaaacaaccagatctcatgaggtggtcttcagtatgtcggaagaacaaagagaaggttggaaattccaggaaaagaagaaatgttagatattgtttctccagaaagttcaatggcactagtaaagttttcgagagctggcaagtggtggtggtgggtgaaataaacagccatgttgctcacacaaagcctgttcggtggtctcttcacacagacgcgcatgaaatttggtgccgtgactcagatcggcggacctcccttgggagatcaatcccctgtcctcctgttctttgctccatgagaaagatccacctacaagctcaggtcctcagaccgaccagcccaaggaacatctcaccaattttaaatcggagaaaaaggagacacgttttatccgtggacccaaaactccggcaccggtcatggactagggaaggcagccttcccttggtgtttaacctttgcagggatgcctctctgattattcacccaggtttcagaggtgtcagaccacgcagggacacctgccttggtccttcacccttagcagcaagtcccacttttctgggggaaggggcaagagcttgctacaagtgccagaaatctggccaccaggccaaggaatgcctgcagcccaggattcctcctaagctgtgtcccatctgtgcgggaccccgctggaaatcggactgtccaactcacctggcagccactcccagagcccctggaactctggcccaaggctctctgactccttcccagatgttcttggcttagcggctgaagaccgatgctgcccgatcgccttggaagccccctcaatgcgttctccaaatgcatgaattacaaccaggaaaaaaagaaggttttgatatcctgaactctttgctggtttaacatgtatgtttctgtcacatgtttcaggtgggacagggacagtacccgtgtaacgcagaagaggagcaccaggatggagaaactctagcctcaccgactgtttaggttgtgagagcacacggggcat

SEQ ID NO: 26582 - DNA, 648 bp, Homo sapiens; identical to SEQ ID NO: 1995
  SIMILAR (2)..(115): 841254mologous to Homo sapiens Human secreted protein, SEQ ID NO: 5576,accession number G01495,Smith-Waterman Score=166.

SEQ ID NO: 26583 - DNA, 2006 bp, Homo sapiens
  SIMILAR (1578)..(73): 931254mologous to Homo sapiens putative p150,accession number U93572,Smith-Waterman Score=2471.
ctaccccacagcagtccccagagtgtgatgttccccttcctgtgtccatgtgttctcattgttcaattcacgtctgttgtttcctgactttttaatgatctccattctaactggtgtgagatggtatctcattgtggttttgatttgcatttctctgatggccagtgatgatgagcattttttcatgtgtcttttggctacataaatgtcttcttttgagaagtgtctgttcatatccttcacccactttttgatggggttgtttgttttcttcttgtaaatttgtttgagttccttgtagattctggatattagccctttgtcagatgagtaggttgtgaaaattttctcccattctgtaggttgcctgttcactctgatggtagtttcttttgctgtgcagaagctctttagtttaattagatcccatttgtcaattttggcttttgttgctgttgcttttagtgttttagacatgaagtccttgcccatgtctatgtcctgaatggtattgcctaggttttcttctagggtttttatggttttaggtctaacatgtaagtctttaatccatctcgaattaatttttgtgtaaggtgtaaggaagggatccagtttcagctttctacgtatggctagccagttttcccagcaccatttattaaatagggaatccttcccccatttcctgtttttgtcaggtttgtcaaagatcagatagttgtagatatgtggcattatttctgaggtctctgttctgttccattggtctatatctctgttttggtaccagtaccatgctgttttggttactgtagccttgtagtatagtttgaagtcaggtagcgtgatgcctccagctttgttcttttggcttaggattgacttggcaatgtgggctcttttttggttccatgtgaactttaaagtagttttttccaattctgtgaagaaagtcattggtagcttgatggggatggcattgaatctataaattaccttgggcagtatggccattttcacgatattgattcttcctacccatgagcatggaatgttcttccatttctttgtatcctcttttatatcattgagcagtggtttgtagttttccttgaagaggtccttcacatcccttgtaagttggattcctaggtattttattctctttgaagcaattgtgaatgggaattcactcatgatttggctctctgtttgcctgttattggtgtataagaatgcttgtgatttttgtacattgattttgtatcctgagactttgctgaagttgcttgtcagcttaaggagattttgggctgagacaatggggttttctagatatacaatcatgtcatctgcaaacagggacaatttgacttcctcttttcctaattgaataccctttatttccttctcctgcctaattgccctggccagaacttccaacactatgttgcataggagtggtgagagagggcatccctgtcttgtgccagttttcaaagggaatgcttccagtttttgcccattcagtatgatattggctgtgggtttgtcataggtagctcttattattttgagcagctcctccttgtacctctggtagaattcggctgtgaatccatctggtcctggactccttttggttggtaagctattgattattgccacaatttccgatcctgttattggtctcttcagagattcaacttcttcctggtttagtctggcagccactcccagagcccctggaactctggcccaaggctctctgaccgactccttcccagatcttctcagcttagcggctgaagactgacactgcccaatcgcctcggaagcccccagctctctggtcccatcatgaaagggtgatggattgagggtattaactactggaaatcgcaggggaccaaagacaccagttttgtggaataaagtaagtttgagataaagcgcagtacagacggtcaaggtaatgctgccttttgcttcaccttcagaag

SEQ ID NO: 26584 - DNA, 631 bp, Homo sapiens
  SIMILAR (568)..(437): 811254mologous to Homo sapiens Human secreted protein, SEQ ID NO: 5576,accession number G01495,Smith-Waterman Score=176.
cctggtgatcaccaaccatatgcggggaacccacaacaggcatatttcagcccacctatatcagccgtcgtctgctccatctatatggggaaacgaacaggcatcattcagccacttcatgcgctgtatctccacaacaatgccaacaccacagaaggggacgggcttaccttccactgtgagagttacccgaagctcggcgtctatgatggtctgggggcttccgaggtgatcgggcagtgtcagtcttcagccgcataatgtagaattggtagaaactctgaagtgtgttccctgtaactggacagtcccactgtccctcaaccactttctcctttccactcttcaatctcttccttctcttaatttcaattcctttcattttctggtagagacaaaggagacacgttttatccgtggacccaaaactctggcgccagtcatggaccggcagccactcccagagcccctggaactctggcccaaggctctcagactccttcccagatcttcttggcttagcggctgaagactgacgctgcccaatcgcctcggaagcccccctgacacccactaggctcagcaaattacctaggctgtactgccgcaaggcttcacagacagcccccat

SEQ ID NO: 26585 - DNA, 1074 bp, Homo sapiens
  SIMILAR (354)..(536): 731254mologous to Homo sapiens Human secreted protein, SEQ ID NO: 5210,accession number G01129,Smith-Waterman Score=228.
aaggcggaggtttcagtgaccgagatcgcaccatcgcactccagcctgggcaacaaatatggatgtggggaataggcaagcaggtaggtggatgtggctggctgcgtggaaagaacagggtggtgggggcagccaaggatcaatcaggcactggtgagaagttctacttcatcccgaaggcaatgggagccatggagggctctggacagaggagaacattgccagacccaggtgctcacaggaacccttctgggggctacagcgcaacagattgtgaagggagccggcctgcaccaggtgaaataaacagctttattgctcacacaaagcctgtttggtggtctcttcacacggacgcgcatgaaatttggtgccatgactcggatcgggggacctcccttgggagatcaatcccctgtcctcctgctctttgctctgtgagaaacatccgcctacgacctcaggtcctcagaccgaccagcccaaggaacatctcaccaattttaaatcaggagcttgctacaagtaccagaaatctggccaccaggccaaggaatgcctgcagcccaggattcctcctaagctgcgtcccatctgtacgggaccccactggaaatcagactgtccaactcacctggcagccactcccagagcccctggaactctggcccaaggctctctgtctgactgactccttcccagatcttctcggcttaacagctgaggactgacactgcacgatcgcctcggaagccccctacaccattcacggatgccgagctttaggtaactctcacagtggaagcccctggcccacagcctggtaccctggagctccataaatacctgttgagtgaatgagaggatgaaggcttctgcagagagagagtggaagaaaagtggcgtcttttgacttcggacttggctttccttgcagaggcctcagggaggaacaacacggaaacaaagatggccttgtcctgggcccttccctccctgccccactgtcctcctctgcatcctacagcagcctggggggaggtggaaatgggcccctttgttctgcttccataa

SEQ ID NO: 26586 - DNA, 367 bp, Homo sapiens
  SIMILAR (220)..(95): 371254mologous to Venezuelan equine encephalitis virus putative,accession number L04599,Smith-Waterman Score=69.
tggcgactgctttgggaagtcctgctggcgggcactgtgcccctgggggggtgcaaagagttgtccagttaccttgatcttctcacagcctcctccccagggcaccgggagagaccaggattggaggacggcaaagaacacacttcccagaggattcttggaggtggcttcctccaggcagtaaatctacagcccaggctccctgcatcttatggctccaatcactttggatctcatcgtcgcctgcacattgccatacacagggaaggagaagagatggagaaggcaaagactttctgaaagccgcggctaaaagctgggcatgtgtcacatcagctcacattccattgtagagacggagtttcac

SEQ ID NO: 26587 - DNA, 232 bp, Homo sapiens
  SIMILAR (114)..(1): 861254mologous to Homo sapiens Human secreted protein, SEQ ID NO: 7217,accession number G03136,Smith-Waterman Score=170.
atggatgaagctggaagccatcatcctcagcaaactaacacaggaacagaaaaccaaacactgcatgttctcactcgtaagtgggagttgaacaatgagaacacatggacacaccagtctgatgattgcaatgatctgatcgtagaataccacaagcctaaccaagctgcggccctgctacagctgccaaacagagcagtattgttgctaaagcagattattaaaacctcag

SEQ ID NO: 26588 - DNA, 322 bp, Homo sapiens
  SIMILAR (49)..(123): 721254mologous to Homo sapiens Human secreted protein, SEQ ID NO: 6834,accession number G02753,Smith-Waterman Score=109.
atggatggagctggaagccatcatcctcagcaaactaacacaggaacagaaaaccaaacaccacatgttctcgctcataagtgtgagctgaacaatgagaatacatggacgcaggaaggggaacaacacatacggggtctgtccttgctggtgagggcaggactcaaggttttattccccaagcagcaaggaatgctgtggacaaggcagccctcagctgtcagttcctttcaggaatttcctcagttgaagagagattccttgcctaaggtgacagtccctttctggggtggtctacatccaatcactggtcaatgcagag

SEQ ID NO: 26589 - DNA, 759 bp, Homo sapiens
  SIMILAR (233)..(427): 751254mologous to Homo sapiens Human secreted protein, SEQ ID NO: 6834,accession number G02753,Smith-Waterman Score=266.
atgaagccagagccaatagggtcagctttgtcccttgacatgtgtaaaacactgccccaggaactagggcatataactaggagagcttttgaagaaggtgtaagatctaggaacagcagaaaagatttggatattactgtaaatgtgagattagtcttgaaagatgaaagagttcatgaagaaaagcagcagaacaaaagataccagacaacaggaacaagtactggaaccactattcacaatagcaaaaacatggaatcaacccaaatgcccatcaacgatagactagataaagaaaatgtggtacatatacaccatggaatactatgcagccataaaaaggaacaagatcgtgttctttgcagggacatggatgcagctggaagccattatcctcagcaaactaatacaggaacagaaaaccaaacaccacatgttctcacttataagggggagatgaacaatgagaacacatggacacagggaggggaacaagacatactggggcctgtcgaggtgaatgcaaaaccttcatcctctttagttcaattcctagcccaagtattcctggaaattcctgtagcttcatcgggaatgtggaaggaatcagaaaagaacttccccagactctcaccgctgtatttgcatactctgctgacctgccagttaccattgatgaaccgtccattgtcctgtgtaaagccagcccctcaagatgtgcactggatttcatgcccttttgcatattccaggacctag

SEQ ID NO: 26590 - DNA, 2556 bp, Homo sapiens; identical to SEQ ID NO: 22181
  SIMILAR (1570)..(2553): 851254mologous to Homo sapiens putative p150,accession number U93567,Smith-Waterman Score=1417.

SEQ ID NO: 26591 - DNA, 1343 bp, Homo sapiens
  SIMILAR (1)..(972): 951254mologous to Homo sapiens ChM1L,accession number AB055421,Smith-Waterman Score=1658.
atggcaaagaatcctccagagaattgtgaagactgtcacattctaaatgcagaagcttttaaatccaagaaaatatgtaaatcacttaagatttgtggactggtgtttggtatcctggccctaactctaattgtcctgttttgggggagcaagcacttctggccggaggtacccaaaaaagcctatgacatggagcacactttctacagcaatggagagaagaagaagatttacatggaaattgatcctgtgaccagaactgaaatattcagaagcggaaatggcactgatgaaacattggaagtgcacgactttaaaaacggatacactggcatctacttcgtgggtcttcaaaaatgttttatcaaaactcagattaaagtgattcctgaattttctgaaccagaagaggaaatagatgagaatgaagaaattaccacaactttctttgaacagtcagtgatttgggtcccagcagaaaagcctattgaaaaccgagattttcttaaaaattccaaaattctggagatttgtgataacgtgaccatgtattggatcaatcccactctaatatcaggaacatttgcaaagcagttgcatcacaactttgcatttattatcttagtttctgagttacaagactttgaggaggagggagaagatcttcactttcctgccaacgaaaaaaaagggattgaacaaaatgaacagtgggtggtccctcaagtgaaagtagagaagacccgtcacgccagacaagcaagtgaggaagaacttccaataaatgactatactgaaaatggaatagaatttgatcccatgctggatgagagaggttattgttgtatttactgccgtcgaggcaaccgctattgccgccgcgtctgtgaacctttactaggctactacccatatccatactgctaccaaggaggacgagtcatctgtcgtgtcatcatgccttgtaactgggacatggatggagctggaagccattatcctcaacaaactaacgtgggaacagaaaaacaaacactgcatgttctcacttataagtgggagctgaacaatgagaacacatggacacagggagaggaacaatacacactggggccttgttgggggtgcagcaggaggagaggatcaggatcaatagctaatacatgtgagacttaatacctaggtgatgggttgatagatgcagcaaactaccatggcacatgtttacttatgtaacaaacctgcatgtcctgcacatgtatcctaagaaacttaaaattaaatttttttaaaagatacaattccacataccccctttaaaagtatacagttcctgggatttt

SEQ ID NO: 26592 - DNA, 1029 bp, Homo sapiens
  SIMILAR (487)..(891): 871254mologous to Homo sapiens Human membrane protein,accession number W39257,Smith-Waterman Score=667.
atgcacgcagacatgcatacacaaacatctatccccacatccacatccacacacactggcacagaatcggatgcctctgagactgaacgtcttgatggtgcactatttattcccccggtttacttcttgcctcagagtgctaatattaggcactgcatcttagcagacacggctgaggccctgataccagctgctcagatccccccagggccacagcatgaaaacaatactgatgcctatgagcagaagcttggcgagattcggaatagaaactgtcttcacttggctagtaatgcaactgtaatgggagtaatacagttgatgatggtactcttgggactgccaactagtaactccctggaggccaagaataatacctggtcctcttgggacatggatggagctggaagccattatcctcagcaaactaacacaggaacagaaaaccaaacaccacatgttctcactttgaagtgggagctgaatgatgagaatacatggaaacatggaggagaacaacacacactggggcctgttgggagttatactggagagctttgccagtccaagattgattactgcatcctagacccatgcagaaatggagcaacatgcatttccagtctcagtggattcacctgccagtgtccagaaggatacttcggatctgcttgtgaagaaaaggtggacccctgcgcctcgtctccgtgccagaacaacggcacctgctatgtggacggggtacactttacctgcaactgcagcccgggcttcacagggccgacctgtgcccagcttattgacttctgtgccctcagcccctgtgctcatggcacgtgccgcagcgtgggcaccagctacaaatgcctctgtgatccagaatgggggctgagcccagattcgaatgccggtgtccctggttttgctgctccagtgcctggcctggaacttccaaagggcatgtctcatactcaacgaataactcaacaagttactgagaaatgcaatttggcacttgaatggtgttga

SEQ ID NO: 26593 - DNA, 1103 bp, Homo sapiens
  SIMILAR (1026)..(883): 651254mologous to Homo sapiens Human secreted protein, SEQ ID NO: 4573,accession number G00492,Smith-Waterman Score=169.
atgcccggacctgcccggcccgaactaggcaaagtccagcgaataggtgaagaggcggaagcccccaaagtatcagcgccgcttcgtggagcctggcgactgctttgggaagtcctgctggcaggcactctgcccctgggggtgtgcaaagagttgtccagttaccttgatcttctcacagcctcctccccagggcaccaggagagaccaggattggaggacggtaaagaacacacttcccagaggattcttggagacctggagaccccgcactcagggcgttcaggaactccccgacccaccaggagcctctcctggtgtctcccagggattgtcaatagttccattttccttgaagaacttgttttcaggtcgtctttacatccccaaccacgttacaaggtggatgtgatgatccctgttggtgaggacacgggagctcagggaagccagcccaaggctacagagccagcattgcacagtcagatatcagtggagtacggcactggttcagaggaaactgtagcagcctctctgggggcagttacattgagaagtcccttcctgctggaggttctcagcctgaatctgctattccagtggcttgactgtcatgctgtcatcatggctggatctgatacggccaccgtggaccttgaggtgacctcgggaatggagacagtgcatgggagagaatcacattggaaggggcctgggtttctgaagaccctggacatggatggagctggaagccattatcctcagcaaaccaacacgggaacagaaaaccaaacactacatgttctcacttataagtgggagctgaacaatgagaacacatggacacagagagaggcacaacatacaccctatggactgtttgggggtgtgtggtgggggaaaggagagcatcaggaaaaatagctaatgcatgctgggattaatacttaggtgattggttgatagatgcagtaagtcaccatggcacacgtttacctatgtaacaaacctgcacatcctgcacacgtaccccacaatgtaaaatgaaattaaaaagcaacaataaacaaacagaatcatgggctcataaaaaaaaaaaaaaa

SEQ ID NO: 26594 - DNA, 571 bp, Homo sapiens
  SIMILAR (502)..(386): 701254mologous to Homo sapiens PADI-H protein,accession number AF229067,Smith-Waterman Score=123.
tagggattcagtgattgtacaagagcagtgggggtttctggacaaagtagagaaaatcatttgtgtattgttatgcaaatagcttacagaactattaataattttgttttctttaatttgtaatttcttatgtaactagtccatttgctttcacccagtgatgagcatcttacctgcttcactcggtagcgctccattcctaatctttttaagggacaaattcatcaacttgggcggttaaaagtctatcagtaacatgatcccagctacttctccaggattcctcttgaggctgtccttactacatgtggcactacactggcaggccacactgtgtgacttattccctggggtttctattgtttctgccttgcttttctcatcctttagatattagcattattggctgggcacagtggttcacacttgtaatcctagcactttgggaagctgaggcaggcagatcacttgagcccaggaattagagaccagcctgggcaacaaaaatgtcggctgcagtgagctgatactgctgtccaccctgggcaacagggtgtgagacctcatctca

SEQ ID NO: 26595 - DNA, 765 bp, Homo sapiens
  SIMILAR (57)..(356): 971254mologous to Homo sapiens Tng2,accession number AF195821,Smith-Waterman Score=546.
  misc_feature (1)...(765): n = a,t,c or g
ggcaccgccccggaattcccgggacgacgatttcgtcctggatggatgcatggggaaggttagaagcacggtacatgtcatacctacattcaaggagaggggaccatgcgtaggataaactgcagagagacaacagatttgcatcccagacacattcacactgggccaagagcagctgccattgcagattcgagtcacgtccttttttccttccttctccttcttggagttacaacagaagctggggaggtgagagtgcagaaaggacgtggatgaagcagagaggcacgtgcctgtctcattcgcctctggatctgctgcatccaggactgtgccagcacaaagtgggagcccgataaatatttattgaagaaatgaaaggtgacaaaaggcagaaggagggagaccccaaaaagagttccagaggctgggaagtccaaggtcaaggcaccagcagattcagtgtctgatgaaggctctctctttgcttccaagatggcggctcttactgcatcttcacatggcgacacagcattcaacccctctggaggaagtagcatttaaggcaccatcttggaagcagggaccagagcctctccagatactaaacctactggcaccttgatcttggacttcgcagactccagaaccgtaagcatagatttctgttctttataaattactcagtctcagcaggaatggactaagacaaccaggaataattcttcgattngtacagaaatgaagcagataggttggttgatt

SEQ ID NO: 26596 - DNA, 381 bp, Homo sapiens
  SIMILAR (191)..(241): 521254mologous to Homo sapiens Human secreted protein HAGFI62, SEQ ID NO:160,accession number Y86245,Smith-Waterman Score =45.
agcggccgcccttttttttttttttttttttttttttttttttttagtgtaaaggttttttaattgggtatatgtagcattagacaaaattatttaaagtcaataaattgttattcgaggaattccatgttgggatttcttccactgtccatcaagggcactttagatcctttaaagagctggagtcaaaagatttatcttcaagtttgcccataattactttggcttctgtcatctcgttttaatatggatatactgatgaagacttcaaaattcacctttttactgtaggtggtggggatctacctggttctcaatttgacaccctctcaacatgaatgagttcaaatcacattcattcctttgacattcatgatcctg

SEQ ID NO: 26597 - DNA, 444 bp, Homo sapiens
  SIMILAR (1)..(183): 1001254mologous to Homo sapiens unnamed protein product,accession number AK027016,Smith-Waterman Score=304.
gcaacacatcttgaagataacgaatgtgatatcaaattggcaggggatagtttcatagtaagttctgaattccctgtaagactgagtgtatacttagaagaagaggatattactgaagaagctgctttgtctaaaaagagagctacaaaagccaaaaatactggacagagaggcctgaaaatgtgacaggatcatgaatgtcaaaggctttttcttgagaacatggtgtctggagttaaagggctgacaggacaactggatcagtttcattaaaaagggcaaacttgaagataaatcttttgactccagctctttagaggatctaaagtgaccttgatggacagtggaagaaatcacaacatggaattcctcgaataacaatttattgactttaaataattttgtctaatgctacatatacacaattaaaaaacctttacacta

SEQ ID NO: 26598 - DNA, 202 bp, Homo sapiens
  SIMILAR (102)..(31): 451254mologous to Homo sapiens U2AF1-RS2,accession number D49677,Smith-Waterman Score=56.
tttgtttaacgtggacaaagacttacagataggtgcaaaaaataaatcctcttttgcaacccagaactcattgttcagtatgagttttgatacatataagaagggatattatgatacctgagacagttgattgatgggagtattgatagccataaaggttggttccaggccaggtgcaatgggtcaagcctgcaatccccac

SEQ ID NO: 26599 - DNA, 669 bp, Homo sapiens
  SIMILAR (146)..(259): 411254mologous to Saccharomyces bayanus alcohol dehydrogenase isozyme 2; Adh2,accession number AF218306,Smith-Waterman Score=70.
tttttttttttttttgactttctagaaatagtgtaaaggttttttaattgtgtatatgtagcattagacaaaattatttaaagtcaataaattgttattcgaggaattccatgttgtgatttcttccactgtccatcaaggtcactttagatcctctaaagagctggagtcaaaagatttatcttcaagtttgccctgaagaagagaaattttgattaaccataattactttggcttctgtcatctcgttttaatatggatatactgatgaagacttcaaaattcaccaagaatctttgggatctaatttcttcaaccaatttactttagggtcctttttactgtaggtggtggggatctacctggttctcaatttgacaccctctcaacatgaatgagttcaaatcacattcattcataagcgatcactcaagaatggtacagatgtgtggagtatgccaatacctaaggtaaaaaagtagattatctggtttttcataacgtttagcaaccgtctttttcaaacttttagcaactgtcttgtaattccttcccacagatctaacaatagtcctgtgagtaaagtaaaaccacagagttactctatgaggcgtttccaacgatgtgcaggctacaggaaaagccccatcgggctcgtgcaatcactct

SEQ ID NO: 26600 - DNA, 943 bp, Homo sapiens
  SIMILAR (651)..(752): 411254mologous to Macaca fascicularis hypothetical protein,accession number AB055273,Smith-Waterman Score=70.
gaaataaggaataaaattcatgtctctgaaaattctcaaatcaaaacagttaaagagaaaccatctataagttcatctgtgagtcgtctaaagggcgtgaataaagtcagagcatcttttcctgaagacagaaaagactacacaggctctaaggcaccaaaggggtcttaaggttatacaatcaactagctgaagtgaaacaacaaaaggaagaaaaaacaaaacaagaagcttatgcccaaaacagagcaagggcaaaagaattccataaggtgagtataactgagggggaaggacttaatttttcaagcatgaagtacacaactgaaactcaaatttttattccttccacagaaaacactagagaaacttcgagccaaaaatacatgctgactttctagaaatagtgtaaaggttttttaattgtgtatatgtagcctcaccccaaaattatttaaagtcaataaattgttattcgaggaattccatgttgtgatttcttccactgtccatcaaggtcactttaggatcctctaaagagctgggagtcaaaagatttatcttcaagtttgccctgaagaagagaaattttgattaacctttaaaactctcacatggcaacaatcatggattattacgttttatatctcctcaggaaaacatagcacccaaacattaggagggctatagggcttcctatagagaacttccatctttggtcacagcgttaagagctctgggtttcacagcctcataagccctctttgaaatgaacccatacaaatgtcttttctaatgcatacatacctttttaatgaaactgatccagttgtcctgtcagccctacataacaatagtataaaagtaaattttacatttccagagatgagtgtacagtgagtgaacatgaatgagtccctagaacgagcctgagttaactcta

SEQ ID NO: 26601 - DNA, 3543 bp, Homo sapiens
  SIMILAR (186)..(275): 411254mologous to synthetic construct rCAS,accession number U19100,Smith-Waterman Score=61.
  misc_feature (1)...(3543): n = a,t,c or g
aacaagcgcctcagacttcagtgtaagtctaacactgaatggagggaagtaccaatgggtagacccctcttagacagccatgcagtataagaaatgttcagcaagaacccgtggggagattctcaggaacaggcctgccactgtcagtggctaggagcagcccatgggaagcatggcctcagtgcaaatggagatttcagaatgcaggagattaagatatccgccagcccgaccgcgggcagggcccacggcctgcggagcctgagaaacgcgagccgtacctgcgttcgcaacaaggcgccttcctgggatcccattcctccggaatacaatcccagctcttgggcctcggggagtcatgctcctacggggcgactgggaagccagtgcatccctgactcacctgagaacccggggcctggacacagtaaccgcagctcagagcaagccagcctgattttgcagtctgggtcatgggggttaaacatcaggaatcaaaggattaaaaatggggggtggggatgggaagttgctgacacgatcagatctggctgcacagtggggaaaaggtcagagagagtgaagacagaaggccgtatactactacagaaagtgaaagataatagcaatgagaatggagagagacccagacctctaggctaccggggtaggcatgtgacccagactggacaaatcgcagttcttgtttccattgccattgtgaccaaccgaggtacagctgaaggaatctgttgttgaaaatcatgcagtgttaagttatgctgtggaggaagaacatgcatatttgggtccaactgtgaagccagatgataaggctaaaacactgtcttatgaaccattatcttcagcaactgtttccactgggagccttttaagttatgaaaacacagatttgagccttacagatccagagtcattttcagagcacatggatgatagcaagcaagaatctaccaccagtaaagaagaggaaacaaatattataagttccataggtccttcaacacaagatatttattagcgtcagaactcttcagacgttcataaatctctgttgcctgcagaggaggaaactacatggggccacactcactttcagcagatgatagacaagtacattagtgaagcagatttgatacctgaaaaaacagatttgcaagaattggaacacatttttcctaatttgcatcatcagctgtgttaaacccttacaaccacatccagattttgacttatcatcatcatcctctgggatttctccagacaacagagacttttaccaggaggagagccagcatgctgatctaccaagtatttttagcattgaagcaagagattcttcccaaggcatgaaaaatcagaactatccctctgaagaacatactgaaatattacaaaacaagaaaaaaattgttcatttccagctttctataggaaacttacatatcactctacttaccatctgatgaggctacttacttcgatcatgtgaatgtactctatagcactccatgtggttctaactctagtgagtgctcaacaaaacaccaactagaaagcagaaaggaaagtatgggctttgaagaactatcaaaaagaggggttgttacaatgttacaaagtcccggactcattgaagataataaaaatgaaacctgtacggttttagacataaatccacaggtagaggaaactgactctcgattatgtgtaagaacagtggagatgggaacttcaattcaggcaccatattccttaactactcaaaatgaaaaatattttgagaattcagctgaaacagacattccaaaaatcaccaaaaaactatctcaactaggagaatcagagctttttgcaagttctggatcattttcattacagagctctataccagtctgggaaaccagaaactggccatggtataatggaagaaccagaacttactttaataagcaccactgataccagtattgctgaaatggattttgcaaatttaacccctagaagagaagagcgagaatgaagcaaaatgcttctttcaggtgagtgtgtttctgcctcttgtatcagcaacagaagcctcagattatccagctgtatcagaactttccatagaaaaaccaaggacagcatctacagcagaaaccccctcgcaggcttacacctgtaccagggagcttacaagaagcatttataaagaggaaaaaatcatttatggagagatcccaccagaggcagaaagaaataaggaataaaattcatgtctctgaaaattctcaaatcaaaacagttaaagagaaaccatctataagttccatcctgtgagtccgtcctaaagggccgtgaataaagtcagagcatcttttccctgaagacagaaagacctacacaggctctaaggcacccaaaggggtctaaggttatacaatcaactagctgaagtgaaacaacaaaaggaagaaaaaacaaaacaagaagcttatgcccgaaaacagaggcaagggcaaaaggattccataagaaaacactagagaaacttcgagccaaaaatacatgctgactttctagaaatagtgtaaaggttttttaattgtgtatatgtagcattagacaaaattatttaaaagtcaataaattgttattcagaggaattccatcgttgtgatttcttccactgtccatcaagggcacttttagatcctctaaagagctgggagtcaaaagatttaaccttcaagtttgccctttttaatgaaactgatccagttgtcctggtcagcccattaaatcactttgggcttctggtcaatcttcgttttaaatatgggatatactggatngaagacttcaaaaattcaccaaagaatctttggggatctaatttcctccaaccaatttaactttaagggtcctttttactggtaggggggtggggggatctaccctgggtttctcaatttggacaccctctcaacatgaatgagttcaaatcacattcattcctaagcgatcactcaagaatgggtacagatgtgtggagtatggccaatacctaagggaaaaaagtagatatccttaactccagacaccatggttctcaagataaaagctttcttgcctaggctggtcttgaactcatggtttcaagcaatactcccaccttggtgtggggattgcaggcttgacccattgcacctggcctggaaccaacctttatggctatcaatactcccatcaatcaactgtctcaggtatcataatatcccttcttatatgtatcaaaagctcatactcgaacaatcgagttctgggttgcaaaagaggatttattttttgcacctatctgtaagtctttgtccacaagttaaacaaaaacatacataagtgcagtcccaaaatgcactacatagcagagtagtcagctctatcgtggtgatcaaaataatgaacatcggggtaatgactggttctccccaggtatacatgttgaataaatgtgtatgccttttcttgaactaataa

SEQ ID NO: 26602 - DNA, 2038 bp, Homo sapiens
  SIMILAR (198)..(121): 531254mologous to Homo sapiens Human gene 42-encoded protein fragment, SEQ ID NO:360,accession number Y86445,Smith-Waterman Score=94.
  misc_feature (1)...(2038): n = a,t,c or g
gatctgtccacgaggaagagaaaatggctttacctttaggacaatctcattgtggactgctttatttatattattagtaacgctgttttaagtgttattctttttattgtattttatttataaaaaatgcctttatatattgaaatatataaatatatataaacacacacacacacacacacacacacacacacatatatatatatatatataattgcctttatatttaggcggtatgagttctccctaagcgtgagttggctctgccctgcacaggcacccaaacagtcctacctaatgtcacttcaccaggaaatgagaggacatggtacagtgtgggagacagcactaacacgtgctgaataactactgtgtaccaggcaactggtgctcggtgcttgttactgttaactcatttaacccccacaactcatctacaaagttggcattaaaatccccaagtcactcagtgagccatgggacctgaatccgaacctagtttatctggagccataatctggggctcctcccatttttccatactgctttccaaaagctttgcgggtttcactctttgggatgggaaccagtcccgtttccgtatggctgtgattctattccctggccgtgggaattcctccgaggctccaactccgcagccggagaagctgctctctggcctccgcgggcagagctctgcttaatacttcgtcttccagaggtccacatttctccccttgacgccccctgtctaccacctccacctggaaatttgatctttactgtgctcagtgatcacgaaattggtcaagcctattcatgttccttctcatctagaattctgtgtgattgttttagcataaactgccccggctcccactgtatccatttccacgatctccttttaaatgtttttctttccagttttgccactgaccagtctggtgaacaggtgctgccaaggggtgccaagttaccattgcaaatggttctaaaacccttttgaaagtgttcttagcaaaagcctttctttctgggtgtttttgtcgaatgagtctatgaagacctcaatgcatcccatcttgggctgatcatgccacagatctcattcccagcctatagtactgcccaagaagtgaagtttatcattgaattttacctgtgttgctctcttttaaagtaatgactttgagatgcatgctttgtatcatatctgaaaagtatgttttattttccttaaagttgtaatattgtgtgtgaaactgtacatattttaaatgatgtagctttggcaggttttatttggttgatatgattttatattaaaagagaaggctgctttcatataggcatagcccctgaaggtggggaatactccctgtttgtacaacggctgcttattagtttgtggattgggggtgggccgaatgtcttcctctgaaattctttggggaaccccccacccctgtccctcccctggaaactcccctgtggcacacccctctgttcctggactgcaggaggattcaagggccctgaagggagcagggatcttgggggcaagtgtttttggggggacgctgtggaacataccttgacccctggggggcgatgtgggaggcagnccccacctccctcggggcaactttgccgtttcccttggagggaagggaggtggggtaggagaggagcttggggaggatgaggaggagcggtccccgccctcacacattgtcctatttttacccattaaccgagcgcccacatgtttatgaacttcaggatagaaatttagcctccttgtgaaaacgttttgttttactgccctaagaaaatacacatctctaggcttgtctgaccagaaagccagcaaagtcttttgcatcgggtgtggcccttttgtattttatttcccatatttaaataagccttccttaaaccctagccccagtcctgagagctttgagggtagccgaaaccccttatctaataaagtctaactctgtgagaaccacagaatcttcttaagcttctcaaa

SEQ ID NO: 26603 - DNA, 4944 bp, Homo sapiens
  SIMILAR (4473)..(4919): 901254mologous to Homo sapiens dJ398G3.2 (novel protein),accession number AL049548,Smith-Waterman Score=672.
agtgggatcattttggcagtaattttgagactctgtccgtctggataactgagaaagaaaaagaactcaatgccttggaaacttcgtcatctgccatggacatgcaaatcagccaaattaaggtgacctgctcacacattaaaagtaagctcagcagcattgtaggattagaagaagaagcccagtcttttgctcagtttgttaccactggagaatctgctcgaattaaagccaagttgacacaaataagaagatacggggaagagcttcgagagcatgcacagtgtctggaaggaacaatcctgggacatttatctcagcagcaaaagtttgaagagaaccttagaaaggtaagaattgatccacctaaatttgaagataaacttgctgttccaattaaaatatgttcttcagctacagaaacatacaaagttcttcaagaacatatggtaagagtatgcttcaacaagtcactgagcagcgcgatcactgccttctcagccagtgccaggaaggttgtgaacagagattcctgtgttcaggaggctgcggctctacagcagcaatacgaggacatcctaaggagggcgaaggagagacagacggcgctggagaatctgctggcccactggcagaggtgagcagcacttttcctttcctttttgacctggttagagcggggtgaagctaaagccagttccccagaaatggacatttctgcagacagagtcaaagtggaaggtgaacttcagttaatacaggcaagttcaaggaagtgtgaggaaggaaaaaataagaaaatgatgaaactacatttggagcagttggatgagagatggagagatttaccacagatcattaacaaaaggttggttctaaaagataaagtggttgctgaacaccagcaatttgatgagctgctgctttccttttctgtctggattaaactgtttctcagtgaattacaaactacctctgagattagcataatggaccatcaagtagcccttactcggcataaggtaaagtggttttttttttagagcaaaaagggcgaattgcagagtctgcagggtcacttagcaaagttgggttctctgggccgtgctgaggacctccacctcctgcagggaaaggctgaggactgcttccagctgtttgaggaggccagccaggttgtggagaggcggcagcttgccctgtcccatttggcagaattcctccagagccatgcctctctgtccggcattctccgccagctgaggcaaacagtggaagcaaccaacagtatgaataagaacgagtctgatttgatagaaaaggacctcaatgatgctcttcaaaatgctaaagcattagaatctgctgccgtcagtctggatggcattctttccaaagcccaataccatctgaaaatcgggagctctgagcaaaggacttcctgcagagccacggctgatcagctctgtggagaggtagagaggatccagaaccttctgggaaccaagcagagtgaggcagatgctctggcagtgttgaaaaaagcattccaagaccagaaagaggagcttctgaaaagcattgaggacattgaagaaaggactgacaaagagcgattgaaagaacctacccgccaagctcttcagcagaggtaaataggaaactgtcacctagaagatgaattgaattctcacgagcatgaactatgttggttgaaagacaaagccaagcaaattgcccagaaagatgtagcttttgcacctgaagttgacagggagataaaccgcttagaggtcacctgggatgataccaaaagactaattcatgaaaagtaagtcaaaacccacccacttattgacttaatgagagaatatcagaacctgaaatcagctgtatctaaagtcttagaaaatgccagcagtgtgattgtaaccagaactaccataaaagatcaggaggatcttaaatgggctttttccaaggtaaaattcaaaatgtgttaaatgaattacaaacagaaagacttggataactttaccagcaaaggaaaacacttgttatctgagctgaagaaaattcacagtagtgatttcagcttggtgaaaacagacatggagagcaccgtggacaaatggctggatgtaagataatcacctgggaaaaacatggataggctgagagtaagcctgtccatttgggatgatgtactgtcaactagagatgagattgagggatggtcaaacaactgcgttccacagatggcagaaaacatcagcaacctggataaccacctcagagctgaagaactgcttaaagaatttgaggtaaattgactgtgttgaccattgagattggaagaactgcattccaaagttaatgatctgaaagaattaactaaaaatctagaaacaccgccagaccttcaggtaagcattttgtaataactgcagaaactggagcatgccaaagaaataactgaagtagcaaaaggaaccctgaaggatttcacggctcaaagtacacaagtggagaagtttattaatgacataacaacatggttcacaaaagtggaagaatcgttgatgaactgtgcccaaaatgagacttgtgaagcattgaaaaaagtcaaggtaggtaataaactatcataaagtcaacaaagcaacatcagctctacccaagaaaatctcaatagcttgtgccgcaagtaccactcagctgagttggagagcctgggccgtgcaatgactggtctgataaagaaacatgaagccgtgagccagttgtgctccaaaacccaggccagcctgcaggaatctctggaaaaacacttcagtggtgagttctgaggggccttagaatggtttttgggagcaaaggcagcagcaaaagaatcatcagatcgcaccggtgacagcaaagttctagaagcaaagctccatgatcttcaggtatagaagctgacatcctgtgatgggcagagcaaacttgatgcagtgactcaagaaggacaaactttgtatgcacatttgtctaaacaaattgtcagtagcattcaagaacaaatcacaaaggccaatgaagagtttcaagcatttctgaaacaatgccttaaagataagcaggctcttcaagactgtgcttcagaacttggaaggtaggttagtttaacaaacaaactgaacttatggatccatgaaatggaagaaaggttcaatacggaaaacttgggagagagtaaacagcacattcctgagaagaaaaatgaagttcataaagttgaaatgtttttgggagaactgctggctgcaaggtatggtccagaaatggaatcccagagagggcagcttctgagtgaagaaggccacggtgctgggcaggagggccgcctgtgttcccagctcctcacaagccaccagaacctacttagaatgaccaaagagaaactccggagctgccaggtggcccttcaggagcacgaagccctggaggaagcactgcaaagcatgtggttctgggtgaaggccattcaggacagactggcctgtgcagagagcactcttgggagcaaagacaccctggagaaacggctgtcacaaatacaggtacatgcgacaccagccagtgaaggggaagttaagttgaatatggccattggcaagggggaacaggccttgagaagtagcaacaaagaaggtcagagggtgattcagactcagttagagacccttaaagaagtgtgggctgacatcatgagctcctccgtccacgctcaaaggtacagaacctatttttagagccaatggaatgactatgtagagaggaaaaaccagttggagcagtggatggaatcagtggatcaaaaaatagaacatcccttacaaccacagccaggtctgaaagagaagttcgtcctgcttgaccacctccagtccatcctgtctgaggcagaagatcacacgagagcccttcaccgtctaattgcgaagtccagggagctctacgaaaagacagaggatgagtctttcaaggacacagctcaagaggagctgaaaacacagtttaatgatataatgactgttgccaaggttagtgctttatattgaaaagagattgtgaaagatcatctaatgtatttagatgcggtccacgagttcacagattggctccattcagcaaaggaagaacttcaccggtggtcagatatgtctggagattcatcagccacccagaaaaagttatcaaaaattaaggtcaggaaatgaacagatgagattggtgcaagccgtctcagcagagtggagtcgctggctcccgaagtgaaacagaacacaactgccagtgggtgtgagctcatgcacacggagatgcaggccctgcgtgccgactggaagcagtgggaagacagtgtattccaaacgcagagctgtttggagaacctggtcagccagatggccctttcggagcaggaattctcaggccaagtggctcaactggagcaggccctggaacagttcagtgcccttctgaaaacctgggctcagcagttaaccctcctggaaggcaagaacacggatgaggagatagtggaatgctggcacaaaggacaagtaagttggcttcctgtttaaaaagcagagcctagaacagaggatctcaagtctcagctgaatgaactttgtcgattttccagagacctgagtacctacagtggaaaagtttctggcttgattaaagagtataattggtgagcatgaaccttattgaagggctgccagaataaagaacagattttacagcaaagatttcgaaaggccttcagggatttccagcagtggttggttaatgcaaaaatcactaccgccaagtgttttgatatacctcaaaatataagtgaagtttcaactagtcttcagaaaatacaggtaagggtgttatcaatta

SEQ ID NO: 26604 - DNA, 556 bp, Homo sapiens
  SIMILAR (3)..(551): 971254mologous to Homo sapiens Amino acid sequence of protein PRO222,accession number Y13366,Smith-Waterman Score=1014.
ttgagattcataccaagacatatagacatggagagaagctaatcatcacttgtcatgaaggattcaagatccggtaccccgacctacacaatatggtttcattatgtcgcgatgatggaacgtggaataatctgcccatctgtcaaggctgcctgagacctctagcctcttctaatggctatgtaaacatctctgagctccagacctccttcccggtggggactgtgatctcctatcgctgctttcccggatttaaacttgatgggtctgcgtatcttgagtgcttacaaaaccttatctggtcgtccagcccaccccggtgccttgctctggaagtctgtccactacctccaatggtgagtcacggagatttcgtctgccacccgcggccttgtgagcgctacaaccacggaactgtggtggagttttactgcgatcctggctacagcctcaccagcgactacaagtacatcacctgccagtatggagagtggtttccttcttatcaagtctactgcatcaaatcagagcaaacaaggccctacacccatgtatt

SEQ ID NO: 26605 - DNA, 731 bp, Homo sapiens
  SIMILAR (2)..(691): 901254mologous to Homo sapiens Amino acid sequence of qo115_13,accession number Y42389,Smith-Waterman Score=1118.
tcccaagaatgggtttcagggccccccagcggagggggttttcctttaaaggctctgtagcccgatttccactgccaagacgggattcaagttaaagggcgttacaaaaagactgtgtttgaagcattttaatggaacctaaggctggatcccaagtgataattccatctgtgtgcaagaagattgccgtatccctcaaatcgaagatgctgagattcataacaagacatatagacatggagagaagctaatcatcacttgtcatgaaggattcaagatccggtaccccgacctacacaatatggtttcattatgtcgcgatgatggaacgtggaataatctgcccatctgtcaaggctgcctgagacctctagcctcttctaatggctatgtaaacatctatgagctccagacctccttcccggtggggactgtgatctcctatcgctgctttcccggatttaaacttgatgggtctgcgtatcttgagtgcttacaaaaccttatctggtcgtccagcccaccccggtgccttgctctggaaggaggaagacctgaacatcttttccctgtcctttatttcccacacatcaggttggcagctgctgtgctttatttttgccctgtgttaaagtcctctcccaccccagcacctacctgttcctcaactagcaccaccacatctctgttctaaatgttgttctcctgcaataaaggacgtttgaattaaa

SEQ ID NO: 26606 - DNA, 1394 bp, Homo sapiens
  SIMILAR (336)..(1049): 981254mologous to Homo sapiens Amino acid sequence of protein PRO222,accession number Y13366,Smith-Waterman Score=1274.
gctgcctgagacctctagcctcttctaatggctatgtaaacatctctgagctccagacctccttcccggtggggactgtgatctcctatcgctgctttcccggatttaaacttgatgggtctgcgtatcttgagtgcttacaaaaccttatctggtcgtccagcccaccccggtgccttgctctggaagtgaaaatccctgtgtctggtgctgttcgtgttactatcaccttgcctgtgaccctgggacatcctaacgtagtgactcagagatggaaagcaggggcttcagacaaaggtgagcttgtggttctgaaacttttattctcccctactgcccaagtctgtccactacctccaatggtgagtcacggagatttcgtctgccacccgcggccttgtgagcgctacaaccacggaactgtggtggagttttactgcgatcctggctacagcctcaccagcgactacaagtacatcacctgccagtatggagagtggtttccttcttatcaagtctactgcatcaaatcagagcaaacgtggcccagcacccatgagaccctcctgaccacgtggaagattgtggcgttcacggcaaccagtgtgctgctggtgctgctgctcgtcatcctggccaggatgttccagaccaagttcaaggcccactttccccccagggggcctccccggagttccagcagtgaccctgactttgtggtggtagacggcgtgcccgtcatgctcccgtcctatgacgaagctgtgagtggcggcttgagtgccttaggccccgggtacatggcctctgtgggccagggctgccccttacccgtggacgaccacagccccccagcataccccggctcaggggacacggacacaggcccaggggagtcataaacctgtgacagcgtctcaggctcttctgagctgctccaaaggctgtattcacctcccaggtgccaagagagcacccaccctgcttctgacaaccctgacataattgccagcacggctgaggaggtggcatccaccaacccaggcatcgacattgcagatgtagacagcagcaacatcaagctgcctgactggcagaccaagtacagggttgcctctccagcccgcagcacttgtgaagacaggtccggggcacccgtaggcacccatgagtcactgttcttctccatcccatcatcagctcgccaggactgggctcccctggactcccagttggaatcaccccagtgcaggctgccaaccctccagagggacttccttgtggaccctcaggctgagagaccagtccctcttgaccctgaacttactgaaatctggtgtcctaacaaaaacaggatagagcgccacatggagcactcaggcattgaggcatga

SEQ ID NO: 26607 - DNA, 500 bp, Homo sapiens
  SIMILAR (319)..(498): 1001254mologous to Homo sapiens unnamed protein product,accession number AK023453,Smith-Waterman Score=299.
cgacgagcttggcgcctgcagcctctgcggggcttggcgccgccgtccgtgagcacccaggccgggtccccacatccccaggccagccctgaccgcggcggcccctccgccgggattcctttccgagagtctgagaagccaactggggccaaacaagttttagaacctctactggctgatgccaacatcatcagagatgaactgttcttaccagaaacttctctgctcctgacaccccacctctccccagaagagaagaaggagagtggccacgttgattcagccaagcacctccaggaggtcccctctggatgtcccatgaggctgcccctcagccacagcccagagcacgtggagatggctttgctcagcaacatcctagcggcctattcctttgtctcagaaaatcctgagcgagcagctctgtactttgtttctggcgtgtgcatcgggctggtgctgaccctggctgctctggtgataaggatctcttgccacac

SEQ ID NO: 26608 - DNA, 536 bp, Homo sapiens
  SIMILAR (68)..(370): 351254mologous to Arabidopsis thaliana F24J5.4,accession number AC008075,Smith-Waterman Score=109.
  misc_feature (1)...(536): n = a,t,c or g
cgggacaggaatgagaggatggatgctgtcaggggcttggagcttctgcggggcttggcgccgccgtccgtgagcacccaggccgggaccccacatccccaggccagccctgaccgcggcggcccctccgccgggattcctttccgaggtactggtgccggcccaagacccgggcagcgctttgtcgtgtccgccccttcaatgatcagctccgggtccccctgctcggccccgcgcgccccaagcgcagtccccggaagtgcgcgccggggccccagcaaagaataaaagaaggagagtggccacgttgattcagccaagcacctccaggaggtcccctctggatgtcccatgaggctgcccctcacccacagcccagagcacgtggagatggctttgctcagcaacatcctagcggcctattcctttgtctcagaaaatcctgagcgagcantctgtaatttgtttctggcgtgtgcncgggctggttgtgacctggctgctttggtgataaggatctcttgcncacagatgca

SEQ ID NO: 26609 - DNA, 539 bp, Homo sapiens
  SIMILAR (494)..(339): 491254mologous to Bovine herpesvirus type 1.1 UL0.5 protein,accession number AJ004801,Smith-Waterman Score=89.
tttttttactgcaagagatacatatttattttttaaaaaaaaggaggggagaggggaggctgaggctgaggctgaggctttcccccaacctggggcagggcagggagcaacaaaatggtctgtaggaactgaagaatgatgcttcacccaaaaggagacttaacttctagtctcaaagattgattgccagccaaggaggaagaagggcattccaaaaagtcaggacctttgctggggccccggcgcgcacttccggggactgcgcttggggcgcgcggggccgagcagggggacccggaagctgatcactgaggggcggacacgacaaagcgctgcccgggtcttgggccggcaccagtacctcggaaaggaatcccggcggaggggccgcgccgcgggtcaagggctggcctggggatgtggggtcccggcctgggtgctcacaggacagcggcgccaagccccgcagaagctccaagcccctgccagcatccatcctctcattcctgtcccgtcgcctgctttgagcctgtattcag

SEQ ID NO: 26610 - DNA, 441 bp, Homo sapiens
  SIMILAR (1)..(24): 1001254mologous to Homo sapiens dJ633O20.1 (similar to Bos taurus P14),accession number AL023804,Smith-Waterman Score=41.
gatgaaaacagggaattgcttgggggagctggatggaatcgatgtgcttcttcagcagttatccgtgtttaaaagacacaatcccagcacggctgaggagcaggagatgatggagaatctgtttgattccctctgctcctgtctaatgcttagttccaatcgtgagcgcttcctgaagggcgagggtcttcagctgatgaatctcatgctcagggaaaagaagatctcccggagcagtgccctggaaagtgctgggaccatgccatgattggccccgaaggcacagacaactgccattaagtttgtttgacattcttggctttacggaaccatctttcccctctttatgaaatctcccaggaagatcaagaaagtgggaaccactgagaaggaacatgaagagcaatgctgttcgatcctggcttccctcctgcggaacct

SEQ ID NO: 26611 - DNA, 2406 bp, Homo sapiens
  SIMILAR (1186)..(1467): 961254mologous to Homo sapiens dJ1168M15.2 (Similar to Drosophila CG11964 protein),accession number AL118499,Smith- Waterman Score=448.
atggagagaatggccatagcagatctgggcaaagtggcagtgatatttaatcatcacttcagaccatctgcaactgttttgcagaagcacatcaagtttatagattctaaagcttcctacaagttaccaggtgctgaggacttgaatggaatgtttcctaaggataagcaaagaaagtggcttctagagataaactctactcctagtgaagatgctgtggacattgttgaaatgacaacaaaggatttagaatattacatgaacttagatgataaattggcagcacagtttaagagaactgactctaattctgaaaaaagttctactgtggtaccattatggtttagagttctttcacttgaagttcacagagaaaagaattataatgtccattttcccatttgggacataaggttcaaatgggaaggttatgggcccaaagttgaaccagaccccaataggggcacaaaacgtccccgggatgatgaagaggaggagcagaagatgcgtcggaaacaaactggtactcgagaacgcggccgctatcgggaagaaaaaatgactgtggtggaggaagcggatgatgacaaaaaaaggctgctgcagattattgacagagatggggaagaggaagaggaagaggctcctggaaggaaagcagctgttcagtgccccgggctgacaaagcagcaaccttatcacttagggaacatttcaaaagccaaattcctggctgccagcctagggccagcctttgcccaaagaagactgatcgtgcctgccgttagtgatagctttactgtggagatcatttcagaggctctgaagttagacagatattggttcatggaatccgagctggacctaaatgacatcattcaggagatgcacgtggtggccaccatgccagacctgtaccaccttctggtggagctgaatgctgtacagtcgcttctcggcttgctcggacacgataatacagatatcctttcagatctgacctcagtaggagagctgacatgtactagaattcatcgtgatatatctgttcatacattaacagctttacttttcaggatctggattggaaggccccttatgggggcaaagccagacagatttgaatgtgtaaatctaggcatctttctgctgactgatggtccagtggagttgagactagagatagtgaaccatgctgtggtcgatttgcttcaggaattaacagatatagacaccctccatgagagtgaagagggagcagaagtgctcatcgatgctctggtggatgggcaggtggtagcactgctggtacagaatctggagcgcctggatgagtctgtgaaaaaggaggcagatggcgtccacaacactctggctattgtggaaaacatggctgagttccggcctgagatgtgtacagagggtgcccagcagggtcttctacagtggctgttgaagaggctgaagttagtattgtctaatagagtaaatgagaaaaagaagaggcaagagctcctctcagaacagtttggaccaaaggcaaagatgccttttgatgccaacaaactgtattgcagtgaagtgctggccatattgctccaggacaatgatgaaaacagggaattgcttggggagctggatggaatcgatgtgcttcttcagcagttatccgtgtttaaaagacacaatcccagcacggctgaggagcaggagatgatggagaatctgtttgattccctctgctcctgtctaatgcttagttccaatcgtgagcgcttcctgaagggcgagggtcttcagctgatgaatctcatgctcagtcattcatcagacagttgtgaaatgcccacatggagaggtggcagtatggagcagggtggaagaatgggcctgggacttgtaagtgtgggtttggaacatgctcttttacttactagctctggatatttggcatgcaagcttggcactggccgttgttttacaacggcggagactgggaaaaaccggggcggtaccccaaacttaatatggccttggcagcacaattccccctttttcggcaaggttggcggtaatatagcgaaagaagcgccccgcacccggattcgcccttcttcccacaaccaagttggcccccaggccttgaaatgggggcgaaatggggggcctcggaagcgcggctccaggcggaagcaaccctgttccaaatgcagcgcgctttacggcggcgcgtccttttaccgcggtgtggccggctcgcttgtcgctcgcacttttgccctattggctctgcggctccgctcgccgcactttacggcagtgtggctggagccgcggctgacgggcccgcggtctgggcgagggtcattgcgaggagcagtagagctgcactgccgaatgtcgtag

SEQ ID NO: 26612 - DNA, 1317 bp, Homo sapiens
  SIMILAR (23)..(280): 881254mologous to Homo sapiens dJ633O20.1 (similar to Bos taurus P14),accession number AL023804,Smith-Waterman Score=374.
tcctatttccccataggcaaagatgccttttgatgccaacaaactgtattgcagtgaagtgctggccatattgtttttttcccctttagaaaacagggaattgcttggggagctggatggaatcgatgtgcttgtttttgcttgacaggtgtttaaaagacacaatcccagcacggctgaggagcaggagatgatggagaatctgtttgattccctctgctcctgtctaatgcttagttccaatcgtgagcgcttcctgaagggcgagggtcttcagctgactttactttgactcagtcattcatcagacagttgtgaaatgcccacatggagaggtggcagtatggagcagggtggaagaatgggcctgggacttgtaagtgtgggtttggaacatgctcttttacttacatatggtttatatcagaggttaccccctcagccccagaatgcacagccctcttttgttcacagggaaaagaagatctcccggagcagtgccctgaaagtgctggaccatgccatgattggccccgaaggcacagacaactgccataagtttgttgacattcttggcttacgaaccatctttcccctctttatgaaatctcccaggaagatcaagaaagtgggaaccactctgccacccctgccagctgctgccactcctacaaaccggccttcggccatgaatggcagagtgagaatggaggcagagcagagcagtgcgcactgtgcagggtttctctgaccttccctataggcaaggccaccctgtgacaagcacctaggggtagcccagctcctaggtggaacactgaggcctgggaatcagctcgccagtccagaagctctagagagctaccccacactcttccctttctttcttgtgaagcttcagcgcttgtcactgttgtccacaagagcaccaggatggctaattactgtgcttattagtatcatgctagagaataaatctgtattttctgcttcctgtgccagcgtgtgtctaactctaccacacgtagtttctagaggctaccagggtgatgtcagaggctgcctaggagcaggaagaattcctgtggccgtggtgtgggtgtcttccctgaacagagaagatgacatggccaggctgaggggagttatggaatactgctgccagcaaggacacactgctgctgatttgcagccatgcccagcatctgccttggctgcccgtcattcccttttaccaaatatttatgatgaagcgggctggagagctctttccttgggaatgcatcttggattccatagtggcagacaagtagaatt

SEQ ID NO: 26613 - DNA, 1917 bp, Homo sapiens
  SIMILAR (298)..(1839): 1001254mologous to Homo sapiens dJ28H20.1 (novel protein similar to membrane transport proteins),accession number AL031055,Smith-Waterman Score=2628.
atggcagaaggtgaaaggggagcagacgtgccacatggcctcggggcctggctggccgacgtggcgttggcggcgctgcgcgcgggagggcagggcaggagggacagaggcgggggcgggccggaaagtttgtccggcggcagcggcgttggggactccggcgggggatgcgcgcccggcccctcagcgcccccagcacgccgccgagtcccgctcgccatggggcccaggaatttgctgattgattggatctggatcatggacaccaccctggggctgggcactgagggtggaggccactccccacctgtcctgcctttgtgtgcctctgtgtctttgctgggtggcctgacctttggttatgaactggcagtcatatcaggtgccctgctgccactgcagcttgactttgggctaagctgcttggagcaggagttcctggtgggcagcctgctcctgggggctctcctcgcctccctggttggtggcttcctcattgactgctatggcaggaagcaagccatcctcgggagcaacttggtgctgctggcaggcagcctgaccctgggcctggctggttccctggcctggctggtcctgggccgcgctgtggttggcttcgccatttccctctcctccatggcttgctgtatctacgtgtcagagctggtggggccacggcagcggggagtgctggtgtccctctatgaggcaggcatcaccgtgggcatcctgctctcctatgccctcaactatgcactggctggtaccccctggggatggaggcacatgttcggctgggccactgcacctgctgtcctgcaatccctcagcctcctcttcctccctgctggtacagatgagactgcaacacacaaggacctcatcccactccagggaggtgaggcccccaagctgggcccggggaggccacggtactcctttctggacctcttcagggcacgcgataacatgcgaggccggaccacagtgggcctggggctggtgctcttccagcaactaacagggcagcccaacgtgctgtgctatgcctccaccatcttcagctccgttggtttccatgggggatcctcagccgtgctggcctctgtggggcttggcgcagtgaaggtggcagctaccctgaccgccatggggctggtggaccgtgcaggccgcagggctctgttgctagctggctgtgccctcatggccctgtccgtcagtggcataggcctcgtcagctttgccgtgcccatggactcaggcccaagctgtctggctgtgcccaatgccaccgggcagacaggcctccctggagactctggcctgctgcaggactcctctctacctcccattccaaggaccaatgaggaccaaagggagccaatcttgtccactgctaagaaaaccaagccccatcccagatctggagacccctcagcccctcctcggctggccctgagctctgccctccctgggccccctctgcccgctcgggggcatgcactgctgcgctggaccgcactgctgtgcctgatggtctttgtcagtgccttctcctttgggtttgggccagtgacctggcttgtcctcagcgagatctaccctgtggagatacgaggaagagccttcgccttctgcaacagcttcaactgggcggccaacctcttcatcagcctctccttcctcgatctcattggcaccatcggcttgtcctggaccttcctgctctacggactgaccgctgtcctcggcctgggcttcatctatttatttgttcctgaaacaaaaggccagtcgttggcagagatagaccagcagttccagaagagacggttcaccctgagctttggccacaggcagaactccactggcatcccgtacagccgcatcgagatctctgcggcctcctga

SEQ ID NO: 26614 - DNA, 648 bp, Homo sapiens
  SIMILAR (399)..(641): 401254mologous to Homo sapiens collagen-like protein (447 AA),accession number X14963,Smith-Waterman Score=102.
catgagagagaggtttattgtctattttgttcattgctgaagctctaacccctatatcaatgtctggcacgtagtaggtgctcactcaagaatcaacgactgatccttcgaggcttctgaatgcagagagaaaaatagagccctagtcccgagtggcaacaaagccattccccacgcgtcccaccccaatgctgtgttagaatctccttctctgtcccctctctgcagaatcacgtccagaggagggggttcgtctgttttgttcgcagtttcgttcgcgacagcgtccccaggcccacaagagcgcctggggcacaaccgcgctcagcgaatcgatgaactgctttgcttctttcggagcctccatttcttcatctgcagaccaggaacagctgcacttgcctggggctgtcggatcagggcgcccgggagagtgcctgggcccgagtgggcgctgcagcaagtgaggggccacttttccggggcagaaaggaagatggaaggaagcgcgaccgagccccgtcccagcccccgccgcaggcctgcagtctcgggctggccacccgagaggcggtatccggccggggcggccccatggcgagcgggactcggcggcgtgctgggggcgctgaggggccgggcgcgcat

SEQ ID NO: 26615 - DNA, 780 bp, Homo sapiens; identical to SEQ ID NO: 11446
  SIMILAR (145)..(612): 261254mologous to Arabidopsis thaliana contains similarity to phytocyanin/early nodulin-like protein~gene_id:K19P17.3,accession number AB007644,Smith-Waterman Score=122.

SEQ ID NO: 26616 - DNA, 757 bp, Homo sapiens
  SIMILAR (202)..(624): 241254mologous to Homo sapiens high mobility group protein- R,accession number AF176039,Smith-Waterman Score=96.
  misc_feature (1)...(757): n = a,t,c or g
ttttcactgaaacaaggaatctttgcctttattgtagatatttcaatgaaaatgtcaacacgttgcaaattggcatactttgggtttgccaatatgtgataaagaactttttcaatggaaactttccctcttttcagggccgaaaagacgctctgcaactatacttaagtatcctaggcaactttattcattcaaaaacatcagagcggagtcaaaagcacaaatccatgaattgggcggcgaagtctgactccagagattacggctgaactgggtttggaaagactgaacccgcgccggtgctcctcctgtttgcttggacttaagtttgagtaccacaactctaacctgccacttcagctgcacgggcaggcttgtggggacccaacaaactccgtccagagagcggctgagtcagccagccgtccccacggttttgggcagccgccgaaggctcctgctaggcccggctggctcaccgggaagttccctgcctccgtcccgtcagcctccaggagggcgccgccggccgccgtgacttcagcaaggcactactatctccgtcagccgccgcctcggccatcttcctgcccggagtgcaacacaatccggctctggccagccttccagctgacgccactctgccagggccctgcagcctcggagcgggatagaaggaagccgcagaaaagacgctgaaagttggcgctcgctgacgcnccgaccggacgcgtggtcgaccgggaattcggacgcg

SEQ ID NO: 26617 - DNA, 861 bp, Homo sapiens
  SIMILAR (801)..(860): 801254mologous to Homo sapiens putative p150,accession number U93574,Smith-Waterman Score=112.
atgacatattgcctcacacctgataagacagctattataaaaaccaaaaagccatcttgtgaagaaagtgtctgcttccccaacagccatgattgtaaatttcctgaggccttaccagccatgtggaacttgttggaaattctggccagggcaatcaggcggaagaaagaaataaagggtattcaattaggaaaacaggaagccaaattgtccctgtttgcagatgacatgattgtatatttagaaaaccccatcatctcagcccacagtctccttaagctgacagagagccaaatcatgagtgaactctcattcacaatagcttcaaagagaataaaatacctaggaatccaacttacaagggaagtgaaggacctcttcaaggagaactacaaaccactgctcaatgaaataaaagaggacacaaacaaatggaagaacattccatgcttatggataggaagaatcaataccgtgaaaatggccatactgcccaaggtaatttatagattcaatgccatccccatcaagttaccgatgactttcttcacagaattggaaggaactactttaaagttcatatggaaccaaaagagagcccacattgacaagacaatcctaagccaaaagaacaaagctgcaggcatcatgctacctgacttcaatctatactacaaggatacagtaaccaaaacagcatggtactggtaccaaaacagagatatagaccaatggaacagaacagagccctcagaaataataccacacatctacaaccatctgatctttgacaaacctgacaaaaacaaaactggggaaaggattccctatttaataaatggtgctgggaaaactggctag

SEQ ID NO: 26618 - DNA, 1335 bp, Homo sapiens
  SIMILAR (340)..(843): 571254mologous to Homo sapiens putative p150,accession number U93563,Smith-Waterman Score=425.
  misc_feature (1)...(1335): n = a,t,c or g
atgaggnacaagttgctgtgctcggttatcacagccatgctgaagttttggtggcccctcctcaatcccagtaacccaaattccatcacgaaagggagaatacaaagtgctcatttcacttcccatctggggcatgttgaaacagtccaaacatctgaaaggaggactagagagaaagaaggctcacctcggaaaaaaccacacaaaaacaaaaagcggccgccaacaaaaacagggagcccaaaccaaacgtcacgtgacgcggaagggggaacagggcataaacccaccgctccacaaaaagcccaaaaaaaggcagaaaacactcagctaaagctaaggccacggcacaaacacaccagcgatagctcaaaccacagcaagagccaacgcagaaacccccttttatttactcttgaaatacaaactaccatcagagaatactacaaacacctctatgcaaataaactagaaaatctagaagaaatggataaattcctcgacacatacaccctcccaagactaaaccaggaagaagttgaatctctgaatagaccaataacaggctctgaaactgtggcaataatcaatagcttaccaaccaaaaagagtccaggaccagatggattcacagctgaattctaccagaggtacaaggaggaactgagaataaagtacctagaaatccaacttacaagggatgtgaaggacctcttcaaggagaactacaaaccactgctcaaggaaataaaagaggacacaaacaaatggaagaacattccatgctcatgggtaagaagaatcaatatcgtgaaaatggccatactgcccaagagaataaaatacctaggaatccaacttacaagggatgtgaaggacctcttcaaggagaactacaaaccactgctcaacgaaataaaagaggacacaaacaaatggaagaacattccatgctcatggataggaagaatcaatatcatgaaaatggccatactgcccaagcacaagcaggacgatatggaagtaaagacagagaaccgtagagggcaacagaaaaaaatggccaaacccatccccgaaaaaggagatataaggaggagacgcctctatcctccaatcggagagctgagcacctccggaggtgagggtttctttttctccagcaggtggttttcgcagagatctgttatatctgaagttccgccagagaaggccactgtcatcactcaccttgacgactgcagacgactcctaacgattcgactgtcagtctttcccacttctaatctagcaatggctcattcaacaaatacctgctgtgtgcctactatgtaa

SEQ ID NO: 26619 - DNA, 1089 bp, Homo sapiens
  SIMILAR (178)..(972): 901254mologous to Homo sapiens putative p150,accession number U93563,Smith-Waterman Score=1301.
atggcttcaaagagaataaaatacctaggaatccaacttacaagggatgtgaaggacctcttcaaggagaactacaaactactgctcaatgaaataaaagaggatacaaacaaatggaagaacattccatgctcatgggttggaagaatcaatatcctgaaaatggccatactgcccaagttcatatggaaccaaaagagagcctgcatctccaagtcaatcctaagccaaaagaacaaagctggaggcatcacgctacctgacttcaaactatactacaaggctacagtaaccaaaacagcatggtactggtaccaaaacagagatatagatcaatggaacagaaaagagccctcagaaataatgccgcatatctacaacaatgtgatctttgacaaacctgagaaaaacaagcaatggggaaaggattccctatttaataaatggtgctgggaaaactggctagccatatgcaggaaactgaaactgcatgtcttccttacaccttatacaaaaattaattcaagatggattaaagacttaaatgttagacctaaaaccataaaaaccctagaagaaaacctaggcaatactattcaggacacaggcacgggcaagaacctcatgtctaaaacaccaaaagcaacggcaacaaaagccaaaattgacaaaagggatctaattaaactaaagagcttctgcacagcaaaagaaactgccatcagagtgaacaggcaacctacaaaatgggagaaaatgttcacaacctactcatctgacaaagggctaatatccagaatctacaatgaactcaaacaaatttacaagaagaaaacaaacaaccccatcaaaaagtgggtgaaggacatgaacagacaattctcaaaagaagacatttatgcagccaaaaaacacatgaaaaaatgctcaccatcactgaccttcagagaaatgcaaatcaaaaccacggtgggaattgaacaacaggaacacatggacacaggaaggggaaaatcacactctggggactgttgtggagtcggggaggagggagggatagcattaggagatatacctaatgctaaatga

SEQ ID NO: 26620 - DNA, 1392 bp, Homo sapiens
  SIMILAR (1)..(786): 841254mologous to Homo sapiens putative p150,accession number U93572,Smith-Waterman Score=1113.
atggtaaagggatcaattcaacaagaagagctaactatcctaaatagatatgcacccaatacaggagcacccagatccataaagcaagtcctgagtgacctacaaagagacttagactcccacacaataataatgggagactttaacaccccactgtcaacattagacagatcaacgagacagaaagttagcaaggatatccaggaattgaactcagttctgcaccaagcggacctaatagacatctacagaactctccaccccaaatcaacagaatgtacattcttctcagcaccacaccgcacttattccaaaattgaccacatagttggaagtaaagcactcctcagcaaatataaaagaacagaaattataacaaactgttgctcagaccacagtgcaaccaaactagaactcaggattaacaaactcactcaaaaccgctcaactacatggaaactgaacaacctgctcctgaatgactactgggtacataatgaaatgaaggcacaaataaagatgttctttgaaaccaatgagaacaaagacacagcataccagaatctctgggacacatttaaagcaatgtgtagagggaaatttatagcactaaatgcccacaagagaaagcaggaaagatctaaaattgacaccctaacatcacgattaaaagaactagagaagcaagagcaaactttacattcaaaagacagcagaaggcaagaaataaatgcagaaaaggcctttgacaaaattcaacagcccttcatgctaaaaactctcaatacactagatattgatgaaacgtatctcaaaataataagagctatttatgacaaacccacagtcaatatcatactgaatgggcaaaaactggaagtattccctttgaaaactggcacaagacagggatgccgtctctcgccactcctattcaacataatgttggaagttctggccagggcaatcaggcaagagaaagaaataaagggtattcaattaggaaaagaggaagtcaaattgtccctgtttgcagatgacatgattgtatatctagaaaaccccatcatctcagcccaaaatctccttaagctgataagcaacttcagcaaagtctcaggatataaaatcaatgtgcaagaatcacaagcatttctgtacaccaataacagacaaacagagagccaaatcatgagtgaactcccattcacgattgctgcaaagagaataaaatacctaggaatccaacttacaaaggatatgaaggacctcttcaaggagaactacaaaccactgctcaacaaaataaaagaggacacaaacaaatggaagaatattccatgctcatggataggaaaaatcaatatcgtgaaaatggccatattgcccaag

SEQ ID NO: 26621 - DNA, 990 bp, Homo sapiens
  SIMILAR (181)..(987): 901254mologous to Homo sapiens putative p150,accession number U93563,Smith-Waterman Score=1280.
atggataaattcctcgacacatacaccttcccaagactaaaccaggaagaagctgaatctctgaatagaccaataacagactctgaaattgaggcaataattaataggttaccaaccaaaaaaagtccagggaacagacagattcacagccgaattctaccagaggtacaaggaggagctgtgttggaagttctggccagggcaatcaggcaggagaaggaaataaagggtattcagttaggaaaagaggaagtcaaattgtccctgtttgcagacgacatgattttatatctagaaaaccccatcgtcttagcccaaaatctccgtgagctgataagcaacttcagcaaagtctcaggatgcaaaatcagtgtgcaaaaatcacaagtgttcttatacaccaataacagacaaacagagagccaaatcatgagtgaactcccattcagaattgcttcaaagacaataaaatacctaggaatccaacttacaaggtatgtgaaggacctcttcaaggagaactacaaaccactgctcaacgaaataaaagatgacacaaacaaatggaagaacattccatgctcatggataggaagaatcaatatcgtgaaaatggccatactgcccaaggtaatttacagattcaatggcatccccatcaagctaccaatgactttcttcacagaattggaaaaaactactttagagttcttatggaaccaaaaaagagcccacattgccaagtcaatcctaagccaaaagaacaaacctggaggcatcacacttcctgacttcaaactatactacaaggctacagtaaccaaaacagcatggtactggtaccaaagcagagatatagaccagtgcaaaagaacagagccctcagaaataataccacacgtctacaactatctgatctttgacaaacctgacaaaaacaagaaatggggaaaagattccctatttaaaaaatggtgctgggaaaactga

SEQ ID NO: 26622 - DNA, 336 bp, Homo sapiens
  SIMILAR (157)..(336): 911254mologous to Homo sapiens Human secreted protein, SEQ ID NO: 7284,accession number G03203,Smith-Waterman Score=296.
agaataaagtacctagaaatccaacttacaagggatgtgaaggacctcttcaaggagaactacaaaccactgctcaaggaaataaaagaggacacaaacaaatggaagaacattccatgctcatgggtaagaagaatcaatatcgtgaaaatggccatactgcccaagagaataaaatacctaggaatccaacttacaagggatgtgaaggacctcttcaaggagaactacaaaccactgctcaacgaaataaaagaggacacaaacaaatggaagaacattccatgctcatggataggaagaatcaatatcatgaaaatggccatactgcccaag

SEQ ID NO: 26623 - DNA, 359 bp, Homo sapiens
  SIMILAR (325)..(41): 341254mologous to Pasteurella multocida LepB,accession number AE006042,Smith-Waterman Score=96.
agctggctgaaaacggaatcacagagagcagcagcccagacgtaggctccaggggcagtgaagaagacatggtttggaaagaagggaagggaaagggagaaacaagagagaaggtgaagacagctgggaaaagagaatgaaaatatagtggctctgcagctgataagaactgaccaggaatactggcgacatcactcttggcactttttcctctctgctgctgcctgccaacccgagttgttcttattaaaacacacagccaaaaacaacagaagaatcagagtttcccagaaatggaagtaagcaacataatcagagttttataaatctactaaatagctcccatcaattgtgctaga

SEQ ID NO: 26624 - DNA, 1842 bp, Homo sapiens; identical to SEQ ID NO: 555
  SIMILAR (1730)..(1837): 881254mologous to Homo sapiens putative p150,accession number U93572,Smith-Waterman Score=164.

SEQ ID NO: 26625 - DNA, 816 bp, Homo sapiens
  SIMILAR (467)..(643): 841254mologous to Homo sapiens Human secreted protein, SEQ ID NO: 7284,accession number G03203,Smith-Waterman Score=256.
atgacgcttctgaaattggcatcatccagccgcagctcagcagaccctctgaccgtcctgagcatttcctcctctgtcctcctgctcaacctggaggagacctggaaaggggacttcttcttcttctccatcccctcaagaatgagatgtggtcccttctccaccccctgggaaatgagacaaggaggtgaagtcctctgcttcctgcctccaggacagcaggcagatttgtctacacagctggctgaaaacggaatcacagagagcagcagcccagacgtaggctccaggggcagtgaagaagacatggtttggaaagaagggaagggagaggggagaaacaagagagaagaacaatcagcccacagtcagaaccaattcccagaccagagacacttttttcaaaacttaggatctattttaacgtatgccttcttgggaactgccatctcctgcatcgtcataggcttcaaagacaataaaatacctaggaatccaacttacaagggatgtgaaggacctcttcaaggagaaatacaaaacactgctcaacaaaataaaagaggacacaaacaaatggaagaacattccatgctcacgaataggaatcatcaatatcatgaaaatggccatactgcccaagtcaggaccctcagctgcacgtctgttggagtttgctggaggtccactgcagaccctgtttgcctgggtatcaccagaggaggctgcagaacagcaaatattgccgaacagccaaagttgctacctgatccttcctctggaagcttcgtctcagaggggcagctggctgtatga

SEQ ID NO: 26626 - DNA, 3137 bp, Homo sapiens
  SIMILAR (1)..(1980): 981254mologous to Homo sapiens putative p150,accession number U93563,Smith-Waterman Score=3335.
atggtaaagggatcaattcaacaagaggagctaactatcctaaatatttatgcccccaatacaggagcacccagattcataaagcaagtcctgagtgacctacaaagagacttagactcccacacattaataatgggagactttaacaccccactgtcaacattagacagatcaacgagacagaaagtcaacaaggatacccaggaattgaactcagctctgcaccaagcggacctaatagacatctacagaactctccaccccaaatcaaaagaatatacatttttttcagcaccacaccacacctattccaaaattgaccacatagttggaagtaaagctctcctcagcaaatgtaaaagaacagaaattataacaaactatctctcagaccacagtgcaatcaaactagaactcaggattaagaatctcactcaaagccgctcaactacatggaaactgaacaacctgctcctgaatgactactgggtacataacgaaatgaaggcagaaataaagatgttctttgaaaccaatgagaacaaagacaccacataccagaatctctgggacgcattcaaagcagtgtgtagagggaaatttatagcactaaatgcctacaagagaaagcaggaaagatccaaaattgacaccctaacatcacaattaaaagaactagaaaagcaagagcaaacacattcaaaagctagcagaaggcaagaaataactaaaatcagagaagaactgaaggaaatagagacacaaaaaacccttcaaaaaatcaatgaatccaggagctggttttttgaaaggatcaacaaaattgatagaccgctagcaagactaataaagaaaaaaagagagaagaatcaaatagacacaataaaaaacgataaaggggatatcaccaccgatcccacagaaatacaaactaccatcagagaatactacaaacacctctacgcaaataaactagaaaatctagaagaaatggatacattcctcgacacatacactctcccaagactaaaccaggaagaagttgaatctctgaatagaccaataacaggctctgaaattgtggcaataatcaatagtttaccaaccaaaaagagtccaggaccagatggactcacagccgaattctaccagaggtacaaggaggaactggtaccattccttctgaaactattccaatcaatagaaaaagagggaatcctccctaactcattttatgaggccagcatcattctgataccaaagccgggcagagacacaaccaaaaaagagaattttagaccaatatccttgatgaacattgatacaaaaatcctcaataaaatactggcaaaccgaatccagcagcacatcaaaaagcttatccaccatgatcaagtgggcttcatccctgggatgcaaggctggttcaatatacgcaaatcaataaatgtaatccagcatataaacagagccaaagacaaaaaccacatgattatctcaatagatgcagaaaaagcctttgacaatattcaacaacccttcatgctaaaaactctcaataaattaggtattgatgggacgtatttcaaaataataagagctatctatgacaaacccacagccaatatcatactgaatgggcaaaaactggaagcattccctttgaaaactggcacaagacagggatgccctctctcaccgctcctattcaacatagtgttggaagttctggccagggcaatcaggcaggagaaggaaataaagggtattcaattaggaaaagaggaagtcaaattgtccctgtttgcagacgacatgattgtttatctagaaaaccccatcgtctcagcccaaaatctccttaagctgataagcaacttcagcaaagtctcaggatacaaaatcaatgtacaaaaatcacaagcattcttatacaccaacaacagacaaacagagagccaaatcatgagtgaactcccagttcacaattgcttcaaagagaataaaatacctaggaatccaacttacaagggatgtgaaggacctcttcaaggagaactacaaaccactgctcaaggaaataaaagaggatacaaacaaatggaagaacattccatgctcatgggtaggaagaatcaatatcatgaaaatggccatactgcccaaggtaatttatagattcaatgccatccccatcaagctaccaatgactttcttcacagaattggaaaaaactactttaaagttcatatggaaccaaaaaagagcccgcattgccaagtcaatcctgagccagaagaacaaagctggaggcatcacactacctgacttcaaactatactacaaggctacagtaaccaaaacagcatcggtactggtaccaaaacagagatatagaccaatggaacagaacagaggcctcagaaataacgccacatatctacactattctgatcctttggacaaacctgagaaaaacaagcatgggggaaaggcatccctaatttataaaatggctgctggggaaaactggctagcccatatgtaggaagctgaaactggatcccttccttacaccttatacaaaaatcaattcaagatggattaaagatttaaacgttagacctaaaaccataaaaaccctagaagaaaacctaggcattaccattcaggacataggcacgggcaaggacttcatgtccaaaacaccaaaagcaatggcaacaaaagacaaaattgacaaatgggatctaattaaactaaagagcttctgcacagcaaaagaaactaccatcagagtgaacaggcaacctacaaaatgggagaaaattttcacaacctactcatctgacaaagggctaatatccagaatctacaatgaactcaaacaaatttacaagaaaaaaacaaacaaccccatcaaaaagtgggcaaaggacatgagcagacacttctcaaaagaagacatttatgcagccaaaaaacacatgaaaaaatgctcatcatcactagccatcagagaaatgcaaatcaaaaccactatgagataccatctcacaccagttagaatggcaatcactaaaaaatcaggaaacaacagggacatggatgaaattggaaatcatcattctcagtaa

SEQ ID NO: 26627 - DNA, 666 bp, Homo sapiens
  SIMILAR (212)..(460): 301254mologous to Pseudorabies virus UL49.5,accession number U38547,Smith-Waterman Score=79.
tcaatatcgtggaaactttggttcacagaattcactctttttaggttcttccagccctctgtctctgccgtcccggtctccaccctggctgttgtactgggcttgaaaactctttccctcctcttctctcatagctttccgggacgacacagttgggcgctccgtgctatttcgctgctcccctcctttctctatactagctctcttatgaacagcttttcttacactgtccacctttatctcggcggtttgctccggctgtgtggctcccgcgacccccatgcctgcggcttcccagaaggctctcccctgccttcagggtcagcagcttaaccctttatctggggcatgcgcaagccgagctgtgtcctggctccctcctgttccagacgggacagctttggctgtctctctttctctgggcaccagtgcctgcacaagagccatgttggaagccccagtggcccccaagagcgcctgtacaacgggtagcagggcaattataccttttacagacaacagtggctcagagccaaggatgtacttacacaaacaggttatataacaagtgggggtgtgcgcctgcacgccaaactcgctgagtcatgcaggcctggatatccaccttggcctacctccatgtaccttttcatgtgattacacact

SEQ ID NO: 26628 - DNA, 1064 bp, Homo sapiens
  SIMILAR (372)..(515): 371254mologous to Homo sapiens Human epidermal like growth factor 1 (EGFL1),accession number R67249,Smith-Waterman Score=80.
ttagcggtgggccctcatactaccatcattgtccctatcaaaagtggtcactgccccactgcccaagtgcaagacgtaaggcttggcacaaagagaattaacagtccggtctgggcccatccatcctgtcaaactaggtggcccttcctcagacatcaggaccatcttctggcatctgccatcctggaaaccctcttcctccaaatagaaatttgccaccccatccaagtctcctccagggtgagtgacatcctcacgtgggccttcctggccttgggtatctggaattgtctgcaggttcgcatgtgtgatcccccagccagggcatgtgtgtctggtcactgtgattttaatacaggggttatctgagaggtgagtgcttcccttgaaaggcactgtgctgtgaacctgcggcttatttacagacgtgtccaaatccgttctctggtcctgcgtgcagtggccacgcccttcatagtctgaacgtgggtgactgtgtatacctgatatgccccagatatcctcctctgaggcgggcaggaaagccacgagacacaggtatagaaggaagaactttgagctcaggtggaccatctgtccacagttcctttcacagtgcagtacttttcccatacacatcaaagttgctttggatcgagaggcgaagaccagcagggcagagctaagcaggccacagacatctttccccagaaaagctgtccccactgcaattcccacagctggcatcgtcagcctctccgtgacagtggagttagacctcacgtttgcaggaatttgtgttttaattcccaggcagagctcgggcctcatcatgggaactaaaaagtcctaggtcaaggagccacatctgttgcggaccgtcttgctgatctttttacatacatactctgcggagtcatcacgcacctcagggcattacatgacaagtcggctgatcatgctaagcttaggactgctttccttttataaagcgcccagatcctctcccgcgatgaaccattaattcatttacccattaagctatgaatggattaatctattcc

SEQ ID NO: 26629 - DNA, 867 bp, Homo sapiens; identical to SEQ ID NO: 21691
  SIMILAR (184)..(840): 731254mologous to Cloning vector pZC320 SopB,accession number U26464,Smith-Waterman Score=742.

SEQ ID NO: 26630 - DNA, 516 bp, Homo sapiens; identical to SEQ ID NO: 7109
  SIMILAR (1)..(345): 961254mologous to Cloning vector pZC320 SopA,accession number U26464,Smith-Waterman Score=564.
  misc_feature (1)...(516): n = a,t,c or g

SEQ ID NO: 26631 - DNA, 948 bp, Homo sapiens
  SIMILAR (1)..(426): 1001254mologous to Cloning vector pZC320 SopA,accession number U26464,Smith-Waterman Score=721.
atgaaactcatggaaacacttaaccagtgcataaacgctggtcatgaaatgacgaaggctatcgccattgcacagtttaatgatgacagcccggaagcgaggaaaataacccggcgctggagaataggtgaagcagcggatttagttggggtttcttctcaggctatcagagatgccgagaaagcagggcgactaccgcacccggatatggaaattcgaggacgggttgagcaacgtgttggttatacaattgaacaaattaatcatatgcgtgatgtgtttggtacgcgattgcgacgtgctgaagacgtatttccaccggtgatcggggttgctgcccataaaggtggcgtttacaaaacctcagtttctgttcatcttgctcaggatctggctctgaaggggctacgtgttttgctcgtggaagtgactggcgatgctgtcggaatggacgatatcccgcaagaggcccggcagtaccggcataaccaagcctatgcctacagcatccagggtgacggtgccgaggatgacgatgagcgcattgttagatttcatacacgggtcaccgtcgacagcgacacacttgcatcggatgcagcccggttaacgtgccggcacggcctgggtaaccaggtcgatactgcaagcaacttgaactctggtaaagaggaccactccgaaagcagtaatacagagaacagaagaactagtaatgatgataagcaggaaagctgctctgagaaaataaaattggctgaagagggatcagatgaagatctggatttggttcaacatcagataatctctgagtgttcaggatttttctccttcttcagtggaacaggatggctaaagtgggctggagttgaagagcccattcctccttccacgtggaaaggtagacctgactggaacttgctatttctctttccccaagtcaattaa

SEQ ID NO: 26632 - DNA, 750 bp, Homo sapiens; identical to SEQ ID NO: 26273
  SIMILAR (645)..(49): 951254mologous to Cloning vector pBACe3.6 levansucrase,accession number U80929,Smith-Waterman Score=1012.

SEQ ID NO: 26633 - DNA, 567 bp, Homo sapiens
  SIMILAR (339)..(425): 861254mologous to Salmonella typhimurium tetracycline resistance protein,accession number AF117344,Smith-Waterman Score= 112.
tcaagggcaggatatgaccatgtcgtggaacctgtagaacgaggtacctccggtgtgcgttggtatgcctgctgtggattgatggtgtgtcctgctaatccccaacattttgcgcacggttatggggcaaaatacctggttacccagcccgtgccggcacgttaaccgggctgcatccgatgcaagtgtgtcgctgtcgacggtgccccgtgtatgaaatctaacaatgcgctcatcgtcatcctcggcaccgtcaccctggatgctgtaggcataggcttggttatgccggtactgccgggcctcttgcgggatatcgtccattccgacagcatcgccagtcactatggcgtgccgttctcggagcactgtccgaccgctttggccgccgcccagtcctgctcgcttcgctacttggagccactgcaggaagcggcggcggaagtcaggcatacgctggtaactttgaggcagctggtaacgctctatgatccagtcgattttcagagagacgatgcctgagccatccggcttacgatactgacacagggattcgtataaacgcat

SEQ ID NO: 26634 - DNA, 257 bp, Homo sapiens
  SIMILAR (118)..(252): 601254mologous to Plasmid F 96 pct identical to gp:AB021078_30,accession number AP001918,Smith-Waterman Score=139.
ctgaacactcagagattatctgatgttgaaccaaatccagatcttcatctgatccctcttcagccaattttattttctcagagcagctttcctgcttatcatcattactagttcttctgttctctgtattactgctttcggagtggtcctctttaccagagttcaagttgcttgcagtatcgacctggttacccaggccgtgccggcacgttaaccgggctgcatccgatgcaagtgtgtcgctgtcgacggtgacc

SEQ ID NO: 26635 - DNA, 567 bp, Homo sapiens
  SIMILAR (100)..(2): 1001254mologous to Homo sapiens Protein sequence encoded by clone p199-7 (PL mutet.rsT4),accession number P93369,Smith-Waterman Score=203.
atggacgatatcccgcaagaggcccggcagtaccggcataaccaagcctatgcctacagcatccagggtgacggtgccgaggatgacgatgagcgcattgttagatttcatacacgggtcaccgtcgacagcgacacacttgcatcggatgcagcccggttaacgtgccggcacggcctgggtaaccaggtgcatgcacagcttcaccaggtgtctactgttaaagtgacagcattaactgaaaaagaatgggaccctgcaacttggaatagggatgtttgggaggaccctgatggagctggagacactgagcttgtaaactctgttgaacctttctttccagaagaaacagcttccctattcccagtaatggcaacatcccctccgcaacccatgctgccatttagccttccacctttgtctaaagagataaaccctgtggtgcctgaggcagcagtgattgcctcgcctgaggcggttgcctggaaagataatggtgattctcctcagcaaacgacacctctgtttgcttctagacctatgactgaagtgccagcaggcccctag

SEQ ID NO: 26636 - DNA, 543 bp, Homo sapiens
  SIMILAR (178)..(540): 901254mologous to Cloning vector pZC320 SopA,accession number U26464,Smith-Waterman Score=556.
atggacgatatcccgcaagaggcccggcagtaccggcataaccaagcctatgcctacagcatccagggtgacggtgccgaggatgacgatgagcgcattgttagatttcatacacgggtcaccgtcgacagcgacacacttgcatcggatgcagcccgattaacgtgccggcacggtctgggtaaccaggacgatgtcacttatgcaataaagcccacttgcttttcggagcttgacattattccttcctgtctggctctgcaccgtattgaaactgagttaatgggcaaatttgatgaaggtgaactgcccaccgatccacacctgatgctccgactggccattgaaactgttgcttatgactatgatgtcatagttattgacagcgcgcctaacctgagtatcgttacgattaatgtcgaatgtgctgctgatgtgctgattgttcccacgcctgctgagttgtttgactacacctacgcactgcagtttttagatatgcttcgtgatctgctcaagaacgtagatcttaaagggttctag

SEQ ID NO: 26637 - DNA, 636 bp, Homo sapiens
  SIMILAR (324)..(605): 1001254mologous to Homo sapiens Protein sequence encoded by clone p199-7 (PL mutet.rsT4),accession number P93369,Smith-Waterman Score=542.
atgtcaggtaaaatgtccagtgatcgagctttgaggaagcagcaacagttgaacaaccttgtctatgtggtaacaaatcaggccaaacctggtgacagaattgtggatttctgcagcggaaccgctgctcaacatacgcttgcatgcctgcaggtcgactctagaggatccccggattgctgctgtgtcctgcttatccacaacattttgcgcacggttatgtggacaaaatacctggttacccaggccgtgcgcacgttaaccgggctgcatccgatgcaagtgtgtcgctgtcgacggcaggcaccgtgtatgaaatctaacaatgcgctcatcgtcatcctcggcaccgtcaccctggatgctgtaggcataggcttggttatgccggtactgccgggcctcttgcgggatatcgtccattccgacagcatcgccagtcactatggcgtgctgctagcgctatatgcgttgatgcaatttctatgcgcacccgttctcggagcactgtccgaccgctttggccgccgcccagtcctgctcgcttcgctacttggagccactatcgactacgcgatcatggcgaccacacccgtcctgtggatctacccactagtcaattcaccatcttgttga

SEQ ID NO: 26638 - DNA, 859 bp, Homo sapiens
  SIMILAR (506)..(856): 961254mologous to Cloning vector pZC320 SopA,accession number U26464,Smith-Waterman Score=597.
tgactggcgattctgtcggaatggacgatatcccgcaagagcccggcagtaccggcataaccaagcctatgcctacagcatccagggtgacggtgccgaggatgacgatgagcgcattgttagatttcatacacgggtcaccgtcgacagcgacacacttgcatcggatgcagcccggttaacgtgccggcacggcctgggtaaccagttgaactacaaagaagatgaatacttcgagaacataattcaaaatttgaaattcagccaaagtaaacaactgaagaagctccgagaaaagaaccggtttacgcagtttcggcttagtgaaacaaaagaaatcaccaatccgtatgccatgcgtttatacgaatccctgtgtcagtatcgtaagccggatggctcaggcatcgtctctctgaaaatcgactggatcatagagcgttaccagctgcctcaaagttaccagcgtatgcctgacttccgccgccgcttcctgcaggtactcaccaaggaaatccagtttttcgatatgcttcgtgatctgctcaagaacgttgatcttaaagggttcgagcctgatgtacgtattttgcttaccaaatacagcaatagtaatggctcttattccccgtggatggaggagcaaattcgggatgcctggggaagcatggttctaaaaaatgttgtacgtgaaacggatgaagttggtaaaggtcagatccggatgagaactgtttttgaacaggccattgatcaacgctcttcaactggtgcctggagaaatgctctttctatttgggaacctgtctgcaatgaaattttcgatcgtctgattaaaccacgctgggagattagataa

SEQ ID NO: 26639 - DNA, 741 bp, Homo sapiens
  SIMILAR (429)..(710): 1001254mologous to Homo sapiens Protein sequence encoded by clone p199-7 (PL mutet.rsT4),accession number P93369,Smith-Waterman Score=542.
accccggtgaatggcaaactggtcgttagccagaacgcgcaagctgatgtgcgttttagtgccgacgccagcgatctgctgatgattgcggcgcgtaaacaagatccggatacgctcttcttccagcgtcggctggtgattgaaggcgatacggagctggggctgtatgtgaaaaacctgatggacgccattgaactggagcaaatgccgaaagccttacgcatgatgctgctgcaactggcggattttgttgaggcgggaatgaaaaccgcgcctgaaaccaaacagacatcgaacccctccacacattttgcgcacggttatgtggacaaaatacctggttacccaggccgtgccggcacgttaaccgggctgcatccgatgcaagtgtgtcgctgtcgacgtcaggcaccgtgtatgaaatctaacaatgcgctcatcgtcatcctcggcaccgtcaccctggatgctgtaggcataggcttggttatgccggtactgccgggcctcttgcgggatatcgtccattccgacagcatcgccagtcactatggcgtgctgctagcgctatatgcgttgatgcaatttctatgcgcacccgttctcggagcactgtccgaccgctttggccgccgcccagtcctgctcgcttcgctacttggagccactatcgactacgcgatcatggcgaccacacccgtcctgtggatctacccactagtcaattcaccatcttgttga

SEQ ID NO: 26640 - DNA, 897 bp, Homo sapiens
  SIMILAR (864)..(391): 871254mologous to Homo sapiens putative p150,accession number U93563,Smith-Waterman Score=713.
ctagcggattccggccctccatatagggtaatcccccagtgcggcacaccccttggccaagggcagccagaggtgtttgttaagcagttctggatcttgggcctccgactgggagagaccccccacaggggtcaccagatccttattcaggggcattcctgctagcatcatgtggggcccctctgggacagagatcccagaggaaggagcaggcagccatctttgctgttctgcagcttctactggtgatacctccaggtgtgggagggacccagacaaatagggtctggagtggattcccagcaaaccatggcaaccctggttacccaggccgtgccggcacgttaaccgggctgcatccgatgcaagtgtgtcgctgtcgacggtgaccctctggtggaattcggctgtgaatccatctggtcctggactttttttggttggtaggctattaattattgcctcgatttcagagcctgttattggtctattcagggattcaagttcttcctggtttagtcttgggaggatgtgtgtgtccaggaatttatccatttcttctagattttctagtttatttgcatagaggtgttgatagtattctctgatggtagtttgtatttctgtgggatcggtggtgatatcccctttatcattttttattgcatctatttggttcttctctcttttcttctttattaatcttggtagccgtctatcaattgtgttgatcttttcaaaaaaccagcccctggattcattgattttttgaagggttctttgtgtctctatctccttcagttctgctctgatcttagttatttcttgccttctgctagcttttaaatgtgttggagttcttctagagtcccagtgcaagcatgcaagcctagccat

SEQ ID NO: 26641 - DNA, 531 bp, Homo sapiens
  SIMILAR (271)..(116): 921254mologous to Plasmid F 96 pct identical to gp:AB021078_30,accession number AP001918,Smith-Waterman Score=277.
atggaagatatcccgcaagaggcccggcagtaccggcataaccaagcctatgcttacagcatccagggtgacggtgccgaggatgacgatgagcgcattgttagatttcatacacgggtcaccgtcgacagcgacacacttgcatcggatgcagcccggttaacgtgccggcacggcctgggtaaccaggtattttgtccacataaccgtgcgccaactgctgtggataagcaggacacagcagcaatccacagcaggcatacaaccgcacaccgaggttactccgttctacagaaatgccatgtgtacagtagaggagaacctgtcttagtttattacccacggtcaaaagtagaacttaaaggcatacctaaagaatttccagatcctcttcagtctgctattggatttactaaagaatttgcattaaatattctcatttgtgaccccagattctctgattcatgtaaattggttcacctgttagcatcagaaagcaaagccaaagataggatagtaaaagcaaattag

SEQ ID NO: 26642 - DNA, 519 bp, Homo sapiens
  SIMILAR (267)..(506): 691254mologous to Plasmid F 96 pct identical to gp:AB021078_30,accession number AP001918,Smith-Waterman Score=277.
ttattggtacggggcccggttacctttggtatggtcggtctcattgtagtttggagccacggtcccgctgggatggtgggtctgagtatagtctgggaccggggtcctacttgtatcgtggtctgattgtgagtcgggggccacgatccattcggggtgtcggtctgattccggtctggaccacggttcccacttgtatggtcggagcagactagcagcgtgagagtacgattccatcgaggcctgtagaacggagtaacctcggtgtgcggttgtatgcctgctgcggattgctgctgtgtcctgcttatcgacaacattttgcgcgcggttatgtggacaaaatacctggttacccaggccgtgccggcacgttaaccgggctgcatccgatgcaagtgtgtcgctgtcgacggtgacccgataggcgagggaccgagcgggtttcagcccgtaaacatgtgtgttttgttgtcgtgtctctgttcgtcgctgcgtgtcgaccgccgcttcgcgcat

SEQ ID NO: 26643 - DNA, 606 bp, Homo sapiens
  SIMILAR (271)..(116): 961254mologous to Plasmid F 96 pct identical to gp:AB021078_30,accession number AP001918,Smith-Waterman Score=291.
atggacgatatcccgcaagaggcccggcagtaccggcataaccaagcctatgcctacagcatccagggtgacggtgccgaggatgacgatgagcgcattgttagatttcatacacgggtcaccgtcgacagcgacacacttgcatcggatgcagcccggttaacgtgccggcacggcctgggtaaccaggtattttgtccacataaccgtgcgcaaaatgttgtggataagcaggacacagcagcaatccacagcaggcatacaaccgcacaccgaggttacttccgttcttacagttacgacgacatgaagaatcccccattgccaaatcaagaattttactaccacaagccaattcaatccaatttaatttataaaaatatttctcatatgcccaccatgtatcatcgctatgtagctgtagatcttcttcactcccttatcacacacacgcacataccacactgccttatgaccaccacctcctcatcagtctcctctcacatcatcaccctgacagaatctgtaccctattcctacctcacttcatccaaatcatcagcattcttccggactcactggactctttcactagccttcacctag

SEQ ID NO: 26644 - DNA, 1059 bp, Homo sapiens
  SIMILAR (721)..(1056): 981254mologous to unidentified cloning vector 29kD protein essential for the replication of mini F plasmid,accession number AB015619,Smith-Waterman Score=577.
atggagaaaaaaatcactggatataccaccgttgatatatcccaatggcatcgtaaagaacattttgaggcatttcagtcagttgctcaatgtacctataaccagaccgtggagctggatattacggcctttttaaagaccgtaaagaaaaataagcacaagttttatccggcctttattcacattcttgcccgcctgatgaatgctcatccggagttccgtatggcaatgaaagacgatcccctcctatgtcctagagacatgcacggcagagaagaacaaagctctgcccttggcaggattctgggtcgtgatgcacgagaaagttccctggtggtccgcgggaggaaggatgttccggtggcccgaccgattgttcgccgttcgcgtagcttttcggcctgtgcttttgccgggtttgacggtttcactcttcctggcggggcccttagtttttggcgggcggcgggttggatttacctcttccgggccaagtccgggggaccttgcgggcacgccatagtgactggcgatgctgtcggaatggacgatctcccgcaagaggcccggcagtaccggcataaccaagcctatgcctacagcatccagggtgacggtgccgaggatgacgatgagcgcattgttagatttcatacacgggtcaccgtcgacagcgacacacttgcatcggatgcagcccggttaacgtgccggcacggcctgggtaaccagaaccggtttacgcagtttcggcttagtgaaacaaaagaaatcaccaatccgtatgccatgcgtttatacgaatccctgtgtcagtatcgtaagccggatggctcaggcatcgtctctctgaaaatcgactggatcatagagcgttaccagctgcctcaaagttaccagcgtatgcctgacttccgccgccgcttcctgcaggtctgtgttaatgagatcaacagcagaactccaatgcgcctctcatacattgagaaaaagaaaggccgccagacgactcatatcgtattttccttccgcgatatcacttccatgacgacaggatag

SEQ ID NO: 26645 - DNA, 3288 bp, Homo sapiens; identical to SEQ ID NO: 14349
  SIMILAR (1)..(1083): 991254mologous to Cloning vector pZC320 SopA,accession number U26464,Smith-Waterman Score=1872.

SEQ ID NO: 26646 - DNA, 1390 bp, Homo sapiens
  SIMILAR (742)..(1383): 971254mologous to Cloning vector pBACe3.6 levansucrase,accession number U80929,Smith-Waterman Score=1086.
atggacgatatcccgcaagaggccggcaggtaccggcataaccaagcctatgcttacagcatccagggtgacggtgccgaggatgacgatgagcgcattgttagatttcatacacgggtcaccgtcgacagcgacacacttgcatcggatgcagcccggttaacgtgccggcacggcctgggtaaccagggttccgatttagtgctatacggcacctcgaccccaaaaaacttgatttgggtgagggttcacgtagtgggccatcgccctgatagacggtttttcgcctttgacgtttggagtccacgttctttaatagtggactcttgttccaaactggaacaacactcaaccctatctcgggctattcttttgatttataagggattttgccgatttcggaaccaccatcaaacaggattttcgcctgctggggcaaaccagcgtggaccgcttgctgcaactctctcagggccaggcggtgaagggcaatcagctgttgcccgtctcactggtgaaaagaaaaaccaccctggcgcccaatacgcaaaccgcctctccccgcgcgttggccgattcattaatgcagctggcacgacaggtttcccgactggaaagcgggcagtgagcgcaacgcaattaatggattttgccgatttcggaaccaccatcaaacaggattttcgcctgctggggcaaaccagcgtggaccgcttgctgcaactctctcagggccaggcgaacgttcagcagtttatcgatgaaggcaattatacatccggcgacaaccatacgctgagagaccctcactacgttgaagacaaaggccataaataccttgtattcgaagccaacacgggaacagaaaacggataccaaggcgaagaatctttatttaacaaagcgtactacggcggcggcacgaacttcttccgtaaagaaagccagaagcttcagcagagcgctaaaaaacgcgatgctgagttagcgaacggcgccctcggtatcatagagttaaataatgattacacattgaaaaaagtaatgaagccgctgatcacttcaaacacggtaactgatgaaatcgagcgcgcgaatgttttcaaaatgaacggcaaatggtacttgttcactgattcacgcggttcaaaaatgacgatcgatggtattaactcaaacgatatttacatgcttggttatgtatcaaactctttaaccggcccttacaagccgctgaacaaaacagggcttgtgctgcaaatgggtcttgatccaaacgatgtgacattcacttactctcacttcgcagtgccgcaagccaaaggcaacaatgtggttatcacaagctacatgacaaggggatcctctagagtcgacaaagcagggctgc

SEQ ID NO: 26647 - DNA, 679 bp, Homo sapiens
  SIMILAR (397)..(558): 941254mologous to Plasmid F 96 pct identical to gp:AB021078_30,accession number AP001918,Smith-Waterman Score=297.
ttatagcttggagtctagtaggttttctttcatgtgcatgcatataaacttctgccagatccttcttaatacagtggactgagagctagacacacagtctagcctgagaatgtactggcataaagtatttttattaaaattcagtttttcaactttcaaagatgtcaaagggtgttcagaagtaccttgagaacctcctgtcctgcctgaaggattttcaagtgcaaagcagacttgctgctgtacgacatgcttgtgtatgtcacactctggatacacagagctgtcacctacacacatcgggtaccgaaccactcgtatcgccggtctaatattaagtctgaaaccacggttcccactcgtatcgtcggtcctgtagaacgcagtaacctcggtgtgcggttgtatgcctgctgtggattgctgctgtgtcctgcttatccacaacattttgcgcacggttatgtggacaaaatacctggttacccaggccgtgccggcacgttaaccgggctgcatccgatgcaagtgtgtcgctgtcgacggtgacccaaaccagccccgcttcctggaagtccacaacacttatgtagtcaccagccacatctggctcaaaggaaaactggccaatgtttcctacagggacattgctttcctgaaaagaactggggtactgttg

SEQ ID NO: 26648 - DNA, 946 bp, Homo sapiens
  SIMILAR (780)..(532): 881254mologous to Plasmid F Protein D,accession number M12987,Smith-Waterman Score=372.
atggaccaaatcccgcaagaggcccgccagtaccggcataaccaagcctatgcctacagcatccagggtgacggttccgaggatgactatgagcgcattgttaaatttcatacacgggtcaccgtcgacagcgacacacttgcatcggatgcagcccggttaacgtgccggcacggcctgggtaaccaggtattttgtccacataaccgtgcgcaaaatgttgtggataagcaggacacagcagcaatccacagcaggcatacaaccgcacaccgagggattacatttcaacatgagatttgggcagggacaaatatccaaactagatcaatccccaacctaaggggatcctctagagaaaaaccggcatgtcatgccagcaatgagactaatattcggccgccgattcgagtgggaccagggttgctttcccaaccaaagttttgggccattcagacatcagccttgatcttccggacaaaacttgagaaaggaagtactcgccgagtggaacgggcaatgaggcagacacaggctttgcagaacttccagcggtataccggcatacagcatgtgcatcgcataggaatggcggaacgtatgtggtgtgaccggaacagagaacgtcacaccgtcagcagcagcggcggcaaccgcctccccaatccaggtcctgaccgttctgtccgtcacttcccagatccgcgctttctctgtccttcctgtgcgacggttacgccgctccatgagcttatcgcgaataaatacctgtagaacggagtaccctcggtgtgcggttgtatgcctgctgtggaaggatgctgtgtcctgcttatccacaactttttgcgcacggttatgtggacaaaatacctggttacccaggccgtgccggcacgttaaccgggctgcatccgatgcaagtgtgtcgctgtcgacggtgacc

SEQ ID NO: 26649 - DNA, 1272 bp, Homo sapiens
  SIMILAR (981)..(1262): 1001254mologous to Homo sapiens Protein sequence encoded by clone p199-7 (PL mutet.rsT4),accession number P93369,Smith-Waterman Score=542.
atggctggcaaactgggcactcaaagctggtcacagccaggtcagccttggatttttcccgatttcggaacacccatcaaccaggattttcgcctgctgggccaaaccagcgtggaccgcttgctgcaactctctcaggcccaggcggtgaagggcaatcagctgttccccgtctcactggtgaaaagaaaacccacccctggcgcccaatacgcaaaccgcctctccccgcgcgttggccgattcattaatgcagctggcacgacaggtttcccgactggaaagcgggcagtgagcgcaacgcaattaatggtcaccgtcgacagcgacacacttgcatcggatgcagcccggttaacgtgccggcacggcctgggtaaccaggttcgcgggctttcccggtcaagctttaaatcgggggcctcccttaagggttccgatttagtgctttacggcacctcgaccccaaaaaaacttgatttggtggactcttgttccaaactggaacaacactcaaccctatctcgggctattcttttgatttataagggattttgccgatttcggaaccaccatcaaacaggattttcgcctgctggggcaaaccagcgtggaccgcttgctgcaactctctcagggccaggcggtgaagggcaatcagctgttgcccgtctcactggtgaaaagaaaaaccaccctggcgcccaatacgcaaaccgcctctccccgcgcgttggccgattcattaatgcagctggcacgacaggtttcccgactggaaagcgggcaaaggaagtaccctgggtgtcgtttgtatgcttcctgtgaattgctgctgtgtcctgttaatccacaacattttgcgcacggttatgtggacaaaatatcctggttaccgcagccggtgccggcacgttaaccgggctgcatccgatgcaagtgtgtcgctgtcgacgtcaggcaccgtgtatgaaatctaacaatgcgctcatcgtcatcctcggcaccgtcaccctggatgctgtaggcataggcttggttatgccggtactgccgggcctcttgcgggatatcgtccattccgacagcatcgccagtcactatggcgtgctgctagcgctatatgcgttgatgcaatttctatgcgcacccgttctcggagcactgtccgaccgctttggccgccgcccagtcctgctcgcttcgctacttggagccactatcgactacgcgatcatggcgaccacacccgtcctgtggatctacccataa

SEQ ID NO: 26650 - DNA, 1531 bp, Homo sapiens
  SIMILAR (893)..(1114): 1001254mologous to synthetic construct lac repressor,accession number A14595,Smith-Waterman Score=354.
atgaatgcagatggggatggagaccacgttgatgagcgaacaatatgcaatggaattgccccagaaaaagatgtagatggatttcatattatcaatattggaagattgtgccttgatcagcattctctcatacctgccactgccagtgctgtttgggaaataataaaaagaacaggcccttatttgcattttccaagtgaaggaattcccggaaaccggaggtcatattctgggtttaaccaacagggccggaggggcttcccccaggcatttttgctgctcagtcaggataaaaccctgcaacaggcatgtgcatgtttgatgaaaggaaaggaagaaaaagaactagacatactagacaatctcttgatgcaagcccccacaggccagcagacactttttggtggagcagaacctccttctctcagctatgaaggttcagttattaggtccctcgactatagggtcaccgtcgacagcgacacacttgcatcggatgcagcccggttaacgtgccggcacggcctgggtaaccagtgggatgaaacatgggatgaaataccatgcgttcaagcatttttgctgctcagtcaggataaaaccctgcaacaggcatgtgcatgtttgatgaaaggaaaggaagaaaaagaactagacatactagacaatctcttgatgcaagcccccacaggccagcagacactttttggtggagcagaacctccttctctcagctatgaaggttcagtagtggccatcgccctgaagacgtttttcggccttgacgttgaagtccacgtctttaatagtgactcttgttccaaattggaacaacactcaaccttatctcgggctattcttttgatttataagggattttgccgatttcggaaccaccatcaaacaggattttcgcctgctggggcaaaccagcgtggaccgcttgctgcaactctctcagggccaggcggtgaagggcaatcagctgttgcccgtctcactggtgaaaagaaaaaccaccctggcgcccaatacgcaaaccgcctctccccgcgcgttggccgattcattaatgcagctggcacgacaggtttcccgactggaaagcgggcaggtcaccgtcgacagcgacacacttgcatcggatgcagcccggttaacgtgccggcacggcctgggtaaccaggcatacaaccgccaccggagggtactccgttctacaggttacgacgacttgtcaatacttgcccttgacagcattgatggaaatgtaatctcacgttgttgtctgatcgacattcaaggggaccgtgggcccgaaccgtattcagacccacacacgagtgggatcgtggtcccgactataattcgaccgacaatcgaggggaacgggggccagaaaaaaatcaacttaggtatacgaactaatttggggtaccgagctcgaattcgtgggggtggtcatagctgtttcctgtgtgaaattgttatccgctcacaattccacacaacatacgagccggaagcataa

SEQ ID NO: 26651 - DNA, 2285 bp, Homo sapiens
  SIMILAR (597)..(4): 981254mologous to unidentified cloning vector 29kD protein essential for the replication of mini F plasmid,accession number AB015619,Smith-Waterman Score=1021.
ctatcctgtcgtcatggaagtgatatcgcggaaggaaaatacgatatgagtcgtctggcggcctttctttttctcaatgtatgagaggcgcattggagttctgctgttgatctcattaacacagacctgcaggaagcggcggcggaagtcaggcatacgctggtaactttgaggcagctggtaacgctctatgatccagtcgattttcagagagacgatgcctgagccatccggcttacgatactgacacagggattcgtataaacgcatggcatacggattggtgatttcttttgtttcactaagccgaaactgcgtaaaccggttctgtaacccgataaagaagggaatgagatatgggttgatatgtacactgtaaagccctctggatggactgtgcgcacgtttgataaaccaaggaaaagattcatagcctttttcatcgccggcatcctcttcagggcgataaaaaaccacttccttccccgcgaaactcttcaatgcctgccgtatatccttactggcttccgcagaggtcaatccgaatatttcagcatatttagcaacatggatctcgcagatggggatcctctcctgtcccacatcctctccaaaatgcagacaagaaaagccattagaaccttgattagataagtaggtctccaaggtggtatttgtgcccagaagtgcaacaaacctgacattgcaaccagcgtacccgtgtgcgaccacgatgtctgagtgtctggcacccgtcaaatgatagacagcatagtaggctcttgtagcaaagaccgcagtgagggagaagaagcactcgaatttgtcttcaatcaggacaccaccattccgctggttacccaggccgtgccggcacgttaaccgggctgcatccgatgcaagtgtgtcgctgtcgacggtgacccgtgtatgaaatctaacaatgcgctcatcgtcatcctcggcaccgtcaccctggatgctgtaggcataggcttggttatgccggtactgccgggcctcttgcgggatatcgtccattccgacagcatcgccagtcactatggcgtgaacattttttagaaccatgcttccccaggcatccgatatttgctcctcaatccacggggactgagagccattactattgctgtatttggtaagcaaaatacgtacatcaggctcgaaccctttaagatcaacgttcttgagcagatcacgaagcatatcgaaaaactgcagtgcggaggtgtagtcaaacaactcagcaggcgtgggaacaatcagcacatcagcagcacatacgacattaatcgtgccgatacccaggttaggcgcgctgtcaataactatgacatcatagtcatgagcaacagtttcaatggccagtcggagcatcaggtgtggatcggtgggcagtttaccttcatcaaatttgcccattaactcagtttcaatacggtgcagagccagacaggaaggaataatgtcaagccccggccagcaagtgggctttattgcataagtgacatcgtccttttccccaagatagaaaggcaggagagtgtcttctgcatgaatatgaagatctggtacccatccgtgatacattgaggctgttccctgggggtcgttaccttccacgagcaaaacacgtagccccttcagagccagatcttgagcaagatgaacagaatctgcagggatacaactatgcaaggatttcttgatctggccaacgaacagatacagcatacgtttttgatcccgggagagactatatgccgcctcagtgaggtcgtttgactggacgattcgcgggctatttttacgtttcttgtgattgataaccgctgtttccgccatgacagatccatgtgaagtgtgacaagtttttagattgtcacaccaggtcattttgcactggggggatcctctagagtcgacctgcaggcatgcaagatttaaacgcagtacctccggtgtgcggttgtatgcctgctgtggattgctgctgtgtcctgcttatccacaacattttgcgcacggttatgtggacaaaatacctggttacccagcccgtgccggcacgttaaccgggctgcatccgatgcaagtgtgtcgctgtcgacggtgccccgtgtatgaaatctaacaatgcgctcatcgtcatcctcggcaccgtcaccctggatgctgtaggcataggcttggttatgccggtactgccgggcctcttgcgggatatcgtccattccgacagcatcgccagtcactatggcgtg

SEQ ID NO: 26652 - DNA, 3873 bp, Homo sapiens
  SIMILAR (1185)..(715): 951254mologous to Cloning vector pZC320 SopB,accession number U26464,Smith-Waterman Score=738.
  misc_feature (1)...(3873): n = a,t,c or g
tcaaccagatgaaactaggcgagccctggagcccatacagttgtggacataaggccccgggaagaccaccttggcagtgcagggcagcccaactgccctgagaatggctgtctgcagggttttcacacaggcttggcctatcctgagcaccatccctgcatctgaaagacactgtagaccggagtaacctcggtgtgcggttgtatgcctgctgtggattgctgctgtgtcctgcttatccacaacattttgcgcacggttatgtggacaaaatacctggttacccaggccgtgccggcacgttaaccgggctgcatccgatgcaagtgtgtcgctgtcgacggtgacccgtgtatgaaatctaacaatgcgctcatcgtcatcctcggcaccgtcaccctggatgctgtaggcataggcttggttatgccggtactgccgggcctcttgcgggagggtaccgagctcgaattcgtaatcatggtcatagctgtttcctgtcgtgccagctgcattaatgaatcggccaacgcgcggggagaggcggtttgcgtattgggcgccagggtggtttttcttttcaccagtgagacgggcaacagctgattgcccttcaccgcctggccctgagagagttgcagcaagcggtccacgctggtttgccccagcaggcgaaaatcctgtttgatggtggttccgaaatcggcaaaatcccccagcttttttctgctcatgaaggttagatgcctgctgcttaagtaattcctctttatctgtaaaggctttttgaagtgcatcacctgaccgggcagatagttcaccggggtgagaaaaaagagcaacaactgatttaggcaatttggcggtgttgatacagcgggtaataatcttacgtgaaatattttccgcatcagccagcgcagaaatatttccagcaaattcattctgcaatcggcttgcataacgctgaccacgttcataagcacttgttgggcgataatcgttacccaatctggataatgcagccatctgctcatcatccagctcgccaaccagaacacgataatcactttcggtaagtgcagcagctttacgacggcgactcccatcggcaatttctatgacaccagatactcttcgaccgaacgccggtgtctgcaggaagcggcggcggaagtcaggcatacgctggtaactttgaggcagctggtaacgctctatgatccagtcgattttcagagagacgatgcctgagccatccggcttacgatactgacacagggattcgtataaacgcatggcatacggattggtgatgtttttctnctggttacccaggccgtgccggcacgttaaccgggctgcatccgatgcaagtgtgtcgctgtcgacggtgaccctatatcgaggagggggtttctnntgaatcgccagcggcatcagcaccttgtcgccttgcgtataatatttgcccatggtgaaaacgggggcgaagaagttgtccatattggccacgtttaaatcaaaactggtgaaactcacccagggattggctgagacgaaaaacatattctcaataaacccgtcttttattgccatacggaacctccggtgaacattcatcaggcgggcacagatgtgaattaaggccggataaaactgggcttttttttcttttacggcttttaaaagccgtaatttccactgcccgctttccagtcgggaaacctgtcgtgccagctgcattaatgaatcggccaacgcgcggggagaggcggtttgcgtattgggcgccagggtggtttttcttttcaccagtgagacgggcaacagctgattgcccttcaccgcctggccctgagagagttgcagcaagcggtccacgctggtttgccccagcaggcgaaaatcctgtttgatggtggttccgaaatcggcaaaatcctttggtgggccgatcatgtccgcagaatcccgcgttggcgtcactacaaacggaatgaccctgtatgctcgttttaggtgttttggcgtgtcacctgtccttgctcggcgctttgcgcgctgaggagcgtagacccggggtgtacgttggtgttgatcgtccttcgtccttttaaagcgtgtctgcccttctagtccgaggttgctgaatgacgttttccgtgtttttcgcttgtacgctgtccacgccgtggcacgcggcgtctgagccagatgctttttcccggattctgtaccccccttgtgctttgcgggcttggtgggagctctgagggtcttctcttgggtttcattccgcgtggtccgcatggctgtgcagggccgtgcccctggtgcttgggggtcgccggttcggcgttgctgatgccgtcgttccggcgtttcggttgattcttcgcttcgggccacgcgggcgcgtcgggcttctgttggtgtgggcggtgttccccgctttgtcgggcctttccgcggttccgcccttttgcgtcgcttgcgtatctgtttacgcttattccggtttcccttgttcccgcctccgccgttcccgcaattttcttcacaccccgattccccggccatcacgttcaatatctggttacccaggccgtgccggcacgttaaccgggctgcatccgatgcaagtgtgtcgctgtcgacggtgacccgtgtatgaaatctaacaatgcgctcatcgtcatcctcggcaccgtcaccctggatgctgtaggcataggcttggttatgccggtactgccgggcctcttgcgggatatcgtccattccgacagcatcgccagtcatgtttgtctccacctgctggaatgtaaatttcatgggacatttttctttgctctgtttatcagtgtttggggggggcgtagaacaggactgcccgctttccagtcgggaaacctgtcgtgccagctgcattaatgaatcggccaacgcgcggggagaggcggtttgcgtattgggcgccagggtggtttttcttttcaccagtgagacgggcaacagctgattgcccttcaccgcctggccctgagagagttgcagcaagcggtccacgctggtttgccccagcaggcgaaaatcctgtttgatggtggttccgaaatcggcaaaatcctgcccgctttccagtcgggaaacctgtcgtgccagctgcattaatgaatcggccaacgcgcggggagaggcggtttgcgtattgggcgccagggtggtttttcttttcaccagtgagacgggcaacagctgattgcccttcaccgcctggccctgagagagttgcaacaagcggtccacgctggtttgccccagcaggcgaaaattctgtttgatggtggttccgaaatcggcaaaatcctgcccgctttccagtcgggaaacctgtcgtgccagctgcattaatgaatcggccaacgcgcggggagaggcggtttgcgtattgggcgccagggtggtttttcttttcaccagtgagacgggcaacagctgattgcccttcaccgcctggccctgagagagttgcagcaagcggtccacgctggtttgccccagcaggcgaaaatcctgtttgatggtggttccgaaatcggcaaaatccattaattgcgttgcgctcactgcccgctttccagtcgggaaacctgtcgtgccagctgcattaatgaatcggccaacgcgcggggagaggcggtttgcgtattgggcgccagggtggttttttttttcaccagtgagacgggcaacagctgaatggccttcaccgtctggccctgagaaaagtgcagctagcgggccacgctggttttgccccaccaggcgaaaattcctgttttgagggtgggttccgaaattgggcat

SEQ ID NO: 26653 - DNA, 3643 bp, Homo sapiens
  SIMILAR (515)..(1267): 721254mologous to Cloning vector pBACe3.6 levansucrase,accession number U80929,Smith-Waterman Score=901.
atggcccgagctccgtgcggcgtgtccccggtgctcccggcctcgggctgcccgcggcccgccgtcaatatcgagggccgtgtcgggcgggggctcaccctcactcacgaccctccgatcatatccacccgcttcctgcaccactccttgcgcagccggtcaacgattcacataaggaaacaaggaggagaaaggcaactaagggtcaccgtcgacagcgacacacttgcatcggatgcagcccggttaacgtgccggcacggcctgggtaaccaggtcctcgatatagggtcaccgtcgaagcgacacacttgcatcggatgcagcccggttaacgtgccggcacggcctgggtaaccagactaataatcagaccgacgatacgagtgggaccgtggtcccagacttaatatcagaccgacgatacgagtgggacccatggtccccagactaataatcagaccgacgatacgaggtgggaccgtggtcccagtcttgttttcagaccgacgatacgagtgggaccgctttgcagaactttcagcggtataccggcatacagcatgtgcatcgcataggaatggcggaacgtatgtggtgtgaccggaacagagaacgtcacaccgtcagcagcagcggcggcaaccgcctccccaattccagtcctgaccgttctgtccgtcacttcccagaccgcgctttctctggccttcctgtgcgaccgacccccacagtagctgaatacatctgctatcacgttgtgtttgctcttgcgggaagcccgaaagacgctgatgacacatcaatctacatgttttatcaaaaggtcggcgacaactcaatcgacagctggaaaaacgcgggccgtgtctttaaagacagcgataagttcgacgccaacgatccgatcctgaaagatcagacgcgagagtggtccggttctgcaacctttacatctgacggaaaaatccgtttattctacactgactattccggtaaacattacggcaaacaaagcctgacaacagcgcaggtaaatgtgtcaaaatctgatgacacactcaaaatcaacggagtggaagatcacaaaacgatttttgacggagacggaaaaacatatcagaacgttcagcagtttatcgatgaaggcaattatacatccggcgacaaccatacgctgagagaccctcactacgttgaagacaaaggccataaataccttggtattcgaaagcccacacggggaacagaaaacggataccaagggcgaagaatctttatttaacaaagcgtactacggcggcggcacgaacttcttccgtaaagaaagccagaagcttcagcagagcgctaaaaaacgcgatgctgagttagcgaacggcgccctcggtatcatagagttaaataatgattacacattgaaaaaagtaatgaagccgctgatcacttcaaacacggtaactgatgaaatcgagcgcgcgaatgttttcaaaatgaacggcaaatggtacttgttcactgattcacgcggttcaaaaatgacgatcgatggtattaactcaaacgatatttacatgcttggttatgtatcaaactctttaaccggcccttacaagccgctgaacaaaacagggcttgtgctgcaaatgggtcttgatccaaacgatgtgacattcacttactctcacttcgcagtgccgcaagccaaaggcaacaatgtggttatcacaagctacatgacaaacagaggcttcttcgaggataaaaaggcaacatttgcgccaagcttcttaatgaacatcaaaggcaataaaacatccgttgtcaaaaacagcatcctggagcaaggacagctgacatcgatagtggctccaagtagcgaagcgagcaggactgggcggcggccaaagcggtcggacaagctgtctgcgaggacgggtgcgcatagaaattgcatcaacgcatatagcgctagcagcacgccatagtgactgccgatgctgtcggaatggacgatattcccgcaagaggcccggcagtaccggcataaccaagcctatgcctacagcatccagggtgacggtgccgaggatgacgatgagcgcattgttagatttcatacacggtgcctgacgtcgacagcgacacacttgcatcggatgcagcccggttaacgctgccggcacggcctgggtaaccaggtattttgtccacataaccgtgcgcaaaatgttgtggataagcaggacacagcagcaatccacagcaggcatacaaccgcacaccggaggttactccggttctaccgggttacgacgacatggccatactttgccccttgacagggcattgatgaaatcgatagtctcacgcatgatagtctgatcgacaatacaagtggggaccactcccccccgtggatggaggagcttattcgggatgcctggggaagcatcgttctaaaaaagttgtacgtgaaacggatgaagttggtaaaggtcagatccggatgagaactgtttttgaacaggccattgatcaacgctcttcaactgatacttcgttatcgacaccagctgccccgatggtggattcgttaattgcgcgcgtaggagtaatggctcgcggtaatgccattactttgcctgtatgtggtcgggatgtgaagtttactcttgaagtgctccggggtgatagtgttgagaagacctctcgggtatggtcaggtaatgaacgtgaccaggagctgcttactgaggacgcactggatgatctcatcccttcttttctactgactggtcaacagacaccggcgttcggtcgaagagtatctggtgtcatagaaattgccgaggggaagtcgcctcgtaaagctgctggacttacccgaagtgatttccgggtcctggttggcgagctggatgatgagcagatggctgcattatccagattgggtaacgattatcgcccaacaagtgcttatgaacgtggtcagcgttatgcaagccgattgcagaatgaatttgctggaaatatttctgcgctggctgatgcggaaaatatttcacgtaagattattacccgctgtatcaacaccgccaaattgcctaaatcagttgttgctcttttttctcaccccggtgaactatctgcccggtcaggtgatgcacttcaaaaagcctttacagataaagaggaattacttaagcagcaggcatctaaccttcatgagcagaaaaaagctggggtgatatttgaagctgaagaagttatcactcttttaacttctgtgcttaaaacgtcatctgcatcaagaactagtttaagctcacgacatcagtttgctcctggagcgacagtattgtataagggcgataaaatggtgcttaacctggacaggtctcgtgttccaactgagtgtatagaagaaattgaggccattcttaaggaacttgaaaagccagcacctgaggaacggagtaacctcggtgtgcggttgtatgcctgctgtggattgctgctgtgtcctgcttatccacaacattttgcgcacggttatgtggacaaaatacctggttacccaggccgtgccggcacgttaaccgggctgcatccgatgcaagtgtgtcgctgtcgacggtga

SEQ ID NO: 26654 - DNA, 2370 bp, Homo sapiens
  SIMILAR (1606)..(2367): 981254mologous to Escherichia coli Hsp70,accession number U01827,Smith-Waterman Score=1234.
atgctgctgtggggggtagcgctgatcgtacggcggatgccggggcgcttctcggcgctaatgttgattgtgctgtcgctgaccgtttcttgccgttatatctggtggcgttacacctctacgctgaactgggacgatccggtcagcctggtgtgcgggcttattctgctcttcgctgaaacgtacgcgtggattgtgctggtgctcggctacttccagacgcctttcttggccagagccacacggaagtgtgcgttcgagccaggaagtgtaccatcttgttgcgcccatgttcgttgttggccctgtacaaatgccaatattatgtcgttgggtggcattgcgattgccgtcggggcgatggtcgatgctgctatcgtcatgatcgagaatgcgcataaacggctggaagagtggcagcaccagcatcctgacgccacgctggataataaaacgcgctggcaggtgatcaccgatgcgtctgttgaagtggggccggcgctatttatcagtctgctgattatcacgttgtcgtttatcccgatcttcaccctggaagggcaggaagggcgtctgtttggcccgttggcgttcaccaaaacgtatgcgatggcgggtgcggcgctgctggcgatcgtagtgatcccgatcctgatgggctactggatccgtggcaaaattccgccggaaagcagtaacccgctcaatcgctttttgattcgtgtttatcatccgctgttgctgaaagtactgcactggccgaaaaccacgctgctggtggcggcgctttcggtgctgacggttctctggccgctcaataaagttggcggggaatttttaccgcagatcaatgaaggcgacttgttgtatatgccatcgacgctgccggggatttccgcagcagaggcggcgagtatgctgcaaaaaaccgacaagctaattatgagcgtacctgaagtggcgcggaaaaatgctgactgcacaagtttcagtgagctggtggagaactttaagaagaccttgagccacactgacccaatggtctcggatgatttgggcactagcttacccttcatcgatatctacttttccactctggactaccaggacacaactgtccacaaggcttcaccaagttgggctggacacgtgcccgaggagaatgccggggcgatgacgacatgccgatgggccaggactgtcatggaaaacctgaatatggatctgctgtacatggctgccgctgtgatgatgggtctggcggcaatcggtgctgcgatcggtatcggcatcctcgggggtaaattcctggaaggcgcagcgcgtcaacctgatctgattcctctgctgcgtactcagttctttatcgttatgggtctggtggatgctatcccgatgatcgctggaaaccacgccgaggccttcgcgagcggcggcttcagcggcttctacgacgcggcgggcgtgatccacttctttctgggtcggtgcgtagaggttgtgcagcagatcaatctgacgcgggttgatcagcgatttgccgtcaaagcccagctgtttgatgtgggcggcttcttgcagaaatccggcttcgttgttagcgtcggaatagacgacgcggcgcgtctggcgggccttcacgtcctgcgcttacttaacgaaccgaccgctgcggctatcgcatacgggctggattccggtcaggaaggcgtgatcgccgtttatgacctcggtggcgggacgtttgatatttccattctgcgcttaagtcgcggcgtgtttgaagtgctggcaaccggcggtgattccgcgctcggcggcgatgatttcgaccatctgctggcggattacattcgcgagcaggcgggcattcctgatcgtagcgataaccgcgttcagcgtgaactgctggatgccgccattgcagccaaaatcgcgctgagcgatgcggactccgtgaccgttaacgttgcgggctggcagggcgaaatcagccgtgaacaattcaatgaactgatcgcgccactggtaaaacgaaccttactggcttgtcgtcgcgcgctgaaagacgcgggtgtagaagctgatgaagtgctggaagtggtgatggtgggcggttctactcgcgtgccgctggtgcgtgaacgggtaggcgaatttttcggtcgtccaccgctgacttccatcgacccggataaagtcgtcgctattggcgcggcgattcaagcggatattctggtgggtaacaagccagacagccaaatgctgttgcttgatgtgatcccactgtcgctgggcctcgaaacgatgggcggcctggtggagaaagtgattccccgtaataccactattacggtggcccgcgcttag

SEQ ID NO: 26655 - DNA, 680 bp, Homo sapiens
  SIMILAR (187)..(486): 831254mologous to Escherichia coli ATP synthase b subunit (atp-4; gtg start codon),accession number J01594,Smith-Waterman Score=400.
atggatctgctgtacatggctgccgctgtgatgatgggtctggcggcaatcggtgctgcgatcggtatcggcatcctcgggggtaaattcctggaaggcgcagcgcgtcaacctgatctgattcctctgctgcgtactcagttctttatcgttatgggtctggtggatgctatcccgatgatcgctgccatcgcgtttgtcctgttcgttctgttctgcatgaagtacgtatggccgccattaatggcagccatcgaaaaacgtcaaaaagaaattgctgacggcctttcttccgcagaacgagcacataaggaccttgtacttgcaaaggccagcgcgaccgaccagctgaaaaaagcgaaagcggaagcccaggtaatcatcgagcaggcgaacaaacgccgctcgcagattctggacgaagcgaaagcttgaggcagacaggaacctctggtgcaggtctttctggaatctgcaaggaaaaggtgaccaatggcaaaggatctgtggcctccacagcagggttctccaagctaaggtcttctgcagtaactatgcagggaaggtacgagatgggggcagctcttctcactctcacaacagtggcaatgggggcagcaatggcagcagcaggtgcactgacaatttctgtttacagagactacaactggcagatgtga

SEQ ID NO: 26656 - DNA, 2511 bp, Homo sapiens
  SIMILAR (444)..(1454): 531254mologous to Homo sapiens dJ934G17.1.1 (chloride chanel protein CLC-6A (KIAA0046)) (isoform 1),accession number AL021155,Smith-Waterman Score=700.
caattcttcatctctggggatcaaatcagtcttaacatggcattttttttctcttctaaaggccccagggcctggagggatggtgggccatagggctggaggggcttacagggaaagccctggcctggtgaatcacggttcctggtgttcgtggacttcagtggtcaccaagattctttcttacatagatccggaccctgctctgcaaggtccttggagtgctgttcagtgtggctggaggtaagaagggtccaacttgtatccttcaaatactcaaagggcagagacgacaagaagcatgatgtatttcagttatggctgagagggtgtgggcctctgggcaggcctagtgggaggtctggttacactgggccaaatccattgattggtttcttttttggaaacaacatgttcatgcgctgcgggtcagactcgacacttgcttgttcagtctagaggagggttcgtccttctggaaccaagggctcacgtggaaagtggtgaggaggaccttcagtgaaagcattaaccacaccccccgaattacactgggtgtcccttactcggtacatggaatccagctccctggattgctgaactttggcgagtttaaggtatgttttgtcctttccccaaggatttttaatttgacccatgaaaatttcctctcaagtgaaggaccagagagaaggggcctcctgggagccacattcaactgtctgaacaagaggcttgcaaagtaccgtatgcgaaacgtgcacccgaaacctaagctcgtcaggtatctgcacagtcgcctcccccccgagcctgctgcggctccctgagcttggtgtgggccgcgccatctctcccgacgacagatgtcctcttcgagtcaaatcggtaatgactcattccagctccaggtaaccccagtgcacctgctacctttatcccataccacgaggaagaatccagaaatgtatgaccttcctctgttgatcttcaacccgcaggagtctgccatcctccagctcttccaccaggatggtgagtgtctgcactgcagcccaatcgtgggtgattggtgtcatctcggacacagccaggcttgcccttcattccatgttccaagtggcctttttgtgccttctctgctgtgtggagctgcttttggacgtttagttgccaatgtcctaaaaaggtactctgtgtgtgtgcgtgtgtgtgcgcatgtgcatgtgtgtgcacgtgtgcgtgtgtatgcatgtgtgtgcgtgcgcatgaccatcagcctcacggtcatcctgatcgagtccaccaatgagatcacctacgggctccccatcatggtcacactgatggtgagcacactccctccaggcccctgtcaggctcagggccacgtccgccccacaggacctatttttaggtctttgctggaatgggagacagaggtggaaatggacaagtaaggccatgattttgctcatgtcctagtttcagaatgtataagctctgaggcctaaggaatgttgttattagggggagggccagacaggagtttattttcaactttccgggctgtatggtctctgtcacgactactcgactctgtcattgcagcaggaaagcagtaagcgtgacggacttgatcagtgggctacagtttgctgtgccctgatctaaagggggacccaagtgctgtgtttatcctgcgcaccacggtccaccatgccttcccggtggtcacagagaaccgcggtaacgagaaggagttcatgaagggcaaccagctcatcagcaacaacatcaagttcaaggtaaagaaaacggcatgagaggaaaggcaggtgagagacaagcggtcccgtctcacacggcttagtgctttgcccatacggaacatgtgtgatgagcacatcgcctctgaggagccagccgagaaggaggacctcctgcagcagatgctggaaaggaggtgagagcctggcggggcccccactgcccgcagggctacacagcggtggggtgagcctttggctcagatgttgtgactgaccttccacggcctgatccttcggtcgcagcttgtcaccctgcttgtccgaggagtttgttactctgaaagccagtcggtaagtctctccgaggcagaaatcagccaggccagacctgacgaagctcgaggggttgggcgctgccggcgggccgacctgacgctgctcaacccgcgcatgatcgtggtgagaagggctgccccggcctgtcccatgcggagctgcctcttcatgccgttggcgtctcaggcagtcagtgacatcagaacgatgggcctgcgccacctgcccgtggtgaacgctgtgggagaggtgagcgaggccccggccctgcccccacctttgagagaggatcccctagccaggtgctgtttgtgcacccaggctttctgacagcccagcccaccctctcctggtgctgcctggggaggcaaatcatgctcactccggcgggcacagctggctgggg

SEQ ID NO: 26657 - DNA, 457 bp, Homo sapiens
  SIMILAR (93)..(341): 281254mologous to Arabidopsis thaliana T6D22.27,accession number AC026875,Smith-Waterman Score=73.
  misc_feature (1)...(457): n = a,t,c or g
actggaggaaggaatgtacatcntgggaggcctctaagctccccagactcaaatgccagcagctcgccaagcgcaagcacttggcccctaacctgagcctgagggaacctgattctactctgcctcccaaagtgggtgatcctcgtgcaggggaggacagcatcggagatcacactgcttcacagagggatcttcagctgcaaggtcactgctgtactggggccacccttcctaagacagagagtccccagggccaggaggcacctgggaacccaaatggggctccacagaatacacgagcctccaaaaagtttagtattatgaagcatctgaatttttttctcttccagaatggctttaaaaagtagactcaggcccagagtcctcaggacatatcagaaaagctttgagagtgtcctgatccctgcaaagcctctaataaattggtcaattgggc

SEQ ID NO: 26658 - DNA, 371 bp, Homo sapiens
  SIMILAR (4)..(357): 271254mologous to Saccharomyces cerevisiae Ylr106cp,accession number U53876,Smith-Waterman Score=96.
  misc_feature (1)...(371): n = a,t,c or g
ngagatgaagatgctaaggaaacccagatagcttccaagaagaagctcagggagataagagagaaggattgggtggtgatccaggcactatggtggggaaaccggagacaagtagcaagtgaaatttatagagaatttgagatactatgttgggagaatcagaactggattggaggtgaacatagagcagaaattcaggcatcagagaagagagaccaaagaaaggatggatgtgaggatggcacaaatatcctggcacccgaggctgagatccaggaacaattaaaaggtgaaactgatgtggagactcagagcaatgagcctcttagagaagaggatggtacagacattcagtcactaggaagagcccg

SEQ ID NO: 26659 - DNA, 703 bp, Homo sapiens
  SIMILAR (445)..(269): 301254mologous to Schizophyllum commune pheromone precursor Bbp1(3),accession number U74495,Smith-Waterman Score=65.
gccctttttttttttttttgcccaaatgaccaatttattagaggctttgcagggatcaggacactctcaaagcttttctgatatgtcctgaggactctgggcctgagtctactttttaaagccattctggaagagaaaaaaattcagatgcttcataatactaaactttttggaggctcgtgtattctgtggagccccatttgggttcccagggtgcctcctggccctgggggactctctgtcttagggaagggtgggccccagtacagcagtgaccttgcagctgaagatccctctgtgaagcagtgtgatctccgatggctgtcctcccctgcacggagggatcacccactttggggagggcagagtaggaattcagggttcccttcagggcttcaggttaggggggccaagtgcttgcgcttggcgagctgtggggaccaggacatcttggccagaaaggtcaggcccagctttgccaccgcagagtggagcctccctttgaagctgacaggttctgcagaatggcaggaaggctgctgcccaacccctctgcaccctgtagattccaggcttcctcttactccatatgtgagctgcctgcatttgagtcctgggagcttagaggcctcccaagagtacattcctttctccagtgggcgtggtctgccctacaaaaatgagtcccactctgcttggagcc

SEQ ID NO: 26660 - DNA, 1695 bp, Homo sapiens
  SIMILAR (1501)..(1629): 1001254mologous to Homo sapiens unnamed protein product,accession number AK024275,Smith-Waterman Score=220.
atgagctgtaccatcaagggctgcttgacggtgtttctcttctcccttctccccaggcggctgttgaagagtgaacttggatcattcattacagactattttcagaaaggcaatctcttccctcgctccctccctctgccttggggcaagtctccagcacagcctcacctgcaggatgagcaacatctggacaatggacgagggcagcttggactgggccagcagcagcagcagtggctcaaagtgccccaggtaccattccagctgttactctggagggagcaagctataagccttggtggcttccacatagtgctaagtctacaggtgcacagagtacaagagaaggaggctttgcagcttccacctagatttcagaagatgtatagaaaagcctgggtgcccaagcagaagcctaccacaggggtggagcccccacaaagagactctaccagggcagtgccaaggggatatgtggggttggagcccctgacacttcctagtggagccgtgggaagggggttcttgccctctagacccaagaagggtagagccaccggcttgcaccctgagcctggaaaaaccacaggcactcaactccaatctgtgagagcagacccaggggctggaacccttcaaagccacaggggcagagctgcccagggccttgggagcccatcctttgcatcaggtagggagagtctcagtgaagaagtggtcccagacttcagccagaacctcaatgcgattttcacctacaagagggcgagaagatgggaagggaggaagaaagaaaagagttcgtcattacttgtaggagaggccagaagacagaaccaaggtgaactccagcacctggataatttaccccaaagggcaaaaggttactccagcttctttgttgatgtcccttatcttaagccttctacaaccaagacaagcagaggccctcttgacctgaaggaggggaagaagagagaaccttgcaggtcagcactggtgcctacttactccccctttcaatgccaagacaggatgctcattggcacacaagaacaggccccaacacccagaactctaagactagaagagactcagagaatatgccaggcctggtgctctcaggccatgccagggcagggggacagaatcttggatgaactttgttcatcctgtctagccccatttctgagttttcactctgagtgtatctatgatgagggttacttgggagcccctttcctggacacactcgtgtctttcccagggaatgggaagaaacaaaaggatgatgacatgacacctaataagtctggatctggaagtaagtttgatctacggttcattaggctggagcagaaaaaaaagaaagggtccggatgctgcctgccagcaacacagccttgtacattggaggaggacaatcaggatttgttgagtgagaacctgctggtcatggcaatgaacactgacctttgtgtatcttggctgttcattttccagagtgttcacgagcccacaggcccaagtgagagttatttgcaactggaggagctggtgaagcaagtggtttctcctttcctcggcatcagcggggaccgtagcttctcaggccccacgtacacgctgggagctggaatgggccagagtttcaatgacactgaaggaaaacagtcttctgcagccccactctga

SEQ ID NO: 26661 - DNA, 628 bp, Homo sapiens
  SIMILAR (302)..(526): 391254mologous to Canis familiaris cyclin-dependent kinase inhibitor,accession number AF076469,Smith-Waterman Score=83.
ttccttttaatgtgttacaggggtctgttccaactaagagcttaggagagttggaagaaaaactgtttttcttcctctacactggcattaggcccaaacaatggtagcgttcctgccatggcccagctaacctgctgacgtcctgacagctccctggatgccccagtcccccaaaattcagtgagctgagcccagcaggaaggtggactcccagggagaccgcaagcaaccatggcaccccagctcagagtggggcttgcaagaagacttgttttccttcaggtgtcattgaaacgtctggcccagttccagcgtccgtgggaggaatgagtgaggaagggagggaggaaggagaagaacccagcaggcagcaggcttggggccagcaccctccgatctgtggtggctgtggttaagctggtgtctccagaaaaacatgagccagggtggtgaaaacctgccagctggccctggctcttgctgtggtagagaggcccaggaaggggcaggaacctcactggaggacgctcctttctttgaagctcaactactacaactccattaaagtgagaagagggggcatcaggttcccaatttgagtaatccatttctgcctctgcctcgtgcc

SEQ ID NO: 26662 - DNA, 809 bp, Homo sapiens
  SIMILAR (58)..(465): 301254mologous to Mus musculus homeobox containing protein,accession number X73572,Smith-Waterman Score=99.
gtagcaaggttgtactggaagaggccgagtctccatgcttgccacttcagagatccacgagccggcctgtcagagaaccctcgtctgctccaatgcagtccctcttcctcatcggggaatgtctggggaccgcatttgtatgcagttccttgtctgtaaaatgggaggattataccttcaccatggaactaccgttcgctaaacagcaccacgtcctctacctgctcttccttcgctgtggtgtcaagtccctcctgcccttgggtacagctgcccgggtcatgcttgctgtcaaggtccctcttacaacgtgtcgcctggagccaagcaccagtgccgatgcgttcagagcaggatcagctccagaagcctccacctccctcggctgggctccctgcttctgttcatgcgaacctctaaccaggcgatcgcaaggggtcagtatggacaccagctggggtggcccaaattccctccccctggccctgagaccagctttctccagaggaggtgggagggtccagcccacactgacggccgcctctgaggctacggggggcctgcagctgcagcagcagagaacaaggaggctctgtcggtgcagaggggtcgacatcgagccccggaaactccccggggagggccgccggctgggcagaaaccacagcccaaacgagggtaagggacagactaagcttctgccttcaggtgaaaagatgcaggagctgaccctcctgggcacctcgtccgcgctggtgccaggcacagcgcctgacatgtcgccttctgaaatctccccacagacctaa

SEQ ID NO: 26663 - DNA, 155 bp, Homo sapiens; identical to SEQ ID NO: 5291
  SIMILAR (155)..(102): 1001254mologous to Homo sapiens mitochondrial 5'(3')- deoxyribonucleotidase (dNT-2),accession number AJ277557,Smith- Waterman Score=94.
  misc_feature (1)...(155): n = a,t,c or g

SEQ ID NO: 26664 - DNA, 868 bp, Homo sapiens
  SIMILAR (400)..(543): 1001254mologous to Homo sapiens mitochondrial 5'(3')- deoxyribonucleotidase (dNT-2),accession number AJ277557,Smith- Waterman Score=280.
atggccgccctctgctccctgtgtttgggttatgctgtgcagtgttcgctgggtctgatgtcactttcttctcaccacctgcccttgcctgtttgcgtccagtatgcctgggtggagaagtactttggccctgactttctggagcagattgtgctgaccagagacaagaccgtggtctctgctgaccttctcatagacgaccggccggacatcacaggcaagtggcctgcgacagtgctggtggtgacagtgacccgcagtcagtccctgttgactgagcactggctgcgcgtgctgacggcctccttgccgcatctcgtgccatcctcacacccgctgcgaaggcgggcggctgcgctccaggtctccactgctgagctgaatgccgctttcccacccacaggggccgagccaacccccagctgggagcatgtcctcttcaccgcctgccacaaccagcacctgcagctgcagcccccccgccgcaggctgcactcgtgggcggacgactggaaggccattctggacagcaagcggccctgctgagctggactgtgcttcgggctcctctgtggggctctgatctcagggctcccagctcggggcctgtggggccagttatgctggtctgggagtccctcctagactcctgggccccatgacctcctgctgcatgtcccttcccttccccagccctgccaggccttaacctgatcacggggcagggctgggccttctggggcttgggacatagacacgtggtcccagggccgtttcagcctgaacctcaggcaggcaggcaccaagctgccagaagcccagggggttcagggacagggaggagttgaggccattgtttcaggggggc

SEQ ID NO: 26665 - DNA, 330 bp, Homo sapiens
  SIMILAR (13)..(201): 981254mologous to Homo sapiens GL002,accession number AF226047,Smith-Waterman Score=317.
atgaatcagccggctattcctcagtatgctattccttgtcactccagctccaatgtggtggtggagcccagtgggcttcttgagctaaacaacttcactagtcaacagctggatgatgaggagacagcaatggagcaggacatagacagtagcacggaggatggaactgaccccagcccttctcagagctctgctgaacgggattttgccgatttcggaaccaccatcaaacaggattttcgcctgctggggcaaaccagcgtggaccgcttgctgcaactctctcagggccaggcggtgaagggcaatcagctgttgcccgtctcactg

SEQ ID NO: 26666 - DNA, 1971 bp, Homo sapiens
  SIMILAR (858)..(550): 661254mologous to Homo sapiens GL002,accession number AF226047,Smith-Waterman Score=282.
accatccaacaaggattctttaatgccagtattattctaggtgtttataaactaattatgaactgagaaaatgtaaaattttaaccaattcaacacttccagggatttgcaaaaacatacaagtttttaaaaaacttttcctgacacatcatttcaaaatacaactattcacattctccttttagatggtattttgctcagcagaaaccagttgagaaacattcacaggaagtctctttccactgcaagacaaaactgtttcaccggccatgatccaacagagaaagaagaccaggtcttaagtcactgtaaatgtgcagctttttttttttctttttcatttttttttaaaaaagtacattcccctgggagttttatcttgttttaaaaagctgctcctgcagcaacattttgttgaaacactggtgttttagggtccacagcctaagtacgggcaaagggctttttttagtcatcaaaatacaagggtttccctggacacttggtaaccaagcaggttttaaagtgcactattgtgtccaaacactaggaccgttcagcagagctctgagaagggctgggttcagttccatcctccgtgctactgtctatgtcctgctccattgctgtctcctcatcatccagctgttgactaggtgaagttgtttaggctcaagaagcccactgggttcccaccaccacattgggagctgggagtgacaaggaatagcatactggaggaatgccctgaatgataatttctgctggactctcttcagctttcttttggcctacattctgaatacgccatgaacttggcctgtcgcaggcactgcttggtggatcaattttccttgtcggttagggaagagccaacagtggatggactcgaacaggactctctacatttctgttgctggggagtggaattcgccatccctgccaccaccatgtgggtggagggtaatgatcctgcttcaccagtgagcatgctagtggcaagagccttctttgggggatccactatcatatgttctacatttgtatcaatctgagcttccatcaaagacattttcaaaatgtcagacactgctgtcttctcagaggcctgaatgggagatatgcttgtaactggtgatgtcagcttaggcacagaactgccaccagttatctttgtaactgtgggaggctggcgcccctcaaaagttatctttgtaacagaggatccttgggttataattggctgctccacctggcttgccgtctgtttctctgaagaagctgggagcgacatttggctctggggggtttggggttgcacgtagatttttggttggttcggagcctgctgcagtttagggagctgctgcgtggttttcactgcaagcacctgtactacagtttgcgggggctgtgccattaaggtaggaagctgcctgtctttggccaccatgggatgctgtgtgtgctgtacatctggcttgggctgtgcttgttcttgctggagaggggtgagtttttgatgcctgatggaaagctggggcatttgcgggagtttgtgctggagctggtctgcctgcaggtggatggtctgcttctgtttagtctggaagcactgcagagttttcacttgcagctgagtctgttccagcgggggctggctaagtttctgctgtttagctgactgtgactgagtcagggcagatcggtaaaacagacctgtctgagggtctaaagtgtccatctcttcaacctcgccctcctcagttccaagttcctcgctgtgtttggtaaaagcagtgtgactgcttaatgcctgctgcataatgtgggtgattgctccaggggaagatgctgggatggacttcaccaccaccgaagtctgtgttgcggtccctccctgagccacatgctggagcagggtacgctggggctgggaaggctgttggggctgggaacgctcgcacgcgc

SEQ ID NO: 26667 - DNA, 1410 bp, Homo sapiens
  SIMILAR (1)..(1407): 981254mologous to Homo sapiens nuclear pore-associated protein,accession number AF107840,Smith-Waterman Score=2368.
atggccaaaagaaatgccgagaaggaactgacagataggaattgggatcaagaagatgaagctgaagaggtgggaacattctccatggccagtgaggaagtcttgaagaatagagccataaagaaagcaaagcgcagaaatgttggatttgaatctgacactggaggagcctttaaaggttttaaaaggtttggtgggtacccttctgaagaagaacgcttttctggatttggtagtggcgctggagggaagcctttggaaggactgtcgaatggaaacaacataaccagtgcccctcccttcgccagtgcaaaggcagcggcagatcccaaggtagcctttggttctcttgctgcaaatggccctaccaccttggttgataaagtttcaaatcccaaaactaatggggacagtcagcagccctcctcctctggccttgcttccagtaaagcttgtgtcggaaatgcctatcacaagcagttggccgccttgaactgctccgtgcgggattggatagtgaagcacgtgaatacaaaccccctctgtgatctgacacctatctttaaagactatgagaaatatttagcaaacattgaacagcaacacgggaacagtggcaggaattctgaaagtgaatctaacaaagtggcagctgaaacacagtctccttccctttttggctcaacaaaattacagcaagagtcaagctttttgtttcatggcaacaaaactgaagatacacctgacaagaagatggaggtggcatctgaaaagaaaacggacccatcatcactaggagcgacaagtgcctcatttaatttcggcaagaaagttgatagctctgttttgggctcattaagctctgtccccctgactggattttctttctcccctggaaactccagtttatttggcaaagatactacccagagtaaaccagtctcttcaccatttcccactaaaccattggagggccaagcagaaggtgacagtggtgaatgcaaaggtggagatgaagaagagaatgatgagccacccaaagtagtagttaccgaagtaaaagaagaagatgctttttactccaaaaagtgtaaactgttttacaagaaggacaatgagtttaaagagaaaggcataggtactctgcatttaaaacctacagcaaatcagaagacacagcttttggtgcgggcagacaccaatttaggcaacatattgctgaacgttctgattccacccaatatgccatgtacgcgaacagggaagaataacgttcttatcgtctgtgttccaaatccaccaattgacgagaagaatgccaccatgccagtcaccatgttgattcgggtaaaaaccagcgaggatgcagacgagttgcacaaaattttactggagaaaaaggatgcctga

SEQ ID NO: 26668 - DNA, 1397 bp, Homo sapiens
  SIMILAR (870)..(1397): 841254mologous to Homo sapiens bK217C2.1 (nuclear pore- associated protein, 60kDa (rat)-like),accession number Z82243,Smith -Waterman Score=746.
aggaggagctgatcaaaagctggagcactcagggaagacttactggagaaggtgagatgggctttggaagataaagtaggggttcaggccgtgagaaatttcctgcccaactttcttaccaaaccctgttgggtaaaggcccaattgaaggaacatccctatcaaaccttgctcagcaaaggtgcaaggaacatcactgtcactttctgagggaacaagggccaaactgcctgatcatagaacgttttatggatagatatactggtaagtatattcacatggcaagccatacgacgcgttgccggccccacgtgagccgacgccccaaagcgcggctgctggcgccggctacgagatcaaggtcggcgcgtgcgcgcttgcgcgagacccgtgttcggcgcggttcccccagctgtctctggctgaaccggcgctctcgcctccctgccgaacacagcgtgaggagcccccccagggatatggtgtttgagtctctgggcttgccgagcactaagtcctctgagttccgcagcgcagcaccggaagcggccgagcgcgctcagcccggcgacccctgcgggctccagacccctgcgccgctgcgccccgggtttcgccgcaaccaagacccagcgagtgcagcggcggccgccgaggaggtgaggagcggcggcgggcgcgggaggatcttagcgaccactttgtggggttgtaatacactctgtattacacaatacaccagaataaggaagcttactctggtgtattgtggtgttgagagcaaacaagagtggggagagtatcacgaaggagttcaggcaggtttaacaagacctggcaggtccccaaaactaatcagtaagtttttggagaaggaactgacagataggaattgggatcaagaagatgaagctgaagaggtaaaaagcagcttccctaagaatgattaagtcttgaagaatagagccataaagaaagcaaagcgcagaaatgttggatttgaagtgagtgcccccttacagctcttgctatttaaaggtttggtggtaccttctggaggaggacgcttttctggatttggtagtggcgctggagggaagcctttggaaggactgtcgaatggaaacaacataaccagtgcccctcccttcgccagtgcaaaggcagcggcagatcccaaggtagcctttggtaagtagctcccatcccccagccgcctcttggttgataaagtttcaaatcccaaaactaatggggacagtcagcagccctcctcctctggccttgcttccagtaaagcttgtgtcggaaatgcctatcacaagcagttggccgccttgaactgctccgtgcgggattggatagtgaagcacgtgaatacaaaccccctctgtgat

SEQ ID NO: 26669 - DNA, 864 bp, Homo sapiens
  SIMILAR (469)..(723): 751254mologous to Mus musculus synembryn,accession number AF288813,Smith-Waterman Score=335.
atgcagcctcaggcaggtccttcagggggtattccagaaggcattgctatcacaggagatgacagctccatgcatgccattgcccctgaagaccttccagtgggacaggatgtggaggcggaagacagtgatactggggatcttgaccctgcacagagaagagccacgaaaggacttaaagtagaaatccgctttttgaaaaacacctctgtgtgcagtggagaagatggagccatctgtcagtgctattcaccttctgacattccatataacttacttattaagtctgttttctcctccaaaaacaatgcagtcaaccttttaagcaatgttccagtctcttgtttggatgttctcatttgtccgttaacccatgaagaaacagcccaagaggcaacgactatagatgaactgcccagtaataaaacagctgagaaaggttttaccaccgtgaagggatgtacaaatcgacctgaagttggctcaactgtgagaaataagctggtgcgcctcatgacacatgttgaccttggagtcaagcaaattgctgctgaattcctttttgtcctttgcaaagagagagtggatagtctgctgaaatacactggctatgggaatgctgcaggactgttggcggccaggggcctcttggctggaggaagaggagataattggtactcagaggatgaggacacagacactgaagaatacaaaaatgcaaaaccaaagccaccacatgggctgtaccggtcgcctgtcacgcacgagttcatcgctcagcggtttcctataccgtataccagcattcctccactctatgtgctaatatacacagcgtgtgggaaacggcatcttatgatataa

SEQ ID NO: 26670 - DNA, 582 bp, Homo sapiens; identical to SEQ ID NO: 11033
  SIMILAR (501)..(313): 791254mologous to Homo sapiens elongation factor-1- beta,accession number X60489,Smith-Waterman Score=268.

SEQ ID NO: 26671 - DNA, 417 bp, Homo sapiens
  SIMILAR (417)..(280): 591254mologous to Homo sapiens HDCMB45P,accession number AF068294,Smith-Waterman Score=126.
tcacctaatcacaagattcttagaacgcttccctcttgttaagggctgcctgactgtatacttgagtctctcagaaaaaccaataacatactgagcagtcttgactgtgtttaggagaggtgtggaaagggagtttttttctaactggtacaaaacggcctggagtttttctaagcttgcacaaaaaggcttgctatcatcataaccatcatcgttatcatcatcatcatcatcatcagacaaagccgtaacagcaggaactgaactgtgagaacatgccacagtataactttcaaaatgggagtcaatcctatcaaaccctgctgttactttatcaactaagtttatgtaatattctaaattttttgttgtcatttcagtaatgttcatagcatcttcaccagagacagacttcat

SEQ ID NO: 26672 - DNA, 814 bp, Homo sapiens
  SIMILAR (231)..(139): 1001254mologous to Homo sapiens unnamed protein product,accession number AK001482,Smith-Waterman Score=170.
ttatatcataagatgccgtttcccacacgctgtgtatattagcacatagagtggaggaatgctggtatacggtataggaaaccgctgagcgatgaactcgtgcgtgacaggcgaccggtacagcccatgtggtggctttggttttgcatttttgtattcttcagtgtctgtgtcctcatcctctgagtaccaattatctcctcttcctccagccaagaggcccctggccgcgcaacagtcctgcagcattcccatagccagtgtatttcagcagactatccactctctctttgcaaaggacaaaaaggaattcagcagcaatttgcttgactccaaggtcaacatgtgtcatgaggcgcaccagcttatttctcacagttgagccaacttcaggtcgatttgtcacatccctcaacggtggtaaaacctgatctttgagaaattttcggatgtttcgatgggctcgggaacattcggttaataagctgagaactggagttagaccctctctatagctgcttcccttgtctattctcttctccataaaattcagtaaaacatgaatggcctccatattcataccattgtataccatggtattgtttttcaaaactgtttctttctcagctgttttattactgggcagttcatctatagtcgttgcctcttgggctgtttcttcatgggttaacggacaaatgagaacatccaaacaagagactggaacattgcttaaaaggttgactgcattgtttttggaggagaaaacagacttaataagtaagttatatggaatgtcagaaggtgaatagca

SEQ ID NO: 26673 - DNA, 1530 bp, Homo sapiens
  SIMILAR (1104)..(967): 761254mologous to Mus musculus synembryn,accession number AF288813,Smith-Waterman Score=182.
tcaccagtcttgactgtggttagaagaggtgtgaaaagggagtttttttctactgggtacaaaacggcctggagtttttctaagcctgcacaaaaaaggcttgctatcatcataaccatcatcgttatcatcatcatcatcatcatcagacaaagccgtaacagcaggaactgaactcatttcgattttcactatcacaaccaagcctgcttgctgtctttctcttcctccgcccttaaaccttagggacttcttttctctctcagcctttgaaggtggtatcatttcaggaggagagaatattgatgccagttctacaggctgtacaggaagcaaggcagcatctttccggggaagcctcaggaagcttttactcatggcagaaggcaaagctccacctccaacttgtctccatctgctgccttttggcagctgggtgagctcttggttctgatctttgagaaattttcggatgtttcgatgggctcgggaacattcggttaataagctgagaactggagttagaccctctctatagctgcttcccttggatgtgacactgctgagaataccggggccacagtcatcctgggtggcggaacatggttccaccccagggaaaagcaaaccaagggagatcaagggttgctgtacctttacttcagttgagctgtcagccagttctacaggctgtacaggaagcaaggcagcatctttccggggaagcctcaggaagcttttactcatggcagaaggcaaagctggagggagacaccttatgtggctggaaagtttatcaagcatgttgacaagtttcatggcttcatattctttttgttcttctgtcatttcatctatggggtttggcattggttcctctaaatgaccagtgataagattaatgtttttggaggagaaaacagacttaataagtaagttatatggaatgtcagaaggtgaatagcatatactttggtttggcattttgtattcttcagtgtctgtgtcctcatcctctgagtaccaattatctcctcttcctccagccaagaggcccctggccgccaacagtcctgcagcattcccatagccagtgtatttcagcagactatccatcccaaacccagagttgtttagttcacaggttaggagccaatggttcagatgatcttttctccgaacattctcattctcatgagttaaatgagctctttcttgcctttctccaagatcaaagtgtgtttcttttatctttgaaatatttcttgagtccatccccttttctacgtctactgccagtgttctaatccaggccctacttgcccctcccaggtagaggcaacagctttctgtctggtctcttctgtctgtccctgcatcaatccattctctatacggcagccagagtgctcttcctggtggggtccttttcatgcctgaaaggctgctgctcatgtgtccaatcacgagacatgggatagctgtttccatcatactcaacaacttgtgttctgtaaaccttttgcccat

SEQ ID NO: 26674 - DNA, 424 bp, Homo sapiens
  SIMILAR (14)..(244): 1001254mologous to Homo sapiens ribosomal protein L23a,accession number U02032,Smith-Waterman Score=385.
  misc_feature (1)...(424): n = a,t,c or g
acccacgcgtccgccgctgaccactgagtctgccatgaagaagatagaagacaacaacacacttgtgttcattgtggatgttaaagccaacaagcaccagattaaacaggctgtgaagaagctgtatgacattgatgtggccaaggtcaacaccctgattcggcctgatggagagaagaaggcatatgttcgactggctcctgattacgatgctttggatgttgccaacaaaattgggatcatctaaactgagtccagctgcctaattctgaatatatatatatatatcttttcaccatannnnnnnnnnnnnnnnnnnnnnnnnnnnnnnnnnggggggggccttttaagggttccaaatttaattaaggggggttgccaagaaaaaatttttttaagggggccccaaaaataaacccccggg

SEQ ID NO: 26675 - DNA, 669 bp, Homo sapiens
  SIMILAR (298)..(462): 721254mologous to Homo sapiens ribosomal protein L23a,accession number U37230,Smith-Waterman Score=188.
ctaagaaggcaaattggtctttggcaccttctccaatgctctgaagggctccctgcccacaccttctttaaagacctttgggaaccaaaatgattttttgtctgtaccagtcaaggctgccactttacaacagctgagagcagtgtcagttgattgatcgtcactgtgcatgtgaatcacctgggggtcttgataaaccacagattccgcatcagtgggtgtggggtgtgcgggacagactgcatttctcataaatttccaggtgctgctgatgctactggtccttcctggaccacacactgtgctgtcatcacgttttcgctgactactgggtctgccacgaagaagacagaagacaacaacacatttgtgttcaatgtggatgttaaagccaactagcaccagatcacacgggctgtgaagaagctctgtgacattgatgtgcccgaggtcaacaccctcccaaatgtctccattagttttcgctttcttctgtgttccacagtgttctgtactttgactgtgttctttcttagagaaaatggctgaccaaaggtagccttgaacccaagtcttcttgttcagtggttgtgtaatcaggtgatgggttattcctgtgtgctgtcgtttttcagctgttattggtggcttgagaaggcacatgtgcat

SEQ ID NO: 26676 - DNA, 627 bp, Homo sapiens
  SIMILAR (448)..(377): 751254mologous to Didelphis marsupialis protamine 1,accession number L17007,Smith-Waterman Score=89.
ttattttgattgaaaacactctgaaattatctgatattttgtaatggcatcagttaaactgtgagctggattccatctttctgcagtaacagcgggcagaaccatttcagttagcatgtgcctcactttaagaaagtcagtggtcactggtttaaagggtatcctttctcttgctagtggaggagtgggtttccgagtgagccagtctgggagcctctggtcctgctttgcagcagcgcgttccatggctgacctgcctgggggtgaagtggcagcctcttccttcagtttgatggcgtcaatctctctcttagctttgggataatctgaaaccataggggtctgccgttcccagactacatcccagggacctatttcctcttcttcttcttcctctttttctccttctcctccttttcctcctcctccttctcctttccagcctccggtaaccacaattctactctctatttttatgggatcaacttttttagcttccatataggaatgagaatgggtggtatctttctgtgcctgacttgtttcacttgacacgatgtcctccaggctcatccgcatagagaaggaagacaggatctcctttttcatgactaaataggattccat

SEQ ID NO: 26677 - DNA, 1830 bp, Homo sapiens
  SIMILAR (85)..(38): 871254mologous to Leishmania major probable (hhv-6) u1102, variant a DNA, complete virion genome,accession number AL160493,Smith-Waterman Score=87.
  misc_feature (1)...(1830): n = a,t,c or g
cctggccttaaaangggggcctataattgncaaaccttacacacacacacacacacacacacacacaccccaacacacacacacaaccctcaaaccccgggttaataaaaagaagcctttgtgggatccagagtacacccctcacttgggtcccaagaatcctaattgtcaacattaggcaaatagaccccaatgaatgtaacccaggaagagaattaaactggttgggccnggaatattgtatttgcataatggatatgccttatttgcaaactaatcctcccaactgtttgtcccagtactaattcaactgactcatcttcctaaatgtataggacaaagcctttaaaaagttaagctcttcagcaacgaaaagttaacaccatctaaaataaatagattttaaaatatatgtaatgaaattacaggtcactggaaattcaattctacaatgaatataaattaacattaaaatctattaagtactattcctgggaagattttggttcagaggttttatttttttaagggcttaatatttgtggaataaattgggcatagcttagaaacccttacaaagttgtaagtagactaggaggtaaggattatttggtgacaaggatacaaagaatctgtttctatgtccaaaataatggcttacctcattttagttaatagaagtattcccaaaaagttgtgcaaataggctttttataactggacgcttattttaagtatactagaggcccagggttgtaaaaagaaaaacctgtaagtcaactccctcctaaataaactgaaagaactcctaagtgaataagccccctgtccctacatcctgccacagtggacggcatactcccaggcactcataagtgtttgttgaatgcatgaattcgctctgacagttttttttttcccctacaggactttcttaaagtgaggcacatgctaactgaaatggttctgcccgctgttactgcagaaagatggaatccagctcacagtttaactgatgccgattacaaaatatcagataatttcagagtgttttcaatcaaaataaaatttccataagtatgagtgtatgtatttttgaggaatgttgatctatgattggcagaagcttttattgttaactcactcactgaaaacaactgcttgagctgaattctatttcaattaacaaccaaggcaagtaaagcactttacctaacttcagaaataccaccagaaaccattccacttctgtaacagcttcttcccctcactccagcacaaatatttaaatgctgtccttaccttagtccacaaaagcaaaacatgaattacaaagctaagattaaattagaaagctgaccgacttaaatatggacaaagtttttttagccttaaaataagaactaagtcaaatacattcaacaaaagtaactcttaaaggcaaatttttttcttatttggtgttttcttcccttcccatttaaatttaagactcaatttttaataatattcatatgtccatttttctaaataatatatcctctttaaaacaatacagaatgcctagcagtgcaacctatgtgtccacataaatatgcaacctgccacataaataaaataagaggttttatcagtctatttatccagcatttgtaactgcaaaaaaggctggaaaaatagctaagaatatttttatgcaagttttggggaggactgaacactggtaaggattcactgtagggctccatcattataagtttcctaaaaagtagtgtgcaaacaaaatatctgaacacagaaccctaaacatactagatgtatgtgtgggta

SEQ ID NO: 26678 - DNA, 931 bp, Homo sapiens
  SIMILAR (260)..(511): 841254mologous to Homo sapiens HS1,accession number X57346,Smith-Waterman Score=380.
  misc_feature (1)...(931): n = a,t,c or g
cgtggtggaattcccggagccggggtannnnnnnnnnnnnnnnnnnntgcagccactgcaggcaccgctgccgccgcctgagtagtgggcttaggaaggaagaggtcatctcgctcggagcttcgctcggaagggtctttgttccctgcagccctcccacggcagagtctccagagatttgggccgctacaaaaagtgcattttgcccattcggctgtggatagagaagcaggaagagcactggacgtggagtcagggaatgacaatggataaaagtgagctggtacagaaagccaaactcgctgagcaggctgagcgatatgatgatatggctgcagccatgaaggcagtcacagaacaggggcatgaactctccaacgaagagagaaatctgctctctgttgcctacaagaatgtgaaaacagagaggaatgagaagaagcagcagatgggcaaagagtaccgtgagaagatagaggcagaactgcaggacatctgcaatgatgttctgtactctcccccttttccaatggatgtggcttcctgtgagcagactgctgtgattgttgtgtctcttctggggtctagctgctcagcgagtctacctggctctgggctggtactgggggttgtctgcacagagtcctgtgatgtgaaccatctatgggtctctcagccagcaataccagcgcctgtttcagtggcgatatcggagggtgcaatggactctgtgaaggtccttagctttggtggtttaatgttctttgtgctgattggcctcttgccaggaggtggagctttccagaaagcatcagctgtagtagtgtggagaggaattggtggtgggcagggtcctagaactcccttgtcttccactaccagggtggataggaaaggaccaccaggtgggggtggggctaggagtgtctga

SEQ ID NO: 26679 - DNA, 1128 bp, Homo sapiens
  SIMILAR (381)..(1007): 621254mologous to Homo sapiens HS1,accession number X57346,Smith-Waterman Score=574.
ccctttataatcgccgccgccgccgccgctgcagccactgcaggcaccgctgccgccgcctgagtagtgggcttaggaaggaagaggtcatctcgctcggagcttcgctcggaagggtctttgttccctgcagccctcccacggtgagtgcggcgcggggtccgaccggggcccccgggggcccaaactcgaagcccctctctggctgctgcgacgacgggtttaaccttgggagacagcagtgggggaaccccctcccattttgcagtaaaaccatttcatcatccttgcactggacttggagtcaggtaaatttggttgaaatcttgcctgcaatattttctagctttctgaatcttcagcatgttaatctctggttcttggctgcagccatgaaggcagtcacagaacaggggcatgaactctccaacgaagagagaaatctgctctctgttgcctacaagaatgtggtaggcgcccgccgctcttcctggcgtgtcatctccagcattgagcagaaaacagagaggaatgagaagaagcagcagatgggcaaagagtaccgtgagaagatagaggcagaactgcaggacatctgcaatgatgttctggtaagaggccagtgcttctgttttgaacagtggtttctaaatagtattaatttaatgtataaatgcagactctcaaattattttaggtatctttctgaagtggcatctggagacaacaaacaaagtaagtaatatctttaaaaagaaattcgaccagtaatggagccagtcttctttcacagggactttttaacgattttaattcgtcttggtctggcactaaatttctcagtcttttactatgagattctaaactctcctgaaaaggcctgtagcctggcaaaaacggtgagaaagaccctttgtgatatctaaccatagcaaaacagtgcttgtgttattaacttcattttattcctgaacatacttagggacaatctcactgtaagtactacttccacagggtttatagtctctttcctattcacctacttaataattcactgttatcttcaagaggtctgttcagtgtcactctgtaccctcaacatatatcccttgtgcgataaaaaaaaaa

SEQ ID NO: 26680 - DNA, 601 bp, Homo sapiens
  SIMILAR (211)..(600): 631254mologous to Homo sapiens HS1,accession number X57346,Smith-Waterman Score=330.
cggaagtggcgatcggagcggaagtggagctaccgccaccgccgccgccgattccggagccggggtagtcgccgccgccgccgccgccgctgcagacactgcaggcaccgctgccgccgccgtgagtagtgggcttaggaaggaagaggtcatctcgctcaggagcttctctcggaaagggtctttgttccctgcagccctcccacgggaatgacaatggataaaagtgagctggtacagaaagccaaactcgctgagcaggctgagcgatatgatgatatggcttgcagcagtgaaaggcatgtcacagaacaggggcatgaaactctccaacgaagagaagaaatcttgctctcttgttgcctacaaagaatgttggtaggcgccccgccgcttcttcctggccgtgtcatctccagcattgagcaagaaaacagagaggaatgtggaaggaagcagcagatggggcaaagagtaccgtgagaagattagaggcagaactgcaggacatctgcaaatgatgttctggagctgttggacaaatatcttattcccaatgctacacaaccagaaagtaaggtgttctacttgaaaatgaaag

SEQ ID NO: 26681 - DNA, 518 bp, Homo sapiens
  misc_feature (1)...(518): n = a,t,c or g
cacgacggtgccagggacccgcaacgtgggccaccttaacaaagcatccggtggaggaaaactaaggntcccggtgagcaagaggaaaggagcccagaggtacctgggagaggatataaataagaaagactggaaaacttaaggtacaaggagtcataacatttagatgttaaagactccgtaaaggttcacactactggaaatgatttttttaataaaccaattctgttcaacaggttaatgacactagtccttttcatgaagctgatgaaatcaagttttggtcagcattcctttcttcttacattcgaaaactacataaaaactgtaccatttattaaagataaaaaaatgttttggatgcacagtccaactatggaacactgtagcagtctgtttactaatctcccttaatggctaaaatcagagtgaatgttatgctcattttctaatgttataataactccagaatgtcaaattcttacattttcttttaaatagtgttgaaggcctcaata

SEQ ID NO: 26682 - DNA, 1103 bp, Homo sapiens
  SIMILAR (383)..(826): 681254mologous to Mus musculus QKI,accession number AJ012812,Smith-Waterman Score=486.
aagaaaaggaagagaaatggaagctataaaagaaaaactaagccagaaaattatttacctactattaacaggtgggtttaacagaagattagaagcatttgaagagagaattagtaaactggaagatagctcagaagactttatattttaagagctgtaagttccagcaagtgaataatgtatagtgatccttttttttttttctcagtttaattttgttgggagaatccttggacctagaggacttacagccaatgtaaataggtatttagagttacacaccttgtatggctacatgaatttatttatagttagtattatgaaagatgtgctctctctttaaagagaataattttaatcatgtactctgtaaattttttaggaggagcaaaatagaggcaagcccaattgggagcatctaaatgaagatttacatgtactaatcactgtggaaggtgtgtagatatagctattatatttgtggacagtctcaaatgctttcatctcatgtgttttccatgtataggcagaaggagaagacagatactgctgtctctatacttctttctaaatttctttgcttactgtagcagcccttgccttttctcttgcagcaacagcccaggctgctccaaggatcattactgggcctgcgccggttctcccaccagctgccctgcgtactcctacgccagctggccctaccataatgcctttgatcagacaaatacagaccgctgtcatgccaaacggaactcctcacccaactgctgcaatagttcctccagggcccgaagctggtttaatctatacaccctatatttatatcatctccaagtacctctggctcctttcctcttgctcaccggaaccttagttttcctcaaaatggaagtgctcaataaatatttgttgagtgaataaatgccactatatcctgtttcctacctgtccctagagaattgtcaagtcaactgatagacttagccctgatattggtgtcgaagccagttggctggctggaaggccggtgaaggcagcaagtcgctcacaggttctaaagtgcaccagagcctggttcgtgcatgttatcaaggccgtgc

SEQ ID NO: 26683 - DNA, 4110 bp, Homo sapiens
  SIMILAR (60)..(503): 851254mologous to Mus musculus qkI-7,accession number U44940,Smith-Waterman Score=619.
aagccgaagcccaccccagattacctgatgcagctgatgaacgacaagaagctcatgacagcctgcccaacttctgcgggatcttcaaccacctcgagcggctgctggacgaagaaattagcagagtacggaaagacatgtacaatgacacattaaatggcagtacagagaaaaggagtgcagaattgcctgatgctgtgggacctattgttcagttacaagagaaactttatgtgcctgtaaaagaatacccagattttaattttgttgggagaatccttggacctagaggacttacagccaaacaacttgaagcagaaaccggatgtaaaatcatggtccgaggcaaaggctcaatgagggataaaaaaaaggaggagcaaaatagagggcaagcccaattggggagcatcttaaatgaagatttacatgtactaatcactgtgggaaggtgcttcaggaacaggggcaggaaatcaaattgaagagagcagttgaagaagtgaagaaattattggtacctgcagcagaaggagaagacagcctgaagaagatgcatctgatggagcttgcgattctgaatggcacctacagagatgccaacattaaatcaccatcccttgccttttttcttgcaggaacagcccaggctgctccaaggatcattactgggcctgcgccgggtctcccaccagctgccctgggtactcctacgccagctgggcctaccataatggctttgatcagacaaatacagaccggtggcatgcccaacggaactcctcacccaactgctgcaatagttcctgcagggcccgaagctggtttaaggtatacaccctatgagtacccctacacattgggcaccagctacatcaatccttgagtatcctatttgaacctagtgggtgtatttagggtgcggtggcttattaaagtttcggaagggcacgatatggcgtgttccattccttttaccaaagggtttgttgaccgcaggaccgaggccgccaccggcaactaacctatgaccttctgacctctgaactcttcacccaatgatgacctgaccatgcctgcctgctgatcagttaactggtaatcgcctttgcttgcctgtcgtcagtgcagcgagctgaggcacttgtccgttcgtcttaccatctaaccaaacaaaagacaaagaaattgttgtcctccaactcagctttttttttttttttttcctgtttgggtgaaagtggttctagaaactgcactgaatagtagtaaagcaataaggcccaattcatcccacagcactgatcatcttttaatatcccaccctaagcgaacggtaagaaggcctctcttaagaaggggagacagatggtccttaactactcaatgacagaggcagttactgtgagagacttctaggaatctttttcttctcatagcgaagtcaaagctctctctgaatgtactgtgtgatgatgcatcatgcatgaaccttcggtcagggatatcattggtgaagtgatttcaaaaagtattcaaaatttgatatgctgtttagtcactacagtgccctcaaagggcagaagttgcagccttttttatattgcctgccaaaatttgaagtattagaagaaagtgtgccatgagagaaaaacttaaggagttttgaaaagtaatgcaaataacaaaactgcaacactatttttaaaaagataaatatctgagttaaaattactgaatctttattttacacctaaaaaaatatgagaacaaggtacatgcattatgtgtcacattactgggcaaactgttcaagtatttttttttaaacctccctgtatagaaaaaaatcattaaggatgtaaaagccatgcttgcctatttgctgtatacatgtaatgaaattgtagataaagtgtagtgcattgaaacaaatgaacaaaaagtagatacttttactatacaagggtgctggtgcagaaaaaaatatatatatttttggaaatgtagcattttatactttcaagtgttataaaaaaaaagaaaaagaacaaagaaaccctttatttcattaaatgattttttctggtggttgtcaagaaacaaaagaccaaaagagcctttttgtctttcttttttattttttaagtattggaataagtctaaagaaaagaaagtgccttattttccttcatggtcattcagtcaagtgtctcataaagatcagctcctccctcagaatacaagttaatgcatgttactcagtcgcccagtatgtgaaagaagatatgagggagacaaatgagttgatagtttgaattataggatttttgccacgttaccttgatgcaaatttgccaaatctgatactgtgaaaagatttgataacttttctaatgcctgactagtaagttttaaaacatcattctttaaaagaatagtttaatacttttggttattccaatcttcaatgttaacccaaaggattctgagataaaaattatgtgtcatctaaacttcagtttacagacaaaattagagctttgttttatttggagaagggggatgcattcatttgattttgttttttgtttttaattaattgaatataataggatacctagcaaatgttttcacaaaagtgaatctttgtgattttcattctagaaaacaatgttttaaatcacccaaatttaatcacatgtctttatatcataccagataactggtgtagtgtatccttttactgtttcaataacctctgcctcccccaccccttaactttaaaagaatgtgaaaaactagcatcatagtgcatataaatactcaaccacatttcagcttaagcttctaatttctcaagaagttgaaacagttagttatgtagttgaagcaatttgtgtgcaaagcctacatctaaacacttgagtgaataatcattaactgctcagtaccagacgtggcaaatctcaagtgacagtggacccccccccccgcccagcttatcaactcgtcccctcttccacaccttcccagcatcacagtcagaggtcagcaggaagctgagtcattaccttcttggtgacctcccccaccatcttgtctcacttggaaaccgttgtcagtttatttactatgcaatagacattcattgttttgtatccagctagctttggtttaatatgccactgctttgtctttctgttacacatacagttttgatttatttacaatatatgctgtgccattttgatttttatattgtttggttggttgaataaatttgcgacactcaaacacttgaggtgatagttgttaaaaacaataccagtatttgatccagtttcatctcaactatgttatacctggacattttagatgtttatcaaaggtcttttatggggaagaaagtaaatgtatgaaataataaatgtgtgacatttatagggaatgttggctctgaacaaacttttgaaaacttggttgacaaaattttggatcaactgaaaaaagcatgacttttgaaatctctgaatgccttggttctcagtattatcattctttattgaatttatttcttattaaaatatgtagtttttaagactttttttctgacagtattatgtaattttttagcgtgggtagatgggagtgtcgcttgtatgttatcgtacagctgacatgtatttttgtctattctttattatcttagtttcatgctatgtatgtaccataaccaacctattgcctatgagaaacatgtaagataatgtatttacagccattgttacaagtttataatgtatttttctatcttgttttatatgtatgttatataacattcaaaaagaatttttttcttgattgagaaaaggatacaaaatgcaaaatccacaattttgataactgaaaattgccaattgttttgcagtactttattatattgggtgtcttgtcttttttgggcttttagttagctaatgaatgaatacattagacacttttgggttttagttgggattttacatagcttgcattttaattctttggttctttgctgtttctattaacccacagcattattttaataaatgttataataccaaccta

SEQ ID NO: 26684 - DNA, 1478 bp, Homo sapiens
  SIMILAR (1195)..(1305): 361254mologous to Homo sapiens Human secreted protein, SEQ ID NO: 6948,accession number G02867,Smith-Waterman Score=72.
ttcggcacgagctcagatcagtgttatttcagatattcagccagggcatctcttttccatcatggatgaaagaaaaggacattgttaagcttcctgaaaaactgctgttttcacaaggttgtaattggattcagcagtacagttttggtcctgagaagtatacaggctcgaatgtgtttggaaaactacggaaatatgtggaattattgaaaacacagtggactgaatttaatggcattagagattatcacaagagaggaagtatgtgcaacacccttttttcagatgccattctggaatataaactttatgaagctttaaagttcatcatgctgtatcaagtcactgaagtttatgaacaaatgaagactaaaaaggtcattcccagtctttttagactcctgttttccagggagacatcctctgatcctttgagcttcatgatgaatcacctgaattctgtagggcgacacatgtgggactaggagcagattgatatgtttatacttgggatactcccttgaagtaaagatcaaagtgttcacactgttgaagtttaactccagagactttgaagtctgctacccagacgagcctttcaaggactgaccggagatctccactgctgaccgagaacgaccgccactaccacattccagtcttttaagtccgctgggggccgaacagcagtgctcaccagtgacggtggtcacagttgcaataaagtctctctctgaaaccaaagctagcatttcagcatggaaggaattaggaccttttcttcaggattacaggtacactggatgcagccatgcattggatggtttttctttatttttcagtgatttcctctgaagcagctgcactgatacatttgggagttggtggcttgactttgtccataaggggcgtggccacttcacatgatggcgggcctttaagagcacaaagaagtttaatatggacaacaacaggaaaaagcaagaagaaaacaagtagggaaaaacagctaacctggaggagaaaggaatttcctttaaccctttatgttcttcattaaaaatcttatcttggactgatttgagggatttttagaaacatggccttattttatataagcattaccttcccaggaatctttgttgtatattaatttttgataaccatttgattaactttaaaaattaagtatatgtgtgtatatatacatatgtatgtttatatacacacatgtatctgtatagttttatatatacatatatacacatagacatacagagaaccactacttttgtaatagtgtacagtttgttttatatctctttacttttttttgttactattttatctggccagcgtaatagttttatttagattttttaaaattctgtagatgaaagcaaatgacagttattgaacagctacaaaactattaaactgtggtacatttaatgtgtaaaagaaaaaaaaagtcgacg

SEQ ID NO: 26685 - DNA, 517 bp, Homo sapiens
  SIMILAR (51)..(335): 531254mologous to Homo sapiens ribosomal protein L35a (AA 1- 110),accession number X52966,Smith-Waterman Score=234.
caagaaacagcaaacatgtctgcagggctgagccctgaggccacttttgctacaagtgacatttctggaaccacacggagcacacagctgttcttgaaattgacagatcaatgcccgagatgaaactgattttttatttgggaaacagatgtacttatgtgtgcaaagaacaacacagtggccctggcagcaaatcaaacacaaccatagtcatctggggaaaggtaacttgtgcccaaggaaagaacagcgtggtttgtgccaagttccaaagccaccctcctgctaaggccattggtcacagaatccatgtgatgctgtaccactggaggattcaaattcattgaaaagtaaataaatacaattttagggttgttaatttgaaaaaacatgtgggtatctaatttctatgtgttggcagggccaaacagtgaaacacggagcttcaaggcgaaggcagcttgttagggtccctccttctgacctgcccttggcagcacatagacaacctgtctac

SEQ ID NO: 26686 - DNA, 1038 bp, Homo sapiens
  SIMILAR (279)..(482): 611254mologous to Rattus norvegicus ribosomal protein L35a (aa 1-110),accession number X03475,Smith-Waterman Score=205.
atgtctatcatccatccagaactgaccctgaggggcgagcaggtagccagggtttcctggatcatccccacaatgtttgccccgctcctgactattcaaggctgtcccttacttgaagacaagtctcctcttgccactcagcaagttctgggaccactggctctgcgtggagcatttgagattcttattctatcaaaagatatcaaattcattctttttgccctcttggagcctggagaggcccatgggaacagggcttctgaaacagcaaacatgtctgcagggctgtgccctgaggccacttttgctagaagtgacatttctggaaccagagggagcacacaactgttcttgaaattgaaggtgtttatgcccgagatgaaactgaattttatttgggaaacagatgtacttatgtgtgcaaagaacaacacagtggccctggcagcaaatcaaacaaaaccagagtcatctggggaaaggaaagaggctcaggatggtgtcgactcagtggaaggcagagatgaagcctggaaagaaaccaggcccttgggggtgttactaacccactggaccgtgacccatctgaagcctgccctgtctctagactcagaaccaacacttgcaggtgtgtcagccacagcagtcagggatgctcttacaaatgcaggtctccacaaacagcagccaacacaaaccaccagaaactccacacagaactcttgcatgcatgagccagaagcaggtcacacagctgcccctagctacaatggcactggcacagtatttagtgagcacatcaccaccctacacgacccttgggtctggtcaaaatttatcactcacggttctggtggctggaaatccaagatcaaagtgccagcagattcaggttctggtgaggacccacttcatggttcacagggcctttttgctgtgtcctcgcgtgatggaaaagatgaggtgccactctcgggcctctttcatacagccactaatcacccctcaaaggccctacctcctaatccatcactttga

SEQ ID NO: 26687 - DNA, 1358 bp, Homo sapiens
  SIMILAR (1054)..(857): 451254mologous to Homo sapiens Human secreted protein, SEQ ID NO: 6012,accession number G01931,Smith-Waterman Score=119.
ttcgtttaatatctgtggattttatttgacttatgtctcaacatacaatatacacacataaagtacaagcagccaccgtaaaacatttttctgatgatatctctcattacttcaaatcctggtggaggaaggaggttcaagaatccatctcacaattaagacctcagggttgaagaggatcatcataaaaactatcagctgacaaccagctcttacacctgctctaccacacaatattattaatagttttctaatgaaaacaaaaatggatttcaggaaacccatgcctgaacattattttttgccctgtttgttttccaatggagtccatctgaaatggttctgtgttttgtttgtacaaaaaagaaataaggctgcctatagtcccagttagcatgtgaaaactctgccaagcacgaagatctcctcccagctcggatggattgctacctgggaaaatggaccgacccagggagtggcaggtcccaaggaagaagggcagtgaggctggacgtcacttgcactgttcgtggtctgtatagtcatccatgtccacatccgaatcaaagagtgagtgtccagtaaaatctgtgtctggggttctggaaaaactgttttctgctccctcatcttcaaaggtctctgtccttgagtaaaagctaaaatccagcagcggggtgtgggttttgctgccttcgctgctctcctcagactcatagatggtattgtcatcatcgtggtgccactctggccaaaatttcctccttatcctctcacagtacatggcaaggttgatcagctcacgtggggatacatctccataaacccattgaaagctaaaaatatcataagtcagctgggcacagtggttcatacctgttatctcagctacttgggagactgaggtaggaggatcacttgaggccaggatgtcaagaccagcagttacatgtgcaacatcgaaaaacagtttagactcagagcatccagccccagtaagccccaaaacctgaagaagagtgtagggcttgcctttgatcagccgttcgggtcttgtccctggtaaggtccacattgcctgtgccaagtgtccaaagacagtggcgtcaagagtggaaagcttgggccccatgatgtacttcttatcacctgagtaacgacgacagatttccttctgcctaactgccttcaaactgggacactggtccctcctaggtctccagcttgccagctcatcctgcagatcttgggacttgtcagcttccataattgtgtgagccaactccatataataaatcctaatggttcggtttctctgaagaatcctgactaatacaccttcgcagggcatcatatca

SEQ ID NO: 26688 - DNA, 556 bp, Homo sapiens
  SIMILAR (555)..(1): 1001254mologous to Escherichia coli N-acetylmuramoyl-L- alanine amidase,accession number L19346,Smith-Waterman Score=940.
gtcattgagcaaagtacgcaatttacgcgcgatggcgatggtgacatttttctcccgcgtaccaccggggccgatagcgccagggtcctgaccgccgtgtccggcatcaatagcgatgataattttatcgccagtgttagccgtcgcgcgcgctgccggacgcgttaccgtattactgctgataacacccgtagtgcggttactttccgttttaaacggattgcgcgccggttcgctgacgcgcggtgcgacaaccgcaggcgtttcaacgcgtttcgcaaccacgggcggcggaggaggcggtggcggcacatcggcgttaatcgtaaagacgacagtgtaattgctgccattctgccgcttcaccgcttcggttttaccgttttcggtaagatcgaccaccagccgtagcgtttgtgcatctttaggcgttccagagcgaatcgccttcaccagattattgccgctgaacaacaacggcagtccctgaatcacgcccgtttgtttgatatcgagcgccacggtgcgtttgctttgatggctaaacgcataatca

SEQ ID NO: 26689 - DNA, 3969 bp, Homo sapiens
  SIMILAR (1380)..(742): 951254mologous to Escherichia coli similar to fdrA gene of E. coli,accession number U73857,Smith-Waterman Score=1023.
  misc_feature (1)...(3969): n = a,t,c or g
ctagcgtgtcgcttgtcgtgccgtcttgcgcgcacggtcggcccacgcggttcgtggctcggttgtgtacgtgtggccgcgtgttgacgtacggtcaggccagatgctccgcctagcgttgcggcttctgtgtggctcttcntggacgagcatgtgtgtggtctcgagttcgtggctgttgtgtgctgattgattcgctctggcgttggccgaggcgccgtagccgtgcatttcgcagcgggtgtctgttgtcgatgcctgggagaccgacgtcgcgtggtcgcttctggtttcgttggaatgtggtgatcgcggtttcccgatcgtcctatcggcgtgtttgcgttctctgtgtatagagtcgctagctcgtatgctcgatccttgcggcattgtcgcgtgtcgctccgctgcctcgcggcgtcgacgtctgcggctcgtggagccgctagtggtgtggtgtcgcgtcctggtctttgcgcggctgatgaccggtgtcggcctgggggcggcgttgccgaatcttatcgccctgacgtctgaagccgcgggtccacgttttcgtgggacggcagtgagcctgatgtattgcggtgttcccattggcgcggcgctggcggcgacactgggtttcgcgggggcaaacttagcatggcaaacggtgttttgggtaggtggtgtggtgccgttgattctggtgccgctattaatgcgctggctgccggagtcggcggttttcggcacatccgcaatcaacggctggttaagcgtatgcaggtcgagattttcctgtttcacgccggagagcatcaccgcttttagcgctgcctctttggtgccgcgggcaaactgtagcccctgctcatccactggcgtttcgccacgatcgaggaagcagacgaccaccggcttgcggcaggcgcgcgcacgttccagcactttgcgggccaccgcaggcgcaggcggtttggagataagcgcaatgatttcagtttgcggatcgttttccagcatcccgatggcgtcgagcatcatcaggccgccgattttctcgctcaggtcgcgcccgccggtgccaatcagttgcgaaacgccgccgccaaattcatgaatgcggacgctcaactcctgactgccggtgccggatgcgccaacaataccgatgttgccgcgacgcacggcgttaccaaaacagagcgccgcgccgttgataatcgccgtgccacagtctggccccatcatcagcagccctttttcgtgggccagttgcttgagcgccagttcatcttcaactgagacgttatcggaaaacagcatcacgttgagatcgttttgcagcgcctgacgcgccagagggacctttcctccaactgtgaccacatggaattcagtcaagaacgtgaaaagaagcaagcgggccttaaataaatctgcaactattccataatctgccacatggaaaattggagcttctgggtctttattaattgccacaattgtcttaaataaatctgcaactattccataatctgccacttggaaaattggagcttctgggtctttattaattgccacaattgtcctgtcctggcagacgctgggtcgggccggcagcccgcgttgcgcccgcacgtgcacaagcagacggagaagacgacccgcgtgcggactgtgctgaacgagaagcagctgcacactctgcggacctgctacgccgccaacccgcggcccgacgctctcatgaaggagcagcctgccccttggcgcacttgatgcgaacaagcctgcgggcccaaggtgcgccggtgtcagcgctgggcctgcggccgccctcatctccctggctgtacgggctccggcgcgcgcccaggacactttgtggccaccaggagactgcggtgacccgcctgcgggcattcccgggcccgggggagcgctgcggcacccgtgcgggatgcggatggccttctccctgacatagtcccgcttgcagtaggtcttcccgtctctcacgaagcacgtgcacgtctcgtccaggtactggctgcactcggcacacttgaggcaggccgcgtgccactcgaggtcgggcgacacccgcaggataaactggtcgtggatctgactcccgcagcccacgcacatggccgtcccgggcttctccagtaaggggcacagaggaggtggccattcacttaattcagcaggtggagctgatgggctagtaaaacatactttttttagttttcctttcttttcattaatctcctccggtagctgtttctcacactcagaatctgaagttagtttttcccactcgtcctcctcttcctcatctttattagtgcccacactggccaaatgagggatcactcgagagtctcgtcgtgtatgtcggtgctttcgtgcgctcccgttgttgcgtggtgtcgtcgtcttcgtcgcgtgggtgtcgagtggcgctgctgtcgtttcgttattgtcgttcttggcgccggtccgtggtcgttgctgctccgtccgccgtggtcggcgttgggcctgtggcgcgcccggtgtcgcgtctcccgccgcgtgatgccttttttcgcgcgttttgcgtcgctttggcctcttgttcgccgtttggtggtcctgcgcgtgtttaccctgtctttgcgcttgtccgccttctccccttttgtgcctggtccgctttcgccgcgtatcctcgtttctgctgttgccctgttcgcgcctcgccgttgtcccgtttccttgtcctctgttggctgttgggcgcttgctgctggctcccttgcgctgtttgctgtctggctttcccgcctcgccctgtgccgttggggctttggccctgcgcctttccctttgtcccctgtccggttgcctttgcggctttgggcttcgctgtgttgttgcccctgttgctttgcccttcgcgtgtgtccttgtgcctttggcttcttctccgccctttttctttccgttttgtgtcgcgccgtgttccctctcgcctttcctctgggcctgtcgtcttcctctgtggggtttgccgtctcgttttggctttttgggtgcgtctttgtccttctgcctctgctttgtccgttgcctcttttgcctatctctggcgcttttgggtctgtggccctcggcgtgccgctttgctcttgcgccgttcccgcttcggggtttggggtgggccttcccccgttccccgataaaaccccgcccccttgtggtgctcggcctgctcgtctttggcaccaaaaggcgctctttctctctgtgtcgtgacggctttatcttcgccttccggccggaatagtcagtgtagaataaacggatttttccgtcagatgtaaaggttgcagaaccggaccattcttgcgtctgatctttcaggatcggatcgttggcgtcgaacttatcgctgtctttaaagacacggcccgcgtttttccagctgtcgattgagttgtcgccgaccttttgataaaacatgtagattgatgtgtcatcagcgtgtgaaatattttctgcatcagccagcgcagaaatattttcagcaaattcattctgcaatcggcttgcataacgctgaccacgttcataagcgcttgttgggcgataatcgttacccaatctggataatgcaggcatgtgctcatcatgcagcttgccagccagaccacgataatcactttcggtaagtgcagcagctttacgacggcgacttccatcggcaatttgtatgacaccagatactcttcggccgagcgccggtgtctgttgaccagtcagtagaaaagaagggatgagatcacccagtgcgtcctcagtaagcagctcctggtaacgttcaaggcctgaccatacccgagaggtcttatcaacactatctcggcggagcacttcaaaaggatcatgtgacagtcccggttttggtgcaccagaatccagcggcat

SEQ ID NO: 26690 - DNA, 1902 bp, Homo sapiens
  SIMILAR (206)..(553): 821254mologous to Escherichia coli mhpT,accession number X97543,Smith-Waterman Score=473.
tcactcgttgacaggtagatgtattttctttctaatcacaggcacatccccaggaagcccagaaatgtctaccactctcaaaatcatgagctccaaggaacccagcatcagcccagagatcaggtccactgtgagaaattctccttggaagactccagaaacaactgttcccatggagaccacagtggaaccagtcaccttcagtccacagctggtctttgcgcggctgatgaccggtgtcgggctgggggcggcgttgccgaatcttatcgccctgacgtctgaagccgcgggtccacgttttcgtgggacggcagtgagcctgatgtattgcggtgttcccattggcgcggcgctggcggcgacactgggtttcgcgggggcaaacttagcatggcaaacggtgttttgggtaggtggtgtggtgccgttgattctggtgccgctattaatgcgctggctgccggagtcggcggttttcgcgtggcgctcgatatcaaacaaacgggcgtgattcagggactgccgttgttgttcagcggcaataatctggtgaaggcgattcccttttaagtctaaaccagtgatgtaacctccatgtattgctttatgattttgcctgtagcttctgcttttctgtaacttaccattgccttcagaaatccttgccaagtatttctctgctttctgccatgtcacgggcccatgatccccattgacatagagactgttcctgtccagggtgtaggggcccagctcttcaatgtcattggtcagtttgcttagctcccagtacagctgctccctgttgagtccagggcttttggggtcaaggcggtgggtgcagatggcatccactccagtggctgccccatctttctcgggcccagaactagtgaccagtgaagtcaccagcccttgtacagtaggggagacagctaaagttggaatggctgaaatcatctttgcctcagaatgggtgaccaatgaagttgtggtctctggttcatcagaagaaatagtcagagttggaatagttgtactggttactgctctagaactagtgaccagagaggtcaccattcctggtacctcaggtgaaacagttagaacagctgagctggcttctaccccatgactggtggccattgaaggtgtggtctctggctcagtgcggttgcttttgcgcatgttttgcgttcgggtgtgtgtcgcttgtgccgtcctctttttgtgcgctggtcttcccttctgctgctttgttcccttcgctgcgacgtccgtctgctcttggtcttggttgtggtgctgattgcgtggctctcgttcgttcagcggcgttctttgtcgcctgtattgacacttttctctgtcgtcttcgtgttggttgttgtcgctgtgttgtgtgtcgctgtatgttgctccagcacctgtttgggttgtgatggtcatttttgcagattctgtcaggacagaggaggcagaaatcctggggatggttcctatggagatgtcttgtgacattgtggactgctcagggcctgacatggatgttctgctaaaggagatggcttctgtcctggagacctcagtagtagcaccagtggacactttagaaagaacagtgtttgcttctgtggctaagctggtctcttcagaggtgctggtctccctcaatctggtggtcagtgaggaagctggctctgactgaattttcctgtaatgtcgatgagcatgtagggttgtactttttgtcggtgcggccaacggctcggcgagctgctgctgatggggcggagctctcctgttatttagtgtgtccgtgcgtttggtcgtggcctgtgcgtttttgagggtggagtctcgttctgtcagctctaggctggagtgctgtggcaccat

SEQ ID NO: 26691 - DNA, 141 bp, Homo sapiens
  SIMILAR (2)..(139): 1001254mologous to Escherichia coli phosphoglucose isomerase (AA 1-549),accession number X15196,Smith-Waterman Score=235.
ggcaacgcttgactacgtggtgccgttcaaagtattcgaaggtaaccgcccgaccaactccatcctgctgcgtgaaatcactccgttcagcctgggtgcgttgattgcgctgtatgagcacaaaatctttactcagggcgc

SEQ ID NO: 26692 - DNA, 1191 bp, Homo sapiens
  SIMILAR (307)..(1092): 931254mologous to Escherichia coli xylG,accession number U00039,Smith-Waterman Score=1244.
atgttcacgagtcaggcgacgcataccttcaccttccgcacccatcaccagcgccaggcgtccggtcattttgctctgatagagtgtatgatccgcctcgcctgccgtaccgacgatccagatattctcttcctgcaacatacgcatggtgcgcgcaaggttagtcacccgaatcagcggaacgctttctgccgcgccgcaggctacttttttcgccgtagcgttgagctgtgcggagcgatctttcggcacaatcaccgcatgaacgcctgcggcgtccgcactacgcaggcacgcgccgagggtgcaagtcaggctcggtaccaaccgtcgattttactggatattattcgcgatctacaacagcacggtatcgcctgtatttatatttcgcacaaactcaacgaagtcaaagcgatttccgatacgatttgcgttattcgcgacggacagcacattggtacgcgtgatgctgccggaatgagtgaagacgatattatcaccatgatggtcgggcgagagttaaccgcgctttaccctaatgaaccacataccaccggagatgaaatattacgtattgaacatctgacggcatggcatccggttaatcgtcatattaaacgagttaatgatgtctcgttttccctgaaacgtggcgaaatattgggtattgccggactcgttggtgccggacgtaccgagaccattcagtgcctgtttggtgtgtggcccggacaatgggaaggaaaaatttatattgatggcaaacaggtagatattcgtaactgtcagcaagccatcgcccaggggattgcgatggtccccgaagacagaaagcgcgacggcatcgttccggtaatggcggttggtaaaaatattaccctcgccgcactcaataaatttaccggtggcattagccagcttgatgacgcggcagagcaaaaatgtattctggaatcaatcccggcccctccaagttaaaaacgtcgttcccccgaccttgctataggacgtttgagcggcggcaatcaagcaaaagcgatcctcgctcgctgtctgttacttaacccgagcattctcatacttgatgaaatcagctcggtaccacgattatatgcatgtatcccagagcaatgcctcccattacagagagcactgtccagacgaggtatttccctgatttgttcatag

SEQ ID NO: 26693 - DNA, 1794 bp, Homo sapiens
  SIMILAR (1253)..(1227): 1001254mologous to Escherichia coli xylG,accession number U00039,Smith-Waterman Score=48.
ttatctgtaaaatggggctaggaaaaggatgcccataaggggcttttcataatcacgctttacaatatccagcgcgcgcagcacggtactggcagggatctgattttcctccagcagcacaatcaaatcgacagccagtttgacatcgtcaggggcattttccagtgacatattctctccattgctgttttcgattttttccagcgcatggcggcagcgtgccaggcgcgcttcataggcttccacttcacgatgcagcgtttgctgttccacgagatcggtcacccgcgccagacgggctctgcgttcggcaaccatctcacgtagccgccgctcaaaatcctgatgctgaatacgtttacgctgccagcgggcaattttcggtggtgcactgtcccactcgcgcaatgaccaggcggaggcttcacgcgcgatggcttccagttgtgccgccagatgttccgccagccaggccacttgcggcagctgttgctgctcaactgcatgacgaagcgcagccagattatcgcccgcctcgtcgagacaagcctgtagtgttgtcgcacgagtctgaaaaagatgcctgtcgaaacgagcacttagcgtggcgaactgtgacaccggggcacaacgctgacgcagcgtagcgagctgtccttccagtttttccagcagcagggcggttttcacgataagaccgcgggcgattttgcttattttgctcacgtttgccatcatgattgcgatgatagctgcaatcatcacgaagacctgctcctgagtcaggttatgatttatcaggttggcttttagtttcccttcatgcatcaccagtacacgatcgctaaggccgagcacttcaggtaattcggaagagatgacaataacggcaataccctgctggacgagttggttaattaatttgtagatctcgtatttcgcgccaatatcgatacccctggtgggttcatcaagaatgagaatgcgcgggttaagtaacagacagcgagcgaggatcgctttttgctgattgccgccgctcaaacgtccaatagcaaggtcgggggacgacgttttaactttgagttgctggattgattccagaatacatttttgctctgccgcgtcatcaagctggctaatgccaccggtaaatttattgagtgcggcgagggtaatatttttaccaaccgccattaccggaacgatgccgtcgcgctttctgtcaggcattgaatggtctcggtacgtccgggcaccaacgagtccggcaataccccatatttcgccacgtttcagggaaaacgagacatcattaactcgtttaatatgacgattaaccggatgccatgccgtcagatgttcaatacgtaatatttcatctccggtggtatgtggttcattagggtaaagcgcggttaactctcgcccgaccatcatggtgataatatcgtcttcactcattcgggcagcatcaggagtaccaatgtgctgtccgtcgcgaataacgcaaatcgtatcggaaatcgctttgacttcgttgagtttgtgcgaaatataaatacaggcgataccgtgctgttgtagatcgcgaataatatccagtaaaatcgacgtttcctgctcagttaatgaggctgtcggttcatcgagaattaacaagcgcacctgtttattaagtgccttggcaatttcaaccagttgttgttgcccaagccttaaatcgccaacgcgggtatcaggtgaaatggataaactgacctgtgcgagcagcttctgacagcgtagcgtcat

SEQ ID NO: 26694 - DNA, 2652 bp, Homo sapiens
  SIMILAR (1654)..(2154): 981254mologous to Escherichia coli glucose-6-phosphate isomerase,accession number U00006,Smith-Waterman Score=878.
aagccactctcgcagccacactccttcagctcctcccggtgcgcctcctcgggcttggccctgccgtccctgcgtttctctctcttcttcttctcttttaggatgttgatggcactagatccataaggctttagttccttttctattttcttggaaggttctctctcggaatcatttttatctttcttttcggtagaaaacaattccgatggttttatctagctcatcttctatgtcagctttcatgttgtaagaaactccgtaagcatccgcctccaggaagtccttttcgtactggccggagtccttcctgctaccgccctcccttgtaatcttcgcccttctctttcttctcggccttctctttcttggctcgctctcggtcgtggctcttcttggatgaagatgaggagtgtctgtgcctctccttctctttcagcttctcagggaggcaggcgctctccctcggcttgtcgtctccaggtggctccgtgaaagagacctccaggaaggcagtcagccccggctcctgccctcggtccgtgaagctgtcagaggagacctcgctgaatttatcgttggagtcttctctgtactcatggagaagcctcttcttccaacttttcaagcaggctttttttcgcgtcggcacttctcgaggacttcctctccttggaatgttctttgtccgacttctctttgtgtttgcttttagccttgtcttcggcagcgtgcttcttttcagccttctcggggagcttctgtttatttttcttatcttgcgtggagtccactgaggctctgtccttcctgtccttgtacttttctgtggactctttatccttcttctccttgtgcttttcaaagactttctctttttggtctctccccggcgtcggcaagcccctcggtcctttctcctgtctctgggctccttgtccttctgcctctcagggtgctgcttgtcagaagacttcctgtgtctgtcggaggcataggcctcccgtccttcctccttctcctggaggccgtccgtcctcggcaagtcgctggcctctcccatcttgaacccgctccccatgcaggctgtctctgtcgtcctcactctcatctgtgaagatgtctgcgatgtaccaggcttttctctttgcctttcttgtcatcttttttttcagagaagtcttctgagatgatcccagggaaagccttctccttcttctctttcccttggtcgagagacgctttcctttctttgtctttgccatgtgtgtctttatgtttttccttggtatcttttttctctttaaaacatttatcaaattctttgtccttctgacatttttccaggattgatttctcacttttgtccttgtcactggatttctctttgtatctttctggttttgtcttctccttcctttccttatcggggccatccttcttctccttctctcgtgctgggtggtgccgttcccacggctccaggcccttcccaaagtcgccgtcggacttgtccttgaagccactgtgggctgtgtccatgactgtctgttggtgctgagaggactcctgattcttcacaatcatgtgccgggctagcagcttatgtgatgcagcgtttgctctgagagtttcctgtagtttggaatcctggtactgctcgcgctgattgtcatctggtacaacaatttctttggtgcggaaactgaagcgattctgccgtatgaccagtatatgcaccgtttcgcggcgtacttccagcagggcaatatggagtccaacggtaagtatgttgaccgtaacggtaacgttgtggattaccagactggcccgattatctggggtgaaccaggcactaacggtcagcacgcgttctaccagctgatccaccagggaaccaaaatggtaccgtgcgatttcatcgctccggctatcacccataacccgctctctgatcatcaccagaaactgctgtctaacttcttcgcccagaccgaagcgctggcgtttggtaaatcccgcgaagtggttgagcaggaatatcgtgatcagggtaaagatccggcaacgcttgactacgtggtgccgttcaaagtattcgaaggcaaccgtccgaccaaataaatactgctgcgtgaaatcactccgttcagcaaactcaacgaagtcaaagcgatttccgatacgatttgcgttattcgcgacggacagcacattggtacgcgtgatggtattgaacatctgacggcatggcatccggttaatcgtcatattaaacgagttaatgatgtctcgttttccctgaaacgtggcgaaatattgggtattgccggactcgttggtgccggacgtaccgagaccattcagtgcctgtttggtgtgtggcccggacaatgggaaggaaaaatttatattgatggcaaacaggtagatattcgtaactgtcagcaagccatcgcccaggggattgcgatggtccccgaagacagaaagcgcgacggcatcgttccggtaatggcggttggtaaaaatattaccctcgccgcactcaataaatttaccggtggcattagccagcttgatgacgcggcagagcaaaaatgtattctctcccaccctcgctgctcttggcagggcagacacctcctccat

SEQ ID NO: 26695 - DNA, 566 bp, Homo sapiens
  SIMILAR (21)..(566): 681254mologous to Homo sapiens fibrillin 5,accession number X62009,Smith-Waterman Score=777.
caccgtgctggaattcccgggtcgacgaatgcctgtccagcccgagtgtgagtggcgtctgtcggaacctggccggctcctacaccgtggaatgtggccctggcagccggctggacccctctggtaccttctgtctagacagcaccaagggcacctgctggctgaagatccaggagagccgctgtgaggtgaaccttcagggagccagcctgcggtctgagtgctgcgccaccctcggggcagcctgggggagcccctgcgaacgctgcgagatcgaccctgcctgtgcccggggctttgcccggatgacgggtgtcacctgcaatgatgtgaacgagtgtgagtccttcccgggagtctgtcccaacgggcgttgcgtcaacactgctgggtctttccgctgtgagtgtccagagggcctgatgctggacgcctcaggccggctgtgcgtggatgtgagattggaaccatgtttcctgcgatgggatgaggatgagtgtggggtcaccctgcctggcaagtaccggatggacgtctgctgctgctccatcggggccgtgtgggga

SEQ ID NO: 26696 - DNA, 2853 bp, Homo sapiens
  SIMILAR (2233)..(2826): 981254mologous to Escherichia coli thiC,accession number M88701,Smith-Waterman Score=1060.
atggggcttaaggttgacgataaagtgccgctttttgcagtggtgagccgtctgaccagccagaaaggtctcgacctggtgctggaagccttaccgggtcttctggagcagggcgggcagctggcgctactcggcgcgggcgatccggtgctgcaggaaggtttccttgcggcggcagcggaataccccggtcaggtgggcgttcagattggctatcacgaagcattttcgcatcgcattatgggcggcgcggacgtcattctggtgcccagccgttttgaaccgtgcggcttaacgcaactttatggattgaagtacggtacgctgccgttagtgcggcgcaccggtgggcttgctgatacggtttctgactgttctcttgagaaccttgcagatggcgtcgccagtgggtttgtctttgaagatagtaatgcctggtcgctgttacgggctattcgacgtgcttttgtactgtgtcaaggacagtttcatcatcggactaccgatgtcgagtacaaaggcgatccgaaagcggtgaagattgaagagagtgaaatcaattacctgctgaatgtgtataacacgcactttaaaaagcagttaagccgtgacgatatcgtctggacctactccggtgtgcgtccgctgtgtgatgatgagtccgactcgccgcaggctattacccgtgattacacccttgatattcatgatgaaaatggcaaagcaccgctgctgtcggtattcggcggtaagctgaccacctaccgaaaactggcggaacatgcgctggaaaaactaacgccgtattatcagggtattggcccggcatggacgaaagagagtgtgctaccgggtggcgccattgaaggcgaccgcgacgattatgccgctcgcctgcgccgccgctatccgttcctgactgaatcgctggcgcgtcattacgctcgcacttacggcagcaaccagcgagctgcgtgctcggcaatgcgggaacgtgaagcgcgcacactgccgcaaaaactggctggcacgctgggtatgttaagtaaagtaatgcggatcccacgccagcaggaagtcacggctctgcgcacttatctgcaaattcgtatcggtctgcatgcggcgtttaatgcctgtgaagagatgtgccaacgcgtggcgctggagcgtcaactggacagcgaagaacgcgcattactgattgaacgttcgcaaacggttattcgtcagggccgcgatcttcttcacgcctgggatgccacctggaactcggcgcaggcgctggataacgcactacagccggacagagcaggtcagtttgccgacgccctggagaaatacgctgccgatgagtcattttttgcccaactcgataaatatgatattccggtggtggtgattggcaaagttgaaggtcaatatgcccatgtttattctgtcgataccgataattttggcgacagcattgcgttgaccgatgcattaattgaaagtgggcatcaaaatattgcctgcctgcatgctccgcttgatgtccatgtttcggttgatcgcgttaatggttataagcagagcctggctgcgcataatattgcagtgcgtgatgaatggattgttgatggcggttatacccatgaaactgcattaaaagcagcacggcaattattaagccagtcaccgttgcctgaggcggtgtttgccactgacagcctgaaattaatgagcatttatcgtgcggcagcagagaaaaatattggctattccgcagcagttagcggtgcgcatcttattcgggctacatttatagatcgtattaagtactcgggccggattcggcaatttagcccattattaggacgaccccttgaatcatcgctactgtgctctaaagagcacgcaatactgacggcttgccatgccagcaccaacaggggcagcagaatcagcaaaaatgccagcattaccagttgtcgtaatgagcggggaaaaacgggccagcgtttcaaggtgttactctcgtcagacgcgaatagcctgatgctaaccgaggggaagttcagatacaacaaagccgggaattacccggctttgttatggaataaggcggtgcctaactcgacgtttcgcccgatggttgatatagctacgctgatatcagaagttggacggcaggcaccttgttgtgcgtcattcgtattttatgtagcacgtcccgaaggggctgacataataaaggaagatcttacctgggaagcgttccgcgacacgctgctggaacaggccgagcaaggtgtggattacttcactatccatgcgggcgtactgctgcgctatgtgccgatgaccgcgaaacgcctgaccggaatcgtctctcgcggcggttcgattatggcgaaatggtgcctctcccatcatcaggaaaatttcctctatcaacacttccgcgaaatttgtgaaatctgtgccgcttatgacgtttcgctgtcgctgggcgacggtctgcgccccggttctattcaggacgccaacgatgaagcgcagtttgccgagctgcatacgctgggcgaactgaccaaaattgcctgggaatatgacgtgcaggtgatgattgaaggcccaggccacgtgccgatgcagatgatccgccgcaatatgaccgaggagttagagcactgccacgaagcgccggtttacactctggggccgctaactaccgatattgcgccgggctatgaccacttcacgtcggggattggtgcggcgatgattggctggtttggctgcgcgatgctctgttacgtaacgccaaaagagcatatgggtcctgcccccccccaaaaatatttttaa

SEQ ID NO: 26697 - DNA, 3264 bp, Homo sapiens
  SIMILAR (139)..(864): 941254mologous to Escherichia coli Glucose-resistance amylase regulator (Catabolite control protein),accession number D90770,Smith-Waterman Score=1150.
gaaaaaaaatttcatttcgtaaagggattatggaattgtggggggcccaggccattatttatcaactgcccgtgttgtcttcgaccggcaaactccataagatgtgcagcattcacgttcggacggagttcctgacctatgtcccctactatttatgatattgccagggttgcaggcgtatcaaaatccaccgtatcacgcgtgctgaataagcaaactaatatctccccggaagcgcgcgaaaaagtgttacgggccattgaagaattacagtatcagccaaacaagctggcccgcgcgctgacctcttcgggttttgatgccattatggtgatttctacccgttcgaccaaaactacggcgggtaatccgtttttgttggaagttgcgcaggccttccccgccaaagctgaataaaaaggcttccaggtgctagtacgaacgtcgcacaatccggcagaagatctgcaaaaatgcgaaagcaaaattaagcagaaaatgattaaaggcattattatgctcagttcgccagcggatgagtcattttttgcccaactcgataaatatgatattccggtggtggtgattggcaaagttgaaggtcaatatgcccatgtttattctgtcgataccgataattttggcgacagcattgcgttgaccgatgcattaattgaaagtgggcatcaaaatattgcctgcctgcatgctccgcttgatgtccatgtttcggttgatcgcgttaatggttataagcagagcctgggtgcgcataatattgcagtgcgtgatgaatggattgttgatggcggttatacccatgaaactgcattaaaagcagcacggcaattattaagccagtcagtgtcgttgtctgttgctgtgtcgtggtctgcttgtctgtgtgtgctttgggagctcgagctggatcggtaccgcgtgcactatgcactttgctgtgccactgtgggccgtgcctggggccttccatgtgaactttgccctgcacagccacacccctgccgccgcggcttcatccccaatatccacacgggggcctgccaagatgtggatgagtgccaggctgtgccaggcctgtgccagggaggcagctgcgtcaacatggtgggctccttccattgccgctgtccagttggacaccggctcagtgacagcagcgccgcatgtgaagatgtcgacgaatgcctgtccagcccgtgtgtgagtggcgtctgtcggaacctggccggctcctacacctgcaaatgtggccctggcagccggctggacccctctggtaccttctgtctagacagcaccaagggcacctgctggctgaagatccaggagagccgctgtgaggtgaaccttcagggagccagcctgcggtctgagtgctgcgccaccctcggggcagcctgggggagcccctgcgaacgctgcgagatcggtagtatcctccttgaggcctcccaggcacccatgggaaaagccctccatggggcgggtccccccttgggctggcatgagaaaatgactcctctcttcactcttgttctcccagttgcagaccctgcctgtgcccggggctttgcccggatgacgggtgtcacctgcgatgctgggagccagagtcccatccgcacaggtgcacaggtagggctgggagcagaagccttcaccgcaggcgcgcctacagaatggtggatgaatgcaacgggtgcagtcaagaccggaacgagtctggccgtcctgctcattggtgtcgggctgtgccggaaactagtggccgcgtgggctctgttccgggctgtgcttgcaccccccgtgtttgtatttcccaattgctggtcgcatgtttcccctgtgtttggccctaacaggggaaaacgatctcaagactgggtccgggtggtgttggtcggccattccgacggcgcctcgatctccctgatccatgccggcggcacccccgcgccggatgtgaagggcgtggtctgtctggcgccgcatgtgatgaacgaggaaatctgcgtcgcctcgatccaaaaggccaaggcggcctccacttgtatcctgcggcttgccgtgcgtcgtgactcgtgtatccgcggcttgggcgcgtgcgtccaggcgtgggtcaatcgaggcttgccagcgtcgacagagcgtgcgtgtatcaagtcactgcgactatcatcacagacgcaggaacatctcacagagggggtcaatcaatccgtcacagagtgcaaacaggaagacggagtgaatgaaaggcgccagaggagagacaccgaaagaccaaatagagggacgccaagagaaacagcgctggtaagacggtccaatcggccgtggtatatagatatcattacacaggattacggggctgggatgcaggcacgggcaaaggcatgtgtccacgcccccagcctggccacgccccagcaggcagtgggtgtccccatctacccacgagtccaccccagccccgcaggtgcataccacagccgagctcgtcgctggagtcgggacagtctgggtggccgtcgcagcgccacagatggggatgtccctatactgcccaggctgatcttgacgctcctggtgctcaagtgtgtcttaacgttgccttgcgtccctcccgccaaaacagggtttgccctttgcggcacacgtttcacccaggtgcttgtttcaggttatccgaacgtcattattacccattcatttgacccactttttgcatttgtccacctcacaaccctctacgcgtacatagcattgctaattacccattccgcccaattttttaacaggggcttttgcaacaaagcttttggtgtcctttggtggacaaccattgacatctgccgacacttcaccaacctgtgtctgaatggccgctgcctgcccacgccttccagctaccgctgcgagtgtaacgtgggctacacccaggacgtgcgcggcgagtgcattgatgtagacgaatgcaccagcagcccctgccaccacggtgactgcgtcaacatccccggcacctaccactgccggtgctacccgggcttccaggccacgcccaccaggcaggcatgcgtggatgtggacgagtgcattgtcagtggtggcctttgtcacctgggccgctgtgtcaacacagagggcagcttccagtgtgtctgcaatgcaggcttcgagctcagccctgacggcaagaactgtgtggcctggctgatagagcgagactccatctcctaa

SEQ ID NO: 26698 - DNA, 453 bp, Homo sapiens
  SIMILAR (313)..(450): 1001254mologous to Rattus norvegicus chloride intracellular channel 5,accession number AF323174,Smith-Waterman Score=244.
acgcgcggatcctgtgacacctccgggcagcccggcacttgttgctcccacgacctgttgtcattcccttaacccggctttccccgtggccccccgcctcctcccggcttcgctccttttcatgtgagcatctgggacactgatctctcagaccccgctgctcgggctggagaatagatggttttgtgaaaaattaaacaccgccctgaagaggagccccgctgggcagcggcaggagcgcagagtgctggcccaggtgctgcagaggtggcgcctccccggcccgggacggtagccccgggcgccaacggcatgacagactcggcgacagctaacggggacgacagggaccccgagatcgagctctttgtgaaggctggaatcgatggagaaagcatcggcaactgtcctttctctcagcgcctcttcatgatcctctggctgaaaggagcg

SEQ ID NO: 26699 - DNA, 1476 bp, Homo sapiens
  SIMILAR (1111)..(1143): 721254mologous to Homo sapiens acetylcholinesterase,accession number M76539,Smith-Waterman Score=46.
tcatgcagcgaaggcaccagtctccctctgtaaccttggtccttccctaaagtatgtagtcattggtgcagaatgtacagctgtgaaggtgactgtttctctaaaggctttggtgatgtaagccccgccctgcagccgccggctattttgggcgcgttggcggcggcgggatcgctgacagtcgcggatcctgtgacacctccgggcagcccggcacttgttgctcccacgacctgttgtcattcccttaacccggctttccccgtggccccccgcctcctcccggcttcgctccttttcatgtgagcatctgggacactgatctctcagaccccgctgctcgggcagggctcggggtgcgctggactccggaccctcccaggagggcggcgcggagccctgtgctcccccgtggcctttccgcaggccagcgccccgctgcgaggctcctgggcggaatggaggaaggcaggttccggcaggtggccgtcttctcggagagttgatccgcagtttgtccacccccgtccccgcctccgctgtcaccgcttgctccttggacagaaactgcctaatgtcagagctgctgtactttatttgcaacctgtaggaggaaggatggaggcgaggctgcggcggcgtttcccggtccgccggtgtaaggagaaagaaacatttgatcagcccttggtgccgacgctgcagaagtagggaaacctgaggcttctctgatgagataagttcccaatctaacactttgggatatacgctatgtgggtttaaggaagagtagtgagataaaatgtgagctgctgctgtttttgccattgctattacggctgcattcactgtgaccatgttggaataaggagagcccccatatcctatatcaacctctatggacttcagggtgatggtttcttttccacttttgtttaacgttattttgtggaattgaaggttctgggcagggcttccccacaggctctgggagaggggagctgtgtagggaaagttatgtggcctttcctcattcaggtactttgtgaatataacagggatctgatcaactttttcacacagtagctcaatgcagtgtttagtgagtggtctcccccacttggactccctccaccctgtagttctgccaccctgcgggacggccaactcctttgctgggctctctacagtcagccagcacagggaagattgaagttggaggacatcatggtaggtttgcatggtcgaatcacttccacccactttccatagtccagagctcaatcctgtggctgttcctctgtgcaagggaagctgggaagtgtcatctaactgtgcaggtgagttagccaagccattcaagcaggaaagccattctgtgaagccccagacaaccgctcccaaggacagattactttggttaactttcacattagccactttcattgtgtgtgtgtgcatgcctaatttcctcat

SEQ ID NO: 26700 - DNA, 462 bp, Homo sapiens
  SIMILAR (450)..(1): 961254mologous to Escherichia coli Probable ATP-dependent helicase Lhr (EC 3.6.1.-) (Large helicase- related protein),accession number D90809,Smith-Waterman Score=736.
gcgcaatcggtcaatagtcagacgttcagcgaattgcgcgccacccagaccttctacaaaacgacctcgcataattcgcccggagtcttccatacttcgacaaagcgtttgcatcgatggaaacccgccagggatattttcggctatcaccgcctgacgactgatgatgccgtagcggtcgagcatattttccgccagcgccagcatcctttcggtatcgtttagtggctccacctgcaataacgaccagcgtccagccagatttggtgtgttgtaagatacccgcggcgagacgggttgcgcatagacaggacgtccacgacgagcccggtgactgcggcgagttgaggtgcgcgcagtttaactgctgcgggtgagggcgcgtaacggcgcccaaatggcgctggtgaagacgccctgccagaccagcgcccataacgccccttgcaggggcagagagac

SEQ ID NO: 26701 - DNA, 1319 bp, Homo sapiens
  SIMILAR (774)..(217): 971254mologous to Escherichia coli similar to E. coli hypoth. 26.8 kDa protein, ruvA-ruvC region,accession number L19201,Smith- Waterman Score=935.
tcagtgtggtcttatcatttgaggaactgtgatgaggaccgtgtagctggagagcagagtgtgggtaggaggaagaatagtgaaaggagttgaggtgtatgcaggggccagatcctgcgaggcatttcggatatgttttggtgtttggatttgaccttgtgggcagggatgccattgaagggctgtgtgcatggagtgggattgggtccattcattgttaaagacacttggtggcgagaccaccgtttcctcaagcggaatattcttgccgtaacgttctttgagctttgcctgaacttgtgggctgctcaggtcgaactctttcaacttctgctgctcgcccacgcgcattcccagcgcgttctggtaaaccttccacaccacttccgaacagtactggcgatcgtcgctcggtgagaagctgaaatcatacggtttaccgagataacgttttgccgtttgcgccagtttttgctgttgttcaacactcagtccgccttcaacgcggcgaacaacgtatttgcccttttcaccatgggcgatccactgcttgagcggggtgtatttcaccgggccgactgcttcaaaaacgtagggctttttgttgcgtatcaccagcataccggtgtggctataatcggtatgggtcgccagttggatcgctttactttgcgatgagcgagagatctgaaagatgatgtcgccggtttgtggctgccaggcaaaggcaggtacagaaaccagcaggctgaggatcagcagcctgtttttcatagttaaacgtccatgtataaaaagcggtgggtcgcagacaacgtgcgctttgtttatgccggatgcggcgtgtacgcccttatccggcctacggtcaggttcccgtaggcatgataagacgcgtaagcgtcgcatcaggcaatgaatacccaatgcgaccagcttcagcaggcacttggtttgctggtaatgctccagcatcatcttgtgggtttcgcgaccgatacctgattgtttgtagccaccaaacgccgcatgtgccgggtaagcgtgataacagttggtccacacgcgcccagcctgtatgccgcgccccatcttataggccagattaccgttgcggctccagacgcccgcgcccaggccatattgcgtatcgttcgccagctccagcgcttcttccatcgttttaaaggtggtcaccgccagcaccgggccaaaaatctcctcctggaacacccgcatattgttctgaccaaacagaatcgtcggttcgaggtagtagcagtctttcagttcaccttccagcacgttgcgccgcccgc

SEQ ID NO: 26702 - DNA, 2430 bp, Homo sapiens
  SIMILAR (1993)..(2424): 921254mologous to Escherichia coli ETHANOLAMINE AMMONIA-LYASE LIGHT CHAIN (EC 4.3.1.7) (FRAGMENT),accession number D90873,Smith- Waterman Score=668.
atggaagcgctggcaggcattaaaaagataaaaatgatgtgtctgcgaaaagctaagaggacccggagggacaagttcaccagtgcactggagctactactggcaaaagatgttcccctgccctttttgctgaccggattaacgctggtacttggcgtcactgctgagctggggccatgcacgcaaaatgttcctgcatcgctgctcgccgccatttaccctcagtggcgggatacatgccggtctgggaaccgtgctcatctatgcgtgggcactctctggcggatgtttaactggttttggttctggatctggcgcgaacaaccgctgcgcgagtcactaagtctgctgtaccgtgaactggcagattattgtgaagccaaatacagcctgcttacccagcacaccgaccctgaaaaagcgctgccgccgctgctggtgcgccagcaaaaagcggtcgatctaattacccagtgctatcagcaaatgcatatgctttccgcgcaaaataatactgactacaagcggatgctgcgtattttccaggaggcgctggatttacaggaacatatttcggccactctgctgcaggtctactggagttgctggaggtccactccagacctgtttgcctgggtatcagcagcggtggcatcagaacagcggattgttgtgaaccgttgtggaggtcagtgtgactgctgtgtggcattcatcttggcaaacaccattgggaacggtcacatggggccatcaacagcactatctcgtccccaacacatcaagcacatcatccaaggtggcaaaaaaatgctggtctggcaggaaaaagaggaattactcgccccagaggttttccacgcgctgactaccgcactgcgtcgcgaaccacggctgcgctttacgctaacagaagtgaatgatctaccggtccggcaaacgccgatgtttacgctgctgctattgcaggacggattattccgcgtccggctcttcagacttgtatttagcggcagtttctttgatcagctgctgcagttcgccacgctgatacatttcgatcacgatatcacaaccgccgaccagctcgccgtcaacccacagttgcgggaaggtcggccagttagcatatttcggcagttccgcacgaatgtccggattctgcagaatatcaacataggcaaaacgttcgccacatgcggcaagcgcctggactgcctgggcagagaaaccgcagctcggcagtttcggatcgggttttccagcatctgggcgttggattttttcgaaaggtggggcccattggcaaaagagaaatatggcctcgatgttgaactggtaggatttagcggttcgttgctaccgaacgatgcgacaaatcatggcgaacttgatgcgaatgtcttccagcatcgaccctttcttgaacaagataatcaggcgcatggttataaactggtagcgaagagagtggcgaggcggaagtttatcaggctatccaccatcaactggttgccagtgcgcgggcagttaaagcctgtcatagcctgctccccgaagcgaaaatcggcaatatgcttctcggtgggctggtttacccccatcacctgccagccacaggatatgttgcaggccatggaagagaaccggcgctggatgttctttggtgatgttcaggcgcgtggccagtatcccggctatatgcagcgtttcttccgcgaccacaatatcaccattgagatgactgaaagtgacgcagaagatctctacaacgaccgccagattatccgtgctggcttagaagatcactttatgggcaagctgagcggcatctctatgggctgtgactgctgttataccaaccacgctgacgctgaccagaacctcaacgaaaacctgatgatcctgctcgccaccgcaggctgcaactacatcatggggatgccgctgggtgatgacatcatgctcaactaccagaccaccgcattccacgataccgccactattgaagaaattgtacgcagcgtgatggcgtcaatgggacaagcggcccccgcgccgtcagaagcaaagtgcgccaccaccaactgtgcggcaccggtgacctcggaaagctgtgcgctggatttaggttccgctgaagcaaaagcgtggattggtgttgaaaatccgcatcgcgcagacgtattaacagaactgcgccgcagcaccgtggcccgcgtttgtaccggtcgtgccggtccgcgtccacgtacgcaggcgctgctgcgtttcctggccgatcactctcgttcgaaagataccgtactgaaagaagtgccggaagagtgggtgaaagcgcagggcttgctggaagtacgctctgaaattagcgacaaaaatctctacctgagtcgccggataatggccgcgctgtgttcaaaactgtga

SEQ ID NO: 26703 - DNA, 1979 bp, Homo sapiens
  SIMILAR (854)..(1396): 1001254mologous to Escherichia coli Probable ATP-dependent helicase Lhr (EC 3.6.1.-) (Large helicase- related protein),accession number D90809,Smith-Waterman Score=927.
atggcctgttgtgcatcaggattcttaaccttcttcacgccgtgcagacggcgagaaaaacgcagtctgtcacgcagcatcagcgaatccagccgctgctgcaaggccgtaaagagccggttgacggaacactggtacgtacaaggggctctgcgaagcgttagaagccttacgggcacttgcgcggagactccgatcggcgtaagaggccagcgccgatatcccgaagcggccaaaagagatcatgcgcctacgtcatattgcaatttattgaatttgcacgaacttgtaggccggataaggcgttcacgccgcatccggcataaacaacgagcacgttgtctgcgacccaccgctttttatacatggacgtttaactatgaaaaacaggctgctgatcctcagcctgctggtttctgtacctgcctttgcctggcagccacaaaccggcgacatcatctttcagatctctcgctcatcgcaaagtaaagcgatccaactggcgacccataccgattatagccacaccggtatgctggtgatacgcaacaaaaagccctacgtttttgaagcagtcggcccggtgaaatacaccccgctcaagcagtggatcgcccatggtgaaaagggcaaatacgttgttcgccgcgttgaaggcggactgagtgttgaacaacagcaaaaactggcgcaaacggcaaaacgttatctcggtaaaccgtatgatttcagcttctcatggagcgacgatcgccagtactgttcggaagtggtgtggaaggtttaccagaacgcgctgggaatgcgcgtgggcgagcagcagaagttgaaagagttcgacctgagcagcccacaagtggagccactaaacgataccgaaaggatgctggcgctggcggaaaatatgctcgaccgctacggcatcatcagtcgtcaggcggtgatagccgaaaatatccctggcgggtttccatcgatgcaaacgctttgtcgaagtatggaagactccgggcgaattatgcgaggtcgttttgtagaaggtctgggtggcgcgcaattcgctgaacgtctgactattgaccgattgcgcgatctggcgacacaagccacgcaaacgcgccactatacaccagtggcgctctctgccaacgatccggctaatgtgtggggaaatcttctgccctggcctgcacatccggcaacgctggttccaacgcgtcgggcgggtgcgctggtggtcgtttctggcggcaaattgttactctatctggcgcaaggtggcaaaaaaatgctggtctggcaggaaaaagaggaattactcgccccagaggttttccacgcgctgactaccgcactgcgtcgcgaaccacggctgcgctttacgctaacagaagtgggtacatgataaagaacagaccacgcagacactgaaaatggtggcggaaaatggtcgttgggtcattgacgatattgtcagcaatcatggcagcgtcttacaagcagttaatagcgagaatgaaaaaacgctggccgctttagcttcgttgcaaaaagaacagccggaagcctttgttgccgaactctttgaacatattgctgattatagctggccgtggacgtgggtggtttccgactcttaccgccaggcggttaatgccttctataaaaccaccttcaagacggccaataatcccgatgaagatatgcaaatagaacggcaatttatttacgacaatccgatctgttttggcgaagagtcgctattttcacgcgttgatgaaattcgagtcctggagaaaaccgccgattccgcccgcattcatgttcgttttacgctgaccaatggcaacaacgaagagcaagaactggttttacagcggcgcgaaggcaagtgggaaatcgctgattttatccgcccgaacagcggcagcctacttaagcagattgaggcaaaaactgccgccagattaaagcaatga

SEQ ID NO: 26704 - DNA, 1195 bp, Homo sapiens
  SIMILAR (232)..(600): 971254mologous to Escherichia coli K12 homolog of pectin degrading enzyme 5-keto 4-deoxyuronate isomerase,accession number AE000368,Smith-Waterman Score=658.
ttatcggaggttgatgtggacgtaagacagagcatccacagtgcgcacgcaaaaacgctggatacccaagggctgcgcaatgaatttttggttgaaaaggtatttgtcgccgatgagtacaccatggtttacagccacattgaccgaattattgttggcggcattatgccgataactaaaacggtttccgttggcggggaagttggtaaacaactcggcgtaagctatttcctcaccagtaaccgtcgcacgattaacaaatatttggtcccggatgtactggaaacctgccaatcgagtatggggctgacggagctggctccgggtaactagtggaacaccatgccgtgtcacacccacgagcgccggatggaagtttatttctatttcaatatggatgatgacgcctgcgttttccacatgatggggcagccgcaagaaacgcgtcatatcgtgatgcataacgagcaggcggtgatctccccgagctggtcgatccattccggtgtcggaaccaaagcttatacctttatctggggcatggtcggtgaaaaccaggtctttgatgatatggaccatgtggccgttaaagatttgcgagctaatcatcatcagcgctttatcatcagtcagcgcagtgacattcacctcacgacgcaatggatcaagcgagcagcgcagaccattcatccgccagtttccataatccagcaaatcgttgcgttcttcgagtgagagtggcgtcggcgttgggttaaccaccgcgacctctttcagcgcaggcgcgggcggtacgctgagcggcggttcgtcccctttcttgatccacgcggtttcactgccaacgcgcttttgctgagcatcaataaacaacaacgctgcttttaagccactcagagaaatggtctgatcgccatcgcgtaaggtgattgccttcccttcctgaatcatctgcaaaaacgcggtgatggttgccgtatcatcggttactaataaccatggtgaaatccgccacttgtcaccacttaacgccaacggctcgccatctaacagcagccgtggcgctatctccccttctgacgcctccggcgacttcaatccgccgcgctcaatacctccaacggcatctggtactcgccccggcgcaacaactcagggtcatctccagtccattatatctactacagtcggccag

SEQ ID NO: 26705 - DNA, 515 bp, Homo sapiens
  SIMILAR (85)..(240): 321254mologous to Arabidopsis thaliana putative zinc-finger protein,accession number AL022604,Smith-Waterman Score=72.
ctcctacaaggttgaggtgaagattaaacccagcacgctgcaggtcgagaatatttccattggtggtgtgcttgtcccactggaactgaagtctaaagagcctgatggggacagagttgtttatacgggtacatatgacacagaaggtgtgaccccaacgaagagtggagaacggcaacccatccagatcaccatgccggagtgcctggaacaacgaccccaagagatctctcttacatatgaatgtgaagaataagcacattcttcaatgtgtgccatcatgaggaacaaatgttctttttttttttttccaaattatttgctttgcattctaggggagggcttctcacaggccatcagaattatcggggatgcttgttaaaatgtagattcctaaactctacctttttagacctcttaaattgagcaaactctctgagagtaaatccaaagcatctgcattttattaagcactttaggtgattcttatcatattaaagtttggaaaacactaa

SEQ ID NO: 26706 - DNA, 600 bp, Homo sapiens
  SIMILAR (277)..(537): 281254mologous to Lactococcus lactis subsp. lactis translation initiation factor IF-3,accession number AE006414,Smith- Waterman Score=85.
atgccgtatgctgttctttttctcctgagttttctgttcaggctggtgatggtgcctgggattagcaacatccccacagcaagaggatgttttttggtttatccatggcagggacgatttcttgccagcgaccgctggataatgcacccagtagacctctggcgggaaatctattgcaggaatatttccattggtggtgtgcttgtcccactggaactgaagtctaaagagcctgatggggacagagttgtttatacgggtacatatgacacagaaggtgtgaccccaacgaagagtggagaacggcaacccatccagatcaccatgccggagtataaaatagaggaacaaaccataactcttaaaaggcttcagaattctactagtctaacccttcattttagagataagcaaactgaggcagagaaaggtgtggtgaccatccaggatgtgagcaggactcccacgctccagccaatggatttctacgtgatcttgattaatttcatgtctgcagtagaagtaggtggcatggtgaatagaaagaagtacactcgagattctatgccagtgggttgtaagaccaccaaaattgtttaa

SEQ ID NO: 26707 - DNA, 763 bp, Homo sapiens
  SIMILAR (25)..(171): 411254mologous to Homo sapiens Human bcl2 proto-oncogene mutant protein fragment 14,accession number Y21166,Smith-Waterman Score=82.
ggaggcacgagggcggcagcctcagctccaccacctccctcaccctccccgcgcttcctctccgcccctcgcgctccagccactcggccgcagccggcgctgtcctccgccccccggagccgccgcgccagaccctcgcccagacatgggggacctgccgggcctcgtgcgcctctccatcgcgctgcgcatccagcctaatgacggcccggtcttttacaaggtggatgggcagcgcttcggccagaaccgcaccatcaagctgctcaccggctcctcctacaaggttgaggtgaagattaagcccagcacgctgcaggtcgagaatatttccattggtggagtgcttggcccactggaactgaagtctaaagagcctgatggggacagagcagtttatacgggtacatatgacacagaaggtgttgaccccaacgaagagtggagaacgggcaacccatccagatcaccatgccgttcacagacattgggaccttcgagacagtgtggcaagtcaagttctacaattaccacaagcgggatcactgccagtggggaagccccttctctgtcattgagtatgaatgcaagcccaacgagacacgcagtctgatgtgggtgaacaaggagtccttcctctgaaagtggctctttctgatgctactggacaatcttttcagaaatctacttttagataaaccagcgcaggccttaaacaaggcatgccacaccattgctgttccccatctggtactaatgaccg

SEQ ID NO: 26708 - DNA, 429 bp, Homo sapiens; identical to SEQ ID NO: 3963
  SIMILAR (196)..(411): 551254mologous to Homo sapiens Human secreted protein HCHPF68, SEQ ID NO:163,accession number Y86248,Smith-Waterman Score =162.

SEQ ID NO: 26709 - DNA, 426 bp, Homo sapiens
  SIMILAR (237)..(323): 961254mologous to Plasmodium falciparum glutamic acid-rich protein,accession number J03998,Smith-Waterman Score=141.
atggggcgatgcccaccccagagtgagaaaccaaagaaaagcagccccccccactcaccacagcagccccacgggctggcatcttccctccctgagctccaggtccccatgactgttgacacatcccaggaaggggagctaaagggacctgtgggtgtaccttttgtgccaattcgatgtaccactcttgttgcttctagacttaaatctatggtagaaattgaggtggcaaggccaaggaagaagaagaagaagaagaagaagaagaagaagaagaagaagaagaagaagaagaagaagaagaagaagaagaagaagaagaaggaggaggaggaggaggaagaagaggaggagaaggaggaagaggaggaggaggaagaaaaggaggaggaggaggtggaaataatcaatgtagtatatgcttga

SEQ ID NO: 26710 - DNA, 252 bp, Homo sapiens; identical to SEQ ID NO: 3917
  SIMILAR (100)..(219): 851254mologous to Homo sapiens Human secreted protein HCHPF68, SEQ ID NO:163,accession number Y86248,Smith-Waterman Score =171.

SEQ ID NO: 26711 - DNA, 174 bp, Homo sapiens; identical to SEQ ID NO: 3961
  SIMILAR (28)..(156): 741254mologous to Homo sapiens Human secreted protein HCHPF68, SEQ ID NO:163,accession number Y86248,Smith-Waterman Score =148.

SEQ ID NO: 26712 - DNA, 280 bp, Homo sapiens
  SIMILAR (16)..(228): 591254mologous to Alcelaphine herpesvirus 1 putative immediate early protein,accession number AF005370,Smith-Waterman Score=217.
atgaagggaagaagaaggaaaaagaaggaaggagaaggaggaggaggagaatcggaaagaggaggaggaggaggagaaggagaaggagaaggagaagaagaagaagaagaagaagaagaagaagaagaagaagaagaagaagaagaagaagaagaagaaaaagaagaagaagaagaagaagaagaagaacaagaagaagaagaagacgacgaagaagaagaggaagaaaaatcctgtagtgtcaatgtctcactgatagaattaccctgggaccccaagg

SEQ ID NO: 26713 - DNA, 379 bp, Homo sapiens; identical to SEQ ID NO: 11232
  SIMILAR (90)..(365): 721254mologous to Homo sapiens Human thyrotropin GPR N- terminal sequence,accession number W03626,Smith-Waterman Score=321.

SEQ ID NO: 26714 - DNA, 363 bp, Homo sapiens
  SIMILAR (70)..(261): 781254mologous to Homo sapiens Human follicle stimulating hormone GPR N-terminal sequence,accession number W03627,Smith- Waterman Score=225.
atgggccgggcgtggtggctcatgcctataatcccagcactgtgggaggctgaggtgggcggattacctgaggaagaagaagaaggagaaggagaaggagaaggagaaggagaaggagaaggagaaggagaaggagaaggagaaggagaaggagaagaagaagaagaagaagaagaagaagaagaagaagaagaagaagaagaagaagaagaagaagaagaagaagaaaaagaagaagaagaagaagaagaagaaacagttattatcaaaggatgcattagtctgaagcactccactgccattcaggcactgagacataggagttgcgctatacaatggatacttggacagtgcagggattag

SEQ ID NO: 26715 - DNA, 847 bp, Homo sapiens; identical to SEQ ID NO: 11235
  SIMILAR (1)..(684): 981254mologous to Mus musculus reverse transcriptase,accession number D84391,Smith-Waterman Score=1238.

SEQ ID NO: 26716 - DNA, 396 bp, Homo sapiens
  SIMILAR (127)..(348): 621254mologous to Arabidopsis thaliana putative protein,accession number AL162506,Smith-Waterman Score=231.
atgttgatgaaagacccacagtggaacagcagcatcttcatctccacccacttagctctacaacagaagcgcagacaagcagagtatggtgcccaggagcctagcagaaggatagttgggggaaaaggatcaggagctcaggtagatgaagaagaagaggaggaggaggaggaggaggagaaggaggaggaaaaagaagaagaaggagaagaagaggaagaagaagaagaagaagaagaagaagaagaagaagaagaagaagaagaagaagaagaagaagaagaagatgttgttgttgagtcttccgatgatcaggccaagactaccacatcctcgttgggcttcatctccatcctctatggttgccaaaccatagtgtgcattagagtcgcttag

SEQ ID NO: 26717 - DNA, 2034 bp, Homo sapiens
  SIMILAR (928)..(1929): 991254mologous to Homo sapiens leukocyte antigen F,accession number X17093,Smith-Waterman Score=1782.
atggcgccatattgtagcaggacgagccgcagacaaaactcctcagacaccgagttaaagaaggaatgggtttattcggccgggggcatcggcaagactcctgtgtcaggagccgagctcccccaccagccaacagtagtagctgaaaagcgagagcacactgatgaagaacactgcgggcacaaagaaaaggaaaaaacgtggcgttctcaggaattgacgtcctccaggcccccagatgagggtagtgagcaccctgagagccagctggactcccctcttggtgtgttactgcacagccacagcctctggagtggaatgatagctgatgacatcattttaaaagtcacagtactacagagatgtttggacactcatcagaggcagacctgctgtgggaaagtcaaggccttggctgatgcaaaaataattgcagtttttgccattacaataattcttaccaagaactattcacattggaccaaagccaattgtaatgatccatgtgatggagagagccagaatgctatgaaagtggccttgaccagaaataggtcatttgatccttggctcattgacatctccatagattttcggtgtacaatgttcggtctgatgtgcaaggtacaacttttccagagaagaagaggaggggggcggggaggagcaggaggaggaggaaagaaggaggagaaggagaaggagaaggagaaggagaggaagaggaagaggaagaggaagaggaagaagaagaagaagaagaagaagaagaagaagaagaagaagaagaagaagaagaagaagaagaagaagaagaagaagaagaagaagaagaaaaggaagaagaagaaactgtctctacaccttcattctcaggacaagttcattgtctggcaccaagctccttgggacgcggaggttggggtcatggcgccccgaagcctcctcctgctgctctcaggggccctggccctgaccgatacttgggcgggctcccactccttgaggtatttcagcaccgctgtgtcgcggcccggccgcggggagccccgctacatcgccgtggagtacgtagacgacacgcaattcctgcggttcgacagcgacgccgcgattccgaggatggagccgcgggagccgtgggtggagcaagaggggccgcagtattgggagtggaccacagggtacgccaaggccaacgcacagactgaccgagtggccctgaggaacctgctccgccgctacaaccagagcgaggctgggtctcacaccctccagggaatgaatggctgcgacatggggcccgacggacgcctcctccgcgggtatcaccagcacgcgtacgacggcaaggattacatctccctgaacgaggacctgcgctcctggaccgcggcggacaccgtggctcagatcacccagcgcttctatgaggcagaggaatatgcagaggagttcaggacctacctggagggcgagtgcctggagttgctccgcagatacttggagaatgggaaggagacgctacagcgcgcagatcctccaaaggcacacgttgcccaccaccccatctctgaccatgaggccaccctgaggtgctgggccctgggcttctaccctgcggagatcacgctgacctggcagcgggatggggaggaacagacccaggacacagagcttgtggagaccaggcctgcaggggatggaaccttccagaagtgggccgctgtggtggtgcctcctggagaggaacagagatacacatgccatgtgcagcacgaggggctgccccagcccctcatcctgagatgggagcagtctccccagcccaccatccccatcgtgggcatcgttgctggccttgttgtccttggagctgtggtcactggagctgtggtcgctgctgtgatgtggaggaagaagagctcaggtgattggattgtggctgcccacagcgagagaggattttccccgctcagtcactcacatgccaatcccttccagaaacaccctcgcaggcacacccagaaataa

SEQ ID NO: 26718 - DNA, 960 bp, Homo sapiens
  SIMILAR (569)..(724): 691254mologous to Leishmania major 18 kDa nuclear protein,accession number AJ237814,Smith-Waterman Score=164.
atgcagaaagaactgaagggcaccaaaacctcagtcctacccctagaccatggtactcccacaggccctcctgagctctccgaatggaaaccagggactccccaagatcctggagttgaggaggaagcagtaaaggtgacagaaaaggagtgcgatcaaggaggaaggagcgtaggctgtttggaaagccaagtgaagaaagtgtttataggagagaatgatgcttatcactcaaagcaagctaatcccaaacgctctaccgataggtgggagagtggaatgagcaaatatgagagatggaattgtaaatttgcttcaccacccacaccaagccaacagcacacacaactgctgcaatgcatggatcttcctgaaatccagaccagaccaagatatgccaagaaacaatacaggggcaaaaaggattcctatttctctaagagtttatgtctaagaggctatgcccaaacggaatcatattttagacacactaagaagtcattctggtttgttgaaagcagtagctctatgctacagtggcatcaggaacatctggaaaacttttccaaaaggaagaagaaggagaaggaggaggaggaggaggaggaggaggaggaggaggagaaggagaaggagaaggagaagaagaagaagaagaagaagaagaagaagaagaagaagaagaagaagaagaagaagaagaagaagaagaagaaaacatcacaggatgctgttttgcggatactggagaaacaatgcttttgggaaaacatcaaggatgaaaaacaaggccacggaggtgattcagacaacagtaatgcagtgatccagggcccagggcaagctggctgtaaggaacgggtgcggggcctcacaggtgctgccggcctggacagggaagacaagggcctgggatcagcaggacttggaaaggaaatgacggaagcccatagcttatga

SEQ ID NO: 26719 - DNA, 495 bp, Homo sapiens
  SIMILAR (251)..(493): 971254mologous to Homo sapiens unnamed protein product,accession number AK022613,Smith-Waterman Score=384.
  misc_feature (1)...(495): n = a,t,c or g
ggggccccttgacggctgtggattgagcacagtggatctgcagcattgggttttgccatcacggttacaggcttcccaagtaaagttgaaaagtaaaggacgagcaagttcctcaggaaatcaagaaagcagcggtcagagctgtattattctcctctttgatgtaataaagtcagctattagatatgagaaaaccatttcagaagcctggattaaggcaattgaaaacactgcctcagtatctgaacacaagggcattttagattatctggataacatatcccctcagcaaatacgaaaactcttctatgttctcagcacactggcatttagcaaacagaatgaagccagcagccacatccaggatgacatgcacttggtgataagaaagcagctctctagcaccgtattcaagtacaagctcattgggattattggtgctgtgaccatggctggcatcatggcggcagacagaagtgaatcacctagtttgan

SEQ ID NO: 26720 - DNA, 3117 bp, Homo sapiens
  SIMILAR (803)..(946): 281254mologous to Homo sapiens Human Adipose Specific Protein 1,accession number Y94441,Smith-Waterman Score=46.
atggccattgaagtaggggtcgcctgtcctctgtggcttgatcaaaggcacacaggactgtcaatggcaggataccagctctggtcaccatggaccccactggatgagagtttccaatggctgcggcacacgacacctacaccttcctccaagcacccattcaaggcctccccctgcttcccacacacaccgtccgaccttgaagtgcagctgtgctttcaagaggtcactctagtcctagacagcccattcctggaatctggagtgagtcccaagttaccctgccacacatcagagttgcgcacgatgaacaacaaaggactggtcaggaagccccagcccatccgcctcagtggagtagattctgtctttggcagggttatcacagctcagccaccaaagtggaccgggactttcagagtttcagacaagtcagccttttgcaaaatcattagcagggagcaccagtggcccattggactgaaggagcctcagattcagatgacagtcactatgtgcaaacagatgctgcgctctatcctcttgctgtatgcaacttacaaaaagtgcacctttgccttgcagcactccaagcatacttttgttgttttcttccgtgtgatgatggctgaactagagaagacggtgaaaaaaattgagcctggcacagcagcagactcgcagcagattcatgaagagaaactcctctactggaacatggctgttcgagacttcagtatcctcatcaacttgataaaggtatttgatagtcatcctgttctgcatgtatgtttgaagggtgaagagattaagtcccaaaattcccaggagagcacagcagatgagagtgaggatgacatgtcatcccaggcctccaagagcaaagccactgaggatggtgaagaagacgaaataatagaagaatttgttagtggcctggagtcttacattgaggatgaagacagtttcaggaactgccttttgtcttgtgagcgtctgcaggatgaggaagccagcaagaacagtgatgaaatcaacatacctcgactcattgtcagtcaactaaaatggcttgacagagttgtggatggcaaggacctcaccaccaagatcatgcagctgatcagtattgctccagagaacctgcagcatgacatcatcaccagcctacctgagatcctaggggattcccagcacgctgatgtggggaaagaactcagttcctcaggaaatcaagaaagcagcggtcagagctgtattattctcctctttgatgtaataaagtcagctattagatatgagaaaaccatttcagaagcctggattaaggcaattgaaaacactgcctcagtatctgaacacaaggtgtttgacctggtgatgcttttcatcatctatagcaccaatactcagacaaagaagtacattgacagggtgctaagaaataagattcgatcaggctgcattcaagaacagctgctccagagtacattctctgttcattacttagttcttaaggatatgtgttcatccattctgtcgctggctcagagtttgcttcactctctagaccagagtataatttcatttggcagtctcctatacaaatatgcatttaagttttttgacacgtactgccagcaggaagtggttggtgccttagtgacccatatctgcagtgggaatgaagctgaagttgatactgccttagatgtccttctagagttggtagtgttaaacccatctgctatgatgatgaatgctgtctttgtaaaggcccgacgccgctctgacgccactgaggtgcgccacgacgtgacgtcaacgttcgcgccggaagtggaagaccaggcagcccagctgaaggcaactgggaaccagctttcagtgaagatggcagggccagaactgttgctcgactccaacatccgcctctgggtggtcctacccatcgttatcatcactttcttcgtaggcatgatccgccactacgtgtccatcctgctgcagagcgacaagaagctcacccaggaacaagtatctgacaggcgtcgggcctggtgggactgtcagctgagatgccaagtaccaaagcgctttgcagtctgtaaaactgccattagagattgtttagctgctgagaatcacggtgtagttgatggaccaggagtgaaagttcaggagtaccacataatgtcttcctgctatcagaggctgctgcagatttttcatgggctttttgcttggagtggattttctcaacctgaaaatcagaatttactgtattcagccctccatgtccttagtagccgactgaaacagggagaacacagccagcctttggaggaactactcagtatctacctggagcacacagagagcattctgaaggccatagaggagattgctggtgttggtgtcccagaactgatcaactctcctaaagatgcatcttcctccacattccctacactgaccagggatgtacttcttgggattctccaaatactccatcagtgtatcctctccccaggtgatgcctttgttcttattggtgtctgtgatgacatgcacttggtgataagaaagcagctctctagcaccgtattcaagtacaagctcattgggattattggtgctgtgaccatggctggcatcatggcggcagacagaagtgaatcacctagtttgacccaagagagagccaacctgagcgatgagcagtgcacacagatggaaaaactaagtcttgtcagcacgtccggcttccaggcacccgcctttaacacgtgcgataccatctggcttccagaaaagcccaacagaaacatgatccgccactacgtgtccatcctgctggagagcgacaagaagctcacccaggaacaagtatctgacagcatgcagcagagtgcaaggcacatggggacgaggcacccacagtccctctcccataagcctgccaagaagattgatgtggcccgtgtaacctttgacctgtacaagctgaacccacaggacttcattggctgcctgaacatgaaggcgactttttatgatacgtactccctttcctatgatctgcactgctgtggggccaaacgcatcatgaagtga

SEQ ID NO: 26721 - DNA, 397 bp, Homo sapiens
  SIMILAR (65)..(187): 381254mologous to Homo sapiens Similar to CAAX box 1,accession number BC000393,Smith-Waterman Score=67.
caattctgtcagtagctgatacaaacttcagaatacccttcacctcagccacagctgcccagtcccacagcttctttcctcccaaccccagcacccctgcacccttagctccaaaattcctaaaaggttcactgtttgttcttctaatttctccccatgatgttgcgtttgaaattggtttgctctagtgggtttccctgtagccttgcgtattcctgagctgcaacatcagattctggtttttctccgcagtgactttccatttcctgtgaaaagcactgtacggactggaagaatacgacactcaggatgggattgccataaacctcctgcccgctgctgttttctcaggactttgcaaaaagatgggggtcccggtgacctcacaggaatcagg

SEQ ID NO: 26722 - DNA, 1197 bp, Homo sapiens
  SIMILAR (109)..(285): 911254mologous to Homo sapiens ARF GTPase-activating protein GIT1,accession number AF124490,Smith-Waterman Score=273.
  misc_feature (1)...(1197): n = a,t,c or g
ggcattttagattatctggataacatatcccctcagcaaatacgaaaactcttctatgttctcagcacactggcatttagcaaacagaatgaagccagcagccacatccagcaactacactcgagcgtgcggacaggcaacctggagacatgtctgcgcctgctctccctgggtgcccaggccaacttcttccacccagagaagggcaccacacctctgcacgtggctgccaaggcaggacagacactgcaggccgagctgcttgtagtcgccgcaaagaatccggaaaaacgtgaatataccaccgaaaacggatctccggctgaaacccctacgtgtagcgcaggaaaacgaggaacaccacgaaccaagatgtcggacatctccagcgaggacctgcgtcgtgaaattcaggcggttttgaaggacgccgatttggcgaccatttcggcaaagagggtgcgcgagcaggtggagggaaagctgaactgctcgttgctgagccgcaagaaggagttcgacaagatcgtgatggaggtgatcaacgagcagcaggacgaggaggacgaagacgatgacgagggcaaggatcccgatgccgatcccgacgatgagagcgagcccagcgaggaggaggaccccagcagcagcgaggaggaggccgccaagaagaagaagcagacccccaagaagaggccacagcccacgaagcacaaggcgcccaagaagaagcgcaagaccctaaatgccgacgattccggcaccgctgatgaacgactgccnnnnnnnnnnnnnnnnnnnnnnnnnnnnnnnnnnnnnnnnggtgtagagtacaatagcacacttcacacttgtcctgaagtggttggtgccttagtgacccatatctgcagtgggaatgaagctgaagttgatactgccttagatgtccttctagagttggtagtgttaaacccatctgctatgatgatgaatgctgtctttgtaaagctcagcaaccggctttttgaggaactcgccatggacgtgtatgacgaggtggatcgaagagaaaatgatgcagccggattccagcccaaactctgggtctggatgagtggcactggccttgttccatttgtctgtccccagccggccacgcccagccttgccctggcccggcctagctctgcgtgcccaaagaccacccctgtctga

SEQ ID NO: 26723 - DNA, 1774 bp, Homo sapiens; identical to SEQ ID NO: 4571
  SIMILAR (31)..(597): 951254mologous to Homo sapiens Human Adipose Specific Protein 1,accession number Y94441,Smith-Waterman Score=925.

SEQ ID NO: 26724 - DNA, 1099 bp, Homo sapiens
  SIMILAR (682)..(581): 971254mologous to Homo sapiens Human breast tumour-associated protein 10,accession number Y48465,Smith-Waterman Score=183.
gcacgagcccagctgaaggcaataagcttggtctcaccgctgcagcagaggttctgtgctagccgggcataggggcgagagaaggcccagaggcgacagtcagagagaagcaactgcgccccggtgaagagaagctcgcccatcaccggctgggagccagctttcagtgaagatggcagggccagaactgttgcttgactccaacatctgcctctgggtggtcctacccatcgttatcactcttcgtagacatgatccgccactacgtgtccatcctgctggagagcgacaagaagctcacccaggaacaagtatctgacaggggacgaggcacccacagtccctctcccataagccctgccaagaagattgatgtggcccgtgtaacctttgacctgtacaagctgaacccacagggacttcattggctgcctgaacatgaaggcgactttttatgatacgtactccctttcctatgatctgcactgctgtggggccaaacgcatcatgaaggaagctctccactgggcccttttcagcatgcaaaccacggggccacgtgctgcttcacctcctgttacctgcagcagctcctcgatgccacagaggacgggcatccccccaagggcaaggcctcatccctcatcccgacctgtctaaagatactgcagtgaaagcccaagccctagctttccccagtgaaggactaaaattaggggccccccgctcaattggtagtggccacaagcctggcagctgtagagccgctaaccttccgacacctccctcaccacacaggaccctgagtgaggaggaggggctggaaacctgggatgggttggccaaaggagaacctcaggctcctggcctggcccagctccttcctgcccaaggtagcttagcccatccagactggtcctgaagtctgtccctccattggcatgaagtttgcccctcagcagtccggcctcacaggctgtactttcatggtgctctttaccttttggcccccatcccagaacatttgtgagtgaatttgcaagcatactagcatgtgatattagggagtttgcaataaattattgatgctgaaaaaaaa

SEQ ID NO: 26725 - DNA, 3130 bp, Homo sapiens
  SIMILAR (986)..(1195): 871254mologous to Homo sapiens Human Adipose Specific Protein 1,accession number Y94441,Smith-Waterman Score=331.
atgcacttggtgataagaaagcagctctctagcaccgtattcaagtacaagctcattgggattattggtgctgtgaccatggctggcatcatggcggcagacagaagtgaatcacctagtttgacccaagagagagccaacctgagcgatgagcagtgcacacaggtgacctccttgttgcagttggttcattcctgcagtgagcagtctcctcaggcctctgcactttactatgatgaatttgccaacctgatccaacatgaaaagctggatccaaaagccctggaatgggttgggcataccatctgtaatgatttccaggatgccttcgtagtggactcctgtgttgttccggaaggtgactttccatttcctgtgaaagcactgtacggactggaagaatacgacactcaggatgggattgccataaacctcctgccgctgctgttttctcaggactttgcaaaaggatgggggtctggtgacctcacaggaatcaggccaaaaattggtgtctccgctgtgcctggctccgtatttccggttactgagactttgtgtggagagacagcataacggaaacttggaggagattgatggtctactagattgtcctatattcctaactgacctggagcctggagagaagttggagtccatgtctgctaaagagcgttcattcatgtgttctctcatatttcttactctcaactggttccgagagaatgaccttctcaccttcactgtggaactactgttcgtcctggcacaggcatatgcctactgttttgattcaattgtaaatgccttctgccaggaaacatcacctgagatgaaggggaaggtgctcactcggttaaagcacattgtagaattgcaaataatcctggaaaagtacttggcagacatgatccgccactacgtgtccatcctgctggagagcgacaagaagctcacccaggaacaagtatctgacagcatgcagcagagtgcaaggcacatggggacgaggcacccacagtccctctcccataagcctgccaagaagattgatgtggcccgtgtaacctttgacctgtacaagctgaacccacaggacttcattggctgcctgaacatgaaggcgactttttatgatacgtactccctttcctatgatctgcactgctgtggggccaaacgcatcatgaacaagaacagtgatgaaatcaacatacctcgactcattgtcagtcaactaaaatggcttgacagagttgtggatggcaaggacctcaccaccaagatcatgcagctgatcagtattgctccagagaacctgcagcatgacatcatcaccagcctacctgagatcctaggggattcccagcacgctgatgtggggaaagaactcagttcctcaggaaatcaagaaagcagcggtcagagctgtattattctcctctttgatgtaataaagtcagctattagatatgagaaaaccatttcagaagcctggattaaggcaattgaaaacactgcctcagtatctgaacacaaggtgtttgacctggtgatgcttttcatcatctatagcaccaatactcagacaaagaagtacattgacagggtgctaagaaataagattcgatcaggctgcattcaagaacagctgctccagagtacattctctgttcattacttagttcttaaggatatgtgttcatccattctgtcgctggctcagagtttgcttcactctctagaccagagtataatttcatttggcagtctcctatacaaatatgcatttaagttttttgacacgtactgccagcaggaagtggttggtgccttagtgacccatatctgcagtgggaatgaagctgaagttgatactgccttagatgtccttctagagttggtagtgttaaacccatctgctatgatgatgaatgctgtctttgtaaagggcattttagattatctggataacatatcccctcagcaaatacgaaaactcttctatgttctcagcacactggcatttagcaaacagaatgaagccagcagccacatccaggatgacatgcacttggtgataagaaagcagctctctagcaccgtattcaagtacaagctcattgggattattggtgctgtgaccatggctggcatcatggcggcagacagaagtgaatcacctagtttgacccaagagagagccaacctgagcgatgagcagtgcacacaggtgacctccttgttgcagttggttcattcctgcagtgagcagtctcctcaggcctctgcactttactatgatgaatttgccaacctgatccaacatgaaaagctggatccaaaagccctggaatgggttgggcataccatctgtaatgatttccaggatgccttcgtagtggactcctgtgttgttccggaagttgactttccatttcctgtgaaagcactgtacggactggaagaatacgacactcaggatgggattgccataaacctcctgccgctgctgttttctcaggactttgcaaaagatgggggtccggtgacctcacaggaatcaggccaaaaattggtgtctccgctgtgcctggctccgtatttccggttactgagactttgtgtggagagacagcataacggaaacttggaggagattgatggtctactagattgtcctatattcctaactgacctggagcctggagagaagttggagtccatgtctgctaaagagcgttcattcatgtgttctctcatatttcttactctcaactggttccgagagaatgaccttctcaccttcactgtggaactactgttcgtcctggcacaggcatatgcctactgttttgattcaattgtaaatgccttctgccaggaaacatcacctgagatgaaggggaaggtgctcactcggttaaagcacattgtagaattgcaaataatcctggaaaagtacttggcagatgcatataccaatggaacagaagagagcccagaaataagtccatacacctacaatgaactcattctcagcaaaggtgccaagaatatacattggggaaagacactctcttcaataaatggtgttgggaaaactggatatccatatgcagaagaatga

SEQ ID NO: 26726 - DNA, 710 bp, Homo sapiens
  SIMILAR (203)..(709): 891254mologous to Homo sapiens 30 kDa protein,accession number AF157321,Smith-Waterman Score=748.
cggacgcgtgggttttcgccggaagtggattaccaggcagcccagctgaaggcagtatgctcggctcacagtcgcaggagagttctggggtacacgggcaaaggggcttgagaaggcccggaggcgaagccgaagagaagcaactgtgccccggagaagagaagctcgcccattccagactgggaaccagctttcagtgaagatggcagggccagaactgttgctcgactccaacatccgcctctgggtgggcctacccatcgttatcatcactttcttcgtaggcatgatccgccactacgtgtccatcctgctgcagagcgacaagaagctcacccaggaacaagtatctgacagtcaagtcctaattcgaagcagagtcctcagggaaaatggaaaattacattcccaaacagtctttctttgacacgaaaatattattttcaacaacccagaggatgggattttttcaaaaaaacttaaacgggaggtagtgccaccttctcctatgactgatcctactatgttgacagacatgatgaaagggaatgtaacaaatgtcctccctatgattcttattggtggatggatcaacatgacattctcaggctttgtcacaaccaaggtcccatttccactgaccctccgttttaagcctatgttacagcaaggaatcgagctactcacattagatgcatcctgggtgagtt

SEQ ID NO: 26727 - DNA, 417 bp, Homo sapiens
  SIMILAR (332)..(228): 421254mologous to Kluyveromyces lactis cytochrome oxidase assembly protein,accession number AJ238801,Smith-Waterman Score=64.
acgctgagctgctcgggcccataaccttgtcagtttgctgtgctaaccactacttatatcttttggtcgtgggacttctcaaaggacaggacagacataggcactctcacagtatcaagcccatttaccgtcacctcacaccaatactcgccccaccgtgtgataggctcttctggtaactttaatgtatgtggggcaaccacaacaccaagcgcctcacctgccttggtctggatcttctctaattttccttcttgtctcagcaatttctcctcttcaaacagcttcttgttttcaggggaagcatatacagccagtcccttgagaaagagtcgattccggcctaaagatttcttactgagaccaggtcaccccggactccaacatctgtcaattagaacagagacaggggaattt

SEQ ID NO: 26728 - DNA, 1127 bp, Homo sapiens
  SIMILAR (1004)..(1072): 471254mologous to Ovis aries small proline-rich protein with paired repeat,accession number L77967,Smith-Waterman Score=63.
tttttttttttttttttttaaaaaagaacatattctctttatttctgcttgggatacaaatgttcagtttggatgatgagaatgaggcaagtactggagacaatggctggctctcctgtttgtccccaataaactcccaaatggaggaagaagctaaaacaggttttggatcggtttcggtctacatgcatctagcttatcaaatcctacagccttggtacttctggaacaggacttccctgcccccagtgatgacagttaaagatggcaaaaatgaagaattcaacatgtaatacggcagtgcaagtcttgatgtccttcagactgttctctaaaattctcgtatttgggtcagaagctggggagtgaagatgcaggggtgctttgcacaattccttgctccacttgctcccgattcctgctttgcctgccttggaagggaagagtagatttagatctggggggctggtggggggccatagccttggaagccttgctgggctaaccagtacttatatcttttggtcttgggcttctcaaagttcacgaacagacataggcactctcacagtatcaagcccatttaccgtcacctcacaccaatactcgccccaccgtgtgataggctctgctggtaactttaatgtattgtggggcaaccacaacaccaagattctttaaagaagtggcgggcaactatttcagggttcagctcccatttgacattgttcttcatccctacctccaggcgacagctttttagaaatttacactgtcgcctcacctgccttggtctggatcttctgtaactttcctcctggtctcagcaatttctcctcttcaaacagcttcttgttttcaggtgatgcatatgcagccagtctctgagaaaggagttgattccgatccacagatttctttactgagatcaggtcaccccagactccaagtgtctccacagactgtgtgaagatgatctccagattttctttgggccagtgctccgtgtcctccaccagcttgtcgatgtagtgtcgctggtgcagacgcagcttctggccctccctggccagtggtaccttccatccacccagtgctccacaatgccgagggcacgacagtcccat

SEQ ID NO: 26729 - DNA, 711 bp, Homo sapiens
  SIMILAR (88)..(516): 821254mologous to Homo sapiens Human cell-cycle phosphoprotein CECYP-1,accession number Y16600,Smith-Waterman Score =609.
ggggccgcgtgggaatggaaacatctgccccacgtgcaggaagccgggtggtggccacgacagcgcgccactccgcagcgtaacctcgcagatcccctgcgtgtgtcctcgcaagactagctcaccgaaatggccgcgtccagtcaaggaaactttgagggagatattgagtcagtggaccttgcagaatttgctaagcagcagccgtggtggcgtaacgtgtttgggccagaatctggactctcagccgaaaagtatagcgtggcaacccacctgttcattggaggtgtcactggatggtgcacgggttttatattccagaaggttggaaagttggctgcaacagctgtgggaggtggatattttctccttcagcttgcaaaccattctgggtacatcaaagttgattggcaacgagtggagaaggacatgaagaaagccaaagagcagctgaagatccctaagagcactcagatacctaaccagaagcacatgtcccggatgcaggtcaaaagcctagagcaagctagatctgagctgtgcatacattggcagacacgtgtgagtggcccagtgccccagggacaagctcctattgttggtcccactggtgcccctcagcagcaggcctggccctggccttgtttacaagccagttctgtcacagtgtgcttagcagcagcagtggcagcaggatctgatggagcttag

SEQ ID NO: 26730 - DNA, 906 bp, Homo sapiens
  SIMILAR (448)..(663): 521254mologous to Homo sapiens Human cell-cycle phosphoprotein CECYP-1,accession number Y16600,Smith-Waterman Score =134.
  misc_feature (1)...(906): n = a,t,c or g
ccgcggggcctgtgacaccgcacgctgagctctgtgaggtagccgcttgcggagactgcaagcagccgcggcgcgcccggccctccctcttccgctgccgccgtgggaatggaaacatctgccccacgtgccggaagccaagtggtggctgacaactgcgcgccactccgcggcctaccgcgcagatcctctacgtgtgtcctcgcgagacaagctcaccgaaatggccgcgtccagtcaaggaaactttgagggaaattttgagtcactggaccttgcggaatttgctaagaagcagccatggtggcgtaagctgttcgggcaggaatctggaccttcagcagaaaagtatagcgtggcaacccagctgttcattggaggtgtcactggatggtgcacaggtttcatattccagaaggttggaaagttggctgcaacagcttgtggggaggtggattttttctccttcagcttgcaaaccatacttgggtacatcaaagtttgactggcaacgagtgggagaaggacattgaagaaagcccaaagagcagcttgaagatccgtaagagccaatcagattacctactgaggtcaggagccaaagctgcagggaggtggtgtcattttgtgaagaagaatgttctagtaacatgggggatttttccggaggctttctgcttggcatggcatcctaaggaagatgacctccatgttccattgttccctgggttttttcccagccagcagccttttacactccatcatagggacatcgagtccctcctcctcttcttcccatggccttctttccctggccattgggaaaattntgagtnggctttttttaaggcatcngcttggttacaaattcaatgttgggcaccatgaggctttcangggggggca

SEQ ID NO: 26731 - DNA, 735 bp, Homo sapiens
  SIMILAR (415)..(564): 341254mologous to Aedes aegypti=mosquitoes, Rockefeller, female, Peptide Partial, 92 aa vitelline membrane protein homolog {C-terminal},accession number S54556,Smith-Waterman Score=79.
atggtcattgcaaacagtgctgaacagacacctttacaagtcaccttatgcacgacagcaaaagtttcatcggaactccccagtggacttgctctcttaattcaaaatggctgtaacagtgtcacgttggctgcacctgtttcaaagaaagttcagaaaattgggtatttcacagacacattaagatttcaaacaaagacgagagcattcacaaggaacagagagggaacttccatagcagtcttcgagagagaagttctggtagaagaggaggtagagaacttccatgatggaggcgacttccaggagaagccgactgcccttctccatggaactcagcctgcatctgcccaggagtcagaggaggtgagggaggagatctgggaagggctggacaggcccatctgcttcctgccccctcagcctgctggtgagccagcacataacccacaaaagcctcaacagcccctggccccccatcaactttcaaaggcaccaatgcaaaagactatagctactgcttcagttccttcttccaaatgtcatatgaaatgcctcttaggggtctatactaacccagaactgtgcaggagagagaaatctgggaaacacagtttcagcttaactaaggtgaactgctattagtcaaccacacctagtctcactatgcccatttgtcatgtgtggcccactcagactgaaagaaatctttgttggttcactgttttataaggg

SEQ ID NO: 26732 - DNA, 1358 bp, Homo sapiens
  SIMILAR (1046)..(819): 341254mologous to Homo sapiens Human secreted protein clone du515_21,accession number Y29862,Smith-Waterman Score=58.
gcctcaccgcagccttgccgccacctttattgggcactcagccctgaggcttcttacacacacgcgccgggggatgggaggggatggggtgtcacttcgggggcagggaccctctggcggggaggacgggtggcttggtgataagagcatggccccagggcccggcgccttggcccccggaacgctctgtgaccctcgcagctgacctggcctaagggcgtgcagagtcgtgacctgggaccacccgtgggtgaagctggctccccaagtgtctggggctcaacttgggggcaattgaaaagcacggcccgctggttcaatggggttgtcaaggaagaacggagccactccttcttgaggcacttgtttcaagctgcgacagccgcaatgttggggggggttctcttgtttgaaccgcggcaactgggcttccttcaaaaggctgtgaaaggctgcccgcatgcgtctttcttgggtgccggtcggccgcctccttcggccaacgcttgagcaactgcaaatgggcgtcctcggatggtgccgcgcctccacgcttgccctcctccaagcacgcgggcggttcacgttcttcctccagcggcacctccagatggctcttggctttctcggctgtgtccggggcctccctgagctgatggtctcggcgcagcgtgtcctcgatctgggccccgggtgaccttgctggacgtggccacccgcggcgccttaccgccctagagcagggagtcctcctgcctccagtaggcgctgcgtctccttcgtacgttccaactggtggaggcaccgattatcattctgcgtcccagcactgctctttcctcatcacgtcgtttgtcgtcgtccttccagtaagcatcactccagctccttctgcttcttggcatcagcggccgccttggcctctgccctccgtgcccgggccgctgccgacttggtgttctcaccctggaacttcttgggcatccctcagcaggctgcggcgaagaggatggggatgggggagcaggggcbggaggggacatcggvactcagcaagccaagaatcacacttgggcagccatgaccctcttggggcctctgtggccttctctgtataaaacaagggctttggacttagcgctctccttgtaaaagtttattaaggcaaaattcacatcatgacaccaaatgagctcatttaggccaggtctggtggctcacacccgtaatcccagcaccttgggaggccgaggcgggcggatcacttgcggtcagaagctcgagaccagcctctcaaagtgcctggatcacaggtgtgagccacagtgcctggcaatttctgctgtttaagccaccca

SEQ ID NO: 26733 - DNA, 1374 bp, Homo sapiens
  SIMILAR (1)..(1371): 961254mologous to Homo sapiens putative G-protein coupled receptor,accession number U78723,Smith-Waterman Score=2211.
atgagtttcctcatcgactccagcatcatgattacctcccagatactattttttggatttgggtggcttttcttcatgcgccaattgtttaaagactatgagatacgtcagtatgttgtacaggtgatcttctccgtgacgtttgcattttcttgcaccatgtttgagctcatcatctttgaaatcttaggagtattgaatagcagctcccgttattttcactggaaaatgaacctgtgtgtaattctgctgatcctggttttccaatggtgccttttttacaattggcctattttattgtgagcaatatccgactactgcaataaacaacgactgcttttttcctgtctcttatggctgacctttatgtatttcttctggaaactaggagatccctttcccattctcagcccaaaacatgggatcttatccatagaacagctcatcagccgggttggtgtgattggagtgactctcatggctcttctttctggatttggtgctgtcaactgcccatacacttacatgtcttacttcctcaggaatgtgactgacacggatattctagccctggaacggcgactgctgcaaaccatggatatgatcataagcaaaaagaaaaggatggcaatggcacggagaacaatgttccagaagggggaagtgcataacaaaccatcaggtttctggggaatgataaaaagtgttaccacttcagcatcaggaagtgaaaatcttactcttattcaacaggaagtggatgctttggaagaattaagcaggcagctttttctggaaacagctgatctatatgctaccaaggagagaatagaatactccaaaaccttcaaggggaaatattttaattttcttggttactttttctctatttactgtgtttggaaaattttcatggctaccatcaatattgtttttgatcgagttgggaaaacggatcctgtcacaagaggcattgagatcactgtgaattatctgggaatccaatttgatgtgaagttttggtcccaacacatttccttcattcttgttggaataatcatcgtcacatccatcagaggattgctgatcactcttaccaagttcttttatgccatctctagcagtaagtcctccaatgtcattgtcctgctattagcacagataatgggcatgtactttgtctcctctgtgctgctgatccgaatgagtatgcctttagaataccgcaccataatcactgaagtccttggagaactgcagttcaacttctatcaccgttggtttgatgtgatcttcctggtcagcgctctctctagcatactcttcctctatttggctcacaaacaggcaccagagaagcaaatggcaccttga

SEQ ID NO: 26734 - DNA, 3031 bp, Homo sapiens
  SIMILAR (505)..(852): 871254mologous to Homo sapiens 60S ribosomal protein L30 isolog,accession number AF201949,Smith-Waterman Score=540.
cgcatacagtggtccatttccaagacaaagtgccttaaattggcttaggtcagcaaactacagaagaaacaggaaatactaggcccctgcttcgatagctgatgcctgcttgtcagcctccccaccttccccctcttccccgccccttagttgccctcacccgaaccaaagaagtttagtctgagatgaaagtttactagcctgcagaatagcttgctttgtctgttcttatcagccttcccagctacttaggtcataaatcaaattcttaaagagcccccgagctgactaggattgcaatgcattgtgggctgcaacaaaatgtagcaagacaaccctaaagaaacacctaaagcctctaaccctggcacacgataagggctcggttttgttcgacgacttcactttttttccagtgaagaaacagaagcccgaggggcaatcctctaccactgaatttctgtaatcttcatttgacgtatttttccataggccacaagtgccaattgcaagttgttcagattttgtaaatctaaatgtcataaaaacttttaaaagaagtgcagtcctcgcaaagctaggtggatcaaagcattccagaatgcagctggtaaagagcttacagtggataattcatttgaatttgaaaaacgtagaaatgaacctatcaaataccagcgagagctatggaataaaactattgatgcaatgaagcaaattgaagaaatcaaacagaaatgccaagctaaatttataatgaacagactgaataaaaataaagagctacagaaagttcaggatatcaaagaagtcaagcaaaacatccatcttattcaagcccctcttgcaggctggaatggttcatgtggacaagatgagtcctaagcaaaactgaaccaggtcccaccaggacctgacgtggggccactagatttggagccatgggtattaactatcacagcagggagccccaacccctgggccactgacccgctacccaagacctaattatatgctaattaccaaacgaaattacacaccttcagagagctttcctctgactgcttggaggaagctctgcccaccacaaatgcaacgagtaaccctggcacccagttgcgtttccgcggcttgctaaaggcctgctctccaaggctgccaggccttgctgagtttgcacaaagaaacgcggcccgcggtagcaggcgtccggctaaaaaggtcaccagtttggctgatcccaggactgttagggttaacttcccagtctgcttgtcacgtccctgtgaccatcaagtccaaggcctcttgtgtgatcggatcatcaagggccacaataaggatgtcacctatgtaatgaatgcacatgaccactttgtgcagggaccgggaaggcggagctagggatgcaggttcggtcgcctctttaggccactgcgccacgcagtcttcccagaaactgtcaaggtgctggtatgtttcttgcccttgcacttttagtgtactaaaatcaacggccaaactctactctttatagcaatcaaagctttttgccgagcacgtgaaccctcaacttctgtactccttccgtcacccagcgacgtggcgctgaatcccgcgtcacacctttctctaccccacgccgaaccctcaccctcatcctccttttctgatctccgtctgagtgaccccggtggtggactgtcgattgagatggggccagggggctgcctgtgactggttatctcctccctaagggtgtctgcagtagtgacaaggagctactattctccaactaggaaggagactccattgacctttatctgttttttctggaaactaggagattcctttcccattctcagcccaaaacatgggatcttatccatagaacagctcatcagctgggttggtgtgattggagttactctcatggccctcctttctggatttggtgccgtctactgcacatacactttgatgtcttatttcctcaggaatgtgactgacacagatattctagccctggaacagcgactgctccaaaccatggatatgatcataaaaactccagaactcagtcatctgtaccccacgattttgttaattttacctcaggagcttgaagttttgtcttcctaaaacttatagcgaccgcttgtcttcctaaaatttacagcgaccgtttttaggactcacgctcttagaaccccgtccattcgaataaatgactatacgcttgtaagtggtttacgctgtgtaactcagtactacgaatacgacttgctctcttcctacaccagatttaaagagggagccccgtgggagcccaaagacaatcttgctgtagaataagaataggtgctgaattaagaagactgttttcctttagacaataagctaaaacatttgtaagactcacctcatttatttctcttctctcaggtatcgcagtcccaaactgacagcaggcgatgcctgaaaacagttatttcacatacttatgtaatagaaggaaaaatccctcatatccaccgctcacatccatggcctactccaggattagagagagagagagaggggtataagttcttttcagggctctctctggtttcagagtcccccagttctaaaggtcacatagtaaagtttggtggatgtcaggacttacttggtttgtgtttgggcatccaacacatcgtcttaccactgcagtccatgaaaagtgcactgacaagaacattgggatctccaggtagttgtttctacccaggaagagacgagggaagaccaccaaagcagtgtggtagccgggaaattacagataaggatcaaccagccaatgtcaacttccttcctctcatgaactctaccccttcctggctagattctgatcatcctggtgtatttgtcacagacccaaaatacaaatctctagtcaacagtatagagctcttcatggcttccaaaacaaggcatatttccttcctagaatgttccttctctggaatccccgtgattcactcctcat

SEQ ID NO: 26735 - DNA, 734 bp, Homo sapiens
  SIMILAR (144)..(482): 861254mologous to Homo sapiens 60S ribosomal protein L30 isolog,accession number AF201949,Smith-Waterman Score=508.
ctggtctaacagacccgcgagaacgaaggacgcttgcctttttccggtcggggaagggggaagaaggtaacttccggtgacggggttgcatcacttcctctcaagcttggcgtttgtttggtggggttacacgcgggttcaacatgcgtatcgaaaagtgttatttctgttcggggcccatctatcctggacacggcatgatgttcgtccgcaacgattgcaaggtgttcagattttgcaaatctaaatgtcataaaaactttaaaaagaagcgcaatcctcgcaaagttaggtggaccaaagcattccggaaagcagctggtaaagagcttacagtggataattcatttgaatttgaaaaacgtaggaaatggaacctattcaaatacccagcgagagctatgggaataaaactattgatgcgtatgaagagagttgaagaaatcaaacagaagcgccaagctaaatttataatgaacagattttggctaggcacctttggcagggatgtctcagaaatgatggcgtatccttctcatgcatcatatcgggaagcacatgatgtcaccttgctgattgaagaaaataaagagctacagaaagttcaggatatcaaagaagtcaagcaaaacatccatcttatccgagcccctcttgcaggcaaagggaaacagttggaagagaaaatggtacagcagttacaagaggatgtggacatggaagatgctccttaa

SEQ ID NO: 26736 - DNA, 1183 bp, Homo sapiens
  SIMILAR (1114)..(1182): 821254mologous to Homo sapiens Human secreted protein, SEQ ID NO: 6834,accession number G02753,Smith-Waterman Score=119.
atgcttattttcaacgactatacatcaagtatgtacaagattgaagttccacaacgcaagaccttcccctacacagatgaaaagtcaagggacaaagaaggagagagaagtatcaacccagttccaatatctggccgggctaaccccgcggctcctgcacctgtgcctgcccggggaatcgtgggccgtttcccactcctcttcaaccctcagcgacatcttgggccttcttttccagtcagttgggacggcgcccctatgaggctgtgtcttatccctcggaacatgggcaccccacagagggtcctgtctcctgtggtctggagccccgcctcaaggaagaaacccatgctgtctgctcacaactccaggatgtttggacacctcagccccgtgaggattcctcatctcagaggcaagtttaaccttcaacttccttcattagatgagcaggtgatcccagccaggctcccgaagatggaggtgagggcagaagagcccagagaagcaacggaggtgacagaccaggtagagacccaggggcaggaggacaataaaaggggcccctgtagcaatggggaagcagcttccacctctaggcccctggagactcagggaaacttcacttcctcctggtacaatcccaggcccttggagggaaatgtccacctcaagagcttgacagaaaacaaccagactgacaaggcccaggtgcctgcagtgagtttctactccaacggccatggagtcgccagttcacacagccctgctggaggcatccttccctttgggaagcgtgacccacttccaacagtgctccctgccccagttccaggctgctccctgtggccagagaaggcggccttgaaggtgctgggtaaagaccacctgcccagctctccaggcttgctgatggtgggggaggacatgcagcccaaggatcctgcagctcttgggtcaagtaggtcttctccacacagagctgccggccacagttcccacaaaagaaaactgtcggggccaccgctgcagctgcaaccgacccctcccctgcaactgagggacatggatgaagctggaagccatcatcctcatcaaactaacacaggaacagaaaaccaaacaccacatgttctcactcataagtgggagttgaacaatgagaacacatggacacaggaag

SEQ ID NO: 26737 - DNA, 3210 bp, Homo sapiens
  SIMILAR (700)..(3015): 821254mologous to Homo sapiens calpain 3; calcium activated neutral protease; CAPN3; CL1,accession number AF127764,Smith- Waterman Score=3312.
atgaacaccaagcgacgagagccctggctctttggggaggaacacacccgactcatccgagaagccatcagagagcgctatggcctcctgccatattggtattctctgttctaccatgcacacgtggcttcccaacctgtcatgagttttgctgaccagaggggtcattatcccagcaagtgtgtggtggagaagatcttggtcttaggcttcaggaaggagccatcttctgtgactacccactcatctgatggtaaagatcagcctgtggcttttacgtattgtgccaaaacatccatcctgagcctggagaagctctcactcaacattgccactgactgggagccacttgccatgccgaccgtcattagcgcatctgtggctccaaggacagcggctgagccccggtccccagggccagttcctcacccggcccagagcaaggccactgaggctgggggtggaaacccaagtggcatctattcagccatcatcagccgcaattttcctattatcggagtgaaagagaagacattcgagcaacttcacaagaaatgtctagaaaagaaagttctttatgtggaccctgagttcccaccggatgagacctctctcttttatagccagaagttccccatccagttcgtctggaagagacctccgaaatccttcctgttcatctttgaggccccctcaccaagctcaggccagtcccatagtgggtactcagctgatgctgatgtagtgacctttgccagccctatgcagtctgaaaagactgtgtcctatcaggagaagcaccacacagaaaggtccgtgctgagcagccagactccttacgggatgaagcagtttgtgtcaggctaccttatggcgcaaccgagaagccccttgtgtcaacttgagtgggaaatttgcgagaatccccgatttatcattgatggagccaacagaactgacatctgtcaaggagagctaggggactgctggtttctcgcagccattgcctgcctgaccctgaaccagcaccttcttttccgagtcataccccatgatcaaagtttcatcgaaaactacgcagggatcttccacttccagttctggcgctatggagagtgggtggacgtggttatagatgactgcctgccaacgtacaacaatcaactggttttcaccaagtccaaccaccgcaatgagttctggagtgctctgctggagaaggcttatgctaagctccatggttcctacgaagctctgaaaggtgggaacaccacagaggccatggaggacttcacaggaggggtggcagagttttttgagatcagggatgctcctagtgacatgtacaagatcatgaagaaagccatcgagagaggctccctcatgggctgctccattgatgatggcacgaacatgacctatggaacctctccttctggtctgaacatgggggagttgattgcacggatggtaaggaatatggataactcactgctccaggactcagacctcgaccccagaggctcagatgaaagaccgacccggacaatcattccggttcagtatgagacaagaatggcctgcgggctggtcagaggtcacgcctactctgtcacggggctggatgaggtcccgttcaaaggtgagaaagtgaagctggtgcggctgcggaatccgtggggccaggtggagtggaacggttcttggagtgatagatggaaggactggagctttgtggacaaagatgagaaggcccgtctgcagcaccaggtcactgaggatggagagttctggatgtcctatgaggatttcatctaccatttcacaaagttggagatctgcaacctcacggccgatgctctgcagtctgacaagcttcagacctggacagtgtctgtgaacgagggccgctgggtacggggttgctctgccggaggctgccgcaacttcccagatactttctggaccaaccctcagtaccgtctgaagctcctggaggaggacgatgaccctgatgactcggaggtgatttgcagcttcctggtggccctgatgcagaagaaccggcggaaggaccggaagctaggggccagtctcttcaccattggcttcgccatctacgagatgcacgggaacaagcagcacctgcagaaggacttcttcctgtacaacgcctccaaggccaggagcaaggggatctataccctacgagggttctctagaggctggttctggcttggctgccaggaagccgtgcaccagagcaaaccgtccacgggcctcctgcttgcttctggtgacactgagaccccacatgtctgtattcctcacagggaagttgaaaataccatctccgtggatcggccagtgcccatcatcttcgtttcggacagagcaaacagcaacaaggagctgggtgtggaccaggagtcagaggagggcaaaggcaaaacaagccctgataagcaaaagcagtccccacagccacagcctggcagctctgatcaggaaagtgaggaacagcaacaattccggaacattttcaagcagatagcaggagatgacatggagatctgtgcagatgagctcaagaaggtccttaacacagtcgtgaacaaacgtgagttgctcaaaccaaatgggggtgggacagatggctctggaaagctcaacctgcaggagttccaccacctctggaacaagattaaggcctggcagaaaattttcaaacactatgacacagaccagtccggcaccatcaacagctacgagatgcgaaatgcagtcaacgacgcaggtgctgagaaggaaggggtggcagggatgtggacccgagacggattccacctcaacaaccagctctatgacatcattaccatgcggtacgcagacaaacacatgaacatcgactttgacagtttcatctgctgcttcgttaggctggagggcatgttcagagcttttcatgcatttgacaaggatggagatggtatcatcaagctcaacgttctggagaagttcccacaactgcccaacacctcacctacccgtttcctgctgcacaaagtctccttcactctcatcttttcgatacatcgtcaggcagggcagaagggcactacgccgcagagcattcgaggctctcagcacactgccagccagcgtgaaaatgcggcttcactacagcccagagaaaagggccaggtttag

SEQ ID NO: 26738 - DNA, 561 bp, Homo sapiens
  SIMILAR (131)..(268): 391254mologous to Canis familiaris D4 dopamine receptor,accession number AB030236,Smith-Waterman Score=84.
atggcagcaggcaagggagtgtgtgcaggggaactcccctttatgaaaccatcagctctcatgagacttcttcactaccacaaggacagtgtgggggaaaccatccctgtgattctgttatcttcacctgggattgcaaaatggaacgggaacccacgacccagcctcgcacctgcctccagggacgcacgacccagcccctcacctgcctccagggaccgggacccacgacccagccccgcgcctgcctccagggagcggcacccctaccctgtgcgtcgtcctcggattgaggggccttgctccgttgcggtgcaggaaaccatggcgatgtgcgagagggtcagggtcgtgctggcacaggtaggaggagagagttatgacaggaaggagcttgagcaaaaccaggaagacgtggtggaccttctggctggacagtccactgccttcctctgccagcacgttggatggaaatcagaggatgactgccctggggcacagtcaatctgcagtcttatcctggaactctcaacatcaggcagcagatgccttcagttttaa

SEQ ID NO: 26739 - DNA, 1393 bp, Homo sapiens
  SIMILAR (1095)..(1169): 601254mologous to Bos taurus cytokeratin 19,accession number X04152,Smith-Waterman Score=71.
ctcctctcccaattgtgtaagaccttgtccttctaagaaattccttcttccattatgctcagagtggctctgctttcctgaccggaccctgactggagcaagggatatttcatccagacctcagatacgagactttgtatcttggacagggattactacttctatctgttcagccctgtgccaggcaacatcagggataagacggcctttagcctattggaattcacgatccaattctgcagcacatttgtcccattccctagtggctactcccaattgccatataatttgtcactctacgtcacttgattcacctcagcaagcttgctttgctactatccgaggaacactgaattgggtcccagatattttggggatcgtgccccgaacccagtctgcaggcagcctagaatttggctgtgtatacaggaacccaggaaaggaaggaagtgccaatagagagaagggaaatggtggcagggggcagaggcagaggtcttcaagaactcccattctcttggcgtccattgcaatgaaactacctctgatggaagagaggagaccttgtggtacaggccaggcagcccacactccatcaatgtctggccctgaaaaaagcaaccccatccccagctacatgaaagcttttctcccacatggatcatcacttgatcttgcttatccatctctcttgggaatgatccacctgagaaatatgacagaagccattgccatagctgttgccagaatagtaactagaacaacacttgaggggtattccttgaagtgtgaaagggcattaggtttgcagtcgtatagcctggttttgaatccagacctaaccactttactgagtgaccttaagaagagagaaggggctgtgatcatcgaggaactcacacagcatccaccaggatccatgggccacagcatgtcagtatcctctgttggtttcttgtcctcatccttttctgtgggctatgatggggacgatgggggttacagtggcagctgtgctaatgccctggccaggtccaatgggctgctggtaggcaacgagaagatcaccatgcagaccctcaataaccacctatctggcctcctacctggccaaggtgaacgccctggaagaggtcacctgagagctgggggtgaaggtccatggctgggttttgacattgagctgcagcagctcagcatgaaagccgccctggaaggcacactggaagaaacaagggccctctttggagccaagctggcacagatccaggcgctggtcaggggtgttgaagcccagcagggtgacgtgggtgctgacagccagcagcagaaccagcaccagtggttcatggacatcaagtctcagctggaggaggagattactatctactga

SEQ ID NO: 26740 - DNA, 647 bp, Homo sapiens
  SIMILAR (370)..(630): 441254mologous to Mus musculus TAGL-alpha,accession number AF149837,Smith-Waterman Score=184.
atggtggaaggggaagcaaacacgtccttcttcacgtggcagcagcaaggagaagtgccgagcaaagagggaaaagccccttataaaaccatcagctctcgtgagaactcactcactatcatgagaacggcatgagagtaaccacccccatgattaaattactcccgggtaccttccacgacacatgcggattgtgggaactacaagaggaatttggcactgcgaggttctctgccgaggccaaccagaaataccccttggaagctggaatctgcaacaatggcccagggtgtcctctggatcctactcggattgctactgggtcagacccagggacaggatgcccggccatccacccccctgccgctggggagcggcgccttatcggggccgcccgaagctgctgcagtgccgctgggattcttgtacgtgcatcacacctacgtgcctgcaccacctgcacggacttcacgcgctgcgcagccaacatgcgctccatgcagcgctccaccaggacacgcaaggctggggagacatcggctacagttcgtggtgggctcggacggctacgtgtacgagggacgcggctggcactggtgggcgcccacacgctcggccacaactcccggggcttcggcgtggcctag

SEQ ID NO: 26741 - DNA, 750 bp, Homo sapiens
  SIMILAR (55)..(282): 1001254mologous to Homo sapiens Polypeptide identified by the signal sequence trap method,accession number Y02362,Smith-Waterman Score=402.
aaaagcatcagctgaggtgatattagttcagtcacctaacaactcctagaagagatgaggaaagggaaccttctgctgagctggcttctggggcctgagcttccagagctgtccccaagggctaggaaggccgacctgaaggatgagaacctcaaattcagttgctggtgggagccaaggaagacggcgggtgttctaacgtggccctttctggctgagctggcggaagtgggcgttttggccgatgggatgtatctcggcgctgtgtctgtggcccagcaaagccttggagtcctgtccctgacagtggccaaagggcttttatctgaggttgtgggcatctttctggatgcacttcgtaaaggcagtgcactggcgatgctgagggcactcatgggcttggagtcagcatccttctttaaagcatataatccttcaaatgaaagaggcaacacaaggcaccatataatgggtttggcagaactggaagctctggagaacggtcacccaacctgcctgcagtttaccctgaacatgaccgaggctgtcaagacctacaagtggcagtgcatagagtgcaaatcctgtatcctctgtgggacctcagagaatgatgaccagctactcttctgcgatgactgtgaccgaggctatcacatgtactgtttaaatcccccggtggctgagcccccagaaggtaatgatgatgaagtcaacaataagaacagcaacagatactactactactag

SEQ ID NO: 26742 - DNA, 3189 bp, Homo sapiens
  SIMILAR (91)..(1803): 1001254mologous to Homo sapiens dJ979N1.1 (dJ979N1.1),accession number AL035659,Smith-Waterman Score=2989.
atgggggtggaggacactggcctgagggtggtcatcgccctcagggacacgcctcccgacatggggaagggaatgagagtgggaagactgatggagaggcagaaacggaaggcggacatcgagaaagggctgcagttcattcagtcgacactacccctaaagcaagaagaatatgaggcctttctgctcaagctggtgcagaatctgtttgctgagggcaatgatctgttccgggagaaggactataagcaggctctggtgcagtacatggaagggctgaacgtggccgactacgctgcctctgaccaggtggccctgccccgggagctgctgtgcaagctgcatgtcaatagggccgcctgctacttcaccatgggcctgtatgagaaggcgctggaggacagcgagaaggcgctgggcctggacagtgagagtatccgggcgttgttccgcaaggcacgcgctctcaatgaactgggacgccacaaggaggcctacgagtgcagcagccggtgttccctcgccctgccccacgatgaaagcgtgactcagcttggtcaggagctggcccagaaactggggctgcgagttcgcaaggcgtataagaggccccaggaattggaaaccttttctctgctcagtaacggcactgcggctggcgtggcagatcagggaacttctaatggattggggtccatagatgacatcgaaacaggtaatgtccccgatacgagggaacaagtggaaattggggccccgagagactgctacgtggaccctcgaggctccccagcccttctcccctccacgcccacgatgcccctgttccctcacgttctggacctgctggcccccctggacagcagcaggaccctccccagcaccgacagcctggatgacttctcagacggggatgtctttggcccagagctggacaccctcctggactcgctgtctctggtccagggtggcctgtctggcagcggcgtgcctagtgagttgccccagctgatacccgtgttccccggcgggaccccactgctaccacctgtggtgggtggctccatccctgtctccagcccactgccccccgcctccttcggcttggtcatggacccctccaagaagctggccgcctctgtgctggatgccctcgatcccccgggccccacgctggaccccctggacctgctgccgtactcggagacccggctggatgcactcgacagctttgggtcgacacgaggctccctggacaaacctgactccttcatggaggagaccaactcacaggaccaccgtccccctagcggtgctcagaaaccagccccctcgccagagccctgcatgcccaacactgccttgctcatcaagaaccccttggctgccacccacgagttcaagcaggcctgccagctctgctaccccaagacaggcccccgggctggcgactacacctaccgtgagggccttgagcacaagtgcaagcgggacatcctgctcggccggctccggagctcggaggaccagacctggaagcggatccggccccggcccactaagaccagcttcgtgggctcctactacctgtgcaaagacatgattaacaagcaggactgtaagtacggggataactgcaccttcgcctaccatcaggaggagatcgacgtgtggaccgaggagcggaagggcaccctcaaccgcgacctgctcttcgacccgctggggggtgttaagcgcggcagcctcaccatcgccaagctcctgaaggagcaccagggcatcttcaccttcctctgcgaggccatggcacagacagggctggggatgctccctggcacggaccaccataggaagtcagccctggaacccgtgggctgtggaggcctggtcttagaaccagtaggtcctggagggtcaatctgctttgacagtaaaccccggatcatcagcaaaggcaccaaggactctccgtctgtctgctccaacctggctgccaagcacagcttctacaacaacaagtgcctggtgcacatcgtccgctccacctccctcaagtactccaagatccgccagttccaggagcacttccagttcgacgtgtgccgccatgaggtgcgctacggctgcctgcgggaggacagctgccacttcgcccacagcttcatcgagctcaaggtctggctgctgcagcagtactcaggcatgacccacgaagacatcgttcaggagtctaagaagtactggcagcagatggaggcgcatgcggggaaggccagcagcagcatgggtgctccgaggacacatgggcccagcacctttgacctgcagatgaagtttgtatgtggccagtgctggagaaacgggcaggtggtggagcctgacaaggacctcaagtactgtagtgccaaggcccggcactgctggaccaaggagcggcgggtccttctggtgatgtccaaggccaagaggaaatgggtgtcagtgaggccactgccatccattcgtaacttcccacagcaatacgatctctgcatccatgcacagaacggccgcaagtgccaatatgtggggaactgctccttcgcacacagcccggaggagagggacatgtggaccttcatgaaggagaacaagatcctggacatgcagcagacctatgacatgtggctgaaaaaacacaacccaggaaagcctggagaagggacccccatcagttctcgggaaggggagaagcagatccagatgcccacggactacgcggacatcatgatgggctaccactgctggctctgcggcaagaacagcaacagcaagaagcagtggcagcagcacatccagtccgagaagcacaaggagaaggtcttcacgtccgacagtgacgccagcggctgggccttccgcttccccatgggcgagttccggctctgcgacaggctccagaagggcaaagcctgcccagatggggacaagtgccgctgcgcccatggacaggaggagctcaacgagtggctggaccggcgcgaggtgctgaagcagaagttggccaaggctcgcaaggacatgctgctgtgcccacgggacgacgactttggcaaatacaacttcctgctgcaagaggacggggaccttgccggtgccaccccagaagcccctgctgctgctgccaccgccaccactggggagtag

SEQ ID NO: 26743 - DNA, 1430 bp, Homo sapiens
  SIMILAR (393)..(638): 741254mologous to Homo sapiens unnamed protein product,accession number AK024120,Smith-Waterman Score=313.
tgatagcgtcatcagatctgaaacgttttactctgaatgtggcatggaatagagattatatggagattaagaatgtaaatagggataatagtgtggaagctgttgcagctgacaaagcaaatctgtggaatgttgaacttgagagagattatctgaaattggaatggaacttatgtttaaaagggaagcagagcctaagtttggaaaatttgcagcctgatgatgtgatagaaaagaaaaacccattttctggggagaaattcaaggtgactgcagaaatttgcatacgtatacagaagtcaagaattgaggtttgggaacctccacctagatttcagaggatctatggaaatgcctggatgtacaagcagaagttggctgcaggggtggagccctcatggagaacctctgttagggcaacagagaaggaaaatatggggttggagcccccacacagagtccccactggggcactgcctagtggagctgtgagaagagggccaccatcctccagattccagaatggtagatccactgatagcttgcacactgtgcctggagaagccacagacactcaacaccagcctatgaaagcagctgggagtgaggctgtaccctgcaaagctataggggcagagctgctcaagaccatgggagcccacctcttgtatcagcatgaccatgatgtgaaacagggagtcaaaggagatcattttggagctttaaaatttgattaccttgctggattttggacttgcatggggcctgtaaccccttttttttggccaattactcccatttggaacagctgtatttactcaattacctgtaccccgattgtatctaggaagtaactagcttgatttggattttacagggtcataggcagaagagacttgccttgtctcagatgagactttggacaggggacatttgggttaatgctgaaatgagttaagactttgggggactgttgggaaggtatgattggttttgaaatgtgaggacatgagatctgggaggggctggggtagaatgatatggtttggctgcatccccacgcaaatctcacattaaattgatgagatcccataattcccacatgttgtgggagggacctggtgggagataatttgaatcatgggagtgggtctttcctgtgctgctctcatgatagtgaataagtctcatgagatctgatggttttgtcaggggtttctgcttttgcatcttcatcatttttctgttgccactgccatgtaagaagtgcctttaaccttccaccatgattctgaggcctccccagccatgtggaactgcaagtccaactatacctctttttcttcccagtctcaggtatgtctttatcagcagcatgaaaacggactaatacacctacattaaagggcagagaagaggcaaaaaaaaaa

SEQ ID NO: 26744 - DNA, 1839 bp, Homo sapiens
  SIMILAR (340)..(1839): 1001254mologous to Homo sapiens 09-NOV-1998 Human potassium channel TASK2 cDNA,accession number A27747_cd1,Smith-Waterman Score =2614.
agcgacgcgtggagaagcggcccacgtgtctgcccagagtcaagtcctgtgttcttcccgctccttacgcatccgcggtccagggcgccctttcagccccgctggtgttcgcccaccccgggccgcgtgagtggggccccacgcagctccccgcactccgtgggccaacttggccaagcaactctgtccggggagcggtgcttgcggggggtgagtaccgggcactgcgcatgcggagctccaaattcaaacagctgttttcagaggctggagggcgggcggactggtagcagctggggctaggagaggctttctctaggaggcggccgctcgagagccatggtggaccggggccctctgctcacctcggccatcatcttctacctggccatcggggcggcgatcttcgaagtgctggaggagccacactggaaggaggccaagaaaaactactacacacagaagctgcatctgctcaaggagttcccgtgcctgggtcaggagggcctggacaagatcctagaggtggtatctgatgctgcaggacagggtgtggccatcacagggaaccagaccttcaacaactggaactggcccaatgcaatgatttttgcagcgaccgtcattaccaccattggatatggcaatgtggctcccaagacccccgccggtcgcctcttctgtgttttctatggtctcttcggggtgccgctctgcctgacgtggatcagtgccctgggcaagttcttcgggggacgtgccaagagactagggcagttccttaccaagagaggtgtgagtctgcggaaggcgcagatcacgtgcacagtcatcttcatcgtgtggggcgtcctagtccacctggtgatcccacccttcgtattcatggtgactgaggggtggaactacatcgagggcctctactactccttcatcaccatctccaccatcggcttcggtgactttgtggccggtgtgaaccccagcgccaactaccacgccctgtaccgctacttcgtggagctctggatctacttggggctggcctggctgtccctttttgtcaactggaaggtgagcatgtttgtggaagtccacaaagccattaagaagcggcggcggcgacggaaggagtcctttgagagctccccacactcccggaaggccctgcaggtgaaggggagcacagcctccaaggacgtcaacatcttcagctttctttccaagaaggaagagacctacaacgacctcatcaagcagatcgggaagaaggccatgaagacaagcgggggtggggagacgggcccgggcccagggctggggcctcaaggcggtgggctcccagcactgcccccttccctggtgcccctggtagtctactccaagaaccgggtgcccaccttggaagaggtgtcacagacactgaggagcaaaggccacgtatcaaggtccccagatgaggaggctgtggcacgggcccctgaagacagctcccctgcccccgaggtgttcatgaaccagctggaccgcatcagcgaggaatgcgagccatgggacgcccaggactaccacccactcatcttccaggacgccagcatcaccttcgtgaacacggaggctggcctctcagacgaggagacctccaagtcctcgctagaggacaacttggcaggggaggagagcccccagcagggggctgaagccaaggcgcccctgaacatgggcgagttcccctcctcctccgagtccaccttcaccagcactgagtctgagctctctgtgccttacgaacagctgatgaatgagtacaacaaggctaacagccccaagggcacatga

SEQ ID NO: 26745 - DNA, 2346 bp, Homo sapiens
  SIMILAR (946)..(2346): 951254mologous to Homo sapiens 09-NOV-1998 Human potassium channel TASK2 cDNA,accession number A27747_cd1,Smith-Waterman Score =2266.
atgcctttgatgaaggctgtacattgccaagaagagatttgtgtcatcattctgctagaatgtggcaccaacccagatcttatggatgtctatagcaacaatgcactacactatgctgtgtataatgagaatacactactggcagaaaaactgccctcacaccatgtgaatactgaagtgctgaacaaggatactgaagtgctgaacaaggatgcaaacacaccacttttacttgctatagtttgcaaaacacagcaaaagcctaccatggaaatgaaagattctgttgtgaagaaagcaatagaaaggaagaacgaacaaacatccaaagcagaacaagaagtacaagtgacatcagaggaagaacaagaaaagcttgaaagtgaaaataaacagccacaggttgaagaagctagaaagaagcacgaaagaacctcgaaagggaaaaaggacattgaaattgttaaagaaatgaatgatgaccttcaagagactataaaactgaatggaaaaacattaacaaaaacagtatcccagtatggtcaacagcttaacgacctcaaaactgagaatacaatgctcaagtctaaactggagaaggaaaatcaaaacaaggaaagactggaagctgaagttgagtcattccatgctagactggctgctgctataaatggtgctcataagaaaggggataatgaacaaaaggtaattaatatccaaggatgctgtcttgagagtgaaaaggaaggtcttctgctagaagggaaaaataaggaattaatcaatgaatgcaatcatttaaaagactgtttcagtatgaaaaagagaaagcagaaggagaagtaccacataccaagttctgagcactatgctttatatgacaaaccatataaagcagaggggggtagcctggataatgatgtgtctagagcaggatttctcagccttggcacttttgatgttttgggccagaaaatcgttgtgggggttgtcctgtgtctcgtggtatctgatgctgcaggacagggtgtggccatcacagggaaccagaccttcaacaactggaactggcccaatgcaatgatttttgcagcgaccgtcattaccaccattggatatggcaatgtggctcccaagacccccgccggtcgcctcttctgtgttttctatggtctcttcggggtgccgctctgcctgacgtggatcagtgccctgggcaagttcttcgggggacgtgccaagagactagggcagttccttaccaagagaggtgtgagtctgcggaaggcgcagatcacgtgcacagtcatcttcatcgtgtggggcgtcctagtccacctggtgatcccacccttcgtattcatggtgactgaggggtggaactacatcgagggcctctactactccttcatcaccatctccaccatcggcttcggtgactttgtggccgtgcaacagacctatgttgggggtgccctaggtgtgaaccccagcgccaactaccacgccctgtaccgctacttcgtggagctctggatctacttggggctggcctggctgtccctttttgtcaactggaaggtgagcatgtttgtggaagtccacaaagccattaagaagcggcggcggcgacggaaggagtcctttgagagctccccacactcccggaaggccctgcaggtgaaggggagcacagcctccaaggacgtcaacatcttcagctttctttccaagaaggaagagacctacaacgacctcatcaagcagatcgggaagaaggccatgaagacaagcgggggtggggagacgggcccgggcccagggctggggcctcaaggcggtgggctcccagcactgcccccttccctggtgcccctggtagtctactccaagaaccgggtgcccaccttggaagaggtgtcacagacactgaggagcaaaggccacgtatcaaggtccccagatgaggaggctgtggcacgggcccctgaagacagctcccctgcccccgaggtgttcatgaaccagctggaccgcatcagcgaggaatgcgagccatgggacgcccaggactaccacccactcatcttccaggacgccagcatcaccttcgtgaacacggaggctggcctctcagacgaggagacctccaagtcctcgctagaggacaacttggcaggggaggagagcccccagcagggggctgaagccaaggcgcccctgaacatgggcgagttcccctcctcctccgagtccaccttcaccagcactgagtctgagctctctgtgccttacgaacagctgatgaatgagtacaacaaggctaacagccccaagggcacatga

SEQ ID NO: 26746 - DNA, 768 bp, Homo sapiens
  SIMILAR (706)..(593): 351254mologous to Eumeces egregius ATPase subunit 8,accession number AB016606,Smith-Waterman Score=47.
atggccctaagggtatatacactgcctcagctgccttgggcttcatgcctgggctcctccaccagggccagccccaataggtctttagttcgaggtagaggttctgctgttatttcccaggcttcgaagtacaagtcttccctgaacctacctccagtgggagcccgcctccagcggcaggatggagggatcataacctgtctagagcagcttcatgaaaaaatcaacgagatgaggaacgtgttcaactcgctggagaacaaggtatctccctgggataaaaaagaagaagctaaccagaaaaagctggaatttgcattcgcaaacagtgattatctggcccttctacaagcgtataaggagacaaaaaatacacagtggaagtcgaaacagacttttattttagaaagtattcttgataatgtgttcaaagactgccctggctacagcccaggactggcagtaaatacaaccagctttggggaggaatctccctctggggaatgtggaatcacagatgctgacagcccaaaggaggcactggaaacaggatttactacaaagccaatcaagaaaatcatgaaagagattgtagacacggcaaaaagggtggggagtgatgtgtttcaacatatgggtcttagagaaattcaagagctaacagataccacaccagaggaattaacagaagacaaggtggagatagatgcttctgaaccactgccagacagtgagaaagatgcagaacagtgccagaaaacaaactga

SEQ ID NO: 26747 - DNA, 1776 bp, Homo sapiens
  SIMILAR (360)..(440): 811254mologous to synthetic construct tox/synthetic protein,accession number M21873,Smith-Waterman Score=122.
atgcgccaatcaccgaagggattcgtatgtgtacaggagagaacgcttgctcgcggcacatcgcagctgtttagagaaggcggaccaggcgatcgtacggagaacgcgagtaagagtgcagagccatacaacgggagcagtgtatggacacaagaaacaattgattcctccgtccttcctctaagtccgtattatccgttaccccctacacgtgatagcattcctagtcttttgttctatccacccaaaagatacattattatctctctagaagaagttttagccatttcgtgcaactttttagtgcacgcgcttaacaagccccagtacgttgcaccccagaggggtaccgagcacgcattcgtaatcatggtcatagctgtttccagtgtgggattgttttccgctcacaattccacacaacatacgcgccgggagcgaaaagtgtcaagcatggggtgcctcatgagtgagccactcacatacaatgcgatggctcacagcgcgctttccagtcgggagacctgtcgtgcacgcagcattaatgaatcggccacccgcggggagaggcgggctggcgaacaggtgccctccgttataagtaaaaatcgcacagccggcaccaaaataggccccccgccccccccaggtagttgggtcgggccccgggggaagcgaggggagtatttatatgcgggggggaagatatccagcagcaccgcgaagcgcacgtgtaaagcattccgccagaagacgcaccctgtcggagaccgaggggcaccaggaatgtgtatgaacgagtgtgacagaatcgcgcccagtagtgtacattctcagtctctgctggtgcgaggagggcacagcgtggagttaccggcactgcgaagaagcagtgttggcgctcgaacagacccaaaccaatccgggaaaacattaatacccgttaattcactcgctctcatggccctgtttaggctattcccaattcgagcactgagctccgcagctagggtctgtccacctaagcatcttccccggcctagcgcaagagagcgcatcctcaccatcatcctcccaaatatcgtcgtgccacagcttgcatctttcgagggatcgcagtctctcccacgatcccgcggcgagagatatttccagtgtacattccaccactctcgtaagtcagaatattggcggatgaagagatcacctccatcaggcgaaaacccacccacgcaaaacccctgcggaataagcttggaaaacagcaaaatccttacgttcccaagaggctttcgtaaatcatcggagatagatctcaacagatatcaaggaattggcagttatggggaaattaattctctcagaggcagtaaacgtttacgtgtactctatgagccctggagaatgaatccgaagacaagactgtctgatgatcagatttatcacgatgtcattgatcacttattatgtgaactgtatatcacgaggatcaagaaattgggcttgaactgtgctccactcacttctatggagctgccaagtgcccagaaatttcagacacatccacctcactggagctcgagcattggtgctctcagcatgagtccattgctatcagctgtacatacagcagcaattaaaacttctcgtcgaagctcatcacgctcaaacttcaagaaaattacattgcacgcagaagaacttcagtctattttgccttcaacaggaattaatttattagatgaagaattccacgaagattgtgacagacactag

SEQ ID NO: 26748 - DNA, 426 bp, Homo sapiens
  SIMILAR (32)..(259): 1001254mologous to Homo sapiens Human secreted protein, SEQ ID NO: 5487,accession number G01406,Smith-Waterman Score=421.
tgctggcagcgctggaaactgggtggacggcatgggttggtctcaggatttgttccgcgccttgtggagatcgctgtcaagggaagtgaaagagcacgtgggcacggaccaattcgggaacaaatactactacatcccgcagtacaagaactggagaggacaaactattcgagagaaaagaattgtagaagcagcaaataaaaaagaagtagactatgaagcaggggatattccaacagaatgggaagcttggattagaagaacaagaaagactccacctactatggaggaaatactaaagaatgaaaaacacagagaagaaatcaaaataaaaagccaagatttttatgaaaaagaaaaactcctcactggtctctttactaaggaaaggaagaaccctcagtggctcccagcagcactggtaaa

SEQ ID NO: 26749 - DNA, 505 bp, Homo sapiens
  SIMILAR (49)..(153): 971254mologous to Homo sapiens Human secreted protein, SEQ ID NO: 5487,accession number G01406,Smith-Waterman Score=182.
gcatgggttggtctcaggatttgttccgcgccttgtggagatcgctgtcaaggacaaactattcgagagaaaagaattgtagaagcagcaaataaaaaagaagtagactatgaagcaggggatattccaacagaatgggaagcttggattagaagaacaagaaagactccacctactatggaggaaatactaaagaatgaaaaacacagagaagaaatcaaaataaaaagccaagatttttatgaaaaagaaaaactccttagtaaagagaccagtgaggaactcctgcctccaccagttcaaactcaaattaaaggccatgcctctgctccatactttggaaaggaagaaccctcagtggctcccagcagcactggtaaaacctttcagccaggatcctggatgccacgagatggcaagagccacaatcaatgaatgcattatggtcaaatcttttcatgtatatggatgtgactattttaacaaataaaagaagtgaaaagtt

SEQ ID NO: 26750 - DNA, 1006 bp, Homo sapiens
  SIMILAR (455)..(670): 931254mologous to Homo sapiens Human secreted protein, SEQ ID NO: 5487,accession number G01406,Smith-Waterman Score=364.
gggatgtcgataccgctggtccatgaaccacactttgaaaaacaaagctgtagctaccaatgagagccctctggattctactgccagggtggaggggtgggcgagtgtgaagaagccccctgtgcaggaatggcaaaagaatggacttagtactggatcctgggctggggtggaggaggaggcgccactgcagatccagtatggtgagagttcctacattgacaaagaagttggactagaggcactccagggcccactgagatccatgcagatacagcagactttccttcctgcattcacgctcctcacgatgaatctcatggcttccaccagaatcctcaaaaccacagcacatcagtttgctagcttgcacaaaaggtgtgatctcaaccctggggctgatggcgcagaagtgagcatgaacgacagctcacgttctggtggccttgtgggaaaggatttgttccgcgccttgtggagatcgctgtcaagggaagtgaaggagcacgtgggcacggaccaattcgggaacaaatactactacatcctgcagaacaagaactggagaggacaaactattcaagagaaaagaattgtagaagcagcaaataaaaaagaagtagactatgaaacaggggatattccaacagaatgggaagcttggattagaagaacaagaaagactccacctactatggaggaaatactaaagaatgaaaaacacagagaagaaatcaaaataaaaagccaagatttttatgaaaaagaaaaactccttagtaaagagaccagtgaggaactcctgcctccaccagttcaaactcaaattaaaggccgtgcctctgctccatacttcggaaaggaaaaaccctcagtggctcccagcagcactggtaaaacctttcagccaggatcctggatgccacgagatggcaagagcacaatgaatgaatgcattatggtcaaatcttttcacgtatatggatgcgactattttagcaaataa

SEQ ID NO: 26751 - DNA, 450 bp, Homo sapiens
  SIMILAR (285)..(166): 821254mologous to Homo sapiens Human secreted protein, SEQ ID NO: 5487,accession number G01406,Smith-Waterman Score=162.
ttaggccgccatctttgctgtttcggtgacatagccattccaggctccgggctttggagagtccaagttgaccaggggtggaagcggtatcccagcacagcacagctgctctatgaaagcatagctagactgcttctttaagcaggtctctgatcctgttcctccttcccattctgttggaatatcccctgcttcatagtctacttcttttttatttgctgcttctacaattcttttctctcgaatagtttgtccattttcattaaaatggtaagaatgaataaatgtacagtaacaatctgaactgccaactggtaaatctgcacttgtgacaactgaatgtctttgagactgaccatttaaaggcatgatctctgtcaaccagggctgaatgaggatcacattttcccttttctctggtgtccaggcgctaatacagactacttccat

SEQ ID NO: 26752 - DNA, 475 bp, Homo sapiens
  SIMILAR (3)..(137): 1001254mologous to Homo sapiens Human secreted protein, SEQ ID NO: 5487,accession number G01406,Smith-Waterman Score=251.
aattcgggaacaaatactactacatcccgcagtacaagaactggagaggacaaactattcgagagaaaagaattgtagaagcagcaaataaaaaagaagtagactatgaagcaggggatattccaacagaatgggaaggaaatactaaagaatgaaaaacacagagaagaaatcaaaataaaaagccaagatttttatgaaaaagaaaaactccttagtaaagagaccagtgaggaactcctgcctccaccagttcaaactcaaattaaaggccatgcctctgctccatactttggaaaggaagaaccctcagtggctcccagcagcactggtaaaacctttcagccaggatcctggatgccacgagatggcaagagccacaatcaatgaatgcattatggtcaaatcttttcatgtatatggatgtgactattttaacaaataaaagaagtgaaaagttatttaccttgtaaaa

SEQ ID NO: 26753 - DNA, 440 bp, Homo sapiens
  SIMILAR (11)..(142): 931254mologous to Homo sapiens Human secreted protein, SEQ ID NO: 5487,accession number G01406,Smith-Waterman Score=228.
ggtggacggcatgggttggtctcaggatttgttccgcgccttggggagatcgctgtcaagggaagggaaagagcacgtgggcacggaccaattcgggaacaaatactactacatcccgcagtacaaaaactggagaggtgaggtggcggcgtgggcagcgattgcgtggtcagtgattgcgaggacaaactattcgagagaaaagaattgtagaagcagcgaataaaaaagaagtagactatgaagcaggggatattccaacagaatgggaagcttggattaaaagaacaagaaagactccaccctttatggaggaaatactaaagaatgaaaaacacagagaagaaatcaaaataaaaagccaagatttttatgaaaaagaaaaacttcttagttaagaaaaccaggagggactctctgcctcaccagttcaaactcaa

SEQ ID NO: 26754 - DNA, 1386 bp, Homo sapiens
  SIMILAR (799)..(1014): 941254mologous to Homo sapiens Human secreted protein, SEQ ID NO: 5487,accession number G01406,Smith-Waterman Score=368.
gtgggaactcttcgagataagcactatgtcttatggttctccatcctgtccccaacacagggcctggcctatcacgctctcaggggatgtcgataccgctggtccatgaaccacactttgaaaaacaaagctgtagctaccaatgagagccctctggattctactgccagggtggaggggtgggcgagtgtgaagaagccccctgtgcaggaatggcaaaagaatggacttagtactggatcctgggctggggtggaggaggaggcgccactgcagatccagtatggtgagagttcctacattgacaaagaagttggactagaggcactccagggcccactgagatccatgcagatacagcagactttccttcctgcattcacgctcctcacgatgaatctcatggcttccaccagaatcctcaaaaccacagcacatcagtttgctagcttgcacaaaaggtgtgatctcaaccctggggctgatggcgcagaagtgagcatgaacgacagctcacgttctggtggccttgtgggaaagccctgcccctccatctgtaagatctttgatctcacaaacatattctgtgcccttccagagaatgacatcaccaagtgtgccctctgtcctgtcacttggagctcctggaagcacagaatgtccctcagcctggacactgcccctggcctggggagggggtccctgcagccaccatcaggaaagctcccaccctggggacagtctctcctgcctcctgttcttcctggggtcaaagacgtgctcctgctcaagggtgagcaggatttgttccgcgccttgtggagatcgctgtcaagggaagtgaaggagcacgtgggcacggaccaattcgggaacaaatactactacatcctgcagaacaagaactggagaggacaaactattcaagagaaaagaattgtagaagcagcaaataaaaaagaagtagactatgaaacaggggatattccaacagaatgggaagcttggattagaagaacaagaaagactccacctactatggaggaaatactaaagaatgaaaaacacagagaagaaatcaaaataaaaagccaagatttttatgaaaaagaaaaactccttagtaaagagaccagtgaggaactcctgcctccaccagttcaaactcaaattaaaggccgtgcctctgctccatacttcggaaaggaaaaaccctcagtggctcccagcagcactggtaaaacctttcagccaggatcctggatgccacgagatggcaagagcacacaatcaatgaatgcattatggtcaaatctttatcatgtatatagatatgactatattaacaaataaaagaagtgaaaagttaaaaaaaaaaaaaaaaaa

SEQ ID NO: 26755 - DNA, 585 bp, Homo sapiens
  SIMILAR (310)..(582): 901254mologous to Homo sapiens ribosomal protein S7,accession number Z25749,Smith-Waterman Score=408.
atggagttgcttaaaaggcatccttctgctcttcctaagccggcgctcggcaagttctcccaggagaaggccatgttcagtacgagcgccaagatcgtgaagcctaatggcgagaagccggacgagttcgagtcccgcatctcccaggctcttctggagctggagatgaacttggacctcaaggctcagctcagggagctgaatattatggcagccaaggaaattgaggttggtggtggtcagaaagctatcataatctttgttcccgttcctcaactgaaatctttccagaaaatccaagtccggctaccaacttggaaaagctgtacaaaatataagcaaaagcatcccaggagccatactctgacagctgtgcacgatgccatccttgaggacttggtcttcacaagcaaaattgtgggcaagagaatccgcgtgaaactagatggcagccggctcatgaaggttcatttggacaaagcacagcagaacaatgtggaacacaaggttgaaactttttctggtgtctataagaagctcatgggcaaggatgttaattttgaattcccagagtttcaattgtaa

SEQ ID NO: 26756 - DNA, 742 bp, Homo sapiens
  SIMILAR (150)..(659): 451254mologous to Homo sapiens ribosomal protein S7,accession number Z25749,Smith-Waterman Score=203.
cggcgctcggcaagttctcccaggagaaagcccatgcttcagttcgagcagccaagatcgtgaagcccaatggcgagaagcccggacgagttcgagtccgggcatctccccaggctcttttggagctgggaaatgaactcggaccctcaaggcttcagctcagggaacctgaattattacggccagcctaaggtaaattgaaagttggtggttgttcggaaaacctatccataaacttttgttccccgttccctcaaactgaaaatcttttccagaaaatccccaagtccgggcctagtaccgcgaattggagaaaaaagttccagtggggaagccatgtcggtctttatcgccctcagaggagaattctgccttaagcccaacttcggaaaaagcccgtacaaaaaaataagcaaaaagcgtcccccagagcccgtactctgacagctgtgcacgatgcccatccttgaggacttgggtcttccccaagcgaaaattgttggggcaagagaatcccgcgtcaaacttagatggcagccggcttcataaaggttcatttggacaaaagcacagcagaacaatgtggaacacaaggttggaaactttttctggtgtctataaggaagctcacgggcaaggatgttaattttgaatttcccaggagtttcaattgtaaacaaaaatgacgtaaataaaaagtatatattcacagtaaaaaaaaaaaaaaaaaaaaaagtcgagc

SEQ ID NO: 26757 - DNA, 404 bp, Homo sapiens; identical to SEQ ID NO: 804
  SIMILAR (308)..(282): 881254mologous to Homo sapiens calbindin D28K,accession number S46006,Smith-Waterman Score=40.
  misc_feature (1)...(404): n = a,t,c or g

SEQ ID NO: 26758 - DNA, 2628 bp, Homo sapiens; identical to SEQ ID NO: 19833
  SIMILAR (166)..(933): 1001254mologous to Homo sapiens N-methyl-D-aspartate receptor 2A subunit precursor,accession number U90277,Smith-Waterman Score= 1325.

SEQ ID NO: 26759 - DNA, 400 bp, Homo sapiens
  SIMILAR (62)..(100): 691254mologous to Homo sapiens calbindin D28K,accession number S46006,Smith-Waterman Score=41.
gtgattaaaagctttattgctcacacaaagcctgtttggtggtctcctcacacagacacgcatgaaatttggtgctgtgactcggatcgggggacctcccttgggagatcaatcccctgtcctcctgctctttgctccatgaaaaagatccacctacaacctcgggtcctcagacccaccagcccaaggaacatctcaccaattttaaatcgggctgctcatcgccatgccgagctaagtcccaattcttcctcagtctctgctcctccaccctataatccttctatcacctcccctcctcacacctggtctggcttacagtttagttccacgactagctcttccccaccttcccaacaatttcctcttagagaggtggctggagctgaaggcagtcagg

SEQ ID NO: 26760 - DNA, 277 bp, Homo sapiens
  SIMILAR (42)..(209): 501254mologous to Homo sapiens Human secreted protein, SEQ ID NO: 5210,accession number G01129,Smith-Waterman Score=139.
atgttgctcacacaaagcctgtttggtggtctcttcacacggatgcgagtgaaatttggtgctgtgactcagatcaggggacctcccttgggagatcaatcccctgtcctcctgttctttgctcggggaggggcaagtaccctaaccccatatatctctgtgccccgatcccttatttctgtgccccaacctcttatatctctgtgccccaatcccttatttctatgccccgacctcgtatctctgtgccccgacccctttcccacttttctggagg

SEQ ID NO: 26761 - DNA, 630 bp, Homo sapiens; identical to SEQ ID NO: 5258
  SIMILAR (206)..(325): 251254mologous to AKV murine leukemia virus gag-pol polyprotein (tag amber codon at 2250-2252 inserts Gln in Mo- MuLV),accession number J01998,Smith-Waterman Score=43.

SEQ ID NO: 26762 - DNA, 384 bp, Homo sapiens
  SIMILAR (208)..(384): 591254mologous to Homo sapiens reverse transcriptase homolog= pol {retroviral element},accession number S61070,Smith-Waterman Score=177.
atgcagcaagaagaccctgaagaaagtaccaaaagccccaacccaacgaccaataaaaaacaagaaaagaaacttagcctgtttggtggtctcttcacatggacgcgtgtgaaattcggtgccgtgactcagattgggggacctcccttgggagatcaatcccctgtcctcctgctccttcaacgtttattctccaaaggatatcgggtatccccatccaaagctcaaatttcttctccatccgttacctacctcaatagtgtctccttaataaaaactcttctcaagaccactttacttccaaaggaagctggagtcattcactgcaagggccatcaaaaggcatcagatcccattgctctgggcaacacttctgctgataag

SEQ ID NO: 26763 - DNA, 1359 bp, Homo sapiens
  SIMILAR (1356)..(583): 931254mologous to Homo sapiens putative p150,accession number U93563,Smith-Waterman Score=1304.
ttatatcatgaaggcttccataaagaggaactttaactgtgaaaatacaagcctctgcttggaaatagggagctgtttttctggacatttggctttcctgttacttctaagatgctctctgaggtgcactgcctccacagcccgtgtggttatgacatttgatctattattttcagtgctttgagacactgaaagggcctgtggctccggatcccagagttggggagttttaagaggtttagaagcctggccgtcaatacccacagcagttatggagacaagggaaacaggcccttgaaaagaaggtaatgtggagtgggtagcctccgtattgactaagaaggggacggacttatcctccactgtgagagttacccagagcgtctgtgatggtcctgtaggcttccgaggcaattgggcggtgtcagtcttcagcttgctgttttggttactgtagccttgtagtattgtttgaagttgggtagtgtgatggttccagctttgttctttttgcttaggactgtcttggctatatgggctcttttttgcttccacaggaattctaaagttgttttttttaattctgttgtttcctgactttttaatgatcgccattctaactggtgtgagatggtatctcattgtggttttgatttgcatttctctgatgaccagtgatgatgagcattttttcatgtgtcttttggctgaataaatgtcttcttttgagaagtgtctgttcatatccttggcccacttgttgatggggttgtttgtttttttcttgtaaatttgtttgagttctttgtagattctggatattagccctttgtcagatgagtaggttgtgaaaatgttctcccattttgtaggttgcctgttcactctgatggtagtttcttttgctgtgcagaagctctttagtttaattagatcccgtttgtcaattttggcttttgttgccattgcttttggtgttttagacatgaagtccttgcccatgcctatgtcttgaatggtaatgcctaggttttcttctagggtttttatggttttaggtctaacgttcatgtctttaatccatcttgaattaatttttgtataaggtgtaaggaagggatccagtttcagctttctatatatggctagccagttttcccaacaccatttattaaatagggaatcctttccccattgcttgtttttctcaggtttgtcaaagatcagatagttgtagatatgcggcgttatttctgagggctctcttctgttccattgatctatacctctgttttggtaccagtaccatgcttttttgattactgtagccttgtagtatagtttgaagtcaggtagcat

SEQ ID NO: 26764 - DNA, 2146 bp, Homo sapiens; identical to SEQ ID NO: 5260
  SIMILAR (1478)..(1882): 601254mologous to Homo sapiens NAG13,accession number AF194537,Smith-Waterman Score=369.

SEQ ID NO: 26765 - DNA, 1503 bp, Homo sapiens
  SIMILAR (637)..(834): 501254mologous to Homo sapiens calbindin D28K,accession number S46006,Smith-Waterman Score=152.
atggcagctgaatctacggtatccatttctgactccacaagactgtcagtctcaccactgaataatataagacctgagtttgccaagtctcttgctaacattccagatggaggaaaactgccaccatatctaatttatcatcatcacatcatcatcaccaccatcatcatgatcattcatggtcatcatcattcatcatcactcatggtcacatcatcatcaccatcatcatgttcattcatggtcatcatcatgctcatcatcatgtgctcatcatcacatcatcaccatcatcatcgtcagctcatcgtcatcatcatcgtcatcatcatcgcgtcatcatcacatcatcatcaaccatcatcatgctccagtccatgtcatcatcatgctcatcatcacactcgtcatcattcatcatcatcacccatcatcatcgtcaccaatcgtttctatttcattgctgctaagttttctctcatccctgaactagtggcttcccactatggtccatctaccctgggcccaagccccaagagctccttggaaaaatggacaattgttgtactgcaagaggagcctgaagtatctgatggcaccagaagcctgtttggtggtctcttcacatggacgcacatgaaatttggtgccgtgactcgctctttgctctgtgaaaaagatccacctatgacctcgggtcctcagacccaccagcccaaggaacacctcaccaattttaaatcggggccacatggagaacttccaggttttcgtcaggaagcagaagcaggaaccaggagaaagcctagtccagagcttgatagggatttccgtgggaaagtcaaggcagagagaggcggaattgttggtgcactcgcctatctagaatcaagtgctgctaatacagataagctgcttgaagaaacttcctttgtttcacaaggccttccctcctgccaagaaagtgaagacgaatatgcatctgtttggaaatctcccaaatgcatgtgcaaaatgggccaagcagctttcattgccaaatattcggaggagccctgtcacagcctcatgcagaggacttcagtattagggcgaaggcacctgcagacaatgccgggaagagaggagggggaaaggaggatatttctggcaaatgtcagcaagactgggaaagtcctcaggtgcttattgtttgtaagtgaacgagcctccatcggatgggttgctgctgccctcgccaaggcatgttactgcacgcagtttgccttggctggaagttgtggttactgctgcttctcctgctccctgctggatgatcctgggttcttatgggcacaagatcgggggtggggcaggccatgggtggttttggaaaaggcaacattggagcagggaaacagggataagtcatacaaagaggtgcaagagggtgagaagagaggcctcaaaggaaaccagtctgccagcaacttgatcttagaattacagcctccaggaccatag

SEQ ID NO: 26766 - DNA, 1650 bp, Homo sapiens
  SIMILAR (396)..(226): 771254mologous to Homo sapiens Human secreted protein, SEQ ID NO: 5210,accession number G01129,Smith-Waterman Score=237.
tcagttggaagtacaagtccagtccatgccatctcctctgaaactgccttccacctgagccccagcaaagtgtgggcctggacagccaggtgtcctcagcccattggaacagggcacctgaccctggactagcaaatgcatgggctgggctaagccaattagattctttctctcagaaatggagacagaattagtgggtggatgttgtgtacttgagtcagggtggaagcagctgatccgatttaaaattggtgagatgttccttggactggtgggtctgaggacccgaggtcgtaggtggatctttttcatggaacaaagagcaggaggacaggggattgatttcccaagggaggtcccctgatccgaatcacggcaccaaatttcacttgcgtccgtgtgaagagaccaccaaacaggctttgtgtttggtgcaataaagcttttaatcacctgggtgcaggtgggctgagtcctgggaagcacaaggggtcggggaactacctcccctagccaagggaagccatgagaaactgtgctatgagggatggtgctatctagcctagatactacacttttcccgtggtcttcacaacctgcagaccaggagattcccttagtgcctataccactagggccctgggtttcaagcacaaaactgcgcagccatttgggcagacaccaagctagctgcaggaattttttctcataccccagtggcacctggaacgccagtgagacagaaccatttactcccctgggatgctccagcttggtcgggggaggagtgtctgccattactgaggcttgtgtatgtggttttcccctcacagtgtaaacaaagctgccaggaagtttgaactgggcagagcccaccacagctcggcaaagcctttgtagccagactgcctctttagattccttctctctgggcagggcatctctttttggagcaccctgtttattgctgtgggtgtgtgacagctggaagacagggctcatggaaaggtcaaaggaggcatgggcacccattccccttgcccctgttgttgctgcagatggtatgttgctcaatatcatatcagtatgactacccggaatcctccttcctcctcctgtttctctccagcctgtgcagtgcagggaagagcactggctctcatgccatactgctggggtctgcttttgtgcttccccacctggtggctctgagatcttagccaagcactgtaccttcctggggctgctcccatcagccctggccttgggaatgaagtggtcagagaaaatgatctcctcataaatgtctgatgaaaatcggcttgccaccctgggctgctcatcttgtaattctgagtcagaaagtttggggtggggcctgctgatctgtgcatttaaccaagactctgggtgagtctcatgatcacatgagtctcgcaagtcctcattgatgtctgaagctgtctctctggcatactccatagcagaatccatcactctataccctactttatttcttgtccattgatccttgacatcctgcagtcttatttgtgctgtaagattggatccagtcttgctatgctcctcctgcttcatggcttgatggtccagagaagacccattcatgatgagaagtgtgggccacat

SEQ ID NO: 26767 - DNA, 878 bp, Homo sapiens
  SIMILAR (617)..(579): 921254mologous to Homo sapiens Human secreted protein, SEQ ID NO: 5210,accession number G01129,Smith-Waterman Score=70.
ctttcctgaagattgaggatggtaagggatataaaggttttactgaataccaggagcctgagaaactgcttgggtgatttgactaataaaggccggtccattatcggacctccactgtgagagttatctaaagcatctgtgatggttcctgtaggcttctgaggcgatcgggcagcatcagtctttagccacttgactgtgcctttaacttgagccacctttttaagaggaaattgttgggcaggtggaggagggctagtcgcagaatgaaactgtaagcccgaccaggtgtgaggaggggaggtgataaaaggattatagggtcggggagcagaggctgaggaagaattgggacctggcttggcctggcgaggagcagcctggggaggagaggaggggtcagatgggtccgtagaaaaggaagattggaaagactcagcaacgcttggagttgggactgatttaaaattggtgagaagttccttgggctggttggtctgaggaccagaggtcgtaggtggatctttctcatggagcaaagagcaggaggacaggggattgatctcccaagggaggtccccccgatccgagtcacggcaccaaatttcatgcgcatccgtgtgaagagaccaccaaacaggctttgtgtgagcaataaagctttttatttcacctgggtgcaggggggctgagtcagtgccacccttcccatcacaggctctgagtgccaagacgtcccagggctgcttcaattttctgctccccatattccagtgcagcatttcttgactaccccagtcatggctcaaatgggccaaggtgcagctcgacctgccacactggaaggtacaagtcataaactgtggtggaatccacat

SEQ ID NO: 26768 - DNA, 858 bp, Homo sapiens; identical to SEQ ID NO: 5261
  SIMILAR (358)..(702): 841254mologous to Homo sapiens reverse transcriptase homolog= pol {retroviral element},accession number S61070,Smith-Waterman Score=498.

SEQ ID NO: 26769 - DNA, 1444 bp, Homo sapiens
  SIMILAR (920)..(1087): 831254mologous to Homo sapiens Human secreted protein, SEQ ID NO: 5210,accession number G01129,Smith-Waterman Score=249.
atgacctctggtcctcagaccaaccagcccaaggaacacctcaccaattttaaatctgcatgctttaaaaggattaaagcctgttatcattcgcctgttacagcatggccttttaaagcctataaactctccttacaattcccccattttacctgtccaaaaaccggacaagccttacaggttagttcaggatctgagccttatcaaccaaattgttttgcctatccaccccatgatgttactaggggagatatcagtcaccaaggccttggctggctccctgataaaagcccttgcagtattccacactgcagaatccccaggctatgctctcctggattcttactacctgctccagaaagggagtgtttgcatctccatcctccaagaagaggaagcattttcttggccggggaaaggagagtgtcgagataagtcctgggcctctctgggcctaatacccgcatttccccagggaggacagtggaaacaggccctggggcttctggaccacagctgcctctgctttggggaattaggcaccaggttggcagccccagcatccttcagcaccttcccaataacaaaccgagagcgggagagaaaaactgacaagctgattccaaaattcatgtggaaatgcaagggacccagaataaccaaaacaatcttggaaaagaatgaagttggagaatttacacttcttgatttcaaaacttaccacaaatttgcagtaatcaaaactatgtggtactggcataaggacagatacattgatcaacagaatgacattgaaagtccagaaataaattcatatgtttatggtcaactgatttttgacaaagactcagcccgcctgcacccaggtgaaataaacagtcttgttgctcacacaaagcctgtttggtggtctcttcatatggacgcgcatgaaatttggtgccgtgactcggattgggggacctcccttgggagatcaatcccctgtcctcctgctctttgctccatgagaaagatccacctacgacctcgggtcctcagaccgaccagcccaaggaacatctcaccaatttcaaatccgtttttacctgaaaactatatcaaattgagtcatcctgtcccgttagactcctacgtgctctgccagtttctcaggttgtccttgtttttaatgaccttaacagttttaagaagcactagtcagggcaaaacgacagctgtgcttcaccattctggggtacttgctgtcaatgcacctgccctcacagtctgggacactgccaagccccaccatcccaaggactctgtgcagtatgcaggccaggaatccctcaggctgtgggtttccacatgtgcttctgcatggaaagctcccctggctgctgcaggatgtcctttgcagagccccatcctgtcctccttatcgcagctgcaggcagcctga

SEQ ID NO: 26770 - DNA, 2904 bp, Homo sapiens
  SIMILAR (1469)..(2128): 841254mologous to Homo sapiens reverse transcriptase homolog= pol {retroviral element},accession number S61070,Smith-Waterman Score=914.
atgtggaaaggccccaaaggattagacatgtatggaaagagctcagtgagccctaagacatcagatatactggggagagacactctcctgctggccttgaaggtgcaaacagtggtgttgcaaactgcctgtggagagggccatgtggcaggaaactgtgggaggcctctagaaactgaaggcagtctccagctgacagctactaagaagctaagggactcagtcctgcaaccaaaaagtcctgaattctgccaacaatttacaagagcttggaataggacccaagttccagatgagactgaagccccagctggcacctatgcagcccaatcgggggacctcccttgggagatcaatcccctgtcctcctgttctttgctccatgagaaagatccacctacggcctcaggtcctcagaccgaccagcccaaggaacatctcaccaattttaaatcgggtttcagaggtgtcagaccacgcagggacgcctgccttggtccttcacccttagcggcaagtcccgcttttctggggaaggggcaagtaccccaaccccttctctctgtgtctctaccccttctccgcctttctggggggcaagaaacacccaaccccttctccttcaccctgagtggcaagtccgcttttctagaggagcaagtaccccaacctcgtatctctgtgccccagtcccttatttccacgccccgacctcttatctctgtggcccaatcccttatttctgcaccccaacctcttatatctctgtgccccaatcccttatttccatgccccgacctcttatctctgcaccccaaccccttatttccacgacccaacccctttcccgcttttctggaaggagcttgctacaagtgccagaaatctggccaccaggccaaggaatgcctgcagcccgggattcctcctaagctgcgtcccatctgtgcgggaccccactggaaatcggactgtccaactcacctggcagccactcccagagcccctggaactctggcccaaggatctctgattgactccttcccagatctcggcttagtggctgaagactgatgctgcccaatcaccttggaagcctacaggaccatcacagatgctttgggtaactcttacagtggaggcacgctttaaaaagattaaagcctgttatcacttgcctgctacagcatggccttttaaagcctatcaactctccttacaattcccccgttttacctgtcctaaaaccagacaagccttacagctccttcagctatactcactctttattgagtctcccacaattaccattgttcctggcccagacttcaatccagcctcccatattattctggataccacacctgacccccatgactgtatctgtctaatccacctgacattcactccatttcctcttatttccttctttcctgttcctcaccctgatcacacttggtttattgatggcagttccaccaggcttaatcgttgctcaccggcaaaggcaggctatgctatagtatcttccacatctgtcattgaggctaccagtctgccccactgcactacctctcagcaagccgaacacattgccttaactcgggccctcactcttgcaaagggactacgcgtcaatatctctactgattctaaatatgcctttcatattctgcaccaccatgtggtcatatgggctgaaagaggtttcctcactacacaagggtcctccatcattaatgcctctttaataaaaactctgctcacggccgctttacttccaaaagaagctggagtcattcactgcaaggggcatcaaaaggcgtcagatcccattgctttaggcaatgcttatgctgataaggtggctagacaagcagctagctctccaacttctgtccctcacggccagtttttctccttcacttcggtcactcccacctactcccccactgaaacttccacctatcaatctcttcccacacaaggcaaatggttcttagaccaaggaaaatatcttcttccagcctcacaggcccattctattctgtcgttatttcataagctcttccatgtaggttacaagccgctagcccgtctcttagaacctctcatttcctttccatcatggaaatctatcctcaaggagatcacttctcagtgttccatctgctattctactacccctcagggattgttcaggcctcctcccttccctacacatcaagcttggggatttgcccctgcccaggactggcaaattgactttactcaacatgccctgagtcagataactaaaatacttcttagtctaggtagatactttcactagataggtagaggcctttcctacagggtctgagaaagccaccacagtcatttcttcccttctgttagacataattcctcagtttagccttcagcacctcaatagagtctgataacagatgagcctttattagtcaaatcaggcaagcagtttctcaggcctttggtattcagtggaaccttcatatcccttaccgtcctcaatcttcaggaaagctagaacggactaatggtcttttaaaggcacacctcaccaagctcagcctccaactaaaaaaggattggacagtacttttacctcttgctcttctcagaatcagagcctgtcctcgagatgttacagggtacagtccatttgaacttttatatggacgcactttcttgcttggccccaacctcatcccagacaccagccctctaggcgactatcttccagtcctccagcaggctagacaggaaatttgccaggctgctaatcttctcttgcctactccagatccccagccatatgaagacaccctagctggacgatcagttcttgttaagaatctgacccctcaaactctacaaccttga

SEQ ID NO: 26771 - DNA, 1578 bp, Homo sapiens
  SIMILAR (851)..(825): 881254mologous to Homo sapiens calbindin D28K,accession number S46006,Smith-Waterman Score=40.
ctaagccaagatctgggaaggagtcagagagccttgggccagagttccaggggctctggaagtggctgccaggtgagttgaaccgtccgattttcagtggggtcccacacagatgggatgcggcttaggaggaatcccgggctacgggcattccttggcccagtggccagatttctggcacatgtagcaagctcctgatttaaaattggtgagatgttccttgggctggtgggtctgaggacctgaggtcataggtgaatctttttcacggagcaaagagcaggaggacaggggattgatctcccaagggaggtctcccccgatccgagtcacggcaccaaatttcatgcgcggcaccaaatttcatgcgcgtccgtgtgaagagaccaccaaacaggctttgtgtgagcaacaaggctgtttatttcacctgggtgcaggtgggatgagtccgaaaagagagtcagtgaagggagataggggtggggccattttataggatttgggtaggtaatggaaaattacagtcaaagggggttgttctctggctggcaggggtgggggtcataaggtgctcaatgggggagattttgagccagaaggaatttcacaaggcagtgtcatcagttaaggcaggaacaggccattctcacttcttttgtgattcttcagttacttcaggccatctggatgtatacccgatttaaaattggtgagatgttccttgggctggtgggtctgaggacccgaggtcgtaggtggatctttttcacggagcaaagagcaggaggacaggggattgatctcccaagggaggtccccccgatccgagtcacggcaccaaatttcattcacgtccgtgtgaagagaccaccaaacaggctttctgtgagcaacatggctgtttatttcaccttggtactttgggtgctcttctgggttgacagaggtggctccatcagctttccaggccttcacttgggtgtaatgaatccaagagtctattccagtgacctccactgccataggagtagaaagaaatacagtgtaaggtccctcccaatctgggcctaggtgtaagatctggtaaaggcttttaagaattttccatttgttcgcaactggtagataaaagcttgccatcctccaattgtagccattctggggactgaaaaatatgtccctgagagatggcccattctgtttctgcagcttcctctcaatatcaggggctgcctgagtaataaatttatcctttaggattaattgtccctcgactaaatcaggagatagagacatgtgctttaccaaggcccctcttagccgttccagaaaatcagtaggattctcatccattccctggtcgtgagggtctgcagcttcattcctgaagtcagcgagaccacgaacccactgggaggaacaaacaactctgggtgtgccacctttatgagctgtaacactcactgcgaaggtctgtggcttcactcctgaagtcagtgagaccacaaacccactggaaggaagaaactctggacacatctgaacatctgaaggaacaaactccagacacaccat

SEQ ID NO: 26772 - DNA, 1187 bp, Homo sapiens
  SIMILAR (195)..(1184): 881254mologous to Rattus norvegicus sodium-calcium exchanger form 3,accession number U53420,Smith-Waterman Score=1575.
gtggcggtggggggttcagtccacgttcaaagagccagaaacctggcaggggaagagatggggcagtgacacccaaccggaaaaataaaggaaactacaagaagaacccagctaagagatgtgaggcttctgaaagctcccatggaaaggttcgcagctcctccacctgctcggtccagctgccccaggtcaaggaagctctcaaaacaattcacatcaaggtaattgatgatgaggcatatgagaaaaacaagaattacttcattgagatgatgggcccccgcatggtggatatgagttttcagaaagatgtgacagacaggaagctgactatggaagaagaggaggccaagaggatagcagagatgggaaagccagtattgggtgaacaccccaaactagaagtcatcattgaagagtcctatgagttcaagactacggtggacaaactgatcaagaagacaaacctggccttggttgtggggacccattcctggagggaccagttcatggaggccatcaccgtcagtgcagcaggggatgaggatgaggatgaatccggggaggagaggctgccctcctgctttgactacgtcatgcacttcctgactgtcttctggaaggtgctgtttgcctgtgtgccccccacagagtactgccacggctgggcctgcttcgccgtctccatcctcatcattggcatgctcaccgccatcattggggacctggcctcgcacttcggctgcaccattggtctcaaagattcagtcacagctgttgttttcgtggcatttggcacctctgtcccagatacgtttgccagcaaagctgctgccctccaggatgtatatgcagacgcctccattggcaacgtgacgggcagcaacgccgtcaatgtcttcctgggcatcggcctggcctggtccgtggccgccatctactgggctctgcagggacaggagttccacgtgtcggccggcacactggccttctccgtcaccctcttcaccatctttgcatttgtctgcatcagcgtgctcttgtaccgaaggcggccgcacctgggaggggagcttggtggcccccgtggctgcaagctcgccacaacatggctctttgtgagcctgtggctcctctacatactctttgccacactagaggcctattgctacatcaaggggttctaa

SEQ ID NO: 26773 - DNA, 2926 bp, Homo sapiens; identical to SEQ ID NO: 22621
  SIMILAR (1859)..(2488): 971254mologous to Mus musculus SPARC-related protein,accession number AF070470,Smith-Waterman Score=1110.

SEQ ID NO: 26774 - DNA, 1128 bp, Homo sapiens
  SIMILAR (760)..(942): 531254mologous to Rattus norvegicus Na-Ca exchanger isoform NACA5,accession number U04940,Smith-Waterman Score=136.
atggacactgcttgtccctccttcaatgagccaaatgggccagcacagcactgggccagagacacagcctcgggcgatggacttgagggcacagtcctcatggagacagaggcctaccttggccatgggagtcaagggccctgggatgcttatgccatgggatgggaagaagaggcgaagtcacccactctgaatgcaggagataaggatctggagaacctgctgcccccaaatgcaggtgctccaagaagatgtggaagtggaacaggtgataccaccactcaccagaaaacagggaccaatgggccagatgggctactgctctttccctgggcaaaaatgagaaagtggttggaaagggaactcaaggatgtgagaactgcctgcaaaaaggcagctttcagcttgttttcacttcttttgggagggaacatgcagcctggcatttatctctcctcgccagcgaatgtcaatcaggaatcaaaaagccaaacagaggaggctttgaacggtgtcatcgggggtcgaagtgacttccagctgtctgtccataatcatgcagttacctcagatgtccctttccctctagccacaggtggcggtggggggttcagtccacgttcaaagagccagaaacctggcaggggaagagatggggcagtgacacccaaccggaaaaataaaggaaactacaagaagaacccagctaagagatgtgaggcttctgaaagctcccatggaaaggttcgcagctcctccacctgctcggtccagctgccccaggtcaaggaagctctcaaaacaattcacatcaaggtaattgatgatgaggcatatgagaaaaacaagaattacttcattgagatgatgggcccccgcatggtggatatgagttttcagaaagcttttactactacttacatcttccaacttcgcaaagtccaggttttgacaagtggcattttcctgaagtatttttgcttagaatatactgggtctgacacattggcacctgagtgtgagaggagaaaatgtatttatgtcgatgcagaaagcctaaagatccgtgggcagtttcgtgatgacatcttatgtctgtttatttgtgtgtttgtgtgcgtgttttaa

SEQ ID NO: 26775 - DNA, 577 bp, Homo sapiens; identical to SEQ ID NO: 22620
  SIMILAR (229)..(348): 371254mologous to Homo sapiens Secreted protein encoded by alternate reading frame of clone ek591_1,accession number W85464,Smith-Waterman Score=63.

SEQ ID NO: 26776 - DNA, 501 bp, Homo sapiens
  SIMILAR (493)..(428): 771254mologous to Homo sapiens Neural thread protein,accession number R95913,Smith-Waterman Score=95.
  misc_feature (1)...(501): n = a,t,c or g
gccggccggnnnaatgagaccccagtttgacangcaagngccgcggaannncttngggaggctgaggtgggcggatcacttgagaccaggagtttgagaccagcttcttgggaggctaaggcagcaggatcgcttgaaccctggaggcggaggttggagtgagttaagattgtgccactgcactccagcctgggtgacagagtgggactctgtctcaaaaacaaaaacaaaaaaccctttaaaagtgtgtgataaacatcagcttgacaaatatgaacccagcacccgtgaagcactggcactatgctgggtgctgagggagatggcatgaacagaaaagagagacacaggcccaaggagggaagtccagtgtttggtgggagatggggatgttaacaatcacacaggtcaggcacggtggctcacacctgtaatcccagcactttgggaggctgaggcaggtggatcacctgaggtcaggagttcaagaccagcctgacn

SEQ ID NO: 26777 - DNA, 352 bp, Homo sapiens
  SIMILAR (351)..(115): 731254mologous to Homo sapiens Human secreted protein, SEQ ID NO: 7870,accession number G03789,Smith-Waterman Score=301.
gaaaacaaggccactgggttcaagaagtaataggaaactttgagaaggtgatattcatgaaatgatgggatgagcaaagaattcaagaatgagtggtggccaggcatggtggctcacgtctgtaatcccagcactttgggaggctgaggcggggggatcacctgaggtcaggaattcgagaatagcctggccaacatggtaaaaccccatctctactaaaaatacaaaaattatctagttatggtgggaggctgaggcaggagaatcgcttgaacccaggagtcggaggttacagtgagccaagattgcaccactgcactccagcctgggcgacagagcaagactctgtctc

SEQ ID NO: 26778 - DNA, 621 bp, Homo sapiens
  SIMILAR (514)..(323): 841254mologous to Homo sapiens PRO2550,accession number AF130089,Smith-Waterman Score=282.
tagcatttgggagtggcgaaaaacaatgtaaaacttatgatgtcactcaccattctgataatgttcagggtgcctttctcctaccaggagagtactgtggcttagaggaaagaaatggtctatcaactgaacatgaaatggagcaggccaagaccttaggacattgggatttttgtgggaggagagtaataggtaattagacactgattgtgtggtagaaatactgcaggggaaaaggtcgccctcttatgcatcaaagagcaatacctgttgtttagcaaagagtgatgaaaaattgatcttgttttgaaattgaagagagaggccaggcgcggtggctcacacctgtaatcccagcactttgggaggctgaggcaggtggatcacctgaggtcgggagttcgagaccagcctgaccaacatggagaaaccccaattgtactaaaaatacaaaattagccgggcgtggtggcaggtgcctgtaatcccagctacttgggaggctgaggcaggagagtgcttgaacccaggaggcggaggttgtggtgagccaagatcatgccactgcactccagcctgggcaacaagaacaaaactccatctaaaaaaaaaaaaaaaaaa

SEQ ID NO: 26779 - DNA, 605 bp, Homo sapiens
  misc_feature (1)...(605): n = a,t,c or g
ttttttttttttttttttttacaggaacacanatttgttgttttaataaaaatacgatttctacaaaaggtgcttaacacggcccaggacgggctgtccggtggagtcagccgtaggacccctgaaggatttacaaagacagagccggctcaccagcacactcctgccagcaccgggacccactgcgaacaaagacagagccggctcccccagcacgctcctgctagccctgggacccactgtgagccactgcggggtgtccttcatttaaaaaaagtctggactgtgacactgcagaaggagtctgaaagcccaattcctgaatccctgcgttagaactgagagttccaggccgggcgcggtggctcatgcctgtaatcccagcactttgggaggctgaggcgggtggatcacctgaggtcaggagttgaagaccagcctgaccaacatgatgaaaccccatctctaataaaaacttgcccgtaatcccagcactttgggaggccgaggtgagtagatcacgaagtcaggagatcgagaccatcctggctaacacggtaaaacactgtctctaataaaaatacaaaaaaattagccaggtgtgg

SEQ ID NO: 26780 - DNA, 556 bp, Homo sapiens
  SIMILAR (438)..(373): 901254mologous to Homo sapiens PRO1722,accession number AF119851,Smith-Waterman Score=108.
ttttttttaaaatcacaaataatttattcttccgttagagttgatacagttttaaatagcaacaaagtacacagtggtggaaaattggcacagaacctacaagcatttcaatcacaataaggctgtccatgatttatctgttcaaacttgatgtccattttctactgatcaagttgaaagaaaaaacctattctggccaggcacggtggctcacgcctgtaatcccagcactttggaaggccgaggcgggtggatcacctgaggtcaggagttcgagaccagcctggccaacatggcgaaacctcgtctctactaaaagtacaaaaattagctgggtgtggtggcgggtgcctgtcatcccagctactcagggaggctgaggcaggagaactgcttgaacctgggaggcggaggttgcagtgagctgagattgcgccacttgaacttccagcctgggcgaccaagagcaagactccatctcaaaaaaaaaaaccaagaaccaaaaaccaaaaccaaaaaacctgttctgaccttgaaacacacaaacacacactct

SEQ ID NO: 26781 - DNA, 2453 bp, Homo sapiens
  SIMILAR (5)..(316): 991254mologous to Rattus norvegicus synaptotagmin XI,accession number AF000423,Smith-Waterman Score=552.
cccaggtaatccttatgtcaaggtgaacgtctactacggcagaaagcgcattgccaagaagaaaacccatgtgaagaagtgcactttgaaccccatcttcaatgaatctttcatctacgacatccccactgacctcctgcctgatatcagcatcgagttcctcgttatcgacttcgatcgcaccaccaagaatgaggtggtggggaggctgatcctgggggcacacagtgtcacagccagtggtgctgaacactggagagaggtctgcgagagcccccgcaagcctgtggccaagtggcacagtctgagcgagtactaatcctgttcttctctcctctaatccccgggggccaagctggggagggatgtggaggggaaaaagatgacagagaagtggactccaaacctcattttagttgtagaagaaaatttcttacaaaacaaattccacaaagaacaccctatatgaccacagctgcagatcagttcttagcaatgatgtttttttttctgctttgcaaggcgctagaatcttttattttactttattttttttgaggtggagtttcgctcttgttgcccgggctggagtgcaatggtgagatctcaactcactgcaacctctgccctccaggttcaagtgattctcctccctcagcctcccaagtagctgggattacaggcacccacgagcatgcccggctaattttttgtattttcagtagagatgggtttcaccatgttggccaggctggtctcgaattccagacctcaggtgatccacccgcctcggcctcccaaagtgctgggattacaggtgcgagccaccgtgcccggcctctggttttgttttgttttttttttttaatgggggacaaaagagagggaaagacccctataaaatctatatataacaatgtaaccatatacttgcatgtcttaatacaaactgaagaaattagcctaactgccaatatcaagttggcagattttaatccatggaaattgtgttttgtgctgaattgtatttgctgattacctgaaattggcttctttttattgggcttctctggagaatttctcccactccccacctctgcagaagaaaattttgctcttataaaacctcatgttttcatcattcccatcttttctttttattgcctcttatatctctgctctttgacctcaaggtctagaggtctgcagtaagccaagaaacaaaggtggggtggatgaggcaaggtttgcaggagaaagaggaattgagaaatggggtatttttgctatcagctcttctgctatgaagtagtaaaaggcagtctataattaactgacagacctaactgaagcacagagaatacatcagacttatgcatccaagacatcagaacttggattttatcaaacttgatgacttctctaaaaggagctttggaaacttcaaattcagctataggatagtaccaatgaacacatccagctgatcccaaaagctgttttcaggtataaggacaaggagaggagacaagtgacgacagccattcccctttgcagctatctactgtagtgacagccatttcttggttgatgggttggaagtcatcagaggtttgaagaattacactggcctttgtttttctggaaatgccgaccatggagatgctttagagtcttctcaaatagcttagatgttgtaatgaggttagctttgcttcataaaacaggggccctcagaagttctccttaaatttttcaataaaaatttagctcttaaaaaaataacagtgtgactgagtgaatgaagataagttggattctttcagagcattcttttcctcaaaacgagctgcataattcttggaatttatgtcttaccacatggtggagggatggaggaactacaggatgcaattcttcttctaccaatgggcaatagaggttgagagagattcagcatctttctgggattagaattcaagtctctttactcctacagcagctgtgtctccaacgttgagactttgcagatggcacagactccatggataataggtaaacttggggccgggcgcagtggctcatgcctgtaatcccagcactttgggaggctgaggcgggtggatcacctgaggtcaggagttcgagaccagcctgggctaacatggtgaaacccccgtctctactaaaaatacaaaaaaaattagccaggcttggtggcaggcgcctgtaatctcagctacctgggaggctgaggcaagagaatttgcttgaacccaagaggcggaggttgcagtgagctgagatcgtggcattgcactccagcctaggcaacatcagtgaaactccatctcaaaaaaaagtgcaccaggccaggcatggtggctcacgcctgtaatcccagcactttgggaggctgaggcaggtggatcacctgaggtcaggagttcgat

SEQ ID NO: 26782 - DNA, 396 bp, Homo sapiens
  SIMILAR (95)..(24): 661254mologous to Homo sapiens Human secreted protein, SEQ ID NO: 4473,accession number G00392,Smith-Waterman Score=79.
ttatataggagagctctggctggcatcagactggtgcccctctgggacaaagtttccacaggaaggagcaggcagcaatctttgctgttctgcagccttccctgatgatacccaggcgaacagggtctgaagtggacctccagcaaactgcagtggacttgcagaagaggggcctgactttacgggtccaagggccaatggcccccagacaagtatccgagaattctctgtactatctcttcggtttttctgtaaatctaaaactgttctataaaatgtcaggcctctgagccaaagctcagccattataacctctgtgacctgcacacacacatccaggtgccctgcaggagccaagaagtccatcagctccatgacatttccaagaacactcat

SEQ ID NO: 26783 - DNA, 564 bp, Homo sapiens
  SIMILAR (264)..(380): 381254mologous to Homo sapiens put. HMG-17 protein,accession number X13546,Smith-Waterman Score=69.
atcattgcctctacttgggactcttgcccctttgggttttgctggttctgaaatttctgatgcctgtagccaaagtgggacatttgagtgggcttctggaaatccaacattctagaagaaagccaaccaccaaaaacttttgaggaggaggagaaaacttctcctacccctggtaccttttggttggttgtgggtggttttcttccagtcccattgtacctgatgttccacctttttccctcctccttcctgcccaaaaaaagaaacctgctcctcccaaagccagagcccaagcctaaaaaggcccctgcaaagaagggagagaaggtacccaaagggaaaaagggaaaagctgatgctggcaaggaggggaataaccctgcagaaaatggagatgccaaaacagcccaggcacagaaagctgaaggtgctggagatgccaagtgaagtgtgtgcatttttgataactgtgtacttctggtgactgtacagtttgaaatactattttttatcaagttttataaaaatgcagaattttgttttttaaaaaaaaaaaaaaaaaaa

SEQ ID NO: 26784 - DNA, 812 bp, Homo sapiens
  SIMILAR (546)..(788): 871254mologous to Homo sapiens put. HMG-17 protein,accession number X13546,Smith-Waterman Score=364.
  misc_feature (1)...(812): n = a,t,c or g
acttcttggctcctgcagggcacctggatgtgtgtgtgcaggtcacagaggttataatggctgagctttggctcagaggcctgacattttatagaacagttttagatttacagaaaaaccgaagagatagtacagagaattctcggatacttgtctgggggccattggcccttggacccgtaaagaatataaacaccccaacctctcagaagaatagaacagctcaaactactgaaacgacccgcttaacgtacaaaagaacatacgacacgcgttgcgagatcggcgcgcgccaaacacacatgcgaacctacgtcgcacagagacctatgtacgtttcagtggtgtcccccggtgctttgtttgacgacaacaaggctctccctataatccgagcgataaaaaccacaacgtcttcctgttcaaatagaaagtgctttacggaagactcgccatgggccattgctggggccttagtctccagtgctccagagccagtagtgctcgcggcagttgagcgacagggcgaagccctcganagaagggctgaaggacataaagtcaaggtgaaggatgaaccacagagaagatccgcgaggttgtctactaaacctgctcctccaaagccagagcctgagcctaaaaaggcccctgcaaagaagacagagaaggtacccaaagggaaaaaaagaaaagctgatgcaggcaaggaggggaataagcctgcagaaaagagagatgccaaaacagaccaggcacagaaagctgaaggtgctggagatgccaagtggagtgtgtgcctttttgactga

SEQ ID NO: 26785 - DNA, 891 bp, Homo sapiens
  SIMILAR (105)..(311): 561254mologous to Homo sapiens put. HMG-17 protein,accession number X13546,Smith-Waterman Score=178.
gaattctaagaggctagaacgacccccggaccgaccaaagcccgcgcgccgctgycatgcccgsgtkccagcacctacgtcccgctgccgtcgccgccgccaccatgcccaagagaaaggctgaaggggatgctaagggagataaagcaaaggtgaaggacgaaccacagagaagatccgcgaggttgtcgtgctaaacctgctcctccaaagccagagcccaagcctaaaaaggcccctgcaaagaagggagagaaggtacccaaagggaaaaagggaaaagctgatgctggcaaggaggggaataaccctgcagaaaatggagatgccaaaacagaccaggcacagaaagctgaaggtgctggagatgccaagtgaagttgtgtgcattttttgattaactgtgttacttctgggtgactgtacagtttgaaatactattttttatccaagttttattaaaaatgcagaatttttgttttactttttttttttttttttaaaagctatgttgttagccccccagaacacttcattgttgtttttgggggggaagggggcatattgtcactaataggaatgtctcccaaagctgggattgatgtgggaggaaaacaccttttccccttcttagttttgaagagacttcctcttgggctcccgggggggaggggattccctggacttttgacacacatgggccaccttgggcaccaaaagccttgtggtatagaaaaacaaatttgtttttatgtcctcttctccctttccatctttcagcatagacttaactcccttaagcccagacatctgttgagacctgacccctagtcattggttaccagtgtgtcaggcaatctggactttccagtgatgccactgaggatggca

SEQ ID NO: 26786 - DNA, 9486 bp, Homo sapiens
  SIMILAR (8974)..(6821): 1001254mologous to Homo sapiens sodium/myo-inositol cotransporter,accession number AF027153,Smith-Waterman Score=3694.
tcagatcaaattatcctttattaaaatgaagcacagtcaagtataggaaaaaaataaaggtaacttcatctctcacatacaaacgtacacaaaaaaaatcaaagacaagtagtatttgccctgttaaagtatgactttctgcatgtttgggggggcactgttaagaggtaatatttcctaaaagatttaagattttttacaaaaaaccccaatcacactacagcttaaaacagaaatatgtcacctgttccacccaccaaaaacctagacatctgtccctatttctccagtttcaagttgcagtaaaaagccctcaaaccccattttagctagtaacccccaaatataattttggcattcttgacatttgtattctctccctccatcaatgtggtacaaacttattgagattattcctttgggtcccttaccattaggaccagtttagataccgcattgtcttgggcttatcaatactgtagtgctcatagcaactctgagacaaatacctggtggcctttatgactggcacttgtgggatacagagaatactattagtcttgtgctttctatgtgtgggtacactaatgtgtgaacacgattttgtgctttctatggactttagctttctatcatggaatataaactgttgtcacgtacctgttctcgatatacctatcaacctacaatggaaacacaacaaaattaagatcacagaacataagtaactttaagtttttaatggatataaaagaaacaacatttaggctacaacacaaatacagaactacctggtttcactgaacctaaataaaggctgcacataaagtatgtcaatgtaatgcatgtttttttttttttttttacttccttcactagttacgacaaaatttaagaggaataacaaatacaaattttctgttaagaacggaaaggtgcaaactagcagagtcaatactggtaaccagaaggcactaatccaaacacataaatttcaaaagctggttatattatggaataccatatatactggcctttgccagtttgggatttctgcaatagcaataagcctcgtttctgtttccaattataacaacaaaaagatgagttactaatgaacattccacttacagaagtctaggctatgttgataaattgaaaacttatctagactactctgtctaagagcaataaaaagtaaacactcttttatccagcagcactaggaaacagggtgaatttaccaagataaattaggttggggatacctactgccaacttgtgcggttgtcgaattcactgtaatatgtattcctcttattgatagagctctgaatgtaaacaacctagaagtgaggggaaaagcttcagtatcatggacaacaattatgttatagtgcttttcagtggtatagagcaaaaccactgttcccacactacgaaaaatctgagaccactgtgttttgtcttgatttgctcgctcttcagctgcttactttattctagcatcctttctcttcaagcaagctgtgaacccaggtaaccaaatttaagagtcattacataaagtacagttattggtttaagtcaatagcctcagactatgtatggtactgcccaaaaagtaaagtgcacaagattagcaatgatacagatataccaaacagtttttgtttatttctgagtgaaagactatatatgccaatggttagggttgttggttactggataaattaggtgcttaccccaaaacaaaaaaactaatccctctttttataaagaagtttagatggaaacagaaacagaaattacatcaattctcacaacattcctttaaaggtgaatcagtaatttaaagccttattctcagcattgaagagagtaaataaaaacatttatatgactactaagtgaataatggtgtgggactcaccactggcaaagccagttaattactttgaaccttaactaaattctctcctaggagtcaaagtagctgaacagctaaagtattccaacaaaggacagtctgacaaaaacattccatattaagtgaccttgatagaagaaaaagatttgcagccctaagttaaccaagtctagcaatcgaaagattaccttttcacaatccagcctcatacgttccagtacaaaagggttcctttatatgccaactaattccaaatttttacttttactgcaaaaaaacctttttggcatcaaaactccattgtttctctgcactctgacaccatcatttcaaaggggctcacataaatgatcactactgctctctccctaatttttgaaaaaggagttttgaggataaaacagtgcttttattattagccaacacaaagtgtgaggaaatcattcctgaggattaacattttaagctaacagaaattcagtatacttaaaacataattatatttaatgagtcattatttggatctaaaagtcctcaatactggggccaaacatcactttcacacaccatgccaatatgccttaaagtgaactaagctgaccaaaaaatccaaatttgaatttgctaagtgctgaaaagactaggtgtaggactgacacagcaatgtgaagggagacaaagagaaagaccagtctctctgaatggtaagtgggcatatacacatatagaaacagatcccatttgtaaagaagtctgctcaggctattatcaacactgaaatgccttcaacaacctagcatctggctaatgcaaaatcttacaaatactgaagcctcaaagcatttttctactaaattatctctactgtggtaacaaacttcgtactttataatgcttaacatcaaaccagggtttaaaaagctgaaacttatttattggtgccctgatttatatggggaggagtttaaagtagctgagagccaaggtgcttcaagctctaaatctaatgaaaatgattctacatatgcagattttaagctaatatttgttgtcttttaccaacgggctaatatctgtgtcacccaggtacttatctcacttaatcatttttctgatttcttaggaaattttgtcctggcaagtctctgtagtcacgtaatttaacaggaaaggtcttgtatacatctctctatccaaacctaggaaacagtgaggtgtcaccaccaacgacccatgtgatccctttccagtcatcatgcctctgatgaaaatgagccaggagaatcatcataagttaaccctgtaagctttaacactgccaagcaggaacagggaagacctaacctttgagtagcaagtaactgagtagctaataagccgctttatttggtggtaaagaatgaaaataacccacaggccacaccaaatgatattcaaagtcagaggggaagatccatatgcctactataaagaaaatgagccatggactgcgaatacagacacactctattggctctcacaagagttaaccccttgcttagcctcaagttacagaagtgcataacaaccccctcaactcagttcttaaaatgtgaagtttcacagagtgatgggtcccagctaatttcttgaggtatcatccctaagagctatggctacatgaccctggccaggctctttgtgccaaaatacaatggatcctttgagccaagtgaaaaggaagccctaggagatgagatctattgaatttaggccgaaggacacagcaccattgctattgcttgatgcttctctaatctaaagacaaagcataattacccccaggaaagaatagctggggaagaagaaatcggctcaagtgtttactctctgggggtggcagaacagaatattctgaaagatgaccagggaaattagaggtcccacaaaatatgcaataatcatcctgcataccaatgtaatatgcccttctcatcagatcttgagatgaaaattgcctgagaagacaaaagtctaagaactggggataccattaacacctggtaagacatttatttttctctaccttccaagaccagtgtcctcacctcattttgacttttagctattctagtcaatatcaagcttcaattctgaaccttagcttgagctaatataaaaatatacacatgttaatgtctaaagaccaatgtcatcatttaggacccatttagtcagtgtaaagtatgaacattttgctagcttaagacagtccatgtatgatcattccagggacaatcattctaatgaaatatagattgaagactggtccctgaattaagttgcaatcagcaattcacaaacttactcgagcacattatctatttactggaaagcaataagaaagacaagcttcagggactttagtctaaataaaatgatgtttatactggcaagaataaacaattctaatgaatatgctaatagtcattccttatttacagactttagtactctaaacttgacctactgctatatacacacagacacaagatgatgtaccttatgtatcttactaagacaagagcagaaagaaggtagagggaccctaattctccaaactactaggactcaatgttaaataaagggagaaaaaaaaaatcacagacacctcctattcatttacgctggatatggaagagataggctgcccagccaatatgtcaattatcagtgaattacacagtagtgtggttcaaagaaaattttagttcttacaacttaatgttaatttgaaaaatccaagatcttattactttcccaaacaccaaaaggttgtcccaaaggaagaacagttcctttgaaaaaacaggacaaaacattgacaaccatttgtccagacacatctgaacaaaccatgagtccagatttggagacctggtttctgttcttcccaaaagagacttcataaccttggacatgtcgcagcctcaacttccaaacaagaaaatgatgagctctatctatttggcccccaaattataaacctcaagaataaaattgagaaaaattctacgaggcactctaagctcttcagaaatacatgctattcatacataaattattttttcatttacagactcagtccttcagaaagcctcctgatcatgggaagacactatgctacctgacaatttctaaaattaactttggactaatcaagtccatcataatgaaactagtttatagactacaaaaaaattaaaaagactgagttttgattcaaaatctacaaaagtatttatgaaagtaatttccctaaatacaagcctagtaaaatcatgcaatctaaaaagtatcagagattaaagaaggtcaaagaaagtacatacataatttgcttccttcatctttcatggaggacaaaggacagtgttgagcatacgaagacacagaagtacgtaatctgtagagcttttctctaacatcttttgtaccctgtacccactagctgcaagtgggtgccaagccatgtcaagttagagtcctataattacacagtcctgtaataccctccacaagacacactactaaccccaaaagttcttgtttggcacctctcaaacatgctatccatcctacagaaagactatattgacaacctaacaacagcaaagtatgcactgagttttctgttaccgacggccggaattggcactgaaacatccttatgctctaagtcactacaacaaaaatgtggaggctgtgtccagatggaaagtctttggaggaaaaaaaaatcagggaaaaacttatcaaggatgcaataagatatcagaattaaattttccctctaaaaattcaaccttgatatatcatgatctaatcaagtagagcaatccagcacacaaaggcagcgtcaatttttcttcaggtttctggacatatcttccaactggatccacctaggaaggcatttggctaataatttttccaaataacaagaataaagctagaaaattagcagaatatatgagtaatcatctgattagcataagttaatcaaacactgcttagggggctggtcatttccaaactatataaacaaccttaatatgatcaataaatatggggatcatcagcaacatttacttcattttctcccccataatcatttaacaacacaatcatgacatgtaactttacaggcagacttgttggtcatttcagtatggttcacttaaacttgaaagtagaaagaaaaaaaaaaaggaactggaacaaagtttttccctaacattccatatactggtggtacaaaaatacctacaggaaaacattctttctttgggaaatcagaatccgtaggctcatgctaacaaaatgaacctggcaaatgaacttgtcctgaaacaagtatcacacaagcacattcgattttcagtacataactgattgtacaatgtctaagaaataagtttttcttaatggtaggagggattacagagacagaaaaaaaactttagaaatgagcaaatcttctacttcagggtaaggtctgccaagacttggcagtgcagacagtataccttaattcatggtaacttaacatatattctgctctaagtgctctgtgagaataattggtctcttcttactttggtatgcaaaatttaaaaccacatttgcacaattcagtctgttaggtttggcttcacttaagttgaagatttactttaatccatctctgggaaaataaagtcttgtaattagatgattttctgctaagtaaaatttggctaaaacctacagcgtaaacaatgcctgagagatgcacagttacataacttttttccccaaagaccagtcagtattgtcttaagttagtgtctcaccatatccttaagttcataaggagaaataaacaaacatgaaaattccaagtgaacacacagcaaaaagtccaatatttagtattactttaacttgccgagtctcttctagcatctgtaaacaaacagcctcctcttccatcaggtctctgagactcctcttgctgaggctcttacttttaaagccacaaaaccagtctatgaacttccagtaccgacctccatcatccgtttctttctttctctctttctcacccatgagagctgcttgcccattggagtaagcgtcaactggtgtttctgcctctgaatgacctaaggatgccactgggttgccctcctctctgcaggttaccaacagattaacatcttcaggctgaaggcccttaatgctgtcttcagatttcccgttgggaatgatgtggttgatggtctcattattctcactgcatctcagaatgctcttttcttgcatttggtatggttcctcttttggggagcagttctccttcaccaccaggttcttcttagaccaaaaggtggtggttcgaatctgttcctttgtgggaggtggtgtgagaaggctcacaattacagtaatgagtcccgtgacccaaaacaatcctgtggccacatacatataatggatgtctttgatgaagcccggcctattatcaggttggtcacattctggggcacggtaggcaaaggccagtatcaaacggactgctccaagaacaaagccagccattccaccatagaaagccccttgttcattgcagcgcttccagaaaattgccagcaggaacaaggctgccactgggggtgtcaggtaatctgctacctcctgaatgtaaaggtacatctggcctccttgcatctccacgatgattggcacccatgctatgctgatcaccaccataaatgccacaaatatcctccccacaatcattaactcccgggagcttgcgctcttgcggataagtttgtacacatcgagggtgaatatggtactggcactgttaaagatagagtctaagtcactcatcagagctgcaatcatcactgccatcattaaaccccgaaggcccacaggaaccagcttcatcaccaggcgtgggtaagcaatattggagcaaccagctctgcttccacacaccagcatgcagtgctctgggttgatgcaagctatatcatcagtaaacagtatcctggaaatcattcctgggacaactatgataaacattggcaggagctttaagaagccagccataagagtagagcctttggcatgagcaatgtttttggctgcaaggaccctctgcacgatgacttggtcagcacaccagtaccatactgaagctggggtctgcccaagaatgaatccaggccaaggaacatcttcatctgttggattccgcagcattttcagggcttctttcttaggggagacattacaagaatttgtgttggaaaggttgtatgtcaataagatggaagtgacatcgggtgaggccaacatgtaccttctcttaacttcctcaaacccgccaatctccattatgctaataatcataagtgtaagtgccccaatgatcatgagcagagcctgcagagtgtctgtgtagatcactgcaacaaggcctccggtgacagtcagcaaagcagtcatgccaatgagcaggatgacagacacataaagattccaacccaaagactcctggataaaaagggcacccgaatacagatccaccgagagcttggtgaaaatatagagaatcagagacaaggctgcaaaatagacctgaatcctatggccaccaaatcgcttggacaagtattcaggcatggtatatacccctgaccggatgtaaattgggatgaaaacccatcccagaagttgtaaaagcagtaaggcattgaattcccatgcgcccactgcaaatccacttgcagctccagatcctgccagcccaatgaagtgctcactcccaatattgctcacaaacagagaggcaccaattgttacccaggtcatagagcgccccgccaggaagtatccactcacggtgcttctattagatttccacatggcaaaaaaaccaatgcacatgaccaggataaaatacagggccactatggcaatgtctgctgtgtccagtacagctctcattctggtaacttgtgaataatagcgctccaatgacagaagtgtccaactttttatttatttttagtaaccccagccaagtctgtaaaccatacgtgaactggactacacagagcaacacagcagggtcaaagtctttgtcctttggtttgctgtcttgatggtggtggttgtgataaactttgaagaagacagtttaaattttccgcttcttaattgggattgagaacttagctcgtactcttaatccactctccacaagaccatcagcatttactcaggtgctggaggagaaattctgagttgcagctaagtctagtgaagcctactgtaccaaccccgctgcatggctttcaggattaaagccagctcgtagcggggcatgcctggaggatcggcgagtgcggctcggaagccaaccggttcccgggacgcgaaggggcgggacggcggggacagtggggacctagaaactgctgcgccggacggctcccaggcggcgaaagcacggtccg

SEQ ID NO: 26787 - DNA, 1428 bp, Homo sapiens
  SIMILAR (299)..(556): 371254mologous to Gallus gallus type XII collagen,accession number M17375,Smith-Waterman Score=94.
  misc_feature (1)...(1428): n = a,t,c or g
tacccctcgttccaggaggcagttagagttttacgtaaacagaaatgtgatctgatcaacatgctgtttgagaaggaccactctgggagcccgagagtagaagagggaagacccgggtcagtgaggcagatgaggaaactgaaccacagagttcagttacttgttcaagggtacacagtcattggacacaggcggtctggctttggctccatgctcttgaccaccaagctgtactgctgccaactagccacctttgaacagcgcattcagggacagaaggggaaaaaggagccagacacagggaccaaggagacaaaggaaaaccccaagagtacaggatcatggatggccaagaagagaccctcaggactgcagagagctgccagcgcctttaagcccgggctcgcgctctcggaccgtgctttcgccgcctgggagccgtccggcgcagcagtttctaggtccccactgtccccgccgtcccgccccttcgcgtcccgggaaccgcntcggcttccgagccgcactcgccgatcctccaggcatgccccgctacgagctggctttaatcctaaaaagccatgcagcggccagaggactgctgctactttgaaacgtacgatagagggccctgagggacagagaagcaatagtgagggacttgggaaaacctgggtgaacgaagcgcttccttaataggatctctgcccacaagtcagcaagcacaacagagggcgggtatttcttggtgggatttttatggcacccaccgcagctgtttgaaaggcatgggtgggagcacttgttttcgagatnttaggatgttgatttaggaggggatttttgttcaaacaccctcttgacccaggaactaaaagaatgttgaaagggattgtccccagttcccattcgcagaaaaaattatattccacaaagaagaggtaagaagtgggaagatttccccgaattttaacccttatatgtaaattcctttcacattttggggcagcatggacgagaagggaagaatttgccaagtttggccttttatataagccatgtgttgcaggtgcctgtttgatttttctaaggtattttaagccccttggatccccctttgccttcgaaaaggtggggaactgctcactgacagcttctctgtaaccttgcagtacccagtggatcgttccttgattttgttttcattagtgtcaatttctttgtcattggaggacttttcccctttacaacgagtaacaccattttttggaagnaggcaaaacttataatacctcctgggattgtgagctagtcattcagcctgtggtaaccatgtgggnaaataaaaatggacggaccaaggtaattatatgggacaacttttgctttgagtaataaacttgattgtaggaaaaaaaaaaaaaaaaa

SEQ ID NO: 26788 - DNA, 467 bp, Homo sapiens
  SIMILAR (258)..(196): 451254mologous to Homo sapiens Human epidermal growth factor fragment,accession number R87459,Smith-Waterman Score=49.
catccatgattttttgaccaaggacagtagactgcctatatcagttgattcaccaaccagctgctgctgacagcaacaccactgcagcatctaatgtggacaaagtacaagaaagcagaaattcaaaaagcaggtctagggagcaacaaagctcctaattctattacccactacatgacatgtgggccaagtgctacacttagtcctgagatgtattttttctttaagtcttgaatgaatacaaaaggagcccattttataatataaaccttgatgtacatgttgagatatttggacaatgaaaatgccttaaaaggaatgcatatggataaagttgcacttataacacccttcaacaaaatctaattttaaattgtctttttcttttctattaagggttttctttttcagtgtctaccattgtacttataactgttattaaataccaaatcaaataatataaaaaa

SEQ ID NO: 26789 - DNA, 2673 bp, Homo sapiens
  SIMILAR (2310)..(2363): 881254mologous to Caenorhabditis elegans similar to RD tandem repeat region of RD protein (nuclear rna-binding protein),accession number U28971,Smith-Waterman Score=83.
  misc_feature (1)...(2673): n = a,t,c or g
ataataaaccccagccccggggataaaaatttcctaaaaccaaccccggaagcaaaactttccaaccaccaagctattcaggtagtttttaccccctttacccctttaaaattttttattttccctaaagcctttaatctctgtaaggaggttgggccaatatgtcccccccccaaaataaaggtcccttcccaaaattcccaagtaggtttttattcggccccccataaggaaaaaaatttttccttgccatgcccgggttaaatttgggcccccccaagggttcttttaaaagggccccccctccnnnnnnnnnnnnnnnnggatacaaaaatcacctcagggttctatttctttttatactagtttgagacgtgaatggtagtccgaacttaatttttgaaggagaaacaaaatgaaaaatgttttttaaaaaacaaacagtggtatctcttgtcatgagttggatgcctgtgactgacatcaggtattgccaagtaataaacattttgccattcaactctaaatcccttattaggcattagttttaaagggaaatgttacaggcttttatattatttgatttgggtatttaataacaggttataaggtacaatgggtaggacactggaaaaaggaaaaccccttaatagggnaaaggaaaaagacaatttaaaattagattttgttgaagggtgttataagtgcaactttatccatatgcattccctttaagggcattttcattgtccaaatatctcaacatgtacatcaaggtttatattataaaatgggctccttttgtattcattcaagacttaaagaaaaaatacatctcaggactaagtgtagctcaccaagaaaaacacaaaaattcaccactcacaaaaagtaacttaaaatacaaaagtcatttaggtatacattattactccccattggtaattccagatttggggtcaggtatcttttttcatttccctggacataaaccattagggcaggcacagggctgtagtacttcattgtgaggtggctacaactctataatatgcacagtgattttaaaataggctttttgcatgcctttgccatggaaaaggtgctacatacaaacctgtttttgtggaactctttggtaaccaccaatttaaaaatttggatgaaagcatttccaccatggacagatctgaagcacattattggagcttctgagccaaagcttanttaccctgtatattgattcttcaggtttccttgaggggttagggtgttgatttagattacagccagataatttaaagcatgtcaggccccggttaggaaaatgaaaatggctccgattcgtttccagttggctttattattgtttggcagaagttgtttaggggagaagagtggcttcctacaaagtttgcttctcaaggtatactggagaaagtaaaatattcatgtggttacctactgtcctagttgtttccttgaaaagggtatgaaaaaaagtgtgatgaatataattgaagattattcatatttttgtagtctcaatgtgttcccttggttgtctctttaattgtccccttcctcagggtcagcctactcangaatccagtaactttaacacgttgttttccagcattttcctgcttgaaagcactaatgcacttaaacccagcatgttcctgtaattttaaggataattaagtgttcctggagaggtccaagctggaatgtcattcgccctcattgggctacatcacccaccccattaaatttcagcttttcagtaattgttctgggatgtgttcctagttgtgcaaattagatggctaggctaaaaataaaccctaaggttacccccaacctaactgtatttaggcccataacataatttcctatgtttacttttatcccaccctaaaaatgaatgtacattttttgacatgccaattgtctcctagactgctctgatacctattaccaatgtgctacttgaatcccagggagttatgacagagagagatgtttcaaaagtctacggaaaaggttttagatatttctgttgtgcattattttttgtatgttagtaagaatcctttgtatttccatttacatagcacctttcatccaagattttcaaaatgatttaatgttaacagcatttggtggtaaaacctaagttaccggtggcattgaagtacgtaagtaagctcaagttctctaagttccatttcaatttaaacatgctctcttttttattgatggtcttttggaaattagactgtgaacacaacattgctactggcctacgaaagagagagagaaagagggagagagaaagagagagagagagagagagagacttttcttatggttactgggttagtgatgaaacccacaactcataaaccacacactatggaatatggaattattccaaaaagttcttcagagctggtaatgaaagcctaagaagtacactgttaaaattttaaaaagtcagtatgtttctcatttcagaccttgaagattactctgatattgatgttaaataatgaatttgcattaatgagtatcaatgcattttttgatttcataagaaaataaaactgtgatataaaattggaactactaaaaaaattgatgtttccctgggttaactaaatctatttt

SEQ ID NO: 26790 - DNA, 989 bp, Homo sapiens
  SIMILAR (485)..(610): 781254mologous to Homo sapiens Human secreted protein, SEQ ID NO: 7420,accession number G03339,Smith-Waterman Score=157.
cttttgcttcagaaaaggaaagggaagaataaaacttgtcaatagtagggtagagcaccaagcaggctcctggggtccctggtttcagtccttggttgctggacaatatttctggacctgctctgggccagatgggagcccacttccctgaaaggagagacccaagcctggcatcattcatcacaagctgactgaagagctcgtaggcaggctcaacaccagatggaagctgccaaggcttgggccttccaccctctgaagccacagcccatgctctatgttggccccattcagccatagctggagtggctggatcacagtgcaccaagtccctaggctcttgaatgctttgctgcttagaaatttcttctgcctgataccctaaatcacccctttcaagttcaaagttccacaaatctgtagggcaggagcaaaatgccaccagtctctttgctaaaacataacaagggtcacccttgctccatttcccaacaagtttctcatttctatctgagaacacctcagcctggacattattgtccataacactatcagaattttgggcaaagccattcaacaagtctctatgaagttccaaactttcccacattttccagtgttctactgagccctccaaactgttccaacctctgcctgttaccaagtttcaaagttgcttgcacatttttgggtacttttttaaggagcacctcactccactggtatcaatttactgtattagtctgctttcaccctgctgataaagacatactcaagtctgagaagaaaaagaggtgtaaagaaaaagaactgtaattggacttaaagttccacatgggctggggaggcctcagaatcatggtgggaggcaaaaagacacttcttacatggcagcagcaagagaaaatgaggaggaagccaaagcagaaactcctgataaacccatcatatctcatgagacttattcactatcatgagaatagcacagg

SEQ ID NO: 26791 - DNA, 724 bp, Homo sapiens
  SIMILAR (723)..(586): 891254mologous to multiple sclerosis associated retrovirus polyprotein,accession number AF009668,Smith-Waterman Score=221.
agtgaggccaaccctttgccactacatccatttccttactgaggtatgccatgggttgcaagctggccctcggacctgtgtcaggactcctaggactcctagagctattcctgttttttctgtgacatataaaggaacgtcttgtcccattggcaagcttaacactggggcttgggttagggcctcctttagagcctggaaagccacttctgcttcaggtgtccattctactaaatgggtatcagctttctgagttttcttaattagtgtgtataatggcctggctatttcgctgtacctgggaatccatattcggcagaagcctgttatgccaaggaaccctcttaattgctttggggttttgggatgaggataagctggtataggctgaatacgttcctcactgaggaccctggtgcctttggataattttagccctaagtatttaaccttctgtgagcagagctgagcctttggtttggaaaccttgtagtcacaggtgatgaggaagtttaagagtgcttgggtggcttgatggcacaaggtttttgaacgggcagctaaaagtaaatcatccacatatacaacaacctcatcgataatcctgagatcttgcactaacctccactgtccgttgggtttctgtactcctaaaattggagtactgcaggggctattgcatggttttactaggccttgggcttttaggtccttaacaatcttt

SEQ ID NO: 26792 - DNA, 391 bp, Homo sapiens
  SIMILAR (143)..(274): 361254mologous to Homo sapiens envelope protein precursor,accession number AF072506,Smith-Waterman Score=58.
gaatgggggaccccacgagggccatagtttcctcccctcagaatggccagccaccgaagaaggaaaaatacttatgcctgcagctaaccaatggaaattacttaaaacccttcaccatatctttctcttaggcattaatagcacccatcagatggtcaaattattatttactagaccaggccttttcaaaactatcaagcagatagtcaaggcctgtgaagtgtgccaaagaaataatcccctgcactgcagcccatacatttcaatccctttatctttaacctccttgttaagtttgtctcttccagaatcaaagctgtaaaactacaaatagttcttcaaatggagccccagatgcagtccatgactaagatctaccatggacccctgg

SEQ ID NO: 26793 - DNA, 1662 bp, Homo sapiens
  SIMILAR (256)..(1167): 831254mologous to multiple sclerosis associated retrovirus polyprotein,accession number AF009668,Smith-Waterman Score=1318.
gcggagcagggtttatctcctcagacaaaggtggaaaggctgatggcagtgtgggtcagggagggggtgttgccattactggggatggggaagctgtttcttctggcaaaaaagtttcatcagagtttacaaactcagtgtccccagctctatcagggtcctcccatacgtccccattccaagttgcagggtcccattcttttccaatcaatgccctcactttaacagtagacacctggcagtactgtgcatgcacccgaggccgatcaaggactccaaaagattgttaaggacctaaaagcccaaggcctagtaaaaccatgcaatagcccctgcagtactccaattttaggagtacagaaacccaacggacagtggaggttagtgcaagatctcaggatcatcaatgaggctgttgtccctctataccaagctgtacgtaacccttatactctgctttcccaaataccagaggaaacagggtggtttacagtcctggaccttaaggatgcccttttctgcatcgctgtacatcctgactctcaattcttgcttgcctttgaagatcctttgaacccaacgtctcaactcacctggactgttttaccccaagggttcagggatagcccccatctatttggccaggcattagcccaagacttgagccagttctcatacctggacactcttgtccttcggtacgtggatgatttacttttagccgccccttcagaaaccttgtgccatcaagccacccaagtactcttaaatttcctcgccacctgtggctacaaggtttccaaactaaaggctcagatctgctcacagcaggttaaatacttagggctaaaactatccaaaggcaccagggccctcagtgaggaacgtatccagcctatattggcttatcctcatcctaaaacccgaaaacaactaagagggctccttggcatcacaggcttctgccaaatatggattcccaggtacagcgaaatagccaggccattacatacactaattaagaaaactcagaaagccaatacccatttagtaagatggacacctgaagcagaagcagcttttcaggtcttaaagaaggccctaacccaagccccagtgttaagcttgccaacggggcaagactttttccttatatgtcacagaaaaaacaggaatagctctaggagtccttacacagcactatggagaggaaaggaattcctgacttccgacggaatacctatcaaacatcaggaagccattaggagattattattggctgtacagaaacctaaagaggtggcagtcttacactgccagggtcatcagaaaggaaaggaaagggaaatagaagggaaccgccaagtggatattgaagccgaaaaagctgcaacgcaggaccctccattagaactgcttatagaaggacccctagtatggggtaatcccctctgggaaaccaaaccccaaatcgaagctgtaagactacaaattgttcttcaaatggagccccagatgcagtccatgactaagatctaccacggacccctggactggcctgctagaccgtgctccaatgttaatgacatggaaggcacccctcctgaggaaatctcaactgcacgacccctactatgcctcaattcagcaggaagcagttaa

SEQ ID NO: 26794 - DNA, 954 bp, Homo sapiens
  SIMILAR (760)..(948): 731254mologous to Homo sapiens envelope protein,accession number AF072508,Smith-Waterman Score=217.
atggcccataggcccaagcccggtattcctagaccttttggaaagcccaaggttgagaggttcactcgaaccctgggagtggctgcaggtggagctgcctgccagtccagcaccgtgcacccgcactcctcagcccttgggcggtcgatgggactgggtactgtggagcagggggtggtgctcataggggaggctcccgcggcgccagagaccacggactcaccactgagcacaaaggcaatgttgggcatgctggtaaaggaccactggagtccagcagcccagacccctttctttgtgatcaaggaaggtgggaaaaggggtgcaggactgctacatggccaactaattttaaaggataagtttatcactcagtcagctgcagacattaaagaaaaacttcaaaagtccaccttaggcccagagcgaaacttaaaaaccctattgaacttggcaacctctgttttttataatagagatcaggaggagcaggcggaacgggacaaacgaggtaagaaaaaggccaccactttagtcatggccctcgggcaagcggactttggaggctctggaacgcggaaagcctgggcaaatcgaatgcctaatagggcttgcttccagcagtacccccttagacctgaggcccaacaaggactccaaaagattgttaaggacctaaaagcccaaggcctagtaaaaccatgcagtagcccctctgatactccaattttaggagtacagaaacctaatggacagtggagaattgaagctgtaaaactacaaatggctcttcaaatggagccccagatgcagtccatgactaagctctactgcggacccctggactggcctgctagcccatgctctgatattaatgacatggaaggcaccccccctgaggaaatctcaactgcacgacccctactatgccccaattcagcaggaagctgttaa

SEQ ID NO: 26795 - DNA, 2049 bp, Homo sapiens
  SIMILAR (241)..(1314): 811254mologous to multiple sclerosis associated retrovirus polyprotein,accession number AF009668,Smith-Waterman Score=1501.
gaacccagcccagctctaggactcacccctgagcgcaaaggcaatgttgggcatgctggtaaaggaccactagaatccagcagcccagacccctttctttgtggtcaagaaaggcgggaaaaggggtgcaggactgctacatcggtaagcataactaatccgataaacagaggtccatgggtggttacgcaccctggaaaggaactcacccctgagcacaaaggcaatgttgggcacgctgggagagacattctagcaaaagcaggggccattatacacctgaacataggagaaggaacacccgtttgttgtcccctgcttgaggaaggaattaatcctgaagtctgggcaacagaaggacaatatggacgagcaaagaatgcccgtcctgttcaagttaaactaaaggattccacctcctttccctaccaaaggcagtaccccctcagacccaaggcccaacaaggactccaaaagattgttaaggacctaaaagcccaaggcctagtaaaaccatgcagtaacccctgcagtactccaattttaggagtacagaaacccaacagacagtggaggttggtgcaagatctcaggattatcgatgaggccattgtccctctatacccagctgtacctaacccttatactctgctttcccaaataccagaggaagcagagttgtttacagtcctggaccttaaggatgcctttttctgcatccctgtacatcctgagtctcaattcttgtttgcctttgaagatccttcaatcccaatgtctcaactcacctggactgttttaccccaagggttcagggatagtccccatctatttcaccatacattagcccaagacttgagccagttctcatacctggacactcttgtcctttggtacatggatgatttacttctagctgcccgttcagaaaccttgtgccatcaagccacccaagcgcttttaaacttcctcgccacttgtggctacaaggtttccaaaccaaaggctcagctctgcttacagcaggttaaacacttacggctaaaattatccaaaggcaccagggccctcagtgaggaacgtatccagcctatatcggcttatcctcatcccaaaaccctgaagcaattaagaatgttccttggcataacaggcttctgccaaatatggattaacaggtatggcaaaatagccaggccattatacacactaattaaggaaactcagaaagccaatacccatttagtccgaaggaccagcttgcaacccgtggcatacctgagtaaggaaactgggaccagcttgcaacccgtggcatacctgagtaaggaaattgatgtagtggcaaagcgttggcctcactgtttacgggtagtggcagcaatagcagtcttagtatctaaagcagttaaaatgatacaaggaagagctcttactgtgtggacatctcatgatgtgaacagcatactcactgctaaaggggacttgtggctgtcagacaaccacaatgaagaaaaaatagaacataactggcaacaagtaattgctcaaacctatgccgctcaaggggaccttttagaggttcccttgactgatcccgacctcaacttgtatactgatggaagctcctttgtagaaaaaggacttcgaaaggcggcttacgcagtgttcagtgataatggaatacttgaaagtaatcccctcactccaggaactagcactcagctggcagaactaatagccgtcactcaggcactagaattagaaggaaaaagggaacccgaaaatccagcagacaatgctagctattcctgtgaacctctagaggatctgcgcctgctcttcaggcgacaaccaatcgaagctgtaaaactacaaatggttcttcaaatggagccccagatgcagtccatgactaagatctaccgcggacccctggactggcctgctagcccatgctccaatgttgatgacattgaaggcacccctcccaaggaaatctcaactgcacgacccctactatgccccaattcagcaggaagcagttaa

SEQ ID NO: 26796 - DNA, 165 bp, Homo sapiens
  SIMILAR (14)..(76): 1001254mologous to Homo sapiens NADH-ubiquinone oxidoreductase subunit CI-KFYI,accession number AF047184,Smith- Waterman Score=119.
  misc_feature (1)...(165): n = a,t,c or g
cttcagtgcgatcaagttctacgtgcgagagccgccgaatgccaaacctgactggctgaaagttgggttcaccttgtctgttgagttgtaaatgtgagagaaaaagttatatgtgaatatatatcaagccagcatttgtattcgcatcattaaatnnnnnnnnnn

SEQ ID NO: 26797 - DNA, 831 bp, Homo sapiens
  SIMILAR (2)..(70): 951254mologous to Homo sapiens Human secreted protein, SEQ ID NO: 8066,accession number G03985,Smith-Waterman Score=148.
atggcgccgtccgccttgctgcgtcccctttcccggctgctggcccccgccaggctcccgagcggccgtcccgtaaaccgggagaggagacaccctccccggggcgccccttacatgaccactcccgagtcgtctgagggtccgcaagcccttaaacgaggctttgaaagcctcggacaggacaggtgcgtcctgtctaactcgccagtggccctgggcgaggcagtaagttacaaatttacagaccctcttcccctttcagcttcagtgcgatcaaagttctacgtgcgagagccgccgaatgccaaacctgactggctgaaagttgggttcaccttgggcaccactgtcttcttgtggatctatgtaagtactttactcccggatgtcgtgagactacaccagcgtgaaaagataaaaccagctaggcacttccccagtcgctacagactcagaagaggagctgcaagtgacagccaaagcattccccatggccagacaatgagacaaggagaagcagctggctatccccctcctttggactgttgggacacaggagatcagagaagggccgggaagccaagaaccgggacactctccaccattaatatttcggcgaatcagacaggaagaagagagttcatggctattataagactcatactaggaggtaggccttggaggggaaaacctgcacgtggtaccagtgcccacccaaggtcagagacatctgacactctaagattggaccccacaggaggatgctccgtgggtcctgtggacctcaacctgctcaaaggggatgctcttagcagaggctctgaggtctag

SEQ ID NO: 26798 - DNA, 640 bp, Homo sapiens
  SIMILAR (3)..(359): 891254mologous to Homo sapiens Human secreted protein, SEQ ID NO: 8066,accession number G03985,Smith-Waterman Score=583.
  misc_feature (1)...(640): n = a,t,c or g
ctcatccctactccagaagcgagaacaacggaggcagaggagctgaagactccagtatgcaactgactacaaggagacagaaggctgaggccggggtgctagagaaccttgccgtgctggaattcacgttgacgcccccacggagctctgctgcagagccctcgagtcccgcacttccggccgccaggtggcgctggttctgttgccaactcggagagactgagctgggccacgcaagatggcgccgtccgccttgctgcgtcccctttcccggctgctggcccccgccagggctcccgagcggcccttcagtgcgatcanaaagttttacgtgcgagagccgccgaatgccaaaccttgactggctgaaagttgggttcacctttgggcaccacctgtcttcttgtggatctattctcatcaaacaacaccaatgaagatattttagagtacaaaagaagaaatgggctggaataaacttttgaaacactaatgtagtatgctccgtatagtgattgtagctgttcctctggattcaccatctgttgagttgtaaatgtgagagaaaaagttatatgtgaatatatatcaagccagcatttgtattttgcatcattaaataaaaagaaataaaaataaa

SEQ ID NO: 26799 - DNA, 414 bp, Homo sapiens
  SIMILAR (22)..(258): 641254mologous to Homo sapiens dJ1065O2.3 (paired box gene 1),accession number AL035562,Smith-Waterman Score=233.
atgcagagcagagctgagagccccagtcaacagtcagcagccacggccagccacatgactaatagggctgtagacatctggaacaaactcgtggacactctaaaactaagacgcactgttaagggcagctctccccggacccgagcccggagggaacggcaggcggacccgggcgcacaggtctgcgcggcggccccggcaatcggcacgggcaggatcggaggactcgcggaggaggaagccagtgccggcccgcgggactgcttccaggtacaaaggttcatttggacttctggtttgcaagggatgagggttaaaaaaaacaaaacaaaacaaacaacaacaacaacaaaaacaacccagaaagtatcttctagagccagccgcaagagctgtgagctgcttccaagttag

SEQ ID NO: 26800 - DNA, 2619 bp, Homo sapiens
  SIMILAR (1390)..(1476): 271254mologous to Homo sapiens dJ1065O2.3 (paired box gene 1),accession number AL035562,Smith-Waterman Score=42.
agtggatagcaggaggaaaagctcagaggagcaatgtctgggtgagtgtgggtagcagctgagagcaccatgggcctgctgggagcagagggcactggaggacaacgcgatacccggccgggggacgacagggggcgacaaactgtaaggttttccctatgcccgaccgtgcagaaggctgcagcgagggctgtgtgctcccgatcgcgcacagctggctgcgggaaaggggccaggattgagacgaaggctcgcggactctgctaccggggagaaccaccccctctcatcgtgcgcaatccccagactcacccctctacagtagcccccagccacgggcggccttcacggggacgggggcggagttttgtcgggagcgctgggagtctcagaaacctcggctgttcctactctctcccctatgccctcttcctggtctagcacattcagcccaatgcctttggtgcttactgggctcaacctcagagctctcagatcctgaccccctcaaatcagttcaggggacccttggctaacccgccgggtgttttctccccctccggctcactcttgtctggcgcatccgcagagcagacgtatggcgaggtgaaccagctgggcggtgtgttcgtcaacggccgccccctgcccaacgccatccgcttgcgcattgtggagctggcgcagctgggcatccgaccctgtgacatcagtcggcagctccgcgtatcccacggctgcgtgagcaagatcctggcgcgctacaacgagaccggctccattctgcccggggccatcggggggagcaagccccgcgtcaccactcccaacgtggtcaagcacatccgggactacaagcaaggagaccctggcatctttgcctgggagatccgcgaccggctgctggccgacggcgtctgtgacaagtacaatgtgccttcggtgagctccatcagccgcatcctgcgcaacaagatcggcagcctggcgcagcccggaccgtacgaggcaagtaagcagccgccgtcgcagcctacgctgccctacaaccacatctaccagtacccctaccccagtcccgtgtcgcccacgggcgccaagatgggcagccaccccggggtcccgggcacggcgggccacgtcagcatccgtggttggccacacgtgtgcccagggcagattcggaggcaccttttaatccgtcctctctctcctgcaggggccctggctgggagcgaaggcaccgcttactctcccaagatggaagactgggccggcgtgaaccgcacggcccagtcggcctccaccctctctgccgtgggcggctttctccccgcctgcgcctacccggcctccaaccagcacggcgtgtacagcgccccgggcggcggctacctcgccccgggcccgccgtggccgcctgcgcaaggtcctcctctggcgccccccgctcaacgaaaccgtgtgttttcttttttttttgtgtgtgtgtgtgtgtgtgtgtgtgtgtcttgcacagaggtggttggcccagctctgcgcagccacagcaagttgcgcctgaggctgaggcgagggaagctgcaggagaaaaaaaaatccagagttccccttacttcaaatcgaggcgctccaagctccccctttaaaggaggacttggggaaaaaagaaaattgaaaataggcccctgtaggtataaacaaactgtggatcctagtgtaggagaagcagagtggctcaaggttgggaaaggaaaaacaggcttgcgcaatcgtggcgtcactttctggcttccggtggcaaaacttgggccccttcccaagcccctaaataatagagtaaggcgcagaatactgccgaggaatccaggccgctccagggaaatctctggtggctcatttcccgcaagatttccccctgcccacagcgagctccgagccgcgggtgtcagcggactcgacgcattggctgctcttcgcacttgtgcgggcgcctggggtttggaaagggtgagggtccgcgcaacgttagagtcctgttcccttctgcggaagtcgccatcagacctgaaaccttcccagccctctgcgcccttcacttcctttactgagcaggtggtgagggggttggacggcaacgggaattgcacctggccagcggtcagtgtttgcaaatggccttgcgaggagtcccgcttgccaaggctctccttgcaagtggctctcctagcgggagaggaagggctggagtcccagtgcctctcgcactgcgcggcgctaggtagtgatccgacgcctctgtgcttcctcccgcagtggctgacaggaagcctcccagctccggcagcaaggccccggacgccctcagtagcttacacggactgcccatcccggcctcgacctcctaggggcagctctccccggacccgagcccggagggaacggcaggcggacccgggcgcacaggtctgcgcggaagcagagtttgtgtagcaagtccacttagatcaattttatgtgatcatgctttgtgtcatgtctacagatccagaactggtgtgcagagacctcgtcctgcttggaaaacgcattcacctccagggggctgaaaagcctgtt

SEQ ID NO: 26801 - DNA, 2775 bp, Homo sapiens
  SIMILAR (270)..(1589): 1001254mologous to Homo sapiens dJ1065O2.3 (paired box gene 1),accession number AL035562,Smith-Waterman Score=2363.
tgggcctggggtcgcgggcgtggagagtgtcctgggagggggcagcagcggcggcggcaggccctggagcgggcggcagcgcgctccgctgccgcgcacagcgcgtctccagcccgcggctgggccgccgcggctctcggctctcgggcgccctccctctatgcctctcacgcggcggcggcggcgcccaagctctcccggactgcgccgggcccagccccggccaccccggccaccccggcgccaggcagctggccggcccgctcgctatggagcagacgtatggcgaggtgaaccagctgggcggtgtgttcgtcaacggccgccccctgcccaacgccatccgcttgcgcattgtggagctggcgcagctgggcatccgaccctgtgacatcagtcggcagctccgcgtatcccacggctgcgtgagcaagatcctggcgcgctacaacgagaccggctccattctgcccggggccatcggggggagcaagccccgcgtcaccactcccaacgtggtcaagcacatccgggactacaagcaaggagaccctggcatctttgcctgggagatccgcgaccggctgctggccgacggcgtctgtgacaagtacaatgtgccttcggtgagctccatcagccgcatcctgcgcaacaagatcggcagcctggcgcagcccggaccgtacgaggcaagtaagcagccgccgtcgcagcctacgctgccctacaaccacatctaccagtacccctaccccagtcccgtgtcgcccacgggcgccaagatgggcagccaccccggggtcccgggcacggcgggccacgtcagcatcccgcgctcatggccctcggcacactcggtcagcaacatcctgggcatccggacgtttatggagcaaacaggggccctggctgggagcgaaggcaccgcttactctcccaagatggaagactgggccggcgtgaaccgcacggccttccccgccacccccgcagtgaatgggctagagaaacctgccttagaggcagacattaaatacactcagtcggcctccaccctctctgccgtgggcggctttctccccgcctgcgcctacccggcctccaaccagcacggcgtgtacagcgccccgggcggcggctacctcgccccgggcccgccgtggccgcctgcgcaaggtcctcctctggcgccccccggggccggcgtagctgtgcatggcggggaactcgcggcagcaatgaccttcaagcatcccagccgagaaggaagcctcccagctccggcagcaaggccccggacgccctcagtagcttacacggactgcccatcccggcctcgacctcctaggggcagctctccccggacccgagcccggagggaacggcaggcggacccgggcgcacaggtctgcgcggcggccccggcaatcggcacgggcaggatcggaggactcgcggaggaggaagccagtgccggcccgcggggtgcacgcccagccagcccccaggcccagccctgcctctggccggacccaccacacttcctttattggtctgggtttttaggcttctctgaacttgggttttagactgccgtaccctcctcacaatccttgctctgacgtggcctccttcgctctgccagcttcaaatttcttttttgtcactcccttgtccgtctccgtctcgcctctctccctgtttccttcccccctctttctttctcactctccctcccttccctttctctttcccttcctccctaccttccaccccggctttccccgaccttccagggctccctctgcccttccactctcttttccttgctccgacctctgctccagtcccgcttcttcccccgtctcctctttctagtcctctatatgctatcagccctttttcctggtccatccctgtcgttccttctctctctgtctctggttctactgtcaagggccctagttccctttgttttactgcttccccaaccctccctcagtccctgaggagccctagagccatcttcgtgacagtcccttctctggcacctgggactttgtagccttcactcctctgagcccaccagccctaatggaggggggctcaaacctaggaagtggacagaaaagccacagcctttattttgtattttttttgtaataacaaaccctaaaaaaccctccatgaactgtcctctcccgtcgatccccgcagcatattgtctggaaatctgttttctttctcagagcccagtggccgccgggcttctcttcccttctgagatgatgtcaccccaaagaagactggggtaggagtagggagcacaggggttgttggtgttttcagtgcttagaaaactgggttgtcctgcaggtgtctcctcccacccctccactcgcaacacttgctagggaatccgaccagtggtaaacacatcagcactttttggtgttcaggggtcagcacaatttgttaatttaaaccacagactgcttccaggtacaaaggttcatttggacttctggtttgcaagggatgagggttaaaaaaaacaaaacaaaacaaacaacaacaacaacaaaaacaacccagaaagtatcttctagagccagccgcaagagctgtgagctgcttccaagttaggcgagctggtggtggtaccctggacataatgcaattctgtagtcagagcaatatccctggcgagagcctgacatcgcctgttaaaggtggctgcctctgaataaaggaaagcgtctgaaaggtgaa

SEQ ID NO: 26802 - DNA, 579 bp, Homo sapiens
  SIMILAR (297)..(31): 1001254mologous to Homo sapiens phosphatidylinositol transfer protein,accession number M73704,Smith-Waterman Score=474.
tcacgtaaggatcccagactcatcagactcggttctgcagtaggggtaagcattccaggctttctcgtgtatattcagggctccctctggggccagcattcgaacaaacgtgggtactttgctctgcaggtggtagatcttgtgtgtgtactggcctttctcaccgtccttctcgtagggctcattcaccaggacctccacgccttcgccaccacccgtttcatttttactggcctcagccacagaatacagctgccccacttgatactcatctacagacacaggcaggattactcgatctaatgtgaccttcactcgcaccctttccagggctgcaacgctgcggccacagccagtgtctcggatgcccctgctcctcccccgtcccccgcccagggatgcacacacggggcacgagtcgggcaggaaggaaacgcagataccaggcaggccctgcatctccggcaccttggacttttcccttgcaggctcctgctgttgccttcggctgacctccccatggtccagcgccacagcatcggatgggcttgcatttgcctgtggactcccgtaggtcat

SEQ ID NO: 26803 - DNA, 1056 bp, Homo sapiens
  SIMILAR (997)..(803): 501254mologous to Homo sapiens Polypeptide fragment encoded by gene 15,accession number Y01194,Smith-Waterman Score=141.
atgacctacgggagtccacaggcaaatgcaagcccatccgatgctgtggcgctggaccatggggaggtcctggctgctgagcgggatggcagggctgtgtacagaagacaaggcgaccacagggacctggtggccaagaggatggctcttaaaaaaaagtccaacatcatcattatcatcttcatcatcatcatcgtcatggtagtgaagtcctttcacctgtgtaaggttcactacgtgccagacattgctctaagccctggtgaaatcctactatggaactgcaccaatccaagcagtacgagaaggccccataaaaagttccggagatcacattttgcaaatcagagacatagcaatcccatgctgacccacagccaggatgcacttaatggagccgcagcaaaatgcagcttaaagcaggaggtcatcatgccagttaacaggttccttgttagtccactgacaggactgagcctcagcaactccaaacatcagccaagggaaagaacacccaagaccaccagtgcagttacatttttctctctcctgttcttatacatcatctacagttccaacccccttgacaatacttactgtaataactgctccgaggcaaggacatggaaagaagagagaaaaagattaatgaagatgaagaaatatctgccccccaccccccacaaggaggacgaatggcagagtgtactttactccctgtggcttattccacggtcacctccaagccccaaaatacaaataccagaggaggagcaaaacgagacatggagaaaaagtgtgctggtgaggagactgagtgatggtgaggttcctccccgctggacagcactgctctcctcgcaccccggcactgaggtcctggaccctctggcgaggagactgggtgacggtgaggagactgggtgatggtgagactcctccccgctggacagcgctgctctcctcgcaccccggtactgaggtcctggaccctctggcgaccagactgggtgatggtgaggttcctccccattgcacagcactgctcctcgtgcc

SEQ ID NO: 26804 - DNA, 414 bp, Homo sapiens
  SIMILAR (332)..(39): 281254mologous to Homo sapiens mucin MUC5B,accession number Z72496,Smith-Waterman Score=88.
atgcaaagttgcaatgtggaaaagccattttatccaaccggaatttcccagtcagtcatctaccttgagctagatgctggggagagtgtggtaagacaagcccttacttttgttgcgcagggccactggacatgggcaggcaatggggacggatgcaggtctgcttcggtcactagagacgtactggggcctgacaacatcaacaacgtcacaaccctgaggtctgaggtcccgggcatggcactttgtgaggtagtaaaaggactgtctgaaggtcttctccagcctctgctcaaggtttcaggaggtcccgagggctcggtattgtcagagaatgcttcccatgcctggaccctggaccttctggttgtgctgatggactcagcggacactggcaggacccagctatcctga

SEQ ID NO: 26805 - DNA, 2184 bp, Homo sapiens
  SIMILAR (532)..(627): 391254mologous to Simian T-cell lymphotropic virus type 1 envelope glycoprotein gp46,accession number L20643,Smith-Waterman Score=56.
  misc_feature (1)...(2184): n = a,t,c or g
ttttttttttacttttgaatcaaaggctttatctttaagaaagcagatttagagaatcagaattttctatccattttggttctattaagaaaagtataccaaattaaaaattaagaactattttttaatagataatacatgtacagtggcggtaccaaacaaaattcccanaaggagggntnacaagagggtgtacattgaaaagtcattcccacccctcttcccagaggcaattcaggctgccgggctgctagatatcctcccagagacatcctaggcatatggcaggtgggacatatgatatacacgtgtatacgtctgtgtgaaaacatatggcacacacatacatctacacactttctccattccaaacattagggataccatggggcttttttcctcactttaatcatggcatcttgggggcccattctatgggtaggtacacacacacaggggtccattgttttaaaattttcttacaaactaatcccattgtttaaagctgggccataatgtattttaaccattcccccggtaatgggtgggcactctccaactttttgctattacaatggtttcaacaaaaactccttgtaccacaaggtaccttgtacacaggtacaattcttaggagtagcattgctagttcaaagagcttatgcatttgcacttttgatagacaccgtccagctgtcccccatggagtgcctacatgtcacactcctgccaccaccgtatctagtgctgccacccacagccttgcactgtggtcccacttcttggttcacatggctgagacatttctgcccatcaagttacctttaggttcatgacacattttgagccaaaacataccttatctctaacattagtgtagttcttccctctctttttcccttcttagggaataaaaaaaaaaaaatctgtaaaagggcaatcccttggaaagattcaaaaccctctgaacaccctgtttcaacctcaaacttcaaggttaacagtaataaccatactctgagaagagacccctcctaaagttgtgaaaaactgttctcaatactaagcatcaagtagaggaaaggttcaatctaaattttccctaatagaagatgccaaagttgccaatgtggaaaagcccattttatccaaccggaatttcccagtcagtccatctaccttgagctagatgctggggagagtgtggtaagacaagcccttacttttgttgcgcagggccactggacatgggcaggcaatggggacggatgtaaggctggcgtggaactatccacggtattccctgtgttgtcaagtatgttgcagatctgcaacagattctccagttttgcacatttattgagtagagggaatactattatagcattaaccttttacaatgcatcttcagcctgtaatagaaggaatgctctggacttcatgaaaaggatcaagagaggcgcctgggggattctgaagatgcacagaacaaggcactttccttggcaatcccaaccatggggacagatgatggcatccatcctatggggctctttattgtactgttctgcattaagatgttcttttactttgaggccaacaccagccatgagtaaatcataaagtgcttccttaaagtgttcttcctcaaatgcatgtttcaacatctgcacttcagaacaagtggtcaggctcaaagtaactgtgctactgctagatacctacctcccttttagggtgatcatcagtcacctacagagtgggcaaacaagaccatatgaggcagcagaaatatgagggcacaggttagagccagggctcactgtccggagtgccctttcaggcaggtctgcttcggtcactagagacgtactggggcctgacaacatcaacaacgtcacaaccctgaggtctgaggtcccgggcatggcactttgtgaggtagtaaaaggactgtctgaaggtcttctccagcctctgctcaaggtttcaggaggtcccgagggctcggtattgtcagagaatgcttcccatgcctggaccctggaccttctggttgtgctgatggactcagcggacactggcaggacccagctatcctgaaaatattaagggctacgagctcctcgtgccaagctggncgtntcggatgcactcagtnctcattncacgccccgctactcc

SEQ ID NO: 26806 - DNA, 647 bp, Homo sapiens
  SIMILAR (111)..(299): 921254mologous to Homo sapiens pinch-2 protein,accession number AF288404,Smith-Waterman Score=309.
gttgacgcgtcgaccaacgcgggcggaagccaggaggccgggatattgatgctcctggctctgtgtgctgccattctcatccgtgtgctcaaagctctcaggcacccacgatggccttctcaggccgagcgcgcccctgcattatcccagagaacgaagaaatcccccgagcagcccttaacactgtccacgaggccaatgggaccgaggacgagagggctgtttccaaactgcagcgcaggcacagggacgcgaaagtctacaaggagatctgtgacttttatgcgaaattaaacctgcccagtcctcaagtacctgctcaagatcttctccaggaagctttcttgacattccaggccttatcgatcttctgttcagcagccatagcacccactgtgtgtcccatgcaggcatggtggctagcaccagcttcagtggcactggcccctcaaaagttttacagcagagtgccttggaccctgatggtgcatgcagccagcagcacccatcccttggcagtcagctatgtagggggtaccttgggtgagggaactcactgggaacagccttctctggtattggaaaggaggatttccagcaatctgtgccagcgacttttctgcatgcagcatgccctggtagtgtga

SEQ ID NO: 26807 - DNA, 275 bp, Homo sapiens
  SIMILAR (133)..(273): 781254mologous to Homo sapiens reverse transcriptase homolog= pol {retroviral element},accession number S61070,Smith-Waterman Score=202.
atgaatgggaaagagttttttctccagcccaatctcacgctgataactgccggcttcaagagccagacctccaggaaggcattagagcagttccccgagaggatccccaatggaactatcaggcagattccccagcaagccaaactcattgccttaactcaggccctcactcttgcaaaaggagtacatgtcaatgtttatactgactctaaatatgccttccatatcctgcaccaccatgctattatatgggcagaaagaggtttcctcactac

SEQ ID NO: 26808 - DNA, 272 bp, Homo sapiens
  SIMILAR (3)..(164): 851254mologous to Homo sapiens reverse transcriptase homolog= pol {retroviral element},accession number S61070,Smith-Waterman Score=232.
aaagagatttcctcactacgcaagggtcctccatcattaatgcctctttaataaaaactcttctcaaggccactttacttccaaaggaagttggagtcattcactgcaagggccatcaaaaggcatcagatcccatcactcagggcaacgcttatgctgataagtctgataatgggccagcctttattagccaaattgcccaagcagtttctcaggctcttggtattcagtggaaccttcataccccttaccgtcctcaatcttcaggaagg

SEQ ID NO: 26809 - DNA, 1005 bp, Homo sapiens; identical to SEQ ID NO: 6706
  SIMILAR (559)..(1002): 441254mologous to Baboon endogenous virus strain M7 gag-pol precursor polyprotein,accession number D10032,Smith-Waterman Score= 298.

SEQ ID NO: 26810 - DNA, 1794 bp, Homo sapiens; identical to SEQ ID NO: 6699
  SIMILAR (649)..(1791): 1001254mologous to Homo sapiens homolog of S. cerevisiae Msh2p,accession number U03911,Smith-Waterman Score=1931.

SEQ ID NO: 26811 - DNA, 567 bp, Homo sapiens
  SIMILAR (341)..(132): 501254mologous to Feline leukemia virus gag-pol precursor polyprotein gPr80,accession number AF052723,Smith-Waterman Score= 185.
tcacatgacaacttcactgctagcacaatcaggattccagaaaaccagtgcactaaacaaaattacaaccaagggatcacactgagtccagtttacttcactgctacctccaccagagcgggtgctggtatccatggctgagagaccatggggtggataggcaaaacaatttggttgataaggctcagatcctgaactaacctgtaaggcttgtccggtttttggacaggtaaaatgggggaattgtaaggagagtttataggctttaaaaggccatgctgtagcaggcaagtgataacaggctttaaccctttcaaagcatgctgtgggatgggatattggcattaatcggggtaaaagtggttaggttttaatgagatggtaagggatgcatgatcggtcaccaaggagggagtagaggtatcttatatttgtgggttaaggtgggggaatataagaggaggacgcaaaggaggctttggactgggaagaagggcagcaatgagatgtagctgtaatccaggaatagtcagggaagcagataatttagttaaagtggctcgccct

SEQ ID NO: 26812 - DNA, 892 bp, Homo sapiens; identical to SEQ ID NO: 6704
  SIMILAR (259)..(546): 821254mologous to Homo sapiens reverse transcriptase homolog= pol {retroviral element},accession number S61070,Smith-Waterman Score=396.

SEQ ID NO: 26813 - DNA, 552 bp, Homo sapiens
  SIMILAR (7)..(186): 601254mologous to Homo sapiens HPF1 protein,accession number M27877,Smith-Waterman Score=196.
atggcccatcttctaatccatactggagagaaactttacaaatatagtgaatgcggcaaggtcttcggacacaagttatacctaatcaaccatcagataattcatactggagagagaccttacaagtgtaattcatgtggcaagacagggtgtctcgtggagtatttagccccgctcatcttgatgagtattgagctctcagcagagggtagctcctctctgcagctggccgtcccattgtctgttctgctctggctgagcccagggcttttaggggacttaaacggcaggaagtacctgctgatttgtccatggctgaagcaggtgtccggagtggtggagggtccgggcctgggggcgggtcccgaccatgcgaaggtgggcgtggcctggtcagctgcttcaggggcgcggggcacaggttccagtggtgccactgctcttctgcagctgctcctgccatcaccgctcacacctcccttctgctgccagcgcgatggtagcggctgctccggatggcccgtgactgccatcagtagtgcaggagtttag

SEQ ID NO: 26814 - DNA, 459 bp, Homo sapiens
  SIMILAR (459)..(343): 941254mologous to Homo sapiens Human secreted protein, SEQ ID NO: 5576,accession number G01495,Smith-Waterman Score=198.
tcaagcatagtcacctttggggggcattctgtctaccacaatcctcaaggaaaaggctttacactcaatgaccgctgttgagtttagtggggaagacacattaaccaaataactaagtaatttcatgtgggcctcgtgcactttaggggaaactgacttcatctggggggtcaaggaaggcctttctgagggcagacattcaagctggaaacttagggcaaaggtgaggctgaagttgcctggaggtatgcgatgaacaaggaccagagaaaagcaaggcagcgagccctccggggagtcagttctgtgactgaagacactctcaacatttgcagactttgctggcagccactcccagagcccctggaactctggcccaaggctctctgactgactccttctcggcttagcggctgaagactgttgctgcccgatcgcctcggaagccccgtagaccat

SEQ ID NO: 26815 - DNA, 657 bp, Homo sapiens; identical to SEQ ID NO: 16187
  SIMILAR (573)..(454): 801254mologous to Homo sapiens Human secreted protein, SEQ ID NO: 5576,accession number G01495,Smith-Waterman Score=177.

SEQ ID NO: 26816 - DNA, 324 bp, Homo sapiens
  SIMILAR (166)..(279): 391254mologous to Homo sapiens prostaglandin F synthase,accession number AB028065,Smith-Waterman Score=60.
atgaagaaaatcaagctcatgcagatatgtaattggcaaagggatgagtattgtgatagacttttccagataattgtggctgttcttcttgatactagaccaaaactcaacaagtggcagtttcttaaagctgtcctgagtgggcacttccccagcaaaggcagcaagctgaagaaggctggaataagattgatgacactggttagtagcttcaatgcatggcggacttactgcatacagggccgccctggtctaaactggaaaaattctgccaaccaagaggaatccttatttagtggtgttgtcaacgtggcttttcaatag

SEQ ID NO: 26817 - DNA, 476 bp, Homo sapiens
  SIMILAR (42)..(203): 811254mologous to Homo sapiens Human secreted protein, SEQ ID NO: 5210,accession number G01129,Smith-Waterman Score=231.
tcgaacgacgcttcacatagccggctaggtggacgcttcacctggacgcgcatgagacttggagccgtgactcagattgggggacctcccttcggagatcaatcccctgtcctcctgctctttgctccgtgagaaagatccacctacgacctcaggtcctcagaccgaccagcccaagaaacatctcaccaatttcaaatccagactccactggaaatcggactgttcaactcacctggcagccactcccagagcccctggaactctggcccaaggctctctgactgactccttctcggcttagcggctgaagactgatgctgcccgatcgcctcggaagccccgtagaccatcacggacgccgagcttccggtaactctcacagtggaaggtaagcccgtccccttcttaatcaatacggaggctacccgctccacattaccttctttccaagggcctgtttcccttgcctccat

SEQ ID NO: 26818 - DNA, 1245 bp, Homo sapiens
  SIMILAR (1183)..(1133): 761254mologous to Homo sapiens Human secreted protein, SEQ ID NO: 5576,accession number G01495,Smith-Waterman Score=76.
tcactgaatcatgggggtcccgtcgcggctggcggggttgtcgctcggtgtgctggcgtgcggttgcgtgtgggttgcgtggggcgtgttctgttggtggtttgtttccggcgcacgtccgggccgatgcgctgcgatggcctctttcgttaggtcgctgtcaccgcttctgcgtctactcgtcccttgcgtcggtcgctcttgtgatgaatatgctgccaacggccttctcgcgaaacgggacgtaaatggccgcgacatggatactcctcgcgtaaggcgggtcatgggggtcggggtacccagtaggatgctgcatccgatgggacgacttttccaggcgggttccaatcgccctcgggttatgcgccggagtacgttcctggttcgcgggtgtttcgcccaacactgctgaacttcgtagtcgtccgagttgttctgtggatcgcctggttccaggggctgtctggtagcattaccctcgtggcctccctcattatccacggagcccggctccacgtggcacaccagggcagggccggggagggtgtgtgcagacaccacctgggtatcttggaaatcagctaattccctgttgatgtcatccaacaggagcatccagttccatgtctggttctctggaaactcttgctctggaggaagccagccaccaagtaagaaatctgacaaccctgagaccgccatgctggagaggccacatgtggatgcattggctgacagcccctgcatcaacaccagccacgtgagcaagacacctgccttgttgagctcagtctccaaaacactcggctttttctttttcttctccccgcttccccccaccctttcctggcggccctgtatgcagtaagtccgccatgcattgaagctactaaccagtgtcatcaatcttattccagccttcttcagcttgctgcctttgctggggaagtgcccactcaggacagctacagattcagggatctgcaggccggccacagccagcaggccggggttgttcccagcacggccgcccgcattctgcctcctccagagtgagtatccgggcagtttcctggggagacctgggttcccatttgtatcacaatgacaacagctagtttctggcacctggcagccactcacagagcccgtggaactctggcccaaggctctctgactccttctcggcttagcggctgaagactgacgctgcccgatcgcctcggaagccccgtagaccat

SEQ ID NO: 26819 - DNA, 453 bp, Homo sapiens
  SIMILAR (353)..(237): 941254mologous to Homo sapiens Human secreted protein, SEQ ID NO: 5576,accession number G01495,Smith-Waterman Score=198.
tcgaacgacgcttcacatagccggctaggtggacgcttcacctggacgcgcatgagacttggagccgtgactcatactgggggacctcccttcggagatcaagcccctgccgtcctgctctttgctccgcgagaaagaaccacctacgacctcaggtcctcagaccgaccagcccaagaaacatctcaccaatttcaaatccagactccactggaaatcggactgttcaactcacctggcagccactcccagagcccctggaactctggcccaaggctctctgactgactccttctcggcttagcggctgaagactgatgctgcctgatcgcctcggaagccccgtagaccatcacggatgccgagctttaggtaactctcacagcggaagtgtctttatgagaaggggaaattagaaggtagacacacgcagagaatagaccatgtgaagat

SEQ ID NO: 26820 - DNA, 663 bp, Homo sapiens; identical to SEQ ID NO: 1392
  SIMILAR (70)..(192): 901254mologous to Homo sapiens calbindin D28K,accession number S46006,Smith-Waterman Score=204.

SEQ ID NO: 26821 - DNA, 522 bp, Homo sapiens; identical to SEQ ID NO: 638
  SIMILAR (337)..(468): 461254mologous to Human T-cell lymphotropic virus type 1 Gag,accession number S74562,Smith-Waterman Score=136.

SEQ ID NO: 26822 - DNA, 516 bp, Homo sapiens; identical to SEQ ID NO: 641
  SIMILAR (514)..(449): 861254mologous to Homo sapiens Human secreted protein, SEQ ID NO: 5576,accession number G01495,Smith-Waterman Score=106.

SEQ ID NO: 26823 - DNA, 615 bp, Homo sapiens
  SIMILAR (615)..(499): 871254mologous to Homo sapiens Human secreted protein, SEQ ID NO: 5576,accession number G01495,Smith-Waterman Score=176.
ttagaggtctaaaagatcctttgagaaaccatcaaataatctctctgtcttcatctccatgatcttgtcctcctttgccccttccactgtactggtgtccccaatttcaaaaggtttcaggtgttctgttgaacaaatcttttgtttctcattactcttcccttccatctcttcacttctctgcctggtatttagaaataaggctgatctccttacagtgaataattctctggtgcaggccacgagaggagcctggacttcgtcctccttgtggcagtaaagaggagcctctcccctctcttcaatttcaaatccagtaagcggcctctttttactctcttctccaacctccctaaccctcagcctctttctcctttcaatcttggcgccacacttcaatctctcccttcttttaatttcagttcctttcattttctggtagagacaaaggagacacgttttatccgtagacccaaaactccggtgccggtcacggactggcagccactcccagagcccctggaactctggccgaaggctctctgactgactccttctcagcttagcggctgaagactgacgctgcccgatagcttcggaagtcccgtagaccat

SEQ ID NO: 26824 - DNA, 1764 bp, Homo sapiens; identical to SEQ ID NO: 1396
  SIMILAR (727)..(834): 581254mologous to Homo sapiens Human secreted protein fragment encoded from gene 42,accession number Y07785,Smith- Waterman Score=97.

SEQ ID NO: 26825 - DNA, 579 bp, Homo sapiens
  SIMILAR (201)..(401): 481254mologous to Bovine leukemia virus gag,accession number K02120,Smith-Waterman Score=159.
gtgtcagaccacgcagggacgcctgccttggtccttcacccttagcggcaagtcccgcttttctggggaaggggcaagtaccccaaccccttatatctctgtgccccgatcccttatttccgcaccccaacctcatatctctgcgccccaatcccttatgtccgcaccccgacctcgtatctctgtgccctgacccctttcccgcttttctggaggcacataagaacttccaaacgactgaaccgcagcagccaggcgttcctccagaacctcctcccacaggagcttgctacacgtgccggaaatctggccactgggcaaaggaatgcccgcagcctgggattcctcctaagccacgtcccatctgtgtgggaccccactgaaaatctgactgttcaactcacctggcagccactcccagagcccctggaactctggcccaaggctctctgactgactccttcccagatcttgggcttagcagcttgaagactgacactgcccgatcgcctcggaagccccggagaccatcacggacgccgagctgccagtaactctcacagtggaagctatctggtc

SEQ ID NO: 26826 - DNA, 794 bp, Homo sapiens
  SIMILAR (794)..(675): 901254mologous to Homo sapiens Human secreted protein, SEQ ID NO: 5576,accession number G01495,Smith-Waterman Score=187.
ctagagctgaagcccaaacgcctccagggttttccattcatattccgttaccacctgttcaccgatcttgtctccacagtgagaggtgacagcgtgctggcagccctcacttgctctcagtgcctccttggcctcagtgcccactctggccacacttgagaagcccttcagcccgccactgcactgtgggagcccctctctgggctggccgaggcggagccggctccctctgcttgcagggaggtgtggagggagaggcacgggcaggaaccagggccgcgcatggccctcgtgggccagcgggagtgcgtgagggtctgtggcttccttcttgaggtcagtgaagtcaggaatccaccaattttggacacaacagcatatgtcaaggctgtttttctgatgtggcagctgccaccacacctccccggcaggagagccacatgccagagaggccgctctctgagatgctcaaagtccatgttcctacacagctctttggcagctgtctctctatacttgtacaactggaattcaaattctttgtacatctggttattctgcttctcattgagattgagggaaggtgagagcacctggcagctgaggaattctagaagaatcttgtcaggtccagaagtcttaggaaagccgcctgtatggcccaagtccttggaatctggcagccactcccagagcccctggaactctggcccaaggctctctgactgactccttctctgcttagcagctaaagactgacattgcccgatagcctcggaagccccgtagaccat

SEQ ID NO: 26827 - DNA, 1971 bp, Homo sapiens
  SIMILAR (789)..(739): 581254mologous to Leishmania major probable ctg26 alteRNAte open reading frame,accession number AL160493,Smith-Waterman Score= 69.
atgggagccatgttcattgtgggtgccgggaaactgcctttcctctccctggaagagcttcaagaaggaggtaaaactccagtttcattctgcgagcattcgtggaggtgcgtggaaggggctgaattgaagggagaaagccgtgaggaggaccaggtctccacaggagcctcccgttcctctattagatgccagcagggcaaggggtctgtcacgcagatcccttggtttctagctgggggaagcacatggtcctgtgagagcttccaatgtcacaccccggtgctcctaagagcactttgtggatctctcatcaatgccttcacaccaagcagcaacttcaaaacatgcctaagtcacagcagagaggctgcaccattttccctttcatcacctctagcaattggtaacctcagtgcaggggaagacagctgggagagaagacaggccccatcagagcctgcctcagccatggtgtgggagaatcttagtttcaatccattttcttcattcagtatgcaaggagatgacccggaagtgattgtgttatttcccgtggctccttgcatggattcatttgtcttcaattgctcatatcagtcctctattgcattcacctcttcactgcccagttctcaaagtctggcagccctcagacttgggctgagatgtgcagcttcccgagagatcagggagagcatagatatatccctttttcagttcagaggaaaacacctaacaacaacctcaacaaacacaacaacaacagcaaaaggacgaagcgtgagccagaaattccatctgcaatcagctccaacagggagaggcttggacatgcccgccattgacgctgccaggcctcgaactctcctgagagttggatttttcccagtctgtgctatctcactcttatttgaggaatttgagtcagagcaaaatgtgggcagagaaggagaaggaacaccaacacctcaattattgagggaaaagacgtgcaggttttctgtagcagtgaacctgaaggaagacactgctttgtgtctggctcccaaagaaaaaggccaagttgatctttcctgtgaaacagctgaagcaggatgtcttgagggtccccaggccattgtgtgcatgaagtgtgctcgtccctctgcaggtgacaccccggcttgtggtgaaaccctggctagtggatatgccggcatcccctgggattccagtccatcaaggtggccaccggccaccagggcttcacatgcttcactgagcgctgtcccctgtccccggcacacgggttccctgccttgctgtgtgttaccttctgaagataccaccgccatgatgagaagaggccgtgcctgcaattcacaaggtcaccacttttgctccgtcatggatccgggtttggctgttgttcagcatgcagcacctgctttcgattctgagatgcatcccacatggtccagcacgaagcgttctttggacagaacgcctgccatgaatgtcattcctcactggcctaccgtggtgctcaggtgttcaccgttgggggtagcaggtccccggagtgtgatgttccccttcctgtttagcccctttggtgtgtgtaactgtcaacctcaggatttctttgtcaagctcagcagagtatgcagagcagagtctaggaaggacagcttagatttttggaaaaccacgccagaccacaccggaaaacacaaaactttgagccttgactcccagcgagaggcgttcagctacggcaagaggggctggtctcagcgtctcttaatcagccccagggtggtttatctaagtgaagtaaggttgcccgtaagctatgctctctcccctaaactctctctggctgtgatgtctgggtcctcaggtcccaaatcttggcagggacagcccgtgagtgctggagccgggtccggtggggaagcagggatgtgtgcctcttccactggctga

SEQ ID NO: 26828 - DNA, 963 bp, Homo sapiens
  SIMILAR (230)..(541): 371254mologous to Homo sapiens Human secreted protein sequence encoded by gene 9 SEQ ID NO:56,accession number B08899,Smith-Waterman Score=184.
tggtaaacattaaaggcttgaaaaaccatattttgttagccctaaaatgtacatttttcttcccattttaacttatctgaaattgggatgcatctcattactgtcaaccaggtgatagtcatgtaacgctcctaccgtgtgcatgtgtgaatttacagcttgtcatcgtgtcatccctttaaccaacatgtgttttgttggtatcaaatgtgtcaggtttaattgacattttaaaatgtcttcaaaaagatcacactatgattcagcattgaaacgaaaagttattgtgtatgcagaaaagcatggaaacagagcagcagggcgtacatttgatattagtgaagcaaatattcgtcgctggagaaatgatcgcaattccatattttcctgcaaagcaacaacaaaatgttttacgggacctaagaaaggtaggtacccacaagtagatgaagctgtactacgtttcgtcagtgagacacgtgcaaaaggattgcctatcacacgccaagcaatggcaattgaaggcaggagaagttgccaaaaccctaggaattgatgaaacaaaattcaaaagccaccaagaggcttggtgtgtaccggatttccatgcgtcgagccaggactatcaattaaggcatcaaacatcgtttttgtcccaagctccccactgccattaaacagaagacagtgttggagcactctttcaagaagtgctgcataaccagtactcttgacaacaccgggagagacgttctgtggaaaaatgcagacatcaatgactgtggtttgaaaagtgattcagaagagttggattccagaatatgaagttataattataacttaaccaatttatttcacacattttctttacatatgcacaagattgatgtgataaaaatctgtttaactcaaagcgctgtttcaataaatataaacattttctgtgaaaaaaaaaaaaaaaaa

SEQ ID NO: 26829 - DNA, 560 bp, Homo sapiens
  SIMILAR (559)..(239): 991254mologous to Homo sapiens Keratin 8,accession number X74929,Smith-Waterman Score=518.
ggcagagctagctgaggttttattttggaccaaaaaaaaaaagcaattgaattgttttgtagctggaggcatgggcaaggggggtccccaggtagtaaactccccaggtgggctgagggctagggctgagcctcaggtgggtctcctgttcccagtgctaccctgcatagcggcctccttcccaggctctggggcagcgcaggaggggtaggctgggaggggctgccgcagctgttcacttgggcaggacgtcagaggactcagacaccagcttcccatcacgtgtctcgatcttcttcacaaccacggccctggaggagctggtgcggctgaaggagctggagcccgcgccagagccaaagctggagcccaggctgtagctgaggccggggcttgtgaggcccccataggccgagctcagaccacctgcatagccgctggtggtcttcgtatgaatactcatgttctgcatcccagactccagccggctctcctcgccctccagcagcttcctgtaggtggcgatctcgatgtccagggccagcttgacgttcatcatg

SEQ ID NO: 26830 - DNA, 1971 bp, Homo sapiens
  SIMILAR (970)..(1536): 701254mologous to Rattus norvegicus prelingual lipase,accession number A01157,Smith-Waterman Score=737.
atgggggcagactttccccttgctgttctcatgatagtcagattagccatttcagaagagagctggatctgctccaacacaaggaccccaggtttacttactggtgattttgattcagaggcctcaaaacgccagccactcagcagaaatgagaccatgttaactgtcaaagccttgagagagaagaccaatttttacacatttccctactactttgccataaaatataatcctgagggtttcactctgtcaccgaggctggcgttcagtggtggtgctattacagctcactggagtctcaaactcctgggcccaggcagatcccaaatgtggcagcttttagcagcagcatgctggatgcttcttcttggatctatgtatggttatgacaagaaaggaaacaatgcaaaccctgaagctaatatgaatattagccagattatttcttactggggttatccttatgaagagtatgatgttacaacaaaagatggttatatccttggaatttataggattccacatggaagaggatgcccagggaggacagcagaacaagatgctggagaccatgtggagcctgcagcagcagaagacagctgggagaacgtggacaacatggagagctgcatcaacaacttgctgcggcagctggacacatgggaccagaagctgaaggtggaggtggagcttgacaacatgcaggggctggtggaggacttcaagacggaccaaacaggagagggcgccgtagcttcaccggaacctggagctgatgaatgtcaagctggccttgggcatcgagagcgccacctacaggaagctgctggagggcgaggagagcccgctggagtctgggacgcagagcagtccagctttgactgtggtggggactccggctctttcagccgcaccagctcctgcagggccatagttgtgaagaagattgacccctgcaatgggaagctgcatggcttaattgcatctgccagtaactggatttgcaacctgcccaacaacagtttggctttccttctggcagatagtggttatgacgtgtggttggggaacagccgaggaaacacttggtccagaaaacaccttaaattgtcaccgaaatcaccagaatactgggccttcagtttggatgagatggctaaatatgaccttccagccacaatcaattttatcatagagaaaactggacagaagcgactctactacgtgggccactcacaaggcaccaccatagcttttatagcattttctacaaacccagaactggctaaaaagattaagatattttttgcactggctccagttgtcacagttaaatacacccaaagtcctatgaaaaaactaacaaccctttccaggcgagtagttaaggtgttgtttggtgacaaaatgttccaccctcatacattgtttgaccaattcattgccaccaaagtgtgcaatcgaaagctattccgtcgtatttgcagcaacttcctatttactctgagtggatttgatccgcaaaacttaaatatggtaggtgaggatttgagaagaaagcttttctgccaacaattctcatctcttcttacccgaaacgtccttcgcttagataaaggctatggttttgatatttatcttgctgtgcctacgccttatgtcagacccactgaagtagaatctcaggggcttgcagaatttcaacagcagactgctgcctctctgaatataaatcatgatgagaataattttaaactaaaaatcaggactaaattggctgttaattctggtcagctccaagcttttgattggggaaactctgatcagaacatgatgcacttccaccagattgaaatgactgaaatgacagatacacagttcagaatctggacggcaacagagatcattgaaattcaggagaaagttgaaactcagtccaaggaatctaaggaatccagtaaaataatttaa

SEQ ID NO: 26831 - DNA, 836 bp, Homo sapiens
  SIMILAR (86)..(679): 291254mologous to Homo sapiens Extended human secreted protein sequence, SEQ ID NO. 160,accession number Y35911,Smith- Waterman Score=182.
cagagaccactgtgcaagcgtaatcacttcccaagaagggttttgctttaaagttttgttatgagttgctaaaatggtgaaatgctgctccgccattggatgtgcttctcgctgcttgccaaattcgaagttaaaaggactgacatttcacgtattccccacagatgaaaacatcaaaaggaaatgggtattagcaatgaaaagacttgatgtgaatgcagccggcatttgggagcctagaaaaggagatgtgttgtgttcgaggcactttaagaagacagattttgacagaagtgctccaaatattaaactgaaacctggagtcataccttctatctttgattctccatatcacctacaggggaaaagagaaaaacttcattgtagaaaaaacttcaccctcaaaaccgttccagccactaactacaatcaccatcttgttggtgcttcctcatgtattgaagaattccaatcccagttcatttttgaacatagctacagtgtaatggacagtccaaagaaacttaagcataaattagatcatgtgatcggcgagctagaggatacaaaggaaagtctacggaatgttttagaccgagaaaaacgttttcagaaatcattgaggaagacaatcagggaattaaaggatgaatgtctgatcagccaagaaacagcaaatagactggacactttctgttgggactgttgtcaggagagcatagaacaggactatatttcatgaaataatttcatgttacgttccacctaaaattgtcattggtacaaatttttataaaatctcatttaccatcactaaataatatccatcatttaaa

SEQ ID NO: 26832 - DNA, 670 bp, Homo sapiens
  SIMILAR (94)..(342): 271254mologous to Neisseria meningitidis adenylate kinase; adenylate kinase,accession number AF037779,Smith-Waterman Score=76.
atgcggattggtttcatcaagggcctagaaggtgcaagatcagaaggttatattatcactgaaataccatcactttcacaggatgccatgactaccttacagcaaatagaattaattaaaaacttaaacctgaaacctgatgttataatcaatataaagtgtcctgactatgatttgtgccagagaatttctgggcaaagacagcacaataatacgggatacatatacagtagagaccagtgggatcctgaagtcattgagaatcataggaaaaagaagaaagaagcccaaaaggacggaaaaggagaagaggaagaagaggaagaagagcaagaagaagaagaggcatttattgccgaaatgcagatggtggctgaaattcttcatcatctagttcagaggcctgaagattatttggaaaatgttgaaaacattgttaagctttataaggaaacaattctccaaactttagaagaagtaatggctgaacacaatccccagtatctcattgagctaaatggaaataaaccagcagaggagctctttatggtgagtgcagtgttaagcaggaatacttcacagcatggaaaatttaaatctattgacagtattgtacttcttttaataaacagaagcatatttatatttgaaccccattaaaaaaaaaaaa

SEQ ID NO: 26833 - DNA, 669 bp, Homo sapiens
  SIMILAR (241)..(444): 801254mologous to Homo sapiens ribosomal protein L27,accession number L19527,Smith-Waterman Score=271.
atggtgaccactaagctgactctgaaaaaagaaattaaagttcaccagatggtcaagagagaatatggcttttggaaacactgccaagagagcttgttcacccatttccaccatgtgaggacacagcaacaaggcaccatctatgaaccaggaaatgggtcctccccagacatcacatctgctggtgcctcgatcttcgacttcccagtctccagaactgccccagtggttactgtcaaaatgggcaagttcctgaaacctcggaaagtggtgtttgtcctggctggatgctactccagacacaaagctgtcatcgtgaagaacattgatgatggcacctcagatcgcccctacagccatgccctggtggctggaattgaccactatccctgcaaagtaagagctgccatgggcaagaagaagatcaccaagaggtactctgtggatatcctcttggacaaaactgtcattaataaggatgtctgcagacaccctgctcttaaacccaaggctggacaagaagccaagatcaagtttgaaaagaggtgtttggccgtttccataaacctaggtcaagaatcacttcctcaacgacagagtgaacaggaggcaattaaaacaggtacggacctggtatgggaaaaacgattgctggggaaagaactgtaa

SEQ ID NO: 26834 - DNA, 608 bp, Homo sapiens
  SIMILAR (560)..(595): 751254mologous to Homo sapiens Human secreted protein, SEQ ID NO: 5320,accession number G01239,Smith-Waterman Score=48.
ttttttttttttttttgctggtaggccccgggtggttgcctgccgaaaatgggccaagttccatgaaaccctgggaaaggtgggtgctttgtcctgggctggacggcttactccgggaccgcaaagctgtccatccgtgaagaaacatttgatggatggcaccctcaggatcgccccctaccagcccatgctactggtggctggaaattgaccggcctacccccccgcaaaagtgaacagcctgccatgggcaagaagaaagatcgccccaagagatcaaagataaaatctttttgtggaaagtgytataactaccaatcaccctaatgccccacaagggtactctgtgggatatccccttgggacaaaacttgttcgttcaattaagggatgtctttcagagatcctggctccttaaaccgcaaggccccgacgggaaggcccaaggttcaagtttgaaagagagagtacgagacagggcaagaaaccaagtgggttcttcccagaaaacttgcgggttttaagaatgcctttggttttgattcattaaaaattataaagaaaaaaaaaaaaaaaaaaaaaaaaacaacaaaaaaagggcggccgct

SEQ ID NO: 26835 - DNA, 3328 bp, Homo sapiens
  SIMILAR (285)..(100): 961254mologous to Homo sapiens Protein encoded by 5' fragment of clone M8_2,accession number W36946,Smith-Waterman Score=269.
tctcagatcctgacggtgcagcagcccgcagcctcagccagggagtcccagccgctttcaatggaggagaagcccggccagccacagcctcagcaccatcacagccaccaccatccgcaccatcaccctcagcagcagcagcagcagccgcaccaccaccaccattattatttctacaaccacagccacaaccaccaccaccaccatcatcaccagcagcctcaccaatacctgcagcatggagccgagggcagccccaaggcccagccaaagccgctgaaacatgagcagaaacacaccctccagcagcaccagggaaacgccgaagaagaaaacaggctatggtggaactaaacggtaatgcctggaggaaaggaggaaaatatcctttaaaaagaacccctgagttcctgattgaaagccccaccccaaccccctatttccaggggttccttcaatgggcaacccagcaagttgtaggacactaggccttgaaggcagactgttaaagggcccaacaccctttgggaaagcaggaattaaaacccaagaatttcattcagaaaaacagtatggacaaaaagaatgggaagtcttatgaaaataaatctggagagaatcagtctgtagataagtctgatactataccaattccaaatggtgtggtaacaaataattctggttatattactaatggttatatgggtaaaggagcagataatgatggtagtggatctgagagcggatatacaactcctaaaaaaaggaaagctaggcgcaatagtgccaagggttgtgaaaaccttaatatagtgcaggacaaaataatgcaacaagagaccagtgtcccaaccttaaaacagggacttgaaactttcaagcctgactatagtgaacaaaagggaaatcgagtagatggttcgaagcccatttggaagtatgaaactgggcctggaggaacaagtcgaggaaaacctgctgtgggtgatatgcttcggaaaagctcagatagtaaacctggtgtgagcagcaaaaagtttgatgatcggcccaaaggaaagcatgcttcagctgttgcctccaaagaggactcgtggaccctatttaaaccacccccagtttttccagtggacaatagcagtgctaaaatagttcctaaaataagttatgcaagcaaagttaaggaaaacctcaacaaaactatacagaactcttctgtgtcaccaacttcatcttcatcatcttcatcatctaccggggaaactcagacccaatcatcaagtcgcttatcccaggtccctatgtcagcgctgaaatctgttacttctgccaacttttctaatgggcctgttttagcagggactgatggaaatgtttatcctccagggggtcagccactgctaactactgctgctaatactctaacacccatctcttctgggacagattcagttctccaggacatgagtctaacttcagcagctgttgaacaaattaagactagcctttttatctatccttcaaatatgcaaactatgctgttgagcacagcacaagtggatctgccctctcagacagatcagcaaaacctgggggatatcttccagaatcagtggggtttatcatttataaatgagcccagtgctggccctgagactgttactgggaagtcatcagagcataaagtgatggaggtgacatttcaaggagaatatcctgctactttggtttcacagggtgctgaaataattccctcaggaactgagcatcctgtgtttcccaaggcttacgagctggagaaacggactagtcctcaagttctgggtagcattctaaaatctgggactactagtgagagtggagccttatccttggaacccagtcatataggtgacctgcagaaagcagacaccagtagtcaaggtgctttagtgtttctctcaaaggactacgagatagaaagtcaaaatcctctggcctctcctacgaacactttgttaggctctgccaaagaacagagataccagagaggcctaggaaaggaatgatagctgggggttctttttgacctgagggctgctattgtatatcacactaaagaaatggaatctatttggaatttgcagaagcaagatcccaaaaggataatcacttacaatgaagccatggatagtccagatcaatgaaggaccagactgcctattcgtaacctttctgcagcattagagccatcgttcatgggggacacaaggcttttatgctcctagatcttcaacgcagcagaggaaccataagtagaatcacaggataatatatacaaatatatatatatacatatatatatatatagttatttaaaaaaaggcaacctgaaaagtaaattagacctccttaaggaatcaaatttatttccaagagacctacctcatggttatttaatctccggtactgaataggttttttttccttctgttagtttttgtttttaagtgtgaatgcaagtgattaatgaatacagacttaacaagtgtggttctaaagttcctgctgtcatcaacttgggcaacaaatgacccactggaaaggcaaatccacttaaaagatctctgtatcttgttctgtgactgaagtgatacactaatcacggggaacccagaatgattcaacattttccccccactcctcccttgatctttttggttttactttaattaagcccctgcgagaatgctggataaaatgcccttgaagttagccagggtgtatttttttagcgaatatgatttgcatgtcttgccaggagttaagcggcctctggggtgttggggaaatactttatttctttccatttattttttgtggggcggggataggggagggcattgaagttctacaattctggaatagttagttgatggtacatagttaaccttggctttggttacatattggactttaacaactgattaatctatgcgtgttatttaaatataagttgcataacaagcatttggcttagatatacaatctggaaaaatattcctgtgcccatattttaatgtaattgtataactgggagcaaaaatatattctgcttttcaactgtaggtgctccagacttgctctccgtcactaacactaaatgtgctgttttccttgtttttcatcaaacatttaagacaaacttagacctttctgtaaattatcttttaatttctcagcaaaatctaaaaggggaagaaaaaagtccatgaaaactaagacttttcatgtttttagccagtgagaagataataaaccctgactgtagaaggtgtgttttcatgca

SEQ ID NO: 26836 - DNA, 1422 bp, Homo sapiens
  SIMILAR (340)..(642): 761254mologous to Solanum tuberosum ADP-ribosylation factor 1,accession number X74461,Smith-Waterman Score=398.
atgcctctcattccttgcaacttgccgttaaggcaggaatatgaatgtgggttgaaagtggatgaatggaagcttggaaagggaataagagaagcccagggcacagtcacttcctgtagctctccaattcaaaggcatcccgggtgtaagcccacagttcagtgtatggctgagatgaactacctggcgattaaactgcagccagctgccttcaggcatcaaagaacctgcggatatgttcggttgtatggcaaaaataacttggcagatgtggtccacattgtggaccttgtgacagatctggaggagcctggattatctggtgccactaccgccacgggcctcaccatctcctctttcttctcccacctctttgacaagaagcagatgcacattctgatggttggattggatgccgctggcaagacgaccattccgtatgaactgaagttaggggagatagtcaccaccattcctaccgttggctgcaatgtggaagcggtagactataaaaacattcgtttcacagtatgggatgctggtggtcaagatagaattaggcctctccggaagtattacttcccaaatacccaatatcttatatttgtggtagatagcaataatcgtgaaagaattaaggaggtagcagtctcgtctgctgctgcagggagccctgcagtactggaaaacagccagcagctgtcacggatgcgccagcagcttctgcttctccgtgtaatgcacgtcccccatgcccctagctttggggacttgccgtttgccccagcaccggctggcacagggatgtgtctgtggagggggtcacagtctacaggacaaatcagtgcaggtaccagacccatgctgattatcaaacactataaatacagcaggaagggcaaggaagagggagagtccaaactcgcctgggcacgcgtgtgtgcgcagcagccccggcagagcaggcacctccgcaggtcccctccatttaataatgtatggcctaatacagtacatggtggtgggtgtcatgaagacacgttacacttcgagggcctgaatgattggggtcaaaggctctgtggacagttttatagcccaaatcacatgcactgtatcaaagtcatctggtgtgtactttatatagttcttctgggacatgctgcccagttgaaatgcctaaaactgcttcctgggagcatttgcagtatgaacatgcttttctactgcgtagggcttgacatatgtgttattatggctgtcaaaaggaagccagacccagaagctgctgccacactgtggtgtaactttttcttggaatgtgaattctcccgctatacagagggaattgcagaaactagagtggtcctgtcagaacggaagctagatcttggtgtttctctgctccaagtcctgcaatga

SEQ ID NO: 26837 - DNA, 880 bp, Homo sapiens
  SIMILAR (344)..(481): 341254mologous to Homo sapiens Human secreted protein, SEQ ID NO: 6736,accession number G02655,Smith-Waterman Score=60.
cctgagggctctccagttggaccacgagggtctgacatccaggaggatttccaggagagagcaaccgtcactagggaatatgctgcccagcactgactgtactgagcagcagtgttgtgtgcctgttgggttgatgccatggatagccaggcgttcagaactgaacacgacacctaaaaggcaaacacgaactgtgaatgtgccagtgtcagatgctgccttggtggtcatgtgtgggctggcaggattgcaccctgtgccctctttgaatgcaggggcatgtcaaggccaagggtcaggaagagagctttggcctcgccagcctggtccccagagtggaagtggcagggcaggaggggtgtggcagacagagcacatatcgcccccagccttgcccccagatgttgagtgctgggtgccggagtgcagaggggaacaaggcctggaccctgcctggggagaggcagcacctgggagatctttgtggcttcagatcccatgtggtcctccagatgctcccattgtgaccattttgtttgctctgctgcctcatcctgggccacttcaatttgggtggctgctcagcgttcaggtggagtcgggccactttccacagccatctcatctgtggcctgtgcctccacttccaggaccaagagtccccccaggatgcccaacatcagggcaggcaccatgtagtggagagtggggccaggggccatctgccatggctgtttgggctggggaaggagagcagtacttctggagcatgtgctgtgctcagggccagctccctgtagggtgctggagcagggaccagggaaaggagagagtcacttggtctgaactgggggtcttggatgtgatcatcttcctgtag

SEQ ID NO: 26838 - DNA, 4454 bp, Homo sapiens
  SIMILAR (657)..(2735): 961254mologous to Homo sapiens tousled-like kinase 1,accession number AF162666,Smith-Waterman Score=3458.
ctcgctcgccctcagcgcggcccccgccatgacggaggcgggtgccggtgccgttgccgccgctgccgtcgcagggggggagtcgggttcccagaaagtagcttgatgagtgtccaaagtagcagtggaagtttggaggggccgccatcttggtcccagctctccacgtctccaaccccgggctcggcggcggcggccaggtccctgctgaatcacacgccgccatccgggaggcccagggaaggtgcaatggatgagcttcatagtctggatccaagaaggcaagagttattggaagctagatttactggagttgcaagtgggagcactggaagtacgggcagttgcagtgttggagcttaaaaataaaccccagctctctagctaccttgagcaaagaagggaagttattgatcgaatatcagtcaattcacagaatgatttggaagcctggaagaccagagttgcacaggaaccagggcaaccttgggtgatgaagcaacagaaactgctcatccttttgattgtgggatctccagtggattaaaaaaaaaaagacggccgggcgcagtggctcatgcctgtaatcccagcactttgggaggctgaggctggcggatcacgaggcctcaacaaataacgaaagctctaatcacagttttggaagcttgggatctttaagtgacaaagaatcagagaaacaactggcaggcagctgaaaggactgtgcaagtgacgggactttatctgcagtaggttcccttgagacaccggagaagaaacaatcggaatcatccaggggaagaaagagaaaagcagaaaaccagaatgaaagtagtcagggaaaaagtattgggggacgtggccacaaaattagcgactattttgaataccagggtggaaatggctcaagtccagtaagaggcatacctcctgcaatccgttctcctcaaaattcacattcacattccactccttcctcatctgttcgaccgaatagcccttctcctactgcattagcatttggggaccaccctattgtacaaccaaagcaattatcctttaaaattattcagactgatctcacaatgctgaaattagcagcattagaaagtaataaaatccaggacctggaaaagaaggagggacgtatagatgatttgctcagggctaactgtgatctcagacggcaaatagatgaacaacaaaaattacttgaaaaatacaaagaacgattaaataagtgcatatcaatgagcaagaaacttcttattgaaaagagtacacaagaaaagctgtcaagcagagagaagagtatgcaagatcgattacgcctcgggcactttacaacagttagacatggcgcttcatttactgaacaatggacagatggttttgcatttcagaatcttgtgaagcaacaagaatgggtgaatcagcaaagggaagatattgaaaggcaaaggaaacttctagccaaacgcaaacctcccacagctaataattctcaggcaccctctaccaattctgaaccaaaacaaaggaaaaacaaagcagtcaatggagcagagaatgatccctttgttagaccaaatttaccacaactgttgactttggcagaatatcatgaacaggaagaaattttcaaacttagactaggacatctcaaaaaggaagaggcagaaatccaggcagaacttgaacgtttggaaagagtcagaaatcttcacatacgtgagctgaaaagaataaacaatgaagataattcacagttcaaagatcacccaacattaaatgaaagatatttattacttcatctgcttggtagaggtggctttagtgaagtgtataaggcttttgacctttatgaacaaagatatgctgctgtgaagatacatcagcttaataaaagctggagagatgagaagaaagaaaactaccacaaacatgcctgcagagagtatagaatacacaaagaactggatcaccccagaatagttaaactctatgattatttctccttggatacagatacgttttgtacagtgttagaatactgtgaaggcaatgacttggatttctatctgaagcaacacaagttaatgtcagagaaagaagctcggtctattgtaatgcagattgtaaatgcactaagatatctcaatgagatcaaaccccctattatacattatgatcttaagccaggaaacatcctactggtagatggaacagcatgtggtgaaatcaaaatcactgattttggtctgtccaagattatggatgatgatagctatggtgtagatggaatggatctaacttcccagggggcaggcacttactggtatttacctcctgagtgttttgtagttggaaaagagccaccaaagatttccaacaaggttgatgtatggtcggttggagtcatcttctttcagtgtctttatggtagaaagccatttggtcacaatcaatctcaacaagacattcttcaagaaaatacaatattaaaagccacagaagtccagttccctgtaaaaccggttgtaagcagtgaagccaaggcatttataagacgctgtttggcatatcgaaaagaagatcgatttgatgtgcaccagctggcaaatgacccataccttctcccacacatgagaagatcaaattcttcaggaaacctacacatggctgggctgacagcatcccctacacccccttcttcaagcataattacttactgactttcctccaagattggcatgatatctttgaatttgcttccagatgcacacttaagtttgagagcatttgagtgtttgttttctttttcttttttttttttttttttacacaagacgtggttaagaactgtttgtgaactgaagttcctcatagtgtcatttgtatgagagaggatcatggacaatgaataaatgcacacttctgactataattttgagcagtgaaggaaggatgactgcctgttacacagaaacaggaataccatgttaagatagaggaaaaaaattttgtttatttgggggaacactgtaaataacgtttataatacttaaatacatttggttgttactagagagttctaatatgaagggtagtttttcattatttaaaaacacatggaaaaatatgagacatatttctaacatacgaactatagtgcctggatacattcttcagcatttggcagttaatctgctgaaaccaaagtaagaactgaatgacagtgacagttgtgttttatagtaatagaatgtgagagttagaatctttggacaaagttaggctttgtcatttgcctattcagacttttaccaagttgtacctcgagatcacatgtccgttttctttcactggttatattaaagggagagctattatttctaaatactttacacctttgacaaaatgagctgcttgtgttgaaatcagttgaattcactaaattataatattgccagtgttttcaacacgttagaattgataacaggtatttttcttttgttaccaggccttgttcatcaaaacaggtgacagtgagtaaccaaatgcagaccagttctatgcaggataatgataaattcccttctagctctattgtaaattgttgtacagatgtcatatttcaattactaagtttcagcagcttattcttgtacaaatgtttaaaatatggcttttctaattggatattgtattttttttaagtcttcttgaaggcactctaattgctgctaaatgatgttgcttctttgctaaaaaattaaatgacctagaaggtgcaagttgactgtacatcatagatattaaaaagcagacagtcattaacaatcaagatgtaaaagtgatccatgttggacataattgagtttttaaatcagtttattgggttctagggctgtagaacacatagatactagatttttaatttgttcatggttattctacatttctagaaagttcttatcagcaagatggtcccataagcaaatttcttgtggtttgtacagatttgttaaaatgtgaacgttttctaactgcctcgtagggtagaaaccaatatttttcaggatgctgtatttcactcctgtaaggactttttctttattgtcacattcataatgctgatacttacatgtaagttgttcatgttgcagaaaaaggttatacgtaccacggattctctttaatattgtacagttaaactgtatttctgatgttgcaagccattttgttttttcattgtacatagacacattgtctctttaaaatgctgctgaaattgtagagagtatagccaaaacagtaataaacaatgacagttaaaatgtaaagactatgaaaattacattggaagggagctttcaagatggtaggatattgactaactgagctccttcacttaaaaatcagctgaataaattccttaagtatacttc

SEQ ID NO: 26839 - DNA, 726 bp, Homo sapiens
  SIMILAR (714)..(589): 851254mologous to Homo sapiens PKU-beta,accession number AB004885,Smith-Waterman Score=178.
ctattctggggtgatccagttctttgtgtattctatactgcaggcatgtttgtagtagttttcttttttctcatctctccagcttttattaagttgatgtagcttcacagaagcatagctttgttcataaaggtcaaaagccttatacacttcactaaagccacctctaccaagcagatgaagtaataaatatctttcatttaacattgggtgatctttgaattgtgaattatcttcattgtttattcttctcagctcacgtatgtgaagatttctgactctttccaaacgttcaagttctgcttggatttctgcctcttcttttctgagatgtccttgtctaagtttgaacatttcttcctgttcataatattctgccaaagtcaacagttgtggtaaatttggtctaacaaagggatcattttctgctccattgactcctttgtttttcctttgttttggttcagaattggtagagggtgtctgagaattattagctgtgggaggtttgcatttggctagaattttcctttgcctttcaatatcttccctttgctgattcacccattcttgttgcttcacaagagtaactccaataaatctagcttccaataactcttgccttcttggattcagactacaaagctcatccattgcaccttccctgggcctcctggatggtggtgtgtgtttcatcagggacctggctgccgcttgccgctgagc

SEQ ID NO: 26840 - DNA, 4299 bp, Homo sapiens
  SIMILAR (4087)..(1727): 1001254mologous to Homo sapiens PKU-beta,accession number AB004885,Smith-Waterman Score=4118.
gaagtatacttaaggaatttatccagctgatttttaagtgaaggagctcagttagtcaatatcctaccatcttgaaagctcccttccaatgtaattttcatagtctttacattttacctgtcattgtttattactgttttggctatactctctacaatttcagcagcattttaaagagacaatgtgtctatgtccaatgaaaaaacaaaatggcttgcaacatcagaaatacagtttaactgtacaatattaaagagaatccgtggtacgtataacctttttctgcaacatgaacaacttacatgtaagtatcagcattatgaatgtgacaataaagaaaaagtccttacaggagtgaaatacagcatcctgaaaaatattggtttctaccctacgaggcagttagaaaacgttcacattttaacaaatctggacaaaccacaagaaatttccttatgggaccatcttgctgataagaactttctagaaatgtagaataaccatgaacaaattaaaaatctagtatctatgtgttctacagccctagaacccaataaactgatttaaaaactcaattatgtccaacatggatcacttttacatcttgattgttaatgactgtctgctttttaatatctatgatgtacagtcaacttgcaccttctaggtcatttaattttttagcaaagaagcaacatcatttagcagcaattagagtgccttcaagaagacttaaaaaaaatacaatatccaattagaaaagccatattttaaacatttgtacaagaataagctgctgaaacttagtaattgaaatatgacatctgtacaacaatttacaatagagctagaagggaatttatcattatcctgcatagaactggtctgcatttggttactcactgtcacctgttttgatgaacaaggcctggtaacaaaagaaaaatacctgttatcaattctaacgtgttgaaaacactggcaatattataatttagtgaattcaactgatttcaacacaagcagctcattcttgtcaaaggtgtaaagtatttagaaataatagctctccctttaatataaccagtgaaagaaaacggacatgtgatctcgaggaccaacttggtaaaagtctgaataggcaaatgacaaagcctaactttgtccaaagattctaactgtcacattctattactataaaacacaactgtcactgtcattcagttcttactttggtttcagcagattaactgccaaatgctgaagaatgtatccaggcactatagttcgtatgttagaaatatgtctcatatttatccatgtgtttttaaataatgaaaaactacccttcatattagaactctctagtaacaaccaaatgtatttaagtattataaacgttatttacagtgttcccccaaataaacaaaatttttttcctctatcttaacatggtattcctgttcctgtgtaacaggcagtcatccttccttcactgctcaaaattatagtcagaagtgtgcatttattcattgtccatgatcctctctcatacaaatgacactatgaggaacttcagttcacaaacagttcttaaccacgtcttgtgtaaaaaaaaaaaaaaaaaaaaaaaagaaaaagaaaacaaacactcaaatgctctcaaacttaagtgtgcatctggaagcaaattcaaagatatcatgccaatcttggaggaaagtcagtaagtaattatgcttgaagaagggggtgtaggggatgctgtcagcccagccatgtgtaggtttcctgaagaatttgatcttcgcatgtgtgggagaaggtatgggtcacatgccagctggtgcacatcaaatcgatcttcttttcgatatgccaaacagcgtctaataaatgccttggcttcactgcttacaaccggttttacagggaactggacttctgtggcttttaatattgtattctcttgaagaatgtcttgttgagattgattgtgaccaaatggctttctaccataaagacactgatagaagatgactccaaccgaccatacatcaaccttgttggaaatctttggtggctcttttccaaccacaaaacactcaggaggtaaataccagtaagtgcctgccccctgggaagttagaaccattccatctacaccatagctatcatcatccataatcttggacagaccaaaatcagtgattttgatttcaccacatgctgttccatctaccagtaggatgtttcctggcttaagatcataatgtataatagggggtttgatctcattgagatatcttaatgcatttacaatctgcattacaatagaccgagcttctttctctgacattaacttgtgttgcttcagatagaaatccaagtcattgccttcacagtattctaacactgtacaaaacgtatctgtatccaaggagaaataatcatagagtttaactattctggggtgatccagttctttgtgtattctatactctctgcaggcatgtttgtggtagttttctttcttctcatctctccagcttttattaagctgatgtatcttcacagcagcatatctttgttcagaaaggtcaaaagccttatccacttcactaaagccacctctaccaagcagatgaagtaataaatatctttcatttaatgttggatgatctttgaactgtgaattatcttcattgtgtattcttttcagctcacgtatgtgaagattcctgactctttccaaacgttcaagttctgcctggattcctgcctcttcctttttgagatgtcctagtctaagtttgaaaatttcttcctgttcatgatattctgccaacgtcaacagttgtggcaaatttggtctaacaaagggatcattctcagctccattgactgctttgtttttcctttgttttggctcagaattggtagagggtgcctgagaattattagctgtgggaggtttgcgtttggctagaagtttcctttgcctttcaatatcttccctttgctgattcacccattcttgttgcttcacaagattctgaaatgcaaaaccatctgtccattgttcagtaaatgaagcgccatgtctaactgttgtaaagtgcccgaggcgtaatcgatcttgcatactcttctctctgcttgacagcttttcttgtgtactcttttctataagaagtttcttgctcattgatatgcacttatttaatcgttccttgtatttgtcaagtaatttttgttgttcatctatttgccgtctgagatcacagttggccctgagcaaatcatctatacgtccctccttcttttccaggtctaggattttattactttctaatgctgctaatttcagcatcgtgagatcagtctgaataattttaaaggataattgctttggttgtacaatagggtggtccccaaatgctaatgcagtaggagaagggctattcggtcgaacagatgaggaaggagtggaatgtgaatgtgaattttgaggagaacggattgcaggaggtatgcctcttactggacttgagccatttccaccctggtattcaaaatagtcgctaattttgtggccacgtcccccaatactttttcctcctgctgtacgacccatttcccaataggccaaggactggaagaccgggaggttggggaacccctgactactttcattctggttttctgcttttctctttcttcccctggatgattccgattgtttcttctccggtgtctctgattctttatcacttaaagattccaagcttccaaaactgtgattagagctttcgttatttgttgaggctttagctccaacactgcaactgcccgtacttccagtgctcccacttgcaactccagtaaatctagcttccaataactcttgccttcttggatccagactatgaagctcatccattgcaccttccctgggcctcccggatggcggcgtgtgattcagcagggacctggccgccgccgccgagcccggggttggagacgtggagagctgggaccaagatggcggcccctccaaacttccactgctactttggacactcatcaagctactttctgggaacccgactccccccctgcgacggcagcggcggcaacggcaccggcacccgcctccgtcatggcgggggccccgctgagggcgagcgagagagcgagggctgggaggggagagtcaaggggatgggggaggaaaccgagaagaggggaggtggggaggaaagaggtgagggaaggagagggtacagggaggcccgc

SEQ ID NO: 26841 - DNA, 1209 bp, Homo sapiens
  SIMILAR (73)..(984): 521254mologous to Rattus norvegicus olfactory protein,accession number M64377,Smith-Waterman Score=850.
atgaggtacagtggtaaagcatgtgagatgtccagtttcaggggaacaatgggtgcaggtgagtacaagtccatgggaatgtccaacctgacaagactctctgaatttattctcttgggactctcctctcggtctgaagaccagaggccactctttgccctctttcttatcatatacctggtcactttgatgggaaatctgctcatcatcttggctatccactctgatcctcgacttcaaaaccctatgtattttttcctaagcatcttgtcctttgctgatatttgctacacaacagtcatagtcccaaagatgctcgtgaacttcttatcagagaaaaagaccatttcctatgctgaatgtctggcacagatgtatttcttcctggtttttggaaacatagatagttatctcctggcggctatggccatcaaccgctgtgtagccatttgtaacccattccattatgtcactgttatgaaccgcagatgctgtgtgttgctactagcattccccatcactttctcctatttccactctctcctacatgtcctcctggtgaatcggctcaccttttgtacatcaaatgttatccatcattttttttgtgatgtcaaccctgtgctgaaactgtcctgctcctccacctttgtcaatgaaattgtggccatgacagaagggctggcctctgtgatggctccatttgtctgtatcatcatctcttatctaagaattctcatcgctgttctcaagattccctcagcagctggaaaacacaaagccttctccacctgcagctcccatctcactgtggtgattctgttttatgggagtattagctatgtctatttgcagcctttgtccagctatactgtcaaggaccgaatagcaacaatcaactacactgtgttgacatcagtgttgaacccatttatctacagtttaagaaacaaagacatgaaacggggcttacagaaattgataaacaagattaagtctcaaatgacttctagtcaagccacttggggcccaagaaccagccctccaggacactttaacaccaaagtcactgctcagcggcaagcggcagccaggtccctgatgaaacacacaccaccatccaggaggcccagggaaggtgcaatggatgagctttgtagtctgaatccaagaaggcaagagttattggaagctagatttattggagtt

SEQ ID NO: 26842 - DNA, 2264 bp, Homo sapiens
  SIMILAR (221)..(1681): 1001254mologous to Homo sapiens flavohemoprotein b5+ b5R,accession number AF169803,Smith-Waterman Score=2563.
aacttccgtgtcgacgatcccgcggggcttggcctctgcccggccacagagccggagctggagttgctgtcccgtctggcggcgatccccgggcagggcccggggccggggtttgaagatgctgaacgtcccttcccagtctttcccggcccccaggtcgcagcagcgtgtcgcctccggggggcgtagcaaggtacctttaaaacagggcagaagccttatggattggattcgactgaccaaaagtggaaaggatctaacgggattaaaaggcaggttaattgaagtaactgaagaagaacttaagaaacacaacaaaaaagatgattgctggatatgcataagaggtttcgtttataatgtcagcccttatatggagtatcatcctggtggagaagatgaactaatgagagcagcaggatcagatggtactgaactttttgatcaggttcatcgttgggtcaattatgaatccatgctgaaagaatgcctggttggcagaatggccattaaacctgctgttctgaaagactatcgtgaggaggaaaagaaagtcttaaatggcatgcttcccaagagccaagtgacagatacacttgccaaagaaggtcctagttatccaagctatgattggttccaaacagactctttagtcaccattgccatatatactaaacagaaggatatcaatttagactcaattatagttgatcatcagaatgattcctttagagcagaaacaattattaaggattgtttatatcttatacatattgggctaagccatgaggttcaggaagatttttctgtgcgggttgttgagagtgtgggaaaaatagagattgttctacaaaaaaaagagaatacttcttgggactttcttggccatcccctgaagaatcataattcacttattccaaggaaagatacaggtttgtactacagaaagtgccagttaatttccaaggaagatgttactcatgatacgaggcttttctgtttgatgctgccaccaagcactcatcttcaagtgcccattgggcaacatgtttacctcaagctacctattacaggtacagaaatagtaaagccatatacacctgtatctggttccttactctcagagttcaaggaaccagttcttcccaacaataaatacatctactttttgataaaaatctatcccactggactcttcacaccagagcttgatcgtcttcagattggagattttgtttctgtaagcagtcctgagggcaattttaaaatatccaagttccaagaattagaagatctctttttgttggcagctggaacaggcttcacaccaatggttaaaatactgaattatgctttgactgatatacccagtctcaggaaagtgaagctgatgttcttcaataaaacagaagatgatataatttggagaagccaattggagaaattagcatttaaagataaaagactggatgttgaatttgttctctcagcacctatttctgaatggaatggcaaacagggacatatttcaccagctcttctttctgaatttttgaaaagaaatttggacaaatccaaagttctcgtctgcatttgtggaccagtgccatttacagaacaaggagtaaggttgctgcatgatctcaacttttccaaaaatgagatccatagttttacagcataatgaagagctgtcattgtcctttattcaactagtttatctaaatttgtgattgcttagggttttttaagagaacatttttgtacataacaaaaggttaactaggaatccagccttcagtttcttaaatggaaatcaaatgttccttcagtacagggtaacttcttgggctttcttttggtacccacaactttatttttactactggatatttgacccgggaaagttaatccatggccaaccaaataccataccaggattcctttgttatgaatccacaaatttcccttgcccatttaaattatatcacctgttcctacaataagcacttgtgttttatgacatgataaagtaaatgatcaccttcgatcatgtttcctatgcctgtaaaatgtcttattagcaatacagattaaattttaccttgcactgttaactcaggaaatgatcatttatgtccttgttattaatgttaaaacatagaatgttataacttattaagtgatccaaacatttttttgtgtgtgtatggcattgatgcagaatagaataaaattatacttaagttctttttaaaaaaaaa

SEQ ID NO: 26843 - DNA, 1389 bp, Homo sapiens; identical to SEQ ID NO: 11409
  SIMILAR (76)..(855): 941254mologous to Homo sapiens EF-1 alpha (aa 1- 463),accession number X03558,Smith-Waterman Score=1290.

SEQ ID NO: 26844 - DNA, 474 bp, Homo sapiens
  SIMILAR (1)..(228): 891254mologous to Homo sapiens MAGOH isoform,accession number AF165518,Smith-Waterman Score=362.
atggttatggctagcgatttctacctgcgctactacgtagggcacaagggcaagtttgggcatgagtttttggagtccgaatttcagctggatggaaagcttagatatgccaacagtagcaattacaaaaatgacgtcatgatcagaaaagaggcttacgtgcacaagagtttaatggaagaactgaagagaattattgatgacaatgaaatcacaaaagaagatgatgaagcaggaatggtttctttacctgtgggtctaagtgttccagtgctgtttgaggacctggtgtggggctccttcccagcccatctcaaaggtctagagcgggacttccaggtgaagtcactgtccccagacttgcaatcacaaggtggggaagctggagctgctggaagtcattttgctgccttggagagagacacttttgagaatggggtccagccagagaagctaggccctgctggcatttga

SEQ ID NO: 26845 - DNA, 666 bp, Homo sapiens
  SIMILAR (274)..(381): 881254mologous to Homo sapiens 30-JUL-1996 Conservin2 coding sequence,accession number V19918_cd1,Smith-Waterman Score=173.
cgtcactgcaaggcgccgggggacacgttggctgcgttttcggcgggcttcccgggtacaaaaatggctgtggctagccgatttctacctgcgctactacgtagggcacaagggcaagtttgggcacgagtttctggagttcgaatttcggccggacggaaagcttagatatgccaacaaccatcaattacaaaaatgatgtcatgatcagaaaagaggcttatgtgcacaagagtgtaatggaagaactgaagagaattattgatgacagtgaaattaccaaaagaagatgatgctttgtggcctccccctgatagggttggccgacaggagcttgaaattgtaattggagatgagcacatatcttttaccacattcaaaaataggttctcttattgatgtaaatcagtcaaaggatcctgaaggccttcgagtattttactatttggtacaagacttgaaatgtttagttttcagtcttattggattacacttcaagattaaaccaatttaaattgtatgttttcaggctgtttgtatatttaattaagggatgggaggggttatttgtcatttacagtattggggtttttatgaatgtgaagcaaacaaaaaaaatttgtatgtaaactgaaaataagaaaatacattagcaagcttaatggt

SEQ ID NO: 26846 - DNA, 798 bp, Homo sapiens
  SIMILAR (169)..(669): 981254mologous to unidentified cloning vector 29kD protein essential for the replication of mini F plasmid,accession number AB015619,Smith-Waterman Score=872.
  misc_feature (1)...(798): n = a,t,c or g
atggaggacccagacagcgtgccccccatcgatgtcctctggatcaaaggggcccagggaggtgactacttctactcctttgggggctgccaccgctacgcggcctaccagcaactgcagcgagagaccatccccgccaagcttgtccagtccactctctcagacctaaggatcagaaaatctgatggcaccctacaggaacatgacggtatctgcgagatccatgttgctaaatatgctgaaatattcggattgacctctgcggaagccagtaaggatatacggcaggcattgaagagtttcgcggggaaggaagtggttttttatcgccctgaagaggatgccggcgatgaaaaaggctatgaatcttttccttggtttatcaaacgtgcgcacagtccatccagagggctttacagtgtacatatcaacccatatctcattcccttctttatcgggttacagaaccggtttacgcagtttcggcttagtgaaacaaaagaaatcaccaatccgtatgccatgcgtttatacgaatccctgtgtcagtatcgtaagccggatggctcangcatcgtctctctgaaaatcgactggatcatagagcgttaccagctgcctcaaagttaccagcgtatgcctgacttccgccgccgcttcctgcaggtgagaaaaggtgatgagcccactctaaagccaactctatggcccatgaccgtggtctgggacactttgagcagaaagcgtcctgttctccttggagtcaaaggattggtgacagtgtctgccatgctgtag

SEQ ID NO: 26847 - DNA, 980 bp, Homo sapiens
  SIMILAR (19)..(402): 951254mologous to Homo sapiens dJ850E9.2 (novel protein similar to Drosophila CG6762),accession number AL121758,Smith- Waterman Score=633.
atggggctgcgtgcaggaggaacgctgggcagggccggcgcgggtcggggggcgcccgaggggcccgggccgagcggcggcgcgcagggcggcagcatccactcgggccgcatcgccgcggtgcacaacgtgccgctgagcgtgctcatccggccgctgccgtccgtgttggaccccgccaaggtgcagagcctcgtggacacgatccgggaggacccagacagcgtgccccccatcgatgtcctctggatcaaaggggcccagggaggtgactacttctactcctttgggggctgccaccgctacgcggcctaccagcaactgcagcgagagaccatccccgccaagcttgtccagtccactctctcagacctaagggtttgtagcgaaggtgaggtgcccctgtcttctgtgagtaaactcctcctgtgcccgctgggctggaatgagagtgaagatggtcgccccctcctgaaacaacttttccttcttgcagagaagacccaaccagacagcgctaagggccctgccaggcactgcgaaggaggtgcagaacagattcggagtagagggaagctgcctggagcaatcaagaaaggcttcccaggggaggtggcccttgaacagaaacttgataaagttcattctccttccactcatttgacagatgaggaaatagaggcacagaaagtggacagctggctgcacaatctgagggcccctgcaaccaaatgtctgagggcttctgagggccacaagacctgttccttccccaagacccttaccccggccctggctgaggacagctctcacactgtaaacaactgtccttttcagtctattcagtgccacattttacaaatttttgtgtcttccgctggtgattgtactgttgacaatggccccgggcatggtgctgaggtgctgtctaatgttcctaagcaccagaaggctttgatgtgccttacagagaagatcat

SEQ ID NO: 26848 - DNA, 1212 bp, Homo sapiens
  SIMILAR (499)..(702): 471254mologous to Mus musculus type 1 spinesin,accession number AB016423,Smith-Waterman Score=209.
atgcatggacagacctttagcctcaatgagacctgctggatcacaggctttggcaagaccagggagacagatgggcagcatccctcctgtcactgtgactggccaccagcattgtggaccgagaccctcctcaaagtccaggagttgctacaaaacactagcaagtcctccagccactctgagcaggagaaatgtgcggcccagaaattccacctgctggaggccaaagccacggctcctggggtgccccagtggatgttcttaagtgaaactggcaagtatgtggaggtgaagaacagtcactacaagtactgtgcagctgcttcagacagatgtgtttttatccgagcaggtgatgagtgtgaagtcaccgaagatgaagaagaaaccaaggctcaaaaaggtgctcaccggacaaccgaggttgcccacagggattttgccaacagcttctcaatcttgagatacaactccaccatccaggaaagcctccacaggtctgaatgcccttcccagcggtatatctctctccagtgttcccactgcggactgagggccatgaccgggcggatcgtgggaggggcgctggcctcggatagcaagtggccttggcaagtgagtctgcacttcggcaccacccacatctgtggaggcacgctcattgacgcccagtgggtgctcactgccgcccactgcttcttcgttaatgagttcagtgtgtactttgtcctgtctgaatttgctgagggtaataatactgagatcttatcagtacaagcccttgaccctgtctggacccgggagaaggtcctggagggctggaaggtgtacgcgggcaccagcaacctgcaccagttgcctgaggcagcctccattgccgagatcatcatcaacagcaattacaccgatgaggaggacgactatgacatcgccctcatgcggctgtccaagcccctgaccctgtccggtgagtccaggtttgacgccttctccgggggctgggtgtccaagtgtgagacctcgtctggaagctccctggttgccttctggaaagacacctgcccacctctggctactccacacccagaggctattggcagcacctgggacccaccttctgctccctcaacgccccagggagagtgtaggccagccatcaggcccatttgtaccctggtcatttcctacctgggtcatttccatgtggagtga

SEQ ID NO: 26849 - DNA, 1035 bp, Homo sapiens
  SIMILAR (808)..(936): 681254mologous to Homo sapiens Na+,K+-ATPase gamma-subunit isoform 2,accession number AF241235,Smith-Waterman Score=136.
atggctattggaaaaagtcaaaaaatgacagatgctagaaaggttgtggagaaaatggaacacttatatggtgttggactcctgtgccgggtagtcacaggtactgtagaatcctcgttgagttctagtccattgaattggcctccagaaaaggctgaagcccaatggccacaaaacagccaagtctcctcatctgtaaaatgggcgcagtacccagctcctagggtggtggtgaggggaagtgagataatgcatgcaaagagcatatcccagggcctggcacacgtgccacaggacaggatggtggcgccgcaggctgctgtgcagtacaacatagacggcggccactcaaattctccactacacagagacaaaggagacacgtggacccaaaactccgtggacccaaactccgtggacccaaactccgtggactcaaaactccagcgccctctgggggaggggcaagtacccctcaaccccttctccttcacccttagtggcaagatgttcttaagtgaaactggcaagtatgtggaggtgaagaacagtcactacaagtactgtgcaggcggcagccccaagggggacgtggacccgttctactatggtaagcctgggcccctgcgcacccttcctgagccctcaggaccccttccaccaagcagcggcctctcccagccccaggtccatgctctgtgccccttatctcccctggttaccacgggctgctgcgggcaggctgcggagagagacagctgctgggagagaccacccatcccgctcctcttgccctctctttccggagactatgagaccgttcgcaatgggggcctgatcttcgctggactggccttcatcgtggggctcctcatcctcctcagcaaatcaatgaagatgagccgtaacagcaggatctgccagaatcctgaagagaccgctgagaagcagacaacggaatgggagaagggcctgtcgaagtgggtggccatgaaggcggccgtgcatgctcagcccacggatgacaagctctga

SEQ ID NO: 26850 - DNA, 1020 bp, Homo sapiens; identical to SEQ ID NO: 22993
  SIMILAR (217)..(375): 581254mologous to Rattus norvegicus pR-ET2 encoded oncodevelopmental protein (putative); putative,accession number K02816,Smith-Waterman Score=145.

SEQ ID NO: 26851 - DNA, 453 bp, Homo sapiens
  SIMILAR (151)..(435): 491254mologous to Homo sapiens PC4,accession number U12979,Smith-Waterman Score=210.
atgaataacggaagaaattatagatgtcagaatttggtagacaagggcgtaggagagaaccggggaccggcggacaaccggatgttagtggcccaccagtgcagccgggaggaaaaactaaaggaacccgatgaacacagtgacacccgcagtttgtcagcaggactcgctagcgatggagcgtctggggaagaagccccacggcggaggaaaaggtacccgagacaacgacacgttatctgggctccgggggttgaagcaccaggcgacgacgcagagaggcgtcgcacgagaagccagtggacctgcgacacggcactccccattgggaaaatgaggtacgttagtgttcgcgattttaaaggcaaagtgctaattgatattagagaatattggatggatcctgaaggtgaaatgaaaccaggaagaaaaggccctcaacaaattggatga

SEQ ID NO: 26852 - DNA, 765 bp, Homo sapiens
  SIMILAR (167)..(499): 371254mologous to Homo sapiens PC4,accession number U12979,Smith-Waterman Score=86.
gcccctattgagtgtggcggaattccgtcacttccggttctctgtcagtcgcgagcgaacgaccaagagggtgttcgactgctagagccgagcgaagcgatgcctaaatcaaaggaacttgtttcttcaagctcttctggcagtgattctgacagtgaggttgacaaaaagttaaagaggaaaaaggcaagtttgcttcagaaaaccctgtaaagaaaccaaaagacaggtgagacttccgagagccctgtcatctttctaaacagagccagccagcagccagagatgataaccatgtttcagattgggaaaatggaggtacgttagtgttccgcgattttaaaaggcaaaagtgcctaatttgatattagagaatattggatggatcctgaaggtgaaatgaaaccaggaagaaaaggtatttctttaaatccactaacaatgggagcccagcttgaaggaacagatttctggaccattgattgatgccagtaagaaaacttgtaaaatttccgagcccatattaattaaaccctgtactgttccagttgttttaatctggcttttttccattggcttttgttttctaaatgttctccgaagctattgtatgtttggattgcagaagaatttgtaaggtggaatacttttttttaatgtgcattattaaaaatattgagtgaagctaattgtcaactttattaaggattactttgtctgcccaccacctagtgtaaaataaaatcaagtaatacaaaaaaaaaa

SEQ ID NO: 26853 - DNA, 572 bp, Homo sapiens
  SIMILAR (47)..(118): 1001254mologous to Homo sapiens Sequence of human metallothionine MT-2, class I,accession number R40209,Smith- Waterman Score=145.
  misc_feature (1)...(572): n = a,t,c or g
ttgttcaggtatccaggnacggttctcacctctgtcttttctccttgcaggtgactcctgcacctgcgccggctcctgcaaatgcaaagagtgcaaatgcacctcctgcaagaaaagtaagtgggatcctctctttcctctaccccttccctgtcctccagcctgtcccctctccaccatcctcaggggaattaaagcagtctggggatgccccattgcgcggaaattgttgcctcctcagtgatccttatcagggagagcaggaatccttattcccggtgtcgctagtactcatctctgccgcctcctgtctgcccccaggctgctgctcctgctgccctgtgggctgtgccaagtgtgcccagggctgcatctgcaaaggggcgtcggacaagtgcagctgctgcgcctgatgctgggacagccccgctcccagatgtaaagaacgcgacttccacaaacctggattttttatgtacaaccctgaccgtgaccgtttgctatattcctttttctatgaaataatgtgaatgataataaaaccagctttgacttgaaaaaaaaaaaaaaaa

SEQ ID NO: 26854 - DNA, 597 bp, Homo sapiens
  SIMILAR (486)..(340): 511254mologous to Homo sapiens Human metallothionein Class I amino acid sequence,accession number Y57810,Smith-Waterman Score= 103.
  misc_feature (1)...(597): n = a,t,c or g
gtttaaataaaaaatatggcaaagtgatcaaatgtcattttcaagaccacctggggggttttcaagatttgtcatgttcacattcgggaatttagggccggatcaacttgttttgctttttattatcttttttcaagtcaaaagctgttttaattatccattccacattatttccatagaaaaaggaaatataacaaaacggtccacggtccagggttgttacataaaaaaatcccaggtttgtggaaagtcgcgttcttttacatctgggaagcggggctgtcccagcatcaggcgcaccagggtgcgacttgtccgaggcgcctttgcagagtgcagcccctgggcacacttggcaccagcccacagggaagccaggagcangcgccttttcttgcaaggcaggtgcatttgcactctgttgcattttgcacggatgccggcgcaggtgcaggagacacctgcagcggcacaggagcagtttggggatccattggcgagctgaaagaggcggctccacccgggcccgcgccctaggcttcaaggctcaccgcagcggccctcctactcgtcgcggcgtagcgtccgcggggctcc

SEQ ID NO: 26855 - DNA, 1314 bp, Homo sapiens
  SIMILAR (174)..(233): 901254mologous to Homo sapiens putative p150,accession number U93563,Smith-Waterman Score=90.
atgcaaactaccatcagagaatactataaacacctctacacaaataaactagaaaatctaaatgagatggataaattccttgacacatacaccctcccaagactaaaccaggaagaagttgaatctctgaatagaccaacaacaggttctgaaattaaggcagtaattaatagcctaccaagcaaaaaaaaagtccaggaccagacggattcacagctgaattctaccagagagaataaaatacctaggaatccaacttacaagggatgtgaaggacctcttcaaagagaactacaaaccactgctcaacgaaataaaagaggacacaaagaaatagaagaacattccatgctcatggatatgaagaatcaatatcatgaaaacggccatactgcccaagttttttccactctctgtgtgcccttcaaggacaagaaccatgtcacattcaccagtgggtccacagcaccaagctcagcagcagatatagaaaagatagtcattatacctagccctgaatatggtctccaaaggccacaatcaaaaatggcatcctacaccttactgctacatgacatctgcacactgaaggaacacctgagacatgaagtgagacgagagaagttcatcaacccttccttacatcccattgctatcctggtaataaaggttcatcctcaaggagtatttctgactgctcaaggacaccacgtggaccagaagagcctgtttttcaaacctatgagattgtgtaaactttctctcatcatacaccggaaggccaattcagggaaagaagcagtggagggccgagactgttgtggcgacggcgacctctacggcaacggcttaagctctcggaggagtggcagagtacgatctgaaggaggggcttctgctgaagcactgagccctggtccagtcacttgtggccacagaagtaaggttggttttatgcattaccagtcacacagatatgctacagatatgcttttttgtgtatgccacagtcacacaatagttgtattgtgtctggagttggttcctgcctgtgggttcacggtctcactgacttcaagaatggagccccagaccttcgtggtgagtgttacagctcttaaagatggtacggacccaaagagtgagcgggtcctgctgattggtgcattttacagagcgctgattggcgcattttgcagagcgctgactggtgcattttacaatcctcttgtaagaggaaagttccccaagtccccactcgacccaggaaatccagctgtcctcacctctcagtatgactatagcatattttaa

SEQ ID NO: 26856 - DNA, 729 bp, Homo sapiens
  SIMILAR (490)..(726): 971254mologous to Homo sapiens KIAA1155 protein,accession number AB032981,Smith-Waterman Score=407.
atgaatggatccaatatggcaaatacatcaccgagtgtaaaatccaaagaggaccaggggttaagtgggcacgatgaaaaggaaaacccatttgcagagtacatgtggatggagaatgaagaggatttcaacagacagcctctgaatgaaatatatgttgttgaaaacataaaacaattttcactagctttgttaacactcactgacatgctcttaaccccagtgatcaggattgcaccagggctattagaagccagatgtctgagctgtgggtcagctgtgcactcctacattcaagagtttagcaaactcagagacaagtgttttcatggaaaatttgtgttaatgggaaaaggtgaggaaatttattttatgaaaggaagttgttttggtctaatgccctgtgttattgggtgtagatttgtgggaaacagcagctatatgcagacaggtcagcatggcatgcctcaaatgggaactcgggattggcaggatgtggaggaggaactgcaagagcaagacttcttggaccgctgcttccaagagatgctggatgaagaagaccaagactggtttattccatcacgagacctgcctcaggccatgggacagttgcaacagcagttaaatggactgtcagtcagtgaaggtcatgattctgaagatattttgagcaaaagtaacctgaacccagatgccaaggagtttattccaggagagaagtactga

SEQ ID NO: 26857 - DNA, 712 bp, Homo sapiens
  SIMILAR (99)..(533): 991254mologous to Homo sapiens KIAA1155 protein,accession number AB032981,Smith-Waterman Score=762.
cgcggccgcgtcgacgcttctcgggtgctgtgcttcacgttttggtactaaaggccgagactgttgtggcgacggcgacctctacggcaacggcttaagctctcggaggagtggcagagtacgatctgaaggaggggcttctggttagcccaggttccatcataatgaatggatccaatatggcaaatacatcaccgagtgtaaaatccaaagaggaccaggggttaagtgggcacgatgaaaaggaaaacccatttgcagagtacatgtggatggagaatgaagaggatttcaacagacaggtggaggaggaactgcaagagcaagacttcttggaccgctgcttccaagagatgctggatgaagaagaccaagactggtttattccctcacgagacctgcctcaggccatgggacagttgcaacagcagttaaatggactgtcagtcagtgaaggtcatgattctgaagatattttgagcaaaagtaacctgaacccagatgccaaggagtttattccaggagagaagtactgagccgagaaagctttgaggaagacttgtctgtccccacatctggggatagtaatgcacaaaatggtggagctgaagagggggatggggcgggcgaggggtgcacagcgggaaggggagtggtggtctcacgatactgtgactctgagtaactaatatgctcagtctaattctaagaa

SEQ ID NO: 26858 - DNA, 966 bp, Homo sapiens
  SIMILAR (463)..(963): 1001254mologous to Homo sapiens dJ661I20.1 (similar to RPL12 (ribosomal protein L12)),accession number AL031669,Smith-Waterman Score=864.
atgcgtgccctggatagctcttcgcttctcactggctctgtgaggatcaccagaggaagaagaacctacagagtgagaagaaacagtgagataagtgaagttggtgggaaaaaatgtaagactgaaagcagggtatccctgaagcctgaagaagagagcatttcaagacagaatcatcgcaggtgtcaaacgctgctgagaagcagctttcctcctgaggaccctgaagcaaaaagcctgaaacctagctccccacagaagacgctgcctctttttagaacactctcaatttctttggtggggctgaccttcccttggcccccatactctccaattccagagcatgatcttccaccacaagaaaaacaaggctggcttttgtcttccagctcaaaggaggccaaggtgcaacttctttcagtcgtcctgaatcggattcatctgacacaagctgcctccaccatgctgctgaagtttgaccccaatgagattagagtcgtatacctgaggtgcaccgggggtgaagtcgatgccatgtctgcactggctcccaggataagacccctgggtctgtctcccaaaaaggttgatgatgacattgccaaggcaactagtgactggaagggtctaaggattacagtgaaactgacgattcagaacagacaggcccagattgaggtggtaccttctgcctctgccctaatcatcaaagccctcaaggaaccaccaatagacagaaagaaacagaaaaacattaaacacagtggaattatcacttttgatgagattgtcaacactgctcgacagatgcagcaccaatctttagccagagaactctctggaactattaaagagctcctggggactgactactgcccagtctgtgtctgcaatgttgatggccaccaccctcatgacatcatggatggcatcaacagtgttgtggtggaatgcccaactagttaa

SEQ ID NO: 26859 - DNA, 652 bp, Homo sapiens
  SIMILAR (366)..(599): 701254mologous to Hydra vulgaris L12 ribosomal protein,accession number AJ252184,Smith-Waterman Score=308.
cttaaagccgctgcctcccagagaccttcccggtgttgcgccgccccggccaagcctcagcctttctgggccttagcttcttcacgtgtaggtggggagggaggactggaccacctgtggcggcttgggagcccgcacgccctaggtatacctgaggtgcaccggaggtgaagtcggtgccacttctgccctggcccccaagatcggccccctgggtctgtctccaaaaaaagttggtgatgacattgccaaggcaacgggtgactggaagggcctgaggattacagtgaaactgaccattcagaacagacaggcccagattgaggtggtgccttctgcctctgccctgatcatcaaagccctcaagggaaccaccaagagacagaaagaaacagaaaaacattaaacacagtgggaatatcacttttgatgagattgtcaacattgctcgacagatgcggcaccgatccttagccagagaactctctggaaccattaaagagatcctggggactgcccagtcagtgggctgtaatgttgatggccgccatcctcatgacatcatcgatgacatcaacagtggtgctgtggaatgcccagccagttaagcacaaaggaaaacatttcaataaaggatcatttgacaactgag

SEQ ID NO: 26860 - DNA, 501 bp, Homo sapiens
  SIMILAR (57)..(500): 951254mologous to Homo sapiens beta-actin,accession number X00351,Smith-Waterman Score=756.
cacagagcctcgcctttgccgatccgccgcccgtggccacccgccgccagctcaccatggatgatgatatcgccgcgctcgtcgtcgacaacggctccggcatgtgcaaggccggcttcgcgggcgacgatgccccccgggccgtcttcccctccatcggcgtgatggtgggcatgggtcagaaggattcctatgtgggcgacgaggcccagagcaagagaggcatcctcaccctgaagtaccccatcgagcacggcatcgtcaccaactgggacgacatggagaaaatctggcaccacaccttctacaatgagctgcgtgtggctcccgaggagcaccccgtgctgctgaccgaggcccccctgaaccccaaggccaaccgcgagaagatgacccagatcatgtttgagaccttcaacaccccagccatgtacgttgctatccaggctgtgctatccctgtacgcctctggccgtaccactggcatcgtgatggactccg

SEQ ID NO: 26861 - DNA, 1626 bp, Homo sapiens
  SIMILAR (499)..(1620): 941254mologous to Homo sapiens FKSG30,accession number AY014272,Smith-Waterman Score=1865.
atggtgccatcagcggcggcagcagcagggatgcgctgcctcatcctcaagggtgttgacagcatcggcaagactgagaggaccctccaagagattgggtctccctgtgttgccctggctagtcctgaactgctgagctcaagagatccagtagctgtggactcccaaggtgtggtgggttttttgcattcccttttgtaccggtcatttggcatctgctgtgcataccacacgcagtgcaatgaccatgccagccatgtgtggctcaaggttcctgtatcaggcagcacagctcagctttctcttagttgtaagaaagaaaaagacatcttgcatgaaaatagtacgttgcgggaagaaattgccatgctaagactggagctagacacaatgaaacatcagagccagctaagagaaaagaaatatttggaggatattgaaagtgtgaaaaaaaggaatgataatcttttaaaggctctacaattgaatgagctcaccatggatgatgataccgctgtgctcgtcattgacaacggctctggcatgtgcaaggccggctttgcgggcgacgatgccccccgggctgtcttcccttccatcgtggggcgccccaggcagcagggcatgatggggggcatgcatcagaaagagtcctatgtgggcaaggaggcccagagcaaaagaggcatcctgaccctgaagtaccccatggaacacggcatcatcaccaactgggatgacatggagaagatctggcaccacaccttctacaacgagctgcgtgtggctcccgaggagcaccccgtcctgctgaccgaggccaccctgaaccctaaggccaaccgcgagaagatgacccagatcatgtttgagaccttcaacaccccagccatgtacgtggccatccaggctgtgctgtccctgtacacctctggccgtactactggcatcgtgatggactctggtgacggggtcacccacactgtgcccatctatgaggggaatgccctcccccatgccaccctgcgcctagacctggctgggcgggaactgcctgactacctcatgaagatcctcaccgagcatggctataggttcaccaccatggccgagcgggaaatcgtgcgtgacatcaaagagaagctgtgctatgttgccctggacttcgagcaggagatggccacggcggcctccagctcctccctagagaagagctacgagctgcccgatggccaggtcatcaccatcggcaacgagcggttccgctgccccgaggcgctcttccagccttgcttcctgggcatggaatcctgtggcatccatgaaactaccttcaactccatcatgaagtctgatgtggacatccgcaaagacctgtacaccaacacagtgctgtctggcggcaccaccatgtaccctggcatggcccacagaatgcagaaggagatcgctgccctggcgcctagcatgatgaagatcaggatcattgctcctcccaagcgcaagtactccgtgtgggtcggtggctccatcctggcctcgctgtccaccttccagcagatgtggatcagcaagcaggagtatgatgagtcaggcccctccattgtccaccgcaaatgcttgtag

SEQ ID NO: 26862 - DNA, 1832 bp, Homo sapiens
  SIMILAR (1013)..(1225): 981254mologous to Molgula oculata actin,accession number D85743,Smith-Waterman Score=368.
  misc_feature (1)...(1832): n = a,t,c or g
ggcacgagcgcgtccgccccgcgagcacagaagcctcgcgctttgccgatnccagccgcccgtccacaccacgccagccagctcaccatgtgatgatgaatatcgccgcgcttcgtcgtcgacaacgagctccggcatgtgcaagggccggcttcgcgggcgacgatgccccccgggccgtcttcccctccatcgtggggcgccccaggcaccagggcgtgatggtgggcatgggtcaaaaggattcctatgtgggcgacgaggcccagagcaagagaggcatcctcaccctgaagtaccccatcgagcacggcatcgtcaccaactgggacgacatggagaaaatctggcaccacaccttctacaatgagctgcgtgtggctcccgaggagcaccccgtgctgctgaccgaggccccccttgacccccagggccacccgcgagaagatgacccagatcatgtttgagaccttcaacaccccagccatgtacgttgctatccaaggctgtgctatccctgttacgcctctgggccgttaccactggcatcgtgatggactccggtgacggggtcacccacactggtgcccatctacgaaggggtatgccctcccccatgccatcctgcgtctggacctggctggccgggacctgactgactacctcatgaagatcctcaccgagcgcggctacagcttcaccaccacggccgagcgggaaatcgtgcgtgacattaaggagaagctgtgctacgtcgccctggacttcgagcaagagatggccacggctgcttccagctcctccctggagaagagctaccagctgcctgacggccaggtcatcaccattggcaatgagcggttccgctgccctgaggcactcttccagccttccttcctgggcatggagtcctgtggcatccacgaaactaccttcaactccatcatgaagtgtgacgtggacatccgcaaagacctgtacgccaacacagtgctgtctggcggcacccaacatgtaccctggcattgccgacaggatgcagaaggagatcactgccctggcacccagcacaatgaagatcaagatcattgctcctcctgagcgcaagtactccgtgtggatcggcggctccatcctggcctcgctgtccaccttccagcagatgtggatcagcaagcaggagtatgacgagtccggcccctccatcgtccaccgcaaatgcttctaggcggactatgacttagtttgcgttacaccctttcttgacaaaacctaacttgcgcagaaaacaagatgagattgggcatggctttatttgttttttttgttttgttttggttttttttttttttttggcttgactcaggatttaaaaactggaacggtgaaggtgacagcagtcggttggagcgagcatcccccaaagttcacaatgtggccgaggactttgattgcacattgttgtttttttaatagtcattccaaatatgagatgcattgttacaggaagtcccttgccatcctaaaagccaccccacttctctctaaggagaatggcccagtcctctcccaagtccacacaggggaggtgatagcattgctttcgtgtaaattatgtaatgcaaaatttttttaatcttcgccttaatacttttttattttgttttattttgaatgatgagccttcgtgcccccccttcccccttttttgtcccccaacttgagatgtatgaaggcttttggtctccctgggagtgggtggaggcagccagggcttacctgtacactgacttgagaccagttgaataaaagtgcacaccttaaaaaaaaaa

SEQ ID NO: 26863 - DNA, 438 bp, Homo sapiens
  SIMILAR (189)..(34): 341254mologous to Arabidopsis thaliana gene_id:K19M13.3~unknown protein,accession number AB018110,Smith- Waterman Score=61.
agccgatctgctgcaggtcagcaactgtgtcgtgagcagctgccaaccaccagcctttctggtgctgttctccagttcacgtctgccagctggtgagggcagaggcagacctggtcagacccagcgcccctcctcccttgagggagcatggcacagcgtcacacttgaaagacggtgtttggtttcccatctaatcaacttaagggaagccggcatgtacccttcaaggccctgtcaccacctatttcctgatcagttggtataaactgagggtggcttttagagacccagacttggttggcagcgctgccatggaacaccccagcaagcaccttcccagcctgcctttcggagcaagcacccaaggaagggaatgccggcgctccagcaacaaccaggttcaggcctgtgcagacccctgccctgccgctgcagaaa

SEQ ID NO: 26864 - DNA, 494 bp, Homo sapiens
  SIMILAR (184)..(432): 811254mologous to Homo sapiens 12-OCT-1993 Human death associated protein DAP-1,accession number Q89836_cd1,Smith-Waterman Score=355.
tgcggccgcgcccccttaacggcagtggcactcacccggctcgcgcggccccggcgccccacgcgcgcgcgtcgttctcccgcccgctcgctccccggcgctcacacctgagctcactcgcgcacgcccgcccggcccgagaaccgcgccgccgcctcggccccgcggaagccccgccgcgccatgtcttcgcctcccgaagggaaactagagactaaagctggacacccgcccgccgtgaaagctggtggaatgcgaattgtgcagaaacacccacatacaggagacaccaaagaagagaaagacaaggatgaccaggaatgggaaagccccagtccacctaaacccactgtgttcatctctggggtcaatcgcccggggtgacaaagatttccgcccggcggatgcgcaggtggctcaccagaagccgcatgcatccataggacaaacatccttccccaagaacccagcacatccagcagccacgcaagtga

SEQ ID NO: 26865 - DNA, 1179 bp, Homo sapiens
  SIMILAR (517)..(684): 681254mologous to Homo sapiens DAP-1,accession number X76105,Smith-Waterman Score=207.
atggaggtgaaagctggtggaatgcgaattgtgcagaaacacccacatacaggagacaccaaagaagagaaagacaaggatgaccaggaatgggaaagccccaggaagaaagagggcaagagatatcgccttgcctggaaaaaaagttcctggaaagttaatgaaacactgcttttcttggtaagaggattaacaggaaagatgtgtggacagagttctggggacttgggttctatgttttcaaactcagaaaccacgcagaaacccacagatctttgcaaccccacagaaatacagacaaccatcagagaatactgtaaatacctctgtgcgtataaactagaaaaccaagaagaaactggtaaattcctgaacacatacaccctcccaacactgaaccatgaagaaaatggacccctgaatagaccaataacaagttctgaaattaagggacactggtgggtgctggcctgggggttcctcacccacaaacaccatgcttcctgcagggacgttgatgggcgctggcctggacgttcctcacatacaaccgccatgcttcctgcagggacgctgggtgacaaagatttccccccggcggctgcgcaggtggctcaccagaagccgcatgcctccatggacaagcatccttccccaagaacccagcacatccagcagccacgcaaccgatctgctgcaggtcagcaactgtgtcgtgagcagctgccaaccaccagcctttctggtgctgttctccagttcacgtctgccagctgcccagaagggacagatatcatggaaagggcagctcgggggtctgaaggaggcaagagagactggcagtcagagaaactcaggggagctagtcagcaggatggcaaggagccatttgaggaaagtcgaggaaaagagaaaacctggaaggacccgctcctggagggagacgaagtaccctggcgacagtttcctgttcgtgggtaccagggaggagaggagaacagggggaccctagttcaaatgtgtaccgtggagtgtcgtgccaccctcgagcacccatgttcaaagaacccgtcctatagcgtccaggttctgtcagaactgaataacgcgggcgccccttttcttgtcttcacagctgctgtgctggttaaatgctgctttttacaaattcgaaagtaa

SEQ ID NO: 26866 - DNA, 307 bp, Homo sapiens
  SIMILAR (3)..(122): 971254mologous to Homo sapiens retinol-binding protein,accession number M36809,Smith-Waterman Score=226.
atctgacaggcatagatgaccgcaagtgcatgacaacagtgagctgggacggagacaagctccagtgtgtgcagaagggtgagaaggaggggcgtggctggacccagtggatcgagggtgaggcccaggcagacaaccttgtcccaaggaatcagcaggatgtgtgggccaggatccccctctttgcacagcatgaggcaaaaatgtccagccacccccaggcatctgttagcagagtctgtctcttggctttgtcacttttccttttcttaaaacaaagccatgccaataaagtgatctgtgttca

SEQ ID NO: 26867 - DNA, 403 bp, Homo sapiens
  SIMILAR (184)..(29): 371254mologous to Mus musculus beta-D-galactosidase fusion protein,accession number M60510,Smith-Waterman Score=76.
gaccttcagagccccacagatctgtgttcagacctggttcttctactgaacaacatgggtgaacttggcaagtcccttaagctgatctgtgaaaaggagatgctaatccctgctcacgtggataggcatgaggcttcagagacagcacagagagtgcctggcagagcaggtaggcagctaacagctgccatttgtaccttcactgggttatttatatctaaggtcattctccctgtgagatgaagagcgctttgagggcaggggtggggtctttttggtatcccaggacttagcataggttgaaacaatgaatggatgaatgaagtgtctggggatggtcagggtacactctgagaagtctgcccctcaccataagattctggaaaacatccttcacccctca

SEQ ID NO: 26868 - DNA, 951 bp, Homo sapiens
  SIMILAR (796)..(948): 1001254mologous to Homo sapiens retinol-binding protein,accession number M11433,Smith-Waterman Score=282.
atgtatgtcatagctgaaaacaagcaattgtctcttgtgcctctgagtgaatccggaacccttcatatgcacagtagccttctggataaacacatgaagagaagatcagttgatgaggaaaccaaagagcagacttactcctatgcaaagctgggggagcacatgtggctccacctgcctccctcgtgcatgtgtcgcattgcaggcttcaccccaacagcagggggcagtagtgatcagcaggcccagcatgcccagcacatggcagggctcacagtgctcagggaagatgtgggggctcaaatgtggggtgtagagggtgtcacagtgctcatctgtgctctgccaagcccaggctgggctgtgggatcttcctcgccttcctcctcagttccctggtgccctcctgatgagctcctaagtgtacttcccgctgtcccacctcaggccttcaccgggtgctccattcttctctccttagagcccagccctagtgaatcccactccctggactctcacctgggctcccacagcctctggcctgtaaccctggtgaccatgaacgcttcaagaagcaatttagtccattggggtggggaccttcagagccccacagatctgtgttcagacctggttcttctactgaacaacatgggtgaacttggcaagtcccttaagctgatctgtgaaaaggagatgctaatccctgctcacgtggataggcatgaggcttcagagacagcacagagagtgcctggcagagcaggattgacaaatgtgtctctttcttggcagacaacagtgagctgggacggagacaagctccagtgtgtgcagaagggtgagaaggaggggcgtggctggacccagtggatcgagggtgatgagctgcacctggagatgagagtggaaggtgtggtctgcaagcaagtattcaagaaggtgcagtga

SEQ ID NO: 26869 - DNA, 744 bp, Homo sapiens
  SIMILAR (224)..(286): 1001254mologous to Homo sapiens Human cellular retinoid binding protein N-terminal,accession number P82557,Smith-Waterman Score=106.
cggagggcgctcatttccgggccgcccaccacccgcgtagcaccggcagccgctgtcccggcagtctccagccgtcccgcccgcttgtggccaactggctccagtcactccccgaaatgccagtcgacttcactgggtactggaagatgttggtcaacgagaatttcgaggagtacctgcgcgccctcgacgtcaatgtggccttgcgcaaaattccccaactttgctgaagccagacaaagagatcgtgcaggacggtgaccatatgatcatccgcacgctgagcacttttaggaaacttacatcatggaacttcccaggttgggaaggagtttgaggaggatctgaccaggcatagatgaccgcaaggtgcatgacaaacagtgagcttgggacggagacaagctcccagtgtgtgcagaagggtgagaaggaggggcgtggctggacccaagtggatcgagggtgatgagctgcacctggagatgagagtggaaggtttgggtctgcaagcaagtattcaagaaggtgcagtgaggcccaggcagacaacctttttcccaagggaatcagcaggatgtgtggccagggatcccccctctttgcacagcatgaggcaaaaaatgtccagccacccccagggatctgttagcagagtgtgtgtgcttggctttgtcacttttccttttcttaaaacaaagccatgccaataaagtgatctgtgttcaaaaaaaaaaaaaaaaa

SEQ ID NO: 26870 - DNA, 2403 bp, Homo sapiens
  SIMILAR (1629)..(1874): 591254mologous to Mus musculus retinitis pigmentosa GTPase regulator,accession number AF286473,Smith-Waterman Score=215.
atgctggaagattgtcaggtttccctctgggtaagactcacatggtgccagctggcctctctgacaagagctctccgaacttctgctatcagtgaggccgcattactggaaatgacacggtggaagactcgggccacagagaaactgatcacctggccccagatcccagaacaaggtgctgtgaaaggaagcaccatcacccctctttcctcatttccaacggtgcagggggcatgggtcctctcacaacaagtaggaattatgggagctacaattcaagatgagatttgggtggggacacagaaccgaaccttattaactagtgtcatgagaacaggaagaggcgccagaggctgcctgttctccctttctctctctctgtgcatgcacagagaagaggccaagcaagctcaaagtgaaaaggcactgtctataagcaggaagagaggcctcagcagaaacggttgctccaaatgtctaaacagtaatgtcatcatcagtcaaacaactacaagcaaacatcaagcagatccagtgaatcctacagatggggtcagaggactccttcccaaagaagctgggggaacacatgaaaaatcccatgacgctgaattcgacagccacctacaaaccataaaacatggaaggatgtccctgtgtggccctgtgtgcactgccttggtcactgggaaagacaatgaagtttctaattatccaacagatatgaatgctgaccattacatttgtaccttaattacagggaaggttattgtttacagttctgataagtggctgttttactcagtgtgcaaagggctttccgtttatcctcctggcttttctaggcatctaattacactgttggggacatggatgcccagcctagaagttgatcccaactgcttctgccctacgcacagccagtctctccaggctgtattagtccatttccacactgctgataaagacatacctgagactgggcagtttacaaaagaaagaggtttaattggacttacagttccgtatggttggggaaacctcacaatcatggtggaaggcaaggaagagcaagtcccattttacatggatggcagcaggcaaagagagaatgaggaagatgcaaaagcggaaacccatgatcaaaccatcagacctcgtgagattcattcactaccaggagaacagtatgggggaaaccgcccccatgattcaattagctcccaccaggtccttcccacaacacactggaatcatgggagtacagttcaagatgagatttgggtggggacacagccaaaccctatcacaggctctgtcggttctgtctcctcaatgtttcttggcttcgtgcccttttcacatctccatgagaacagtctcagccaccccaccttctgtaggcccacacagactgcctggtcactctggggtcttcacaccctgtctccccagtacagccctggcaaccttacctgcaactgcaagcaaggcacatctccaacagggagacagtgggacatctgtgtgtccattgctacagccagaaggattctcaaaacagagcctggaactgaagatgcttgggaaggacctgttgaaatgggattggagactggcctgggcaaaaaagcaagacctcatctccaagaagaagatgaaagagagcaagagaagaagaggaagaagaagaagaagaagaagaagaagaagaagaagaagaagaagaagaagaagaagaagaagaagcagcaggagaaggagaaggagaaggagaaggagaaggagaaggagaaggggaggaaggggaagggaagggggaaggaggaggagaagaagaagaaggagaaaaagacggaggaggaggagaagaaaaactgctttcccggctctaagctccaagtgctatcaccttcagttgaccagctgcgtctttgtccctccccacatcactttctgcagccagggcagcactcctggacaggaagccatgaacttgcaattccaccatttcttccagttgcttttggatctgtggcagggtctttgtggaatgagggtcttcgagggagaaggagaaagggagagagtgacctttctaggttttatggcttgctgtgggtgtttgtgagcccaatatttcacggccatgtgacaaggacccagctcttagatgaactaaggagaaggtactacaacatttttggtgctcataatgtgaggcttgagaagggccatggaactccaacggtcatgcaaccaaagcctctgataatggcgccttcttctgggaacccttcgatcagcctcggagggaacgctgactgccatttcccccaaaacagcgccccctaccagcagaaggcagttaagactggtcttcatccttgcgctaatccttaa

SEQ ID NO: 26871 - DNA, 425 bp, Homo sapiens
  SIMILAR (358)..(176): 291254mologous to Human papillomavirus type 16 E5 protein,accession number AJ244865,Smith-Waterman Score=63.
gtataaaattaacaaaaattttatctccttttccattgtaatagaagtatccatttttatctaggcaaatagccagctacattagaaacaaacttttcccgcaaaagaccacagaataaatatttcaggctttgtgcgacatgtagtctctgtcaactgttcagctctgccattataggggaaaagcaaccatacacaacatgtaaacaaaacagtgttgctgtattcccataaaattccattgacaaagcaggcagcagaccagatttgtcccgtgggccatagtttgctgaccccggattactgagcacctactatatgccaggcactattttagaagttggcaatgcaatagtgagcaacacagtcaaggtctctgctctcacagagcctggaaaatcttgttcacagctgtgtcctcagca

SEQ ID NO: 26872 - DNA, 1166 bp, Homo sapiens; identical to SEQ ID NO: 1554
  SIMILAR (205)..(288): 421254mologous to Homo sapiens Human secreted protein from gene 11 clone HMJAG94,accession number W83941,Smith-Waterman Score= 84.

SEQ ID NO: 26873 - DNA, 173 bp, Homo sapiens
  SIMILAR (1)..(72): 791254mologous to Homo sapiens 14-3-3n,accession number L20422,Smith-Waterman Score=99.
  misc_feature (1)...(173): n = a,t,c or g
cagaaggccaaactggccgagcaggctgagcgatatgatgacatggcagcctgcatgaagtctgtaactgagcagatggctcgagaatacagagagaaaattgagacggagctaagagatatctncaatgatgtactgtctcttttggaaaagttcttgatccccaatgcttc

SEQ ID NO: 26874 - DNA, 1050 bp, Homo sapiens
  SIMILAR (259)..(669): 751254mologous to Rattus norvegicus 14-3-3 zeta isoform,accession number U37252,Smith-Waterman Score=488.
atggacaggaagagcaccttaagcaaagatggacttgccaccactgccattttgacatgtgaagtcaccacactgacacataaatcctggaataattatgggaaagcagacacccttataactaaatcctttctctccagtgctcagagcatgaaaattttctgctgttttgggaaatttgtctgcaaacagcttgaaggaaacttggcccaagggctcaccagcaatagcgttgttgaagaacacaaacatccagtcatggaaaaaaatgagctggttcagaaggccaaactggctgagcaggctgagcaatatgataacatggcagcctgcatgaagtctgtaactgagcaaggagctgaattatccaatgaggagaggaatcttctctcagttgcttataaaaatgttgtaggagcccgtaggtcatcttggagggtcatctcaagtattgaacaaaagacggaaggtgttgagaaaaaacagcagatggctcgagaatacagagagaaaattgagatggagctaagagatatctccaatgatgtactatctcttttggaaaaacatctatcaacaatgcagacaaataatttgaatcctggttcggccatttgctacaaatatgctcttgggcaaattactggtcctgtctctgaactttcctcatttacaaaatatgtaaggactaaaataatagccatggtgtttgtaccaaatcatttcaagagactacgtggcatgtgtaatgaacagtatctagaaatggagaggatcgacacagtgcacgaggctctttatggagacaagagctgcaatctttatttaatattagtgagaagaaatgttgctgccttcaaaatggttcaagtatgtggttggcagtgtccaggtctggcattgatggtgtcagcagtacaagctggtagaagctggaaggcaagtgaggctgtcaatgccatccataaacatcagcatcccagggcagaaagagggtgggaaatgatggagacatatggagaaaaagaggatatccagtacattggctga

SEQ ID NO: 26875 - DNA, 1513 bp, Homo sapiens
  SIMILAR (221)..(976): 531254mologous to Homo sapiens phospholipase A2,accession number M86400,Smith-Waterman Score=418.
  misc_feature (1)...(1513): n = a,t,c or g
tcccacctcggcgcctcactcattgtcccctcgcgcagtcatcgagcgcagatcccgcgctctcgattggaacgcctccccatcgctgagcgatcctcaggggctggacgcctcactcccgtttccgagccataaaaggtctaggaccgcttcccccgagccagcagaacatccagtcatggataaaaatgagcctggttcatataggccaaactggccgaagcaggctgagcgatatgatgacatggcagcctgcatgaagtctgtaacttgagcaaggagctgaattatccaatgaggagaggaatcttcctctcagttgcttataaaaattgttgtaggaagcccgtaggtcatcttgggagggtcgtctcaaagtattgaacaaaagacgggaaggtgcttgagaaaaaacagcagatggctcgaggaatacagagaggaaattgagacggagctaaggagatatctggcaatgatgtactgtctcttgttgggaaaagttctttgatccccaatgctttcacaagcaggaggagcaaagtcttcttattttggaaaatggaaagggagattacttaccctttactttgggctggagggttgccgctgggtggatggaccaagaaaggggattgttcgatccagttcacaacaaggcatacccaaggaaggctttttggaaatcagccaaaaagggaaatggcaacccaacacatccctatcagactgggtctgggcccttaacttctctgtgttctattatgagattctgaactccccagagaaagcctgctctcttgcaaagacagcttttgatgaagccattgctgaacttgatacattaagtgaagagtcatacaaagacagcacgctaataatgcaattactgagagacaactttgacattgtgggacatcgggatacccaagggagacggaagctggaaggcagggaggaagggaggggggaaaatttaaccgggcctttcccaactttttgttcttggcctcattcttaaaatttttaccacagttggacccttttgttccttccctggctgttccccacaattagtttttttgttttacggttttttggacgggttttggtttacttctatttggaatttctatatttcccatgtggtttttatgtttaatattagggggagtaggagccagtttaacattttaggggagttatctggttttcatctttgaggtgggccaatatggggatttgggaattttttatcacaagttataagtgtttggcatagtacttttggtacattgtggcttcaaaagggccagtgtaaaactgcttccatgtctaagcaaagaaaactgcctacatactggtttgtcctggccggggaataaaagggatcattgggtccagtcacagggtgtaagtaaattgtggggtaccttaaagggtttggagcncttacnaggccggtggtaagaancatacccccatggataccccccatatttaggcccntgta

SEQ ID NO: 26876 - DNA, 477 bp, Homo sapiens; identical to SEQ ID NO: 5980
  SIMILAR (321)..(476): 1001254mologous to Homo sapiens elongation factor-1- beta,accession number X60489,Smith-Waterman Score=267.
  misc_feature (1)...(477): n = a,t,c or g

SEQ ID NO: 26877 - DNA, 1293 bp, Homo sapiens
  SIMILAR (277)..(834): 911254mologous to Homo sapiens elongation factor-1- beta,accession number X60489,Smith-Waterman Score=886.
atgaaggcacagatggagaaagaggtaaaaactgtactgaaatttgcaatcttcaatgtgctgactggacatagagaacacaataaggaggggatcaaaagtgacttcaatgatcccaatttgtggatgtatggtaatgccattgctcattgcaagaaatatgagagggaaagcagatctgtatgcaaagataaagaattccatacagatctttccaaacattccagtttcagttgttttgaatctgaggtgccactctcagatacagccgacaccatgggtttcggagacctgaaaagtcccgcgggcctccaggtgctcaacgattacctggtggacaagagctacattgaggggtatgtgccatcacaagcagatgtggcaatatttgaagccgtgtccggcccacagcctgctggcttgtgtcatgccctacgttggtataatcatgtcaagtcttatgaaaaggaaaaggccagcctgccaggagtgaagaaagctttgggcaagtatggtcctgccaatgtggaagacgctacaggaagtggaggtacagatagtaaagatgatgatgacattgatctctttggatctgatgatgaggaggaaagtgaagaagcaaagaggctaagggaagaaagtcttgcacaatatgaatcaaagttagccaaaaaccctgcacttgttgccaagtcttccatcttactaaatgtgaaaccttgggataaggagacagatctggcgaaattagaggagtgcgtcagaagcattcaagcagacggcttagtctggggctcatctaaactagttccagtgggatacagaattaagaaaccaaatacagacatgtttgttttgctaattcctactcatccccaacaagttaaaatgcagtatctcattcctttacttaatttcgaaaagcaaaacacagtctttccacaatgcgtcaaagaagtccaccctgatagcggcccaaagcagtcagcaaaacatccaatcttggggccatggtcaaagagcctgtgctgcttcaggccaggtggtgtttggtttctcccacccacttctgttcttatctcttcatcaccaaccacaaaatgggattctgtcccaaactgtaagtggaatggggaactcaagagccgacggtgggcagtcactgcctcatctgagagcagcctggaaggccaactaggaaggttccgcatctctgccatggacgacgcccgtgctacgggtcatgctgtgtcttggaagaaagccaagaagaggcaaggcctcctgggttaa

SEQ ID NO: 26878 - DNA, 1183 bp, Homo sapiens
  SIMILAR (750)..(109): 421254mologous to Homo sapiens elongation factor-1- beta,accession number X60489,Smith-Waterman Score=238.
gctacgacttttttttttttttttttttttaatctttcaatcttttatttaaatgccatggatccaggatggattttagatcttggttgaaagcagccacatgccagtggactgcacatagtcctcaaaaagcagtgatctgctcctccagcatatctgttccaactttatcatcttcaaactacaacactgtatttgaagttcttaaattccggtatccccactggaactaagtttagatgagccccagactaagccgttcttgcttgaatgcttctggacgcacttcttctaattttcgccataatctggtctcatcattcccaaggttttcacatcttagtaagatggaaagacttggcaacaaagtgcaaggttttttttggctttctttgatttcatattggtgcaaagacggttcttccccttagccttctttgctttcttcacttttcctccttcatcatcagatccaaagaggtcaatggtcatcatcatctttaactatctggtagctccacttcctggtaagtggcttccacatcgggcaggaccatatttggcccaaagcttttcttcactcctgggaaggctgggccttttccttttcggtaagactttgatgtgattataccaaacgtaagggcatgagcaccaagttcggccagccggtgggctggacacgggcttcaaaatacttgccacatcttgcttgtgatggcacatacccccctcgatgtagctcttgtccggccaggtaaatcgttgagcacctggaggcccggcagggctttttaggtcttcggaaacccatgggtgtccgctggatcccgagagctggggagcagcagaaagagagcgcgcaaattgtgggcgccccacgctgaagagaggaaaaaggacccgaagagaccggaaaattccttatatagagacggaggcgtttccctccaccgcgccggaccgaaggttaaaggtcaaagtacttttgcattcccacttctccacgtacgaattgggggccctgaattaaatggcccacaaattgtccatggacctttcgttgcgtttggaagtaaattaataaaataggcatgtcttaagttcgtacctccacggctcccgaagatgacgggaaccagccctagaagcgccatgggcgcgaattcctaaggcggtctat

SEQ ID NO: 26879 - DNA, 1357 bp, Homo sapiens
  SIMILAR (113)..(244): 311254mologous to Mus musculus mlrq-like protein,accession number U59509,Smith-Waterman Score=54.
tcccttattagagaggaggcaagccccttacctacttttgttataattggcccttcaccctgctgaggtgacggacaggcttaggcagtgctaataatggcctggctttagctccaataaacactccacaggcttccccacaaaaggccttattgggagcttgggagggcgggggccagatttaaggagctggaagggtaggagaagacagcctgatatggaatggaacagggatggccagccttagtcctactgggatctatggctttcctaatctcccaagaggtagcttgtgtaagatggatgaatggggccagtagtttttaaatgaagcccagatggctagtacagggcctcccccagctttcctcaacccctgcaccattgattgaccttggactctgcctcagggcagaaatcatcaccatctcaccttcttcccctttaccctgttcaggaaagaaagaaccgaaccgagggcccagagagcaagtttatttcggtgaatgctgacggccaaacatcatccaaagggggaccaggatgggaaagttgcttgaagacaagaaagccttagggaaaacttttaggcttagattccaaaattcaacacaggaaaaggcaacggaactctgggggagactgggaaaggtcctcagccattcagcacccatgcgggacgagctctctcttcatagttggataccaacccattggctgtccttcatggccctgcccacccagcatctcctaacttccttccctctgtccatcttcctcaaccccagtgtgaacaaagaacaatgccgggaatttcaagcaccccatgaacgggtgcccatttcccttcccttgtcaaacaccccgaaagtcctttcggacataaatcctccataaggtgcccttggtcccttgtttcttgggccactggtctggcaggcatggggcaggaaagtggctcaaaagtccaggcaccttcgcattcaatctcatcacttctttggggggttccccagggacctttgagcaccccttgccggtgggtagggggttttggcccagggccctcactcacatccacacacttgggtgtacagggaatcttgccatcacgctggtttgggtcaaacaggtgggaagggcctctttgaactccacaccacctaaaactcacccagtgcttgggatcagatctgcggtctggttcttcggtgaagtcacatgtcggactgctcagctctgctcagctacaggccagaatgcatcaccttccgtgaagaatgactgctcagaagcctgtcataaaggattatatgctagaaactttggagtacaggtttctgatggtattgcttaa

SEQ ID NO: 26880 - DNA, 351 bp, Homo sapiens
  SIMILAR (1)..(351): 781254mologous to Homo sapiens immunoglobulin heavy chain,accession number M34024,Smith-Waterman Score=462.
gggattcccagctctttctgcttgctgatcaggactgcacacagagaactcaccatggagcttgggctgagctgggttttccttgttgctattttaagaggtgtccagtgtgaggggcaattgggggagtccgggggaggcttagttcagcctggggggtccctgagactctcctgtgcagcctctggattcgccttcagtagccattggatgcactgggtccgccaagctccagggaaggggctggtgtgggtctcaaatattaatcctgatgggaatgaaacatactacgcggactccgtcaagggccgattcgccatctccagagacaacgccaagaacacgctttat

SEQ ID NO: 26881 - DNA, 637 bp, Homo sapiens
  SIMILAR (57)..(446): 851254mologous to Homo sapiens immunoglobulin heavy chain VH3,accession number U24080,Smith-Waterman Score=577.
ctgggattcccagctgtttctgcttgctgatcaggactgctcacagagaactcaccatggagtttgggctgagctgggttttccttgttgctattttaaaaggtgtccagtgtgaggtgcagctggtggagtccgggggaggcttaattcagcctggggggtccctgagactctcctgtgcagcctctggattcaccttcatcagtagctactggatgcactgggtccgccaaggtccagggaaggggctggagtgggtctcacgtattgatagtgaaggcagtaggacaagctacgcggactccgtgaagggccgattcaccatctccagagacaacgccaagaacacgctgtttctccagatgaacagtctgagacccgaggacacagctgtgtattactgtactagagacacagtgaggggaagtcaatgtgagcccagacacaaacctcgctgcaggggcatctgagaccacgagggggtgtcctgggccctgtgaactgggctgctctccgtggcagcggctggtggtgctaaaggctgattttctctcagcatctggggctgattcatcaagtttcctcagagaacctttcagattaacaattctgtacttacgtttaatgtctctgaatg

SEQ ID NO: 26882 - DNA, 693 bp, Homo sapiens; identical to SEQ ID NO: 5864
  SIMILAR (463)..(570): 881254mologous to Homo sapiens dJ292B18.2 (novel protein similar to methylenetetrahydrofolate dehydrogenase, methenyltetra- hydrofolate cyclohydrolase, formyltetrahydrofolate synthetase, accession number AL133260,Smith-Waterman Score=156.

SEQ ID NO: 26883 - DNA, 1116 bp, Homo sapiens; identical to SEQ ID NO: 21219
  SIMILAR (367)..(1113): 761254mologous to Mus musculus h2-calponin,accession number Z19543,Smith-Waterman Score=960.

SEQ ID NO: 26884 - DNA, 1063 bp, Homo sapiens
  SIMILAR (869)..(1057): 711254mologous to Homo sapiens neutral calponin,accession number D83735,Smith-Waterman Score=241.
aaggagtggacttgtggggggcggaggaggctgtttccatctaggagctgagttgcctgtgagacaccagtgggtctctagaaacaggatctaaagccctggaaagaaacgtaggctagaagccaatgatgtcaacagaggggcactattcattctctccgtccaagtgtacaacaggcaaatatccctgcttgcgtggagctgacagcaatgaaatgtaataagtaagtacatttgtataagcgaaggtaccagctcctatgggaaaaaacagagcaaggagaggggaattgggagtgcaggggctggagatggggtgtgatttcaaatagggcagtcagagtaatccttgttgagaaggtggccttggagcaaagccatgaaggagatgagagtgggctgtatgttaactgcagaaagcctctcagatggagggaatagtcaccagaggactctcagcatgtttgaagaaagcaaagaaagtcagtgtgaggccaggaggggactgcgtgggaggaatgactccagcaagccggcagctgacccgtctctggcctgcatgcctccccctgtggtccactgccggtggtcttcagctctctcctcgtcccacccccatggtctgctgacagcccagcccagtgcatccctgccatctctgctctaccgctggtcctcccaacaaccaacttacagctggggctcagctatccctgtgtccccagtccagagcctgcctctcagccctcccaaggcggccttgagcgctgctcctgctcctccaggggagaggtcagctggggagagcaacagggagaagaggacagggagaggttggttaacaaatacaaacttacagctagataggagtaatgagcacacctatgacaccaagctgggaatcgacaagtgtgacaactcctccacgtccctgaagatgggatacacgcagggcgctcatcagagcggccaggccttcggcatgggcctacagatatacgaccccaggtactactggggaggcccagtggcccacggcgctccctcgggctccggcccctga

SEQ ID NO: 26885 - DNA, 386 bp, Homo sapiens
  SIMILAR (88)..(17): 291254mologous to Bos taurus immunoglobulin heavy chain,accession number AF304438,Smith-Waterman Score=42.
ttttccttactagataatttttatttaatcctttatcaactgttaattgcttttcaaaagaagttccttttaaactaggccctttatagcacatttcaaaagttatctgaagaatcaaacatcttttgaaagctgagtagggagagggaaaaaagaaggtatacttgccttatttgtagcagtagcactggatccagcgtggctgtgatagttgcaaggatcatgggtcacttcgggtttggagaggatttgtgggtccatccttggaacaattcctctggctcatgaggtcactgatacccaacacggcagaatggtataccaggttgccacggcaggcttttgaagttcgctgggtgcagccagcataggcacgcaaggccttg

SEQ ID NO: 26886 - DNA, 1020 bp, Homo sapiens
  SIMILAR (282)..(425): 331254mologous to Araneus diadematus fibroin-1,accession number U47853,Smith-Waterman Score=47.
atgcactcgcggagggagagagcccggggcttgcggggggctcatcacccgctcgtagacaacgggcccccgcaatccctgcgggctccgccgctgctctcaccgctcaaaacggcaggtgcaaaaagcatttgggagccgcttgccagcgcgcggagacccgaaacccctgaaagaactccactccagaagacgccagaacaagttcccacgaatttcatgggcgcccttcacatgaaaacctcagctcccctatcctcaaggaacggggaagggcgccggggagggacttcggtggccagctgtccctgggtcgtgggcgctgtttgctctgcggagcgccagccctgcacacagcgggtgcgggaagcgttgatgggaggctggagggcgggggcgcagaacaacagggcagaggatcaggtggacgaattcacagaagtaggcttcagaagatgggtaataaaaaactatgatgagctaaaggagcatgttctaacccaatgcaaagaagttaagaaccttgataaaagcatacacccagaaatatccaggcttcatgaatttataacgacaacgcacactttgcctgttataggcggtaaagtaagcctcctgtcaaaatgccaagacaatgcggagcagaaacaatctcaaggatgtagccaagaaggccatgaagtgtatgacccgaggctgaacagcagcagcagcagcagctccagcggcggggggcagagcccggggctgcggcgctgctcaacctcggcggcggcagcggcggcgctggaaggtgctgctctcaagcccatgcccgtccatgcaggtctcgtgggctccggcgagggcggcggcgcgggcgccgtggcgggcccgtgtagcagatggggcgccaccaccgccgcagcaagcagcgcgcagccggcgcagccagtccgcggcggcagcagcggggcgcaggggcatcgtggcggccggaggcggcaggcagggaaagggggacctgcaggcagcagctga

SEQ ID NO: 26887 - DNA, 949 bp, Homo sapiens
  SIMILAR (209)..(343): 441254mologous to Homo sapiens T-cell specific surface glycoprotein CD28 isoform 2,accession number AF222342,Smith- Waterman Score=75.
tcaaacatcttttgaaagttgagtagggagagggaaaaaagaaggtatacttgccttatttgtagcagtagcactggatccagggaccacaggtacgtttgtcacttgaactgaaagataattattatctatgagtggccaggccccttctactttgcatgtttggaagttatccttgaaagttctgaggtgaggatctccaaacaagccacaaaaaaaggtaactgggagggttctggtcccctctcctgtgttccctggctccagcgtggctgtgatagttgcaaggatcatgggtcacttcggggttggtagaggatgtgggtccatccttggaacaattcctctggctcatgaggtcactgatacccaacacggcagaatggtataccaggttgccacggcaggcttttgaagttcgctgggtgcagccagcataggcacgcaaggccttgcaaaactcagagtcaaagccgtcaacggcagagttcaggtgagaagtcagggacacgaagtccgtggtgcatttctggattcgacattgggctggctgttggcagtcaccattcaagacagtttctttaacaccaggactacacgtgtgaatttcgagattaactcccaggtttgcaaaatctggtaaaaatctttccatctggtgtacttccttcgcctcgccgccacccccaactccagaaaagcagcacaaggctccttgtctccctccgaggcggctgcgtggagcagcccgaggctgaacagcagcagcagcagcagctccagcgcggggggcagagccggggcgtcggcgctgttcaacctcggcggcggcacggcggcgctggaaggtgctgctctcaagcccatgcccgtccatgcaggtctcgtgggctccggcgagggcggcggcgcgggcgctgggcggggtctgggcccgtgggtgcggcat

SEQ ID NO: 26888 - DNA, 1886 bp, Homo sapiens
  SIMILAR (655)..(939): 901254mologous to Bos taurus micromolar calcium activated neutral protease 1,accession number AF248054,Smith-Waterman Score= 444.
  misc_feature (1)...(1886): n = a,t,c or g
atggacctgcagaagtttgggctcagcctatacctggtgcaggccctgtttggaatcatcaacatcccggccatgctggtggccaccgccaccatgatttacgtgggccgccgtgccacggtggcctccttcctcatcctggccgggctcatggtgatcgccaacatgtttgtgccagaagccaccgagaactctgctccaggggaagtggaaattggaagcgctccactttcggttctaggcgccgaggaactcgggcgagagcgtggagcacggctgcagggcgggaggggtagagattcccagtgggtgactggaggcttgggagtgaagcaagtgctctcagaagaggagattgacgagaacttcaaggccctcttcaggcagctggcaggggaggacatggagatcagcgtgaaggagttgcggacaatcctcaataggatcatcagcaaacacaaagacctgcggaccaagggcttcagcctagagtcgtgccgcagcatggtgaacctcatggatgtatccttccgtttgcttttgtctcctgagtggggttttgggtggagccccaagtcgacttgccggctcggcggccatctccccttctgcacagttgcccactctcccatgactggtctaagtgatggaatttccttcttaacggccacccagcgtgatggcaatgggaagctgggcctggtggagttcaacatcctgtggaaccgcatccggaattacctgtccatcttccggaagtttgacctggacaagtcgggcagcatgagtgcctacgagatgcggatnnccattgagtcggcaggcttcaagctcaacaagaagctgtacgagctcatcatcacccgctactcggagcccgacctggcggtcgactttgacaatttcgtttgctgcctggtgcggctagagaccatgttccttgtggagtggatgcccacacggggccggactgtggcgggtattttgctggggtattccttcaccctgggccagctcatcctggctggggtagcctacctgattcgcccctggcggtgcctgcagtttgccatctctgctcctttcctgatctttttcctctattcttggaggcctgacccctacctttcttgcacacttcggcccgttgaggtcaggcctatggccatggccttcacagacctgctggatgctctgggcagcatgggccgcttccagctcaaccacacagccctgctgctgctgccctgcggcctgctggcctgccacaacttcctgcagaacttcaccgccgctcttggggcccctgagccctgccggcgcttcaccaagcctcagtgggccctgctgagccccaactcctccatcccgggcgcggccacggagggctgcaaggacggctgggtctataaccgcagtgttttcccgtccaccatcgtgatggagtgggatctggtgtgtgaggcccgcactctccgagacctggcgcagtccgtctacattgccggggtgctggtgggggctgccgtgtttggcagcttggcagacagctgcaccctactcccctgtctaggcacgcagatcctgtgcacagcccaggcagcgctgggcaaaggctgcctggccagctccttcatctgtgtgtacctgtttaccggcgagctgtaccccacggagatcaggcagatggggatgggctttgcctctgtccacgcccgcctcgggggcctgacggcgcccctggttaccacacttggggaatacagcaccatcctgccacccgtgagctttggggccaccgcaatcctggctgggctggccgtctgcttcctgaccgagacccgcaacatgcccctggtggagaccatcgcagccatggagaggag

SEQ ID NO: 26889 - DNA, 410 bp, Homo sapiens
  SIMILAR (233)..(328): 541254mologous to Homo sapiens Homo sapiens clone CJ397_1 protein,accession number W48809,Smith-Waterman Score=77.
catgcccactcactgaattctattatattacccacacctctggaaattcacaaagtctgaattcagatctatgcataaggatgcaaacggattagcaataattgctggcactgccatcaacacctcctgtcgatctcacctgatctgaggataaatgaaggcaaagaatgtggccccagcccctggattggagtggaggcaaggagggtggcgagctgtcttcagcagtcggcctcacctctctgctcctgtatcaacaagtgccatttcatccccacttccaatccccaacatttataccccgtgaatcaattcttcttcagcatgccagttgctggagacagcaccatttacatacaggcatctatagcagttatcttccagggtggaagcaagagttttctcgtgcc

SEQ ID NO: 26890 - DNA, 2448 bp, Homo sapiens
  SIMILAR (1795)..(2442): 451254mologous to Pseudopleuronectes americanus renal organic anion transporter,accession number Z97028,Smith-Waterman Score= 485.
atggccaacttgctcacagagggcactcagtcagaccaagaactccttgtttctcatcctgttttttatgattacaaaactcttgcttccaccctggaagataactgctatagatgcctgtatgtaaatggtgctgtctccagcaactggcatgctgaagaagaattgattcacgggccaggacaggactctcaaatgaggacagcagagctcgtggggggctcccacggacccgccgtgggcccaggggaggcagagcctgagccaacagcagtggtgctgtggaccgtggatcctgagggtggcctggggcaagtaccggctgagggtccagggcccctcccggcctctctacataaagccgggggtactgggcctcaggtcaggcctatggccatggccttcacagacctgctggatgctctgggcagcatgggccgcttccagctcaaccacacagccctgctgctgctgccctgcggcctgctggcctgccacaacttcctgcagaacttcaccgccgctgtccccccccaccactgccggggccctgccaaccacactgaggcctccaccaacgactcgggggcctggctgagggccaccatacccctggaccagcttggggcccctgagccctgccggcgcttcaccaagcctcagtgggccctgctgagccccaactcctccatcccgggcgcggccacggagggctgcaaggacggctgggtctataaccgcagtgttttcccgtccaccatcgtgatggagtgggatctggtgtgtgaggcccgcactctccgagacctggcgcagtccgtctacattgccggggtgctggtgggggctgccgtgtttggcagcttggcagacaggctgggctgcaagggccccctggtctggtcctacctgcagctggcagcttcgggggccgccacagcgtatttcagctccttcagtgcctattgcgtcttccggttcctgatgggcatgaccttctctggcatcatcctcaactccgtctccctgctgtcactggtccactgcctgatagagagcctcctagtgccaggagaggctctagaggttgcggtgaacacagccctgctccttggagtccatgttctagcgaggcgagatatcaccagcatgcataacgaatcgtatagtatgttcgaagacattgtggagtggatgcccacacggggccggactgtggcgggtattttgctggggtattccttcaccctgggccagctcatcctggctggggtagcctacctgattcgcccctggcggtgcctgcagtttgccatctctgctcctttcctgatctttttcctctattcttggtggcttccagagtcatcccgctggctcctcctgcatggcaagtcccagttagctgtacagaatctgcagaaggtggctgcaatgaacgggaggaagcaggaaggggaaaggctgaccaaggaggtgatgagctcctacatccaaagcgagtttgcaagtgtctgcacctccaactcaatcttggacctcttccgaaccccggccatccgcaaggtcacatgctgtctcatggtgatttggtggggccattctcctatggagccgacccgacccgctcaaagctgccccgggaaccgcaggtttggttcgcgcacgccgggacttgccaaccgcacccggaaaatcggggccatgtccaaatgtttcgcttcgctgccggcagggagccgcgccgggctcgctcctgggatcaactgcacagtcctggctttggggagcgggaggcgcactgccttaatttcggcgctgaggttctccaactctgtggcttactatggcctggccatggacctgcagaagtttgggctcagcctatacctggtgcaggccctgtttggaatcatcaacatcccggccatgctggtggccaccgccaccatgatttacgtgggccgccgtgccacggtggcctccttcctcatcctggccgggctcatggtgatcgccaacatgtttgtgccagaaggcacgcagatcctgtgcacagcccaggcagcgctgggcaaaggctgcctggccagctccttcatctgtgtgtacctgtttaccggcgagctgtaccccacggagatcaggcagatggggatgggctttgcctctgtccacgcccgcctcgggggcctgacggcgcccctggttaccacacttggggaatacagcaccatcctgccacccgtgagctttggggccaccgcaatcctggctgggctggccgtctgcttcctgactgagacccgcaacatgcccctggtggagaccatcgcagccatggagaggagggtcaaagaaggctcttccaagaaacatgtagaagagaagagtgaagaaatttctcttcagcagctgagagcatctcccctcaaagagaccatctaa

SEQ ID NO: 26891 - DNA, 457 bp, Homo sapiens
  SIMILAR (1)..(456): 971254mologous to Homo sapiens Human secreted protein sequence encoded by gene 9 SEQ ID NO:132,accession number Y91459,Smith-Waterman Score=732.
agaaatttggtgtatcccgctgttatggttctccttcttattgagacatccatctcggtcctcttgggggcttggaatattctttgcctattggttgatgaaacagcaatgccaaaaggaacaagggggcctggaataggaaatgcctctctttctacgtttggttttgtgggagctgcgcttgaaatcattttgattttctatcttatggggtcctctgttgtcggcttctatagccttcgattttttggaaactttactcccaagaaagatgacacaactatgacaaagatcattggaaattgtgtgtccatcttggttttgagctctgctctgcctgtgatgtcgagaacactgggaatcactagatttgatctacttggcgactttggaaggtttaattggctgggaaatttctatattggattatcctacaatttgctttttgctattgtga

SEQ ID NO: 26892 - DNA, 876 bp, Homo sapiens
  SIMILAR (643)..(804): 1001254mologous to Homo sapiens Amino acid sequence of a human secreted protein,accession number Y19508,Smith-Waterman Score =270.
atggagagttgtcattttaccatagaagtgaaaaaggaagaggaagtaaaatttggtgacaagaccggacagaatcacttggagagatttcttaggaaggcccatagtggagactgccaaggacacaccaacgttgagaggcaggaagaccacgtgcactggagttacacagattctctctccacactacacggccgctgctgggggatggaagaggggttggcatcggcagttcaaggctgtcttttctaccctcttcagtgcctctttcaggtgtatgaagttaaaaccaggtacttgggaatgctttgtgcgggaaatccagaagttgcaacaggaagacaagtgccagaagaacaagctggacagctacttttgggaaaatggattcaggagggaggagacatgatagcaaacccacggctgtcttcatcggtggaatacaacataatggagttggaacaagaacttgaaaatgtaaagactcttaagacaaaattagagtggacagtagtgggaagtatgattggaagacaggggtgtgatctaatgattataaaccggggggatttagcaaggcctgttcatattcttctcggtgtcctcgtgtctccggagataaacatgtgcttctcctctggctatcttatggtgtcctctgttgtcggcttctatagccttcgattttttggaaactttactcccaagaaagatgacacaactatgacaaagatcattggaaattgtgtgtccatcttggttttgagctctgctctgcctgtgatgtcgagaacactgggacttgtaattgttttgacatctgcttatgtgaatcttgaaaatgccaaaagtatgctctttagcaacctgatttga

SEQ ID NO: 26893 - DNA, 3636 bp, Homo sapiens
  SIMILAR (1899)..(490): 261254mologous to Arabidopsis thaliana extensin protein- like,accession number AP000735,Smith-Waterman Score=252.
ctagaagtctagaagcgaattttccttatgaagagaagaaaacttaatggcaatatggccctgcttcagccagagttggaactcaggttggattcgtgtctggacacaaaggctacttgctgacaccagccttccagaatggctcaatttggtggcagcagctgatagagctgcatccctctgcaacaactgctcttccaggctgtgacggcaacagcagaagaggcacaggagtgcagattggctgccttctaggaatccaaggtttggacagtgctgaacagcccctccacctacgctgaccatgggttcaggaggaagccagtgtggagactcacaggacccagccatagctggtcgttctgtgacagtgctgcctcggggttcccagaccttaatgagctggtggctccagggatggcttaaaccttggtgctctgactgctcctggggcgcagtcttcccttccagctgccctgctccacagtagacacctggttctggggagtggcggggcttttgtcctgtggcactgccccatgttttcaggttcgcttctctttggtttgctctcccctgatgggctggtgtgtctttgacaggctgctgggttgggggctcactgtcctgctctggggattgcgaagcaatctctctcctctgagacctgccctttcgatgaacctgtccctttctccctggatgctccacaggagccgagctatcctgtagcgactccgcaggggccttttccctcatggtgggagctggctgatcgtggggttctagctgcaaggctggctggtggttcccaggtggtgcctcttccagaggtgccagtcctctagccgtccctttctggttggggagctttttttccctagcccctgtctgctgaagtggcccctggttgtggggtgaggcccgcatgtctggaatcttcctcctggaggagctgcctgcttggggagctttcctttcctttgcaggccttggatcaggctgagtccccgagttctggggcagccctggctccggaagaggagcaggaatgcgagggagcctcactttctgagccgcctcctcctgggcgggactgaggatgcgaggttctgcttgctcctggctggggggactgataagagggagtttcacctcactgaccttctcttcctggacttgctgaagactgtgggctgcctgggggctcagatttggtggtggttttgagtgcggagggctgatgggaggaagtttactggtgtctgcttcccgggttggtggaagcctgggagagaccgtcatggtttgatgggaggttgttcctaaagcctcttccctgctgggcgataggagtttgggtgtgggcctcctgctctggaggggagccagcacctgaggctggggcagccgagtgggagccagccggcttctaggaagcaaggtccccggggctcccctggcctggggctgcttggtatctgttgctaagtcttggggatgtggcagttctgggtgagggatactgactcggatggcttccggtttggaggtttcctccttcagagcttgctgagaatcgccagcaagtttctgcaccaagtcagtgtgggaagaatcttttggaggatcatggtgggaactgctgggtggaagtttgtctgactcaatttcctcatcctgaattctctgagggctgaggggagtggggccaggtccctgtagaggttcagacagaggagggccagtaggggttacctgggcctcccctgactccttgtcctggcctggctgagggctgcgggacgagggaggggaagggtgcacaggaggcaccagggtcggggtgatgggagactgcccaacctcactggcttccatctcagggacatctgtctcagtggctatttgttttaggggaagatctgattgttggacatcctcttccgttgggtttagggataggtcctgggcctgctgaggaagacccagtgctgatgaactgaggtgttgagggagctcaggattgagatggctgtcaggagaaagctctttttgatgggtttctccatcctgagccagctcttggttctgggcaggagttacgctctgattttctaggtgcttggcatgaatttgcattccagagagatgctctgtcatctggccatctgcttgcagtttcgccaagcacctgggagatggaaccaggtgtgctggcaccccagagacagtcttcttgctagcgggagctcctgcacgaaggtccacggctccattcttgaagtcagcaagaccacgaacccactggcaggaaccaactctggacacactgacacttgttttaaggtaactatggttggctccactcttgtgcactgaacctgtaaacatctggtccccattccttggcaccttcttcacagccctgagactcaggaagaacactggctctacttcttgtcccactgcagttgtagccaaactcttggcaggttcctcagtcaatccaaggtattctctaatgagctgactcagtttttggtaggcaacatccagatcatctgcattgattacctcatcaaaatatcccggaaaattctgattaattttaatataaaggtccactctggagacagcaaattcaatttctgcacgactgaataatccttttctccgcaaatatccctcatatttttccttgttcatgggcaccaccaggatataacgaggctcaaaataggaatatttcaaacttcttacaccttctatttccatatgaatacagcttgccaaaccatctcttgcgataccttctacggtgtccctatttaatccatacttgtgattaccataactaaatgttagaatgaatttccccatgttcaccatttcatcaaaaacgtcttgagagataaaatgataatcaactcgatccccttctccaaagtaaggtggtcttgtggtatgacaggccctgaaatcataaaacagatcacctagtccatttctaaccatatctgaagtaagtgctaaactgtctgcagaggcgatgggcaagctctcgtttcccacaagcttcaggaccagcctgaattccggcctttggatttctaataagtacctgtcaaagatcctctgcggctgcatcacgctgttgacaacatgggtcaggtggtcttgagctgcaaccacttcagggggaggatcatatttattcactgctgaaaccttttcttccactttaatcttcttctgatctaattctgttaatcgcagaagcataaaaattacgaagaaccaatattcagacttttcctgaattggattttctagaagattgagaactcgaaggatgggtaaatttttaatgtattctatttctctcagctcagcaatcttattatcctccaggttgatcacttccaggaggtcatgattctctaagccttggaggctgcttatctgattgtgggacagatccaggttctgcagggctttcagatcctccaaacctgtgatcatctcaatctggttattgctcagacaaagtattttgattggtaacttgtttaagccattaattgtcgtgatcttattgttggccaaactaaggtgaattaggttgttgcacat

SEQ ID NO: 26894 - DNA, 538 bp, Homo sapiens
  SIMILAR (356)..(150): 911254mologous to Oryctolagus cuniculus 2,3- bisphosphoglycerate synthase,accession number M15884,Smith-Waterman Score=328.
agcttcttctccagagcctcacttgttcttcaccatgattcaaagccatctgctccctgttgagaccgatcaaggccccatagtgacgctcatttagacgccaggagctttccacaggcacccattcctggcctaggttttccaggatcaagccgggcggtgggaatggcccgattaaggccagatgtgaatacaagatcaaactcaaagtttagcgctttgagttgcttcccacagttccgagcttcctccattccttcgctgttgagtttgtgatccacccagctacaaaaacggttctccttattccaagcaccctctccatgtgttaacataataagtttgtacttggacatactgatggctgaacttcccaggcgttttcaaatgggctaatattcaaggacagcaatacatctgcaaaggggccaccagcagcagcagcagcagcagcagccgctcctccgagccgccaaagagccagcgcctcctaggcctctattcatctcgccggcatcgacgctcttttctagcccct

SEQ ID NO: 26895 - DNA, 1396 bp, Homo sapiens
  SIMILAR (71)..(307): 981254mologous to Homo sapiens aldose reductase-like peptide,accession number U37100,Smith-Waterman Score=398.
tcaaaaacagcaacagaaagcaggacgtgagacttctacctgctcactcagaatcatttctgcaccaaccatggccacgtttgtggagctcagtaccaaagccaagatgcccattgtgggcctgggcacttggaagtctcctcttggcaaagtgaaagaagcagtgaaggtggccattgatgcaggatatcggcacattgactgtgcctatgtctatcagaatgaacatgaagtgggggaagccatccaagagaagatccaagagaaggctgtgaagcgggaggacctgttcatcgtcagcaaggtgcacatggcgcatttggcttgccttcaacaccattgtgccaaagagtcaatggcagagcctgcaaactccacaaagatgctagtgttcattgagagaggtgcggcattttcttgggaagtagagaaagagaaaacacccaaacagccctccagagaagaaagttgtgcaaagatttgcatatttaccctccaagtgcccaggcccacaatgggcatcttggcttttgtactgagctccacaaacgtggccatggttggtgcggaaatgattctgagtgagcaggtagaagtctcacgtcctgctgtgtccagagttggttccttccagagggttcgtggtctcgctggcttcaagaatgaagccgtggaccttcacagtatgtgtctggagtttctcccttctggtgggtttgtgatgtcgctgacttcaagaatgaagccgcagactgtcgtggtgatcgttgtagctcttaaaggtggtgtggacccaaagagtgagcagcagcaagatttttcgtcaagaggaaccaatctttggaaattggttcgcacaaaggtgataagaattgcaaattggttgcgaaatttaaagtttaacttacaaacttcgtgtctccctggggttcaaagcaatttcttctttgctataagccttcccggagtagttgggatttacaaggggccaaccgttgattccaagccacggccccaagttgaacagcccggggaaaccggacaaagccagccccctaacggaaaaccccgaatgccgcccaaaggcatggcccaaccaaaaggcctacacggcgggaacccaaaccaaaaaaaaaaaaggcccgcaaatggaacaaagggtttccccatagggttcccaatggaattaaaatggcgaaccctaaatccggaaaaaaacctactgggccagataaattccaaaaaaccggtggaacacatgctcacctctgttactggaggaagtgaggaggtgctgtataggttatcttggaaaaaacaagtacaacacctgatgaccaaatgggagtccacagtgctacaagcaaaccttcaaccatgtgacaaccttcactaa

SEQ ID NO: 26896 - DNA, 1151 bp, Homo sapiens
  SIMILAR (610)..(1059): 281254mologous to Homo sapiens ring finger protein,accession number AJ001019,Smith-Waterman Score=154.
atgatctttactgaaaaggaacaaattgttcctcaactgaaaaaggacattacccacaaaaaaaaggtgtcccagaagaaactgaagaaacacaaacttatggcctgtggaattgtgacatatgtctttactcagtggaaagttggaaaattgactatcatccatggatccaatccacaagtgggttggttaatctcagacattcagcacacagaagattatgacgtatcttcagccccaaacccagcgggtgaggagggaccggcgcctctgtctgagactggggctcccggctgctccggctcccggccccctgagctggagccagagcgcagcctgggccgcttcagaggccgcttcgaggataaggacgagcagttggaagaagaagaggagctagaggaggaagaagaggaggaggaggaggaggacatgagtcacttctcgttgaggctggagggaggccggcaagactcggaggacgaggaggagcgcctgattaatctctctgagctgaccccatatatcttgtgttccatttgcaaaggttacttaatagatgcaactaccatcacagaatatctttataccttttgtaaaagctgcgtcttacaagacatagtgtacaaattagtgatcaatctagaggaaagagaaaaaaagcaaatgcatgatttctatcaagaaagaggtctagaagtacctaaacctgctgttccacagccagtcccttcaagcaaaggaagatctaaaaaaatccgagaatcagtgtttcctattccacctgaacttgatatgtctttattactggagttcattggtgctaatgaaggcacgggacattttaagccattggaaaagaagtttgttcgagtttcaggagaagcaactattggacatgtagaaaaattcttcagaagaaaaatgggtcttgatccagcttgtcaggtagatatcatctgtggtgatcacctgttggagcagtatcaaactctaagggaaatccgacgtgcaataggtgatgcagcaatgcaggatggtctgcttgtccttcattatggtcttgtagtttctcctctgaagataacttgaagattctaggcacattatgaggagggaaacaaaggaggcttctgcaggactgcatttcg

SEQ ID NO: 26897 - DNA, 1407 bp, Homo sapiens
  SIMILAR (1024)..(1209): 721254mologous to Homo sapiens Human secreted protein, SEQ ID NO: 6688,accession number G02607,Smith-Waterman Score=220.
atggcacacatatcctgtattgccatcccctgctgttgcaaaataaacgtatttgttctggagggcccatctctccgagtttctcctcaggcggacccatgccagtttcctgaagttaatgaccaacagcatgtagctcgtctaaggatcggcactcaatttgtacacatgaaagaaaggatgtatagcaagaaaaatcctcacagatccttgtgttacgccatgttaagttcagaccaagcgaccttctggaaagcgaagtttgttactttaaaaatcagttttgatgaaaggagggaaaagcagatggacttgaaaaagatccaagctcctattagaaaaggcacactaaaggatctcttcaagccccactggcatacattatgccatcaagccttctaccttctgaaattgcatggagcaggaaccttcactgtcaaagagatgcatgtcaaacagctcccttactttctggggtggtgcccgtggctagtggagggaggagggtgggtggaagggagtgcgagtataaagaattgttttggttacttggatgaggctaatcaggacatcattgaaatatttttaaaatgttctttacatggaattcccggtgctcagactacgattgtgggtgtcgttttgcctcaaggtccactagtctcaaaggaggaaagtgtcccctgggtttgttccttctcctcggatgaccaacagtgtggaacgaatggctgtgagacacttgaagaaatgttgaattcaaaacaaggtgtccgagtctactcaggttgtaggatgcaggcagctgcctctcccacacctactaatgccagccttgttggggtgagcactacagattgtcttcttggcttcctcatgcctcagtccccggtctggcctcctgagggtcatgaagtccacgggcttctgttgcttcttcatctttcagagaaagatgaacaggatgtggacttattagggcactttcaggatgaaaccaaaggcccactggctaaccacacgatcgtctcaatagatgcagaaaaaccttttactaaattccaacatcctttcatgagagaaatgctcaataaactaggcatcaaaggaacatacctcaaaataataagagctgtctatgacaaatccacagcaagcatcatactgaacaggcaaaagctggaagcattctccttaagaactgaaaccatgctcattctcatgttcaggaccctggaatttgctgcctccatggccttaccccacttccaggtcctgaacaagcctcttcttctagtccatcctcttaaggatagaccacaccaccagcatacatccctaaatccaagaatggccaagaggcgactgtttgcaggtggaggctggagggttatggacagcatttga

SEQ ID NO: 26898 - DNA, 4371 bp, Homo sapiens; identical to SEQ ID NO: 7102
  SIMILAR (1)..(888): 1001254mologous to Cloning vector pZC320 SopA,accession number U26464,Smith-Waterman Score=1548.

SEQ ID NO: 26899 - DNA, 1455 bp, Homo sapiens; identical to SEQ ID NO: 7103
  SIMILAR (322)..(810): 1001254mologous to Cloning vector pZC320 SopA,accession number U26464,Smith-Waterman Score=862.

SEQ ID NO: 26900 - DNA, 756 bp, Homo sapiens
  SIMILAR (756)..(22): 961254mologous to Cloning vector pZC320 SopA,accession number U26464,Smith-Waterman Score=1259.
  misc_feature (1)...(756): n = a,t,c or g
ttaaatccttttttgggagaggatccccccgatacccaggttaggcgcgctgtcaataactatgacatcatagtcatgagcaacagtttcaatggccagtcggagcatcaggtgtggatcggtgggcagtttaccttcatcaaatttgcccattaactcagtttcaatacggtgcagagccagacaggaaggaataatgtcaagccccggccagcaagtgggctttattgcataagtgacatcgtccttttccccaagatagaaaggcaggagagtgtcttctgcatgaatatgaagatctggtacccatccgtgatacattgaggctgttccctgggggtcgttaccttccacgagcaaaacacgtagccccttcagagccagatcctgagcaagatgaacagaaactgaggttttgtaaacgccacctttatgggcagcaaccccgatcaccggtggaaatacgtcttcagcacgtcgcaatcgcgtaccaaacacatcacgcatatgattaatttgttcaattgtataaccaacacgttgctcaacccgtcctcgaatttccatatccgggtgcggtagtcgccctgctttctcggcatctctgatagcctgagaagaaaccccaactaaatccgctgcttcacctattctccagcgccgggttattttcctcgcttccgggctgtcatcattaaactncgtcatttcatgaccagcgtttatgcactggttaagtgtttccatgagtttcat

SEQ ID NO: 26901 - DNA, 1575 bp, Homo sapiens; identical to SEQ ID NO: 13427
  SIMILAR (1323)..(955): 961254mologous to Cloning vector pZC320 SopB,accession number U26464,Smith-Waterman Score=590.

SEQ ID NO: 26902 - DNA, 1611 bp, Homo sapiens; identical to SEQ ID NO: 24521
  SIMILAR (286)..(1158): 921254mologous to Cloning vector pZC320 SopA,accession number U26464,Smith-Waterman Score=1372.

SEQ ID NO: 26903 - DNA, 1974 bp, Homo sapiens; identical to SEQ ID NO: 13192
  SIMILAR (1)..(552): 1001254mologous to Cloning vector pZC320 SopA,accession number U26464,Smith-Waterman Score=971.

SEQ ID NO: 26904 - DNA, 3216 bp, Homo sapiens; identical to SEQ ID NO: 7108
  SIMILAR (2212)..(2727): 981254mologous to synthetic construct chloramphenicol acetyltransferase,accession number A02739,Smith-Waterman Score=939.

SEQ ID NO: 26905 - DNA, 3069 bp, Homo sapiens; identical to SEQ ID NO: 7110
  SIMILAR (2293)..(3036): 961254mologous to Cloning vector pZC320 SopB,accession number U26464,Smith-Waterman Score=1172.

SEQ ID NO: 26906 - DNA, 975 bp, Homo sapiens
  SIMILAR (659)..(703): 531254mologous to Cloning vector pZC320 SopA,accession number U26464,Smith-Waterman Score=43.
atggaaattcgaggacgggttgagcaacgtgttggttatacaattgaacatattaatcatatgcgtgatgtgttgggtacgcgattgcgacgtgctgaagacgtatttccaccggtgatcggggttgctgcccataaaggtggcgtttacaaaacctcagtttctgttcatcttgctcaggatctggctctgaaggggctacgtgttttgctcgtggaaggtaacgacccccagggaacagcctcaatgtatcacggatgggtaccagatcttcatattcatgcagaagacactctcctgcctttctatcttggggaaaaggacgatgtcacttatgcaataaagcccacttgctggccggggcttgacattattccttcctgtctggctctgcaccgtattgaaactgagttaatgggcaaatttgatgaaggtaaactgcccaccgatccacacctgatgctccgactggccattgaaactgttgctcatgactatgatgtcatagttattgacagcgcgcctaacctgggtatcggcacgattaatgtcgtatgtgctgctgatgtgctgattgttcccacgcctgctgagttggttgactacacctccgcactgcagtttttcgaatgcttctgtcaggcaccgtgtatgaaatctaacaatgcgctcatcgtcatcctcggcaccgtcaccctggatgctgtaggcataggcttggttatgccggtactgccgggcctcttgcgggatgtggtgcattccgacagcatcgccagtcactatggcgtgctgctagcgctatatgcgttgatgcaatttctatgcgcacccgttctcggagcactgtccgaccgctttggccgccgcccagtcctgctcgcttcgctacttggagccactatcgactacgcgatcatggcgaccacacccgtcctgtggatctacccactagtcaattcaccatcttgttga

SEQ ID NO: 26907 - DNA, 1142 bp, Homo sapiens; identical to SEQ ID NO: 21669
  SIMILAR (51)..(692): 881254mologous to Cloning vector pZC320 SopA,accession number U26464,Smith-Waterman Score=970.

SEQ ID NO: 26908 - DNA, 1410 bp, Homo sapiens; identical to SEQ ID NO: 13433
  SIMILAR (655)..(1407): 1001254mologous to unidentified cloning vector 29kD protein essential for the replication of mini F plasmid,accession number AB015619,Smith-Waterman Score=1309.
  misc_feature (1)...(1410): n = a,t,c or g

SEQ ID NO: 26909 - DNA, 1215 bp, Homo sapiens; identical to SEQ ID NO: 24534
  SIMILAR (325)..(1056): 1001254mologous to Cloning vector pZC320 SopA,accession number U26464,Smith-Waterman Score=1282.

SEQ ID NO: 26910 - DNA, 1035 bp, Homo sapiens
  SIMILAR (1)..(459): 891254mologous to Cloning vector pZC320 SopA,accession number U26464,Smith-Waterman Score=674.
  misc_feature (1)...(1035): n = a,t,c or g
atgggcaaattcatgaaggtaaatgncnancgatnccacctgatgctccgactggccattgaaactgttgctcatgactatgatgtcatagttattgacagcgcgcctaacctgggtatcggcacgattaatgtcttatgtgctgctgatgtgctgattgtgggcacgcctgctgagttgtttgactacacctccgcactgcagtttttcgatatgcttcgtgatctgctcaagaacgttgatcttaaagggttcgagcctgatgtacgtattttgcttaccaaatacagcaatagtaatggctctcagtccccgtggatggaggagcaaattccggatgcctggggaagcatgggtctaaaaaatgttgtacgtgaaaccgatgaagttggtaaaggtcagatccggatgagaactggttttgaacaggccattgatcaacgcttttcaactgnagcccggctttaccggcataaccaagcctatgcctccagcatccagggtgacggtgccgaggatgaggatgagcgcattgttagatttcatacacgntgtgacaatctaaaaacttgtcacacttcacatggatctgtcatggcggaaacagcggttatcaatcacaagaaacgtaaaaatagcccgcgaatcgtccagtcaaacaacctcactgaggcggcatatagtctctcccgggatcaaaaacctatgctgtatctgttcgttgaccagatcaaaaaatctgatggcaccctacaggaacatgacaggatctgcgagatccatgttgctaaatatgctgaaatattcggattgacccttttcgaaaccaataaagatatacggccagcattgaaaaagtttcccggggaaggaagagttttgcaaagcctgatgggacataagttcatcagttcaacggaagtttacacgaaagtttttgcgctggatttgggtgccccgcacccggtggcaattttggattcccggagtctgatgccggttgccatagctgaaacaattatacctgaagaataa

SEQ ID NO: 26911 - DNA, 801 bp, Homo sapiens; identical to SEQ ID NO: 21672
  SIMILAR (1)..(492): 1001254mologous to Cloning vector pZC320 SopB,accession number U26464,Smith-Waterman Score=825.

SEQ ID NO: 26912 - DNA, 2787 bp, Homo sapiens; identical to SEQ ID NO: 13435
  SIMILAR (325)..(1296): 981254mologous to Cloning vector pBACe3.6 levansucrase,accession number U80929,Smith-Waterman Score=1684.

SEQ ID NO: 26913 - DNA, 1134 bp, Homo sapiens; identical to SEQ ID NO: 21674
  SIMILAR (1)..(687): 921254mologous to Cloning vector pZC320 SopA,accession number U26464,Smith-Waterman Score=1093.

SEQ ID NO: 26914 - DNA, 888 bp, Homo sapiens
  SIMILAR (843)..(875): 1001254mologous to Cloning vector pZC320 SopA,accession number U26464,Smith-Waterman Score=56.
  misc_feature (1)...(888): n = a,t,c or g
atgcccagtccggtccctgactcacgatccctgcacgtgggctccactgggggaccacaaggatttagagacaagttnttcgatatgcttcgtgatctgctcaagaacgttgatcttaaagggttcgagcttgatgtacgtattttgcttaccaaatacagcaatagtaatggctctcagtccccgtggatggaggagcaaattcgggatgcctggggaagcatggttctaaaaaatgttgtacgtgaaacggatgaagttggtaaagggatttgcgattttgggaccaccctcaaaacagtatttcgcctgttgggcaaaaccagcgtggaccgctttgtgcaactttctcaggcccagccggatctggctctgaaggggctacgtgttttgctcgtggaaggtaacgacccccagggaacagcctcaatgtatcacggatgggtaccagatcttcatattcatgcagaagacactctcctgcctttctatcttggggaaaaggacgatgtcacttatgcaataaagcccacttgctggccggggcttgacattattccttcctgtctggctctgcaccgtattgaaactgagttaatgggcaaatttgatgaaggtaaactgcccaccgatccacacctgatgctccgactggccattgaaactgttgctcatgactatgatgtcatagttattgacagcgcgcctaacctgggtatcggcacgattaatgtcgtatgtgctgctgatgtgctgattgttcccacgcctgctgagttgtttgactacacctccgcactgcagtttttcgatatgcttcgtgatctgctcaagaacgttatcttaaagggttcgagcctgatgtacgtattttggggtattctttag

SEQ ID NO: 26915 - DNA, 735 bp, Homo sapiens; identical to SEQ ID NO: 5002
  SIMILAR (1)..(471): 911254mologous to Cloning vector pZC320 SopA,accession number U26464,Smith-Waterman Score=725.

SEQ ID NO: 26916 - DNA, 1116 bp, Homo sapiens; identical to SEQ ID NO: 7376
  SIMILAR (1)..(852): 951254mologous to Cloning vector pZC320 SopA,accession number U26464,Smith-Waterman Score=1388.
  misc_feature (1)...(1116): n = a,t,c or g

SEQ ID NO: 26917 - DNA, 1176 bp, Homo sapiens; identical to SEQ ID NO: 7113
  SIMILAR (565)..(1161): 831254mologous to Cloning vector pZC320 SopA,accession number U26464,Smith-Waterman Score=842.

SEQ ID NO: 26918 - DNA, 1002 bp, Homo sapiens; identical to SEQ ID NO: 7114
  SIMILAR (28)..(744): 961254mologous to Cloning vector pZC320 SopA,accession number U26464,Smith-Waterman Score=1206.

SEQ ID NO: 26919 - DNA, 1554 bp, Homo sapiens; identical to SEQ ID NO: 13439
  SIMILAR (1554)..(1159): 871254mologous to unidentified cloning vector 29kD protein essential for the replication of mini F plasmid,accession number AB015619,Smith-Waterman Score=598.
  misc_feature (1)...(1554): n = a,t,c or g

SEQ ID NO: 26920 - DNA, 1980 bp, Homo sapiens; identical to SEQ ID NO: 25743
  SIMILAR (1791)..(1195): 951254mologous to Cloning vector pZC320 SopB,accession number U26464,Smith-Waterman Score=932.
  misc_feature (1)...(1980): n = a,t,c or g

SEQ ID NO: 26921 - DNA, 1356 bp, Homo sapiens
  SIMILAR (357)..(452): 371254mologous to unidentified cloning vector 29kD protein essential for the replication of mini F plasmid,accession number AB015619,Smith-Waterman Score=47.
  misc_feature (1)...(1356): n = a,t,c or g
atgttggccccgatccactcggtgtgggttantatcgtcggacccgcgctccactggatttgctcagactacagcgcgcctaacctgggtatcggcacgattaatgtcgtatgtgctgctgatgtgctgattgttcccacgcctgctgagttgtttgactacacctccgcactgcagtttttcgatatgcttcgtgatctgctcaagaaccttgatcttaaagggttcgagcctgatatcagaaaatctgatcgcaccctacaggaccatgacggtatctgcgagatccatgttgctaaatatgctgaaatattcgcattgacctctgcggaagccagtaaggatatacggcaggcattgaagagtttcgcggggaaggaagtggttttttatcgccctgaagaggatgccggcgatgaaaaaggctatgatcttttccttggtttatcaaacattattacccgctgtatcaacaccgccaaattgcctaaatcagttgttgctcttttttctcaccccggtgaactatctgcccggtcaggtgatgcacttcaaaaagcctttacagataaagaggaattacttaagcagcaggcatctaaccttcatgagcagaaaaaagctggggtgatatttgaagctgaagaagttatcactcttttaacttctgtgcttaaaacgtcatctgcatcaagaactagtttaagctcacgacatcagtttgctcctggagcgacagtattgtataagggcgataaaatggtgcttaacctggacagggattttgccgatttcggaaccaccatcaaacaggattttcgcctgctggggcaaaccagcgtggaccgcttgctgcaactctctcagggccaggcggtgaagggcaatcagctgttgcccgtctcactgatcagaaaatctgatggcaccctacaggaacatgacggtatctgcgagatccatgttgctaaatatgctgaaatattcggattgacctctgcggaagccatagtaatagcggccgtattcaaaccacgccaactcacggttaaatattgtatcacccaggcccaagggatcgttatgcgcgtagagaaggctcgaaccggtttacgcagtttcggttacctccacccaaaagaaatcaccaatccgtatgccatgcgtttatacgaatccctgtgtcagtatcgtaagccggatggctcaggcatcgtctctctgaaaatcgactggatcatagagcgttaccagctgcctcaaagttaccagcgtatgcctgacttccgcccccgcttcctgcaggtctgtgtaatgagatcaacagcagaaggggatcctcagagtcgccaatga

SEQ ID NO: 26922 - DNA, 1932 bp, Homo sapiens; identical to SEQ ID NO: 5205
  SIMILAR (418)..(1038): 911254mologous to unidentified cloning vector 29kD protein essential for the replication of mini F plasmid,accession number AB015619,Smith-Waterman Score=970.
  misc_feature (1)...(1932): n = a,t,c or g

SEQ ID NO: 26923 - DNA, 1749 bp, Homo sapiens; identical to SEQ ID NO: 10646
  SIMILAR (955)..(1242): 961254mologous to Cloning vector pZC320 SopA,accession number U26464,Smith-Waterman Score=482.

SEQ ID NO: 26924 - DNA, 1041 bp, Homo sapiens; identical to SEQ ID NO: 7116
  SIMILAR (1)..(930): 951254mologous to Cloning vector pZC320 SopA,accession number U26464,Smith-Waterman Score=1553.

SEQ ID NO: 26925 - DNA, 1014 bp, Homo sapiens; identical to SEQ ID NO: 7118
  SIMILAR (1)..(792): 841254mologous to Cloning vector pZC320 SopA,accession number U26464,Smith-Waterman Score=1170.

SEQ ID NO: 26926 - DNA, 1009 bp, Homo sapiens; identical to SEQ ID NO: 13444
  SIMILAR (371)..(1003): 941254mologous to unidentified cloning vector 29kD protein essential for the replication of mini F plasmid,accession number AB015619,Smith-Waterman Score=1051.

SEQ ID NO: 26927 - DNA, 1077 bp, Homo sapiens; identical to SEQ ID NO: 7120
  SIMILAR (761)..(805): 531254mologous to Cloning vector pZC320 SopA,accession number U26464,Smith-Waterman Score=43.
  misc_feature (1)...(1077): n = a,t,c or g

SEQ ID NO: 26928 - DNA, 1869 bp, Homo sapiens; identical to SEQ ID NO: 13450
  SIMILAR (1)..(603): 991254mologous to unidentified cloning vector 29kD protein essential for the replication of mini F plasmid,accession number AB015619,Smith-Waterman Score=1045.
  misc_feature (1)...(1869): n = a,t,c or g

SEQ ID NO: 26929 - DNA, 924 bp, Homo sapiens; identical to SEQ ID NO: 21685
  SIMILAR (523)..(921): 951254mologous to Cloning vector pZC320 SopB,accession number U26464,Smith-Waterman Score=622.

SEQ ID NO: 26930 - DNA, 1191 bp, Homo sapiens; identical to SEQ ID NO: 7127
  SIMILAR (7)..(693): 1001254mologous to Cloning vector pZC320 SopA,accession number U26464,Smith-Waterman Score=1205.

SEQ ID NO: 26931 - DNA, 1297 bp, Homo sapiens
  SIMILAR (1)..(894): 981254mologous to Cloning vector pZC320 SopA,accession number U26464,Smith-Waterman Score=1531.
atgaaactcatggaaacacttaaccagtgcataaacgctggtcatgaaatgacgaaggctatcgccattgcacagtttaatgatgacagcccggaagcgaggaaaataacccggcgctggagaataggtgaagcagcggatttagttggggtttcttctcaggctatcagagatgccgagaaagcagggcgactaccgcacccggatatggaaattcgaggacgggttgagcaacgtgttggttatacaattgaacaaattaatcatatgcgtgatgtgtttggtacgcgattgcgacgtgctgaagacgtatttccaccggtgatcggggttgctgcccataaaggtggcgtttacaaaacctcagtttctgttcatcttgctcaggatctggctctgaaggggctacgtgttttgctcgtggaaggtaacgacccccagggaacagcctcaatgtatcacggatgggtaccagatcttcatattcatgcagaagacactctcctgcctttctatcttggggaaaaggacgatgtcacttatgcaataaagcccacttgctggccggggcttgacattattccttcctgtctggctctgcaccgtattgaaactgagttaatgggcaaatttgatgaaggtaaactgcccaccgatccacacctgatgctccgactggccattgaaactgttgctcatgactatgatgtcatagttattgacagcgcgcctaacctgggtatcggcacgattaatgtcgtatgtgctgctgatgtgctgattgttcccacgcctgctgagttgtttgactacacctccgcactgcagtttttcgatatgcttcgtgatctgctcaagaacgttgatcttaaagggcaagaatttaatatccgcggcattgttcccgtattacgccgtgtaaaacctgacctggcgattggtattgatatcactccatcgtgtgacacccctgatttacacgattattccgaggtcaagattaatcagggcgttgggatcacctgcctgaactaccatggtcggggaacgctggccggattaatcacgcctcctcgcctgatacggatgttggaacagacggctcttgaacacaacattccggtgcagcgagaagtggctcccggcgtgataacagaaaccggttatatccaggttgagcaggatggtattccctgcgccagtctctctattccttgtcgctatacccattctccggcggaggttgccagcctgcgtgatttgactgattgcatccgcctattgaccgctctggcag

SEQ ID NO: 26932 - DNA, 1147 bp, Homo sapiens
atgaaactcatggaaacacttaaccagtgcataaacgctggtcatgaaatgacgaaggctatcgccattgcacagtttaatgatgacagcccggaagcgaggaaaataacccggcgctggagaataggtgaagcagcggatttagttggggtttcttctcaggctatcagagatgccgagaaagcagggcgactaccgcacccggatatggaaattcgaggacgggttgagcaacgtgttggttatacaattgaacaaattaatcatatgcgtgatgtgtttggtacgcgattgcgacgtgctgaagacgtatttccaccggtgatcggggttgctgcccataaaggtggcgtttacaaaacctcagtttctgttcatcttgctcaggatctggctctgaaggggctacgtgttttgctcgtggaaggtaacgacccccagggaacagcctcaatgtatcacggatgggtaccagatcttcatattcatgcagaagacactctcctgcctttctatcttggggaaaaggacgatgtcacttatgcaataaagcccacttgctggccggggcttgacattattccttcctgtctggctctgcaccgtattgaaactgagttaatgggcaaatttgatgaaggtaaactgcccaccgatccacacctgatgctccgactggccattgaaactgttgctcatgactatgatgtcatagttattgacagcgcgcctaacctgggtatcggcacgattaatgtcgtatgtgctgctgatgtgctgattgttcccacgcctgctgagttgtttgactacacctccgcactgcagtttttcgatatgcttcgtgatctgctcaagaacgttgatcttaaagggttcgagcctgataacgcagagcatgctggcttcattgtacagatggaatcctggagaatgccccacatcccctccctgctcagctccacttcacccatggtgcaacctaagatatgctccccctcagggtattcatccctggtaacccacgtgctgaagagtgcctccaaggattattgtttacagcaaacatggaagatcggccctttcacaagtgagaaaactgagacttacttaggaggaacatgggcctcttggatgataaaaaatg

SEQ ID NO: 26933 - DNA, 1026 bp, Homo sapiens; identical to SEQ ID NO: 10668
  SIMILAR (213)..(386): 911254mologous to unidentified cloning vector 29kD protein essential for the replication of mini F plasmid,accession number AB015619,Smith-Waterman Score=269.

SEQ ID NO: 26934 - DNA, 1560 bp, Homo sapiens; identical to SEQ ID NO: 13461
  SIMILAR (805)..(1557): 1001254mologous to unidentified cloning vector 29kD protein essential for the replication of mini F plasmid,accession number AB015619,Smith-Waterman Score=1309.

SEQ ID NO: 26935 - DNA, 1165 bp, Homo sapiens
  SIMILAR (1)..(894): 1001254mologous to Cloning vector pZC320 SopA,accession number U26464,Smith-Waterman Score=1557.
atgaaactcatggaaacacttaaccagtgcataaacgctggtcatgaaatgacgaaggctatcgccattgcacagtttaatgatgacagcccggaagcgaggaaaataacccggcgctggagaataggtgaagcagcggatttagttggggtttcttctcaggctatcagagatgccgagaaagcagggcgactaccgcacccggatatggaaattcgaggacgggttgagcaacgtgttggttatacaattgaacaaattaatcatatgcgtgatgtgtttggtacgcgattgcgacgtgctgaagacgtatttccaccggtgatcggggttgctgcccataaaggtggcgtttacaaaacctcagtttctgttcatcttgctcaggatctggctctgaaggggctacgtgttttgctcgtggaaggtaacgacccccagggaacagcctcaatgtatcacggatgggtaccagatcttcatattcatgcagaagacactctcctgcctttctatcttggggaaaaggacgatgtcacttatgcaataaagcccacttgctggccggggcttgacattattccttcctgtctggctctgcaccgtattgaaactgagttaatgggcaaatttgatgaaggtaaactgcccaccgatccacacctgatgctccgactggccattgaaactgttgctcatgactatgatgtcatagttattgacagcgcgcctaacctgggtatcggcacgattaatgtcgtatgtgctgctgatgtgctgattgttcccacgcctgctgagttgtttgactacacctccgcactgcagtttttcgatatgcttcgtgatctgctcaagaacgttgatcttaaagggttcgagcctgatgtacgcgggagaggaggatcaaggccagaggccctcctgcagggaaaaggtggcttctcctcagtggtagctctgggcgcaagcatcatctgtaacaagatcccaggcctggctcccagacagcgggcgatctgccagagccggcccgacgccatcatcgtcataggagaaggctcacaaatgggcctggacgagtgtcagtttcagttccgcaatggccgctggaactgctctgcactgggagagcgcaccgtcttcgggaaggagctcaaagtgg

SEQ ID NO: 26936 - DNA, 1067 bp, Homo sapiens; identical to SEQ ID NO: 7153
  SIMILAR (1)..(888): 1001254mologous to Cloning vector pZC320 SopA,accession number U26464,Smith-Waterman Score=1548.

SEQ ID NO: 26937 - DNA, 1288 bp, Homo sapiens
  SIMILAR (1)..(924): 971254mologous to Cloning vector pZC320 SopA,accession number U26464,Smith-Waterman Score=1558.
atgaaactcatggaaacacttaaccagtgcataaacgctggtcatgaaatgacgaaggctatcgccattgcacagtttaatgatgacagcccggaagcgaggaaaataacccggcgctggagaataggtgaagcagcggatttagttggggtttcttctcaggctatcagagatgccgagaaagcagggcgactaccgcacccggatatggaaattcgaggacgggttgagcaacgtgttggttatacaattgaacaaattaatcatatgcgtgatgtgtttggtacgcgattgcgacgtgctgaagacgtatttccaccggtgatcggggttgctgcccataaaggtggcgtttacaaaacctcagtttctgttcatcttgctcaggatctggctctgaaggggctacgtgttttgctcgtggaaggtaacgacccccagggaacagcctcaatgtatcacggatgggtaccagatcttcatattcatgcagaagacactctcctgcctttctatcttggggaaaaggacgatgtcacttatgcaataaagcccacttgctggccggggcttgacattattccttcctgtctggctctgcaccgtattgaaactgagttaatgggcaaatttgatgaaggtaaactgcccaccgatccacacctgatgctccgactggccattgaaactgttgctcatgactatgatgtcatagttattgacagcgcgcctaacctgggtatcggcacgattaatgtcgtatgtgctgctgatgtgctgattgttcccacgcctgctgagttgtttgactacacctccgcactgcagtttttcgatatgcttcgtgatctgctcaagaacgttgatcttaaagggttcgagcctgatgcttcatcaagaaaacaaaattattcatcaaaaaatgaaaactgtgtggaagaaacttttgaagaattgcttttaaagtataaacaaatacagttggaactagaatgcatcaataaggatgaaaaactagcattgagtagcaaagaagagaatgtgcaggaagatcctaaaacattgaacttcgaggaccaaactagcactgataatgtcagtattacaaaggattcaagtaaagaagtagctcctgaggagaaaacacaagtcaaaacttttcaggcatttgaattaaaaccactcaggcaaaaattgactttaccaggagataagaaccgtttgaaaaaagttaaagatggagcaaaaccactttccctgaaatccgacactactgattctagtcaag

SEQ ID NO: 26938 - DNA, 1377 bp, Homo sapiens
  SIMILAR (1061)..(1105): 531254mologous to Cloning vector pZC320 SopA,accession number U26464,Smith-Waterman Score=43.
atgaaactcatggaaacacttaaccagtgcataaacgctggtcatgaaatgacgaaggctatcgccattgcacagtttaatgatgacagcccggaagcgaggaaaataacccggcgctggagaataggtgaagcagcggatttagttggggtttcttctcaggctatcagagatgccgagaaagcagggcgactaccgcacccggatatggaaattcgaggacgggttgagcaacgtgttggttatacaattgaacaaattaatcatatgcgtgatgtgtttggtacgcgattgcgacgtgctgaagacgtatttccaccggtgatcggggttgctgcccataaaggtggcgtttacaaaacctcagtttctgttcatcttgctcaggatctggctctgaaggggctacgtgttttgctcgtggaaggtaacgacccccagggaacagcctcaatgtatcacggatgggtaccagatcttcatattcatgcagaagacactctcctgcctttctatcttggggaaaaggacgatgtcacttatgcaataaagcccacttgctggccggggcttgacattattccttcctgtctggctctgcaccgtattgaaactgagttaatgggcaaatttgatgaaggtaaactgcccaccgatccacacctgatgctccgactggccattgaaactgttgctcatgactatgatgtcatagttattgacagcgcgcctaacctgggtatcggcacgattaatgtcgtatgtgctgctgatgtgctgattgttcccacgcctgctgagttgtttgactacacctccgcactgcagtttttcgatatgcttcgtgatctgctcaagaacgttgatcttaaagggttcgagcctgataaaaaatggttggctggtcatgaacaatacatattttatgccaattcagaactccctaaaaacccaaggggtggactcggggtgagataccctggggggccacacaatgtgccagacaacctggattgggtccatttgctatataatgggggtcaggcaccgtgtatgaaatctaacaatgcgctcatcgtcatcctcggcaccgtcaccctggatgctgtaggcataggcttggttatgccggtactgccgggcctcttgcgggatatcgtccattccgacagcatcgccagtcactatggcgtgctgctagcgctatatgcgttgatgcaatttctatgcgcacccgttctcggagcactgtccgaccgctttggccgccgcccagtcctgctcgcttcgctacttggagccactatcgactacgcgatcatggcgaccacacccgtcctgtggatctacccactagtcaattcaccatcttgttga

SEQ ID NO: 26939 - DNA, 1030 bp, Homo sapiens
  SIMILAR (1)..(945): 941254mologous to Cloning vector pZC320 SopA,accession number U26464,Smith-Waterman Score=1532.
atgaaactcatggaaacacttaaccagtgcataaacgctggtcatgaaatgacgaaggctatcgccattgcacagtttaatgatgacagcccggaagcgaggaaaataacccggcgctggagaataggtgaagcagcggatttagttggggtttcttctcaggctatcagagatgccgagaaagcagggcgactaccgcacccggatatggaaattcgaggacgggttgagcaacgtgttggttatacaattgaacaaattaatcatatgcgtgatgtgtttggtacgcgattgcgacgtgctgaagacgtatttccaccggtgatcggggttgctgcccataaaggtggcgtttacaaaacctcagtttctgttcatcttgctcaggatctggctctgaaggggctacgtgttttgctcgtggaaggtaacgacccccagggaacagcctcaatgtatcacggatgggtaccagatcttcatattcatgcagaagacactctcctgcctttctatcttggggaaaaggacgatgtcacttatgcaataaagcccacttgctggccggggcttgacattattccttcctgtctggctctgcaccgtattgaaactgagttaatgggcaaatttgatgaaggtaaactgcccaccgatccacacctgatgctccgactggccattgaaactgttgctcatgactatgatgtcatagttattgacagcgcgcctaacctgggtatcggcacgattaatgtcgtatgtgctgctgatgtgctgattgttcccacgcctgctgagttgtttgactacacctccgcactgcagtttttcgatatgcttcgtgatctgctcaagaacgttgatcttaaaggagcaaggcctgtcattacggtggatgtctccatcttcctcccgggctccatcaacatcacagcgcctcagtgtcacgacggacagcagcctgtgaactgcctgaacgtcaccacctgcttcagcttccatggcaaacacgttccaggagagattg

SEQ ID NO: 26940 - DNA, 1344 bp, Homo sapiens
  SIMILAR (1)..(900): 991254mologous to Cloning vector pZC320 SopA,accession number U26464,Smith-Waterman Score=1563.
atgaaactcatggaaacacttaaccagtgcataaacgctggtcatgaaatgacgaaggctatcgccattgcacagtttaatgatgacagcccggaagcgaggaaaataacccggcgctggagaataggtgaagcagcggatttagttggggtttcttctcaggctatcagagatgccgagaaagcagggcgactaccgcacccggatatggaaattcgaggacgggttgagcaacgtgttggttatacaattgaacaaattaatcatatgcgtgatgtgtttggtacgcgattgcgacgtgctgaagacgtatttccaccggtgatcggggttgctgcccataaaggtggcgtttacaaaacctcagtttctgttcatcttgctcaggatctggctctgaaggggctacgtgttttgctcgtggaaggtaacgacccccagggaacagcctcaatgtatcacggatgggtaccagatcttcatattcatgcagaagacactctcctgcctttctatcttggggaaaaggacgatgtcacttatgcaataaagcccacttgctggccggggcttgacattattccttcctgtctggctctgcaccgtattgaaactgagttaatgggcaaatttgatgaaggtaaactgcccaccgatccacacctgatgctccgactggccattgaaactgttgctcatgactatgatgtcatagttattgacagcgcgcctaacctgggtatcggcacgattaatgtcgtatgtgctgctgatgtgctgattgttcccacgcctgctgagttgtttgactacacctccgcactgcagtttttcgatatgcttcgtgatctgctcaagaacgttgatcttaaagggttcgagcctgatgtacgtctgttaaagaaagtaagggtcgagaacagcatccctgcagctggagaaacacaaaatgtagaagtagcagcagggcccgctgggaaatgtgctgccgtagatgtggagcccccttcgaagcagaaggagaaggcagcctccctgaagagggacatgcccaaggtgctgcacgacagcagcaaggacagcatcaccgtctttgtcagcaacctgccctacagcatgcaggagccggacacgaagctcaggccactcttcgaggcctgtggggaggtggtccagatccgacccatcttcagcaaccgtggggatttccgaggttactgctacgtggagtttaaagaagagaaatcagcccttcaggcactggagatggaccggaaaagtgtagaagggaggccaatgtttgtttccccctgtgtggataagagcaaaaaccccgattttaag

SEQ ID NO: 26941 - DNA, 2280 bp, Homo sapiens
  SIMILAR (682)..(1386): 891254mologous to Cloning vector pZC320 SopA,accession number U26464,Smith-Waterman Score=1066.
  misc_feature (1)...(2280): n = a,t,c or g
atggtggattcgttaattgcgcccgtaggagtaatggctcgcggtaatgccattactttgcctgtacgcgccacgaatgtgaagtttactcttgaagagctccggggtgatagtgttgagaagacctctcgggtatggtcagaaaaaaaggatagaggagggcaggaggcagaagtgagcggggaagggtcgtcgcagaccaaatcactgcaaaagcggcaacactcaaatgggtcagatttcacagccaggggcttccacacgggccaggctttggtaagaagcaaagggacatactggaatccaacagggttgggactctcgcatgggacagaagaccctaacttgattggtgaggagttggatgctggggagtgggacaagaacacacgaaaggagttggcggttttaaatgtcagacgggattttgccgatttcggaaccaccatcaaacaggattttcgcctgctggggcaaaccagcgtggaccgcttgctgcaactctctcagggccaggcggtgaagggcaatcagctgttgcccgtctcactggtgaaaagaaaaaccaccctggcgcccaatacgcaaaccgcctctccccgcgcgttggccgattcattaatgcagctggcacgacaggtttcccgactggaaagcgggcagttttgggtttttgaagggggattacgtgttttggttcgtgaaagggtaaccacccccaagggaacaggcctcaatgtatcagggatggggtaccagatctttaatattcatgcagaagacactctcctgcttttctatcttggggaaaaggacgatgtcacttatgcaataaagcccacttgctggccggggcttgacattattccttcctgtctggctttgcaccgtattgaaantgagttaatgggcaaatttgatgaaggtaaactgcccaccgatccacacctgatgctccgactggccattgaaactgttgctcatgactatgatgtcatagttattgacagcgcgcctaacctgggtatcggcacgattaatgtcgtatgtgctgctgatgtgctgattgttcccacgcctgctgagttgtttgactacacctccgcactgcagtttttcgatatgcttcgtgatctgctcaagaacgttgatcttaaagggttcgagcctgatgtacgtattttgcttaccaaatacagcaatagtaatggctatcagtccccgtggatggaggagcaaattcgggatgcctggggaagcatggttctaaaaaatgttgtacgtgaaacggatgaagttggtaaaggtcagatccggatgagaactgtttttgaacaggccattgatcaacgctcttcaacaagtgcctggagaaatgctcttgcagcgaaccggtttacgcagtttcggcttagtgaaacaaaagaaatcaccaatccgtatgccatgcgtttatacgaatccctgtgtcagtatcgtaagccggatggctcaggcatcgtctctctgaaaatcgactggatcatagagcgttaccagctgcctcaaagttaccagcgtatgcctgacttccgccgccgcttcctgcaggattttcgcctgttggggcaaaccagcgtggaccgcttgctccaactctctcagggccagtcggtgaagggcaatcagctgttgcccgtctcactggtgaaaagaaaaaccaccctggcgcccaatacgcaaaccgcctctccccgcgcgttggccgattcattaatgcagctggcacgacaggtttcccgactggaaagcgggcaggattttgccgatttcggaaccaccatcaaacaggattttcgcctgctggggcaaaccagcgtggaccgcttgctgcaactctctcagggccaggcggtgaagggcaatcagctgttgcccgtctcactggtgaaaagaaaaaccaccctggcgcccaatacgcaaaccgcctctccccgcgcgttggccgattcattaatgcagctggcacgacaggtttcccgactggaaagcgggcaggattttgccgatttcggaaccaccatcaaacaggattttcgcctgctggggcaaaccagcgtggaccgcttgctgcaactctctcagggccaggcggtgaagggcaatcagctgttgcccgtctcactggtgaaaagaaaaaccaccctggcgcccaatacgcaaaccgcctctccccgcgcgttggccgattcattaatgcagctggcacgacaggtttcccgactggaaagcgggcagtga

SEQ ID NO: 26942 - DNA, 1125 bp, Homo sapiens; identical to SEQ ID NO: 13464
  SIMILAR (370)..(1122): 991254mologous to unidentified cloning vector 29kD protein essential for the replication of mini F plasmid,accession number AB015619,Smith-Waterman Score=1301.

SEQ ID NO: 26943 - DNA, 1137 bp, Homo sapiens
  SIMILAR (1)..(984): 911254mologous to Cloning vector pZC320 SopA,accession number U26464,Smith-Waterman Score=1553.
atgaaactcatggaaacacttaaccagtgcataaacgctggtcatgaaatgacgaaggctatcgccattgcacagtttaatgatgacagcccggaagcgaggaaaataacccggcgctggagaataggtgaagcagcggatttagttggggtttcttctcaggctatcagagatgccgagaaagcagggcgactaccgcacccggatatggaaattcgaggacgggttgagcaacgtgttggttatacaattgaacaaattaatcatatgcgtgatgtgtttggtacgcgattgcgacgtgctgaagacgtatttccaccggtgatcggggttgctgcccataaaggtggcgtttacaaaacctcagtttctgttcatcttgctcaggatctggctctgaaggggctacgtgttttgctcgtggaaggtaacgacccccagggaacagcctcaatgtatcacggatgggtaccagatcttcatattcatgcagaagacactctcctgcctttctatcttggggaaaaggacgatgtcacttatgcaataaagcccacttgctggccggggcttgacattattccttcctgtctggctctgcaccgtattgaaactgagttaatgggcaaatttgatgaaggtaaactgcccaccgatccacacctgatgctccgactggccattgaaactgttgctcatgactatgatgtcatagttattgacagcgcgcctaacctgggtatcggcacgattaatgtcgtatgtgctgctgatgtgctgattgttcccacgcctgctgagttgtttgactacacctccgcactgcagtttttcgatatgcttcgtgatctgctcaagaacgttgatcttaaagggttcgagcctgatattggcatgatgtacctgttcctctccttccttgaggactccgggtatatggcgcgtgcggcgtttgtgatggaccgtctgatgcaggcgctgggcttgccggggaaatcctttgtgccgctgatcgtcggtttcggttgtaacgtaccgtcggtaatgggtgcacgtacgcttgatgcaccgcgtgaacgtctgatgaccatcatgatggcaccgtttatgtcctgcggcgcgcggtatcaaagagac

SEQ ID NO: 26944 - DNA, 1884 bp, Homo sapiens
  SIMILAR (1)..(1083): 991254mologous to Cloning vector pZC320 SopA,accession number U26464,Smith-Waterman Score=1872.
atgaaactcatggaaacacttaaccagtgcataaacgctggtcatgaaatgacgaaggctatcgccattgcacagtttaatgatgacagcccggaagcgaggaaaataacccggcgctggagaataggtgaagcagcggatttagttggggtttcttctcaggctatcagagatgccgagaaagcagggcgactaccgcacccggatatggaaattcgaggacgggttgagcaacgtgttggttatacaattgaacaaattaatcatatgcgtgatgtgtttggtacgcgattgcgacgtgctgaagacgtatttccaccggtgatcggggttgctgcccataaaggtggcgtttacaaaacctcagtttctgttcatcttgctcaggatctggctctgaaggggctacgtgttttgctcgtggaaggtaacgacccccagggaacagcctcaatgtatcacggatgggtaccagatcttcatattcatgcagaagacactctcctgcctttctatcttggggaaaaggacgatgtcacttatgcaataaagcccacttgctggccggggcttgacattattccttcctgtctggctctgcaccgtattgaaactgagttaatgggcaaatttgatgaaggtaaactgcccaccgatccacacctgatgctccgactggccattgaaactgttgctcatgactatgatgtcatagttattgacagcgcgcctaacctgggtatcggcacgattaatgtcgtatgtgctgctgatgtgctgattgttcccacgcctgctgagttgtttgactacacctccgcactgcagtttttcgatatgcttcgtgatctgctcaagaacgttgatcttaaagggttcgagcctgatgtacgtattttgcttaccaaatacagcaatagtaatggctctcagtccccgtggatggaggagcaaattcgggatgcctggggaagcatggttctaaaaaatgttgtacgtgaaacggatgaagttggtaaaggtcagatccggatgagaactgtttttgaacaggccattgatcaacgctcttcaactgctgccccgatggtggattcgttaattgcgcgcgtaggagtaatggctcgcggtaatgccattactttgcctgtatgtggtcgggatgtgaagtttactcttgaagtgctccggggtgatagtgttgagaagacctctcggacaccggcgttcggtcgaagagtatctggtgtcatagacattgccgatgggagtcgccgtcgtaaagctgctgcacttaccgaaagtgattatcgtgttctggttggcgagctggatgatgagcacatgcctgcattatccccattgggtaacgattatcgcccaacaagtgcttatgaacgtggtcagcgttatgcaacccgattgcagaatgaatttgctggaaatatttctgcgctggctgatgcggaaaatatttcacgtaagattattacccgctgtatcaacaccgccaaattgcctaaatcagttgttgctcttttttctcaccccggtgaactatctgcccggtcaggtgatgcacttcaaaaagcctttacagataaagaggaattacttaagcagcaggcatctaaccttcatgagcagaaaaaagctggggtgatatttgaagctgaagaagttatcactcttttaacttctgtgcttaaaacgtcatctgcatcaatatatagtttaagctcgagacagcagtttgctcatggagcgccagtattgtataagggcgataaaatggtgcttaacctggacaggtctcgtgttccaactgagtgtatagagaaaattgaggccattcttaaggaacttgaaaagccagcaccctga

SEQ ID NO: 26945 - DNA, 1211 bp, Homo sapiens
  SIMILAR (295)..(633): 851254mologous to Cloning vector pZC320 SopA,accession number U26464,Smith-Waterman Score=509.
atgaagatgccagaaaaacatgacctgttggccgccattctcgcggcaaaggaacaaggcatcggggcaatccttgcgtttgcaatggcgtaccttcgcggcagatataatggcgttctagaggctcgaagtctgaaatcaagatgtcagcagagccatgctcttgctgaaggctctaggggagggccacctgttactggtcgatttaagtcaacctttaccgctgattcgtggaacagatactctcttccatccttaaccggaggtgggaatatcctgcattcccgaacccatcgacgaactgtttcaaggcttcttggacgtcgctggcaggaactcctgcgtgatgtgtttggtacgcgattgcgacgtgctgaagacgtattcccaccggtgatcggggttgctgcccataaaggtggcgtttacaaaacctcagtttctgttcatcttgctcaggatctggctctgaaggggctacgtgttttgctcgtggaaggtaacgacccccagggaacagcctcaatgtatcacggatgggtaccagatcttcatattcatgcagaagacactctcctgcctttctatcttggggaaaaggacgatgtcacttatgcaataaggcccccttgcggccgggcttgaccattattccttcctgtctggctctgcaccgtattgaaactgagttaatgggcaaatttgatgaaggtaaactgcccaccgatccacacctgatgctccgactggccattgaaactgttgctcatgactatgatgtcatagttattgacagcgcgcctaacctgggtatcggcacgattaatgtcgtatgtgctgctgatgtgctgattgttcccacgcctgctgagttgtttgactacacctccgcactgcagttattcgatatgcttcgtgatctgctcaagaacgttgatcttaaagggttcgagcctgatgtacgtattttgcttaccaatacagcaatagtaatggctctcagtccccgtggatggaggagcaaaatccgggatgcctggggaagcatgggtctaaaaaatgttgacgtgaaacggatgaaattgggtaaaggtcaaatccggatgagaactgtttttgaaacagccatggataaacgccttttaactggtgcctgggaaaaagcttttttttttttggaacctggcttcgaagaaaaatccaaccgctga

SEQ ID NO: 26946 - DNA, 1440 bp, Homo sapiens
  SIMILAR (340)..(1140): 961254mologous to Cloning vector pZC320 SopA,accession number U26464,Smith-Waterman Score=1341.
  misc_feature (1)...(1440): n = a,t,c or g
atgatcctaagtgaattaacacaagaacagaaaaccaaatattgcatgttcttacttataagtgggaacaaaacattgaatacacatagacataaagtgccggaactcgtccccgactttgctcaacgattggtgcaggtgcttatttcagacagaagccaggcagtaggagcaggcatttctgagcctacaagtgcagtggggtccttcccaggtctccaagagtgcagggatgcgtgggcccacagctgcagctgtgaaggtattggttggggctcttgcctgcttggtgaaacaggaggcctgggtctgcagccacagtttgggcagctgcagctgagcccagcgagcgaggaaataacccggctttggagaataggtgaagcagcggatttagttggggtttcttctcaggctatcagagatgccgagaaagcagggcgactaccgcacccggatatggaaattcgaggacgggttgagcaacgtgttggttatacaattgaacaaattaatcatatgcttgatgtgtttggtacgcgattgcgacgtgctgaagacgtatttccaccggtgatcggggttgctgcccataaaggtggcgtttacaaaacctcagtttctgttcatcttgctcaggatctggctctgaaggggctacgtgttttgctcgtggaaggtaacgacccccagggaacagcctcaatgtatcacggatgggtaccagatcttcatattcatgcagaagacactctcctgcctttctatcttggggaaaaggacgatgtcacttatgcaataaagcccacttgctggccggggcttgacattattccttcctgtctggctctgcaccgtattgaaactgagttaatgggcaaatttgatgaaggtaaactgcccaccgatccacacctgatgctccgactggccattgaaactgttgctcatgactatgatgtcatagttattgacagcgcgcctaacctgngtatcggcacgattaatgtcgtatgtgctgctgatgtgctgattgttcccacgcctgctgagttgtttgaatacaccttcgcactgcagtttttcgatatgcttcgggatctgctcaagaacgttgatcttaaaaggttcgagcctgattggtttggaaatgccagtccattcaccaagggtagactgcccgcatggaacctatatggagggcttgttaaaaatattgcttctcaggttccgccctcggggaatctaatccagtatgtcagaggcaaagcctggtctgttacgctgctgtgtgccagccactgtcctggtgtgtctgttgttggttccttcaggtgggttcttggtcttgctgacttcaagaatgaagctgcggaccttcgcggcattactgtagaagctccccctagatattctaaaaatccttctgcttcaaaatga

SEQ ID NO: 26947 - DNA, 1174 bp, Homo sapiens
  SIMILAR (1)..(894): 1001254mologous to Cloning vector pZC320 SopA,accession number U26464,Smith-Waterman Score=1557.
atgaaactcatggaaacacttaaccagtgcataaacgctggtcatgaaatgacgaaggctatcgccattgcacagtttaatgatgacagcccggaagcgaggaaaataacccggcgctggagaataggtgaagcagcggatttagttggggtttcttctcaggctatcagagatgccgagaaagcagggcgactaccgcacccggatatggaaattcgaggacgggttgagcaacgtgttggttatacaattgaacaaattaatcatatgcgtgatgtgtttggtacgcgattgcgacgtgctgaagacgtatttccaccggtgatcggggttgctgcccataaaggtggcgtttacaaaacctcagtttctgttcatcttgctcaggatctggctctgaaggggctacgtgttttgctcgtggaaggtaacgacccccagggaacagcctcaatgtatcacggatgggtaccagatcttcatattcatgcagaagacactctcctgcctttctatcttggggaaaaggacgatgtcacttatgcaataaagcccacttgctggccggggcttgacattattccttcctgtctggctctgcaccgtattgaaactgagttaatgggcaaatttgatgaaggtaaactgcccaccgatccacacctgatgctccgactggccattgaaactgttgctcatgactatgatgtcatagttattgacagcgcgcctaacctgggtatcggcacgattaatgtcgtatgtgctgctgatgtgctgattgttcccacgcctgctgagttgtttgactacacctccgcactgcagtttttcgatatgcttcgtgatctgctcaagaacgttgatcttaaagggttcgagcctgatgtacggaattattcacctctctgtccccagggtgcaaaccagggctgggcacacaggaggactgggtgcgagggagaggagaaaggcagagacctcaagcagacaccagaccatctgtgctcgtccaggcctgagtttccagaagcgtccagttcttgtcgccagagcctagtcaagctgcccaggtcccggatacgatctttgatgcttgccttcctccaaactcacacccattctttgaaacacttcatgtcaccaaacagcttgagaagtttgtttttcccag

SEQ ID NO: 26948 - DNA, 1812 bp, Homo sapiens; identical to SEQ ID NO: 21693
  SIMILAR (445)..(1140): 971254mologous to Cloning vector pZC320 SopB,accession number U26464,Smith-Waterman Score=1122.

SEQ ID NO: 26949 - DNA, 2190 bp, Homo sapiens
  SIMILAR (1)..(1083): 991254mologous to Cloning vector pZC320 SopA,accession number U26464,Smith-Waterman Score=1872.
atgaaactcatggaaacacttaaccagtgcataaacgctggtcatgaaatgacgaaggctatcgccattgcacagtttaatgatgacagcccggaagcgaggaaaataacccggcgctggagaataggtgaagcagcggatttagttggggtttcttctcaggctatcagagatgccgagaaagcagggcgactaccgcacccggatatggaaattcgaggacgggttgagcaacgtgttggttatacaattgaacaaattaatcatatgcgtgatgtgtttggtacgcgattgcgacgtgctgaagacgtatttccaccggtgatcggggttgctgcccataaaggtggcgtttacaaaacctcagtttctgttcatcttgctcaggatctggctctgaaggggctacgtgttttgctcgtggaaggtaacgacccccagggaacagcctcaatgtatcacggatgggtaccagatcttcatattcatgcagaagacactctcctgcctttctatcttggggaaaaggacgatgtcacttatgcaataaagcccacttgctggccggggcttgacattattccttcctgtctggctctgcaccgtattgaaactgagttaatgggcaaatttgatgaaggtaaactgcccaccgatccacacctgatgctccgactggccattgaaactgttgctcatgactatgatgtcatagttattgacagcgcgcctaacctgggtatcggcacgattaatgtcgtatgtgctgctgatgtgctgattgttcccacgcctgctgagttgtttgactacacctccgcactgcagtttttcgatatgcttcgtgatctgctcaagaacgttgatcttaaagggttcgagcctgatgtacgtattttgcttaccaaatacagcaatagtaatggctctcagtccccgtggatggaggagcaaattcgggatgcctggggaagcatggttctaaaaaatgttgtacgtgaaacggatgaagttggtaaaggtcagatccggatgagaactgtttttgaacaggccattgatcaacgctcttcaactgctgccccgatggtggattcgttaattgcgcgcgtaggagtaatggctcgcggtaatgccattactttgcctgtatgtggtcgggatgtgaagtttactcttgaagtgctccggggtgatagtgttgagaagacctctcgggtatggtcaggtaatgaacgtgaccaggagctgcttactgaggacgcactggatgatctcatcccttcttttctactgactggtcaacagacaccggcgttcggtcgaagagtatctggtgtcatagaaattgccgatgggagtcgccgtcgtaaagctgctgcacttaccgaaagtgattatcgtgttctggttggcgagctggatgatgagcagatggctgcattatccagattgggtaacgattatcgcccaacaagtgcttatgaacgtggtcagcgttatgcaagccgattgcagaatgaatttgctggaaatatttctgcgctggctgatgcggaaaaatatttacgtatcagtgataaacttgggaataatacagaaacatcaatgagccaaaagccttgcaaaatgaaaaggataattctagagaagagttggcagtttgaaaaatggatcatcatagtgatcttatttcattatggtgaaagttggaacctcttacgtgccgatcaacgtctcattttcgccaaaagttggcccagggcttcccggtatcaacagggacaccaggatttatttattctgcgaagtgatcttccgtcacaggtatttattcgcgataagctcatggagcggcgtaaccgtcgcacaggaaggacagagaaagcgcggatctgggaagtgacggacagaacggtcaggacctggattggggaggcggttgccgccgctgctgctgacggtgtgacgttctctgttccggtcacaccacatacgttccgccattcctatgcgatgcacatgctgtatgccggtataccgctgaaagttctgcaaagcctgatgggacataagtccatcaattcaacggaagtctacacgaaagtttttgcgctggatgtggctgcccggcaccgggtgcagtttgcgatgccggaatctgatgccgttgcaatgctatccttttaa

SEQ ID NO: 26950 - DNA, 1408 bp, Homo sapiens
  SIMILAR (1)..(960): 941254mologous to Cloning vector pZC320 SopA,accession number U26464,Smith-Waterman Score=1562.
atgaaactcatggaaacacttaaccagtgcataaacgctggtcatgaaatgacgaaggctatcgccattgcacagtttaatgatgacagcccggaagcgaggaaaataacccggcgctggagaataggtgaagcagcggatttagttggggtttcttctcaggctatcagagatgccgagaaagcagggcgactaccgcacccggatatggaaattcgaggacgggttgagcaacgtgttggttatacaattgaacaaattaatcatatgcgtgatgtgtttggtacgcgattgcgacgtgctgaagacgtatttccaccggtgatcggggttgctgcccataaaggtggcgtttacaaaacctcagtttctgttcatcttgctcaggatctggctctgaaggggctacgtgttttgctcgtggaaggtaacgacccccagggaacagcctcaatgtatcacggatgggtaccagatcttcatattcatgcagaagacactctcctgcctttctatcttggggaaaaggacgatgtcacttatgcaataaagcccacttgctggccggggcttgacattattccttcctgtctggctctgcaccgtattgaaactgagttaatgggcaaatttgatgaaggtaaactgcccaccgatccacacctgatgctccgactggccattgaaactgttgctcatgactatgatgtcatagttattgacagcgcgcctaacctgggtatcggcacgattaatgtcgtatgtgctgctgatgtgctgattgttcccacgcctgctgagttgtttgactacacctccgcactgcagtttttcgatatgcttcgtgatctgctcaagaacgttgatcttaaagggttcgagcctgataaagctactcttttacaagatcccttctatgctagtgagttcagtcctgctattggaagtcaaaagccatatagttggcccagggcttcccggtatcaacagggacaccaggatttatttattctgcgaagtgatcttccgtcacaggtatttattcgcgataagctcatggagcggcgtaaccgtcgcacaggaaggacagagaaagcgcggatctgggaagtgacggacagaacggtcaggacctggattggggaggcggttgccgccgctgctgctgacggtgtgacgttctctgttccggtcacaccacatacgttccgccattcctatgcgatgcacatgctgtatgccggtataccgctgaaagttctgcaaagcctgatgggacataagtccatcagttcaacggaagtctacacgaaggtttttgcgctggatgtggctgcccggcaccgggtgcagtttgcgatgccggagtctgatgcggttgcgatgctgaaacaattatcctgagaat

SEQ ID NO: 26951 - DNA, 1278 bp, Homo sapiens
  SIMILAR (1014)..(208): 961254mologous to Cloning vector pZC320 SopB,accession number U26464,Smith-Waterman Score=1290.
tcaacaagatggtgaattgactagtgggtagatccacaggacgggtgtggtcgccatgatcgcgtagtcgatagtggctccaagtagcgaagcgagcaggactgggcggcggccaaagcggccggacagtgctccgagaacgggtgcgcatagaaattgcatcaacgcatatagcgctagcagcacgccatattgactggcgatgccgggtgctggcttttcaagttccttaagaatggcctcaattttctctatacactcagttggaacacgagacctgtccagggtaagcaccattttatcgcccttatacaatactgtcgctccaggagcaaactgatgtcgtgagcttaaactagttcttgatgcagatgacgttttaagcacagaagttataagagtgataacttcttcagcttgaaatatcaccccagcttttttctgctcatgaaggttagatgcctgctgcttaagtaattcctctttatctgtaaaggctttttgaagtgcatcacctgaccgggcagatagttcaccggggtgagaaaaaagagcaacaactgatttaggcaatttggcggtgttgatacagcgggtaataatcttacgtgaaatattttccgcatcagccagcgcagaaatatttccagcaaattcattctgcaatcggcttgcataacgctgaccacgttcataagcacttgttgggcgataatcgttacccaatctggataatgcagccatctgctcatcatccagctcgccaaccagaacacgataatcactttcggtaagtgcagcagctttacgacggcgactcccatcggcaatttctatgacaccagatactcttcgaccgaacgccggtgtctgttgaccagtcagtagaaaagaagggatgagatcatccagtgcgtcctcagtaagcagctcctggtcacgttcattacctgaccatacccgagaggtcttctcaacactatcaccccggacacacgtgaatgttgctcttactcccataaacagaatatttatatcttgtaaatgagctatagaatcatcattgttgtgctttctgaacagcttgaaatactctatttctattttctcagggctgtggttttctggctgatggttcatccccatattttccacagtcttgaaagatactctcattttataggaacctggcaagtgaagatactgtgcccacaggactgtgctgcctggctgagacccagaccaggaaaatgagcacatttgagtgagatcaggcat

SEQ ID NO: 26952 - DNA, 1100 bp, Homo sapiens
  SIMILAR (1)..(900): 991254mologous to Cloning vector pZC320 SopA,accession number U26464,Smith-Waterman Score=1553.
atgaaactcatggaaacacttaaccagtgcataaacgctggtcatgaaatgacgaaggctatcgccattgcacagtttaatgatgacagcccggaagcgaggaaaataacccggcgctggagaataggtgaagcagcggatttagttggggtttcttctcaggctatcagagatgccgagaaagcagggcgactaccgcacccggatatggaaattcgaggacgggttgagcaacgtgttggttatacaattgaacaaattaatcatatgcgtgatgtgtttggtacgcgattgcgacgtgctgaagacgtatttccaccggtgatcggggttgctgcccataaaggtggcgtttacaaaacctcagtttctgttcatcttgctcaggatctggctctgaaggggctacgtgttttgctcgtggaaggtaacgacccccagggaacagcctcaatgtatcacggatgggtaccagatcttcatattcatgcagaagacactctcctgcctttctatcttggggaaaaggacgatgtcacttatgcaataaagcccacttgctggccggggcttgacattattccttcctgtctggctctgcaccgtattgaaactgagttaatgggcaaatttgatgaaggtaaactgcccaccgatccacacctgatgctccgactggccattgaaactgttgctcatgactatgatgtcatagttattgacagcgcgcctaacctgggtatcggcacgattaatgtcgtatgtgctgctgatgtgctgattgttcccacgcctgctgagttgtttgactacacctccgcactgcagtttttcgatatgcttcgtgatctgctcaagaacgttgatcttaaagggttcgagcctgatgtactcacactggaagctggttggatggtgtccactcacactgagcgtgggtatttctcttctagtccactgattcaaaagtcagtgtccactgggaacatcctcagagacacccccacaaactacttcaccagctatccaggcatcgctcaatccagtcaaattggacacctaatattaataatcacatatagttatgacatttgcataag

SEQ ID NO: 26953 - DNA, 2334 bp, Homo sapiens; identical to SEQ ID NO: 13478
  SIMILAR (1)..(1077): 991254mologous to Cloning vector pZC320 SopA,accession number U26464,Smith-Waterman Score=1862.

SEQ ID NO: 26954 - DNA, 1915 bp, Homo sapiens
  SIMILAR (784)..(984): 671254mologous to Cloning vector pZC320 SopB,accession number U26464,Smith-Waterman Score=210.
atgacagcccggaaagcgaggaaaataacccggcgctggagaataggtgaagcagcggatttagttggggtttcttctcaggctatcagagatgccgagaaagcagggcgactaccgcacccggatatggaaattcgaggacgggttgagcaacgtgttggttatacaattgaacaaattaatcatatgcgtgatgtgtttggtacgcgattgcgacgtgctgaagacgtatttccaccggtgatcggggttgctgcccataaaggtaacgacccccagggaacagcctcaatgtatcacggatgggtaccagatcttcatattcatgcagaagacactctcctgcctttctatcttggggaaaaggacgatgtcacttatgcaataaagcccacttgctggccggggcttgacattattccttcctgtctggctctgcaccgtattgaaactgagttaatgggcaaatttgatgaagcgcagcctaacctgggtatcggcacgattaatgtcgtatgtgctgctgatgtgctgattgttcccacgcctgctgagttgtttgactacacctccgcactgcagtttttcgatatgcttcgtgatctgctcaagaacgttgatcttaaagggttcgagcctgatgtacgtattttgcttaccaaatacagcaatagtaatggctctcagtccccgtggatggaggagcaaattcgggatgcctggggaagcatggttctaaaaaatgttgtacgtgaaacggatgaagttggtaaaggtcagatccggatgagaactgtttttgaacaggccattgatcaacgctcttcaactgatacttcgttatcgacaccagctgccccgatggtggattcgttaattgcgcgcgtaggagtaatggctcgcggtaatgccattactttgcctgtatgtggtcgggatgtgaagtttactctttgaattgttccgggggtgatagtgttaaaaagacctctcgggtatggtcaggtaatgaacgtgaccaggagctgcttactgaggacgcactggatgatctcatcccttcttttctactgactggtcaacagacaccggcgttcggtcgaagagtatctggtgtcatagaaattgccgatgggagtcgccgtcgtaaagctgctgcacttaccgaaagtgattatcgtgttctggttggcgagctggatgatgagcagatggctgcattatccagattgggtaacgattatcgcccaacaagtgcttatgaacgtggtcagcgttatgcaagccgattgcagaatgaatttgctgggaaatatttcttgcgctggctgatgcggaaaatatttcacgtaagattattacccgctgtatcaacaccgccaaattgcctaaatcagttgttgctcttttttctcaccccggtgaactatctgcccggtcaggtgatgcacttcaaaaagcctttacagataaagaggaattacttaagcagcaggcatctaaccttcatgagcagaaaaaagctggggtgatatttgaagctgaagaagttatcactcttttaacttctgtgcttaaaacgtcatctgcatcaagaactagtttaagctcacgacatcagtttgctcctggagcgacagtattgtataagggcgataaaatggtgcttaacctggacaggtctcgtgttccaactgagtgtatagagaaaattgaggccattcttaaggggggcttctacataaggtgggaggagggaagaaaacgggagtgcatctgcctggggcctgtaccggaggaagatgctcaggaggcccagcagacccaggactctctcccacctatggccccgtggcaagaccaaaggggagctctttggagctgtggcccctttgtgtcttccaaatcatattaa

SEQ ID NO: 26955 - DNA, 1077 bp, Homo sapiens
  SIMILAR (1)..(897): 991254mologous to Cloning vector pZC320 SopA,accession number U26464,Smith-Waterman Score=1554.
atgaaactcatggaaacacttaaccagtgcataaacgctggtcatgaaatgacgaaggctatcgccattgcacagtttaatgatgacagcccggaagcgaggaaaataacccggcgctggagaataggtgaagcagcggatttagttggggtttcttctcaggctatcagagatgccgagaaagcagggcgactaccgcacccggatatggaaattcgaggacgggttgagcaacgtgttggttatacaattgaacaaattaatcatatgcgtgatgtgtttggtacgcgattgcgacgtgctgaagacgtatttccaccggtgatcggggttgctgcccataaaggtggcgtttacaaaacctcagtttctgttcatcttgctcaggatctggctctgaaggggctacgtgttttgctcgtggaaggtaacgacccccagggaacagcctcaatgtatcacggatgggtaccagatcttcatattcatgcagaagacactctcctgcctttctatcttggggaaaaggacgatgtcacttatgcaataaagcccacttgctggccggggcttgacattattccttcctgtctggctctgcaccgtattgaaactgagttaatgggcaaatttgatgaaggtaaactgcccaccgatccacacctgatgctccgactggccattgaaactgttgctcatgactatgatgtcatagttattgacagcgcgcctaacctgggtatcggcacgattaatgtcgtatgtgctgctgatgtgctgattgttcccacgcctgctgagttgtttgactacacctccgcactgcagtttttcgatatgcttcgtgatctgctcaagaacgttgatcttaaagggttcgagcctgatgtaccaataagagctaactgccatcaagagccatcagtatgtcttcaagctgcatgcccagaaagctggattggttttcaaagaaagtgtttctatttttctgatgacaccaagaactggacatcaagtcagaggttttgtgactcacaagatgctgatcttgctcaggttgaaagcttccaggaactg

SEQ ID NO: 26956 - DNA, 2222 bp, Homo sapiens; identical to SEQ ID NO: 24594
  SIMILAR (1626)..(2219): 941254mologous to Cloning vector pZC320 SopA,accession number U26464,Smith-Waterman Score=964.

SEQ ID NO: 26957 - DNA, 1633 bp, Homo sapiens
  SIMILAR (169)..(345): 441254mologous to Cloning vector pZC320 SopA,accession number U26464,Smith-Waterman Score=97.
atggtcggtttaggaccaccttttgggaaaatacgaactaccatcagagaatactacaaacacctctatgtgaataaactagaaaatctagaagaaatggataaattcctcaacacatacactctcccaagactaaaccaggaagaagttgaatctctgaatagaccagtaacaggatctgaaatcgaggcaataatcaatagctttccaaccaaaaaaagtccaggaccagatggattcacagccgaattctaccagaacgtagagtctgcacctagttcgtttggttatccaatgaaccaaattaatcatatgcgtgatgtgtttggtacgcgattgcgacggtgctgaagacgtatttccaccggtgatcggggttgttgcccataaaggtggcgtttacaaaacctcagtttctgttcatcttgctcaggatctggctctgaaggggctacgtgttttgctcgtggaaggtaacgacccccagggaacagcctcaatgtatcacggatgggtaccagatcttcatattcatgcagaagacactctcctgcctttctatcttggggaaaaggacgatgtcacttatgcaataaagcccacttgctggccggggcttgacattattccttcctgtctggctctgcaccgtattgaaactgagttaatgggcaaatttgatgaaggtaaactgcccaccgatccacacctgatgctccgactggccattgaaactgttgctcatgactatgatgtcatagttattgacagcgcgcctaacctgggtatcggcacgattaatgtcgtatgtgctgctgatgtgctgattgttcccacgcctgctgagttgtttgactacacctccgcactgcagatattcgatatgcttcgtgatctgctcaagaacccacaagccgcgatcgctctcagcgacatctttcgcctgacggaactctatattgtgcggcagaccaagtgcttcacgcgctttggtggtcaggccacgcccgataatcagcggaatacggccaccagcacgcacttcatcaatcagcacgtcggttttcagttcgaaggtcgccagcagttcgccggtttcgtggttacgcacttcacctttgtacgggtaaacgtcaatcacgtcgcccatgttcaggttagagacgtcgacttctattggcagtgcacccgcgtcttccatcgtgttaaagaagatgggtgcaattttaccgtcgaggcacaaaccaccgccgcgtttgttcggcacatgtggaatatcatcggccataaaccacagaacggagttagtggcggatttacgctaagaacccgttcccacaacgttaccgacgtacgccaagcgggaaaccctttttgttgcagagctttcgatttgcttggatcggaccaaacaacaccagtgctggttttggctcaatacctctacaggccctactgtataggcctattggtgtacggcgaagttgaatttgtttgcgttttgcgatattgtgttccccctactgctacatttcctgaattcttaaaagtttattcgaagtttctaaagaccattctaatggctgtcaatgcctggtaccgtaagaataaaaaccgtggcttcaaactatga

SEQ ID NO: 26958 - DNA, 2275 bp, Homo sapiens
  SIMILAR (849)..(655): 691254mologous to Cloning vector pZC320 SopB,accession number U26464,Smith-Waterman Score=200.
ctatcctgtcgtcatggaagtgatatcgcggaaggaaaatacgatatgagtcgtctggcggcctttctttttctcaatgtatgagaggcgcattggagttatgctgtagatctcattaacacagacctgcaggaaacggcggccgaaagtcaggcctaccgcttggtaactttgaggcagctggtaacgctctatgatccagtcgattttcagagagacgatgcctgagccatccggcttacgatactgacacagggattcgtataaacgcatggcatacggattggtgatttcttttgtttcactaagccgaaactgcgtaaaccggttctgtaacccgataaagaagggaatgagatatgggttgatatgtacactgtaaagccctctggatggactgtgcacacgtttgataaaccaaggaaaaggatcatagcctttttcatcgccggcctcctcttcagggcgataaaaaaccccttccttccccgcgaaacttactcctacgacatgggggcatgaatccaggtctactgtagaggatcccctactacagacgaaggtatatgaaatcaggatggtaatgacagttgcaaaataggtgaaagcatttgctcttcctgtccaggttgaagcaccattttatcgacgataatacaatactgtcgctccaggagcaaactgatgtcgtgagcttaaactagttcttgatgcagatgacgttttaagcacagaagttaaaagagtgatactttcgtcagcctcaaatatcaccccagcttttatccggtcaataagggtaaaaggccccctgcttaagtaattcctctttatctgtaaaggctttttgaagtgcatcacctgaccgggcagatagttcaccggggtgagaaaaaagagcaacaactgatttaggcaatttggcggtgttgatacagcgggtaataatcttacgtgaaatattttccgcatcagccagcgcagaaatatttccagcaaattcattctgcaatcggcttgcataacgctgaccacgttcataagcacttgttgggcgataatcgttacccaatctggataatgcagccatctgctcatcatccagctcgccaaccagaacacgataatcactttcggtaagcgccgcagctttacgacggcgactcccatcggcaatttctatgacaccagatactcttcgaccgaacgccggtgtccgtagaatttctttagaaacccttttttgtgcgttggtcatctggaaaggcagggcatctaaaaggcgctttgctaaaactttgctgctgctaaagcgaggtgctgctatttgtcgaatataagcacgacgtgtaagtaagctgatttgatgcgcgaccagttcttcaaaaatcaatcgctgctgtgcaggatgtgagccttgattgagttgtaccatattggcatcaatcggtggttcgtgaatatagtgcagagcttcttttaattcgtagccattactgtatttggcgggcagtaattcaggtaaagcatcgctatgatgtccagtgcttcggcgaacatattcacgcaattccagcttggctggttgtatgtctgggatttctgagcgacagaggggctgcaggcagagcacagctggtagacccagacccctgcccacagcccagaccccggctgcccagggacctgtgtaagccccttctccagaccccggcaccaggccccacttctcacatgggcttccagtctcactccctgatgggctgaactctgtggactgtagaacgtccagggtggtcctgccataggcggggagaaagaaagatttagaaaatccctggtgcaaggcttccacgagcaaaacacgtagccccttcagagccagatcctgagcaagatgaacagaaactgaggttttgtaaacgccacctttatgggcagcaaccccgatcaccggtggaaatacgtcttcagcacgtcgcaatcgcgtaccaaacacatcacgcatatgattaatttgttcaattgtataaccaacacgttgctcaacccgtcctcgaatttccatatccgggtgcggtagtcgccctgctttctcggcatctctgatagcctgagaagaaaccccaactaaatccgctgcttcacctattctccagcgccgggttattttcctcgcttccgggctgtcatcattaaactgtgcaatggcgatagccttcgtcatttcatgaccagcgtttatgcactggttaagtgtttccatgagtttcat

SEQ ID NO: 26959 - DNA, 4118 bp, Homo sapiens
  SIMILAR (1)..(888): 1001254mologous to Cloning vector pZC320 SopA,accession number U26464,Smith-Waterman Score=1548.
  misc_feature (1)...(4118): n = a,t,c or g
atgaaactcatggaaacacttaaccagtgcataaacgctggtcatgaaatgacgaaggctatcgccattgcacagtttaatgatgacagcccggaagcgaggaaaataacccggcgctggagaataggtgaagcagcggatttagttggggtttcttctcaggctatcagagatgccgagaaagcagggcgactaccgcacccggatatggaaattcgaggacgggttgagcaacgtgttggttatacaattgaacaaattaatcatatgcgtgatgtgtttggtacgcgattgcgacgtgctgaagacgtatttccaccggtgatcggggttgctgcccataaaggtggcgtttacaaaacctcagtttctgttcatcttgctcaggatctggctctgaaggggctacgtgttttgctcgtggaaggtaacgacccccagggaacagcctcaatgtatcacggatgggtaccagatcttcatattcatgcagaagacactctcctgcctttctatcttggggaaaaggacgatgtcacttatgcaataaagcccacttgctggccggggcttgacattattccttcctgtctggctctgcaccgtattgaaactgagttaatgggcaaatttgatgaaggtaaactgcccaccgatccacacctgatgctccgactggccattgaaactgttgctcatgactatgatgtcatagttattgacagcgcgcctaacctgggtatcggcacgattaatgtcgtatgtgctgctgatgtgctgattgttcccacgcctgctgagttgtttgactacacctccgcactgcagtttttcgatatgcttcgtgatctgctcaagaacgttgatcttaaagggttcgagcctgatgctgaatcatgtcagggagatttaagtacattggccaatgtggttacatcattagcgaatcttggaaaaactaaagatctttctcaaaatagtaatgaaatgtctatgattgaaagcttaagcaatgatgatacctctttgtgtgaatttcaagaaatgcagaccaacggtgatgtttcaagcattactgccaaaacaagatgccatttaacagttactacgtcagccaactctgctaaatgcttagcaaatgtcaccatgtctcaccctcagagcttccccatggaatacacattggatcttacaccccttgcccccaactacaacatcatcacccaccttcaccatttacagcgttgccacccccacacaaccctcattagtggccaccatcaccactgccgccgtgctgcagccctgttagagacgacttccctcctcttcagtcctgagcaaagagacaaggaaacaccttctcaacagcctcgtgagtctagaaacacagaggtcccattcacggggcttttcccaggtaccaggagttccgttggcagtgaaagaggtgagctggtgatatgggatagtgttcacccttgttacaccgttttccatgagcaaactgaaacgttttcatcgctctggagtgaataccacgacgatttccggcagtttctacacatatattcgcaagatgtggcgtgttacggtgaaaacctggcctatttccctaaagggtttattgagaatatgtttttcttctcagccaatccctgggtgagtttcaccagttttgatttaaacgtggccaatatggacaacttcttcgcccccgttttcaccatgggcaaatattatacgcaaggcgacaaggtgctgatgccgctggcgattcaggttcatcatgccgtttgtgatggcttccatgtcggcagaatgcttaatgaattacaacagtactgcgatgagtggcagggcggggggtnaaaacatacgctcaatactcaaccggttgaagatacttcgttatcgacaccagctgccccgatggtggattcgttaattgcgcgcgtaggagtaatggctcgcggtaatgccattactttgccctgtatgtggtcgggatgtaaagtttactcttgaagtgctccggggtgatagtgttgacaagacctctcgggtatggtcaggtaatgaacgtgaccaggagctgcttactgaggacgcactggatgatctcatcccttcttttctactgactggtcaacagacaccggcgttcggtcgaagagtatctggtgtcatagaaattgccgatgggagtcgccgtcgtaaagctgctgcacttaccgaaagtgattatcgtgttctggttggcgagctggatgatgagcagatggctgcattatccagattgggtaacgattatcgcccaacaagtgcttatgaacgtggtcagcgttatgcaagccgattgcagaatgaatttgctggaaatatttctgcgctggctgatgcggaaaatatttcacgtaagattattacccgctgtatcaacaccgccaaattgcctaaatcagttgttgctcttttttctcaccccggtgaactatctgcccggtcaggtgatgcacttcaaaaagcctttacagataaagaggaattacttaagcagcaggcatctaaccttcatgagcagaaaaaagctggggtgatatttgaagctgaagaagttatcactcttttaacttctgtgcttaaaacgtcaggggattttgccgatttcggaaccaccatcaaacaggattttcgcctgctggggcaaaccagcgtggaccgcttgctgcaactctctcagggccaggcggtgaagggcaatcagctgttgcccgtctcactggtgaaaagaaaaaccaccctggcgcccaatacgcaaaccgcctctccccgcgcgttggccgattcattaatgcagctggcacgacaggtttcccgactggaaagcgggcagcataggcttggttatgccggtactgccgggcctcttgcgggatatcgtccattccgacagcatcgccagtcactatggcgtgctgctagcgctatatgcgttgatgcaatttctatgcgcacccgttctcggagcactgtccgaccgctttggccgccgcccagtcctgctcgcttcgctacttggagccactatcgactacgcgatcatggcgaccacacccgtcctgtggatctacccactaggattttgccgatttgggaccccccatcaaacaggattttcgccggttggggcaacccagcgtggaccggcttgctgcaactctctcagggcccagccggtgaagggcaatcagctgttgcccgtctcactggtgaaaagaaaaacccacccctggcgcccaatacgcaaaccgcctctccccgcgcgttggccgatttcattaatgcagcgggcacgacaggtttccccgactggaaagcgggcagtgagcgcaacgcaattaattgttgagaagccttctcgggtatggtcaggtaatgaacgtgaccagaagctgtttactaaggacgcactggatgatctcatccttttttttctactgactggtcaacagacacgggcggtcggtcgaagagtatctggtgtcatagaaattgccgatgggagtcgccgtcgtaaagctgctgcacttaccganagtgattatcgtgttctggttggcgagctggatgatgagcagatggctgcattatccagattgggtaacgattatcgcccaacaagtgcttatgaacgtggtcagcgttatgcaagccgattgcagaatgaatttgctggaaatatttctgcgctggctgatgcggaaaatatttcacgtaagattattacccgctgtatcaacaccgccaaattgcctaaatcagttgttgctcttttttctcaccccggtgaactatctgcccggtcaggtgatgcacttcaaaaagcctttacagataaagaggaattacttaagcagcaggcatctaaccttcatgagcagaaaaaagctggggtgatatttgaagctgaagaagttatcactcttttaacttctgtgcttaaaacgtcatctgcatcaagaactagtttaagctcacgacatcagtttgctcctggagcgacagtattgtggagtggatcctcaccagagagccggttttcagccctaagttga

SEQ ID NO: 26960 - DNA, 4828 bp, Homo sapiens
  SIMILAR (1217)..(1273): 521254mologous to Plasmid F Protein A,accession number M12987,Smith-Waterman Score=49.
  misc_feature (1)...(4828): n = a,t,c or g
ttaaccagtgcataaacgctggtcagtaaatgaggaaggctatccccactggcacagcttaatgattgcagcgccggaacgagggaaaaataacccggcgctgggaaatagggtaaaccaccgatataatttggggtttttttccaggcttccaaagatccgaaaaaccaggccggactccggcaccggatatggaaaatcgaaggcggggttgagcaacgtgttggttatacaattgaacaaattaatcatatgcgtgatgtgtttggtacgcgattgcgacgtgctgaagacgtatttccaccggtgatcggggttgctgcccataaaggtggcgtttacaaaacctcagtttctgttcatcttgctcaggatctggctctgaaggggctacgtgttttgctcgtggaaggtaccgacccccagggaacagcctcaatgtatcacggatgggtaccagatcttcatattcatgcagaagacactctcctgcctttctatcttggggaaaaggacgatgtcacttatgcaataaagcccacttgctggccggggcttgacattattccttcctgtctggctctgcaccgtattgaaactgagttaatgggcaaatttgatgaagnagaatccccaactgagttaatgggcaaatttgatgaaggtaaactgcccaccgatccacacctgatgctccgactggccattgaaactgttgctcatgactatgatgtcatagttattgacagcgcgcctaacctgggtatcggcacgattaatgtcgtatgtgctgctgatgtgctgattgttcccacgcctgctgagttgtttgactacacctccgcactgcagtttttcgatatgcttcgtgatctgctcaagaacgttgatcttaaagggttcgagcctgatgtacgtattttgcttaccaaatacagcaatagtaatggctctcagtccccgtggatggaggagcaaattcgggatgcctggggaagcatggttctaaaaaatgttgtacgtgaaacggatgaagttggtaaaggcatcccgaatttgctcctccatccacggggactgagagccattactattgctgtatttggtaagcaaaatacgtacatcaggctcgaaccctttaagatcaacgttcttgagcagatcacgaagcatatcgaaaaactgcagtgcggaggtgtagtcaaacaactcagcaggcgtgggaacaatcagcacatcagcagcacatacgacattaatcgtgccgatacccaggttaggcgcgctgtcaataactatgacatcatagtcatgagcaacagtttcaatggccagtcggagcatcaggctatcagagatgccgagaaagcagggcgactaccgcacccggatatggaaattcgaggacgggttgagcaacgtgttggttatacaattgaacaaattaatcatatgcgtgatgtgtttggtacgcgattgcgacgtgctgaagacgtatttccaccggtgatcggggttgctgcccataaaggtggcgtttacaaaacctcagtttctgttcatcttgctcaggatctggctctgaaggggctacgtgttttgctcgtggaaggtaacgacccccagggaacagcctcaatgtatcacggatgggtaccagatcttcatattcatgcagaagacactctcctgcctttctatcttggggaaaaggacgatgtcacttatgcaataaagcccacttgctggccggggcttgacattattccttcctgtctggctctgcaccgtattgaaactgagttaatgggcaaatttgatgaaggtaaactgcccaccgatccacacctgatgctccgactggccattgaaactgttgctcatgactatgatgtcatagttattgacagcgcgcctaacctgggtatcggcacgattaatgtcgtatgtgctgctgatgtgctgattgttcccacgcctgctgagttgtttgactacacctccgcactgcagtttttcgatatgcttcgtgatctgctcaagaacgttgatcttaaagggttcgagcctgatggggatcctctagagtcgacctgcaggcatgcaaacataatactttcaaaagataacttgtcttctgtgaatgaagagtcagatggcaagagtgaaaaagaaataggcgaccaggagggacccgtgatgctggtgtggaccagaaagcgtaatagtggagatggagacaagtggatggattcagggtctattttggagatggagctggcaggttttgttgttggattaagtggatgtagggagccaatttttagcacctggggggatcctctagagtcgacctgcaggcatgcaagcgatctaaacactccagttgaaccacgagacatgtccaggttaagcaccattttatcgcccttatacaaatactgtcgctccaggagccaaactgatgtcgtgagcttaaactagttctggatgcagatgacgttttagccacagaagttaaaagagtgataacttcttcagcttcaaatatcaccccagcttttttctgctcatgaaggttagatgcctgctgcataagtaattcctctttatctgtaaaggctttttgaagtgcatcacctgaccgggcagatagttcaccggggtgagaaaaaagagcaacaactgatttaggcaatttggcggtgttgatacagcgggtaataatcttacgtgaaatattttccgcatcagccagcgcagaaatatttccagcaaattcattctgcaatcggcttgcataacgctgaccacgttcataagcacttgttgggcgataatcgttacccaatctggataatgcagccatctgctcatcatccagctcgccaaccagaacacgataatcactttcggtaagtgcagcagctttacgacggcgactcccatcggcaatttctatgacaccagatactcttcgaccgaacgccggtgtctgttgaccagtcagtagaaaagaagggatgagatcatccagtgcgtcctcagtaagcagctcctggtcacgttcattacctgaccatacccgagaggtcttctcaacactatcaccccggagcacttcaagagtatacttcacatcccgaccacatacaggcaaagtaatggcattaccgcgagccattactccggaatagtcagtgtagaataaacggatttttccgtcagatgtaaaggttgcagaaccggaccattcttgcgtctgatctttcaggatcggatcgttggcgtcgaacttatcgctgtctttaaagacacggcccgcgtttttccagctgtcgattgagttgtcgccgaccttttgataaaacatgtagattgatgtgtcatcagcgtctttcgggcttcccgcaagagcaaacacaacgtgatagccgttgtattcagctactgttccgtcagcgttttgcagcggccagctgtcccacacatcaagtccttttgcagactcaatatttttaatcgttgattgatcgaattgaggcacttggtatttttcgttttgctgctgtttagggatcattccacagttagcgacgacatgttcaatccttgaccttgacggcaaagaatatactcgtagactcacgcgaatagtcgcatcaccaatataaagtggatccgtgatcccagtccgataatcagaccgaaaacacaagtggtatcctggtcccagactaataatcagaccgacgatacgagtaggaccgctgatcccagacgacgatacgagaggcccgtagtcacagactaataatagaccgccgatacgagatggaccatggtccccgcctaataaactggacgacgatacgatatggaccgtggtcccagtctttatggcagcaaccccgatcaccggtgtaaatacgtcttcagcacgtcgcaatcgcgtaccaaacacatcacgcatatgattaatttgttcaattgtataaccaacacgttgctcaacccgtcctcgaatttccatatccgggtgcggtagncgccctgctttctcggcatctctgatagcctgagaagaaaccccaactaaatccgctgcttcacctattctccagcgccgggttattttcctcgcttccgggctgtcatcattaaactgtgcaatggcgatagccttcgtcatttcatgaccagcgtttatgcactggttaagtgtttccatgagtttcattctgaacatcctgaccgggcagatagcttcaccggggtgagaaaaaagagcaacaactgatttaggcaatttggcggtgttgatacagcgggtaataatcttacgtgaaatattttccgcatcagccagcgcagaaatatttccagcaaattcattctgcaatcggcttgcataacgctgaccacgttcataagcacttgttgggcgataatcgttacccaatctggataatgcagccatctgctcatcatccagctcgccaaccagaacacgataatcactttcggtaagtgcagcagctttacgacggcgactcccatcggcaatttctatgacaccagatactcttcgaccgaacgccggtgtctgttgaccagtcagtagaaaagaagggatgagatcatccagtgcgtcctcagtaagcagctcctggtcacgttcattacctgaccatacccgagaggtcttctcaacactatcaccccggagcacttcaagagtaaacttcacatcccgaccacatacaggcaaagtaatggcattaccgcgagccattactcctacgcgcgcaattaacgaatccaccat

SEQ ID NO: 26961 - DNA, 2761 bp, Homo sapiens
  SIMILAR (213)..(761): 971254mologous to Cloning vector pZC320 SopA,accession number U26464,Smith-Waterman Score=942.
  misc_feature (1)...(2761): n = a,t,c or g
atgaaactcatggaaacacttaaccagtgcataaacgctggtcatgaaatgacgaaggctatcgccattgcacagtttaatgatgacagcccggaagcgaggaaaataacccggcgctggagaataggtgaagcagcggatttagttggggtttcttctcaggctatcagagatgccgagaaagcaaggccgattccggcacccggatatggaaaattcgggcccgggttgagcaacgtgttggttatacaattgaacaaattaatcatatgcgtgatgtgtttggtacgcgattgcgacgtgctgaagacgtatttccaccggtgatcggggttgctgcccataaaggtggcgtttacaaaacctcagtttctgttcatcaggctcaggatatggctctgaaggggctacgtgttttgctcgtggaaggtaacgacccccagggaacagcctcaatgtatcacggatgggtaccagatcttcatattcatgcagaagacactctcctgcctttctatcttggggaaaaggacgatgtcacttatgcaataaagcccacttgctggccggggcttgacattattccttcctgtctggctctgcaccgtattgaaactgagaaaatgggcaaatttgatgaaggtaaactgcccaccgatccacacctgatgctccgactggccattgaaactgttgctcatgactatgatgtcatagttattgacagcgcgcctaacctgggtatcggcacgattaatgtccgaatactcttcctaccttactggtctgaagattcctattcatcttataagggagaggcctcttggaagcttgtgcctcatttcccctggacttcacccaatactcctttaccctttgctgattttgctttgtatccttttgctgtgaccgatcatagctgcnacaatgaatgcctgcaggtcgactctagaggatccccccatgataaagtgagagtcaatgaggtgacaaagctgtggaagtcctggggcactggatcagtcaaggtcctgtcactcaaggcagaaccagatggcaagggagcctattggtatagaccacataaggcaacctcttggatctcggagcagagtggagaagtctggagagtgcagctgaaggagccaacagtgaatatcccacagacttgttcagaattacaactccagggtccaaacctattagaaggcaatgttctcaagtttttcgatatgcttcgtgatctgctcaagaacgttgatcttaaagggttcgagcctgatgtacgtattttgcttaccaaatacagcaatagtaatggctctcagtccccgtggatggaggagcaaattcgggatgcctggggaagcatggttctaaaaaatgttgtacgtgaaacggatgaagttggtaaagatacttcgttatcgacaccagctgccccgatggtggattcgttaattgcgcgcgtaggagtaatggctcgcggtaatgccattactttgcctgtatgtggtcgggatgtgaagtttactcttgaagtgctccggggtgatagtgttgagaagacctctcgggtatggtcaggtaatgaacgtgaccaggagctgcttactgaggacgcactggatgatctcatcccttcttttctactgactggtcaacagacaccggcgttcggtcgaagagtatctggtgtcatagaaattgccgatgggagtcgccgtcgtaaagctgctgcacttaccgaaagtgattatcgtgttctgcgctggcgagctggatgatgagcagatggctgcattatccagattgggtaacgattatcgcccaacaagtgcttatgaacgtggtcagcgttatgcaagccgattgcagaatgaatttgctggaaatatttctgcgctggctgatgcggaaaatatttcacgtaagattattacccgctgtatcaacaccgccgaattgccagggtgcgggcttgtcaagttcgttaagaatggcgtcaaatgtcacgacacacgcagttggcacacgaggcctgtccaggttaagcaccatttcatcgccctcatacaaagcagtcgctccaggagcaaaccgatgtcgtgagcataaacgagttcttgaagcagatggcgttttaagcacagaagttaaaagagtgagaacttctgcagcttcagatatcaccccagctggcttctgctcatgcagggctatcaaagatgccgagaagccaggccgactcccgcacccgtatatggaaattcgaggacgggttgagcaacgtgttggttatacaattgaacaaattaatcatatgcgtgatgtgtttggtacgcgattgcgacgtgctgaagacgtatttccaccggtgatcggggttgctgcccataaaggtggcgtttacaaaacctcagtttctgttcatcttgctcaggatctggctctgaaggggctacgtgttttgctcgtggaaggtaacgacccccagggaacagcctcaatgtatcacggatgggtaccagatcttcatattcatgcagaagacactctcctgcctttctatcttgggcaaaaggacgatgtcacttatgcaataaagcccacttgctggccggggcttgacattattccttcctgtctggctctgcaccgtattgaaactgagttaatgggcaaatttgatgaaggtaaactgcccaccgatccacacctgatgctccgactggccattgaaactgttgctcatgactaa

SEQ ID NO: 26962 - DNA, 2436 bp, Homo sapiens
  SIMILAR (1)..(915): 971254mologous to Cloning vector pZC320 SopA,accession number U26464,Smith-Waterman Score=1549.
  misc_feature (1)...(2436): n = a,t,c or g
atgaaactcatggaaacacttaaccagtgcataaacgctggtcatgaaatgacgaaggctatcgccattgcacagtttaatgatgacagcccggaagcgaggaaaataacccggcgctggagaataggtgaagcagcggatttagttggggtttcttctcaggctatcagagatgccgagaaagcagggcgactaccgcacccggatatggaaattcgaggacgggttgagcaacgtgttggttatacaattgaacaaattaatcatatgcgtgatgtgtttggtacgcgattgcgacgtgctgaagacgtatttccaccggtgatcggggttgctgcccataaaggtggcgtttacaaaacctcagtttctgttcatcttgctcaggatctggctctgaaggggctacgtgttttgctcgtggaaggtaacgacccccagggaacagcctcaatgtatcacggatgggtaccagatcttcatattcatgcagaagacactctcctgcctttctatcttggggaaaaggacgatgtcacttatgcaataaagcccacttgctggccggggcttgacattattccttcctgtctggctctgcaccgtattgaaactgagttaatgggcaaatttgatgaaggtaaactgcccaccgatccacacctgatgctccgactggccattgaaactgttgctcatgactatgatgtcatagttattgacagcgcgcctaacctgggtatcggcacgattaatgtcgtatgtgctgctgatgtgctgattgttcccacgcctgctgagttgtttgactacacctccgcactgcagtttttcgatatgcttcgtgatctgctcaagaacgttgatcttaaagggttcgagcctgatgctttgcagaactttcagcggtataccggcatacagcatgtgcatcgcataggaatggcggaacgtatgtggtgtgaccggaacagagaacgtcacaccgtcagcagcagcggcggcaaccgcctccccaatccagaacattttgaggcatttcagtcagttgctcaatgtacctataaccagaccgttcagctggatattacggcctttttaaagaccgtaaagaaaaataagcacaagttttatccggcctttattcacattcttgcccgcctgatgaatgctcatccggagttccgtatggcaatgaaagacggtgagctggtgatatgggatagtgttcacccttgttacaccgttttccatgagcaaactgaaacgttttcatcgctctggagtgaataccacgacgatttccggcagtttctacacatatattcgcaagatgtggcgtgttacggtgaaaacctggcctatttccctaaagggtttattgagaatatgtttttcgtctcagccaatccctgggtgagtttcaccagttttgatttaaacgtggccaatatggacaacttcttcgcccccgttttcaccatgggcaaatattatacgcaaggcgacaaggtgctgatgccgctggcgattcaggttcatcatgccgtttgtgatggcttccatgtcggcagaatgcttaatgaattacaacagtactgcgatgagtggcagggcggagaacacaagcatcttcagngtgacaatctaaaaacttgtcacacttcacatggatctgtcatggcggaaacagcggttatcaatcacaagaaacgtaaaaatagcccgcgaatcgtccagtcaaacgacctcactgaggcggcatatagtctctcccgggatcaaaaacgtatgctgtatctgttcgttgaccagatcagaaaatctgatggcaccctacaggaacatgacggtatctgcgagatccatgttgctaaatatgctgaaatattcggattgacctctgcggaagccagtaaggatatacggcaggcattgaagagtttcgcggggaaggaagtggttttttatcgccctgaagaggatgccggcgatgaaaaaggctatgaatcttttccttggtttatcaaacgtgcgcacagtccatccagagggctttacagtgtacatatcaacccatatctcattcccttctttatcgggttacagaaccggtttacgcagtttcggcttagtgaaacaaaagaaatcaccaatccgtatgccatgcgtttatacgaatccctgtgtcagtatcgtaagccggatggctcaggcatcgtctctctgaaaatcgaatggatcatagagcgttaccagctgcctcaaagttaccagcgtatgcctgacttccgccgccgcttcctgcaggtctgtgttaatgagatcaacagcagaactccaatgcgcctctcatacattgagaaaaagaaaggccgccagacgactcatatcgtattttccttccgcgatatcacttccatgacgacaggatag

SEQ ID NO: 26963 - DNA, 3241 bp, Homo sapiens
  SIMILAR (874)..(1770): 971254mologous to Cloning vector pBACe3.6 levansucrase,accession number U80929,Smith-Waterman Score=1554.
atgcagggcatgcaagccctagctaggacagttgatggtaaggaagaaagcctcaaccttgatcaagcttttcaatgggctggaaaaagttcttcttttgggacctgtcccaataaatttcgatcgtcgattaaccccgctggagatagaatattaagcggggcctgttatccaaaactacgtcaatactcaaccggtggagaaacttcgtattcgacaccagctgccccgatggtggattcgttaattgcgcgcgtaggagtaatggctcccggtaatgccattactttgcctgtatgtggtcgggatgtgaagtttactcttgaagtgctccggggtgatagtgttaagaagacctctcgggtatggtcaggtaatgaacgtgaccaggagctgcttactgaggacgcactggatgatctcatcccttcttttctactgactggtcaacagacaccggcgttcggtcgaagagtatctggtgtcatagaaattgccgatgggagtcgccgtcgtaaagctgctgcacttaccgaaagtgattatcgtgttctggttggcgagctggatgatgagcagatggctgcattatccagattgggtaacgattatcgcccaacaagtgcttatgaacgtggtcagcgttatgcaagccgattgcagaatgaatttgctggaaatatttctgcgctggctgatgcggaaaatatttcacgtaagattattacccgctgtatcaacaccgccaaattgcctaaatcagttgttgctcttttttctcaccccggtgaactatctgcccggtcaggtgatgcacttcaaaaagcctttacagataaagaggaattacttaagcagcaggggggatcctctagagtcggcgacaactcaatcgacagctggaaaacgcggggccgtgtctttaaagacagcgataagttcgacgccaacgatccgatcctgaaagatcagacgcaagaatggtccggttctgcaacctttacatctgacggaaaaatccgtttattctacactgactattccggtaaacattacggcaaacaaagcctgacaacagcgcaggtaaatgtgtcaaaatctgatgacacactcaaaatcaacggagtggaagatcacaaaacgatttttgacggagacggaaaaacatatcagaacgttcagcagtttatcgatgaaggcaattatacatccggcgacaaccatacgctgagagaccctcactacgttgaagacaaaggccataaataccttgtattcgaagccaacacgggaacagaaaacggataccaaggcgaagaatctttatttaacaaagcgtactacggcggcggcacgaacttcttccgtaaagaaagccagaagcttcagcagagcgctaaaaaacgcgatgctgagttagcgaacggcgccctcggtatcatagagttaaataatgattacacattgaaaaaagtaatgaagccgctgatcacttcaaacacggtaactgatgaaatcgagcgcgcgaatgttttcaaaatgaacggcaaatggtacttgttcactgattcacgcggttcaaaaatgacgatcgatggtattaactcaaacgatatttacatgcttggttatgtatcaaactctttaaccggcccttacaagccgctgaacaaaacagggcttgtgctgcaaatgggtcttgatccaaacgatgtgacattcacttactctcacttcgcaaggccgcaagccaaaagcaacaatgctatcagagatgccgagaaagcagggcgactaccgcacccggatatggaaattcgaggacgggttgagcaacgtgttggttatacaattgaacaaattaatcatatgcgtgatgtgtttggtacgcgattgcgacgtgctgaagacgtatttccaccggtgatcggggttgctgcccataaaggtggcgtttacaaaacctcagtttctgttcatcttgctcaggatctggctctgaaggggctacgtgttttgctcgtggaaggtaacgacccccagggaacagcctcaatgtatcacggatgggtaccagatcttcatattcatgcagaagacactctcctgcctttctatcttggggaaaaggacgatgtcacttatgcaataaagcccacttgctggccggggcttgacattattccttcctgtctggctctgcaccgtattgaaactgagttaatgggcaaatttgatgaaggtaaactgcccaccgatccacacctgatgctccgactggccattgaaactgttgctcatgactatgatgtcatagttattgacagcgcgcctaacctgggtatcggcacgattaatgtcgtatgtgctgctgatgtgctgattgtttccacgcctgctgaattggttgactacacctccgcacttgagttttttcgatatccttcgtgatctgctcaagaacgttgatcttaaagggttcgagcctgatgcccaagaaagatttactagggcgggcgccggagcctcctcatgcaggccccgcggggacctgctgtcgcccccgcccccgcccccgccctcgccctcttggccccggccgtctggtgatgttgtggggttcagcgccgccgccagaacggtcacggagcgcggcccccggccccctatcccgcaccttcgcagtcgcccggccgcagcgcccggctgcccggcagcacgctcagagccagcgccaccgccagcccctgcgtggcccacatcctcctcatcctcctcctcctcctcctcctcctcctcctccgctgccgccgccgaccgactgaaccgcacccgccgcgccgcaccgcctccaagaagcgactacagcagcgacggaagcggtgtgggccgccatcttgggctgataggagacgtgcggggtggacggactgcgggacatctgaaggaagggctcaaggcgcgccaagctcaaagctgggccgccactctagaccgtggagggaagcgcccgggccagatcatcggtcgaggacatggggtcgcctcagagtgggaaggccctcggggtcccccgctgccgtgggacctcctgagtggggtcccgggaatcaccagagaagcactggaggatgtttccttttcgactgccctcctttcaagtgccctcctggctgcctgccttcaaggcaggatgcgggaaccgttggctctactcagtgcaaaaaggacatgtctatag

SEQ ID NO: 26964 - DNA, 4112 bp, Homo sapiens
  SIMILAR (182)..(895): 971254mologous to Cloning vector pZC320 SopA,accession number U26464,Smith-Waterman Score=1218.
  misc_feature (1)...(4112): n = a,t,c or g
atgaaactcatggaaacacttaaccagtgcataaacgctggtcatgaaatgacgaaggctatcgccattgcacagtttaatgatgacagcccggaagcgaggaaaataacccggcgctggagaataggtgaagcagcggatttagttggggtttcttctcaggctatcagagatgccgagaaagcagggcgactaccgcaccccggatatggaaattcgaggacgggttgagcaacgtgttggttatacaattgaacaaattaatcatatgcgtgatgtgtttggtacgcgattgcgacgtgctgaagacgtatttccaccggtgatcggggttgctgcccataaaggtggcgtttacaaaacctcagtttctgttcatcttgctcaggatctggctctgaaggggctacgtgttttgctcgtggaaggtaacgacccccagggaacagcctcaatgtatcacggatgggtaccagatcttcatattcatgcagaagacactctcctgcctttctatcttggggaaaaggacgatgtcacttatgcaataaagcccacttgctggccggggcttgacattattccttcctgtctggctctgcaccgtattgaaactgagttaatgggcaaatttgatgaaggtaaactgcccaccgatccacacctgatgctccgactggccattgaaactgttgctcatgactatgatgtcatagttattgacagcgcgcctaacctgggtatcggcacgattaatgtcgtatgtgctgctgatgtgctgattgttcccacgcctgctgagttgtttgactacacctccgcactgcagtttttcgatatgcttcgtgatctgctcaagaacgttgatcttaaagggttcgagcctgatgtacgtcaggcaccgtgtatgaaatctaacaatgcgctcatcgtcatcctcggcaccgtcaccctggatgctgtaggcataggcttggttatgccggtactgccgggcctcttgcgggatatcgtccattccgacagcatcgccagtcactatggcgtgctgctagcgctatatgcgttgatgcaatttctatgcgcacccgttctcggagcactgtccgaccgctttggccgccgcccagtcctgctcgcttcgctacttggagccactatcgactacgcgatcatggcgaccacacccgtcctgtggatctacccactacttgctgaaatatcagtcctgggagtaggtaaagcgtttggtattaagnataacccatatcttcatattcatgcagaagacactctcctgcctttctatcttgggcaaaaggacgatgtcacttatgcaataaagcccacttgctggccggggcttgacattattccttcctgtctggctctgcaccgtattgaaactgagttaatgggcaaatttgatgaaggtaaactgcccaccgatccacacctgatgctccgactggccattgaaactgttgctcatgactatgatgtcatagttattgacagcgcgcctaacctgggtatcggcacgattaatgtcgtatgtgctgctgatgtgctgattgttcccacgcctgctgagttgtttgactacacctccgcactgcagtttttcgatatgcttcgtgatctgctcaagaacgttgatcttaaagggttcgagcctgatgacgatgtcacttatgcaataaagcccacttgctggccggggcttgacattattccttcctgtctggctctgcaccgtattgaaactgagttaatgggcaaatttgatgaaggtaaactgcccaccgatccacacctgatgctccgactggccattgaaactgttgctcatgactatgatgtcatagttattgacagcgcgcctaacctgggtatcggcacgattaatgtcgtatgtgctgctgatgtgctgattgttcccacgcctgctgagttgtttgactacacctccgcactgcagtttttcgatatgcttcgtgatctgctcaagaacgttgatcttaaagggttcgagcctgatgtacgtattttgcttaccaaatacagcaatagtaatggctctcagtccccgtggatggaggagcaaattcgggatgcctggggaagcatggttctaaaaaatgttgtacgtgaaacggatgaagttgggatttggctctgtgactcaagcttgtatgcaccggggtgtgacaatctaaaaacttgtcacacttcacatggatctgtcatggcggaaacagcggttatcaatcacaagaaacgtaaaaatagcccgcgaatcgtccagtcaaacgacctcactgaggcggcatatagtctctcccgggatcaaaaacgtatgctgtatctgttcgttgaccagatcagaaaatctgatggcaccctacaggaacatgacggtatctgcgagatccatgttgctaaatatgctgaaatattcggattgacctctgcggaagccagtaaggatatacggcaggcattgaagagtttcgcggggaaggaagtggttttttatcgccctgaagaggatgccggcgatgaaaaaggctatgaatcttttccttggtttatcaaacgtgcgcacagtccatccagagggctttacagtgtacatatcaacccatatctcattcccttctttatcgggttacagaaccggtttacgcagtttccgcttagtgaaacaaaagaaatcaccaatccgtatgccatgcgtttataccaattcctgtgtcagtatcggaagccggatggctcaggcatcgtctctctgaaaatcgactggatcatagagcgttaccagctgcctcaaagttaccagcgtatgcctgacttccgccgccgcttcctgcagtgcataaacgctggtcatgaaatgacgaaggctatcgccattgcacagtttaatgatgacagcccggaagcgaggaaaataacccggcgctggagaataggtgaagcagcggatttagttggggtttcttctcaggctatcagagatgccgagaaagcagggcgactaccgcacccggatatggaaattcgaggacgggttgagcaacgtgttggttatacaattgaacaaattaatcatatgcgtgatgtgtttggtacgcgattgcgacgtgctgaagacgtattttccaccgctgatcgggggttgctggccataaaggggggcggttacaaaacctcagtttctgttcatcttgctcaggatctggctctgaaggggctacgtgttttgctcgtggaaggtaacgacccccagggaacagcctcaatgtatcacggatgggtaccagatcttcatattcatgcagaagacactctcctgcctttctatcttggggaaaaggacgatgtcacttatgcaataaagcccacttgctgggccggggcttgacattattccttcctgtctggctctgcaccgtattgaaactgagttaatgggcaaatttgatgaaggtaaactgcccaccgatccacacctgatgctccgactggccattgaaactgttgctcatgactatgatgtcatagttattgacagcgcgcctaacctgggtatcggcacgattaatgtcgtatgtgctgctgatgtgctgattgttcccacgcctgctgagttgtttgactacacctccgcactgcagtttttcgatatgcttccggatctggtcaagaaccgcgatcttaaaggggtcgagcctgatgtatttattcgcgataagctcatggagcggcgtaaccgtcgcacaggaaggacagagaaagcgcggatctgggaagtgacggacagaacggtcaggacctggattggggaggcggttgccgccgctgctgctgacggtgtgacgttctctgttccggtcacaccacatacgttccgccattcctatgcgatgcacatgctgtatgccggtataccgctgaaagttctgcaaagcctgatgggacataagtccatcagttcaacggaagtctacacgaaggtttttgcgctggatgtggctgcccggcaccgggtgcagtttgcgatgccggagtctgatgcggttgcgatgctgaaacaattatcctga

SEQ ID NO: 26965 - DNA, 2323 bp, Homo sapiens
  SIMILAR (197)..(466): 961254mologous to Plasmid F Protein A,accession number M12987,Smith-Waterman Score=443.
  misc_feature (1)...(2323): n = a,t,c or g
gcaagtccctccctaggtcgggtcccgggtcggggagcgcaatgatattagtgnctaagggtgtgctcctctatactccctttggagagttgtcttatattaacacaccctcgggtttttgaaactctgcgatttggtggtccctccacattaattcgcaagnttatataaaaacccgcaaaccattgattaaggtatgttcagaatgaacctcatggaaccccttacccagtgcataaacgctggtcatgaaatgacgaaggctatcgccattgcacagtttaatgatgacagcccggaagcgaggaaaataacccggcgctggagaataggtgaagcagcggatttagttggggtttcttctcaggctatcagagatgccgagaaagcagggcgactaccgcacccggatatggaaattcgaggacgggttgagcaacgtgttggttatacaattgaacaaatttatcttagcgcgtgatgtgtttggtacgcgattgcgacgtgctgaagacgtatttccaccggtgatcggggttgctgcccataaaggtggcgtttacaaaacctcagtttctgttcatcttgctcaggatctggctctgaaggggctacgtgttttgctcgtggaaggtaacgacccccagggaacagcctcaatgtatcacggatgggtgccagatcttcatattcatgcagaagacactctcctgcctttctatcttggggaaaaggacgatgtcacttatgcaataaagcccacttgctggcctggggcttgacattattccttcctgtctggctccgcaccgtattgaaactgagttaatgaacgaaattgatgaaggtaacctgcccaccgatccacacctgatgctccgactggccattgaaactgttgctcatgactatgatgtcatagttattgacagcgcgcctaacctgggtatcggcacgattaatgtcgtatgtgctgctgatgtgctgattgttcccacgcctgctgagttgtttgactacacctccgcactgcagtttttcgatatgcttcgtgatctgctcaagaacgttgatcttaaagggttcgagcctgatctctccagcttcgctaagcaggccctgtcccaggcccagaagtctattgacagggttctggacatccaggaagaggagccgagcatctgggccgagaccattccgtatggagagccgggtatttattcgcgataagctcatggagcggcgtaaccgtcgcacaggaaggacagagaaagcgcggatctgggaagtgacggacagaacggtcaggacctggattggggaggcggttgccgccgctgctgctgacggtgtgacgttctctgttccggtcacaccacatacgttccgccattcctatgcgatgcacatgctgtatgccggtataccgctgaaagttctgcaaagcctgatgggacataagtccatcagttcaacggaagtctacacgaaggtttttgcgctggatgtggctgcccggcaccggtgtgacaatctaaaaacttgtcacacttcacatggatctgtcatggcggaaacagcggttatcaatcacaagaaacgtaaaaatagcccgcgaatcgtccagtcaaacgacctcactgaggcggcatatagtctctcccgggatcaaaaacgtatgctgtatctgttcgttgaccagatcagaaaatctgatggcaccctacaggaacatgacggtatctgcgagatccatgttgctaaatatgctgaaatattcggattgacctctgcggaagccagtaaggatatacggcaggcattgaagagtttcgcggggaaggaagtggttttttatcgccctgaagaggatgccggcgatgaaaaaggctatgaatcttttccttggtttatcaaacgtgcgcacagtccatccagagggctttacagtgtacatatcaacccatatctcattcccttctttatcgggttacagaaccggtttacgcagtttcggcttagtgaaacaaaagaaatcaccaatccgtatgccatgcgtttatacgaatccctgtgtcagtatcgtaagccggatggctcaggcatcgtctctctgaaaatcgactggatcatagagcgttaccagctgcctcaaagttaccagcgtatgcctgacttccgccgccgcttcctgcaggtctgtgttaatgagatcaacagcagaactccaatgcgcctctcatacattgagaaaaagaaaggccgccagacgactcatatcgtattttccttccgcgatatcacttccatgacgacaggatag

SEQ ID NO: 26966 - DNA, 1776 bp, Homo sapiens; identical to SEQ ID NO: 13245
  SIMILAR (1)..(948): 951254mologous to Cloning vector pZC320 SopA,accession number U26464,Smith-Waterman Score=1559.

SEQ ID NO: 26967 - DNA, 1927 bp, Homo sapiens
  SIMILAR (777)..(34): 961254mologous to Cloning vector pZC320 SopB,accession number U26464,Smith-Waterman Score=1172.
ttatttggcctcattttctctataactcagttggacacgagaactgtccaggttaagcaccattttatcgcccttatacaatactgtcgctccaggagcaaactgatgtcgtgagcttaaactagttcttgatgcagatgacgttttaagcacagaagttaaaagagtgataacttcttcagcttgaaatatcaccccagcttttttctgctcatgaaggttagatgcctgctgcttaagtaattcctctttatctgtaaaggctttttgaagtgcatcacctgaccgggcagatagttcaccggggtgagaaaaaagagcaacaactgatttaggcaatttggcggtgttgatacagcgggtaataatcttacgtgaaatattttccgcatcagccagcgcagaaatatgtccagcaaattcattctgcaatcggcttgcataacgctgaccacgttcataagcacttgttgggcgataatcgttacccaatctggataatgcagccatctgctcatcatccagctcgccaaccagaacacgataatcactttcggtaagtgcagcagctttacgacggcgactcccatcggcaatttctatgacaccagatactcttcgaccgaacgccggtgtctgttgaccagtcagtagaaaagaagggatgagatcattcagtgcgtcctcagtaagcagctcctgggcacgttcattacctgaccatacccgagaagtcttctcaacactatcacccccggaccacttcagagtaaacttccgggagatatgagtcgtctggcggcctttctttttctcaatgtatgagaggcgcattggagttctgctgttgatctcattaacacagacctgcaggaagcggcggcggaagtcaggcatacgctggtaactttgaggcagctggtaacgctctatgatccagtcgattttcaaaagaggagaatgccttgagcccatcccgggcttacggatactgacaacagggatttcgtataaacgcatggcatacggattggtgatttcttttgtttcactaagccgaaactgcgtaaaccggttctgtaacccgataaagaagaggaatgagatatgggttgatatgctcactgtaaagccctctggatggactgtgcgcacgtttgataaaccaaggaaaagattcatagcctttttcatcgccggcatcctcttcagggcgataaaaaaccacttccttccccgcgaaactcttcaatgcctgccgtatatccttactggcttccgcagaggtcaatccgaatatttcagcatatttagcaacatggatctcgcagataccgtcatgttcctgtagggtgccatcagattttctgatctggtcaacgaacagatacagcatacgtttttgatcccgggagagactatatgccgcctcagtgaggtcgtttgactggacgattcgcgggctatttttacgtttcttgtgattgataaccgctgtttccgccatgacagatccatgtgaagtgtgacaagtttttagattgtcacacagagcagacaggttgagcttcacaccagcctcaaggggtggagtgtagctgaccccagtcaaccagtggttgactttggtagaaatgaaagcaatgggtttcaattgaaatttagctgcaaggccaaaacgagtgcagctggtacttgatgtccaagccaggtttattaaagcatcaagttcttcacaaactttttgataaactgatcctccaaattctgccccatcattgacattagtgtgcagctggaagtccccagtcctgtagcccactgcaaagttattctttgtctgctttgacttggtgctgttaaagctcatctggtacccagcaagctgagccatgaattgcaagtccagcaaaatcaaagttaacat

SEQ ID NO: 26968 - DNA, 4326 bp, Homo sapiens
  SIMILAR (1255)..(2442): 961254mologous to Leishmania major probable levansucrase precursor,accession number AL160371,Smith-Waterman Score=2023.
atgaaactcatggaaacacttaaccagtgcataaacgctggtcatgaaatgacgaaggctatcgccattgcacagtttaatgatgacagcccggaagcgaggaaaataacccggcgctggagaataggtgaagcagcggatttagttggggtttcttctcaggctatcagagatgccgagaaagcagggcgactaccgcacccggatatggaaattcgaggacgggttgagcaacgtgttggttatacaattgaacaaattaatcatatgcgtgatgtgtttggtacgcgattgcgacgtgctgaagacgtatttccaccggtgatcggggttgctgcccataaaggtggcgtttacaaaacctcagtttctgttcatcttgctcaggatctggctctgaaggggctacgtgttttgctcgtggaaggtaacgacccccagggaacagcctcaatgtatcacggatgggtaccagatcttcatattcatgcagaagacactctcctgcctttctatcttggggaaaaggacgatgtcacttatgcaataaagcccacttgctggccggggcttgacattattccttcctgtctggctctgcaccgtattgaaactgagttaatgggcaaatttgatgaaggtaaactgcccaccgatccacacctgatgctccgactggccattgaaactgttgctcatgactatgatgtcatagttattgacagcgcgcctaacctgggtatcggcacgattaatgtcgtatgtgctgctgatgtgctgattgttcccacgcctgctgagttgtttgactacacctccgcactgcagtttttcgatatgcttcgtgatctgctcaagaacgttgatcttaaagggttcgagcctgatgctgaaacaagccagggagctctgggcacactggcaaatgtagtgacctcccttgccaacctaagtgaatctttgaacaacggtgacacttcagaaatccagccagaggaccagtctgcaagtgagataactcgggcatttgataccttagctaaagcacttaataccacagacagctcctcttctccaagcttggcagatgggatagacaccagtggaggagggagcatccacgtcatcagcagagaccagtcgacacccatcattgaggttgaaggccccctcctttcagacacacacgtcacatttaagtcaattcgggaggatcgaaacggcagatcgcaaaaaacagtacatacagaaggagacatgaacatgaacatcaaaaaaattgtaaaacaagccacagttctgacttttacgactgcacttctggcaggaggagcgactcaagccttcgcgaaagaaaataaccaaaaagcatacaaagaaacgtacggcgtctctcatattacacgccatgatatgctgcagatccctaaacagcagcaaaacgaaaaataccaagtgcctcaattcgatcaatcaacgattaaaaatattgagtctgcaaaaggacttgatgtgtgggacagctggccgctgcaaaacgctgacggaacagtagctgaatacaacggctatcacgttgtgtttgctcttgcgggaagcccgaaagacgctgatgacacatcaatctacatgttttatcaaaaggtcggcgacaactcaatcgacagctggaaaaacgcgggccgtgtctttaaagacagcgataagttcgacgccaacgatccgatcctgaaagatcagacgcaagaatggtccggttctgcaacctttacatctgacggaaaaatccgtttattctacactgactattccggtaaacattacggcaaacaaagcctgacaacagcgcaggtaaatgtgtcaaaatctgatgacacactcaaaatcaacggagtggaagatcacaaaacgatttttgacggagacggaaaaacatatcagaacgttcagcagtttatcgatgaaggcaattatacatccggcgacaaccatacgctgagagaccctcactacgttgaagacaaaggccataaataccttgtattcgaagccaacacgggaacagaaaacggataccaaggcgaagaatctttatttaacaaagcgtactacggcggcggcacgaacttcttccgtaaagaaagccagaagcttcagcagagcgctaaaaaacgcgatgctgagttagcgaacggcgccctcggtatcatagagttaaataatgattacacattgaaaaaagtaatgaagccgctgatcacttcaaacacggtaactgatgaaatcgagcgcgcgaatgttttcaaaatgaacggcaaatggtacttgttcactgattcacgcggttcaaaaatgacgatcgatggtattaactcaaacgatatttacatgcttggttatgtatcaggatcaactaagttaccgctgatggccactggggtcagtccttctggggaccttatgagagactgtgtaggacatacttcagaactgtcccaccaaggcccaaggaaactaggatgtttatccagcaactcttgtctgtccttggttgagagctgttctcagggcaacttacagcccacccctcatgttcctatggctggagagggatcttcaggcaaagagacacagtgccctcccttttcggccgcggcgcgtgactggtgtgacaatctaaaaacttgtcacacttcacatggatctgtcatggcggaaacagcggttatcaatcacaagaaacgtaaaaatagcccccggaatcgtccagtcaaacgacctcactgaggcggcatatagtctctcccgggatcaaaaacgtatgctgtattctgttcgttgaccagttcaaaaaatttgatggcaccctacaagaaccatgccggtatctgcgagatcccatgttgcttaaatatgttgaaatatttcggattggccctctccgaaagccagtaagaatatacggccagccattgaagagtttcgcggggaaggaagtggttttttatcgccctgaagaggatgccggcgatgaaaaaggctatgaatcttttccttggtttatcaaacgtgcgcacagtccatccagagggctttacagtgtacatatcaacccatatctcattcccttctttatcgggttacagaaccggtttacgcagtttcggcttagtgaaacaaaagaaatccccaatccgtatgccatgcgtttatacgaatccctgtgtcagtatcgtaagccggatggctcaggcatcgtctctctgaaaatcgactggatcatagagcgttaccagctgccctcaaagttaccagcgtatgcctgacttccgccgccgcttcctgcaggtctgatgttaatgagatcaacagcagaactccaatgcggcctctcattactttggaaaaaaagaggggcgccagaacactcatatcgctatcagagatgccgagaaagcagggcgactaccgcacccggatatggaaattcgaggacgggttgagcaacgtgttggttatacaattgaacaaattaatcatatgcgtgatgtgtttggtacgcgattgcgacgtgctgaagacgtatttccaccggtgatcggggttgctgcccataaaggtggcgtttacaaaacctcagtttctgttcatcttgctcaggatctggctctgaaggggctacgtgttttgctcgtggaaggtaacgacccccagggaacagcctcaatgtatcacggatgggtaccagatcttcatattcatgcagaagacactctcctgcctttctatcttggggaaaaggacgatgtcacttatgcaataaagcccacttgctggccggggcttgacattattccttcctgtctggctctgcaccgtattgaaactgagttaatgggcaaatttgatgaaggtaaactgcccaccgatccacacctgatgctccgactggccattgaaactgttgctcatgactatgatgtcatagttattgacagcgcgcctaacctgggtatcggcacgattaatgtcgtatgtgctgctgatgtgctgattgttcccacgcctgctgagttgtttgactacacctccgcactgcagtttttcgatatgcttcgtgatctgctcaagaacgttgatcttaaagggttcgagcctgatgtacgaacgggtctgtcctggtgtgaccagatgcctcgcacgtgtcagtccctgaggattcaaagacgaagtagatgctggtatgcacagctgggagacctgaagatggatcacatcacaggactctttgcagacattcaccagcaccagcctggagcccagtag

SEQ ID NO: 26969 - DNA, 4019 bp, Homo sapiens
  SIMILAR (583)..(1224): 971254mologous to Cloning vector pZC320 SopA,accession number U26464,Smith-Waterman Score=1092.
atggcggaaacagcggttatcaatcacaagaaacgtaaaaatagcccgcgaatcgtccagtcaaacgacctcactgaggcggcatatagtctctcccgggatcaaaaacgtatgctgtatctgttcgttgaccagatcagaaaatctgatggcaccctacaggaacatgacggtatctgcgagatccatgttgctaaatatgctgaaatattcggattgacctctgcggaagccagtaaggatatacggcaggcattgaagagtttcgcggggaaggaagtggttttttatcgccctgaagaggatgccggcgatgaaaaaggctatgaatcttttccttggtttatcaaacgtgcgcacagtccatccagagggctttacagtaaccggtttacgcagtttcggcttagtgaaacaaaagaaatcaccaatccgtatgccatgcgtttatacgaatccctgtgtcagtatcgtaagccggatggctcaggcatcgtctctctgaaaatcgactggatcatagagcgttaccagctgcctcaaagttaccagcgtatgcctgacttccgccgccgcttcctgcagtgcataaacgctggtcatgaaatgacgaaggctatcgccattgcacagtttaatgatgacagcccggaagcgaggaaaataacccggcgctggagaataggtgaagcagcggatttagttggggtttcttctcaggctatcagagatgccgagaaagcagggcgactaccgcacccggatatggaaattcgaggacgggttgagcaacgtgttggttatacaattgaacaaattaatcatatgcgtgatgtgtttggtacgcgattgcgacgtgctgaagacgtatttccaccggtgatcggggttgctgcccataaaggtggcgtttacaaaacctcagtttctgttcatcttgctcaggatctggctctgaaggggctacgtgttttgctcgtggaaggtaacgacccccagggaacagcctcaatgtatcacggatgggtaccagatcttcatattcatgcagaagacactctcctgcctttctatcttggggaaaaggacgatgtcacttatgcaataaagcccacttgctggccggggcttgacattattccttcctgtctggctctgcaccgtattgaaactgagttaatgggcaaatttgatgaaggcagatccttcatgcctgggcctccacccaccacccactggggcggtcaagccagtagcaggtcagcaactctctggacagagctgcgaagggcaactgaaagcctctctgccactgcccctgcagtggaactacccatgctaccctcagactaataaaggagcaaagaccctacgtgccttatgcacacctccaacaagctgtagtcgacccaaggagaggaggccacatggttcttattatgttgtacgtgtaacgggtgacgttggtaaaggtcagatccggatgagaactgttgttgaacaggccattgatcaacgctcttcaactggtgcctggagaaatgctctttctatttgggaacctgtctgcaatgaaattttctatcgtctgattaaaccacgctgggagattagatgggggaagcgtgcgcctgttattccaaaacatacgctcaatactcaaccggttgaagatacttcgttatcgacaccagctgccccgatggtggattcgttaattgcgcgcgtaggagtaatggctcgcggtaatgccattactttgcctgtatgtggtcgggatgtgaagtttactcttgaagtgctccggggtgatagtgttgagaagacctctcgggtatggtcaggtaatgaacgtgaccaggagctgcttactgaggacgcactggatgatctcatcccttcttttctactgactggtcaacagacaccggcgttcggtcgaagagtatctggtgtcatagaaattgccgatgggagtcgccgtcgtaaagctgctgcacttaccgaaagtgattatcgtgttctggttggcgagctggatgatgagcagatggctgcattatccagattgggtaacgattatcgcccaacaagtgcttatgaacgtggtcagcgttatgcaacccgaccgcagaatgaatttgctggaaatatttctgcgatggctgatgcggaaaatatttcacgtaagattattacccgctgtatcaacaccgccaaattgcctaaatcagttgttgctcttttttctcaccccggtgaactatctgcccggtcagttattgacagcgcgcctaactggggtatcggcacgattaatgtcgtatgtgctgctgatgtgctgattgttcccacgcctgctgagttgtttgactacacctccgcactgcagtttttcgatatgcttcgtgatctgctcaagaacgttgatcttaaagggttcgagcctgatgtacgtattttgcttaccaaatacagcaatagtaatggctctcagtccccgtggatggaggagcaaattcgggatggcctgggaaagcatggttctaaaaaatgttgtacgtgaaacggaatgaagttgttaaaggtcagatccggatgagaactgtttttgaacaggccattgatcaacgctcttcaactggtgcctggagaaatgctctttctatttgggaacctgtctgcaatgaaattttcgatcgtctgattaaaccacgctgggagattagataatgaagcgtgcgcctgttattccaaaacatacgctcaatactcaaccggttgaagatacttcgttatcgacaccagctgccccgatggtggattcgttaattgcgcgcgtaggagtaatggctcgcggtaatgccattactttgcctgtatgtggtcgggatgtgaagtttactcttgaagtgctccggggtgatagtgttgagaagacctctcgggtatggtcaggtaatgaacgtgaccaggagctgcttactgaggacgcactggatgatctcatcccttcttttctactgactggtcaacagacaccggcgttcggtcgaagagtatctggtgtcatagaaattgccgatgggagtcgccgtcgtaaagctgctgcacttaccgaaagtgattatcgtgttctggttggcgagctggatgatgagcagatggctgcattatccagattgggtaacgattatcgcccaacaagtgcttatgaacgtggtcagcgttatgcaagccgattgcagaatgaatttgctggaaatatttctgcgctggctgatgcggaaaatatttcacgtaagattattacccgctgtatcaacaccgccaaattgcctaaatcagttgttgctcttttttctcacccccgtcaggcaccgtgtatgaaatctaacaatgcgctcatcgtcatcctcggcaccgtcaccctggatgctgtaggcataggcttggttatgccggatctggctctgaaggggctacgtgttttgctcgtggaaggtaacgacccccagggaacagcctcaatgtatcacggatgggtaccagatcttcatattcatgcagaagacactctcctgcctttctatcttggggaaaaggacgatgtcacttatgcaataaagcccacttgctggccggggcttgacattattccttcctgtctggctctgcaccgtattgaaactgagttaatgggcaaatttgatgaaggtaaactgcccaccgatccacacctgatgctccgactggccattgaaactgttgctcatgactatgatgtcatagttattgacagcgcgcctaacctgggtatcggcacgattaatgtcgtatgtgctgctcacgccctgattgttcccacgcctgctgagttgtttgactacacctccgcactgcagtttttcgatatgcttcgtgatctgctcaagaacgttgatcttaaagggttcgagcctgatgtacgtattttgcttaccaaatacagcaatagtaatggctctcagtccccgtga

SEQ ID NO: 26970 - DNA, 7622 bp, Homo sapiens
  SIMILAR (5190)..(5435): 1001254mologous to Cloning vector pZC320 SopA,accession number U26464,Smith-Waterman Score=420.
atgaaactcatggaaacacttaaccagtgcataaacgctggtcatgaaatgacgaaggctatcgccattgcacagtttaatgatgacagcccggaagcgaggaaaataacccggcgctggagaataggtgaagcagcggatttagttggggtttcttctcaggctatcagagatgccgagaaagcagggcgactaccgcacccggatatggaaattcgaggacgggttgagcaacgtgttggttatacaattgaacaaattaatcatatgcgtgatgtgtttggtacgcgattgcgacgtgctgaagacgtatttccaccggtgatcggggttgctgcccataaaggtggcgtttacaaaacctcagtttctgttcatcttgctcaggatctggctctgaaggggctacgtgttttgctcgtggaaggtaacgacccccagggaacagcctcaatgtatcacggatgggtaccagatcttcatattcatgcagaagacactctcctgcctttctatcttggggaaaaggacgatgtcacttatgcaataaagcccacttgctggccggggcttgacattattccttcctgtctggctctgcaccgtattgaaactgagttaatgggcaaatttgatgaaggtaaactgcccaccgatccacacctgatgctccgactggccattgaaactgttgctcatgactatgatgtcatagttattgacagcgcgcctaacctgggtatcggcacgattaatgtcgtatgtgctgctgatgtgctgattgttcccacgcctgctgagttgtttgactacacctccgcactgcagtttttcgatatgcttcgtgatctgctcaagaacgttgatcttaaagggttcgagcctgatggcacacaggcaaagatgacacaaggtgaacgcaggaacgtccccaaacaagaatacatatctcgtgggtatttcacccttaaagaaaccgtgatcgatacaagcaatggaagcaggatttctttcacgactcgtataaccggcaaagacgtagtaagaaccaccagcattgtaatgctggctaaagtcactttcctgagctgtataacgatgagcgattttactttttctggctatgaattggcctgctttgtaacacactccggtctatcccgtagcgccgggcatatcctgtcgcaatgtgcaaatctcgcggcaacaaccagtgaatacttcattcacaagcctcaccgcctgatcgcggcagaaactggttatagccaatcaaccgtcgttcgtgcattccgtgaagctgtaaacaaaggaattctgtctgtagagattgttatcggcgatcaccgtgaacgtcgcgctaacctgtaccggtttacaccatcctttttggccttcgcacaacaagccaaaaatgcgctgatagaaagcaaattaaagatctcttcagcggcaaccaagtgtgacaatctaaaaacttgtcacacttcacatggatctgtcatggcggaaacagcgggttatcaatcacaagaaacgtaaaaatagcccgcgaatcgtccagtcaaacgacctcactgaggcggcatatagtctctcccgggatcaaaaacgtatgctgtatctgttcgttgaccagatcagaaaatctgatggcaccctacaggaacatgacggtatctgcgagatccatgttgctaaatatgctgaaatattcgggattgaccttcgcggaaagcaataaagaatatccgccaggcattgaagagtttcgcggggaaggaagtggttttttatcgccctgaagaggatgccggcgatgaaaaaggctatgaatcttttccttggtttatcaaacgtgcgcacagtccatccagagggctttacagtgtacatatcaacccatatctcattcccttctttatcgggttacagaaccggtttacgcagtttcggcttagtgaaacaaaagaaatcaccaatccgtatgccatgcgtttatacgaatccctgtgtcagtatcgtaagccggatggctcaggcatcgtctctctgaaaatcgactggatcatagagcgttaccagctgcctcaaagttaccagcgtatgcctgacttccgccgccgcttcctgcaggtctgtgttaatgagatcaacagcagaactccaatgcgcctctcatacattgagaaaaagaaaggccgccagacgactcatatctttttcgatatgcttcgtgatctgctcaagaacgttgatcttaaagggttcgagcctgatgtacgtattttgcttaccaaatacagcaatagtaatggctctcagtccccgtggatggaggagcaaattcgggatgcctggggaagcatggttctaaaaaatgttgtacgtgaaacggatgaagttggtaaagatacttcgttatcgacaccagctgccccgatggtggattcgttaattgcgcgcgtaggagtaatggctcgcggtaatgccattactttgcctgtatgtggtcgggatgtgaagtttactcttgaagtgctccggggtgatagtgttgagaagacctctcgggtatggtcaggtgctgtatcccagggaggtgagagttttatctatatgcccctgactggggctgctgcctttctttcagagatgccctgcccagagaggaggaatctaaagaagcagtgtggctacagtggctttgctgcatgcggttatcaatcacaagaaacgtaaaaatagcccgcgaatcgtccagtcaaacgacctcactgaggcggcatatagtctctcccgggatcaaaaacgtatgctgtatctgttcgttgaccagatcagaaaatctgatggcaccctacaggaacatgacggtatctgcgagatccatgttgctaaatatgctgaaatattcggattgacctctgcggaagccagtaaggatatacggcaggcattgaagagtttcgcggggaaggaagtggttttttatcgccctgaagaggatgccggcgatgaaaaaggctatgaatcttttccttggtttatcaaacgtgcgcacagtccatccagagggctttacagtgtacatatcaacccatatctcattcccttctttatcgggttacagaaccggtttacgcagtttcggcttagtgaaacaaaagaaatcaccaatccgtatgccatgcgtttatacgaatccctgtgtcagtatcgtaagccggatggctcaggcatcgtctctctgaaaatcgactggatcatagagcgttaccagctgcctcaaagttaccagcgtatgcctgacttccgccgccgcttcctgcaggtctgtgttaatgagatcaacagcagaactccaatgcgcctctcatacattgagaaaaagaaaggccgccagacgactcatatctttaatgatgacagcccggaagcgaggaaaataacccggcgctggagaataggtgaagcagcggatttagttggggtttcttctcaggctatcagagatgccgagaaagcagggcgactaccgcacccggatatggaaattcgaggacgggttgagcaacgtgttggttatacaattgaacaaattaatcatatgcgtgatgtgtttggtacgcgattgcgacgtgctgaagacgtatttccaccggtgatcggggttgctgcccataaaggtggcgtttacaaaacctcagtttctgttcatcttgctcaggatctggctctgaaggggctacgtgttttgctcgtggaaggtaacgacccccagggaacagcctcaatgtatcacggatgggtaccagatcttcatattcatgcagaagacactctcctgcctttctatcttggggaaaaggacgatgtcacttatgcaataaagcccacttgctggccggggcttgacattattccttcctgtctggctctgcaccgtattgaaactgagttaatgggcaaatttgatgaaggtaaactgcccaccgatccacacctgatgctccgactggccattgaaactgttgctcatgactatgatgtcatagttattgacagcgcgcctaacctgggtatcggcacgattaatgtcgtatgtgctgctgatgtgctgattgttcccacgcctgctgagttgtttgactacacctccgcactgcagtttttcgatatgcttcgtgatctgctcaagaacgttgatcttaaagggttcgagcctgatgtacgtattttgcttaccaaatacagcaatagtaatggctctcagtccccgtggatggaggagcaaattcgggatgcctggggaagcatggttctaaaaaatgttgtacgtgaaacgaatgaagttggtaaagctgccccgatggtggattcgttaattgcgcgcgtaggagtaatggctcgcggtaatgccattactttgcctgtatgtggtcgggatgtgaagtttactcttgaagtgctccggggtgatagtgttgagaagacctctcgggtatggtcaggtaatgaacgtgaccaggagctgcttactgaggacgcactggatgatctcatcccttcttttctactgactggtcaacagacaccggcgttcggtcgaagagtatctggtgtcatagaaattgccgatgggagtcgccgtcgtaaagctgctgcacttaccgaaagtgattatcgtgttctggttggcgagctggatgatgagcagatggctgcattatccagattgggtaacgattatcgcccaacaagtgcttatgaacgtggtcagcgttatgcaagccgattgcagaatgaatttgctggaaatatttctgcgctggctgatgcggaaaatatttcacgtaagattattacccgctgtatcaacaccgccaaattgcctaaatcagttgttgctcttttttctcaccccggtgaactatctgcccggtcaagaagcttgcatgcctgcaggcatatggtgcaagctgttggtagatctaccattctggggtctggagcacagtggctcttctctcacagcttcactaggcagtggcccaagtggcactttgtgtgagggctccaaccccacgtttgccttctgcactgcccttgtagaagtttttcataagggctccattcctgcagtagacttctgcctggacatccaggtcgactctagaggatcccctttcgatatgcttcgtgatctgctcaagaacgttgatcttaaagggttcgagcctgatgtacgtattttgcttaccaaatacagcaatagtaatggctctcagtccccgtggatggaggagcaaattcgggatgcctggggaagcatggttctaaaaaatgttgtacgtgaaacggatgaagttggtaaaggtcagatccggatgagaactgtttttgaacaggccattgatcaacgctcttcaactgatacttcgttatcgacaccagctgccccgatggtggattcgttaattgcgcgcgtaggagtaatggctcgcggtaatgccattactttgcctgtatgtggtcgggatgtgaagtttactcttgaagtgctccggggtgatagtgttgagaagacctctcgggtatggtcaggtaatgaacgtgaccaggagctgcttactgaggacgcactggatgatctcatcccttcttttctactgactggtcaacagacaccggcgttcggtcgaagagtatctggtgtcatagaaattgccgatgggagtcgccgtcgtaaagctgctgcacttaccgaaagtgattatcgtgttctggttggcgagctggatgatgcgactctagaggatccccttttcttaatccagtctatcattgttggacatttggattggttccaagtctttgctattgtgaataatgccgcaataaacatattgatcttatttcattatggtgaaagttggaacctcttacgtgccgatcaacgtctcattttcgccaaaagttggcccagggcttcccggtatcaacagggacaccaggatttatttattctgcgaagtgatcttccgtcacaggtatttattcgcgataagctcatggagcggcgtaaccgtcgcacaggaaggacagagaaagcgcggatctgggaagtgacggacagaacggtcaggacctggattggggaggcggttgcgccgctgctgctgacgtgtgacaatctaaaaacttgtcacacttcacatggatctgtcatggcggaaacagcggttatcaatcacaagaaacgtaagtttagcccgcgaatcgtccagtcaaacgacctcactgaggcggcatatagtctctcccgggatcaaaaacgtatgctgtatctgttcgttgaccagatcagaaaatctgatggcaccctacaggaacatgacggtatctgcgagatccatgttgctaaatatgctgaaatattcggattgacctctgcggaagccagtaaggatatacggcaggcattgaagagtttcgcggggaaggaagtggttttttatcgccctgaagaggatgccggcgatgaaaaaggctatgaatcttttccttggtttatcaaacgtgcgcacagtccatccagagggctttacagtgtacatatcaacccatatctcattcccttctttatcgggttacagaaccggtttacgcagtttcggcttagtgaaacaaaagaaatcaccaatccgtatgccatgcgtttatacgaatccctgtgtcagtatcgtaagccggatggctcaggcatcgtctctctgaaaatcgactggatcatagagcgttaccagctgcctcaaagttaccagcgtatgcctgacttccgccgccgcttcctgcaggtctgtgttaatgagatcaacagcagaactccaatgcgcctctcatacattgagaaaaagaaaggccgccagacgactcatatctgtgacaatctaaaaacttgtcacacttcacatggatctgtcatggcggaaacagcggttatcaatcacaagaaacgtaaaaatagcccgcgaatcgtccagtcaaacgacctcactgaggcggcatatagtctctcccgggatcaaaaacgtatgctgtatctgttcgttgaccagatcagaaaatctgatggcaccctacaggaacatgacggtatctgcgagatccatgttgctaaatatgctgaaatattcggattgacctctgcggaagccagtaaggatatacggcaggcattgaaaagtttcgcggggaaagaagtggttttttatcgccctgaagaggatgccggcgatgaaaaaggctatgaatcttttccttggtttatcaaacgtgcgcacagtccatccagagggctttacagtgtacatatcaacccatatctcattcccttctttatcgggttacagaaccggtttacacaatttcggcttattgaaacaaaagaaatcaccaatccgtatgccatgcgtttatacaaatccctgtgtcaatatcgtaaaccggatggctcaaggcatctctctttgaaaatcgactggatcatagagcggttccagctgccctcaaattaccaaccgatgcctgactttccccgccgtttcctgcaggtatga

SEQ ID NO: 26971 - DNA, 2099 bp, Homo sapiens
  SIMILAR (656)..(916): 601254mologous to unidentified cloning vector 29kD protein essential for the replication of mini F plasmid,accession number AB015619,Smith-Waterman Score=218.
gcctctaaagggttcttcttttttaaaaggcgccttgtaaggcctttatccatgttgtttttagagaaaggtgttgtgacaaattgcccccttccagtggtgccaaaatcaccctccaaatgaccagtcctgtcttgtgaccaaattcccctttacccctggtaccaaattgccctcagaagaagctgttttttcacaaagttatcccctgcttattgactcttttttatttagtgtgacattctaaaaaacttgtcacactttcacatggatctgtcatggcggaaacagcggttatcaatcacaagaaacgtaaaaatagcccgcgaatcgtccagtcaaacgacctcactgaggcggcatatagtctctcccgggatcaaaaacgtatgctgtatctgttcgttgaccagatcagaaaatctgatggaaccctacctgaacatgacggcttctgctatatccatgttgctcaatctgctgaaataaccggattgacctctgcggaatccagtaaggatatacggcaggcattgaagagtttcgcggggaaggaaagtggttctttatcgccctgaagaggatgccggcgatgaaaaaggctatgaatcttttccttgggttatcaaacgggcgcacaggccatccagagggcttttcagtggacatattccccccatatctcattcccttctttatcggggtacagaacccggttaacgcagttttcggcttagggaaacaaaagaaatcacccatccgtatgccatggcgttattacaaatccctgggtcaggatcggaaggccggatggctcaggccatcgtctcttcttaaaatcgactggatcatagagcgttaccagctgcctcaaagttaccagcgtatgcctgacttccgccgccgcttcctgcagcattttctggctcatgctggctgtcccaaaggcacccagaacttcacgtttagaatgaaatttatcatcttctccattaaaaaagttttacctcctgttgacacaatcttagctcatgaccccgttatccatacttgtcatctgagagagtcctttggtagtgtctctccttcatctccaaaatctaatcggttaccatgccctgaagtgatcttatttcattatggtgaaagttggaacctcttacgtgccgatcaacgtctcattttcgccaaaagttggcccagggcttcccggtatcaacagggacaccaggatttatttattctgcgaagtgatcttccgtcacaggtatttattcgcgataagctcatggagcggcgtaaccgtcgcacaggaaggacagagaaggcgcggatttggggaagtgacggacagaacggtcaggaacctggatatgtcgaggcgggttgcccgccgctgctgctgacggtgtgacgttctctgttccggtcacaccacatacgttccgccattcctatgcgatgcacatgctgtatgcccggtataccgctgaaaggtctgcaaagcctgatgggacataagtgcatcaggtcaacgggaaggctaccccaaaggtttttgggcctggaatggggcttgcccgggcacccggggggcaggttggcaatggccgaagtctgatgcggttgggaatgcctaaaacaataaccttgggataaatggccttggccttatattggaaatgggaaaccggaggggatatgctgtttttgtctgttaaacagaagaagctgggctgttatccccttgagaagcgaacgaaacaggccgggaaaatctcccattattgcgaagaatcccgtttattattcttaggagcctgtgtagcgtttataggaaagaatggttctgtcatgatgcctgcaagccggtaacgaaaacgatttgaatatgccttcaggaacaatagaaatcttcgtgcggtgttacgttgaagtggagcggattatgtcagcaatggacagaacaacctaatgaacacagaaccatgatgtggtctgtccttttacagccagtagtgctcgccgcagtccagcgacagggcgaagccctcgagtgagcgagggagcacccaggaacagcacttatatattctggg

SEQ ID NO: 26972 - DNA, 6475 bp, Homo sapiens
  SIMILAR (46)..(747): 501254mologous to Streptomyces noursei NysC,accession number AF263912,Smith-Waterman Score=522.
  misc_feature (1)...(6475): n = a,t,c or g
atggcgcaacgccctatgaggaaactgaggctcagggaaagtaataacggccagggttcgcggcttgacgatccgatcgaggcgcaggcgctgatcgccacctacggccgtgatcgtgatcctggccggccgttgtggttggggtcggtcaagtcgaacatcggtcatacgcaagcggcggcgggtgtggctggtgtgatcaagatggtgatggcgatgcggcacgggcagctgccacgcacgttgcacgtggaatcgccgtcgccggaggtggattggtcggcggggacggttcaactccttacggagaacacgccctggcccaggagtggtcgtgttcgtcgggtgggggtgtcgtcgttcgggatcagtggtactaacgcgcacgtcatcctcgaacagcccccgggagtgccgagacccgctatggcaatccgggacagtttccctctttgcccgcctcctgctgaggccttcaacacctctggaggaagggctgctacagtcaagtcttcaggagaaagcaagaagggaccagtctctacggatgtgcctagtcatccctcggtatccacaggggatgggttccaggacctcatgggtaccaaatccaaggatgccaagttccttcggcatattttcgaacggttgttgggtgaatctgtggctatcagagatgccgagaaagcagggcgactaccgcacccggaatatggaaattcgaggacggggttaagcacggtgttggttatccaattgaccaaaattaatcatatcgcgtgatgtgtttggtacgcgattgcgacgtgctgaagactgtatttccaccggtgatcggggttgctgcccataaaggtggcgtttacaaatcctcagtttctggttcatcttgctcaggatctggctctgaaggggttacgtgttttgctcgtgaaaggtaccgcccccccagggaaacagcctcaatggtatcgcgggagggggacccagctcttcataatcagtgcagaacacagctcttatgccttttatatcttggggacaaggacgatgtcacttatgcaataaagcccacttgctggccggggcttgacattattccttcctgtctggctctgccccgtattgaaactgagttaaatgggcaaatttgatgaaaggtaacttgccccccgatccacacctgatgctccgactggccattgaaactgttgctcatgctcatgactatgatgtcatagttattggacagcgcgcgctaacctgggtatcggcacgattaatgtcgtatcgcccccctgatgtgctgacccgttcccacgcctgcttgagctatgtttgattacgcctccgcactggcagttttttgactattcttcgtgatctgctcaagaacgcgtgatcttaaaaggggtcaaccctcgtgtcccttttttgctttacccaatccagcaatagtaatggaatctcagtccccctggatggacacatcacgcacncnntaaataaaactaaagcaagagtttcaggggaaaaatactacactttgtgttatagtatccctgcatgctggcagggagactcgagaggatctcctttgagcataggctttttcctgtttgatattacaaccctaaggtcgactctagaggatcccctggagctgcctgccagtcctgcgacatctgcaggcactcctcagctcttgggtgatcgatgggactgggcgccgcgaacaggggcggccgtcgtcagggacgctcgtgtggcacaggagcccatggaggagggggaggctcaggcacggtgggctgcaggtcccgagccctgccccatggggacgcagctaaggcccggcgagaaattgagtgcagcaccggtggtccagcactgctgggggacccacacaccctccgcagctgctggcccgggtgctaagcccctcattgcccggggctggtggggctggcagggctggctagccgctccgagtgcaggcccgccaagcccactcccacctggaactccagctggcccgcaagccccgtgtgcagccccggttcccgcttgcgcctctccctccacacctccctgcaatctgagggagccggctctggccttggacagcccagaaaggggctcccacagtgcagcggtcgacactagaggatccccgtggacaagctggccgctgcaaaacgctgacggaacagtagctgaatacaacggctatcacgttgtgtttgctcttgcgggaagcccgaaagacgctgatgacacatcaatctacatgttttatcaaaaggtcggcgacaactcaatcgacagctggaaaaacgcgggccgtgtctttaaagacagcgataagttcgacgccaacgatccgatcctgaaagatcagacgcacgaatggtccggttctgcaccctttacatctgacggaaaaatccgtttattctacactgactattccggtaaacattacggcaaacaaagcctgacaacagcgcaggtaaatgtgtcaaaatctgatgacacactcaaaatcaacggagtggaagatcacaaaacgatttttgacggagacggaaaaacatatcagaacgttcagcagtttatcgatgaaggcaattatacatccggcgacaaccatacgctgagagaccctcactacgttgaagacaaaggccataaataccttgtattcgaagccaacacgggaacagaaaacggataccaaggcgaagaatctttatttaacaaagcgtactacggcggcggcacgaacttcttccgtaaagaaagccagaagcttcagcagagcgctaaaaaacgcgatgctgagttagcgaacggcgccctcggtatcatagagttaaataatgattacacattgaaaaaagtaatgaagccgctgatcacttcaaacacggtaactgatgaaatcgagcgcgcgaatgttttcaaaatgaacggcaaatggtacttgttcactgattcacgcggttcaaaaatgacgatcgatggatgccagcctacgtgttctgaggctttgcagaactttcaacggtataccggcatacagcatgtgcatcgcataggaatggcggaacgtatgtggtgtgaccggaacagagaacgtcacaccgtcagcagcagcggcggcacccgcctccccaatccaggtcctgcccgttctgaacattttgaggcatttcagtcagttgctcaatgtacctataaccagaccgttcagctggatattacggcctttttaaagaccgtaaagaaaaataagcacaagttttatccggcctttattcacattcttgcccgcctgatgaatgctcatccggagttccgtatggcaatgaaagacggtgagctggtgatatgggatagtgttcacccttgttacaccgttttccatgagcaaactgaaacgttttcatcgctctggagtgaataccacgacgatttccggcagtttctacacatatattcgcaagatgtggcgtgttacggtgaaaacctggcctatttccctaaagggtttattgagaatatgtttttcgtctcagccaatccctggtcttccttagagctagcagtgatcatgggaccaattctggccaataagtgtgacaatctaaaaacttgtcacacttcacatggatctgtcatggcggaaacagcggttatcaatcacaagaaacgtaaaaatagcccgcgaatcgtccagtcaaacgacctcactgaggcggcatatagtctctcccagggatcaaaaacgtatgctgtatctgttcgttgaccagatcagaaaatctgatggcaccctacaggaacatgacggtatctgcgagatccatgttgctaaatatgctgaaatattcggattgacctctgcggaagccagtaaggatatacggcaggcattgaagagtttcgcggggaaggaaagtggttttttatcgccctaaagaggatgccggcgataaaaaaggctatgaatcttttccttggtttatcaaacgtgcgcacagtccatccagagggctttacagtgtacatatcaacccatatctcattcccttctttatcgggtttacagaaccggtttacgcagtttcggcttagtgaaacaaaagaaatcaccaatccgtatgccatgcgtttatacgaatccctgtgtcagtatcgtaagccggatggctcaggcatcgtctctctgaaaatcgactggatcatagagcgttaccagctgcctcaaagttaccagcgtatgcctgacttccgccgccgcttcctgcaggtctgtgttaatgagatcaacagcagaactccaatgcgcctctcatacattgagaaaaagaaaggccgccagacgactcatatcgatctggctctgaaggggctacgtgttttgctcgtggaaggtaacgacccccagggaacagcctcaatgtatcacggatgggtaccagatcttcatattcatgcagaagacactctcctgcctttctatcttggggaaaaggacgatgtcacttatgcaataaagcccacttgctggccggggcttgacattattccttcctgtctggctctgcaccgtattgaaactgagttaatgggcaaatttgatgaaggtaaactgcccaccgatccacacctgatgctccgactggccattgaaactgttgctcatgactatgatgtcatagttattgacagcgcgcctaacctgggtatcggcacgattaatgtcgtatgtgctgctgatgtgctgattgttcccacgcctgctgagttgtttgactacacctccgcactgcagtttttcgatatgcttcgtgatctgctcaagaacgttgatcttaaagggttcgagcctgatgtacgtattttgcttaccaaatacagcaatagtaatggctctcagtccccgtggatggaggagcaaattcgggatgcctggggaagcatggttctaaaaaatgttgtacgtgaaacggatgaagttggtaaagctgccccgatggtggattcgttaattgcgcgcgtaggagtaatggctcgcggtaatgccattactttgcctgtatgtggtcgggatgtgaagtttactcttgaagtgctccggggtgatagtgttgagaagacctctcgggtatggtcaggtaatgaacgtgaccaggagctgcttactgaggacgcactggatgatctcatcccttcttttctactgactggtcaacagacaccggcgttcggtcgaagagtatctggtgtcatagaaattgccgatgggagtcgccgtcgtaaagctgctgcacttaccgaaagtgattatcgtgttctggttggcgagctggatgatgagcagatggctgcattatccagattgggtaacgattatcgcccaacaagtgcttatgaacgtggtcagcgttatgcaagccgattgcagaatgaatttgctggaaatatttctgcgctggctgatgcggaaaatatttcacgtaagattattacccgctgtatcaacaccgccaaattgcctaaatcagttgttgctcttttttctcaccccggtgaactatctgcccggtcaggtgatgcacttcaaaaagcctttacagataaagaggaattacttaagcagcaggcatctaaccttcatggagcagaaaaaagctggggttgttattttgaagctgaagaagttatcactcttttaacttctgtgcttaaaacgtcatctgcatcaagaactagtttaagctcacgacatcagtttgctcctggagcgacagtattgtataagggcgataaaatggtgcttaacctggacaggtctcgtgttccaactgagtacagatacggtgtcttcttaaatgttcttcttccggcaacaaagtattttcagttgcacgatccaagcctacgtaacatggaacttaattactctctggcttcagaggatctggttttgaaggggctacgtgttttgctcgtggaaggtaacgacccccagggaacagcctcaatgtatcacggatgggtaccagatcttcatattcatgcagaagacactctcctgcctttctatcttggggaaaaggacgatgtcacttatgcaataaagcccacttgctggccggggcttgacattattccttcctgtctggctctgcaccgtattgaaactcacctaatgggcaaatttgatgaaggtaaactgcccaccgatccacacctgatgctccgactggccattgaaactgttgctcatgactatgatgtcatagttattgacagcgcgcctaacctgggtatcggcacgattaatgtcgtatgtgctgctgatgtgctgattgttcccacgcctgttgagcatgtttgattacgcttccgcacggcagttttttcactattcttcgtgatctccagcgtcggacattgaattcgt

SEQ ID NO: 26973 - DNA, 615 bp, Homo sapiens; identical to SEQ ID NO: 26823
  SIMILAR (615)..(499): 871254mologous to Homo sapiens Human secreted protein, SEQ ID NO: 5576,accession number G01495,Smith-Waterman Score=176.

SEQ ID NO: 26974 - DNA, 229 bp, Homo sapiens
  SIMILAR (229)..(137): 871254mologous to Homo sapiens Human secreted protein, SEQ ID NO: 5576,accession number G01495,Smith-Waterman Score=152.
gtttcaagggtgtcagaccacgcagggatgcctgacttggtccttcacccttggcggcaagtccctctttcctggggcaggggcaagtacccctcaaccccttctccttcacccttagtggcaagtcccgctttcctggcagccactcccagagctcctggaactctggcccaaggctctctgactgactccttctcggcttaccggctgaagactgatgctgccccat

SEQ ID NO: 26975 - DNA, 495 bp, Homo sapiens; identical to SEQ ID NO: 23463
  SIMILAR (346)..(236): 891254mologous to Homo sapiens Human secreted protein, SEQ ID NO: 5576,accession number G01495,Smith-Waterman Score=181.

SEQ ID NO: 26976 - DNA, 657 bp, Homo sapiens; identical to SEQ ID NO: 16187
  SIMILAR (573)..(454): 801254mologous to Homo sapiens Human secreted protein, SEQ ID NO: 5576,accession number G01495,Smith-Waterman Score=177.

SEQ ID NO: 26977 - DNA, 1752 bp, Homo sapiens; identical to SEQ ID NO: 16188
  SIMILAR (1279)..(1569): 881254mologous to Escherichia coli g30k protein,accession number M29698,Smith-Waterman Score=418.

SEQ ID NO: 26978 - DNA, 479 bp, Homo sapiens
  SIMILAR (295)..(474): 761254mologous to Homo sapiens neutral protease large subunit,accession number M27826,Smith-Waterman Score=215.
tggaccagcgtggtggaattcttggggaagaaaatgccaccacccagatgcacatgaaatttggtgccgtgactttgatcgggggacctcccttgggagatcaatcccctgtcctcctgctctttgctccgtgagaaagatccacctatgacctcaggtcctcagaccaaccagcccaagaaacatctcatcaatttcaaatccggaccccactggaaatcggactgttcaactcacctggcagccactcccaaagccccctggaactctggcccaaggctctctgactgactccttctcggcttagcggctgaagactgatgctgcccgatcgcctcggaagccccgtagaccatcacggacgccgagcttccggtaactctcacagtggaaggtaagcccgtccccttcttaatcaatacggaggctacccgctccacattaccttctttccaagggcctgtttcccttgcctccat

SEQ ID NO: 26979 - DNA, 456 bp, Homo sapiens
  SIMILAR (303)..(187): 1001254mologous to Homo sapiens Human secreted protein, SEQ ID NO: 5576,accession number G01495,Smith-Waterman Score=208.
tcagtctggctggacggcacagtcggacacctccgaaaggctgtccactccctgtcttagggcaaaggtgaggctgaagttgcctggaggtatgcgatgaacaaggaccagagaaaagcaaggcagcgagccctccggggagtcagttctgtgactgaagacactctcaacatttgcagactttgctggcagccactcccagatcccctggaactctggcccgaggctctctgactgactccttctcggcttagcagctgaagactgatgctgcccgatcgcctcggaagccccgtagaccatcacggatgctgagctttgggtaactctccctgtgattgagctgaatgagcccagatctcttctatgcttccgatttctcctaaaacctttgaaaagtagcttttaaatccatcattactcttaaaatcttcctctatttatgtgattagaaaa

SEQ ID NO: 26980 - DNA, 370 bp, Homo sapiens; identical to SEQ ID NO: 11297
  SIMILAR (247)..(44): 971254mologous to Homo sapiens Similar to ubiquinol- cytochrome c reductase hinge protein,accession number BC001426,Smith-Waterman Score=350.
  misc_feature (1)...(370): n = a,t,c or g

SEQ ID NO: 26981 - DNA, 408 bp, Homo sapiens
  SIMILAR (291)..(88): 831254mologous to Homo sapiens Similar to ubiquinol- cytochrome c reductase hinge protein,accession number BC001426,Smith-Waterman Score=293.
  misc_feature (1)...(408): n = a,t,c or g
caaacaaatggtacattcaaaatccataaggaaatattctgatgcacaaatgataaagactggaggtcaagtaagttcacacatatatttcaagttgatatagagtatgaggaaaacgcaatggtccctcgcatgcaagaagtcaaagagatcctccgagcaatcctcttctgaatgtgatcgagaggatacacgctcatcacagagctatagccgctaccgggcctttacacaattctccaactgctcgcattgctctctcactgttgttaggggatccactaattcctcctnnnnnnnnnnnnnnnnnnnnnnnnnnnnnnnnnnnnnnnnnnnnnnnnnnnnnnnnnnnnnnnnnnnnnnnnnnnnnnnnnnnnnnnnnnnnnnnnnnnnnnnnnnnnnnnnnat

SEQ ID NO: 26982 - DNA, 291 bp, Homo sapiens
  SIMILAR (3)..(206): 1001254mologous to Homo sapiens Similar to ubiquinol- cytochrome c reductase hinge protein,accession number BC001426,Smith-Waterman Score=364.
aggaggaattagtggatcccctaacaacagtgagagagcaatgcgagcagttggagaaatgtgtaaaggcccgggagcggctagagctctgtgatgagcgtgtatcctctcgatcacatacagaagaggattgcacggaggagctctttgacttcttgcatgcgagggaccattgcgtggcccacaaactctttaacaacttgaaataaatgtgtggacttaattcaccccagtcttcatcatctgggcatcagaatatttccttatggttttggatgtaccatttggttg

SEQ ID NO: 26983 - DNA, 685 bp, Homo sapiens
  SIMILAR (400)..(206): 671254mologous to Homo sapiens Similar to ubiquinol- cytochrome c reductase hinge protein,accession number BC001426,Smith-Waterman Score=217.
tttttttttttgcagatcatagaacttttatttagatggaatcattgcgaattacatagaagctaccagcctaagccaaaacccatgaggttcatgtgaacttacagttacacaaataagaaacaaatggtacatccaaaaccataaggaaatattctgatgcccagatgatgaagactggggtgaattaagtccacacatttatttcaaagttgtaaagaagtttgtgggccacgcattggtccctcgcatgcaagaagtcaaagagctcctccgtgcaatcctcttctgtatgtgatcgagaggatacacgcttcatcacagagctctagccgctcccgggccttttacacatttctccaactggctcgcattgctctctcactgttgttaggggatccgtgcagaaggccagctggcagagccacactggccgccagaaatggcagaatgcgggtctcccattcaattctggatgctaagtagtagggaaaagtttcacattcctggccttccaaggttgccagtatgcactggaagcctcagtcctatcactaattcctcctcttcctcttcctccacatcaggatctccggattcggtaagcatcttttgctcgtcctccagtcccatgtctggctacggttctagattcaacacgagcagcaacagcggcacctaaccc

SEQ ID NO: 26984 - DNA, 1022 bp, Homo sapiens
  SIMILAR (267)..(100): 621254mologous to Homo sapiens Human receptor molecule (REC) encoded by Incyte clone 044150,accession number Y32193,Smith- Waterman Score=170.
tcaaggaagacaaacattgtattgttccactttggtgaggtacctagaatagcagtcacattcatagagacagaaagtagaatggtagtaaccaggagctttcttgagggcagtttcctcaatcctctccaagtaatatatattgagcagaggtaggatgctttgaagtattgggcctgggagggaccaaaaccccgctctccagaacccccatatgggcgctcaccgcccgcccgcacagctcgaacagggcggggggagcgttggggcccgaggccgagctcttcgctggcgccgcctcccgggacgtggcctccatggtcgttgccgccgctacctcacagaaccagcaactccgggcgcgccaggcctcgggcgccgccatctctgcctgcggctggtagtacatgccaatctgagcatgtgttcgcgaccacgatgagtgtgccgcacttccggccagatcgccggatttccgctgagtgacccttacaagtccttcttgatcctgaactgggttaggtgccgctgttgctgctcgtgttgaatctagaaccgtagccagacatgggacgaatccggagatcctgaggaggtaaggcaaggcgatccactcggccctcttctctgccctgaagcccaggacgcaatgggtcccttcgcatgccaaggaagtccaagagctccctccggtgcaatcctccttctgtatggtgatcgagagggatacaccgttcatcacaagagctcctagccagctcccggggcctttacacatttctcccaactggctccgcattgctctctcttcactgttggtagggggggatcccacttaattccctccctctttccctctttccctcctccctcaggggatctccggaattcggtaaagcatctttttgctccgtcctccagttcccatgttctggctacgggttctagattcaaacacgagcagcaacagcgggcacctaacccagttcaggatcaavaaggacttgtaagggtcactcagc

SEQ ID NO: 26985 - DNA, 510 bp, Homo sapiens; identical to SEQ ID NO: 17040
  SIMILAR (115)..(387): 651254mologous to Sus scrofa ribosomal protein L29/cell surface heparin binding protein HIP,accession number AB016798,Smith -Waterman Score=283.

SEQ ID NO: 26986 - DNA, 1044 bp, Homo sapiens
  SIMILAR (208)..(591): 751254mologous to Homo sapiens ribosomal protein L29,accession number Z49148,Smith-Waterman Score=472.
atgactattttgggaaacacttttattctcagcttagagtggacattgccccggtcacgatctatgacaataatggtgctattatgttcctacagtgttgggcagatgctcctaggagggctggcttttgccattcaggactggcacatattgcaactgactgtgtctacacccataattgtcctcttcttgtcctcttggtatgaacaatctccacattctttgcctggtgtggaccccaagttcctgaagaatatgcgctttgccaagaagcacatcaagaagggcctaaagaagatgcaggtcaacaatgccaaggccatgagtgcacatgccaaggctatcaaggccctcataaagcccaaggaagttaagctcaagatcccaaagagtgtcagcaacaagctccatcgacttgcccacattgcccactccaagcttgggaagcatgatcatgcccacattgccaaagggctcaggctgtgtgggccaaaggccaagaccaaggatcaaaccaaggcccagcctgcagctccagcttcaattccagctcaggctcccaaaggcgcccaggccactacaaagggttcaaattgggccctaaattgcattccaaagaccctgctcctggaacagccttctgcaatcaacacaacctcttggaggttttactgcgtctggcactcgcaggttcccctgctctcactctctctctctctgtttccttgctgtgaaaaacgtgttgaccatcaggcatatggcagaataattggatttcaggcaagccaatgtgagaaaccagaaggcaaatctggtcatttgtgggtatacacaggacaaagaaaaaggagtgtagagaaacagaggctgtcctggagtgcttcaatttggaaagtatcttctaaactaaatgaactagaggagccaggaatcagtactcaaaaaagcagaggagaaagcaagctgctacaagaaactcaagggaaacaagaaaagagaacttcagggtttcagcccaattcactaaataggaaagagggctaa

SEQ ID NO: 26987 - DNA, 673 bp, Homo sapiens
  SIMILAR (34)..(312): 941254mologous to Rattus norvegicus rat ribosomal protein L29,accession number X68283,Smith-Waterman Score=459.
ggcgcttcgggagccgcggcttatggtgcagacatggccaagtccaagaaccacaccacacacaaccagtcccgaaaatggcacagaaatggtatcaagaaaccccgatcacaaagatacgaatctcttaagggggtggaccccaagttcctgaggaacatgcgctttgccaagaagcacaacaaaaagggcctaaagaagatgcaggccaacaatgccaaggccatgagtgcacgtgccgaggctatcaaggccctcgtaaagcccaaggaggttaagcccaagatcccaaagggtgtcagccgcaagctcggatcgacttgcctacattgcccatcccaagcttgggaagcgtgctcgtgcccgtattgccaaggggctcaggctgtgccggccaaaggccaaggccaaggatcaaaccaaggcccaggctgcagctccaccttcagttccagctcaggctcccaaagacaaggatacgtcaaatatttttatttccaacaggaaaaggggctgtgactttaccaaaaaagagactaacatcccaaaagtgctgaccatatccatggccccatcattaatgtcactgtactctgtaacacgtaaccaaaccacaaagccccccagcaggcataaaaacctcacaaaaggacagctggagcccctctactga

SEQ ID NO: 26988 - DNA, 449 bp, Homo sapiens
  SIMILAR (30)..(167): 1001254mologous to Homo sapiens Lsm5 protein,accession number AJ238097,Smith-Waterman Score=233.
aatgaaggcaggccacttccggcgtagccatggcggctaacgctactaccaacccgtcgcagctgctgcccttagagcttgtggacaaatgtataggatcaagaattcacatcgtgatgaagagtgataaggaaattgttggtactcttctaggatttgatgacttttgcagtgatgcaagtgggcttctggctgttacctgggaagatcagaggcagaagcttgggagctctagcagggtcctggtgctctatgagtaccactcttggaagacagcagccctcctggctgacatctctctaagaagtggagctggtacttctcacatcaacctgacacccaaattgacgctctgtgtacttcagtcacaaggagttgaagttagtgggcatgaggctggaatagagagtggtcagaaaacagacctcatctactttatccaggagtga

SEQ ID NO: 26989 - DNA, 2388 bp, Homo sapiens
  SIMILAR (1302)..(850): 231254mologous to Homo sapiens splicing coactivator subunit SRm300,accession number AF201422,Smith-Waterman Score=53.
tcatgctggccgtggtgggtgagctgtccagctctcctctcccagatcttccaggggccagcaggcttccactaaccacagggcctgggggcacttcagtctaccagggcagatgcttgccaggcccatggggaccagcaggctcccgcaggccctcccaaagccacatgcagcagtgcggctggcaagccccacttgggggagaccctgctgttgccggccaggcctgtgggacaagtacagtctgacatctttgccgatggcctggagatgagcaccccctgctctctcctcgatgttgcagcagaacccacgcgtagagagggttggggcgagcagtccaggcagacccccgggattttcctgccgtattgcacaagcattcatgcgttcatttaatcttgcttttttaggcaatactggggctgtcacactgcatgggctccgggacactgtggctgcccttatgtggtgtccccggagggccctgcaggtgtcacaccgctgctccacactgccacctgctgtcagcatctgtgcaacgtatccaggtctctgggggctgctgtctttttgcatcttccaagtagacatcaaagattggtttgctatcagtgtcacttctataatccgtggttctgattctggatcctccctccgagcctgggtgacgctgtcatgaaagaagctgccagaagcccacagcagggcagttaggcagggaatgcgagtccgtgtccagagcaagggtgactccagtccctccaggacggagaagccagtgcgacccactgtcccaggcccccatggccctggctgctcctttgcttggccccacagaggaggtgtaacagctgcctgcagcttggctgggggatgtggggccactgggctggggtggttgggcagcggcttagcttcaggggtgaaggggagctggggctgctcgtccctctgtccatctgccggcctcactgcctcttcactccaaaaacgatacgagatcgccacagtgttctcctgagagtcgcaggctcttgtgtagagctggggagaagcagctggtgttagtgagcgagctcgtgctggaatggcaagtacgtcactgtgcagcactggggagagcagctcctgggcagcgggcccaagatgtgcatccctgtcaggagcagcctcggcgccaggacgacgcattgcccttccagatgaaaaacagagcagccccgggggggcagggcggggcgccaggagggctcgttgatgtccagagttctgcttctctgccaggcgttgtggtaacttgctagccatccccttctgctctgtgcacttctctgtatgtaacacaggcccagttaggatgcagcaatgcagcagcccccagccttcaaggccctgtggactacaccctcggtagtccgagagcagcgcggggctgggagcctgtgctgccgttccggccacgccggtgaagcgcttccggtccccgtgctggtgggactgaggagagcgccgtgctgccgttccggccacgccgtgaagcgcttccggtctccgtgctggtgggactgagaagaacgccgtgctgccgttccggccacgccggtgaagtgcttccggtccccgtgctggtgggactgagaagaacgccgtgctgccgttctggccacgccgtgaagcgcttccggtctccgtgctggtgggactgagaagaacgccgtgctgccgttccggccacaccagagaagtgcttccggtctccgtgctggtgggactgaggagaacgccgtgctgccgttccggccacgccgtgaagcgcttccggtccccgtgctggtgggactgagaagaacgccgtgctgccgttccggccacgccggtgaagtgcttccggtccccgtgctggtgggactgaggagaacgccgtgctgccgttctggccacgccgtgaagcgcttccggtctccgtgctggtgggactgagaagaacgccgtgctgccgttccggccacaccagagaagtgcttccggtctccgtgctggtgggactgaggagaacgccgtgctgccgttccggccacgccgtgaagcgcttccggtctccgtgctggtgggactgagaagaacgccgtgctgccgttccggccacgccggtgaagcgcttccggtctccctgctggtgggactgaggagagcgccgtgctgccgttccggccacgccgtgaagcgcttccggtctccgtgctggtgggactgagaagaacgccgtgctgccgttctggccacgccgttgaagcggctgatccggcctggttctgggttttcccggagcctgcagggcagccccgccccaggcggcagcagctgggcctgcagcgtgtccctcat

SEQ ID NO: 26990 - DNA, 678 bp, Homo sapiens
  SIMILAR (415)..(675): 831254mologous to Homo sapiens ribosomal protein L31,accession number X69181,Smith-Waterman Score=378.
atggtcaaccacattagtctccagggacacgcaaacctggatgtgcttctgggggagcagcggtctgaatatttgggaaacccgtttggcactatgtgtgacgttgaacatcatgtgccctttctacagcaggttccctgcaggcacccccaggagaagctcgagcatgtgctcacatctcagggcagttctgttgggagcagccccaagccagacacagcccagtgccatcccagagttaaggagcacttcatggcgtgctgcacgcggaaaccccacacagctctggccacgcagccccagctccccttcacccctgaagctaagccgctgcccaaccaccccagcccagtggccccacatcccccagccaagctgcaggcagctgttacacctcctctgtggggccaagcaaagcacatccacagagtggccttcaagaagcgtgcccctcaggcactcaaagagatttggaaatttgccatgaaggagatgggaactccagatatgtgcattgataccaggctcaacaaagctgtctggaccaaaggaataaggaatatcccataccgcatccgtgtgcggttgtccagaaaatgtaaagagaatgaagattcaccaaataaactctatactttgattacttatgtacccgttactgctttcaaaaatctatag

SEQ ID NO: 26991 - DNA, 582 bp, Homo sapiens
  SIMILAR (211)..(312): 401254mologous to Rattus norvegicus formin binding protein 21,accession number U77626,Smith-Waterman Score=70.
ttaagctgtggcctcagccacctcaacagggccctgtctggccatggagacgttccccaagttccagtcattgtcagctgctgggacactgcggtactgaatcagcccgttggagtcatccaagtgtgaaaaggtacctgaatgagggcagcgtctgctggaagactcgggcgcatttcgtctgtaccgagagcaatcaggaagtttggggtctgtggtgctccccagcacagcaagccccagggctacaggggagtcgttagctcccaggccagggctctgtggacacgtggccagagctgtgtggggtttccgcgtgcagcacgccatgaagtgctccttaactctgggatggcactgggctgtgtctggcttggggctgctcccaacagaactgccctgagatgtgagcacatgctcgagcttctcctgggggtgcctgcagggaacctgctgtagaaagggcacatgatgttcaacgtcacacatagtgccaaacgggtttcccaaatattcagaccgctgctcccccagaagcacatccaggtttgcgtgtccctggagactaatgtggttgaccat

SEQ ID NO: 26992 - DNA, 356 bp, Homo sapiens; identical to SEQ ID NO: 22901
  SIMILAR (3)..(167): 821254mologous to Rattus rattus fusion protein,accession number X62671,Smith-Waterman Score=224.
  misc_feature (1)...(356): n = a,t,c or g

SEQ ID NO: 26993 - DNA, 439 bp, Homo sapiens; identical to SEQ ID NO: 22902
  SIMILAR (424)..(233): 711254mologous to Rattus rattus fusion protein,accession number X62671,Smith-Waterman Score=222.
  misc_feature (1)...(439): n = a,t,c or g

SEQ ID NO: 26994 - DNA, 795 bp, Homo sapiens
  SIMILAR (487)..(738): 621254mologous to Homo sapiens putative organic anion transporter,accession number AJ251529,Smith-Waterman Score=277.
atgccgctgctctacagcctggatgacaaagtgatgagctcctacatccaaagcgagtttgcaagtgtctgcacctccaactcaatcttggacctcttccgaaccccggccatccgcaaggtcacatgctgtctcatggtgatttgtgttcttagaattgaagtggaagaagaagaggaaatcctcttgaactcttacaccacaccttcaaagccatgtgaagacgtgcttgcttcctctttgccttctgcaatgattttcagcaccagtgtccccaggggctcctgggagaagcccccagggggccgtctggacatcggctcaggtgctgctagcaagcaccaggttccaggcagcttagatggtctctttgaggggagatgctctcagctgctgaagagaaatttcttcactcttctcttctacatgtttcttggaagagccttctttgaccctgtagaaatgaaaaggcagaaggcagtgcttggggcccctgagccctgccggcgcttcaccaagcctcagtgggccctgctgagccccaactcctccatcccgggcgcggccacggagggctgcaaggacggctgggtctataaccgcagtgttttcccgtccaccatcgtgatggagtgggatctggtgtgtgaggcccgcactctccgagacctggcgcagtccgtctacatggccggggtgctggtgggggctgccgtgtttggcagcttggcagacaggtttcacatctttgacacaccctacacagactccgttattctagaaccccaagaatga

SEQ ID NO: 26995 - DNA, 843 bp, Homo sapiens; identical to SEQ ID NO: 22903
  SIMILAR (280)..(498): 801254mologous to Rattus rattus fusion protein,accession number X62671,Smith-Waterman Score=295.

SEQ ID NO: 26996 - DNA, 1905 bp, Homo sapiens
  SIMILAR (1560)..(727): 891254mologous to Homo sapiens FKSG44,accession number AF334946,Smith-Waterman Score=1286.
tcagccctgctccaggctgtcgccgggctgcaccacggtgtagctcccctggcccaaggacagctgccggctgaagaaggatgtggtgcgcttcggcttcactcgcctgatccccttgccgtcctccacgtagtcgatggtggagagatgctggatccggctggacaccacactgccctgcctccgcagcttggggcgctgaacaggagccagtgaggagctggggtccgagggcgagccagtcgcactgtcctgggggcctgcgggctccgccgcctggctcagttcgatgcagtactcaatgagactgctcatcagttcggcctgcttggagtagatcttgaggagcttgttgacaggtgtgccctcgctgtccccgtcgaactccagccacaagatgggctcctcctcctcgggggaggtgtggtcccacgacagctcctggaagcgcaggcccagcaggacatgcttctctctgctatcgatgacgtgcacgccttccagactgatggccacagaaactggcttgcgcccaccccggtgcaaaaagccttgggccggcttgtcaacctcaccgtggaagaaggcacaccggagggagaagggcctgatggcacagagaagggtgggcactgcaggcggagggaagcgcgtggccccaggtgtggagcaaagccagtcgtgggtttggcacttggtctgggggccagggctgctggaggtggccaggagagcctgctgaccactgtccaggcggagacctttcagcagcagggacccataaaacggcagctcgtggcacttgaggagataggcgcggtagtgggtgcccagggcggcctcgcacccgccgtcgctgctgacctcctgcacctggcggtaggcgttcagcaggccctgctcgcccggcccggccctggccccacggccccggagggcagcaaagagactctggccccgcttacagaggtgggcagggaggaaggagtccagcttctccctcaggtcgcaggctgccggccggccgggctggtagggcccaagctgcacgcggcacaccagggcgcccagagcctcgcagtcctccacgtcgcacgggtaccgtgcagccagcacgttgcccttggcctcctcatagagcagccgcaggacctcctcgtcatggatctgcaggggggtgtggcagggacagccgctcagctgggccatggccacgtcatcatctggggcactggtgaagcgcagcagcagctccggccactggcgtcccagcttgtagggctggtgcttgggtttcagctgcacctccagcagaggggagaccagccagagcgcgaagacatccagggcgatgtctggaagctgcaggacctcgcggacagcgcggtgcagctcatgggcactgagcgagggcaggttctccacagccaggggcaccaccgtgtcatccgctaggtataccagcacgtcagccgctcgggctcccacggaggacacgctgcttcggtgggatcgctcagcggggccgggctgcccggcactgccttctgtcccgtccatctgcaaaggcaaagagaaacagcagttaccgggagccagggatggggggctggaggtctcctcaagctctcggtgagtacggtaagggatcccaggctgggtccgcaaggttgagcggcgctgcctcgcagggtcgcagagcccgccacctgagaggcaaggctcctgcctggaatcctgccccgccgccaagcccgccaccgcccgcactcgggctcccgctaaggacgcagcgggaagcgacgcggaagccacggcgggaggaagcgcggcgcccgaggccccgcccccttcgacccgggggagccaatgggagcccagggccgccccgcgcggcccgcgcat

SEQ ID NO: 26997 - DNA, 1278 bp, Homo sapiens
  SIMILAR (721)..(1161): 701254mologous to Homo sapiens FKSG44,accession number AF334946,Smith-Waterman Score=485.
atgacaagcagaagcccctgcgctggctgcctcaatgcctaccgcacagctcgggcgaggcgtatttatagacggagaacaactcgcatcaccggaattcgatcaccttccgccgcctttgtaataactgcctctcactgcaagtcaaccctgtacaaccagccagatatttgtggacaacacttcacagctcaaaacaaggtgaacctaactcctcagcaaaccacagatgctcctgaaagtctccaaggccagaagaaaacccctaaacatataccacactgtggcaactgtagcctagaagtcgcctacgtgcgcgcccgggagctgcacactcttgaagtgaccggcctggagacggttgcccagagcaaggcccatgtagcatccctggagggcctcatccctgaagataaggtcgtgcttctggcaggttctcccttacagaatgaagccaccctgggtcagtgtggggtggaagccctgacaaccctggaagtggttggccgcaggctaggaggtgagtggggctacaggggccccaaactggtgtccaggggcaattcacgacacttagacttacttggtttgccctgcacggacagctgccggctgaagaaggatgtggtgcgcttcggcttcactcgcctgatccccttgcctgcgagggaatgggagggcacactgagcagaggcgctgtccctgtgtccctgctgctgaaaggtctccgcctggacagtggtcagcaggctctcctggccacctccagcagccctggcccccagaccaagtgccaaacccacgactggctttgctccacacctggggccacgcgcttccctccgcctgcagtgcccacccttctctgtgccatcaggcccttctccctccggtgtgccttcttccacggtgaggttgacaagccggcccaaggctttttgcaccggggtgggcgcaagccagtttctgtggccatcagtctggaaggcgtgcacgtcatcgatagcagagagaagcatgtcctgctgggcctgcgcttccaggagctgtcgtgggaccacacctcccccgaggaggaggagcccatcttgtggctggagttcgacggggacagcgagggcacacctgtcaacaagctcctcaagatctactccaagcaggatctggctcacgcttcaccttctctcacctggatcagtcagaggctctctgcctctaggtttcacatctttgacacaccctacacagactccgttattctagaaccccaagaatga

SEQ ID NO: 26998 - DNA, 366 bp, Homo sapiens; identical to SEQ ID NO: 5296
  SIMILAR (230)..(51): 431254mologous to Homo sapiens Human secreted protein, SEQ ID NO: 7083,accession number G03002,Smith-Waterman Score=89.

SEQ ID NO: 26999 - DNA, 367 bp, Homo sapiens
  SIMILAR (176)..(367): 391254mologous to multiple sclerosis associated retrovirus element gag polyprotein,accession number AF123881,Smith-Waterman Score=102.
ggcactgattggtccattttacagggtgctgactggtccattttacaaacctctagctagccacagagcactgactggtgcatttttacagagcgctgactggcgcattttacaatcctcttgtaagatatcaaagttctccaagtccccacccaacccagaagtccagctggcttcacctctcaatcccccctctaaacaggacaccccaactgctgctaggaattgggcgatgcccactctagctacttcctgctggatagggaaggaaacaagcaaagaaatctccaaaggaccacaaaaactcccaggctatcggttatgtccccttcaagctgtagggggaggggaatttggcccaacccag

SEQ ID NO: 27000 - DNA, 331 bp, Homo sapiens
  SIMILAR (204)..(19): 821254mologous to Homo sapiens potential CDS,accession number X57147,Smith-Waterman Score=249.
ctcatgagtagtccagacagtgagatcctttccttgtattattttgatagcctctgacacaaagacggccactgcagcaactaactttaaacagtgaggccagacttttgctactgcatctatttccttacttaggtatgccactggttgtggggttttcccacgagtctgaataaggtctccaagagctatccctgctctctcaggtgactggcctgctccattttctgtcctctctgaaccaccaaggtttgtttgtctgagggccatgactaaggctgcagcctttctctgatctcgcttttccttttgggcctgttcctcttggtcc

SEQ ID NO: 27001 - DNA, 211 bp, Homo sapiens
  SIMILAR (205)..(50): 681254mologous to Human endogenous retrovirus W polyprotein,accession number AB021921,Smith-Waterman Score=177.
ctctcaatctcccatctaaacaggacaccccaactgttgtcgggaattgggcgatgaccgctttagctacttccccattctccacaaatgaacttccatcggtatataggttaaggtcaggattagctaaggggacttctaaaagatcctctcgagcagcagaagtctggactataatttgttggcagtcatgctcgattggttccccatc

SEQ ID NO: 27002 - DNA, 519 bp, Homo sapiens
  SIMILAR (260)..(295): 831254mologous to Homo sapiens potential CDS,accession number X57147,Smith-Waterman Score=45.
ggtcaattgatttcaaagatacgtttataacccaatcagctgcagatatcaggagaaagttccaaaagcaagccctgggccctgaacacaatctggaggcattattaaacctagcaatcttggtgttctataacagggaccaagaggagcaggcccaaaaggaaaagcgagatcagagaaaggctgcacccttaatcatggccctcagacaaactttggtggttcagagaggacagaaaatggagcaggccaatcacctgatccccggatacagtgagatagccaggcccctctatactctaatcaaggagattcagagggcaaatactcatcaagtagaatgggaaccagaggcagaaacagccttcaaacccttaaagcaggccctagtacaagctccagctttaagtcttcccacaggacaaaacttctctttatacatcacagagagagcagggatagctcttggagtccttactcagactcatgggacaaccccacaactagtggcatacctaa

SEQ ID NO: 27003 - DNA, 540 bp, Homo sapiens
  SIMILAR (168)..(16): 681254mologous to Homo sapiens p33ING1b,accession number AB037387,Smith-Waterman Score=222.
tcaagggctttgcccatcgttctttccccggcatctggaacagtaccacttgcgctttggtttatggttgagactcacacacgagaagcggaaccactcgatggggcattcgttgtcgcagcggatcatctcccagtaggagggctcgctggggtcgatggggaggtcttgccgccgtcgcgctgcgtcgccctgctcctgctgcgggtggaacggctccacgtggctgtctacctgccgcgtgaggctctccaccagctccaccctctggctcttgatctggatcttctgatcgcccggctcgtatgccactggttgtggggttgtcccacgagtttgagtaaggactccaagagctattcctgctctctctgtgacgtataaagagaagttttgtcctgtgggaaggcttaaggatggagcttctactagggcctgctttaaggttttgaaggctgtttctgcctctggttcccattctactagatgagtatttgccttctgggtctccttgattagagtatagagtggtctggccat

SEQ ID NO: 27004 - DNA, 747 bp, Homo sapiens
  SIMILAR (279)..(569): 471254mologous to Gibbon ape leukemia virus pol polyprotein,accession number U60065,Smith-Waterman Score=235.
atcaaggagaccgagagggcaaatattcatctagtagaatgggaaccagaggcagaaacagccttcaaaaccttaaagcaggccctagtacaaactcaagacttaagccttccccaggacaaaacttctctttatacctcacagagagagcgggaatagctcttggagtccttactcagacttgtaggacaaccccacaaccagtaaggaaggaaccccacaacctaagtaaggaaattgatgtagtagatctcttggtccatcgtaaggccccttttggggaacaaagaataggtcactatcctggagaggactggcagttagacttcacccatatgcctaagtcaaggggatttcaatacttgttggtctgtgttgaccaaccaaattggatagaagccttcccctgcaagacggagaaggctcaggaagtggttaaagtactaactcatgaaataattcccagatttgggcttccccaaagcttacaaaacgacaatggtccggctcttaaagccacggtaactcagggaatttccagggcactagggatacaatatcactttcatgagctcaactcacaacttctaccaaggacccctggactgacccaccagccctttggcctagagtgttcccctctggagggcactacaactgcagggccccttcttcacccctatccagcaggaagtagctagagcagtcatcacccagttcccaacagcagctggggtgtcctgttta

SEQ ID NO: 27005 - DNA, 666 bp, Homo sapiens
  SIMILAR (187)..(387): 581254mologous to multiple sclerosis associated retrovirus element gag polyprotein,accession number AF123881,Smith-Waterman Score=187.
atggatgaagctggaaaccatcattctcagcaaactaccacaaggacagaaaaccaaacacagcatgttctcactcatagtgcttactggggcctgaagcttcaaccaagtttggaagtgatgggagatactgaagacctggacatgtggcttgtcagcctaaggtggtggaggtgtgcatgtttaccaaacatctgggacattagaaagaaggaaataagcaaagaaatctccaaaggaccacaaaaacccccaggctattggttatgtccccttcaagctgtagcaggaggggaatttggcccaacccggatacatgtccccttctcctgctctgatttaaagcagatcaaggcagacctggggaagttttcagatgatcttgatagaaagctacctgaaagaaaaggaaatgcagaaaacaacttacggataattatattagacgttccactgcactgttctccaaaattttacaaccacgttttggcaattgtaagtacagatgttatgatcattcctgcacagttgtttttcatagataaacccctctgtgtgaaattttggggtcaacaggtaggacgtacactgagctacagcaagagctttggagctttgtgcacatttcctgtcctcaatcagcatgacttggaggatattccttaa

SEQ ID NO: 27006 - DNA, 1983 bp, Homo sapiens
  SIMILAR (763)..(1875): 351254mologous to porcine endogenous retrovirus viral polyprotein,accession number AJ133818,Smith-Waterman Score=574.
atggagaagtggaacatcacacaccggggcttcttgggggatggggtgcaagcttgcagatcgtctactgtgtgggaccttgagatccccctccccgacgagcaccaaccctgctccacggcacccagtcccattgaccacccaagggctgaggaatgccagcgcatggcgcaggactggcagtcagctccacgtgtagccccagtgcgggatccactaggtgaagccagctgggctcctgagtctgctgctcttgtgaggacgtggagagtctttatatctagctcagggattgtaaatacaccagtcagcaccctgtgtttagctcaagatttgagtgcaccaatcgaaactctgtatctagctgctccggtgaggacgtggagagtctttatatctagctcagggattgtaaatacaccaatcagcaccctgtgtttagctcaaggaggacaagcaagggtgcaggttttcaacattgcgtcagtaaggaccactaaatccgaccttcctcggtcctccatgtggtctgggaggaaaactagtgtttctgttgctgcgtcagtgagtgcaactattccgatcagcagggtccagggaccgttgcgggttcttggacagggagagaaacaaaacaaaccaaaactgcgggaaacaagcaaagaaatctccaaaggaccacaaaaacccccgggctgtcggttatgtccccttcaatctgtagcaggaggggaatttggcccaacccgggtatatgtccccttctccctctctgatttaaagcagatcaaggcagacctggggaagttttcagatgatcctgatagggaccaagaagaacaggcccaaaaggaaaagcgagatcagagaaaggccacagccttagtcatggccctcagacaaacaaactttggtggttcagagaggtcagaaaatggagcaggccaatcacctgggtggttggtgacagaagaaggaaaggtagtcaaagcctgtgaggtgtgccaaaagaattatcccttggtatatcataaggcccctgtgggggaacaaagaataggtcactatcccggagaggactggcagttagacttctcccatatgcctaagtcaaagggatttcaatacttgttggtctgtgttgatacctttacaaattggatagaagctttctcttacaagacagagaaggctcaggaagtgattaaagtcctaataattcctagattcaggcttccccaaagcttacagagtgagaatgttccagcttttaaagccacgataactcagggaatctccaaggcactagggatacaatatcgccttcattgctcctggaggccacaatcctctgggaaggttgagaaggcaaatcaaacactcaagaggcacttaaggaaactaacacaagaaactcacctcccatggcctactcttttgcccatggccttgttgagaattcgaaattctccccacaaaatagggctcagtccatatgaaatgctgtatgggcgaccttttctcacaaatgacctcctactcaatcaggaaatggccaactttgtcaaagatataactttggcaaaatatcaacaaaaccttaaaaatctacctgaaggatgtcacagagaacagggaacagagttgtttcaaccaggagatctagtgttggtcaaatctcttccctctacctccccatctatggactctttgtgggaaggaccatactctataatcctctctactcccattgcagttaacatggcaggagtggaaacttggattcaccacacccgagttaaactttggacatctcctgaggaacctgctggatcatcagctcaggagtcccaagatcagccagaccagcttcgatacacctgcgaaccgttggaggacttgcacctcttatttcagaaggaaacatcccagactaaaaaggctcctaccactgatcctgaggaaagacctcttcctccttaa

SEQ ID NO: 27007 - DNA, 675 bp, Homo sapiens; identical to SEQ ID NO: 5321
  SIMILAR (211)..(393): 621254mologous to multiple sclerosis associated retrovirus element gag polyprotein,accession number AF123881,Smith-Waterman Score=193.

SEQ ID NO: 27008 - DNA, 1285 bp, Homo sapiens
  SIMILAR (779)..(1282): 941254mologous to Homo sapiens NAG13,accession number AF194537,Smith-Waterman Score=815.
aattcaggggctaaataccaggcatctgtcggccagttaaaagtgactagcacggccaccagactaaagacacgggtgtcaggctttctgggaaagggctctcgaacaacctccaactcttcggagttgggagcgttgaaggaaacaataaaagaaatctccaaaggaccacaaaaccccctgggctatcggttatgtccccttcaagctgtagggggaggggaatttggcccaacccgggtacatgtccctttctccctctctgatttaaagcagatcaatgcagacctgggaaagctttcagatgatcctgatagggatcaagaggaagaggcccaaaaggaaaagcaagatcagagaaaggctgcagcattagtcatggccctcagacaaaccaaccttggtgattcagagaggacagaaaatggagcaggccaatcacttgccgttgagggccaggaaattgacttcctcctggacaatggtgcggctttctcagtgttaatctcctgtcccagacagctgtcctcaaggtccgttaccatccggggaatcctgggacagcctgtaaccaggtatttctcccacctcctcagttgtaattgggagacttttctacagataagttcccctctggaggacactacaactgcagggccccttcttcacccctatccaggaggaagtagctagagtggtcatcatccaattcccaacagcaattggggtgtcctgtttagaggggggattgacaggtgaagccaaccgggcttctgagtcagaaacacaaactaccatcagagaatactacaaacacctctatgcaaataaactagaaaatctagaagaaatggataaattcctcaacacatacactctcccaagactaaaccaggaagaagttgaatctctgaatagaccaataacaggatctgaaattgagtcaataattaacagcttaccaaccaaaaaaagtccaggaccagatggattcacagccaaattctaccagaggtacaaggaggagctggtgccattccttctgaaactattccaatcaatagaaaaagagggaatcctccctaactcattttatgaggccagcatcatcctgataccaaagactggcagagacacaacaaaaaaagagaattttagaccaatatccttgatgaacattgatgcaaaaatcctcaataaaatactggcaaaccgaatccagcaacacatcaaaaagcttatctaccatgatcaagtgggcttcatccctgggatgcaaggctag

SEQ ID NO: 27009 - DNA, 1491 bp, Homo sapiens
  SIMILAR (673)..(1488): 641254mologous to multiple sclerosis associated retrovirus polyprotein,accession number AF009668,Smith-Waterman Score=880.
atgtttcggaaggatgaagaactgacttcctcacagagggatttagctgtaaggaactgggcatggagcctagcccgtggtgagcgctcagcaaacatgcacgcagtacacacctcgcttctagtggaaaggacaatactgaccacgaccaaggaaagagggtctaccttgcaatatcccttaagacctggagctcataaaggattgcaagatattgttaaacgtttcaaagctcaagccttaataaggaaatgcagcagtccctgcaacaccccaattctaggagtacaaaaaccgaatggtcagtggagactagtgcaagatcttagacttatcaatgaggcagtaattcctctatatccagttgtacccaacccctataacctgctctctcaaataccagaggaagcagaatggttcactgttctggacctcaaggatgccttcttctgtattcccctgcactctgactcccagtttctctttgcctttgaggatcccacagaccacacgtcccaacttacgtggacggtcttgcccccagggtttagggatagccctcccctgtttggtcaggcactggcccaagatctaggccacttctcaagtccaggcactctggtccttcagtatgtggatgatttacttttggccaccagttcagaagcctcttgccagcaggctactctagatctcttgaactttctagctaatcaagggtacaagttgtctaggtcgaaggcccagctttgcctacagcagacattaaaacagttgaaggggttccttggaattaccggcttttgccaactatggatccctggatgcagcgagatagccaggctcctctatactccaatcaaggaaacccagagggcaaatactcatctagtagaatgggaaccagaggcagaaacagccttcaaaaccttaaagcaggtcctagtacaagctccagctttaagccttcctacaggacagaacttctctttatacgtcacagagagagccaggatagctcttggagtccttactcagactcgtgggacaaccccacaaccagtggcatacctaagtaaggaaattgatgtagtagcaaaaggctggcctcactgtttaagggtagttgcagcagtggccatcttagtgtcagaggctatcaaaataatacaaggaaaggatctcactgtctggagtactcatgatgtaaatggcacactaggtgccaaaggaagtttatggctatcagacaacaacctacttagataccaggcactactccttgagggaccagtgcttgaaatatgcatgtgcgtggccctcaaccctgccccttttctcccagaggatggggaaccaatcgagcatgactgccaacaaattatagtccagacttatgccgcccaagatgatctcttagaagtccccttaactaatcctgaccttaacctatataccaatggaagttcatttgtggaaaatgggatatga

SEQ ID NO: 27010 - DNA, 3215 bp, Homo sapiens
  SIMILAR (522)..(13): 991254mologous to Cloning vector pSacBII SacB,accession number U09128,Smith-Waterman Score=908.
tcaataaattctctgcgctgttgtcaggctttgtttgccgtaatgtttaccggaatagtcagtgtagaataaacggatttttccgtcagatgtaaaggttgcagaaccggaccattcttgcgtctgatctttcaggatcggatcgttggcgtcgaacttatcgctgtctttaaagacacggcccgcgtttttccagctgtcgattgagttgtcgccgaccttttgataaaacatgtagattgatgtgtcatcagcgtctttcgggcttcccgcaagagcaaacacaacgtgatagccgttgtattcagctactgttccgtcagcgttttgcagcggccagctgtcccacacatcaagtccttttgcagactcaatatttttaatcgttgattgatcgaattgaggcacttggtatttttcgttttgctgctgtttagggatctgcagcatatcatggcgtgtaatatgagagacgccgtacgtttctttgtatgctttttggttattttctttcgcgaagcttgagtcgctcctccttcgtatcccattctccacaaatgaacttccatcggcatataggttaaggtcaggattagctaaggggacttctaagagatcatctcgggtggcataagtctggactataatttgttggctgtcatgctcgattggttcctcatcctcccaggagggtgtggtcgccatgatctcgtagtcgatagtggctccaagtagcgaagcgagcaggactgggcggcggccaaagcggatcggacagtgctccgagaacgggtgcgcatagaaattgcatcaacgcatatagcgctagcagcacgccatagtgactggcgatgctgtcggaatggacgatatcccgcaagaggcccggcagtaccggcataaccaagcctatgcctacagcatccagggtgacggtgccgaggatgacgatgagcgcattgttagatttcatacacggtcccaggagaaaaaggaagaagctatcaccttactgaaggattccatcaaatatggtccagagtttgcagatgcatattcaagcttagcttcgttattggctgagcaggcccctgaaggcctttgtccgttgtcgtcaggactaggtcggtctcgcccaatggcgacagagtggtcacccgggaaccggatctgcgcggctccgtggcctaaagaggtggccgagcctgcttgcgtccctaggccgccttcccgggccctccacgccttaatggcctccgccgcgcggcgttcaagcggccgccatactttccggcccaccacgcccggcgccgcccaaaggcgctgcgtcccagcgactctgcgggggtttcgtcgaggcccggcaggcttgggtcgggagacgcggcggccggcggggtcccgtcggggagacgcagccgccgccatcagtcatccagccgccctcccgcggggcagggctcgggaccagcagcccgccatgcctgagcctcccaccccctccgtgggctcctgtgcggcccgagcctcccagattagcgcggccccctgctccacggcgcccagtcccatcgaccacccaagggctgaggagtgccggcgcaccgtgtgggactggcaggcagctccacctgcagcccaggtgcgggatccattgggtgaagccagctgggctcctgagtctggtggagatgtggagaacctttatgtcttgctcagggattgtaaatacaccagtcagcaccctgtgtctagctcagggtctgtgaatgcaccaatcgacactctgtatctagctactctgctcagggattgtaaatacaccaatcggcactctgtatctagctcaaggtttgtaaacacaccaatcagcaccgtgtctagctcagagtttgcgaatgcaccaatcgacactctgcatctagctactctgaaggaagaaactccgaacacatctgaacatcagaaggaacaaactccggacatgccgcctttaagaactgtaacagtcacggcgagggtccgcggcttcattcttgacgtcagtgagaccaagaacccaccaattccagacacattttggcgacccagatgggaccttcgccaatcaccaagcaatcaaaccctggcgtttaatgaaaagaatgcggctttagctgcagcccaagagtttggagatacctggtatcttagtcaagtaaatgacagaatgacagccgaagaaagggacaaattcccgactgaatttattccttctagtgggttcttggtcttgctgacttcaagaatgaagccgcagacatttgcggcgagtgttacagctcttagagttggcgcgtccggagttgttcgttcctcccatccagagttgtttgtccctccagatgggttgatggtcttgctggcttcaggagtgaagctgcagaccttcgcgggaagcggcaggctgaagggctcctcaagcacagccagagtggatgccaaggccgaggaggtgccgagagacaccccaactgctattgggaatttggccaatgaccactctagctacttcctgctggataggggtgaagaaggggccctgcagttgtagtgtcctccagaggggaacttatccctgactggttagtgtaaaaacaacactctttccctgagaaggtgcagagtcctcctttctcagcagtgaggaggtctaggccttggcggttttggagagtcactgctgccaaagagttttcaagtacagttacatcactaactatggcataacctgcccttcgtatcccattctccacaaatgaacttccatcaatatataggttaaggtcaggattagctaaggggacttctaagagatcatctcgggcggcataaatctggactataatttgttggcagtcatgcttgattggttccccatcccttaaacagtgaagccagacttttgctactacatcaacttctttacttaggtatgccactggttgtggggttgtctcacgagtctgagtaaggattccaagagctatccctgctctctctgtgatgtataaaaagaagttttgtcctgtgggaaggcttaaagctggagcttgtactagggcctgctttaaggttttgaaggctgtttctgcctctggttcccattctactagatgagtatttgccctccgggtctccttgattagagtatagaggggcctggctatctcgct

SEQ ID NO: 27011 - DNA, 3747 bp, Homo sapiens
  SIMILAR (523)..(1209): 711254mologous to Homo sapiens gag,accession number AF156961,Smith-Waterman Score=836.
atggctccatgcatacgtgtgccccacaacgtgctcctcgtgccagctagcaggcatggacccaaacacatcttccccctgcccctcacacggcccccggagctgacagcccaaaggaatcagaaggaacttcgagacaagccaaaaggatcctggaggagagaaagaataggagaggccaagctcctctcccctgcgaaggtcatgaatttccgaaggctccaccctgccttcccagttggcagttttccttttaacaaccaccacactacacctctatcagcagccctaaaaagggaacaggttgaggacagagctgggacatggaggatggaaggacagaaagatggaaagaacctgttggttttcagaaaccagtaccccaaaatacgacatgctgaactgaagaacaagactcaaggtctctctgaccttccaccgtttcttccaaagaaactgaagttccattatctgcctaagatccagacctatcaaggagaacagttttcttcccctccctctcagaaggaaatcagcaaagaaatctccaaaggaccacaaaaacccctgggctatcggttatgtccccttcaagctgtaggaggaggggaatttggcccaacctgggtacatgtccctttctcactctctgatttaaagcagatcaaggcagacctggggaagttttcagatgatcctgataggtacacagatgtcctacagggtctagggcaaacctttgatttcacttggagagatgtcatgctattgttagatcaaaccctggcctttaatgaaaagaatgcagctttagctgcagcccaagagtttggagatacctggtatcttagtcaagtaaatgatagaatgacagctgaagaaagggacaaattccctaccagtcagcaagccatccccagtatggatccccactgggacctcggctcagatcatggggactggagtcacaaacatctgttgacccacgttctagaaggactaaggagaattaggaaaaagcccatgaattgttcaatgatgtctaccataactcagggaaaggaagaaaatccttctgtcttcctcaagcggctatgggaggccttaagaaaatatactctcctgtcactctactcacttaagggtcagttgatcctaaaagataagcttattacccaatcagccacagaaatcaggagaaagctgcaaaaggaccaagaggaacaggcccaaaaggaaaagcaagatcagagaaaggccacagccttagtcatggccctcagacaaatgaaccttggtggttcagagaggacagaaaatggagcagaccagtcacctggtagggcttgttatcagtgtggtttacaaggaaactttaaaatagattgtccacagacacaagctgccccctcggccatgtccactatgccaagtttacccaacccctataccctgctctctcaaataccagaggaagcagaatggttcacagttctggacctcaaggatgacttcttctgtaatcccctgcactctgacttccagattctctttgcctttgaggatcccacagaccacaaatctgaacttatgtggacagtcttgccccaagggtttagggatagccctcacctgtttgttcaggtactggcccaagatctgagccacttctcaagttcaggcactctggtccttcagcatgtggatgatttacttttggctaccagtttagaagcctcatgccagcaggctcctctagatctcttgaactttctacctaatcaaggatacagcaagatagccaggcccctctatactctaatcaaggagacccagagggcaaatacttatctagtagaatgggaaccaggggcagaaacagccttcaaaaccttaaagcaggccctagtacaagctccagctttaagccttcccacaggacaaaacttctctttgtacatcacagagagagcaggaatagcttttggagtccttactcagactcgtgggacaaccccacaaccagtggtatacctaaaggatggggaaccaatcgagcatgactaccaacaaattatagcccagacttatgccacccaagatgatctcttagaagtccccttagctaatcctgaccttaacctatataccgatggaagttcatttgtggtgaacgggatacgaagggcaggttatgccatagttagtaatgtaactgttcttgaaattaaggtggcaggagtggaatcttggattcaccacacccaagttaaattttggacaccccctgaggaacctgtggggccgtcagctcaggagtcccaagatcagccagagcagcctcaatatacctgcaaactgttggaggacttgcatctcctattttggaaggaaacatcccagactgaaaagagagctcccctctggaggatactacaactgcagggccccttcttcacccctatccagcaggaagtagctacagcagtcattgcccaattcccaacagcagttggggtgtcctgtttagagaggggattgagagtggaaacatgggaaccagaggacaggtctccttcgagggtggagaaagcacggaagcagctggaagctcagcacagagaaagaacgtacctttgcaagcagagtcggatgggcatttctaactgcactgcaggaagtacatgctcagtgccacaggtaagggaccttccggagcaagccgcatgcctgggggcccaagtgcacagctttgagcaggacctgggggtgagagacctccaggcgcaagcagggtacttggaggcccagataaacagcctggaacaggagttagcaagagctgttagtgcgaccttgagccggtccttcaggcaggacactccctttaggtctgatgctgaggaggaggaggctcctccgctgcaggctcctcctgtgatccgtcagaagctgcagctgtgccaacggttggcacaagagcaaggtggccacacattaatcaagtggctaatgacagtcatatggactgttttcaatgatgccagagagatactacaaacttatgtggggtgccgcatacatgaagtgactactgctctggcagccctcagggaggcagaaggccattcgcaggaccggagaatccgcaccgtaaggagggagaaaatgcctcatccgcagttaaccaccccaccagataaaaaggggctccaggagggggaactagacaaccagaggctatatgtggagctggcaatccactggtcccccactaatgtaccgcgggtcctagcactgatagatactggtgcagactgcagtctagtttatgggaacccagataaatttctaggcaaagctgcatttatggacggttatgggagccagtcggtgaaggttacttccactcatcagtaccgtttgccaggggggaatacagaggtaactgagactattaagaagttagaggaggtgcaaatagtgtgtggcatccatagcccctaccattttccattatggccagtcagaaagcctgatgggatttggcagataacagtggattatcggaaactgaataaagtaatactccttctgcatgtatctgtaccttctatcatggatttgatgaacttcttgacaacagaactgagacaatgccactatgtggtggaattgaccaatgcattcctctcagtcgacattgttccagagaggcaggaacagtttgctttcatgggagggtga

SEQ ID NO: 27012 - DNA, 543 bp, Homo sapiens
  SIMILAR (253)..(29): 401254mologous to Human herpesvirus 4 BKRF1 encodes EBNA-1 protein, latent cycle gene,accession number V01555,Smith-Waterman Score=101.
tcaatgggactgggcgccatggagcagggggtggtgctcgtcggggaggctcgggccgcacaggagcccacggagtgggggaggctcaggaatggagggctgcaggtcccaagccctgcccgagcccgcgctcagatgccccagctcagccgagaggccgctcgcgccgggtccttcctcttccccaagtgcaggcagagcccccggagccatggccagtccttccggcagctccgaagccactggcaagacccgaggcagggatggccggcccaggagggaggaggacgacgtccctcccgaggagaagaggctgcggctgttgctgccccgcatcttcctgtttttcttccctttcttgttgagcagcgagagttgagaggaggcagatggcttccatcccaaaaatcgctctcctctttccatccctccctcttttacgtggacactgccaaagaccaggataccagaatgcagtggagtgaccaagtgtagtgggaccttgggaacgcgagtctggaaccaggcggctggggtttgcat

SEQ ID NO: 27013 - DNA, 1392 bp, Homo sapiens
  SIMILAR (1309)..(1130): 251254mologous to Homo sapiens Human N-methyl-D-aspartate receptor subunit encoded by clone NMDA24,accession number W87504,Smith-Waterman Score=45.
atgcccccccaccaccaccacgaatggtctcaccccaaatgttgtgactgtgccaaagctgagaaatccaggtttctcctcagcaagaaagaaaatagctgcaacgtggatgcacctctacaggagccccaggctgacaataaccttcctgatctggtttcaaccctggatgcttttacctggtgcatccatcagggatttcagggattccagcacaacgctaagtgcttctatggacgagcttcccttaatctcagcagcaacaaccccaggcaatggagcctgttgacagatccatttgccactgaagacagtaaggctcagagaggggatggaaagaggagagcgatttctgggatggaagccatctgcctcctctcaactcttgctgcccaaccagaaagggaagaaaaacaggaagatgcgggacggctacagccgcagcctcttctcttcgggagggacgtcgtcctcctccctcctgggccggccatccctgcctcggggcttgccagtggcttcggagctgccggaagggctggccacggctggggggctctgcctgcacctggagaagaggaaggatacggcgcgagcggcctctcggcggagctggggcgtctgagcgcgggctcgaatttcctcccaccccctgctgagagccagttgcaaggagagactagggaagggcattgggtaactttgttgctaaaagctcttctggataaagacgtatgggaaaagaagcaaatagagttcagcagaagaggacagccccaccaccagcaccacgaatggtctcaccacaaatattctgactgtgccaaagctgagaaacccaggtttctcctcagcaagaaggaaaatccctgcaacgtggatgcacctctacaggagccccaggctgacaataaccttcctgatctggtttcaaccctggatacttttacctggcacaacgctaagtgcttctatggacgagcttcccttaatctcagcagcaacaaccccaggcaatggagcctgttgacagatccatttgccactgaagacagtaaggctcagacaggctacagccccagcctcttctcttcgggagggacgtcctcctcctcctcccttctgggccggccatccctgcctcggggcttgccagtgtcttcggagctgctggaagggctggccatggctccgggggctctgcctgaacttggggaagaggaaggacacggcgcgagcggcctctcggcggagctggggcgtctgagcgcgggctcggttgcaccccgatggtctccctgctcaaggaggagagaagagaagggacgccacgagagggtggacatcggccaaagccacctcgtctttgctcttaccctgtgtcttccatga

SEQ ID NO: 27014 - DNA, 1634 bp, Homo sapiens
  SIMILAR (1631)..(1479): 541254mologous to Homo sapiens Human secreted protein, SEQ ID NO: 4478,accession number G00397,Smith-Waterman Score=147.
  misc_feature (1)...(1634): n = a,t,c or g
ctcaaaaaagatctgttggtaggcaatgggaaggtgcattcatgtcatcctgcaggaggaattctccacgagttttgagcagcctcggttttcccaccacctccaaatcatggaagaaacagggtaagagcaaagacaaggtggctgtggccgatgtccaccctctcgtggcgtcccttctcttctctcctccttgagcagggagaccatcggggtgcaacctggccggggcggggaggaggtgcagggcattgccagagcgggcctgtccatgggcaagggacagcgacctcctgggccaggacatgtgagagctacgcaggcctgggcccggcgtggcggaggtgcgcgacagcggccagaagagggcgccagagtgccaggagccgcccgcggaggagcccgcaccggccccgatacccagctccgcgccacgcggacccaccgagcccgcgctcagacgccccagctccgccgagaggccgctcgcgccgtgtcctttctcttccccaagttcaggcagagtccccggagccatggccagcccttccagcagctccgaagccactggcaagccccgaggcagggatggccggcccagaagggagaaggaggaggacgtcccttccgaagagaagaggctggggctgtaactggaaaggggaagcgcacagcccgagggactgcgagaaccggggaggacgcgccgcggccaggcagggaggagaccggcacccagacaggtggcgaccgcagaggagcagcacgggcagccctcctcgccgtgggcggcatcagagcccccctgcccagtcttggggttgctcctggatgccgtctgggaggcttgctcatggtgacatcctcatctccccatgcactttacctgcattcagagcttgggtcacctggacactgaactcaggtgaattttctctgagatcccgggagaaggaggacagttctctggaaggttttccacggccgatcacggaaagggtgagaaaggagaggtcctggtcggcgacacaattacggtggcagtgtaacgccaggaaactttattgcgtgaagtccctctcactccctctacctccctcttttacggtggactctgccaaagaccaggattcccagaatgccagtggagtgaccaagtgtagtgggaccttgggaacacgagtctggagccaggcggctggggtttgcatccctggttcttgcccctccttagctggctgaacatggcacaagcccacttaccctctctgagcccttacctgtccttcggtggcaaaatggatctgtccaaanaggcccccattccccggggttgttactgctgagattaagggaagctcatcccatagaagcacttagcccttgtgcctggcacatagtgtatggtggataaatgggacttaggactaaaactcatgccttggtgtgtttttgcagtgatgttttgttctggggtgcatcaaaagagacaaggttcttggttgggcatgatggctcaagccaataatcccagcactttgagaggctgaaaagggaggatcacttgtgcccaggaatttaagaccagcctgggcaacatggtgaagcctcatatctacctaaaaaaaaaaaaa

SEQ ID NO: 27015 - DNA, 828 bp, Homo sapiens
  SIMILAR (362)..(195): 401254mologous to Agrobacterium tumefaciens open reading frame 13,accession number X00493,Smith-Waterman Score=84.
atgaggttctcggactccacactcagcccggctggacttcaagtcgggctgggtcttacccttcaggccagcatggccacggagataaaggaaagccaggtttatctcttctcccctggagtatctgttcccttaagagccaagaagagacaaggaagaaaaccagccaattccaaacacaaccagggggaacaaattctccaggtcctgggagctctggggccttggctggaattctgggtggagactctggtccgggaagccattgccctctttcctgtacatcctgtgccggatgatggcacatctggcagccaacactcatggacagccaaccagcaagctcactgggttgggagccactccccagagcttgtcttccatgatggatgcagaaaagggttcagtcagggaaaggaaactaacatgggccaagagcctactgcgtaccaggcccacgctagaggattgacctacaagatgccatttgatccttgcaacagctttggccagctctgtgagcgatccaggcctcagtttccttacccagaagttagggatgataaaaggaagttccttacaggaccaagtgagaatgatgcatgtgaagtatttggcccaggtctggcgcatagaacagactgtgttcctgtgtttacctgggggcaagtacgcttcccctacatcatttatggctgtcccctttcctcccctctgaggcctgcagagaagggaaaaacagaccctaaactgaagaagtgtgtccctccagaccttgtgggcagagggcaggatcccagcctcatcccctacacggggacaccatag

SEQ ID NO: 27016 - DNA, 966 bp, Homo sapiens
  SIMILAR (109)..(831): 891254mologous to Cloning vector pZC320 SopB,accession number U26464,Smith-Waterman Score=1033.
atgccgactgtgcttgcatgccctgcatttgactctagaggatccccgatctgccgtttcgatcctcccgaattgactagtggagtgcgagctctagaagaatcccctaatgccattactttgcctgtatgtggtcgggatgtgaagtttactcttgaagtgctccggggtgatagtgttgagaagacctctcgggtatggtcaggtaatgaacgtgaccaggagctgcttactgaggacgcactggatgatctcatcccttcttttctactgactggtcaacagacaccggcgttcggtcgaagagtatctggtgtcatagaaattgccgatgggagtcgccgtcgtaaagctgctgcacttaccgaaagtgattatcgtgttctggttggcgagctggatgatgagcagatggctgcattatccagattgggtaacgattatcgcccaacaagtgcttatgaacgtggtcagcgttatgcaagccgattgcagaatgaatttgctggaaatatttctgcgctggctgatgcggaaaatatttcacgtaagattattacccgctgtatcaacaccgccaaattgcctaaatcagttgttgctcttttttctcaccccggtgaactatctgcccggtcaggtgatgcacttcaaaaagcctttacagataaagaggaattacttaagcagcaggcatctaaccttcatgagcagaaaaaagctgggaaaaggagccgaagacttcaccacactcttctcagagtggtggcagaaatagataaacctgatccgagagatgaactagcaggtctgttgcagtttgctggaggtccactccagaccctgtttgcctgggtatcaccagtggaggctgcagaacagcaaagattgctgcttgctccttcctctggaagcttcatcccagaggggcaccagcttgatgccagccagagctctcctgtatga

SEQ ID NO: 27017 - DNA, 1032 bp, Homo sapiens
  SIMILAR (499)..(687): 601254mologous to Homo sapiens Human secreted protein sequence SEQ ID NO:195,accession number Y87156,Smith-Waterman Score =177.
atggtggaagacaaagaggagcaagtcacatctgacgtggatagcggcaggcaaagagagagcttgtgcagagagaaacgcctgttttcgaaaccatcagatctcaataagaagcgatgtttcaaacaaggaagagtccatcaaccaggattcccaaccatgctctgtgatgtgatgggcaaagaggtcactccctcatcaggtccactcctgggttttggggaagcaccctctgatcgctggcactatgcctgcatttcttttgttagatgttccaggagaaacacagagccactgacaattagaatgatcagacaggagcggggtggctgtgctgcaggcccaagccaggggaccctgttggaagaagagcagggggctacagaagctggtgccaaggtgctcagggatccaaggcccatgggactcaatgtgggtttgagtgctggctctgctcagactccaggcagctttctgtgtcactctggaggcccacagtggtcaggtgggctctcccatgctcagcttgcaaaggttcacggcagcagttcaggctcgtcttgtgcaggtctgctgcagtttgctggaggcccactccagaccctgttttcctgggtatcaccagtggaggctgcagaacatcaaagattgctgcctgctccttcctctggaagcttcatcctagagaggcactggcctgatgccagccagagctctcctagccggcagacaggaaagattaagtctgctcaacatgcaaccctacagccgcccctaaccccaggtgctgtgtcccagggagatgagacttttgtctgtaagcccctgactggaacttctggatttcctgcagaggtgccctgcacagtgaagagcaatctggaaaagcggtctggccacagctactttcctgcgctgtgtggagtccaggtgccactggagtatgaaaaaactcctgcagctcagtgcctgaccgaacagcctccaggttttgtgcttgaaacccagggccttggtggtgtaggctcatga

SEQ ID NO: 27018 - DNA, 399 bp, Homo sapiens
  SIMILAR (22)..(123): 341254mologous to Xylella fastidiosa hypothetical protein,accession number AE003940,Smith-Waterman Score=36.
atgggcacacagtcacacctcattgtgaagtctgctgaaacggcacacctggtgtttgtctgcaggtctgttcttgcaactaatgagcatggattggagctcgtcgggaataattgtgactcgatcaaagtgggcactgagaagaaaaggctgtcctctctggtctctcttcacgacatccaccatactcctactgactcctttactacaaactcactaagcactgctccgcagactttcagaaatcttcaggtggtgaggtgtttgagtaaactgagctggcctatctggtggattcccaagttcagcaatctttcagccactgagcattctggcctcaatggtggcagctcccctaccctgctggtggcaaaggaaactcctgttgctgagttctag

SEQ ID NO: 27019 - DNA, 1266 bp, Homo sapiens; identical to SEQ ID NO: 15212
  SIMILAR (382)..(1227): 331254mologous to Homo sapiens similar to Kelch proteins; similar to BAA77027 (PID:g4650844),accession number AC006963,Smith- Waterman Score=405.

SEQ ID NO: 27020 - DNA, 993 bp, Homo sapiens
  SIMILAR (67)..(864): 651254mologous to Homo sapiens cytokeratin 18 (424 AA),accession number X12883,Smith-Waterman Score=803.
atgggcacacagtcacacctcattgtgaagtctgctgaaacggcacacctggtgtttgtctgcaggtctgttcttgcaactaatgagcatggattggagctcgtcggcacgaccagcgtctatgcaggtgccgggggctctggttcccggatctctatgtcccactcctccagcttctggggcggcatggggtccgggggcctggctgtgggaatggccgggggcctggcaggaatgggaggcatccagaacgagaaggagaacttgcaaagcctgaacgactgtctggcctcctacctggatggagtgaggagcctggagaccaagaaccggaggctggagagcaaaatcggggagcacttggagaagggaccccagactatcgaggacctgagggctcagatcttcgcaaataccgtggacaatgcctgcatcgtgctgcagattgacaatgcccgtcttgctgttgatgactttagagtcaagtatgagacagaactggccatgcaccagtctgtgaagagtgacatccatgggctccgcaaggtcatcaatgataccaatgtcacttggctgcagctggagacagagattgaggctctcaaggaggagctgctcttcatgaagaagaaccatgaagaggaagtaaaaggcctacaagcccagactgccagatctggattgaccgtggagggcaagctagaggctgagatcaccacctaccgctgcctgctggaagatggtaaggacttcagtcttggtgatgccctggacaacagcaactccatgcaaactatccaaaagaccaccaaccgccagatagtggatggcaaagtggtgtctgagaccaatgacaccaaagttctgaggcattaagccagcagcagcagggtacccatctggttctaggaacacagggacaccatgactattgaagtgttgaagattccagatgaaacgttttttaaaatgtaagcctacactgcagggcat

SEQ ID NO: 27021 - DNA, 495 bp, Homo sapiens
  SIMILAR (296)..(418): 951254mologous to Homo sapiens cytokeratin 18 (232 AA),accession number X12876,Smith-Waterman Score=196.
catgtgtctgttcactggtatccactgagcactgggccgttgctccgtgggtgctcctgtgtcttcaagggagtaacagttacagaggtctcccccttgaagaaagcaaactaagtattgtccctagctgtacttagtatgcaaatgaagtttggccttgagtttcccttttctggaggaagaggctgagggtgatttggagataaaggtagaggtcaggaggctttttccctctacctttcttgtctcccttctactccacggggctgtttataacttgggcttggtcttctgttacagtcttggtgatgccttggacagcagcaactccatgcaaaccatccaaaagaccaccacccgccggatagtggatggcaaagtggtgtctgagaccaatgacaccaaagttctgaggcattaagccagcagaagcagggtaccctttggggagcaggaggccaataaaaagttcagagttcaaaaaaaaaaaaaaaa

SEQ ID NO: 27022 - DNA, 992 bp, Homo sapiens
  SIMILAR (2)..(226): 1001254mologous to Homo sapiens cytokeratin 18 (424 AA),accession number X12883,Smith-Waterman Score=383.
  misc_feature (1)...(992): n = a,t,c or g
gatagccgggggtctggcaggaatgggaggcatccagaacgagaaggagaccatgcaaagcctgaacgaccgcctggcctcttacctggacagagtgaggagcctggagaccgagaaccggaggctggagagcaaaatccgggagcacttggagaagaagggaccccaggtcagagactggagccattacttcaagatcatcgaggacctgagggctcagatctttcgcaaatactgtggacaatgcccgcatcgttctgcagattgacaatgcccgtcttgctgctgatgactttagagtcaagtatgagacagagctagcaccatgagccagtcatgtggagaacgacatccatgggctccgcaaggtcaattgatgacaccaatatcacacgactgcagctggagacagagatcgaggctctcaaggaggagcttgctcttcatgaagaagaaccacgaagaaggaagtaaaaggcctacaagcccagatttgcaagctctgggtttgaccgtgggaggtaggatgcccccaaattttcagggaccttcgccaagattcatgggcagacatccggggcccaattatggacggagctgggctcgggaaggaaccgaggaggcagcttaggacaagttatttggtcttcagcagattttagggatgggcaccacagtgggtcacccacacagtctgcttgaggttggaagcttgctgaagacgacgcttcacagaagctgagacgtacagtcccagtcctttggagattcgacttggactccatgagaaatctgaaggccagctttggagaacaagcttaagggaaggttgaaggcccgcttacgccctacagattggagcagctcaacgggattcctgctgcaccttgagtcagactggcacagaccccgtnagagggctaggagcctnctaacccttttaccatctatnccacagataggcactatgattaatagggaagatgaaactt

SEQ ID NO: 27023 - DNA, 366 bp, Homo sapiens; identical to SEQ ID NO: 26433
  SIMILAR (157)..(345): 731254mologous to Gallus gallus ribosomal protein L35,accession number AB046395,Smith-Waterman Score=231.

SEQ ID NO: 27024 - DNA, 398 bp, Homo sapiens
  SIMILAR (47)..(103): 781254mologous to Homo sapiens ribosomal protein L35,accession number U12465,Smith-Waterman Score=77.
tactaaattcgcggcccgtcgaccggcgttggcggcttgtgcagcaatctccaagatcaaggctcgagatcttcgcgggaagaagaaggaggagctggttgaaacagcatggacgacctgaaggtggagctgtcccagctgcgcgtcgccaaagtgaacagggcggtgcggcttccaagctctctaagatccgagtcgtccggaaatccattgcccgtgttctcacagttattaaccagacttcaggaaagaaaaccttcagggaaattcttacaaggggcaagaagtacaagcccctgggaccttgcgggccttaaggaaggacacgtgccatgcgccgccggttcaaaccaagcacggagggagaaccttgaaggacccaaggaagcaggcagcgg

SEQ ID NO: 27025 - DNA, 547 bp, Homo sapiens
  SIMILAR (546)..(265): 1001254mologous to Homo sapiens HSPC102,accession number AF161365,Smith-Waterman Score=492.
ggtattcaattctttaatggagttacagccacatcgtgggtgcagcagggtgtaggcgattccaaagagcagatgattcaaattcgtgtgcgatgggtacagagagatacgcttggctccagacccacgcgtctccctgtttccctctcttgtggtgggggcacagtagccttcgtgtgtcttcctctagcacagacccctgagctgagggtaggaaaaatgaaggcagcacgagggacgctcccacctcccactctatcctcaagaacctcggccaatgaacgggccactcttgctagttggggtactgatcacttcctgtcctctctgtgaggttggagatgtggccttggaacacaccttcgtgacccccaggagttgctgtaaatccatcggaagtgtgtcctgtgacggacgcgatgtgtctccaaacgtcatccaccagaaggtaactggagattttgtgtgttgccttgacagacccctgagggctggtgacttcatttttatttttatcttcttcacaaggtggcaggaaggagaagac

SEQ ID NO: 27026 - DNA, 1020 bp, Homo sapiens
  SIMILAR (1)..(471): 1001254mologous to Homo sapiens GTP-binding protein,accession number AF081353,Smith-Waterman Score=819.
atggcatcagctggagacacccaggcaggcccacgggatgcagcagatcagaacttcgactatatgttcaaactgctactgataggcaacagcagtgtgggcaagacttccttcctgttccgatacgcggacgactccttcactcccgccttcgtcagtactgtgggcatcgatttcaaggtcaagaccgtctaccgccatgacaagaggatcaagctgcagatctgggacacagcgggccaggagcgctaccgcaccatcaccacggcctactaccggggagccatgggcttcctgctcatgtatgacatcgccaatcaggaatcctttgccgctgtgcaggactgggccacgcaaatcaagacctactcctgggacaacgcccaggtcatcctggtggggaacaagtgtgacctggaggacgaacgtgttgtgcctgctgaggatggccggaggctcgccgacgaccttgccgcatctacagcctcgcgcgtctcctggcggcggcccgtggaagcgcggccctacgtgccggggctgggccaggactctccctgccaaacacgtccaaatgtgcccgggtgccccagggaccccgcccagccgctaaagtgctgtggggtgaataactacacagatttttctggctcttccttcgaaatgacaacgggccacacctaccccaggagttgctgtaaatccatcggaagtgtgtcctgtgacggacgcgatgtgtctccaaacgtcatccaccagaagggctgtttcgataaactcctaaaaatcaccaagactcagagcttcaccctgagtgggagctctctgggagctgcagtgatacagttgccaggaattcttgccactttgctgctgtttatcaagctgggctgacacccaggcctggagaagatgagacacctgggcccatctggctgctggagattcagtctcagttttatttctctgtggcactcactgcttctggaggggagactgttaataaaagatatgggaaccccc

SEQ ID NO: 27027 - DNA, 1173 bp, Homo sapiens
  SIMILAR (361)..(498): 841254mologous to Homo sapiens tetraspanin TM4-B,accession number AF133424,Smith-Waterman Score=200.
caaaacagaaaattaaatgtgcccctttttgtgcagacagagattccgtggaagatgatattcaattctgtaatggagttacagccacatcgtgggtgcagcagggtgtaggcgattccaaagagcagatgattcaaattagtgtaagatgggtacagagagatacgcttggctccagacccacgagtctccctgtttccctatattgtggtgggggcacagtagcgttagtgtgtcttcctctagcacagacccctgagctgagggtaggaaaaatgaaggcagcacgagggacgctaccacttcaaattccaccctcaagaacttcggccaatgaacgggccactcttgctagttggggtagtgatcacttcctgtcctctctgtgaggttggagatgtggccttggaacacaccttcgtgaccctgaggaagaattacagaggttacaacgagccagacgactattctacacagtggaacttggtcatggagaaggggcagcacggagcggcccgggccacccggaagggccccgcccccgcgccggccccgccccgccccggctgcccagaaccgggaggcggcggcggcggcggggccggggcccggggcggcggcggcgggacgcgaggaccatggctgcctccgagcgccgcgccttcgcgcacaagatcaacagggtccagtgcccagctgtcggggggggggaagggggacagctgtggacgcccccccaccttctgcttcaggctctcccgtcacgggctggaccgcgctggggatggatgggtgattgaatggagggagtgggggctggggacagaaccagctgcttctctgcaaagccgcatctacagcctcgcgcgtctcctggcggcggcccgtggaagcgcggccctacgtgccggggctgggccaggactctccctgccaaacacgtccaaatgtgcccgggtgccccagggaccccgcccagccgtcagctccctgaaagacagaaataagttgatccaaattggcatcgagatctgtggttccctggagaagcaggagggatgtagggcagacggaggaggaggagcagggagcgtggggacctccatcaaccgagagctggtgaaatccagcacagatgagtgtgatctgggggagcccagcacttgtcactga

SEQ ID NO: 27028 - DNA, 203 bp, Homo sapiens
  SIMILAR (11)..(85): 401254mologous to Hepatitis B virus surface antigen,accession number AJ297868,Smith-Waterman Score=56.
ccacccccaaggtggcaactggtgtctgtcggcatcttctccttcccatactctccaccgggcaccaggcacatgcccgcctgtagggttttctggtgtcttccctccacaaacctgcatcgagggtctccccatgcaccgtgctgttgcttctgtttctctggaaaacccaatacagcgatcttccagtagtcttcatcagg

SEQ ID NO: 27029 - DNA, 2672 bp, Homo sapiens
  SIMILAR (819)..(1019): 951254mologous to Homo sapiens PRO1868, an A33 antigen homologue,accession number Y96735,Smith-Waterman Score=338.
  misc_feature (1)...(2672): n = a,t,c or g
ttaagaggagacgtccttgtgctcgtccttgtcctcgtcctcctgtgcaccatggcttttgctgtgggcctgacacaccttggggctgccttgtttcaggtcagaagaggagaacttgtagagtgagccatgcttgggtggaaggtaggtgggctcaccaacatcctctacacaattagtacagactgtgatctgaggtggcgtcctagagctttgggataccgctcctagcatggcaaacaccatcagctctgcaccaaaggctgctcggaaatactgtttccttctctcctgagcaattgccacatactggaaatgcaaaagccttgtgaattccatggtaacagcatgatcgctggtataccactcgtacaaataaagtacaacgagggcacagaagaggaaaagcttaattctgcccaggggacagagcttaaaaatctcgcaagggcgtttataaacagtccatggagtatgaggggcgtaagaagctgccagagagactgtgtcgtctacctccacgtacatctcaccgtctggcttccagcccttcccacccccaaggtggcaactggtgtctgtcggcatcttctccttcccatactctccaccgggcaccaggcacatgcccgcctgtagggttttctggtgtcttccctccacaaacctgcatcgagggtctccccatgcactgggcgcagtgccaggaaagaggtcttccagtacgcaaccactcagaccctggccgatggatggccaaaagatgcatcggcaaaagaagcagtcctgagctcacccgccttctctgtcccttcacggtcaatgacctgaacattggcggaattattgggggggttctggttgtccttgctgtactggccctgatcacgttgggcatctgctgtgcatacagacgtggctacttcatcaacaataaacaggatggagaaagttacaagaacccagggaaaccagatggagttaactacatccgcactgacgaggagggtgatcttaaagagtttgctcacgtaaacgcccgtgctgggccctgtgaagccagcatgttcaccactggtcgttcagcagccacgacagcaccatgtgagatgggcgaggtgggctggaccagcacccagcagccgccatcccggcgggaaccccagaaaaggccttccttaccacagcagcccttactttcatcggccccacagacacccacccgcagtttccttccttaaaggctctgcctgatcggtgtttgcagtgtccattgtggggagnaggttttttgggttcagcattttgtaaaaacaaccaaaatcaggaaggtaaattggttgctggaagagggatcttgcctgaggaaccctgcttgtccaacagggtgtcaggatttaaggaaaaccttcgtcttaggctaagtctgaaatggtactgaaatatgcttttctatgggtcttgtttattttataaaattttacatctaaatttttgctaaggatgtattttgattattgaaaagaaaatttctatttaaactgtaaatatattgtcatacaatgttaaataacctatttttttaaaaaagttcaacttaaggtagaagttccaagctactagtgttaaattggaaaatatcaataattaagagtattttacccaaggaatcctctcatgcaagtttactgtgatgttccttttctcacacaagtaatagcctttttcacaagggaactcatactgtctacacatcagaccatagttgcttaggaaacctttaaaaattccagttaagcaatgttgaaatcagtttgcatctcttcaaaagaaacctctcaggttagctttgaactgcctcttcctgagatgactaggacagtctgtacccagaggccacccagaagcccttcagatgtacatacacagatgccagtcagctcctggggttgcgccaggcgcccccgctctagcttcactgttgcctcgctgtctgccaggaggccctgccatccttgggccctggcagtggctgtgtcccagtgagctttactcacgtggcccttgcttcatccagcacagctctcaggtgggcactgcagggacactggtgtcttccatgtagcgtcccagctttgggctcctgtaacagacctctttttggttatggatggctcacaaaatagggcccccaatgctattttttttttttaagtttgtttaattatttgttaagattgtctaaggccaaagcgaattgcgaaatcaagtctgtcaagtacaataacatttttaaaagaaaatggatcccactgttcctctttgccacagagaaagcacccatgaacccacaggctctgtcgcatttcaaaacaaaccatggatgggagtgggcgggccagtccaggccttttaaaggaacgtcaggtgggagcagcccgggtgaaaggccgggcggtggagggaaagtgaaacgcctgatttcaaaagcagtttttttattttgacttttaaattttttcatccgccggagacactgctcccatttgtggggggacattagcaacatcactcagaagcctgggttcttcaagagcaggggttctcagcctcacatgccctggccgtgctggactcaggactgaagtgctgtaaagccnaggagctgctga

SEQ ID NO: 27030 - DNA, 400 bp, Homo sapiens; identical to SEQ ID NO: 212
  SIMILAR (5)..(55): 881254mologous to Homo sapiens peptidylprolyl isomerase,accession number X52851,Smith-Waterman Score=73.
  misc_feature (1)...(400): n = a,t,c or g

SEQ ID NO: 27031 - DNA, 1365 bp, Homo sapiens
  SIMILAR (787)..(1065): 831254mologous to Homo sapiens peptidylprolyl isomerase,accession number X52851,Smith-Waterman Score=420.
atggctggggaggccccagaaatcttacagtcatggcagaaggcaaaggggaagctggcaagtcttacatggctggagcaggaggaagagagagtgaagggggatgtgctacacacctttaaacaaacagatctcatgagaactcactcactatcacaggaagaggaaggggaaatctgcccccatgatctaatcaccttccaccaggtccccaccccaacattgggaattacaatcgacatgagatttggactcttccactcaaaatgtggtctgcaagctgcaattccacagcaccaagtggttggctttgcattatctcatttaactgtaaaaggacaatcctatgaccacgcagagctcgaggaggaatgccaaggaagttccactgggacactgaagctaagaccaggaggtgaagagtggcaggacaagcattctgagagagggactagcaatgtctgctggccccacaagaagagctccacaaaggaactgaaagaagccacgggtctgaagttcagtgacagagaagatgggagcttggcaggggccacactaactgcaatgaaagctatcactgaaggggaatgcaccagcttcaagagcccgaacaagagacccagagccagcaaagcagacatggggtttgttgagagaaacttacttacatacagggatggtccagtgacagtgggctacacagaactgctctgcccagtggcagcagacagggcaggagagccgcttaggctactgccgccaggagtcccagtactatcagccatggtcaaccacaccatgttcttcgacgttgctgtcgacagtgagcccttggaccacgtctcctttgagctgtttgcagaaaagtttccaaagacagcagaaaacgttcgtgctctgagcactgaagagaaaggatttggttataagggtccctgctttcacagaattataccagcatttatgtgtcagggtggtgacttcacgcaccataatggcactggtggcaagtccatctacggggagaaatttgaagatgagaaatttatcctaaagcgtacagcctggatcccacgcctgccaagggagactgcgtggagcggtagggggtgtgtaagcgagtatggggtctggccaccgcacagtcatatgtgccagctgctgcagcggagcgggcagctccaggtgccagcacaggcgccagctctctgcaaggctgcagctggaccaggtgcaccgcaagcagcttccacagttggcaccagggaacacagtggcaccctgaagcttggagatgccaggaacctcagggacccaaataccactgctatcaatattacttggcctgtcatcagcatttga

SEQ ID NO: 27032 - DNA, 1256 bp, Homo sapiens
  SIMILAR (200)..(916): 1001254mologous to Homo sapiens nk-2-related transcription factor,accession number AF000295,Smith-Waterman Score=1260.
ctggagacccggacctcggctttcaaagcggctgggtgggaagagctgtttatataaacagagattccgctgtaaatgcgctaatatcccggctgccagcgcatggcgagcgcctcccacgcccatccgtaggagcggcgtcccggccgcccctccgttcccagcctgccctgcccccgcctccttcccctcctcggccatggccacctctggacgcctgagcttcaccgtgcgcagccttctaggtttacccgagcaggacgcgcaacacctgccgaggcgggagccagaaccacgcgccccccagcccgacccctgcgccgcctggctggattcggagcgcggccactacccttcctcggacgagagcagcctggagaccagcccgccagactcgtcgcagcggccgtccgctaggcccgcgtctccgggctcggacgccgagaaaaggaagaagcggcgggtgctattctccaaggcgcagacgctggagttggagcggcgcttccggcagcagcggtacctgtctgcgcccgagcgcgagcagctggcgagcctgcttcgcctcacgcccacgcaggtcaagatctggttccagaatcatcgctacaagctgaagcgtgctcgcgctccaggggcggcggagtcgcctgacctggcagcatccgccgagctgcacgccgcgcccggcctgctgcgtcgcgtggtggtgccggtgcttgttcgcgacgggcagccgtgcggcggcggcggcggtggcgaggtgggaaccgccgcggcccaggagaagtgcggcgcccctccagccgccgcctgccctctgccgggctaccctgccttcggtcccggctcggcgcttggcctcttccccgcctaccagcacttagcatcccccgccctggtctcctggaactggtgaggccgcagggcggcacctggggctaccctcgactttggagcgcgctctgcgattggagcagggccggagccgaacgcctggaacgctctccgtccgcctccctgcagccccatctccttgggcgccagggtccctggcgcgccctcatcagccgtcgcgcaagcacacacgagggacgtgtgccagagccccctccctcaccttccctccaccgccagccccagagttagattttatgcttgggccttatttgtatatttttaaatagcgatttgtataggaagcaagttatttttttaaaaaatagagtatttttcctcgtaaaaaaaaaaaaaaa

SEQ ID NO: 27033 - DNA, 397 bp, Homo sapiens
  SIMILAR (1)..(351): 991254mologous to Homo sapiens ribosomal protein L29,accession number U10248,Smith-Waterman Score=575.
atgcgctttgccaagaagcacaacaagaagggcctaaagaagatgcaggccaacaatgccaaggccatgagtgcacgtgccgaggctatcaaggccctcgtaaagcccaaggaggttaagcccaagatcccaaagggtgtcagccacaagctcgatcgacttgcctacattgcccaccccaagcttgggaagcgtgctcgtgcccgtattgccaaggggctcaggctgtgccggccaaaggccaaggccaaggccaaggccaaggatcaaaccaaggcccaggctgcagccccagcttcagttccagctcaggctcccaaacgtacccaggcccctacaaaggcttcagagtagatatctctgccaacatgaggacagaaggactggtgcgaccccc

SEQ ID NO: 27034 - DNA, 1209 bp, Homo sapiens
  SIMILAR (280)..(708): 951254mologous to Homo sapiens nk-2-related transcription factor,accession number AF000295,Smith-Waterman Score=690.
atggccagtgttggcgagtttacccccaccccgttcccactcagggctccgcaaacctcggcacactgcagtgcagtcgacctggaggaggccggcgctggtgacccagcttgtgataaactggtcggccagcgcaactaccggtgcggacatgttaagagggccccggggtgggttttttcggggcacgatctcaggcccgctgatgaccgctgtggtatgaatgaggtcaccgcattcggagaggtggatgtccagatgtggactcaggaaatggcctcatcccgaaagtctcgggctacctcggacgagagcagcctggagaccagcccgccagactcgtcgcagcggccgtccgctaggcccgcgtctccgggctcggacgccgagaaaaggaagaagcggcgggtgctattctccaaggcgcagacgctggagttggagcggcgcttccggcagcagcggtacctgtctgcgcccgagcgcgagcagctggcgagcctgcttcgcctcacgcccacgcaggtcaagatctggttccagaatcatcgctacaagctgaagcgcgctcgcgctccaggggcggcggagtcgcctgacctggcagcatccgccgagctgcacgccgcgcccggcctgctgcgtcgcgtggtggtgccggtgcttgttcgcgacgggcagccgtgcggcggcggcggcggtggcgagagctgctggcgtttcgaataccgaaaagtcaaccctgtggaccacgacagggcagaaggagtttctccggagatgagccggcgaggccagggcctcttgtgcaagcagtcactttctcacagaagcgacgacctcgctcccaggcacccgctgctgggagatgcgccagaggagagcagttggggcatcagagcacaacaagaagagcctaaagaagatgcaggccagcaatgccaaggctgtgagtgtatgtgccgaggctatcaaggccctcgtaaaggccaaggagatactactactcccactacacaagtgggaaaattgaaggccaaaaaggttagaagagacttgtccagggtcatacggctggtaagtgacatagaggatctgaacccaagccgtctagttccagatcttacacctctggccacatgggactggaaaggctatttggcagaattcactaggaagggaatggagtctgtttgcaaattaaagtag

SEQ ID NO: 27035 - DNA, 996 bp, Homo sapiens
  SIMILAR (606)..(457): 681254mologous to Homo sapiens Human secreted protein, SEQ ID NO: 7792,accession number G03711,Smith-Waterman Score=146.
  misc_feature (1)...(996): n = a,t,c or g
tttttttttttatttcataattctcctttattaggcacaggtaaacatacatactcatggtatccaaaacctagagtatggacctgggattgtggaccccaagtgtccccagaagagtcccacctgggactttccaggtggccacaggacagaccctggcctaatcctggtccctcaaccttggtgctcaggtcagaagcccccatggttgacaggcctgggacccccatttccaaaacagtcttgagttagacaaagaactagcctcatagtttgggattctttatcttcttgggcccaaatccccaggctttaggccctggaaggagaatcttctttaatcaaagaggacaagagattgctgggaacaaaggtcccagagttgagcttgggttggggtccctgaatttggaaggggaggagggccttggagcctttggaaaagggatacctcccctttctctgaaaaagggtaccaagatacaaaggcaggctggtttgtttgtgaaagggattgtccttggacagaggtgcctgagcaccagcatcagtggaggccgacactggtacaaaagtgtaccccagtgtagacaagtgacctatggtccatggaaaagtgttgtcagctcaaaggatgcccagttttgtcaatctctgtgagcagggaatattgtctcctttgctcacttgctgtacttcccagcaccgagaacagggctttggcacctgataagcacccaagcaggaacttgcaatgtgtgtggaacaaagcagatgtgtacacagcacactccacacaggcttctgcctttctcccttctggaaggcactgaaggtttggctcagttcagaggcaggagaaggcttggagctacccccaaactcaatccactgttggcagctgagcgtgtagtagggtggtcctagccatacagaaccacttctctgtctccctcctcttccctggcttcgtcgaattanannanactggactag

SEQ ID NO: 27036 - DNA, 779 bp, Homo sapiens
  SIMILAR (165)..(407): 321254mologous to Homo sapiens mucin,accession number Z34276,Smith-Waterman Score=97.
ggtcttttcacctaattcacttaatgtttgatgactacgtgctctacctgttagaatctctgcactgtcaggagcgggccaatgagctcatgcgagccatgaagggagaaggaagcactgcagaagtccgagaagagatcatcttgacagaggctgccgcaccaaccccttcaccagtgccatcgttttctccagcaaaatctgccacatctgtggaagtgccacctccctcttcccctgttagcaatccttcccctgagtacactggcctcagcactacaggagcaatgcagtcttacacgtggtctctaacatacacagtgacgacggctgctgggtccccagctgagaactcccaacagctgccctgtatgaggaacactcatgtgccttcttcctccgtcacacacaggataccagtttatccccacagagaggaacatggatacacgggaagctataactatgggagctatggcaaccagcatcctcaccccatgcagagccagtatccggccctccctcatgacacagctatctctgggccactccactatgccccttaccacaggagctctgcacagccatgccagcccacatgtggttgtcttggatgtgccgagttcctccatgtctttgcagaaattgttccctctggctgggtgtctcttccccagtctcttcggctgggcattcatgatgggcattcatggcaatcatattgccgtctttgtggcattcctgaaagtaccaccttgagtcctccaggaccttattag

SEQ ID NO: 27037 - DNA, 274 bp, Homo sapiens
  SIMILAR (233)..(27): 511254mologous to Homo sapiens HRIHFB2063,accession number AB015349,Smith-Waterman Score=159.
  misc_feature (1)...(274): n = a,t,c or g
tggtaggtcttaacaggggtgtcagcccccagaagggaggcggctcgaccgctcagaggctctgtgagggcccgggaggcctggctgggctgtgtggttgagggtaggggaccgggggctgggcggctagaggactcgcccaccttgcagtctccccaggtgcatgggtagcaatagagggagtaggtgtccggcgatggggagccactgccactngggaacccgcccgcctcggatttgggagggactggaggcggcgcnttccgctcgtgcc

SEQ ID NO: 27038 - DNA, 3387 bp, Homo sapiens
  SIMILAR (1504)..(2151): 531254mologous to Homo sapiens HRIHFB2063,accession number AB015349,Smith-Waterman Score=499.
atggcctcggcctcggcctcgccctctctgtgtctgcggcgccctctgcaggatttagggggccgggacaaggaagaggacggtcccttcttccaataccaggaagctaaggaggcaagaattaaggttgccgcagatccgtacagattcaccgtgggtaactccagcccctcctccgtggcggccaggagtgggcacagtgggcgtcagctgtcccgggagcaggctcatgggggagcatcggcgccccgccgtcgggcaggccagcgtctagttctctggctcgcggccgagtggtcagagtgtggggagtacgccgagggcgtcagtgagcgagacatcctgctcatccactcctgccggcagtggacaacggtgacagctcataccctggaggagggccactatgtcatcgggcccaagatcgacatccccctgcagtacccagggaagttcaagctcctggaacaggcccgggatgtgcgggagccagtgaggtacttcagcagcgtggaggaggtggccagtgtcttccctgaccgcatcttcgtgatggaagccatcaccttcagcgtcaaggtggtgtcgggcgagttcagcgaggacagcgaggtgtacaacttcacgctgcatgcgggcgacgagctcactcttatgggccaggcggagatcctgtgcgccaagaccaccaaggagcgctcgcgcttcaccaccctcctgcgaaagctgggccgggccggggcgctggccggggtgggcggcggcggcccagcgagcgcgggggccgcgggaggcactggcggcgggggcgccaggccggtcaaaggcaagatgccctgcctcatctgcatgaaccaccgcaccaacgaaagcctgagcctgccctttcagtgccagggccgcttcagcactcgcagcccgctggagctgcagatgcaagagggcgagcacacggtgcgcgccatcatcgagcgcgtgaggctgccggtgaacgtgctggtgcccagccggccgccgcgcaacccctacgacctgcacccggtgcgggagggtcattgctacaagctggttagcatcatctccaagacggtggtgctggggctggcgctgcgccgcgagggcccggcgccgctgcacttcctgctgctcacggacacgccgcgcttcgcgctgccgcagggcctgctggccggggacccgcgcgtcgagcgcctggtgcgcgacagcgcctcctactgccgcgagcgcttcgaccccgacgagtactccacggcccctcccgccggcgagggcgaccaggagtacgtgagccccgactgggcagccgcgcccgagcccgccgcgccgcccgccgagatcccctacgaggagttgtgggcgcaccaggggcccgaggcctcgtccggcccgcccccagggctcgatctcatctccttcggggccgcgggaccgccgcgtcgggagccggaagcgccgccgcctccagtccctcccaaatccgaggcggtgaaggaggagtgccgcctgctcaatgcccctccagtgcctccccggggtggcaatggcagcggccggctctccagcagccccccggttccccctcgcttccccaagctgcagccggtacattcccccagctccagcctctcctactactcctctggcctccaggatggggcgggttcccgcagtggcagtggctccccatcgccggacacctactccctctattgctacccatgcacctggggagactgcaaggtgggcgagtcctctagccgcccagcccccggtcccctaccctcaaccacacagcccagccaggcctcccgggccctcacagagcctctgagcggtcgagccgcctcccttctgggggctgacacccctgttaagacctaccacagctgccctcctctattcaagccctcacatccccagaagcgctttgctccgtttggagctctcaaccctttttccgggcctgcctacccctcaggcccttcagcggccttgtcttctgggcccagaaccacctcgggtcctgtggctacctctggccctgcgtattccccaggcccagcctcgccaggccaggcctattcagctgctcccccctcctcctgcgccccctcctcctcctcttcttctgaatggcaggaaccagtcctggagcccttcgatccctttgagctggggcagggcagttctccagagcctgagctgctgcgttctcaggagcccagagcagtggggacacctgggcctggaccccgcctttcaccacttggcccctccaaggcctttgagcctgaaggtttggtgctgcaccaggtccccaccccactgtcaccagctgctctgcagggacccgaggcgggaggagcactttttctaacccaagggcgcctggaagggcctcctgccagtccccgggatggagccacaggctttggagtccgagatgcctcctcctggcagccccctgctgacctgtctgcactctccctggaggaggtctctcgcagtctgcgtttcatcgggctctcagaggatgtggtgagcttctttgcccgagaacgcatcgatggtagcatctttgtgcagctcagtgaggacatcctggcagatgacttccacctcaccaagctgcaggtcaagaagatcatgcagttcatcaaaggctggaggcccaagatctgaactgcccagctggagctgcacagctggaatgctggtatgggggccccaggtacagcactccggaggagcaggtgctgcctgcaagaaggatctatgtcgagactgaggctgctcagcagccactgggtggatccaggggagatgcatgtggaaatgtggtcctctggggtcagacccctgcacgggacatcttgcctttgagtgtgcagagtacatggggaaggggctgggggcaccactgtgtacctgggcccagtaaggcatttgccgtgattcccacaacggggtcaaaagctggccttcagggtgacctaacaccccctcatgccctgctatagaccttcacaaacgacttccactgctgaagcctgtaggctctgtttagagacaagaagatggctggtaatttaagccccgatttcccaagtgcccactctcctttgtgctctgttggcttttggcctaaagctgccccagagtgagggtgtaggatgtctgtggtctgtgagatgcctttcccttcccccctctgcttcaaccgtggttgaggggggtggggcctggccccgcacacaggtgagtcgtgtacaagcctaacccatggcacctcagaggctccacctgtgggtcctggttcatgggtgacaactttggaagagcacagctctgccatttgaccgaccc

SEQ ID NO: 27039 - DNA, 750 bp, Homo sapiens
  SIMILAR (209)..(382): 561254mologous to Homo sapiens XAGE-1,accession number AF251237,Smith-Waterman Score=175.
atggatggtgggaagaatgcaaaccttggaacaaaatatgaattcctcctccatgagtcaagtgttcttgtgcaatatttcccacagcaaggaccacgtgtctttgtgatatttgagatgtccaacccgtcaatgagaaaccgaatcaagaaaatgcgagctgtggaaggaaacgtcatgacttctttcttgccaactatgacacagcaggagcccagtgtgccagagcctcaacaagaagaaccaccaactgaaagtcaggatcatacacctggtcagaagagagaagatgatcagggtgcagctgagattcaagtgcctaacctggaagctgatctccaggagctgtctcagtcaaagactggggatgaatgcggagatagtcctgatgtccaggggaagattctgccaaaatcagagcaatttaaaatgccagaaggagaacaccttagggatgtcatccatgcttgtgaggaggaggaacctgtgtcaatgactaccctgaactggctgcctgctgacagctcccgtaaaccaaagatgcaaatcagttgtttggactggacaaggaaccctagagggaaaggtcccttaatgggaggccacattgggggccttggccagctcctacctgacgaattcgacgtagcccagaagggagacaggcaaggtgagaaaatggaaaccctgatgattgctgaaatgatgactgtcactggcagcatggacctggtgtgcttgctgcgctga

SEQ ID NO: 27040 - DNA, 409 bp, Homo sapiens
  SIMILAR (209)..(409): 971254mologous to Homo sapiens zinc finger protein ZNF140- like protein,accession number AF155656,Smith-Waterman Score=334.
  misc_feature (1)...(409): n = a,t,c or g
cttcaggcctggtggcggcttccaagctaaggaacggtttggggcagtgtcnttcccggaggtcggccgccggtacccgctcaccagctacgcggcgcgtcaggtccgcggaggcgcgggctcggggcgcctgcgggacggacactgcccatctctaagataagaacctggaaaggggactctgttggccattggaaattgcagaataatgtctcaggtgacatttagtgatgtggctatagacttctctcatgaagagtgggcatgcctagattctgctcagagggacttatacaaggatgtgatggtccagaattatgagaacctggtctctgtagcaggtctttccgtaactaagccatatgtgatcatgttattggaggatggaaaagagccctggatgatggat

SEQ ID NO: 27041 - DNA, 874 bp, Homo sapiens
  SIMILAR (535)..(666): 681254mologous to Homo sapiens Protein regulating gene expression PRGE-4,accession number Y58611,Smith-Waterman Score=147.
  misc_feature (1)...(874): n = a,t,c or g
aattcggggcagtgtcgttcccggaggtcggccgccgttacccgctcaccagctacgcggcgcgtcatgtccgcggaggcgcgggctcggggcgcctgcgggacggtgaggccctgctgaggactccggacactgcccatctctaagataagaacctggaaaggggactctgttggccattggaaattgcagaataatgtctcaggtgacatttagtgatgtggctatagacttctctcatgaagagtgggcatgcctagattctgctcagagggacttatacaaggatgtgatggtccagaattatgagaacctggtctctgtaggtaaggatatcaccccttccactccaataggggacacctttcttttgccaccctgaattgctggagattctcctaagtaaatggctgaatttctgtaccatgctcccgaggaaatgtgcagctctgttgtgccctgcctaaagcttatctttccatttcagtgaacacccttcatccattcctgtggtccctcttgtgatggcctctcataatagaggaccacagcttaaacaattctatatttgtcctgtaagcaggtctttccgtaactaagccatatgtgatcatgttattggaggatggaaaagagccctggatgatggagaaaaaactgtcaaaggtattgattccacatgagtcatggtgaccgagacaaaggaagatttgttaaagatgtttatagtgagtgtggaagcattttagggatactgtcttcaaagatctcagatagaaatgaaaaattgagggatatttagcttagattttcaaaacaattgtncctccctctcaaattattatctgtatcactcatgtcacctaatcaaggt

SEQ ID NO: 27042 - DNA, 2581 bp, Homo sapiens
  SIMILAR (1480)..(1725): 691254mologous to Homo sapiens ZNF135-like protein,accession number AF265236,Smith-Waterman Score=311.
ctgaggactccggacactgcccatctctaagataagaacctggaaaggggactctgttggccattggaaattgcagaataatgtctcaggtgacatttagtgatgtggctatagacttctctcatgaagagtgggcatgcctagattctgctcagagggacttatacaaggatgtgatggtccagaattatgagaacctggtctctgtagcaggtctttctgtaactaagccatatgtgatccatgttattggaggatggaaaagagccctcggatgatggagaaaaaactgtcaaaaggtatgattccagattgggaatcaagatgggaaaacaaggaattatcaacaaagaaggataattatgatgaagattcaccccaaacagtaataatagaaaaagttgtaaaacaaagttatgaattttcaaattctaagaagaatttggaatatatagagaagttggaagggaagcatggaagtcaggtagaccatttcagaccagcaattctcacctctagagaaagccccactgcagacagtgtttacaaatacaatatatttagaagcacctttcattcaaagtctactctttctgaaccacaaaaaatttctgctgaagggaattcacacaaatatgatatattaaagaagaacttaccaaaaaagtcagttataaaaaatgagaaagtcaatggtggaaagaaacttttgaattctaataaaagtggggcagccttcagccagggcaaatctcttacccttccccagacttgtaatagagagaaaatctatacatgcagtgaatgtgggaaagcctttggcaaacagtcaatcctcaatcgccactggagaattcatacaggagagaagccctatgaatgtcgtgaatgtgggaagacttttagccatggctcatcccttacacgacatctgataagccatagtggagagaaaccttacaaatgtattgaatgtgggaaggcctttagccatgtctcatcacttactaaccatcagagcactcacactggagagaaaccatatgaatgtatgaactgtggaaagtcttttagtcgtgtgtcccatcttattgaacatctaagaattcatactcaagaaaaactctatgagtgtcgtatatgtggaaaggccttcattcataggtcatctctcattcaccatcagaaaatccatactggagagaagccttatgaatgtagagaatgtgggaaagctttctgctgtagctcacaccttactcgacatcaaagaattcacactatggagaaacaatatgaatgcaacaaatgtctgaaagtctttagtagcctctcatttcttgttcagcatcagagtattcatactgaagaaaaaccctttgaatgtcagaaatgcaggaaatccttcaaccagcttgaatcactgaatatgcatttgagaaatcacattagattgaaatgtgatttctatctaatgaatgccatatatgtgggaaagcctttagtcataggtcatccctgcttcaacatcacagaattcatactggagagaaaccttacgaatgtattaaatgtgggaagaccttcagctgtagttcaaaccttaccgtacatcagagaattcatactggagaaaagccatataaatgtagtgagtgtgggaaagcttttagcaaaggctcaaatcttactgcccatcaaagagtacataatggagagaaacccaatagtgtgggaacccctgcagcctgtagtctccaggcaggccttgggccaccaggctggagagagccgcggccacactcagcggtgcaaggtgacccggctgtcttcctggcaggtcctcgtgggagcggctgtcccttgttcaggggcccgggaccgcgtccccgtcccccgacatgtcccccaagcatgccttcagggcagggtgcagactggaaggctggactggcggggacacgcgtgttctgcatctcctaacgctgtgcccactgtgacatttagtgatgtggctatagacttctctcatgaagagtgggcatgcctagattctgctcagagggacttatacaaggatgtgatggtccagaattatgagaaccttgtctctgtaggtctttccataactaagccatatgtgatcacattgttggagcatgggaaagagccctggatggtggagaaaaaactgtcaaaaggtatgattccagtgttggaagttctagccagggcaatgaggcagaagaacgaaataaagggtattcagttaggaaaagaggaagtcaaattgtccctgtttgcagatgacatgattgtatatcttgaaaaccccattgtctcagcccaaaatctccttaagctgataagcaacttcagcaaagtctcagagataccaaaatcaatgtacaaaaatcacaaggcattcttatacaccaacaacagacaaacagagagccaaatcatgagtgaactcccattcacaattgcttcaaagagaataaaatacctaggaatccaacttacaagggatgtgaaggacctctttaaggagaactacaaaccctgctcaacgaaataa

SEQ ID NO: 27043 - DNA, 2436 bp, Homo sapiens
  SIMILAR (325)..(558): 751254mologous to Homo sapiens Protein regulating gene expression PRGE-4,accession number Y58611,Smith-Waterman Score=293.
atgaatgacctttatagcaaggcttgtgaggctctcaacaccaacaaggaaaccaccgttttggactactggaagccagtcactcttcagtacccagagggttacctggcaccaaatagatgcttagtaagtaattgtggagtgaataagatgagtaatgacgaactggtggggcagaatcatggcatggaaggtgaagcttgcataggaggggatgtcttatttaaggactatctaaggcagtggtgcccaacctttttggcaccagggatcggttttgtggaagacagtttttccacagaagcaggaggtggtggtttgggggtgacatttaatgatgtggctatagacttcactcatgaagagtggggatggctcagttctgctcagagggacttatacaaggatgtgatggtccagaattatgagaacctggtctctgtagcaggccttcctgaacctaagccatatgtgatcacggtatttgaggatggaaaagagccctggatgatggagaaaaaactgtcaaaaggtatgattccaggcattcacagcctggcacctacttgccctggagatcaggagcacggcagtgaagagcagcccgaaagtaggagccagcttcatggtgccagtggcaagttctgccaagaggtcggcgccgtcatcaccgccgcgtttacacggactcaacacggaaggccaggaaatgcccaacgccccggccgtggtcaagacgcgcgcggacccaggggccttagccccgccgtcgccgcgacccacacttgccggagtcctcagcagggcctcaccgtcccgcaggcgccccgagcccgcgcctccgcggacctgacgcgccgcgtagctggtgagcgggtaacggcggccgacctccgggaacgacactgccccaaaccgttccttagcttggaagccgccgccaggcctgaagctatcgcgggactgacccagtgcaccgcccacggcgaaccacatttcccagaatcctccccctgcggtacaaatgtcccggaagccgcgaaccgccggcacccgaagaccacacttcccaagggtctctgcggctgcgcggacctggtgcgccgcgggcaaaccggtcacggctttgtaagtagcttaaccgcctggggccgtcgacctagagccggccagctaggaccatgcgcaaattgtcctggggcacacagtcgtcctctggtgaacgatacaactcgaaaccaagggacaccctctacttataagggccatggcgcccggaccaagaaattacatttcccagaaaactgcagccgtgccaaggtcttccgggtcattcctgcgctcacacaaacgtttccctccgagacatgggcagcccttgctgttccctttgccgggaaggttccccaaagaccccttcattccaatgtccacctgctagagagaggcctgcaccttccccttgcaaagtgtacttcagctgtcgcccccagggatctccaatccactgtgggtgaaatattggttaaaaatgtaagcttctggctgggcacgtcggctcatgccaggcatcaaaagggagaagcacagagtcccggcatccgccgtattacagcggatgggtgcatgcgggcggtgacccgagctcgcgcgggctgcggaaccctccactcaccaacgccggcgccgccatgggcccaggggctggattgtgttgctcttcgagagtatgggcaggctctgggaacagagcacataaatcactgcaaaaaagacttcctcagaggttcctgccttccaggtggtgtttgcaaacacagtcctgtctgtgaaagaaaggtgaaagagttaaaaggagccgttaacagtcatcccagcccaaatatttttggtgtctccacgattcgaaggcaaaaagttcaaacctggccttttcttttaagggttttaggagggagagcagagccaactcttggaggcactggactggctgtgacacagaaaaacaagatatgtgaggatagaaaatctgtaccgaggactttgaagaagtccttgtccaatcgccatgggcagtatcggcgacctgacatacgaaatttagacagaccaaacagaaaaatagacactgggaaaaacaaagtcagatctgactcaccttcctgggaccagagactgaggactcaggagttgaatttggtgggcatacactggcagtcgatccattcccctccagaagacagtggcctacagggcgctggaacatcttcaggttgcgcttcccctataagcccgccatctgttgggggtagcccagaacgagtccagcactcacccagtggtgaaatctcactggggcctccaaatgttgtaaccaggcgagttgtagagaaacgccacactctgagactaattcaggactccttttattgctga

SEQ ID NO: 27044 - DNA, 528 bp, Homo sapiens; identical to SEQ ID NO: 15412
  SIMILAR (262)..(528): 911254mologous to Homo sapiens adenine nucleotide translocator-2,accession number M57424,Smith-Waterman Score=431.

SEQ ID NO: 27045 - DNA, 741 bp, Homo sapiens
  SIMILAR (289)..(735): 1001254mologous to unidentified cloning vector 29kD protein essential for the replication of mini F plasmid,accession number AB015619,Smith-Waterman Score=775.
atgaccagcaaagacaaaacttccagaggaacgatcagacagcagcattcgcggttcaagaaaatccgctgttctgcagccaccactgctggtactcaggcaaacagggtctggagtggacctctagcaaactccaacagacctgcagctgaggcaggtgtctccacagcagctgctccagatgggccaccaccaccatcagtacctactgtagacagcgattctttagagtccgcacagttcaagtgtgacaatctaaaaacttgtcacacttcacatggatctgtcatggcggaaacagcggttatcaatcacaagaaacgtaaaaatagcccgcgaatcgtccagtcaaacgacctcactgaggcggcatatagtctctcccgggatcaaaaacgtatgctgtatctgttcgttgaccagatcagaaaatctgatggcaccctacaggaacatgacggtatctgcgagatccatgttgctaaatatgctgaaatattcggattgacctctgcggaagccagtaaggatatacggcaggcattgaagagtttcgcggggaaggaagtggttttttatcgccctgaagaggatgccggcgatgaaaaaggctatgaatcttttccttggtttatcaaacgtgcgcacagtccatccagagggctttacagtgtacatatcaacccatatctcattcccttctttatcgggttacagaaccggtttacgcagttcggctag

SEQ ID NO: 27046 - DNA, 1455 bp, Homo sapiens; identical to SEQ ID NO: 15413
  SIMILAR (436)..(729): 871254mologous to Homo sapiens ADP.ATP translocase,accession number J03591,Smith-Waterman Score=455.

SEQ ID NO: 27047 - DNA, 1156 bp, Homo sapiens
  SIMILAR (53)..(949): 911254mologous to Homo sapiens adenine nucleotide translocator-2,accession number M57424,Smith-Waterman Score=1383.
  misc_feature (1)...(1156): n = a,t,c or g
agccggctcccggcccagtcccgtcctgcagcagtctgcctcctctttcaacatgacagatgccgctgtgtccttcgccaaggacttcctggcaggtggagtggccgcagccatctccaagacggcggtagcgcccatcgagcgggtcaagctgctgctgcaggtgcagcatgccagcaagcagatcactgcagataagcaatacaaaggcattatagactgcgtggtccgtattcccaaggagcagggagttctgtccttctggcgcggtaacctggccaatgtcatcagatacttccccacccaggctcttaacttcgccttcaaagataaatacaagcagatcttcctgggtggtgtggacaagagaacccagttttggcgctactttgcagggaatctggcatcgggtggtgccgcaggggccacatccctgtgttttgtgtaccctcttgattttgcccgtacccgtctagcagctgatgtgggtaaagctggagctgaaagggaattccgaggcctcggtgactgcctggttaagatctacaaatctgatgggattaagggcctgtaccaaggctttaacgtgtctgtgcagggtattatcatctaccgagccgcctacttcggtatctatgacactgcaaagggaatgcttccggatcccaagaacactcacatcgtcatcagctggatgatcgcacagactgtcactgctgttgccgggttgacttcctatccatttgacactgttcgccgccgcatgatgatgcagtcagggcgcaaaggaactgacatcatgtacacaggcacgcttgactgctggcggaagattgctccgtgatgaaggaggcaaagcttttttcaagggtgcatggtccaatgttcctcagaggcatgggtggtgcttttgtgcttgtcttgtaatgatgaaatcaagaagtacacataagttatttcctagggatttttccccctgtggaacagggcatgtttgtatttatattaacatatctttggaggcattcttggacagactcctggctgtccagtttctcagtggcaactattttactggttgaaaatgggaagcaataatattcatctgaccagttttctcttaaagccatntccatgatgatgatgatgggactca

SEQ ID NO: 27048 - DNA, 670 bp, Homo sapiens
  SIMILAR (668)..(543): 1001254mologous to Homo sapiens Fragment of human secreted protein encoded by gene 49,accession number Y76352,Smith-Waterman Score=213.
atgatgcttcctgagggtgttctagaagcccgttccccagtggctgtatccagcctttccttgcatcatcttcctcttgaagatgcttcaggggcccggcttttcaggcttgccctcaccagcggccgtcagccgacactcagggatgtagctaacaccactccgccagtgctttcagtaggaagagctgaggctgcctgggaggcccggggcgaccggaaaagggctctctcaagttctgaaaagagaatctgccaccagatcgaatttcgacccctgagcttgttcggacgtatggtccaaattcagattaaggtggtcacccaacccgagatgtcaggaaaggccttctgcagagaaaatgtccccccacccgccatctgcagccagacaccaggcttcatggagcgcaagacgactcacacagtggcccaggccttgtcacacgcagtgaggacaatcagaggagcacggtcaccgctcaggcctgatgccagcaggacacccaccagctgccagatgagcacgcaatcactcctcatttgcaaagcacggctcccatcattccagaacccaagacactgtctcacaaagacagctctctgcaaggaactgggaagtaacttgagtccagtcagaccggcaaaaatcagtccctcggccttgacct

SEQ ID NO: 27049 - DNA, 559 bp, Homo sapiens
  SIMILAR (288)..(329): 571254mologous to Human immunodeficiency virus type 1 tat,accession number Y16023,Smith-Waterman Score=58.
accggaaaagggctctctcaagttctgaaaagagaatctgccaccagatcgaatttcgacccctgagcttgttcggacgtatggtccaaattcagattaaggtggtcacccaacccgagatgtcaggaaaggccttctgcagagaaaatgtccccccacccgcccatctgccagccccagtgtgtgtgccacacggcagcccttccccgaaacatagtatggattttaaaaatgtgtttatttttgtttcctcaacccacctttataacgtattttttaatttattttgtaatgtcatgtttatgaagtattgctgctatccttgttatccttcccactggttttatatcactgatttattttgtgaaagttgtacactaatgttctatgtcaaaatcaaaagtatttaatgaaatactagttctatttaatgtggttatggaaccagctggaaacacaaaacaaacagtgattgtacacgcaggctgggccgcaggaggtccaggttcattttgttacatatgcaataaacccacggacttttaaaaaaaaaaaaaaa

SEQ ID NO: 27050 - DNA, 496 bp, Homo sapiens
  SIMILAR (458)..(327): 361254mologous to Pseudomonas aeruginosa quinoprotein ethanol dehydrogenase,accession number AF068264,Smith-Waterman Score=68.
ccagaaagttccataagccagagtaccgtttaaacaattcccttcttgtacctcaacaatatgtacccagggttttatgtatacacttaagatttgggggaatgcaaaagggaagggtgactgtttagaatttccttggaaatgtctgtgcacattacaacgtcccacggagccaaattccttccaaactggatgaagcaaagctcttgattcttgagtcatgatgttattttcttctaatttttccgaaccgtctttgtttgactggacaccatattgacagcttcagatggtaggccaacatatactcctccatagtttctcctcttgtcatcttctgttacggattcttctgttacatctttggctgctcctgcagggccttggcccgcgcccgcgctggtggcggtggagttcccgcagcccatcgcgcagccggccggggaagccgcgctccggagcgaattccaccacactgactagggtcacaaaacgg

SEQ ID NO: 27051 - DNA, 888 bp, Homo sapiens
  SIMILAR (542)..(210): 351254mologous to Streptomyces coelicolor A3(2) putative eukaryotic-type protein kinase,accession number AL157953,Smith- Waterman Score=121.
ctaagagcagcccagccggtcttcggcatcaaggcagacacagatgcgtttttgcagctctgcttctagttctccccaaccccactcccacccttccccgcttcctgccccaccaccactgcccgaaaagtcctgtcttgctctgctgcacttttccaggtgcagcgccttggttccgaggagatgggggagaggcctggaggagcaagtgtgggaggtgggggagcggccggggaccacgtccgggaatcctctcccccaggagagccctgagacccgccagctgcaggtgagccccggcggctgcaggggagcccgcgacagtcctccccgcgctccctcggcagagacgccccgcaggctcgactgctccaggcgcaaccgcccccgcgcgggggacttgccacgctttcggtctttccagaaacgggcggtctgctccttggcccgcgcccgcgctggtggcggtggagttcccgcagcccatcgcgcagccggccggggaagccgcgctccggagctctcggccgcgggtccctcagcatcctcctcgccttgtctttgcttttctttcctcacttcccctccctgccccaggatgtggggaggagaggaagtagcagggggcaccctgcacagtggacgcccaataaatgctattgactgaatgttgtgcaggtctgaagccaaaaccgaaatccccagctgctttaacagaaggccaacgcagctctgttccccatacgcactgcctggcaaaagttcttccccagattggtcatcttgacctattcctctcgaacttgccaaccaggctctcatctcacaccttctcacttgccgatccctcatgtctgcaatcttgtcctccagatatttgcacgccat

SEQ ID NO: 27052 - DNA, 423 bp, Homo sapiens; identical to SEQ ID NO: 11733
  SIMILAR (211)..(405): 921254mologous to Homo sapiens acidic ribosomal phosphoprotein (P1),accession number M17886,Smith-Waterman Score= 300.

SEQ ID NO: 27053 - DNA, 342 bp, Homo sapiens
  SIMILAR (124)..(336): 351254mologous to Arabidopsis thaliana putative TNP1-like transposon protein,accession number AC006586,Smith-Waterman Score= 97.
atccccaaggaagacatgaggaagacgttcagggagcaagggctcagaaatggaagctcaattttaattcaggattctcatgatgataacagcttgttgaccaaggaagagaaatgggtcactagtatgaatgagattgactggctccacgttaaaaatttatgccagttagaatctgaagagaagcaagttaaaatatcagcaactgttaacacaatggggtttgatattcgaattaaagccataaaggaattaaaattaatgaaggaactagctgacaacagctgtttgagacctattgatagaaatgggaagcttctttgtccagtgccggacagctat

SEQ ID NO: 27054 - DNA, 355 bp, Homo sapiens
  SIMILAR (255)..(314): 601254mologous to Homo sapiens Human secreted protein encoded by gene 25 clone HSNBN57,accession number Y14435,Smith-Waterman Score=60.
ctgaagagaagcaagttaaaatatcagcaactgttaacacaatggtgtttgatattcgaattaaagccataaaggaattaaaattaatgaaggaactaggatgaaggttattaattcctagctctctaagaaaaataatattccttttatatatagctgacaacagctgtttgagacctattgatagaaatgggaagcttctttgtccagtgccggacagctatactttgaaggaagcagaattgaagatgggaagttcattgggactgtgtcttggaaaagcaccaagttcgtctcagttgttcctgttttttgcaatggggagtgacgttcaacctgggacagaaatggaaat

SEQ ID NO: 27055 - DNA, 1571 bp, Homo sapiens
  SIMILAR (232)..(306): 1001254mologous to Homo sapiens diacylglycerol kinase delta,accession number D73409,Smith-Waterman Score=135.
tcagccctgaatacccaggccatatccagtgctgtcaggggctggagaggcctccaagcctggatattgggactggtgtttgccgccagtcagggcagctcctgtgggtttttcttctttgcatgtttgtccagaaatggggtttcttgcactgggctctgggcactcactgcactcgtgcttttccatctccgacagttcacctctggggacagaggaggttgctgcctgctggagcacctcagtctctgtgagtataaggacatcttcacacggcacgacatccggggctctgagctcctgcaccctgggtgttgaatcactggctgagtcccgagagggcaaaaggccactgtgggtgtcctggacagtggctctcatgaggtcacttgtcatccacttgcttttaggcctgtgttttgtctttgtcttggatttgtccttgctgatggtagtgacgtttttgtcattttggctctcatttgtgttcacaagccgaatgggaagggccgttgtggcaggcctgctgtggagccctctggccctggctgtcttctcggcatccatggcggtgtcttctctgttgcaggacagggtttctggttcagagttgaagggatcagcattaattaacaggcgactgatgactgagccaccgggtaaggaaccagacattccagcccggacatttgggtacaggatcttggtgttgagcgcaggcagccgtcccggcttcccgggtctcaccaaaaccaagcacacgacggtgcgcagagggaggtggaggcacaagtacctttgcgctggctcctccccttgggaccccgaagtctcgctgtgggacagtggtgggcacactctgtggtccatcttctcctctgactcagagaggcccaggacgaagccctcctgctcctgggtctgggcattctgctcatcgacaggggagtagacgcttatagtgaagtcaatgagggccaggaaagaggtcgaggggaggcagcatgaaggggtcccatctgcatcttcaatgatgtccttcccgatcgaggccagtgtggtccacttgcagttattggttgcacgcacagcacagcgcttgtgggccttaaatttgcacacctcgcaggacagcccgtgcgacgtgaccccagacagagcctcacggcacacattgcagtaggtcggcctcgcgtgggaacaggcgtaccaattgtgcatccctgagaagtggtccatgctgtactgggtgggtgtgttaacagttgctgatattttaacttgcttctcttcagattctaactggcataaatttttaacgtggagccagtcaatctcattcatactagtgacccatttctcttccttggtcaacaagctgttatcatcatgagaatcctgaattaaaattgagcttccatttctgagcccttgctccctgaacgtcttcctcatgtcttccttggggatggccgtccaaccctccccacctggacatccagcactgttgatgaagatgacacctgctgggattgctaaggctgtgaggacagtgcccacttctgcattag

SEQ ID NO: 27056 - DNA, 1655 bp, Homo sapiens
  SIMILAR (63)..(1652): 981254mologous to Homo sapiens UDP glucuronosyltransferase 1A8,accession number AF297093,Smith-Waterman Score=2754.
ctcacctactgtatcataggagcttagattcccagctgcttgctctcagctgcagttctctgatggcttgcacagggtggaccagcccccttcctctatgtgtgtgtctgctgctgacctgtggctttgccgaggcagggaagctactggtagtgcccatggatgggagccactggttcaccatgaggtcggtggtggagaaactcattctcagggggcatgaggtggttgtagtcatgccagaggtgagttggcaactgggaagatcactgaattgcacagtgaagacttattcaacttcatataccctggaggatctggaccgggagttcaaggcttttgcccatgctcaatggaaagcacaagtacgaagtttgttttctctatttctgagttcatccaatggtttttttaacttatttttttcgcattgcaggagtttgtttaatgaccgaaaattagtagaatacttaaaggagagttcttttgatgcggtgtttcttgatccttttgatgcctgtgcgttaattgttgccaaatatttctccctcccctctgtggtcttcgccaggggaataggttgccactatcttgaagaaggtgcacagtgccctgctcctctttcctatgtccccagaattctcttagggttctcagatgccatgactttcaaggagagagtacggaaccacatcatgcacttggaggaacatttattttgccagtatttttccaaaaatgccctagaaatagcctctgaaattctccaaacacctgtcacagcatatgatctctacagccacacatcaatttggttgttgcgaacagactttgttttggactatcccaaacccgtgatgcccaatatgatcttcattggtggtatcaactgccatcagggaaagccattgcctatggaatttgaagcctacattaatgcttctggagaacatggaattgtggttttctctttgggatcaatggtctcagaaattccagagaagaaagctatggcaattgctgatgctttgggcaaaatccctcagacagtcctgtggcggtacactggaacccgaccatcgaatcttgcgaacaacacgatacttgttaagtggctaccccaaaacgatctgcttggtcacccgatgacccgtgcctttatcacccatgctggttcccatggtgtttatgaaagcatatgcaatggcgttcccatggtgatgatgcccttgtttggtgatcagatggacaatgcaaagcgcatggagactaagggagctggagtgaccctgaatgttctggaaatgacttctgaagatttagaaaatgctctaaaagcagtcatcaatgacaaaagttacaaggagaacatcatgcgcctctccagccttcacaaggaccgcccggtggagccgctggacctggccgtgttctgggtggagtttgtgatgaggcacaagggcgcgccacacctgcgccccgcagcccacgacctcacctggtaccagtaccattccttggacgtgattggtttcctcttggccgtcgtgctgacagtggccttcatcacctttaaatgttgtgcttatggctaccggaaatgcttggggaaaaaagggcgagttaagaaagcccacaaatccaagacccattga

SEQ ID NO: 27057 - DNA, 2025 bp, Homo sapiens
  SIMILAR (775)..(1071): 911254mologous to Homo sapiens UDP glucuronosyltransferase 1A8,accession number AF297093,Smith-Waterman Score=477.
atgatggggaccgtgatagctggtgggggcctgcaggccacagggcatcaccaaaatgcccccttgagtgggccaaagaggcagtgtatcctgtggggtatcacattgtcaggacagactgaaggaaaggagaagatggttggtggagtccacattcaaactggtattgactgcgaacctctacttttaaatgttcttcatctagacacaagcagtgatggagaaaagtgttgtcaggtgatagaatctccacatgcctttccagctaatgcagaagtgggcactgtcctcacagccttagcaatcccagcaggtgtcatcttcatcaacagtgctggatgtccaggtggggagggttggacggccatccccaaggaagacatgaggaagacgttcagggagcaagggctcagaaatggaagctcaattttaattcaggattctcatgatgataacagcttgttgaccaaggaagagaagaaatgggtcactagtatgaatgagattgactggctccacgttaaaaatttatgccagttagaatctgaagagaagcaagttaaaatatcagcaactgttaacacaatggtgtttgatattcgaattaaagccataaaggaattaaaattaatgaaggaactagtgtttaaagttaatgctgaagaaatctggcctacaagggtggaccagcccccttcctctatgtgtgtgtctgctgctgacctgtgctttgccgaggcagggaagctactggtagtgcccatggatgcggagccactgttcaccatgagaattctcttagggttctcagatgccatgactttcaaggagagagtacggaaccacatcatgcacttggaggaacatttattatgccaccgttttttcaaaaatgccctagaaatagcctctgaaattctccaaacacctgttacggagtatgatctctacagccacacatcaatttggttgttgcgaacggactttgttttggactatcccaaacccgtgatgcccaacatgatcttcattggtggtatcaactgccatcagggaaagccgttgcctatgatgccaggatgtgtctgggaaaagcatgcagttggttacatcttgctgggaaacaggattcagagtctgtgtcttatctgtctgatgagaaggaagcattacttgatgatggagtatgtgtttgcacatgaagacttcttagatctaacagtagcagtcaaaaatgtatccggtttggaagatgctctctggaacatgtatgtagaagaggaagtttttgattgtgacaacttgtaccactgtggaacttgtgacaggctggttaaagcagcaaagagtgaattggatgacttagaatatatatatgacctcttctcagttattatacacaaaggtggctgctacggaggccattaccatgtatatattatagatgttgatcatttgggaaactggcagtttcaattcttacagctccattctcagatatttctactcagttcagatgaaagtacagttcgtctcttgaagaatagttctctccaggctgagtctgatttccaaaggaatgaccagcaaattttcaagatgcttcctccagaatccccaggtttaatcaatagcatctcctgtccccactggtttgatataaatgattctaaagtccagccaatcagggaaaaggatattgaacagcaatttcagggtatagaaagtgcctacatgttgttttatcggaaatcccagttgcagagaccccctgaagatgccaggatatgtctgggaaaagcatgcagttggttacatcttgctgggaaacaagattcagagtgtgagtctcatctgcctgatgagaaggaagcattacttagtgatagaggacaaagcgttgatggaaccaatccagaaaaagtgttcttgttgtctaggccttcttgttgtacaaccaaaaaactgtcagtgggtgttgatcttgtcccctcaaggcttaaggtttggcagttctacacatga

SEQ ID NO: 27058 - DNA, 415 bp, Homo sapiens
  SIMILAR (82)..(5): 651254mologous to Homo sapiens Human secreted protein clone pe159_1,accession number Y28253,Smith-Waterman Score=76.
tttttttaagctggagccgcttgtatttattcagtacagatttaatgacaaaggcctggagccaacacaatctgtaggtaattgtcacccccaccgccttgggagcagtcctgcgcgcaataggatgatcaaaggtctgcaaaagtaaataaaactcgtctagataaattcctttacactcctttgttacctacttcttgcccttagcgtcagggtaagagaatttagctgccttcagcctttattctctcccgaagctttgcaaaacctcctggacttccaagaaggtttgcgtctctccttataacttttcccaccaccctgactgatctcctacatctcccccttttgttttttgcatcaggttttgttgattgaagagtacagatgtgcacagcagcaggtttgtcaggcg

SEQ ID NO: 27059 - DNA, 550 bp, Homo sapiens
  SIMILAR (266)..(364): 541254mologous to Paramecium bursaria Chlorella virus 1 NETTF (7x), DETTS (4x),accession number U42580,Smith-Waterman Score=97.
atcctaccagtttccatttcacattgggaaggttgatcatttcagttaaccatgttaggtttttgtaggagattggtcagggtggtgggaaaagttataaggagagacgcaaaccttcttggaagtcctgggaggttttgcaaagcttcgggagagaataaaggctgaaggcagctaaattctcttaccctgaggctaagggcaagtagtaggtaacaaacgagcgtgctggagtttatctagataagtttatttacttttgccgacctttgatcatccgaccttagatcatccgacctttgatcatctgacctttgatcatctgacctttgatcatccgacctttgatcatctgacctttgatcatctgcgtgcaggactgctccctacaggcgggggcaacaattacccacagattgtgctggctccaggcctttggcattaaatctgtactaaataaatacaagcagctccagcttattggggctgcgtactctcttcggcgtctctaaggccgagcaggttcctagctgcgctcacgcacaatacc

SEQ ID NO: 27060 - DNA, 510 bp, Homo sapiens; identical to SEQ ID NO: 13505
  SIMILAR (1)..(213): 541254mologous to Mus musculus Pro-Pol-dUTPase polyprotein,accession number Y12713,Smith-Waterman Score=162.

SEQ ID NO: 27061 - DNA, 717 bp, Homo sapiens
  SIMILAR (289)..(642): 811254mologous to multiple sclerosis associated retrovirus polyprotein,accession number AF009668,Smith-Waterman Score=472.
atgggagtctttgtagacatagggatgcaagcattaaatatgataccaagtatgataccagtggaaaaggtggcatcatcagtagcttctaatagagctgtaacactcatcacatggcccaagattccattccttggaatccgtgaggccaagaaccccaggtcagagaacacgaggcttgccaccatcttggaagtggcccaccgccatcttggaagtggctcgccaccatcttgggagctctgtgagcaaggacccccggtaacattttggcgatcacaaagggacctccaaagtggaactagtgctcagctggcagaactaatagccctcactcgggcactagaattaggagaagggaaaagtgtaaatatatatacagactctaagtatgcttacctagtcctccatgccaaggaagcaatatggagagaaagggaattcctaacttccaaggaaacacctatcaaacatcaggaagccattaggagattactactagctgtacagaaacctaaagaagtgacagtcttacactgcccgggtcaccagaaaggaaaggaaaaggaaataggaaggaaccaccaagcggatattgaagccaaaagagccacaaggcaggactctccattagaaatgcttatagaaggacccttagtatggggtaatcccctccaggaaaccaagccccagtactcagaagaagaaatagaatga

SEQ ID NO: 27062 - DNA, 1125 bp, Homo sapiens
  SIMILAR (517)..(1125): 991254mologous to Homo sapiens cGMP-gated cation channel protein,accession number M84741,Smith-Waterman Score=1052.
cctctttgggtcccctccctttgtatgggagctctgttttcactctattaaatcttgcaactgcactgtcttctggtccatgtttgttactgctcgagatgagctttcgccccccgtccaccactggtgtttgccgctgtcacagacccgccgctgtcacagacccaccgctgactgccatccctccagatctggaagggtgtccgctgtgcttctgatccagcgaggcacccattgccactcctgattgggctaaaggcttgcccttgttcctgcacagctaagtgcctgggttcatcctaatcgagctgaacactagtcactgggttctacggttctcttccatgacccacggcttctaatagagctataacactcaccacatggcctaagattccattccttggaatccgtgaggccaagaaccccaggtcagagaacacgaggcttgccaccatcttggaagcgacccaccaccatcttggaagtggctcgccaccatcttgggagctctgttacttaaaccaaggactgttggtaaagaaagaacttaaactcataaataaatataaatccaacttgcaatttaaacttgatgttctgtcactgataccaactgatttgctgtattttaagttagggtggaactatccagaaattagattaaacaggttgttacggttctctcgtatgtttgagttcttccagagaacagaaacaaggacaaactatccaaacatcttcaggatttccaaccttgttatgtatatcgtcatcattatccactggaatgcatgtgtgttctactctatttctaaagctattggatttggaaatgatacatgggtctaccctgatattaatgatcctgaatttggccgtttggctagaaaatacgtatacagcctttactggtctacactgactttgactaccattggtgaaacaccccctcccgtgagggattctgagtatgtctttgtggtggttgatttcctaattggagtgttaatttttgctaccatcgttggtaacataggttctatgatttccaacatgaatgcagccagagcagaatttcaagcaagaattgatgctatcaagcaatatatgcattttcgaaat

SEQ ID NO: 27063 - DNA, 891 bp, Homo sapiens; identical to SEQ ID NO: 13510
  SIMILAR (436)..(615): 541254mologous to Mus famulus reverse transcriptase,accession number AJ233597,Smith-Waterman Score=140.

SEQ ID NO: 27064 - DNA, 435 bp, Homo sapiens; identical to SEQ ID NO: 15491
  SIMILAR (266)..(201): 1001254mologous to Homo sapiens super cysteine rich protein; SCRP,accession number U63332,Smith-Waterman Score=195.

SEQ ID NO: 27065 - DNA, 346 bp, Homo sapiens; identical to SEQ ID NO: 15492
  SIMILAR (339)..(7): 801254mologous to Homo sapiens Spinocerebellar ataxia type 2 (SCA2) disease associated protein,accession number W60213,Smith- Waterman Score=426.

SEQ ID NO: 27066 - DNA, 1260 bp, Homo sapiens
  SIMILAR (490)..(552): 951254mologous to Homo sapiens super cysteine rich protein; SCRP,accession number U63332,Smith-Waterman Score=181.
ctaagcaaagttggcaatgatagataaaacatcatcagccatttcatccagatcaaataactgccacgagaagaggtggcagtctcttctgtctgtatctgcccatgagtctctcagttgatcttccttcatgtcgcagtcagaaatgtgatgggtgcccattcctaagccaatcaagggtttttctaaacattttacacacattaactcatttattcccctcaataacttcatggggtaggtaccgatatcgtgctcatttcctagatatgctaagtggtactgggaagggtaactaacctgccaagggtagagagtaagtcgtggagccacgaagccaacccaaagggtctgacccagggtcagcacttttaacagcacgtcactggagagcctctgagatgcttctaaaaggacgaatccatctgcttctgtctctggtactgagggctttttagattccggaggctttctgaagaagtgaaacattgctgctgctgctgctgctgctgctgctgctgctgctgctgctgctgctgctgctgctgctgggtctagagccatctctgggccctgtaggtattggccacttctggccatcacccacagcagccacagcctcctgcttcttgccccaaagctgccactgtcatcagcctctgggctatggaaacatccaacatcagagggcagaaatgcaacagagttctgattattctcttttccacacagttttagtacaatgaccttgggtgagtcatttgaccatttggggcctcggtttgtgacaaagagatacttaccatgagacatgggtttggggggttggttctgatttaccttattcacttttgaaaatttggaacagtcaccttcactcactagaattccaaggtgctttctgtcacattttgaatacaaatctgaggaagcgtctttgcatcttctagtgatattttttcccgggctcagtgaatctacggcagggcagggtgccctttcccttaactcatgccacagatctccttttctgcattcccaagaggggagaggcctgagagggtcagcaacagtaccaatagggagcagagccagcgcaattctgctctttctggtggcttgactgaggaggaccttaacaccctctactctgaaccctccgatctgctttccatgctgcagtacaatcttttcaccctctgcatagaacccttcaatgtttcccattgatcttatgataaagaccgaactccacagcat

SEQ ID NO: 27067 - DNA, 475 bp, Homo sapiens
  SIMILAR (291)..(419): 1001254mologous to Homo sapiens ras-related C3 botulinum toxin substrate,accession number M29870,Smith-Waterman Score=222.
atgcgagcccatcaaagtgtatgttgtgggaaaccggagctgtaggtaaaacctgcctactgaatcagttacacaaccaatgcatttcctggagaatatatccctactgtctttgacaattattctgccaatgttatggtagatggaaaaccggtgaatctgggcttatgggatacagctggacaagaagattatgacagattacgccccctatcctatccgcaaacagatgtgttcttaatttgcttttcccttgtgagtcctgcatcatttgaaaatgtccgtgcaaaggtgctgtaaaatacctggagtgctcggcgctcacacagcgaggcctcaagacagtgtttgacgaagcgatccgagcagtcctctgcccgcctcccgtgaagaagaggaagagaaaatgcctgctgttgtaaatgtctcagcccctcgttcttggtcctgtcccttggaacctttgtacgctttg

SEQ ID NO: 27068 - DNA, 1566 bp, Homo sapiens
  SIMILAR (1372)..(1503): 971254mologous to Homo sapiens ras-related C3 botulinum toxin substrate,accession number M29870,Smith-Waterman Score=225.
atggagtttcgtcatgttggccaggctgatctcgaactcctgacctcaggtaaaaatccagaggtaagtcatccaggctggtacatagctcttctccatgaagcctggtgccccaaccccttcttcatgggccaagatggagctctagtcagcacatctaagtcccaagaacaggatggagaaacagagctagaagaggacaaagaggctagggtgtggccatgtcaaaaaagcgaaaacaacaatatttgttaccactgctggatgaacagggccatcaaaaatgggaaacattttgaaaacatgttgaaacccatttatcagccttttgaccactgcagaaatagtttaagaaatcaagaatgtgaacattccggaaaggcgagggtcagctgccggggcgacgcggcgcggagagggcgggcgggggggctgtgggagcgccggtctctatatggcggcggctctgtcgggcctggctgtccgctctcgcgctcggccgccgcccgctcctatggggtcttctgcaaggggctgactcgcacgctgctcatcttcttcgacctggcctggcggctgcgtatcaacttcccctacctctacatcgtggcttccatgatgctcaacgtccgcctgcaggtgggctgtgtggaaatccgggggtttgtttctgctacctccagtctgatcatttgggccatgagcacaggtcaggcagccctgacgtatgagaaccagcctggcactcgcagcttcgccctggtggaggtgttactattgaatagaataatctcgcagaacactaacatcagagaaggtcacctgtgtgactgtgctgaaataggaccaaaaggaaaaattggacagaagaagaaccggacacagcacggctccaagtctgtcactagggtactacgggcggtcacgaaaacaagaccggtggtaaatcaaatcgagttccgaacaaccttcacactgggaactaaacttgatcttagggatgataaagacacgatcgagaaactgaaggagaagaagctgactcccatcacctatccgcagggtctagccatggctaaggagattggtatggaatcctgtgtttttcctcctccttgtacctcttttattgtagtgacagagactggagtccagtctgggaaaggagggtgtgtgtctcccactcagggcctggtgtactcttggggaaccagctggcaaggccctgtgggtcttaacgtcagcgttggaaggtggaagcagggctgggagccggcagaaggcgcccgggccccaggagctgcctcccgctggtggtgtgatcagaagagagtggggtcgagtgtacattgccgtgtggtcgtgtttcctgtaggtgctgtaaaatacctggagtgctcggcgctcacacagcgaggcctcaagacagtgtttgacgaagcgatccgagcagtcctctgcccgcctcccgtgaagaagaggaagagaaaatgcctgctgttgtaaatgtctcagcccctcgttcttggtcctgtcccttggaacctttgtacgctttgctcaaaa

SEQ ID NO: 27069 - DNA, 695 bp, Homo sapiens
  SIMILAR (1)..(633): 1001254mologous to Homo sapiens small GTPase rac1b,accession number AJ132694,Smith-Waterman Score=1116.
atgcaggccatcaagtgtgtggtggtgggagacggagctgtaggtaaaacttgcctactgatcagttacacaaccaatgcatttcctggagaatatatccctactgtctttgacaattattctgccaatgttatggtagatggaaaaccggtgaatctgggcttatgggatacagctggacaagaagattatgacagattacgccccctatcctatccgcaaacagttggagaaacgtacggtaaggatataacctcccggggcaaagacaagccgattgccgatgtgttcttaatttgcttttcccttgtgagtcctgcatcatttgaaaatgtccgtgcaaagtggtatcctgaggtgcggcaccactgtcccaacactcccatcatcctagtgggaactaaacttgatcttagggatgataaagacacgatcgagaaactgaaggagaagaagctgactcccatcacctatccgcagggtctagccatggctaaggagattggtgctgtaaaatacctggagtgctcggcgctcacacagcgaggcctcaagacagtgtttgacgaagcgatccgagcagtcctctgcccgcctcccgtgaagaagaggaagagaaaatgcctgctgttgtaaatgtctcagcccctcgttcttggtcctgtcccttggaacctttgtacgctttgctcaaa

SEQ ID NO: 27070 - DNA, 1107 bp, Homo sapiens
  SIMILAR (251)..(808): 451254mologous to Homo sapiens ras-related C3 botulinum toxin substrate,accession number M29870,Smith-Waterman Score=264.
ctgcagttttcctcagctttgggtggtggccgctgccgggcatcggcttccagtccgcggagggcgaggcggcgtggacagcggccccggcacccagcgccccaccacccagcaagccgcgcgcccgtccgccgcgccccgagcccgccgcttcctatctcagcgccctgccgccgccgccgcggcccagcgagcggccctcgatgcaggccatcaagtgtgtggtggtgggagacggagctgtagggtaaaactttgcctactgatccagttacacaacccaatgccatttcctgggagaatatatccctactgtctttgacaatttattctgcccaatgttatggtagatggcaaaaccggtgaaatctggggcttatgggatacagctggacaagaagattatgacgagattacgcccccttatcctatccggcaaacagaatgtgttcttaaatttgcttttccccttgtgagtcctgccatcatttgaaaatgtcccgtgcaaaagtggtatcctgaggtgcgggcaccacttgtcccaacactcccatcaatcccagtgggaacttaaacttgatcttagggatgataaaagacacgattcgagaaacttgaaggagaagaagctgactctccatcacctatcccgcagggtcctaagccatggctaagggagattgggtgctgtaaaatacctgggagtgctccggcggctcacacaagcgaaggcctcaagacagtgtttgacgaagcgatccgagcaagtcctctgcccgcctcccgtgaaagaaagaggaagagaaaattgcctgcctgttgtaaatgtctcagccccctcgtttcttgggtcctgtccccttggaaccttttgtcgcctttgctcaaaaaaaaacaaaaaaaaaaaacaaaaaaaaaaaaacaacggtggagccttcgcactcaatgccaactttttgttacagattaatttttccataaaaccattttttgaaccaatcagtaattttaaggttttgtttgttctaaatgtaagagttcagactcacattctattaaaatttagccctaaaatgacaagccttcttaaagccttatttttcaaag

SEQ ID NO: 27071 - DNA, 408 bp, Homo sapiens
  SIMILAR (163)..(246): 551254mologous to Neisseria meningitidis Z2491 putative 50S ribosomal protein L35,accession number AL162754,Smith-Waterman Score=59.
  misc_feature (1)...(408): n = a,t,c or g
ttagagattacaatttgactgaagaacagaaggcgatcaaggccaagtatccgccagtcaataggaagtacgagtgtgagtggggagaagaattttcattgtccaagcaccctcagggaacagaagtcaaagcaataacatattcagcaatgcaggtctataatgaagagaacccggaagtttttgcgatcattgacatttaagacaccaaaaaataaaagactcctacgaagaactggttttgttttcctcttccttttgagaagacactatgaattaaattctacagcttttttttgatatatggaaatttgtagaacagaaatattttagttaaagtgtgactttcagaaagggaaaatcagggcacagccttggtctgtgttccccaaatattcacactttaan

SEQ ID NO: 27072 - DNA, 478 bp, Homo sapiens; identical to SEQ ID NO: 16649
  SIMILAR (111)..(314): 361254mologous to Salmonella typhi PilNb,accession number AF000001,Smith-Waterman Score=79.

SEQ ID NO: 27073 - DNA, 657 bp, Homo sapiens
  SIMILAR (179)..(334): 611254mologous to Homo sapiens Human secreted protein, SEQ ID NO: 6613,accession number G02532,Smith-Waterman Score=154.
caacattgggggagatatctgaagagagcatttgagcaatggcaagtgcccaggtttggtcacatgccagatcctgggccagtgaagcccctccaaccagtagaagtagaaaccaggggaaatgactacaagtttcttctgtttcacttttgggatgaatggctttataagttcagtgctgatgaattcttcatacccgggaagttgtgtgctattgttttctagaaaaggttgtaaaggccaggcgcggtggcttacgcctgtaatcccagcactttgggaagccgaggcaggtggatcacctgaggtcaggagttcgagaccagtctgaccaataaggaagtgaaagtacttagcattgatcaaagaaatttcaaattacgatcaattgggtggggagaagaattttcattgtccaagcaccctcagggaacagaagtcaaagcaataacatattcagcaatgcaggtctataatgaagagaacccggaagtttttgtgatcattgacatttaagacaccaaaaaataaaagactcctacgaagaactgtttttgttttcctcttccttttgagaagacactatgaattaaattctacagcttttttttgatatatggaaatttgtagaacagaaatattttagttaaagtgtga

SEQ ID NO: 27074 - DNA, 386 bp, Homo sapiens
  SIMILAR (383)..(210): 501254mologous to Schizosaccharomyces pombe putative phosphotransferase,accession number Z99259,Smith-Waterman Score= 150.
ttttttttttcttgttactttttaaaatttcttttttataaattaatattttattgttggatcctcctcctttctctggagctgtgcttggggctactctgacactctgtctcttcatcaccagccaaggaaaggggctttcgggtagggcgtacgtgcagggcctccttgaagtacttgggaaggaggaagccatcagtattccctgccagagccaggggtccatcgatgaacacagctatttcacaatgggaccgcatgccactgatgataccggggtctccaggcagtcctggggccaggtgaatgtgcgtccttccctggcaggacaggcctttgagtaggatggatggccagtgcttccagaatgtaccatggactagcat

SEQ ID NO: 27075 - DNA, 949 bp, Homo sapiens
  SIMILAR (388)..(780): 331254mologous to Schizosaccharomyces pombe putative phosphotransferase,accession number Z99259,Smith-Waterman Score= 152.
  misc_feature (1)...(949): n = a,t,c or g
cggcccccttgagatcgtagacactagtcagtgcggtggaattccacctccctgcccctccgtgaggcagatcctctttttatgtaagttgaaaaaactgcggcccagaaaggggagactttctaaaggtcccacagaggatgcccaagcgatctccaagcccagactttgtttcggttgcctgtggctccctgttaaccctggcccagtccagagcaaggttagctcctgagcaccctgcctgcccacagatggcttcgtgcccctgggcaccctcctgcagttgccccagttccgcggcttctctgctgaagatgtgcagcgcgtgggtggacaccaataaggaagcagcggttcgccctgcagctgggggatcccagcactggccttctcatccgggccaaccagggccattccctgcaggtacttaagttggagctgatgcccttgaagacaccgcaggccctgcccccgatgctagtccatggtccccttcaaaggttacaacacttgtctggggccaccccatgtccggcatggagcagcacccntgcatcccccagcccaggaccccagtctgcntaggttgctgactgcactccaggtgcccaggcctcagctccagctgtctctgcaggcatgcggtcccattgtgaaatagctgtgttcatcgatggacccctggctctggcagcagatggaatacccttcttccgctctgccaatggggtgattctgactccagggaatactgatggcttcctccttcccaagtacttcaaggaggccctgcagctacgccctacccgaaagcccctttccttggctggtgatgaagagacagagtgtcagagtagccccaagcacagctccagagaaaggaggaggatccaacaataaaatattaatttataaaaaagaaattttaaaaagtaacaagaaagaaaaa

SEQ ID NO: 27076 - DNA, 853 bp, Homo sapiens
  SIMILAR (141)..(275): 841254mologous to Homo sapiens Human secreted protein encoded by Gene No. 4,accession number W73400,Smith-Waterman Score=200.
  misc_feature (1)...(853): n = a,t,c or g
cgactgatccgcaatcgacttggccgtggccgacgtggtcaagacctggcgtttcagcaacatgcgccagtggaatgtcaactgggacatccgccagttggccatcgagtttgatgaacacatcaatgtggcctcaagctgcgtgtctgccagctgccgaatttgtacacgagtatatcgggggctacattttcctgtcgacgcgggagcgggcccgtggggaggagctggatgaagacctcttcctgcagctcaccgggggccatgaggccttctgagggctgtctgattgcccctgccctgctcaccaccctgtcacagccactcccaaagcccacacccacaaggggctcactgttctcacacccgctccaggcaggcacccagctgggcatttcacctgctgtcactgactttgtgcaggccaaggacctggcagggccagacgctgtaccatcacccaggcccagggatgggggtgggggtccctgagctcatgtggtgccccctttccttgtctgagtggctgaggctgatacccctgacctatctgcagtcccccagcacacaaggaagaccagatgtagctacaggatgatgaaacatggtttcaaacgagttctttcttgttactttttaaaatttcttttttataaattaatattttattgttggnnnnnnnnnnnnnnnnnnnnnnnngggcgccccggccggaaatcccaaatttagaaatggaaaaaccggaaaacccccgcaggtgcctttaaagggggcagggggcccaattaaaatttttttaattaaaacaccgttgggccttttttaaggaaacaaaactcctctaggttcaaat

SEQ ID NO: 27077 - DNA, 1093 bp, Homo sapiens
  SIMILAR (383)..(484): 441254mologous to Homo sapiens Protein polymer adhesive substrate PPAS1-A monomer,accession number W49712,Smith-Waterman Score=54.
  misc_feature (1)...(1093): n = a,t,c or g
caccagtccaggctccctgggagttgctggggggcggagctgaagggtcctactattcctggagaccactggcactcctttctctctgggctctctctgcagtgggtcattgagggttcaggatgggcagtagggcagggtcaccatggagactaggggccaccgctgggttctttcaggaccgagacgtgcagctgtccaaggctctgtcctatgccctgcgccatggggccttgaagctggggcttcccatgggagctgatggcttcgtgccccctgggcaccctcctgcagttgccccagttccgcggctttctctgctgaagatgtgcagcgcgtggtggacaccaataggaagcagcggttcgccctgcaagtggggggatcccagcactggccttctcatccgggccaaccagggccattccctgcaggtcggggtacctaagttggagctgatgcccctggagacaccgcagggccctgccccccggatgctagttccatggtaccatttctggaagcactgggccatccatcctactcaaaaggcctgtcctgccaggggaaggacgcaacattcaccttggccccagggactgnctgggagaccccggtattcatcagtggcatgcgggtcccgttgtgaaatagctgtgttcatcggatggacccctggctctggcagcagatggaatacccattcttccgctctgccaatggggtgattctgactccagggaatactgatggcttcctccttcccaaagtacttcaaggaggccctngcagctacgccctacccgtgagaaccaccaccccagcccctattccttgttcctgaaagctgtgcccttctgcccctcaccctctctcctagcttccaaccctagactgacttaggtgtccctttctctaaccaactcttgtctttatcaggaaagcccctttccttggctggtgatgaagagacagagtgtcagagtagccccaagcacagctccagagaaaggaggaggatccaacaataaaatattaatttataaaaaagaaattttaaaaagtaacaagaaagaactccgtttgaaaccaa

SEQ ID NO: 27078 - DNA, 544 bp, Homo sapiens
  SIMILAR (158)..(108): 941254mologous to Homo sapiens calpastatin,accession number U26724,Smith-Waterman Score=88.
cagttggcttagatggtttctctttacattcagaccggtcaaaatcttctgaaagttcatcaatgagttctgattcactccgaggcttgggtttttcttcaggctctgggcaataggggttttccatctttatccgtggctggttttaatctgtacttcagatgggattgtttcatcatcctcaccacacttctctagtttttcttctttagcttttgcctcatcgacttccttaattgagcggaggtcgagctcaggttctgcttgccgggtgcccagtgaagccgacagagcctcgagtgcttgatcactcattgtatccttctccacctttcttttcttctcttggggtggagcagcacttctgactgtccctgctggactgagcttttaaaacttctgtagattcctctttttcagtttttctttccagcagctgtaggcgacccacaggtgaagtcagatgacaaggcgtctatagcatcatctggccctatgggtttcgaagagtctgcaggaggccctgtgatcccttcctttttag

SEQ ID NO: 27079 - DNA, 838 bp, Homo sapiens
  SIMILAR (527)..(781): 331254mologous to Homo sapiens SPR1,accession number AB031480,Smith-Waterman Score=99.
atgggctcgcctacacccgaacctaacctcgatgacattcagggttcttgggtatattcaccgccctacgacgatgtgaggtttcgatataggctggagagatttcgggaacatgggtcctattcgggaacctttaaaaaaatgggaacacgaatctacagaagtttaaaagctcagtcagcagggacagtcagaagtgctgctccaccccaaggaagaaaagaaaggtggagaagactggtttgtaacaatcctttaatggcccacttgagtccatcaagctatgaagtcttcctgaaaaggagtggattcacttacttcctagaggaactgcccagttcatatggttggatttgtgtccccacccaaatctcatgtcgaattgtaattcccagtgtggaggaggggcccgcccaggcactctccagcagcccagagggagctcctcccagacaaccaagcggaaaagaggcgaagccagaaagagacagagacctgccatcgtggccaaggaccccacgaagagggaacagaggtccacgcacgggacccaacctctgatcaagcccagcaggcacaggcctgcctcgcggagtgcaggccagccgagcctgggccgcccatgccgagcccgggcctgcccatcctgcacccacccggaaaccgcgcctgccagcgagcactccccgcagccccagctcccgcccacgcctctccctccacacctccccgcaagcagagggagccggctccagcctcggccagccccagagaggggcccctacagcgcagtggcgggctgaagggctcctccagcgcaggcagcgtggacgcctag

SEQ ID NO: 27080 - DNA, 1602 bp, Homo sapiens
  SIMILAR (1480)..(1602): 851254mologous to Homo sapiens Human secreted protein, SEQ ID NO: 7420,accession number G03339,Smith-Waterman Score=167.
tcagaccccctgttgatgtgtgcaaatgttggctgtggtaggcaggggtggggtgatcaccaggtccccagtgaaatgctcaggtggaggcagcagcagctgcactatggccctgctccttgggagtgtggtgttgctttcagtggcagcagccacaggcaggtggctggaaagcgtgtactttggctctaggtggcgctttatttgtgcctgaggattttcttttgtgattgttcttttaacttttattttttccgagttgaaggaaatagacagctgtagatggttcacaataccaatcacaatgcgataaatacaagttgcttcatttacatgggcaaagtgggatataatagtccagatcacaggaagtgggctagttggtttcttggtctgagcacagtaaagggattccactgtaaaaccaaggctttgccttataacccttgatgctccagcaaactctagcagacctgcagcagaggggccttcaagagctttgtaaaatgcaccaatcagtgctctgtaaaacgcaccaatcagcaggattctaaaagtagccaatcgtggggatgactgaataaagggcactctgataggacagaaatggaacaactttgggtccgtgccatttttaagagttgtaacaccacgaaggtccgtggctccattcttgaagtcagaaggccacaaacccccccggcaggaatcaactctggacacaacaggaatgcttttacactgatccaggtcatgctgatgcaagaggtggattcccatggtcttgggcagctccacccctgtggctttgcagggtacattcactctcctggctgctttcatgggctggcattgagtgtctatggcttttgccagcgcatggtgcaagctgtcagtggatctactattctgggttctctgtctggacatccaggcatttccatacaccctctgaaatataggcagaggttcccaaacctcaattcctgacttcagtgcacctgcaggcccaacaccacatgtaagccacaaagccttggggtttgcatcctctgaagcaatagcctgagctgtaccttggccccttttagctagggctggagctgaagtagcattttttccttctaggcctccaggtctgtgatggaaggggctgggctggtgtgaaggtctctgacatgccctggagacattttccccattgtatcggggattaacatccggattacttatgcaaatttctgcagccggcttgaatttctccatagaaaatggggttttcttttctattgcaccgtcatgttgcaaattgtccaaacttttatgctctgcttcatcttgaacactttgccacttagaaatttcttcccccagataccttaaatcatctctctcaagttcaaagttccacagatttctagggcaggggaaaaatgctgctagtctcttttcacagcaagagtgacctttactccagttcccaaaaagttcctcatctccatctgagacaacctcagcctggaccttattgtccatatcactatcagcattttggtcaaagccattcaacaagtctctaggaagttccaaactttcccacat

SEQ ID NO: 27081 - DNA, 543 bp, Homo sapiens
  SIMILAR (421)..(543): 801254mologous to Homo sapiens Human secreted protein, SEQ ID NO: 7420,accession number G03339,Smith-Waterman Score=161.
ttaggacacagggcaccaagtcacttggctgcacacagcacgggggccctggacctggcccacaaaaccattttttcctctcaggtctccgggatgccatgaaggtctctgacatgccccggagacatgttccccgttgtcttggtgattaacattcagctcctccttacttatgcaaatttctgcagctggcttgaatctctccccagaaaatgggattttcttttctattgcattgtcaggttgcaaatttttcaaacttttatgctctgctttctcttgaacactttgccccttagaaatttcttctaccagataccctaaatcatctctctcaagttcaaagttccacaaatctctaaggcagaagcaaaatgccaccagtctctttgcataggaagagtgacctttattccagttcccaacaagttcttcatatccatttgaggccacctcagcctgggctttattgtccatatcactatcagctttttggtcaaagccattcaacaagtctctaagaagttccaaactttcccacat

SEQ ID NO: 27082 - DNA, 567 bp, Homo sapiens
  SIMILAR (448)..(567): 871254mologous to Homo sapiens Human secreted protein, SEQ ID NO: 7420,accession number G03339,Smith-Waterman Score=168.
ttatgcaccggaatgctcaacaccatgtgaaaactgccaaaccttggggcttgcatcctctgaagccacagcccaagtgatactctggacccttttagccaccattggagcaactgagatgcaaggcaacaggcccctaaggatgcacacagcagggtggccctgggcctggccctcaaaacaatttttccctcctaggcctccaggcctgtgatgggagggattgccacgaaggtctctgacatgacctggagacattttctccattgtcttggtgatcaacattttatgctccactttctcttcaatgctttgctgcttagaaatttcttgcaccagatcccctaagttatctctctcaagttcaaaggtccacagatctgtatggtgggggccaaataccaccagtctctttgcatagcaaaagtgatctttactccagtttccaacaagttcctcatctccatctgagaccacctcagcctggaccttattgtccatatcactatcagcattttggtcaaacccattcaacaagtctctaggaagtttcaaactttcccacat

SEQ ID NO: 27083 - DNA, 687 bp, Homo sapiens
  SIMILAR (564)..(686): 851254mologous to Homo sapiens Human secreted protein, SEQ ID NO: 7420,accession number G03339,Smith-Waterman Score=167.
ctctgtctggacatccaggcatttccatacaccctctgaaatataggcagaggttcccaaacctcaattcctgacttcagtgcacctgcaggcccaacaccacatgtaagccacaaagccttggggtttgcatcctctgaagcaatagcctgagctgtaccttggccccttttagctagggctggagctgaagtagcattttttccttctaggcctccaggtctgtgatggaaggggctgggctggtgtgaaggtctctgacatgccctggagacattttccccattgtatcggggattaacatccggattacttatgcaaatttctgcagccggcttgaatttctccatagaaaatggggttttcttttctattgcaccgtcatgttgcaaattgtccaaacttttatgctctgcttcatcttgaacactttgccacttagaaatttcttcccccagataccttaaatcatctctctcaagttcaaagttccacagatttctagggcaggggaaaaatgctgctagtctcttttcacagcaagagtgacctttactccagttcccaaaaagttcctcatctccatctgagacaacctcagcctggaccttattgtccatatcactatcagcattttggtcaaagccattcaacaagtctctaggaagttccaaactttcccacatt

SEQ ID NO: 27084 - DNA, 1518 bp, Homo sapiens
  SIMILAR (526)..(849): 871254mologous to Homo sapiens p40,accession number U93572,Smith-Waterman Score=472.
atgtgggaaagtttggaacttcctagagacttgttgaatgtctttgacaaaaatgctgatagtgatatggacaataaagtccaggctgaggtggtctcagatgaaaatgaggaaattgtttggaactggagcaaaggtggctcttgttatgttttagcaaaaagactagcggcattttgcccctgccctagagatttgtggaactttgaacttgagagagatgatttagggtatctggtggaagaaatttctaagcagcaaagcattcaagagggcaatggggaaaatgtctctgggccatgtcagaggtcttcatggcagcccctcctatcactggcccagaggcctaggagtaaaaaatgtgactgggcccagggtccccatgctgtgagcagcctagggacttggtgccctgcatcccagccacttcagccatggctgaaaggggccaatgtagagctggggcaatggcttcagagggtgcaatccccaagtcttggcagcttccatgtggtgttgatcctaccaaatctacgtttgattggtgtacatgaaagtgatggggagaatggaaccaagttggaaaacacttttcaggatattatccaggagaactgccccaacctagcaaggcaggccaacattcaaattcaggaaatgcagagaacaccacaaagatactccttgagaagagcaacccctagacacataattgtcagattcaccaaggttgaaatgaaggaaaaagtgttaagggcagccagagagaaaggtcgggttacccacaaagggaagcccatcagactaacagtgaatgtcttggcagaaaccctacaagccagaagggacatggatgatgctggaaaccatcattctcatcaaactatggcaaggacagaaaaccagacaccacatgttctcactcataggctctatggcaactactttcgaaaaactgctagcaaatactgctgtagtcagcaggattgtgaaaaacaggctggaatttaccatacagtcatgatggaaaacatcagaagtaatgcagagctgcaggcttgtcaagaaaaagggaaggagtcctcatggcctaatcacctcttaaaggtctcagctcctaatactatcgcactggcaacacctgaattttggagggaacacattcagactatagtacctatgaagcagaaaaaaaaatctctccagtattgttttgaaattttaaaaggtctcagctatgagtctgcagaactttctggtgtcattaaggaagcaggttacaggccagcatatcttcaaatagctacacaggtgttagaactgcatggtcttataaagaagacaagtgtgattatggaatcctgcacaccgcatagtcatatctttcaagtcccagaccttagccaagagcagacaattcaggcccaaagccattcaaggaggtggaggcatctgtatgtgatagggggagccagagtggcccagtgtggggagtggaagctcacccagggttcctga

SEQ ID NO: 27085 - DNA, 798 bp, Homo sapiens
  SIMILAR (685)..(798): 861254mologous to Homo sapiens Human secreted protein, SEQ ID NO: 7420,accession number G03339,Smith-Waterman Score=155.
tcatgggctggtgttgagtttctgtggcttttccaggcacacagcacatgctgtcagtggatctaccattctggggtctagaggacagtggccttcttctgacagctcccataggtagtgccccagtggggattctgtgtggttgctccaaccccacacttcccttccatactgccatagcacaggttcttcatgcaggccctgcccctgcagcaaatttctgcctgaacatccagacatttccatacatcctctgaaatctaggtagaggttcccgaacctcaattcttgacttctgtacaccagaggcctaacaccacatgaaagttgccaaggcttggggcttgcaccctctgaagccatggcccaaactataccttggccccttttagccacagctagattggctgtcacagggaaccaaatccttatgcaaatttctgcagctggcttgaatttctcctcagaaaacggggctttcatttctattgcattgtcaggctgcaaatttttcaaacttttatgctctgcttcctcttgaacactttgccacttagaaatttcttctactagatatcttaaatcatctctctcaaattcaaaattccacaaatctctaggataggagcaaaatgtcgccagtctctttgtacaacaatagtctcctttgtcatacttccctagttccttatctccatctgagaccacctcagcctggactttattgtccatatcactaccagcattttggtcaaagccattcaacaagtctcttggaagttccaaactttcccacat

SEQ ID NO: 27086 - DNA, 567 bp, Homo sapiens
  SIMILAR (175)..(95): 551254mologous to Homo sapiens Human secreted protein, SEQ ID NO: 7420,accession number G03339,Smith-Waterman Score=74.
atgtgggaaagtttggaacttcctagagacttgttgaatggctttgaccaaaatgttgataatgatatggacaatgaaatccaggctgaggtagtctcagatggagataaaaaacttattgggaagtggagtaaaggtgactcttgctatgttttagcaaagaaactggaagcattttgcccctgtcctagagatttgtggaactttgaacttaagggagatgatttagggtttctggtaaaagaaatctctaagcagcaaagccttcaaaagcctagggacttggtgccctgcatcccagctgctctagccatggctaaaagtgaccaagatacagctcagcctgtggcttcagagggtgcaagccccaagccttggcagcttccacatgatgttgagccggataaccaagtacagaaatctgagatacttcagagaattgtgacagtgttcactgtcagagattcaaagaggcttctggatgagttacctcagagttatccacaagtcatcaagtggcaaacttggaagagtgatggtagaatattggatgacagtgtctactag

SEQ ID NO: 27087 - DNA, 618 bp, Homo sapiens
  SIMILAR (618)..(517): 881254mologous to Homo sapiens Human secreted protein, SEQ ID NO: 6395,accession number G02314,Smith-Waterman Score=154.
tcaaacctcaattcttgacttctgtgcacccacaggttcaacaccacagggaagctgccaaggcttggggtttgcacactctgaagccatggcccaagctgtaccttggacacttttagccatggctggagtggctgggatgcagggcacaaagtctctaggcatgcctgcatcctgtgcctgtaaaaaccccaagaccctcatgggcttggacacaagcagctggatgtggtgaagaacccattggcagagagcacacaggcggctggacatcaagaggagcagagtagcataggagcacacacacgcccactggggcttcaggagctgtaaacattcaccgctagatgctgccatggggtcggagcccacgtggcccatgagcccacgtggcccagtacctgccatctgcatgcttccctgagaggtttgaggagcaggacaccaaagaagggagccacacctccttctcacaccctgtgagggcgataaaagaacttttcctgtttcattgccatctgaaaccacctcaggctggacttcattgtccatatcactatcagcattttggtcaaagccattcaacaagtctctaggaagttccaaactttcccacat

SEQ ID NO: 27088 - DNA, 1394 bp, Homo sapiens
  SIMILAR (1263)..(1391): 1001254mologous to Homo sapiens 19kD SRP-protein (AA 1 - 144),accession number X12791,Smith-Waterman Score=215.
gaggtgatgatgatgatgatgatgatgataagatgatgccagtgctcttcagccaaagcccaccagctatacacctaacagttaagcaagttgaatgtgttgattgttgcaatgagggagagcacacatcatggggaactttgggcacctttagtaaaacgatgttacaaagaactagttataggattgtgcttgggttatgtgatttggggggagggttcaaggagatggggcttggctctggattggaagctatgaggaagcagacagaaatatataattgggcacaagtccacagtgccttgtcttctgctcatactgggtccctcttgcctcttgccctaggatatctctgctgccactcaagcccacttgactaccctggaagggcagttaatctatatagaaacaatacttatcactggcttgctgtcaataaatacgtgggtaaaactctgtttgtggctctcagctctgaaggctctcagctccctgattcccactccacactctatatttctgtgtgtacatctttaatttctctagcgctgctgggcagaggttggaacacactggagggctcagaagaagacaggaaaaggtggaaaagtttggaacttcctagagacttgcagggctcagaatacaggaagatgtttgaaagtttggaacttcctagagacttgttgaatgcctttgaccaaaatgctgatagtgatatggacaatgaaggccaggctgaggcccgggggcctaggaggaaaaaatggttctgtgggccaggtccagggactttcatcctagccactctagctacagccgtggctaaaaggggccaaggtacacctcgggccatttctcctgagagtgtaagccccaaaccttggcagctctcacatggcattgggcctgagataactactatattttatttccaagtaccgttgttggtggtatttgattatcacacacttattttgggttatgggaacaaagagacatcagcagaagaaaatgacttcgatattcccaaagtaatgaagtccaggttctttggtgcagctcaagaatgcagactggggcagaaatttgagggtgtgacttctattgtcactctgagagacattccacttcagtgtggagatggatctaagggtgatcctcctgccttggcctcgcaaggtgctgtgattacagacgtgagcagccacacaggactgggagatatattcatagtcttctacgggcaagacttaccaggtaagtcagtaatgttgtatgcagcagaaatgatacctaaactaaaaacaaggacacaaaaaacaggaggtgctgaccaaagtcttcaacaaggagagggaagtaaaaaagggaaaggaaagaaaaagaagtaa

SEQ ID NO: 27089 - DNA, 1465 bp, Homo sapiens
  SIMILAR (1165)..(932): 781254mologous to unidentified cloning vector beta- galactosidase alpha-peptide,accession number M77169,Smith-Waterman Score=301.
tcaaatagggcagtcattatgccttagagttccaaagtgatttcctttgactccatgtctcacatacaggtcatgctgatgcaagaagtgggctcccactgccttgggaatcttcacccctgtggctttgcagggtacagccttcctcccagctgctttacacaggctgatgttgagtgtctgtggcttttccatgtgcactgtgtaagctgtcagtggatctaccattctggagtccggaggacagtggccctcttctcacagctccactaggcagtaccttagtggggactctgtgtgagggttctgaccccacatttcccatccacactgccctagcagaggttttccatgagagctccacccctacagcaaacttctgcctggacatccaggcatttccgtacatcctctgaaatctaggcagaggttcccaaacctcaattcttgatttctgtgcacccacagactcaacatcatatggaagctgcgaaggcttggggcttgctcccctctgaagccatggcccgagctgtaccttggcccactgctgctgtttctgctgctgtggctgctgcttctttctcttcttgtccttcagaaagaagccttggattctctgagtagcagtagactccctacaggcattttccagatgtaacagagcatcagtgtctctttctgcctcagttagacaagtgaacttcagagaaagggactcctggtgctttgggaaagagaggattcctgttatgtaacgaggtctatattgaatagttccaaacaaaccaagaatgacgataataatatgtacaaaatttgccaggataggtgcccactgatatccaaggaagtcaaatatttgcctctccagcacacaaactcgtgcacccaactgatcttcagcatcttttactttcaccagcgtttcgcacagatgcgtaaggagaaaataccgcatcaggcgccattcgccattcaggctgcgcaactgttgggaagggcgatcggtgcgggcctcttcgctattacgcccagctggcgaaagggggatgtgctgcaaggcgattacagttgggtaacgccaagggttttcccagtcacgacgttgtaaaacgacggccagtgccaagcttgcatgcctgcaggtcgactctagaggattccaagcgtgcgctttctcatagctcacgctcttgaatgcttcactgctagaaatttcttccgccagataccctaaatcatctctctcaagttcaaatttccatagatctttagggcaggggaaaaatgctgccaatctctttgctaaaatatagcacgagtgacctttactccagttcccaataagttcctcatctccatctgtgaccacctcagcctggacttcattgtccatatcactatcagcattttggtcaaaaccattcaacaagtctctaggaagtttcaaatttctccacat

SEQ ID NO: 27090 - DNA, 866 bp, Homo sapiens
  SIMILAR (24)..(209): 851254mologous to Homo sapiens 19kD SRP-protein (AA 1 - 144),accession number X12791,Smith-Waterman Score=261.
gactcttgtgaaggatggccttctgccgcgcgtcccaggccgaccaggacaggtttatttgtatctatcctgcttatttaaataataagaagaccatcgcagagggaaggcgaatccccataagtaaggctgttgaaaatcctacagctacagagattcaagatgtatgttcagcagttggacttaaacgtaattcttagaaaaataaaaatgtacttttaagaatggaatcgtgatgtccaatacaggaggcagagtccgggtccagctcaaacaggaagatgggagcctctgccttgtacagttcccatcacattatacactaagcctaacttctggttcctaggtaagtcagtaatgttgtatgccgcagaaatgatacctaaactaaaaacaaggacacaaaaaacaggaggtgctgaccaagtctttcaacaaggagagggaagttaaaaagggaaaggaaagcaaaaagaagtaacctagtatcagccatcaagtatgtggtactactgtaagagacatgaatggagacttctaatttgtatcggagggaaacagaagctttttgtttgcatcatttaactgaactgtgaacccttgtgcctctcatctttatcatcggagttgacagtgaaacaaatttacatcagaagtttgcatctcgcgtatatgccgtataaaagattttttttgtctttcaatgcagttttttggaagaaaatatttttaaaatgggacaatggactgtacaataagttacttgaaataagttgtttcagataaatttcaattagatttaaaataaacattatgtccaccttttaagttaatgaaataaaatttgaaactgaaaaaaaaaaaaa

SEQ ID NO: 27091 - DNA, 4136 bp, Homo sapiens
  SIMILAR (2397)..(3728): 461254mologous to Homo sapiens ADA3-like protein,accession number AF069733,Smith-Waterman Score=739.
  misc_feature (1)...(4136): n = a,t,c or g
ttttttttttttttttttgacctcatgcagccccaaaggggcaaataagagactttaattagggtagtgatgttccacctgaatcagtaatgtgatagctatcgtgggatcatatgatccagaatcaggcaggaggagggcccggccaggaagctctggaggactcacctcgccaccttttggcacaagcactggcactgacggacaaggcgaaacagcggccccttctaacttgggagggcacccaatggcccctgtagccagaggtttgcccggcttttgggcccccaggtcctaggcatgactggtggtcaccaatttggcccttgtccccaaccagtgctggggggcccatctttaggcagaactcaggaagctggcagagagttcccaacactttatactggggccaaggaggcttgggaataaaagggcaagggagaaactggagtctgaaacctccctccctccccacctggggtggccatgggagagaaaaaaataaagtcgccttctggctcccaggcccgcccagaccccacagcaaccaataacgtataatcactgggaccagtcacagcccactggaggtggaggtttaaaaaaaaaaaaaaaaaaaaagacaaaaaggttacaatatcctaacaagcaacagagtttaaagttttcaagacgtttaaaaaaaatcttgtcccgggcccagggggacttgaacactcagaagccagcctgaccaggcacggtgtggccttggggcaggtccactgctgctttcttgcccagctagcaagcacaccacccacctcccgcatcaaatgcccaccccaacccaactcccttgccgcctgtcgcgctgctcggggagtgactccaggacgccttcgtggagacatgggtagtctgagggggaaggccacgagatccagccagatggtttaaaaattcttaaggaactcttcagcccacaaatgcgggcacgggcattgacttgacagctttcatcttcacttgattctccttgtcaatcttccttccatggaagtggattcacaaagttccaccaacttgtgttttgtacatctgctctgtgtggaagttggtgatcagaaagctgatatccatacccctccaaaaggcttccttcgaaggataaagaagttctctgctcgcattcatccatgaagcgcatgaacttgtggcaaaaaatctttctcgatctcatcagccctgtttcacagcaatgctgacccggacagagttgatggagccctcaatcagaaccttttccttctcattcctgctgatggtcacaggttgtaacaggagctctttgctactcctgacttccacttccggcttgttgtgtcgttccacacacctgggaggagaagttctccaggcagagggcagcctgcaatgtggcccgcacggcactcaggtaggggcggagagtggcagtcatcgcgggcgctggctgggccggaaagcggaagtacggaagtggccagccccgcgatgcctgccctttcgcgagaagcgcagctacggtctccgcccggacttccggacggtaccatctatgctccgagcggggtagagagcccttacgaacgcttgggccttccggaagttttccacctagggctgtctcggtatttttaaattcttgcactcgagtcactatttaagctcctccaggaatgggtgcagcttccctttgtgccttcggccttcttgtcacctttgccacagcctcccccaggtatgcaatggtacagcccagcttcagattgggcaccaaattaggacaagccgaagcggacgagcccttcgtttcttccggttctgtacccccatcctttctctcgcccctcctacccgcagctcctggcgctcggcggggctaactgcagcgcggagatctcggccgccaagctccgcctcccgccccgggctgtgccccggggctcgcctgaggccgaccacccgcaccccacctctagcggctttgctcgaggcccaccttcttcccacccccggcaaactccagtaggctcgccctcgctgactccccgcccccgcgtcaactgcaaggggcccgcccatagccagttccggggcggttgctcacatcgaccggaactccccgccccctcccgcggcccctggggccgtaggaggccgcagcgaggaggtagagggggcgggggtcgcacatagggtgtccctagagaacgaggactctgaaggcgggacatttgggcgacccccgggcggggccagccattaaacagtcccacttctgtgccagacactgaactgggctcttgacgggcatcatctcttaatcctcagaacatcccagggagctccacaggatccccatatcctgggccatgagtgagttgaaagactgccccttgcagttccacgacattcaagtctgtggatcacctgaaggtctgtccccgctacacggcagtgctggcacgctcatgaggatgatggcatcggcatcgaggagctggacaccctgcagctggagctggagaccctgctgtcttctgccagccggcgccatgcgtgtgcttgaggccgaaacccagatcctcaccgacctggcaggataaggaaaggtgacagacgattcctgaagcttgggtcgagaccattgaatttggagctccccccaaacatgggaagcccaagaaagcaaaaactggaaagggaaggcaggacatgggcccgggcccttgcccaggacggcccaaatccaaaaaccttcagcccaaagatccaggaatatgaattcactgatgaccctatcgacgtgccacggatccccaaaaatgatgcccccaacaggttctgggcttcagtggagccctactgtgctgacatcaccagcgaggaggtccgcacacttgaggagttactgaagcccccagaagatgaggctgagcattacaagatcccacccctggggaagcactactcccagcgctgggcccaggaggacctgctggaggagcagaaggatggggcccgggcagcggcttgtggctgacaagaagaaaggcctcatggggccactgaccgaactggacactaaagatgtggatgccctgctgaagaagtctgaggcccagcatgaacagccggaagatggatgcccctttggtgccctgacgcagcgcctcctgcaggccctggtggaggaaaatattatttcccctatggaggattctcctattcctgacatgtctgggaaagaatcaggggctgacggggcaagcacctcccctcgcaatcagaacaagcccttcagtgtgccgcatactaagtcccctggagagccgcatcaaggaggagctaattgcccagggcctttttggagtctgaggaccgccccgccagaggactccgaggatgaggtccttgctgagcttcgcaaacggcagggttgagctggaaggcacttagtgcccacaaccgcaccaagaaggcccgacctgctgaggctggcaaaggaggaggtgagccggcaggaagttgaggcagcggngtgcgcagggctgagagggagggcatggacgcctttcgcaagattcatgggcttgcccggcaaaaaggaagcggaactccccacccaagaaaagaaaaggaccaggcctggaaaaactcttgaaaggagcgtgaagagcatccttgaagcttgcttggatggggttagccccttaaccccctgccctcaggctgattaatcttggccctaaggggaggggaagggaggcccaacttcctttctttgggccacaggaaacaattgccctgtggctgtcccttcaaatggcggcagtctcctaagaagcccgtggcccttccccctgaggtcattttggcctagctctgtacaaccaggacacaggaagccctgctgggctagcctgaggcctagtctctgcttggtcccctgagatgggggttggaggggacttcgtttctgggtcttcctcttcccctctttaccatcccccactcccctaatcccctacccctgtctccccttcaaggacttctcccttgtggttttgtaaagtgcaaacttaagaataaagtgactgctgtggtttttc

SEQ ID NO: 27092 - DNA, 897 bp, Homo sapiens
  SIMILAR (266)..(367): 411254mologous to Leishmania major probable (hhv-6) u1102, variant a DNA, complete virion genome,accession number AL160493,Smith-Waterman Score=90.
ttttttttttggtggggaatgtgctggaaagaaacattgttttcattccctcattcctggagggagtgctccggcggggatggggaggagtgtttggggtcgaaggagcagccgcgtaaaggccttgagatcctgcagggaagggtcccggtgcacagagaccagcacaggctgcagcagccgggtctgtcccgcgcgtggagcctctggcgacgggtggagcggacggcaggttgccccctccaggtgactggcgggctgaggttgtgtgtgtatgtgtttgtgtctctgtgtggatctgggggtggacacattcgaatgtatatgtctgtgcgtctttattggctctgactgtgttttgtgcatatggtttatgagtcgttttaaaaacgtgtacttttactgctgcgttcaggttttcagccatagaatattctagaaaaaaatagtgataacatttatttcaccgctataaccctgaatgtgtagctgtgttttttaaaaaaacatttttttacaattgtagaatatgtaacatgcctccagaaacgtgccctaaacacaaatatataatttggcaaataattacatagcaagtcctatgttactgtcatctgatctagaaatcatcgtcctcccagaagcccctcatgtgctctggccatctcaaatccctccctgccccagggataaataacatcctgttttgtgataaactctgccttttctatacacgtgtatgcttattaacaaactatgaatttctccacacggtagatttgattatgtttgaatcttacatgaatgtaatcctattggtggattgtttttgctgtataaaagatgtcttccagaaaaaatacattaagaaaagaaaaggaaaaaaaaaaaaaaaaa

SEQ ID NO: 27093 - DNA, 552 bp, Homo sapiens
  SIMILAR (404)..(496): 871254mologous to Homo sapiens putative p150,accession number U93563,Smith-Waterman Score=139.
atgagtgaacttccattcacaattgctacaaagagaataaaacacctaggaatacaacttacaagggatgtgaaggacctcttcaagaagaactacaaaccactgttcaatgaaataaaagatgacacaaacaaatggaagaacattccatgcttatggataggaagaatcaatatcctgaaaatggccatactgcccaaggtaatttatagattcaatgccatccccatcaagctactaatgactttcttcacagaaatggaaaatactaccttcaagttcatgtggaaccaaaaaagagcccacattgccaagacaatcctaagccaaaagaacaaagctggaggcatcatgctacctgacttcaaactatactacaaggctacagtaaccaaaacagcatgggccatggatgaagctggaaaccatcattctgagcaaactatcacaaggacagaaaaccaaacaccgcatgttctcactcataggtgggaactgaacaatgagaacacttggacacagggtggggaacatcacacacaggggcctgtg

SEQ ID NO: 27094 - DNA, 2085 bp, Homo sapiens
  SIMILAR (871)..(1968): 891254mologous to Homo sapiens putative p150,accession number U93569,Smith-Waterman Score=1773.
atggagtgggtactgcttggatctccttctagaaaacctgttggagaagcatggttgactgcagatccaccatatttgtaccgaggccatctttctaccagtctagttacagccagcttccattgcaacttctacagaaagttcaggaaaataacgactttcaacattatagaatttcaagttagaagtgatcattttcaactgatgaatctcattgaggaagatgaggcatcaagaggtagaagactaactcagcaggtgactatggaaatggtgtcagacaaaaagcaaattcgagtgattttcttattcaatttaaaaatgggtcataaagcagcagagacaactcgcaatatcaacaacgcatttggccaaggaactgctaacaaatgtacagtgctcaagaagttttgcagaggagacgagagccttgaagatgaggagcatagtgaccagccatcagaagttaacaactgccaactgagagcaattattgaagctgatcctcttacaaccacacaagaagttgccaaagagcttgacgtcgaccattccagggtcgcttggcatttgaagcaaattggaaaggtgaaaaagctcaataactttctgaatcctggtgaaaccattatatctgaggactatgctcagcaaatctatgagatgcaccaaaaactgccacacctgcaactggcattggtcaatagaaagggcccaattcttctccatgacaacgcccaaccacacgtcgcacaaccaatgcttcaaaagttcaatgcattgggctaccaagttttggctcatccttcatattcacctgacctctcatcaacagactaccacttcttcaagcatctccacaactttttgcagagaataaaatacctaggaatccaacttacaatggatgtgaaggacctcttcaagaagaactacaaaccactgctcaatgaaataaaaggggacacaaacaaacggaagaacattccatgctcatggataggaataatcaatatcatgaaaatggccatactgccagaggtaatttatagattcaatgccatccccatcaagctaccaatgactttcttcacagaattggaaaaaactactttaaagttcatatggaaccaaaaaagagctcgcattgctgagtcaatcctaagccaaaagaacaaagctggaggcatcacactacctgacttcaaactatactacaagactacagtaaccaaaacagcatggtactggtaccaaaacagagatatcgaccaatggaacagaacagagccctcagaaataataccacacatctacaactatctgatctttgacaaacctgacaaaaacaagaaatggggaaaggataccctatttaacaaatggtgctgggaaaactggctagccatatgtagaaagctgaaactggatcccttccttacaccttatacaaaaattaattcaagatggattaaagacttaaatatgagacctaaaaccataaaaaccccagaagaagacctaggcattaccattcaggacataggcatgggcaaggacttcatgtctaaaacaccaaaagcaatggcaacaaaagccaaaattgacaaatgggatctaattaaactaaagagcttctgcacagcaaagggaactaccatcagagtgaacaggcaacctacagaatgggagaaaatttttgcagtctactcatctgataaagtgctaatatccagaatctacaaagaactcatacaaatttacaagaaaaaaacaaacaaccccagtaaaaagtgggtgaaggatatgaacagacacttctcaaaagaagacatttatgcagccaacagacacaggaaaaaatgctcaccatcactggccatcagagaaatgcaaatcaaaaccacaatgagatatcatctcacaccagttagaatagcgaccattaaaaagtcaggaaacaacagagacatggatgaagctggaaaccatcattctcagcaaactatcgcaaagacagaaaaccaaacaccgcatgttctcactcataggtgggaattgaacaatgagaacacttggacacag

SEQ ID NO: 27095 - DNA, 2433 bp, Homo sapiens; identical to SEQ ID NO: 25917
  SIMILAR (1337)..(1399): 801254mologous to Homo sapiens Human secreted protein, SEQ ID NO: 6833,accession number G02752,Smith-Waterman Score=85.

SEQ ID NO: 27096 - DNA, 1403 bp, Homo sapiens
  SIMILAR (255)..(947): 1001254mologous to Homo sapiens DNA-dependent DNA polymerase,accession number AF004713,Smith-Waterman Score=1186.
tcttgactactgggatatctgagctgatctgtgtgttagaaatattggatgtcttaaaagatttgtaacaagatataagtacataaggaaagtaataaaacaggagagcttacatagaaagcatcttaaagagtaaataggagaaagggagttttctttggcattagacaagagtcatagccaggaaagttactcttgataaaatttttgttataatgacttcctcattaccttactttatttttaatccccctagtatgtttgtgctactgaaaggagccactaaggagcagtcttttaagattggtcaggaaattgccgaagctgtgactgctaccaatcctaaaccagtgaaattgaagtttgaaaaggtatatttgccctgtgttttacaaacaaaaaagaggtatgtgggttacatgtatgaaacactggatcagaaggacccagtatttgatgcaaaaggaatagaaacagtcagaagagattcctgccctgctgtttctaagatacttgagcgttctctaaagctgctatttgaaacgagagatataagtctaattaaacagtatgttcagcgacaatgtatgaagcttctggaaggaaaggccagcatacaagactttatctttgccaaggaatacagaggaagtttttcttataaaccaggagcttgtgtgccagcccttgaacttacaaggaaaatgctgacttatgaccggcgctctgagcctcaggttggggagcgagtgccatacgtcatcatttatgggacccccggagtaccacttatccagcttgtaaggcgcccagtggaagtcctgcaggacccaactctgagactgaatgctacttactatattaccaagcaaatccttccacccttggcaagaatcttctcacttattggtattgatgtcttcagctggtatcatgaattaccaaggggatttattgcggcactattcacaatagcaaagacttggaaccaacccaaatgtccatcaatgatagactggattaagaaaatgtggcacatatacaccatggaatactatgcagccataaaaaaggatgagttcatgtcctttgcagggacatggatgaagctggaaaccatcattctcagcaaactatcacaaggacagaaaaccaaacaccgcctgttctcactcataggtgggaattaaacaatgagaacatttggacacaggatggggaacatcacacaatcacacactggggcctgtcgtggggtagggggagaggggagggatagcattaggagatatacctaatgtaaaggacgagttaatgggtgcagcacaccaacatggcacatgtatacatatgtaacaaactggcacgttgtgcacatgtaccctagaacttcaagtataatt

SEQ ID NO: 27097 - DNA, 2033 bp, Homo sapiens
  SIMILAR (1021)..(1251): 981254mologous to Homo sapiens Human GTPase associated protein-11,accession number Y99660,Smith-Waterman Score=408.
atggtgcacaaccagtatggcacctgctgtctcagttcaggtatgagagagtgtgggcacacctacacgagctggccacccaggtctctgtccctggaaagttcccaaattgccactaacagcattgctcagggtcaccaggggagaggggctccccaacagttggtggtcagcagattgtcagagggttttattaccaaagcagcaaacaacagtgcacaagttatagaggacatgaaggatacaaacgctagatgttgtttgctgatgcctcacatattcacccccaagtcacatccaaatcagcccacgtgggagaatggagccacactcaggtctcatggggagatctacatatcagccagaaatcctggaattcaagtagaaagcagtacctgggaattgggggttgcttctcttgaagagggtataaatgcattccacataaagaatatttatgtaaaggaagatgtgaacggatcctgggtggtccaagagcactatcacagtagcaaagacgtggaatcaacccaggtgcccatccacggtggattggataaagaaaatgtggtacctatgcacgacggaatactacgcagctgtaaaaatagaatgaaatcctgtcccctgttttttgcagcaacatggatgcagcagaaggccattatcctaagcaaattaatgcagaaacggaaaaccaaataccacatgttctttattacaccagatcagtcttctcagagaacttcctttgaagtcaatgggcattgtacctccctgagaggtgggtcaaaatatagatctggatctgttaaaaccctacgaaccatttacaacttttcctatcacacgaggtcagtgggcaggtacccatcctcatctgcagaggattgggggatgaagagagaaaagtcagccctgctaataactgacgacaccatttccaatgaggctgccctagttgatgatggttatatcattggagaaatgctgccaccttgtgggagatgtgaaaagaagtcccgagagcaaattgtgataccattcttcagtctcttaatcaaagatatttatttcctcaatgagggttgtgccaaccgccttcccaatggccatgtcaattttgagaaattttgggaactggccaaacaagtgagtgaatttatgacatggaaacaagtggagtgtccatttgagagggaccggaagatcttgcagtatctgctcacagtaccagtcttcagtgaagatgtaagtggcctgccagtgtgctggcgtatgtcggtgtgcccatctgccagcgtgctcccctcagtgtcctctcgacgaccagccgctcctcagactgcccctgccaaactccgcctcatcccgccagtctgtcctgcgtgctggcatctttcggtgtgccctgccggcgtgcccttctaccagtgtgctcccctcaatgtcctctcgacgactcgccacttgcgtcttcttcagcagatgtgttcctcaccacgtccagctacttgtgtgtctgtctgccggcggtctcgggtttttataggcccaagatgggggcgtgatcatggaggggctggcctttgttttctggcatctcgtaccacgaacactcatgaagaccctgcagtcattggagcacccgggtcagcaaagcacacaagctcactcaagaccagatggagaacttatttcctgcagctgacagatagactcagattttgtgagactgaaatgttcactgaagacacttgagaaagaatcctctaaaaatcccggctctgcacattattcatctcctggaatttccatgtgaatcacagctctgcacctggatggagttttcttttgtgtgtgtgtgttttttttaatttggttgaacatttgctgctaatgggacttgcccagctgagtgctggctctgaggaagcccacgtttcttttgttaacttaaatgaagaaaggagtggagggaggggatctaaaacccccccgtttagatcccaaaccttagctcaatcagtatt

SEQ ID NO: 27098 - DNA, 3433 bp, Homo sapiens
  SIMILAR (526)..(1860): 881254mologous to Homo sapiens protein phosphatase-2A subunit -beta,accession number M64930,Smith-Waterman Score=1980.
ggccaggcaagcctgaatcctgtccctgccatctcgccactgcagctcgggtccagaaaggcaccattttgtcgcggctgcccgctctcccagggggaggagggatcttttttgcattttggagcggctgccaaggaggggaacctgttgggcatctccccagacccgcttgtgagcgcctccggggcgggcgggcgggaccagacccctcggggcacggcgtatcttggcacccggaggcagcggaggcaggcgcagcatcctcgctgggaactggagctggagtgagcgcaccgcgcgggaggagccgccgcagcctcgcagaacccgagtggaggaggtgacagctccattgccgggtttttattttttttctctccgcctccccgtctcctcctcaggctcggaccatggtgcagtcccactggctcccctgcccccctctcctgtgagactggctgcggggagggatcatggatacttgtctgccggcttctggttcccacgcaagtaagcctgctgtcaatggaggaggacattgatacccgcaaaatcaacaacagtttcctgcgcgaccacagctatgcgaccgaagctgacattatctctacggtagaattcaaccacacgggagaattactagcgacaggggacaaggggggtcgggttgtaatatttcaacgagagcaggagagtaaaaatcaggttcatcgtaggggtgaatacaatgtttacagcacattccagagccatgaaccccgagttccgattacctgaagagtttagaaatagaagaaaaaatcaataaaataagatggctcccccagcagaatgcagctttactttcttctgtctacttaatgattaaaactgtgaagctgtggaaagtcagcgagcgtgataagaggccagaaggctacaatctgaaagatgaggagggccggctccgggattcctgccaccatcacaaccctgcgggtgcctgtcctgagacccatggacctgatggtggaggccaccccacgaagagtatttgccaacgcacacacatatcacatcaactccatatctgtcaacagcgactatgaaacctacatgtccgctgatgacctgaggattaacctatggaactttgaaataaccaatcaaagttttaatattgtggacattaagccagccaacatggaggagctcacggaggtgatcacagcagccgagttccacccccatcattgcaacaccttcgtgtacagcagcagcaaagggacaatccggctgtgtgacatgcgggcatctgccctgtgtgacaggcacaccaaattttttgaagagccggaagatccaagcaacagatcatttttctctgaaattatctcttcgatttcggatgtgaagttcagccacagtgggaggtatatcatgaccagggactacttgaccgtcaaagtctgggatctcaacatggaaaaccgccccatcgagacttaccaggttcatgactacctccgcagcaagctgtgttccctctatgaaaatgactgcatttttgataaatttgagtgtgtgtggaatgggtcagacagtgtcatcatgacaggctcctacaacaacttcttcaggatgttcgacagaaacaccaagcgtgatgtgacccttgaggcttcgagggaaaacagcaagccccgggctatcctcaaaccccgaaaagtgtgtgtggggggcaagcggagaaaagacgagatcagtgtcgacagtctggactttagcaaaaagatcttgcatacagcttggcatccttcagaaaatattatagcagtggcggctacaaataacctatatatattccaggacaaggttaactaggtggacaagttattacttaataatctcacatactgaatactagtcaaacaagtttttaaatgtttctttgggtcttcatttgatgcattgactttaatttccctatacaggaaatgattggaatagaattaaaaggagtccaacattcccagctccccagttctaagaaacttttgtcaaacccaataggtttgggacacttctgtttagaattgaaagctgccagctaacagtaattcttccatagttgacttgaacttctgatgcttttattgcccagttttctctggtgggtccagtgttttgttcctaggtgtctgctgcgataaaatgaggttgtctgtagtatttaaggagaaaagagataagttttttttaattaagcaattccatttgattgaaaaaaatcaacaaaaaataaacaccgtttactcttagacaaattcttcttgttttgtgaaaaaccagaactagtcagtatctcctgcccctccaccatttttttttccattttccattttcctttgaacaatttcatttaagccagagatttattgcatgaagctgagaagaggatgcagaatgacaaggaaagggcacatcaaccctgctatgctctttttttgtaagctccatagaaacagcctgagaatttggctagggaacttgaatgcttcaggggacagaaagagagcactttcgacacagtgcttcccagagtgagcttggcagggccaggcggggccaaattccatctgctgccttgttactcttgctttttgtgctcttaaatggctccatataatcttctacttacatgttccttggcttttttctcttcaaccttttccagcttatttattccattgacttctaaaggccgagtcctgggtgcttattatctggtgttctaaatgaagcagtaagttggaagcagtgccaccacccctgagtccctgagaaaggctggtctgttctttttgggtgtttctcctaagcagcaccctcccctcctcctggttttggtaaccaaaagtaacaatccatcaacctccattgtacctagaacaaaaatagccaataaaaacgctgagttgtgaagtccaatcaggcacttctaactcaccccaagctcgccatctggaaaaacagaccagaaggcttctcttctacagaaatgaactgtggggaaatcaagcagctgtgacatgaagtgaatgaagtccacttgaagctgtggaagatggttcatccttttccccagttgaggatccagatttataacttctagaaagccatttccagaaggttctatgtggcacacccctaggaaaggcactaaatgcatgcaaaggatttataaacttaggaaagtagatgggtggagtccagaaaactggttctgggttaatatctctacatctgtcttgatgactcatttctcctaactcccatttagtgcagggtaaatggtttgagatgagagtttttcaatgaaagggaaattttctttcagtttacagatgtattagaagtcctgactttcaagtgtaatttgctttggaggagg

SEQ ID NO: 27099 - DNA, 1374 bp, Homo sapiens
  SIMILAR (946)..(1014): 1001254mologous to Homo sapiens PPP2R2B; protein _id= AAF74024.1; translation=MEEDIDTRKINNSFLRDHSYATE,accession number AX067148,Smith-Waterman Score=120.
aaaattaatctatacacccaagaagctcaaagaaacccaagcaggataaatacaaatagatccacacttgaacacatcattgtcaaactgttgtatgccaaatccaaagagaaaatcttgaaagcagcaagaagaatagcacgcaccatagaaagaatgctcactctctccccactactcttcatgtgtatacctcccactcattcttcagatgttacctcagaaaatctcctcattcaggaagtggccactgattcctcagatgataaggtcactctctttagggagccctataaaagcaattactcacaagtctaccatggcaatttcataaccaacctggaaaggatcagacaacgacatcaattttcctctgatggatatgggaaaccctcagggaaaggtgccgattcgcggctgcatgcgccccactgcagcaaagagcagccgcagcctctgcctcggccaccactgctgctgggaaagagtcgtggggctgctgacgcggttgggaggagcctcgcctttaatgcaccagccgcctccagcctcctgcagcagcagcagcagcagcagcagcagcagctgcgagtgcgcgcgtgtgggtgtgagggtgagtgcgctggcgccggctgcagcgccctgcccagctccccgccagcttccctacccccgcctgccggagccgccctcccctcgggtccagaaaggcaccattttgtcgcggctgcccgctctcccagggggaggagggatcttttttgcattttggagcggctgccaaggaggggaacctgttgggcatctccccagacccgcttgctcggaccatggtgcagtcccactggctcccctgcccccctctcctgtgagactggctgcggggagggatcatggatacttgtctgccggcttctggttcccacgcaagtaagcctgctgtcaatggaggaggacattgatacccgcaaaatcaacaacagtttcctgcgcgaccacagctatgcgaccgaagaagagtaccgggaacctaatagaggtccaaacagtattaatcgtctaagtgagtggctgcaggcatcatttgtagatgagtatatggaacctggtgacccagaaatgttaattttcttcaaactgaagtcaagaccttctggtcacttaataggatatagagggaaagttttgggtgcagttccatttgtgaacaagatgtatttttctgtaggttctctgaccccttctggggtcagagatcagaaacttggtaatcctactgctgctgatgatgatcaggagcaacactttgagaccgtggctctctgtctgtcttctcaagtgagtaggcagtccacttcaggtcgacggggctga

SEQ ID NO: 27100 - DNA, 411 bp, Homo sapiens
  SIMILAR (106)..(276): 491254mologous to Bovine herpesvirus 1 BICP22,accession number X76943,Smith-Waterman Score=88.
ccggtgattttctcgatgtcgctgttctggcaggtcttgtgcatggcctcctgcttgctgctttcaccattgctggtggatggcatctcatcactggcccatttagagaactcaggtgtgatgcgcgtgctgggagggccgccatttaggactgcgccccgaagtgcctctctctccttggcttcaccaggctcctcgcctgtgtattgtggcttcccatactccagagtgtcatccccatccacatccaagtcagcatcactgtccgggttctctttgccgctgcacatgatgaagccagagcctcggaagccaccttccaggagagtggtggcccgtatccgcttctgtccacaccactcatactcctcaaagcggttgttgttctcatgctcgatgcccacgcgtccg

SEQ ID NO: 27101 - DNA, 555 bp, Homo sapiens; identical to SEQ ID NO: 755
  SIMILAR (82)..(315): 541254mologous to Cloning vector pZC320 SopA,accession number U26464,Smith-Waterman Score=187.

SEQ ID NO: 27102 - DNA, 2574 bp, Homo sapiens
  SIMILAR (584)..(267): 451254mologous to Homo sapiens HSPC246,accession number AF151080,Smith-Waterman Score=137.
  misc_feature (1)...(2574): n = a,t,c or g
tttttttttatgttttttttaactgtttatactggttttaatccatgtcaaatgtagtttacaaaagggaaaggacaagtacctttgtatagaatatacagacacagcatcacaccacagggcccacgggagggtcggggagacgacactttttccctgggaaaggcagctctaatcccaggaatggttctcagcagaggctggggtggccagggagcactgtcctctagcccccttaactcagcctctgcttcagcttcggttccccatttcctgccttctaccccccaaattccttataaagagcccccatgagcttaagactaagggagaggatcatggtccgcttgggggcgttgttgccnatggtctgggggaggaaggaaattattacaccacttgaacaccgaggcacatgggggagaggggaagggggacaccacagggaggagagagaggcagggttnccccaagaggttgggttggggccgaagcttcccaagccaaccccttaaaggaagccctgcttcccagggtttcttaaaaaagaagaaaatcataccaacccaaaagggggaggggaccaggtagagggcgaggagttgtcccatttatacacaacattgtaaacatacaccggtctattattacatgtgctttcagtctggtgttttgcatgtctgtctgtccggcctngtcagtattgggggctggatcttaggagccgtgccccactactcccccaacccccaccttccctgccccaccctgggaacagagctggaacaggtatggcccccaatccataggtgggagccagcaggtaagtgcctgggccacagcctctactctggctccagagtacctgcgtgtgtaaatgtgtgtgtgtgtacgcatgtttgagtatgtgcatgtatgtacatggggaacctgtgtgccaaatatgttacaaagggaagacggtcactgtcacagaggctgggggcaggtggggcttgcttggaggcgaggcctgcctggggcaagatagctcaacaagtagatcctcccgcaggtctccgggcgctgtgaatcgtgttgcactgaagggcagagcttcttggcaaccccagggtccgcagccagcaactcctcgcagtgcacgtgccaaacactggatggacgttaggggcatcggagtacggagtccatgcaagatgaggcatttgtaacggtccccacgagattagctgccgttcaagttctctgacccgagccttcagagcctcaaacgtggtcacagctgaaatcttcggtgattttctcgatgtcgctgttcttgcaaggtcttctgcatggccctccctgcttgctgctttccaccattgctggtggaatggcatctcaatcaactggccccatttaagagaactcaggtgtgaatgcgcgtgctgggagggccgcccattttaggactgcgccccgaagtgcctctctctccttggcttcacaaggctcctcgcctgtgcaggggatgaacatcagcctctgtgtattgtggcttccccatactccagagtgtcatccccatccacatccaagtcagcatcactgtccgggttctcttttgccgctgcacatgatgaagccagagcctcggaagccaccttcccaggagagtggtggcccgtatccgctttctgtccaacaccactcatactccctcaaaagcggttgttgttctcatgctcgatgtccacagcatcatcctcagccatgcaggagccttccctctgtgaagagcagagcaggatcatgctgggcccaggccatccccacctgctccccacagtctgcaacgaaggcacagctctagccccagctgtggtgtgccaagtgggccctcagctctagggctcctttgaagcaaaccaatttagaggtcaaagacctgggcctcttcccaatagttttccgctggagcccaaggagggaatgagtgagagtgaaagcaaaaggagagagcagtggtcagaagggaagaagctgctgagaccacatggagaccccaagagcccacagattcaggggcagtcagcagctagtgtcgggggaagggagcggggaaggaaggtgggtggtgatggcccctctaccttagaaaggcaatgctccacatgcctactcatctcctgctccgaatcctgccagggggcggttgcaccaggggacatacctgcccttcatcttgctttcctccgtttcaattttcccaatccgagctgcacggggaaaccgaaaacaaagcacagaacaagcagacggtcacttgcagcccccagggtcccagtggagctgacacatcctgacctcttgccagccattggcctttttattcagtgcctgatctggccctcatcttgaaatacctcctgctcctttggggactgggctttgccaagagcacctggggaggagactggtgctaactaagccagtgagtaagtccactctttggctgcagctggtgcaaggtctacccatacctttctatttgcagtgtttaataaaaatccagtgagcaaagacaaaaaa

SEQ ID NO: 27103 - DNA, 1026 bp, Homo sapiens
  SIMILAR (423)..(16): 421254mologous to Baboon endogenous virus strain M7 gag-pol precursor polyprotein,accession number D10032,Smith-Waterman Score= 287.
tcaagttccttttgggtgtgggttccctgttacattttggtttggattcccagttaggaaagcagctggatttagagaattgtcagtggctagtgtcaggtcatctctctctaacaggatagtttcatattttaaaactcttgagttggtgaggcacttttctgccttttgactgaggatagttctgacttggtgaggtgtgctaacaatgaggttttccccaaaggttaattttctgctttcctccacgagcaaagctgttgatgctacagactggacacattcaggccatccacgggttactgggtccagaatttttgacaagaaggctacgggctgctggtagtccccatgtccttgggtgagtacccctaaagccactctctggtttacagtcatgaaaaaatgaaatggctgttcagaatgagaccaaaaggttcctccactagagatgtattttggaattgaagttaagtctttaaagcagttaagatctatttctgcttgatcattgttttcatccagggccttgaaggaagacagtggtttactcaaactgaagcagcctcgttcatctggggtgatacccagaagattcattgtctcatggccatggaaaatggtaagacagcctgtccttttctctgtaggttgatggtggcatgctaaagatgtgagtaaagcaatcaggatttttgtgccctcccactgcttagaggtagcaagggcaggtatcacagtaggggtagtggcagaggggctgtcagttgccacagggaactccacttgagggaaatgcagactctctgccaatgagatgatcagctgggcataaggtaaccatgctgagggtccaagcttgggggctctgcctggcaaggggcagtggggccagggcctgcagtctatctgctccccagcttcatgattcagtccctttcctagggatgtgtgaaagagcctggctttccttttttgtggagctacggcagctggtgctggggtgctcagggatccaagacccat

SEQ ID NO: 27104 - DNA, 858 bp, Homo sapiens
  SIMILAR (256)..(453): 601254mologous to Oryctolagus cuniculus retrovirus related reverse transcriptase,accession number X62677,Smith-Waterman Score= 189.
atggagatgcttgatgagcttccattgttcaactccgaggatcttaccattgtctttttccatggccatgagacaatgaatcttctgggtatcaccccagatgaacgaggctgcttcagtttgagtaaaccactgtcttccttcaaggccctggatgaaaacaatgatcaagcagaaatagatcttaactgctttaaagacttaacttcaattccaaaatacatctctagtggaggaaccttttggtctcattctgtactggaagtcctagccagagaaatcagagaagagaaagaaataaatggcatccaaatcagtaaagagaaaatgaaactatcattgtttgctgacgatatggtcgtttaccttgaaaacccaaaggactcctccagaaagctcctagaactgataaaagaattccacatgtctggagggtcctcaggaaacttacaatcatggtggaaggcacctcttcacagggcagcaggagagagaatgagtgtggcagggagaatgccaggccacactgatgcaatgagtgggctctcaatgccttgggcatctctgcccctatggctctgcatggtacagccccctaagctgctttcatcagctggcattgagtgcctgtggcttttccatgtatacagtgaaagctctccactaggcagtgccccagtggggaccctgtgtggggacttcaaccccatatttcctctcttcactgccctaacagagattctccatgagggctccacccttgcagcagacttctgcctggacatccaggtaccattggaactgcccgagacattaaatggtaatgatgtggttacagttatttgccaattgaagtga

SEQ ID NO: 27105 - DNA, 2491 bp, Homo sapiens
  SIMILAR (1263)..(1454): 641254mologous to Homo sapiens dJ1121G12.1.2 (A novel protein containing a putative PHD finger domain, isoform 2),accession number AL109965,Smith-Waterman Score=179.
atgaggagacatatggtaacttatgcctggcagctcctgaagaaggaactgggactgtaccagctcgccatggatatcatcataatgatccgagtgtgtaaaatgttccgccaaggcctcaggggattccgggaatatcaaatcattgagactgctcactggaagcaccctatcttctccttctgggataaaaagatgcaaagccgagtcacatttgataccatggacttcattgcagaggagggtcactttcctccaaaggccattcagatcatgcagaagaagccttcctggagaacagaggatgagatccaggccgtctgtaacatcttgcaggttctggatagctatcggaactacgcagagcccctgcagctgctcctggccaaagtcatgcgctttgaacggtcatgtgaagagtgccagtgctggcagcatggggtctgcatgggattactggaagaaaatgtgcccgagaaatacacctgttatgtttgccaagaccctccaggtcagaggcctggcttcaagtactggtatgacaaggagtggctgagcaggggacatatgcatggcctggcatttctagaagagaactactcccatcagaatgccaagaagatcgtggccacccaccagcttcttggtgatgtgcagagagtgattgaggttctgcatggcctgcagctcaagatgagcatcttgcaaagccgggagcatcctgatctgccgctgtggtgccagccttggaaacagccatcaggggaggggagatctcatttcagaaacatccctgtcactgacaccaggagcaaggaggaagctccaagctatagaactttgaacggggcagtggagaagcccaggcccctggccctgcccctgccgcgttctgtggaggaatcctatatcaccagtgagcattgctaccagaagccccgcgcctattaccctgccgtggagcagaagctggtggtggagacgaggggctctgccctcgacgatgcggtcaaccccctccatgagaacggcgatgattccctttccccgcgcctgggctggcctctagaccaagacaggagcaagggggacagtgaccccaaacccggctccccaaaggtgaaggaatatgtctccaaaaaggccctaccagaagaagcccctgctcggaagctgctggacagaggtggagaggggctgctgagctcccagcaccagtggcagtttaacctgctgacccatagtggaatctcttcaggatgaagttacgcaacaggatggactccattgagaaggagttggatgtgttggagagctggctggactacactggggaactggagccccctgagccgctggccagggctttccgcagcttcaagcattgtattcaagcagctgctgatgggacctggggcaaggttgcagcagattcgccctctgcttgttcaacatgaaactggggcacccaaaactcatgggggcacaatcctggggcacctgcaggaggagcttcgcatatttaaataaataaacctagcatgctgaatgcacgtgacaccgactgacttcagggatctgggccaggagtgtggtggacattggacaaagaggccattttggctgcgggaggacactctgatctcgaagcctgccataaaggtagcaaatagactcttgggattcccctcttctgtgcacatcgttgaatgaagagagtctttttgcacaaacttcacttgaaattgtgccactgatgataaacggaatgagagccaaaaaagtttagttggagacagttgtaaattcaatttgggagtttatttaattgacttttctattcacgttggggcacatgccaactccctgggtttcttcctgggctggtgttttggggcagcaggcatcattttccttttctagcttcataggaatattgtgagctcaccatgctgtggagggtgggaaaagagcagagacttggctgccctgctttctccttaggactcttcacttttctcaccacatctcttgcatgacttcatggtactggggacaagtttgtatgccttcaccccagagctggctgggttatggcttttgtagcagagcccatacagcctatggaagaactagaatctcactcacagtaataagaatctaggaggaattccaaaccgaagcaggcagggtcttgaacccaaaggacagcattttctacccacttcttaatattgacagcttccccgttctatttaatgtccaaaaatgtttcccaaaatttcaaactctttcactgtaaagatttgttacaaagaatgtggtttggggaattaccttattttatattgctgtaaacaaacttcaaattctacatgtgcgacttttctccttcctgaagggtgtttagtagtcagcgttttcagaattgttttgttactatactttaacattttacatttcctgtttgtattattttgtgagagcaagg

SEQ ID NO: 27106 - DNA, 439 bp, Homo sapiens
  SIMILAR (193)..(125): 651254mologous to Homo sapiens neutral protease large subunit,accession number M27826,Smith-Waterman Score=68.
  misc_feature (1)...(439): n = a,t,c or g
cttaaaagagtattgtctaagttggcaccagagttggggagttttaagaggtttagaagcctggccgtcaatacccacaacagttatggaggcaagggaaacaggcccttgaaaagaaggcggcttccgaggcgatcgggcagtgtcagtcttcagccgctaagccgagaagatctgggaaggagtcagtcagagagccttgggccggagttccaggggctctgggagtggctgccaggagcggcgagattctgcatcttagcttgcctaggtggnnnnnnnnnnnnnnnnnnnnnnnnnnnnnnnnnnnnnnnnnnnnnnnnnnnnnnnnnnnnnnnnnnnnnnnnnnnnnnnnnnnnnnnnnnnnnnnnnnnnnnnnnnnnnnnnnnnnnnnnnnnnnnnnnnnnnnnnnnnnnnnnnnnnnnnnnnnnnnnnncag

SEQ ID NO: 27107 - DNA, 350 bp, Homo sapiens
  SIMILAR (100)..(198): 541254mologous to Homo sapiens neutral protease large subunit,accession number M27826,Smith-Waterman Score=82.
ggccactaggccaagggatgcccacagaactgggactcctcctaagccgtgtcccatctgtgtgggaccccactggaaactggactgtctaactggcccaaggctctgactgactccttcccagatcttctcggctcagtggctgaagactgacgttgcctgatcacctcggaagcctcctggaccatcacagacgctttgggtaactcttacagtggagggtaagtccgtccccttcttaatcaatacgaaggctacccacttcacattaccttcttttcaagggcctgtttcccttgcctccataaccgttgtgggtattgatggccaggctgctaaacctcttaaaa

SEQ ID NO: 27108 - DNA, 840 bp, Homo sapiens
  SIMILAR (387)..(506): 671254mologous to Homo sapiens PRO2225,accession number AF130084,Smith-Waterman Score=145.
accatctcggatgccaagcttcgggtaactctcacagtggaaggaaaggtagaatggactcgtggtcttttaaaaacacacctcaccaagctcagccaccaacttaaacaggattggataatacttttaccactttcgcttctcagaattcagacctgtcctcagaatgctacaagaagccccctaaaccatcagggacgccgagcttcgggtaactctcacaatggaagcccacaagtttcggatacctctactccttccttggcgactgatcatgcaccccttaccatctcattaaaacctaatcacccttaccccactcaatggcaatatcccatcccacaggacgctttaaaaggattaagatctcagcttggcactctcaggctgcacactgtagctctggtgcaagctcaggctttatgttccttccctagcttgggggcagcaagggaagagattttagcagtggttgtggcagagggcctttcacttatctcttggggctccaatccagagagatgtggagctgctatcaatcacagcaatcagactgggatggggcagctgaactgtgggcccaagacaggagggcccttcctggtagtgaacaaagagggaggagagatgcacagctgtttggctcccaatttcactggcatttgttgcagtggcattttgccacacagtccaagctactgtttctggatgcgtatcttcattgagttaaagatcatcttcccaagtgaattttatgtcattctcctagcttcagtaccctcaaagctcaggggggacgtggacttcaaatgccctctaccttcattttccacaatttga

SEQ ID NO: 27109 - DNA, 823 bp, Homo sapiens
  SIMILAR (165)..(509): 441254mologous to Homo sapiens neutral protease large subunit,accession number M27826,Smith-Waterman Score=185.
cttgctacatgtgctggaaatctggccactggcacaaggaatgccggcagcccgggattcctcttaagccgcgtcccatctgtgtgggaccccactgaaaatcggactgttcaactcacctggcagccactcccagagcccctggaactatggcccaaggctctctgactgactccttcccagatcttctcggcttagcagcctgaagactgacactgcccgatcgcctcggaagacccctagaccattcacggacgccgagcttcgcgtaactctcgacagtggaaggtaagcccgtccccttcttaatcaatacggaggctacccacgccacattacctttttttcaaagggcctgtttcccttgcctccataacctgttgtgggtattgacgggccaggcttctaaacctctttaaaactccccaacgtctggtgccaacattagacaatactcttttaagcactcctttttagttatccccatctgcccagttcccttattaggcttaagacactttaactaaattgtctgcttccctgactattcctggagtacagctatatctcattgccacccttcttcccaatccaaagcctcctttgcgtcctcctcttgtatccccccaccttaacccacaagtataagatacctctactccctccttgggcgaccgatcatgcaccccttaccatctcattaaaacctaatcacccttaccccacttcaacgccaatatcccgtcctgcagcatgctttataaagattaaagcctgttatcattccgcctgttacagcatggccttttaaaccctataaact

SEQ ID NO: 27110 - DNA, 478 bp, Homo sapiens; identical to SEQ ID NO: 9547
  SIMILAR (82)..(285): 981254mologous to Homo sapiens hnRNPcore protein A1,accession number X79536,Smith-Waterman Score=378.

SEQ ID NO: 27111 - DNA, 702 bp, Homo sapiens
  SIMILAR (85)..(699): 581254mologous to Homo sapiens hnRNPcore protein A1,accession number X79536,Smith-Waterman Score=646.
atggacctcaggaaattaagagggatgagctggagtgcctacgtggagttcgcacttcggaaagaagacgcatggattcctctgaagtctaagtctgagtctcctaaagagcctgaacagctgaggaagctcttcattggagagttaagctttgaaacagctgatgagagcctgaggagccattttgagcagtggggaatgctcatggactgtgtggtcatgagagatccaaacaccaagtgctccaggggctttgggtttgtcacatatgccactgtggaggaggtagatgcagccatgaacgcaaggccacacaaggtggatggaagagttgtggaaccaaagagcgatctcaagagaagattctcaaagaacagccaaagaggtcgaagttgttccggaaactttggtggtggtcatggaggtcttttcagtgggaatgacaactttggtcatggaggaaacttcaatggttgtggtggctttggtggcagccatagtggtagtggatacggtggcagtggggatggctataatggatttggtaatgatggaagcaattttggaggtggtggaagctacaatgattttggcaattgcaacaatcactcttcaaattttggacccatgaagggaggaaactttggatgcagaagctctggcccttatggtggtggaggccaatactttgccaaaccatga

SEQ ID NO: 27112 - DNA, 4389 bp, Homo sapiens
  SIMILAR (913)..(2187): 991254mologous to Homo sapiens zinc finger protein (583 AA),accession number X51760,Smith-Waterman Score=2444.
atgactggaatctgctacacagaagatgaaagatcatataagaaaaatgctcaaccaacggcagcaagtaaaaagcaaaaagaaacacagaaattctgtctaagagtagacgggcaacaaaaagtgaagctctcggtgctccaggagaaaagcgcgcagctcacagtacaacttaagagccagaagttcctgggccaccccacagcgggccggggtcgcagcgagctctgcctggacctccccgatcccccagaggacccagtggcactggagacccggagtgtgggcacctgggttcgagaacgggacttgggcatgcctgatggggaggctgccctcgccgccaaggtcgctgtgctggagacccagctcaagaaggcgctgcaggagctgcaggcagctcaggcccggcaggctgacccccagccccaggcctggccaccgccggacagcccggtccgcgtggatacagtccgggtggtagaagggccacgggaggtggaggtggtggccagcacagccgctggcgcccccgcacagcgggcccagagcctggagccttacggcacagggctgagggccctggcaatgcctggtaggcctgagagcccacctgtgttccgcagccaggaggtggtggagacaatgtgcccagtgcccgctgcagctaccagcaacgtccatatggtgaagaagattagcatcacagagcgaagctgcgatggagcagcagaaatgaaatgggaggaccagaacattggagatcagtgccaaaatgccaagagaaatctaaggatggcattaacatcctctctgggctgtggatttctccaggttgtgctgagactccagaatttacagcaggtgatagtcagctatttcggccagtgcaagtttggatgcctgcaaggtcaatcatgcgagcatcaggaatatggagagaagccatatacacataagcaacgtgggaaagccatcagtcatcagcactccttccagacacatgaaaggccccccaccggaaagaaacccttctattgtaaagaatgtgcaaaaacctttagttctcttggaaacctccgaagacacatggcggcacaccatggagatggaccttataaatgtaagttgtgtgggaaagcctttgtttggcccagtttatttcatttgcacgaaagaacacacactggagagaaaccgtatgaatgtaagcagtgttctaaagcctttcctttttacagttcctatctaagacatgaaagaatccacacgggagagaaagcgtatgaatgtaagcagtgttccaaagcctttcctgattacagtacctatctaagacatgagagaactcacaccggagagaaaccctataaatgtacacaatgtgggaaagccttcagctgttactattacactcgactacatgaaaggactcacacgggagaacaaccctatgcatgtaagcaatgtgggaaaacgttttatcatcacacaagctttcgaagacacatgataaggcacactggagacggaccacataaatgtaagatatgtgggaaaggctttgattgtcctagttcagttcgaaatcatgaaactactcacactggagagaaaccctatgaatgtaagcagtgtgggaaagtgttatctcatagctcgagctttcgaagtcacatgataacacacacaggagatggaccccagaaatgcaagatatgtgggaaagcctttggttgtcccagtttatttcaaagacatgaaaggactcacactggagagaaaccctatcaatgtaaacaatgtggtaaagccttcagtcttgccggttcccttcgaagacatgaagcaactcacactggagtgaaaccctataaatgtcagtgtgggaaagcctttagtgatctctcttcctttcaaaatcatgagacaactcacactggagagaagccatatgagtgtaaggaatgtgggaaagcattcagttgtttcaaatacctttctcaacataaaaggacccacacagtacaaaaaccttatgagtgtaaaacatgtagaaaagccttcagtcatttcagtaacttaaaagtccatgaaaggattcactctggagagaagccatatgaatgtaaggaatgtggaaaagcattctcttggctcacttgccttctacgacatgaaagaattcacactggagagaaaccctatgaatgtctacaatgtggtaaagccttcactcgttcccgtttccttcgaggacatgaaaaaactcacactggagagaagctgtatgaatgtgtctgcaaggtggacaaacagaaccgtgctggctacagccctattatgctcaccgccctggccaccctgaagacccaggacgacatcgagactgtccttcagctcttccggcttggcaacatcaatgccaaagccagccagccatatgtggcccagggggacctgagtggattccaagacattggtggctacacaaaaaggaaactggacttttattccacgctgttggctggcagtccaggacctcagcatccaggaagtcacctttgtcctcagaccaacctggaaaaatctcgcttttctgcccgtggacaccgccgaagaagcatcgttaaagtctctcttcaccctgccgtcatgtctaagtcagagtctcctaaagagcccgaacagctgaggaagctcttcattggagggttgagctttgaaacaacatgatgagagcctgaggagccattttcgaggcaatggggaacgctcacggacttgtgtggtaatgagagatccaaacaccaagcgctccaggggctttgggtttgtcacataatgccactgtggaggaggtggatgcagctatgaatgcaaggccacacaaggtggattggaagagttgtgggaaccaaagagagcttgtctccagagaaagattctcaaaagaccagggtgcccacttaacttgtgaaaaaagatattttgttggtggcattaaaagaagacacttgaaagaacatcacctaagagattatttttgaacagtattggaaaaatttgaagtggattgaaatccatgacttgacccgaggcagttggcaagaaaaaggggctttgcctttgtaacctttggacggaccatggactccgtgggataagattgtccatttcaggaattaccatactgtgaatggccacaactgtgaagttagaaaagccctgtcaaagcaagagatggctagtgcttcatctcagccaaagaggtcgaagtggttctggaaactttggtggtggtcgtggaggtggtttcggtgggaatgacaacttcggtccgtggaggaaacttcagttggtccgtggtggctttggtggcaccccgtggtggtggtggatatggtggcagtgggggatggctataatggatttggtaatgatggaagcaattttggaggtggtggaagctacaatgattttgggaattacaacaatcagtcttcaaattttggacccatgaaagggaggaaattttggaggcagaagctctggcccctaatggcggtggaggccaatactttgcaaaaccaccgaaacccaaggtggctatggcgtttccagcagcagcaagtaactattggcagtggcaggaggttctaattacagccaggaaacaaagcttatcaggagaggagagccagagaagttgacagggaagctacaggttacaacagatttgttgaacttcagccaagcacagtggttggcagggcttagcttgctacaaagaagacatgttttagacaaatactccatggtgtaatgggcaaaaaactccgaggactgtattttgtgactaattgtattacaaggtatttttagtttctggttctgtgggaaagttgtaaagcattccaacaaaagggttttaatgtagattttttttttttgcaccccatgctgtttgattgctaaatgtaacagtctgatcgtgacgccgaataaatgtcttttttttaatgtgctgtgtaaagttagtccactccttaagccatcttggtaaatttccccaacagtgtgaagttagaattccttcagggtgatgccaggttctatttggaatttatatacaacctgcttgggtggagaagccattgtcttcggaaaccttggtgtagttgaactgatagttactgttgtgacctgaagttcaccattaaaagggattacccaagcaaaatcatggaatggttataaaagtgattgttggcacatcctatgcaatatatctaaattgaataatggtaccagataaaattatagatgggaatgaagcttgtgtatccattatcatgtgtaatcaataaacgatttaattctcttgaa

SEQ ID NO: 27113 - DNA, 1368 bp, Homo sapiens
  SIMILAR (1065)..(1175): 751254mologous to Rattus norvegicus zinc finger protein 5,accession number U78133,Smith-Waterman Score=163.
atgggtatggactgcctcacagggcaccctttcccataccggcaaggctcagccaccagggtatctatcaaagcgacaatctcacaacccagtcacaaagaagccgcgggtatcggcccacaagtcacacaggacgtggaaggcacacggggtgacagcctcgcactgaacggtaccaacctccactcgctccggagtcactcagatggcctgcgacgagcttccggagacccacacgacgctcatcagcccactccagacctgcagaacagaattggtgaaagctctccttcctgccccgaaggctcggggaatttgcactcgggtctcaccgctacccttagttggatggaacccagcccttacgggcccggaaagaagcgcctcagtgcctccgcccccggaggacacaaaggggccgccggcccaactcccgcgggtcctcccacactggcctctccccggccttccagagagccgaaagtccggattccctgcagctccgagcctggcccggtcacagggacgggcccagcgtcacactacacgggctggtgtggaagtgcgcaggcacaaggctctgcgcgcctcccttagcaaccagggcggggagttgagaatcgcagttggccgcagggaaaaggtcagaatcaaacagccacgagaatataaaacgcgaccatggtcacacaaaaggtcgcatattcgcacgacctcagatgtcactggacagggtctctcgccctggaaaccccactccaaattccatggccgaagtttcacacatacagtcacactacgtcactcctccctcttctagccgctgtcaggaccttaaggctccagctgacccggccttcactggccctggagctctcaccaccttcaccccgctgtattctagcttcaggtagagacccaaaaagacggaactaaacacactgagccgggcttccttcacggacttgcgaacctgcagctccagccgactccccgccggctctgccactttggcagcgttaagtgtggaatcggggcctgtgccgcgggcttggtgaacttcccttattgtgcacatgacaggccatacaggtgaaaaaccctatgaatgcaataaatgtggaaaagccttctcccaaagctcatgccttactatacatatacgaggacatacagatactacgtgctcagagaaagaaaatcagggtaggggatgtcatggatactgatgaaattgagctaggaatcattaacaagttaacatttaagcaaagatttgaagaaatgaaaaagtcagtcagtcattcaagtctctggggaaaaagcattcagggagaggcagcagctggttcaaaggcccaaaactag

SEQ ID NO: 27114 - DNA, 4953 bp, Homo sapiens; identical to SEQ ID NO: 6466
  SIMILAR (308)..(2608): 431254mologous to Feline leukemia virus gag-pol precursor polyprotein gPr80,accession number AF052723,Smith-Waterman Score= 1547.

SEQ ID NO: 27115 - DNA, 1367 bp, Homo sapiens
  SIMILAR (1066)..(74): 391254mologous to Fowlpox virus gag,accession number AF006065,Smith-Waterman Score=556.
tttctgccaggttgagcagggccccttcctccttgtctggatcctcctgctccgagtcaccttgttttccttttagctgagggcatttgttcttccaatgtcctatttctttacaataagcacactgattacgctgcaagctctgacaaccaggctgaatttctttcccggggccccccttcccttgcctctttggggggacccctgtgattgctgcagctaacaggtcggcatttcgccggacctgatgttcattctctctgcggttttccttagggcttactgcatccctgtttacaaacacctggttagctatttctaataactgtgatgtgttcatccctgcaaacccagcctgtttctgcagttttcttctaatgtcttctgcactttgactaactaaagccatgttaatcatgcgctgattttcaggactattgggatcaaagggagtatacatacaataggcctcacacagcctctcgtagaattgtgctggactttcttcttttccctgaatggccacgtttgtggccttctgggctcccctctttaatccttccaagagagcttccctgtatcggtttagcctttgcatatcctctctttcatttgggtcccactgggggtcggttcccggtaactgggtccttacatactcttgggggttttggtaatcagccggtgcatgttcctctagccacttagttgctgcttggagcactctccgcctttcatctgtgttaaagaggaacatgagcaactggtggcaatcagcccaagtggggttatgggtctggataatagtttggagcaaatcaattagagcttgcggcttttcagtataggatggggtattgtttttccagttgaggaggtcggcagagaagaagggctggtacacaaaaacacgcctctccaccatgtgcccatcctcatctattccagtataccactgctctctcaggggcatttgtatccccgttttgggtcttaaaccagctgccaagggaggggtttctcccgaggcttcacctcctctcttgcctactctgggtggcctagggatgtttgtcttgtggaggtgcaagccccgtggactcaaaagtggtgagcctctctcccaagtttcaaatgtccagactccaagtgccagttccttcccggtgttcagccactgcgttgatcctccacgggggcctgccacacactgctctcttatttcagccatctttgcagtaaccagttccccagggactttgacaaacttaatgtaggtgatacctgacagcatctcaccatgagcctgtgctaaatgcctcttgcttcctgccttgtgcttctctgaaaccacagcacaggccatg

SEQ ID NO: 27116 - DNA, 1329 bp, Homo sapiens; identical to SEQ ID NO: 5124
  SIMILAR (490)..(1326): 961254mologous to Homo sapiens p40,accession number U93573,Smith-Waterman Score=1383.

SEQ ID NO: 27117 - DNA, 3576 bp, Homo sapiens
  SIMILAR (76)..(1881): 971254mologous to Homo sapiens tripartite motif protein TRIM33 beta,accession number AF220137,Smith-Waterman Score=3028.
atgcaagtattgagaagctttgcctcttatgtacctctttttggaaagccattagagaatgtgattcaccaaaataagttagtaaaccaagaaagtaaaaggtatcagtttttggaagaagcttttcaaaatcagaagggtgcaattgagaatctactggcgaaacttcttgagaagaagaattatgttcattttgcagctactcaggtgcagaataggataaaagaagtaaatgagactaacaaacgagtagaacaggaaattaaagtggccattttcacccttatcaatgaaattaataagaaaggaaaatctctcttacaacagctagagaatgttacaaaggaaagacagatgaagttactacagcagcagaatgacatcacaggcctttcccggcaggtgaagcatgttatgaacttcacaaattgggcaattgcaagtggcagcagcacagcactactatacagcaagcgactgattactttccagttgcgtcatattttgaaagcacggtgtgatcctgtccctgctgctaatggagcaatacgtttccattgtgatcccaccttctgggcaaagaatgtagtcaatttaggtaatctagtaatagagagtaaaccagctcctggttatactcctaatgttgtagttgggcaagttcctccagggacaaaccacattagtaaaacccctggacagattaacttagcacagcttcgactccagcacatgcaacaacaagtatatgcacagaaacatcagcagttgcaacagatgaggatgcagcaaccaccagcacctgtaccaactacaacaacaacaacacaacagcatcctagacaagcagcccctcagatgttacaacaacagcctcctcgattgatcagtgtgcaaacaatgcaaagaggcaacatgaactgtggagcttttcaagcccatcagatgagactggctcagaatgctgccagaataccagggatacccaggcacagcggccctcaatattccatgatgcagccacacctccaaagacaacactcaaacccagggcatgctggaccctttcccgtagtatcggtacacaacaccacaatcaacccaacgagccctactacagcaactatggcaaatgcaaaccgaggtcccaccagcccatctgttacagcaatagagctaatcccctcagttaccaatccagaaaaccttccatcgctgccagatattccacccatacagttggaagatgctggctcaagtagtttagataatctactaagtagatacatctcaggcagtcacctacccccacagcctacaagcaccatgaatccttctccaggtccctctgccctttctccgggatcatcaggtttatccaattctcacacacctgtgagacccccaagtacttctagtactggcagtcgaggcagctgtgggtcatcaggaagaactgctgagaagacaagtcttagtttcaaatctgatcaggtgaaggtcaagcaagaacctgggactgaagatgaaatatgtagcttttcaggaggtgtaaaacaagaaaaaacagaggatggcaggaggagtgcttgcatgttgagcagtcctgagagtagcttgacaccacctctctcaaccaacctgcatctagaaagtgaattggatgcattggcaagcctggaaaaccatgtgaaaattgaacctgcagatatgaatgaaagctgcaaacagtcagggctcagcagccttgttaatggaaagtccccaattcgaagcctcatgcacaggtcggcaaggattggaggagatggcaacaataaagatgatgacccaaatgaagactgtggggactggatatgcacattttgtagagatattggaaagccagaagttgaatatgattgtgataatttgcaacatagtaagaaggggaaaactgcgcaggggttaagccccgtggaccaaaggaaatgtgaacgtcttctgctttacctctattgccatgaattaagtattgaattccaggagcctgttcctgcttcgataccaaactactataaaattataaagaaaccaatggatttatccaccgtgaaaaagaagcttcagaaaaaacattcccaacactaccaaatcccggatgactttgtggccgatgtccgtttgatcttcaagaactgtgaaaggtttaatgaaatgatgaaagttgttcaagtttatgcagacacacaagagattaatttgaaggctgattcagaagtagctcaggcagggaaagcagttgcattgtactttgaagataaactcacagagatctactcagacaggaccttcgcacctttgccagagtttgagcaggaagaggatgatggtgaggcaattgccctggtggaatgccttgccagagcagtgcacggtaggcccccatggaggatcaacgcagtggctgaacacccagaaggaattggcgcttggactccagacatctggaacacgggaggaaacttagcattccttggagacctgaaaggatgcagtgaacttaagaactttcaagagctcaccaataagtcagcccttgttcatccccgagcggatgtgtggtggtattgtggtggacatttactggacactctgccgaataactggagtggcacttgtgctttagtccaattggctatccctttcaccctggcatttcatcaaccagagggagggcaggtgatagaaaaagggtggatctggttatcggatggaagaatagcaatgccacaactgctaggagccgcagtcgtactagctgtgcatgagaccacccatctaggccaagagtctcttaaaaagttgttaggccggtacttctacatctcacatctgtcagcccttgccaaaacagtggcttatggagcagccccctttgaagatccccaagtagacttcactgagatgcccaactgtggagatctcatccctaggtttggactgcccttacaaatcggcttggacaacaggtcagcatttgtggctgacctggtacagaagacagcaaaggtgattggttattataaatgtgctggaactctaaaagggacttgtttgtataatgtcacccagtacaaggtatgtagcccaaaaagtgaccagcctgatgtgtgttgtaacccatctgagccctctatggtaacagtttttgaaataagattaagaacggtcacctggtggggtctaaaccatactaagaagcatccatttagtaagtttcctaagttgcaaactgtttgggcccatccagagtctcactgggactggccagctccagctggactatactggatatgcaggcatagagcctacaccaagctacctgaccaatgggcaggtcgttgtgtcattagcaccattaagccatcctttttcctactgcttgtaaaaacaggtgagctcctaggcttccctgtctatgcttcccgagaaaagagaagcatagccataggtgattggaaaaatgatgagtggccccctgaaagaatcatacagtactatgggcctgccacatgggcacaagacagctcgtag

SEQ ID NO: 27118 - DNA, 824 bp, Homo sapiens
  SIMILAR (374)..(156): 641254mologous to Homo sapiens HERV-E envelope glycoprotein,accession number AF026246,Smith-Waterman Score=246.
tttaaattttaacgtgacttgtttgggcacctctttttcttctgttttggttaacactttactcatatcgtttgtgagcccccaccagtcttcattcttaatcttattttaaaaactgtggtcatgggaggctcaggtgggtcataacgcacatcaggttggtcatttcctgggctacataccttgtacagaataacattatacaaacaaggcttttttagagttctagtacacttataataactgtaaaataataggaccatagcaaccttttgtcctacctcagtgacttgatgtatatactgggaacagtcctcagtctgaggaaggtcagttgaagtccttactgtaaaattccaaattttaaggcaaatgagtcctgcgatgagtttcctcatgctttgaccatgcaaggaccagtcagcttccaggtgtgactggggcagggcttgtcatcttcttcagagtcactttgcaggggttggcgaagctgctcccatgcacgtacagctcccagtctactgatgtttaaggatggtcttggaggttgggcctgctagaataaactgagtccaacacctctacacagttaagtttaactgggctctctgataccaggagcaaggtggcggggtttagggtgttgcaaacttcaatggttatgtggggatttttcacagagcaagctttggtatctagctagtctagcattcattagctaatggtgtcctttggtatttattaaaatcaccacagcacagggggactttatgtttaggttttgtctaagagttagcttatctgcttcttgtgctaacagggct

SEQ ID NO: 27119 - DNA, 1449 bp, Homo sapiens
  SIMILAR (1076)..(1234): 541254mologous to Homo sapiens Amino acid sequence of a human secreted protein,accession number Y19566,Smith-Waterman Score=161.
  misc_feature (1)...(1449): n = a,t,c or g
atgagacaagatggcaaggtggcaagacagctattggtgattggtgagatggtgagacagcgatcagcagctggcaataaggaaggagacaagacgccccagcctatacctctcactgcccaaggaagtaagccctaccagtaccaccaggagggtacccctatatcagcccctaaaatcaaacctgtgtccattgtgggagataagaaacagatggatctgagtactgtccaaaaatatgcagatggagtggccacacataacctagaccatgctagttatcatgtggaaggagatacagttccagatatggaccctcagtggaattaccagagggcttcccaagatctcaaatgcaaaaatcacatgacggagaaagtcagaaatttcaagtgtgagagggagctggcccaaggaaattctactggctttgagatggagggatcacgtggcaaggatggtctctatgagctaagtggcccacagctgacagcaaggaaagaggtacctcattcctgcaactgcaacaaactaaatatggctgatgatctgaatcagcttctgattaaagccactcccttcactatctcggtgtctcctgtccgcggctcgtcctgctacatttcttggttccctgaccggcaagcgagagccgtgtgtggcaggcccccgtggaggatcaacgcagtggctgaacaccgggaaggaactggcacttggcacttggagtccggacgtctcaaactcgtgtgcgtgtggtgtgagcgtggtgttttgtctcgaggagacacgggtcaggtacaaactaagcccaccccactaggaactatgttgaaaaatttcaagaaagaatttaagggagattacggtgttactatgataccaggaaaacttagaactttgtgtgaaatagactggccagcatttgagggaggaaacttagcattccttggagacctgaagggatgcgatgagcttaagaattttcaagagcttatcaatcagtcagccattgttcatccgcaagcagatgtgtggtggtattgtggtggacctttactgggcactctgccggaataactggagtggcacttatactttagtccaattggctatccctttcaccctggcatttcatcaaccagaaggaaaaaaaataagacattgtaaagtgagagaagccccttataggtctttcgactctcctgtccatttagacgcagttgggagtcccacgaaggaatacagatcaatttaaagcttgaaatcaaatagctacaggatttaattcaatattttagtaggtgacagttaataaaaatataaattagataaactacatctattacaaccaacagcagcaagcttttcatgagttaaaagaaaaactcaggtncgcccancctggggccacctgacctgacaaaactttttacactctatgtgtca

SEQ ID NO: 27120 - DNA, 1108 bp, Homo sapiens
  SIMILAR (836)..(1102): 581254mologous to Woolly monkey sarcoma virus reverse transcriptase (476 AA),accession number X15311,Smith-Waterman Score =256.
atgaccattcgatttagcaataaggagatcaataacgacctcagggagggcagtatcagcaggaggatcgtagaagttaaagacttaaaacaaactttggcaattaagacaggataccaagattcaaatgcctggttggaatggatcaaatattccatccacacgttaaacaaaagcaattgttatgcttgtgcacatggcaggccagaggccctgattgtccctcttcccactaaggtggtcctccagttgaccaggcatgggctgcagggtagctattttccaggattctacggcctggagtaacaagttgtgccaagctctctctctgctatatctcaaagtccagcaccctgcgggtcagcccctgagggccgtccagcttccgtctcccaacactaagttcacttcctgtctctcacggcagggaggaaacttagcattccttggagacctaaagggatgcggtgagcttaagaattttcaagagcttatcaatgagtcagcccttgttcatccctgtgcagatgtgtgatggtattgtgggggacctttactgggcactctgccaaataactagagtggcacttgtgctttagtccatttgactatccctttcaccctgtcatttcatctaccagaggaaggaaaaataataataataagacattgtaaagtgagagaagccccttatgggcctttcaactctcacatctatttagatgcaattggaatccaaaagggaataccagatcaatttaaagcccaaaatcaaatagctgcaggatttgagtcaatattttggtgggtgacagttaataaaaatgtagattggataaactacatctattacaaccaacagcaacgagcttttcatgagttaaaagaaaaactcatgtcggccctagccctggggctacctgaccagacaaaaccttttacactatatgtgtcagacagagaaaaaaaaatggcggttagagttttgacccagaccatggggccctggctggggccagtggcctacctctctaaacaactagatggcgtttctaagagttggcccccatgtttgagggctttggcagcaacagccctgctagcataa

SEQ ID NO: 27121 - DNA, 4563 bp, Homo sapiens
  SIMILAR (94)..(3561): 691254mologous to Homo sapiens zinc finger protein,accession number L11672,Smith-Waterman Score=4367.
atgcccaggccagaaaaactgggaaaaacacaggttcccccacttgctgaatgtttgacaaaagattcttttttgggccaaaaacaggcatcactgggaccattgacatttagagatgtgaccatagaattctctctggaggagtggcaatgcctggacacggttcagcagaatttatatagggatgtgatgttagagaactacagaaacctggtcttcctgggtatggctgtctttaagccagacttgataacttgtctgaagcaagggaaagagccttggaatatgaagagacatgagatggtaactaaacccccagttatgcgttctcattttacacaagacctttggccagatcagagcacaaaagattctttccaagaagtaatactgagaacatatgcaagatgtggacataagaatttacgattaagaaaagattgtaaaagtgccaatgagggtaagatgcacaaagaaggttataataaacttaaccaatgcaggacagctacccagagaaaaatatttcagtgtaacaaacatatgaaagtctttcataaatattcaaatagaaataaggttagacacactaaaaagaaaactttcaaatgtataaaatgtagcaaatcatttttcatgctttcatgcttaattcgacataagagaattcatattagacagaatatctacaaatgtgaagaacgtggcaaagcctttaaatcgttctcaacccttactaaacataagataattcatactgaagacaaaccttacaaatataagaaatgtggcaatgcctttaaattttcttcaacgttcactaaacataagagaattcatactggagagacacctttcagatgtgaagaatgtggcaaagcttttaaccagtcctcaaatcttactgaccataagagaattcatactggagagaaaacctacaaatgtgaagaatgtggcaaagcttttaaggggtcctcaaattttaatgcacataaggtaattcatactgcagagaaaccctacaaatgtgaagattgtggcaaaacttttaaccatttctcagcccttagaaaacataagataattcatactggaaagaaaccctacaagcgtgaagaatgtggcaaagcttttagccagtcctcaacccttagaaaacatgagataattcatactggagagaaaccctacaaatgtgaagaatgtggtaaagcttttaagtggtcttcaaaacttactgtacataaggtagttcatactggaaagaaaccctacaaatgtgaagagtgtgagaaaccctacaaatgtgaagaatgtggcaaagcctttaaccagtcctcacaccttactcaacataaaacaattcatactggagggaaaacctacaaatgtgaagaatgtggcaaagcttttaaccatctttcagcccttactaaacataagataattcatactggggagaaaccatacaaatgtgaagaatgtggcaaagcttttaggcaatcctcacaccttactagacataaagcaattcatactggagagaaaccctacaaatgtgaagaatgtggcaaagcttttaaccatttctcagaccttagaagacataagataattcatactggaaagaaaccctacaaatgtgaagaatgtgggaaagcttttagccagtcctcaacccttagaaaccatcagataattcatactggagagaaaccctacaaatgtgaagaatgtggtaaagcttttaagtggtcatcaaaacttactgtacataaggtaattcatactggagagaaaccctgcaaatgtgaagaatgtggcaaagcttttaagcatttctcagccctcagaaaacataaggtaattcatactagggagaaattgtacaaatgtgaagaatgtggcaaagcttttaacaattcctcaatccttgctaaacataagataattcatactgggaagaaaccgtacaaatgtgaagaatgtggcaaagcttttaggcaatcctcacaccttactagacataaagcaattcatactggagagaaaccttacaaatgtgaagaatgtggcaaagcttttagccatttctcagcccttagaagacataagataattcatactggaaagaaaccgtacaaatgtgaagaatgtggcaaagcttttagccatttctcagcccttagaagacataagataattcatactggagagaaaccctacaaatgtgaagaatgtggtaaagcttttaagtggtcatcaaaacttactgtacataaggtaattcatactgcagagaaaccctgcaaatgtgaagaatgtggcaaatcttttaagcatttctcagcccttagaaaacataaggtaattcatactagggagaaattgtacaaatgtgaagaatgtgtcaaagcttttaacagtttctcagcccttatgaaacataaggtaattcatactggagagaaaccctacaagtgtgaagaatgtggtaaagcttttaagtggtcctcaaagcttactgtacataaggtaattcatactggagagaaaccctgcaaatgtgaagaatgtggcaaagcttttaagcatttctcagcccttagaaaacataaggtaattcatactggaaagaaaccctacaaatgtgaagaatgtggcaaagcttttagccaatcctcatcccttagaaaacatgagataattcatagtggagagaaaccatacaaatgtgaagaatgtggtaaagcttttaagtggttgtcaaaacttactgtacataaggtaattcatactgcagagaaaccctgtaaatgtgaagaatgtggcaaagcttttaagcatttctcagcccttagaaaacataagataattcatactggaaagaaaccctacaaatgtgaagaatgtggcaaagcttttaatgattcctcaacccttatgaagcataagataattcatactgggaagaaaccatacaaatgtgcagaatgtggcaaagcttttaagcaatcctcacatcttactagacataaagcaattcatactggggagaaaccctacaaatgcgaagaatgtggcaaagattttaacaattcctcaacccttaagaaacataagctaattcatactagggagaaattgtacaaatgtgaagaatgtgtcaaagcttttaacaatttctcagcccttatgaaacataagataattcatactggggagaaaccctacaaatgtgaagaatgtggtaaagcttttaagtggtcctcaaaacttactgaacataaggtaattcatactggagagaaaccctgcaaatgtgaagaatgtgacaaagcttttaagcatttctcagcccttagaaaacataaggtaattcatactggaaagaaaccctaccaatgtgacgaatgtggcaaagcttttaacaattcctcaacccttacgaaacataagataattcatactggggagaaaccctacaaatgtgaagaatgtggcaaagcctttagtcagtcctcaatccttactaaacataagataattcattctgtagagaaaccctacaaatgtgaagaatgtggcaaagcctttaaccagtcctcacaccttactagacacaaaacaattcatactggagagaaaccctacaaatgtgaagaatgtggcaaagcttttattcagtgctcataccttattagacataaaacaattcataccagagagaaacctacaaatgtgaagaaagtaccaaagcttttaagcaatcctcacaccttactagacaaaacaattcatactggagagaaaccctacaaatgtgaagaatcttttgaccggtcctcaaatcttactgaacataagataattcatgctagagacaaacactacaaatgtgaagaatgggcaaagcttttaaccagttctcaaaccttactcaaaataatttatagtggagaggaacgctacaaattcaaaggatttggcaaaacttttaagtgtttctcaaaacttactgaacacaagataattcatattagagagatactttacaaatgtgaagaatgtggcaaagcttctaacgggttctcaaatcttactgaatgtgagataatttatattagagagaaaccctacaaatgtgaagaatgtggcaaagcttctaacgggttctcaaatcttactgaatgtgagataatttatattagagagaaaccctacaaatgtgaagaatgtggcaaagcttttaactggtccttaaaccttactgaacataagataattaatactaaaggaaaccctaaacatataaaaaatgtgacaaagcttttaactgaccttactcaaaataagatagtttatactgaagacaaactctataaatgtgaagaatgtgacaatgcttttaatcaattctcagactttactagacgtaagaaaattcgtactggagaaaaaccctacaaatgtgaagaaagtgggaacacttttagccagtcctcaactcttactaaacaagataattcaatgggagagaaaccctacaaatgtgaataa

SEQ ID NO: 27122 - DNA, 411 bp, Homo sapiens
gcacagctccctgccgcagaggcgtctcctccttgcctatgtagattttacgttctacccagacacttggtccgtgccttttctgacttctcttctttcagctagggggtgacgccttttccttcaaattcagctcaggtgttaacttccagaaattctttgatctgccaagcctggggtaagagagtgttctctgcccttttgtgcataattctatcagaatacacatcacctttgtaaaattctgcatttacatgtttcttgccctctctggaatgtaaactctgagggcttaaggccttgtctttgtgttacattccccaaccctgtgcgcctgaacttgacaggtgctccgtgaaagttggaagtgttgattgccttcaggaagagattgatgttaattggaataca

SEQ ID NO: 27123 - DNA, 246 bp, Homo sapiens
  SIMILAR (1)..(201): 551254mologous to Homo sapiens Lsm6 protein,accession number AJ238098,Smith-Waterman Score=158.
atgagtcttcggaagcaaacccctagtgacttcttaaagcaaatcatcggacgaccagttgtggtaaaattaaattctggagtggattatcgagtgaactcaggtatgaacaacacaactgaagaacatcttggtgcagcagcatttgtttttgcaggagtattcaagattggcaagcagctgttgagtatcattttacaacctgaatgtcccactcatataacgtataatgtgtgtggcaacagg

SEQ ID NO: 27124 - DNA, 429 bp, Homo sapiens
  SIMILAR (250)..(396): 951254mologous to Homo sapiens Lsm6 protein,accession number AJ238098,Smith-Waterman Score=244.
  misc_feature (1)...(429): n = a,t,c or g
ctgggatcatccgcggcggccgggctcgtggggcgcctggagtgagggttctggttcccgccggcgaggattgttaaaatgagtcttcggaagcaaacccctagtgacttcttaaagcaaatcatcggacgaccagttgtggtaaaattaaattctggagtggannnnnnnnnnnnnnnnnnnnnnnnnnnnnnnnnnnnnnnnnnnnnnnnnnnnnnnnnnnnnnnnnnnnnnnnnnnnnnnnnactgggggtcctggcttgcctggatggctacatgaatatagccctggagcagacagaagaatatgtaaatggacaactgatgaataagtatggggatgcatttatccgaggaaacaatgtgttgtacatcagtacacagaatagacggatgtgaagacaccaatagagcaacgcttttcatagt

SEQ ID NO: 27125 - DNA, 555 bp, Homo sapiens
  SIMILAR (259)..(402): 711254mologous to Homo sapiens Lsm6 protein,accession number AJ238098,Smith-Waterman Score=165.
atggcactaacatctggcaaggacctttgtgctgcatcatcctatgacagaaagcaaaaggataatcttcacattgagtatgctgatgaagaaaaggaagaggaggggttggccttgcttggggtggtagaggtggaagaggtggaggagatggaaggggaggcaagagagctagggggtgacgccttttccttcaaattcagctcaggtgttaacttccagaaattctttgatctgccaagcctggggattgttaaaatgagtcttcggaagcaaacccctagtgacttcttaaagcaaatcatcggacgaccagttgtggtaaaattaaattctggagtggattatcgaggaattttccccactgacaaacttgcacaaataaatatggcaaacactgatgtccaatacccaacagcgattgtccgcttattccctgctagcagaacagatggttctgctaacagaacccagatgttacattcatgtggaagtggagaccacctgtcttcggggaagttaggcctctccttttccccaggggatgaactgtga

SEQ ID NO: 27126 - DNA, 659 bp, Homo sapiens
  SIMILAR (320)..(364): 601254mologous to Echinococcus multilocularis putative U6- snRNA-associated protein,accession number AJ292366,Smith-Waterman Score=42.
aggcagaaaagtgcccctgcctcggcgctttcggttttggctgggatcatccgcggcggccgggctcgtggggcgcctggagtgagggttctggttccccgccggcgaggattgttaaaatgagtcttcggaagcaaaccccctagtgacttcttaaagcaaatcatcggacgaccagttgtggtaaaattaaattctggagtggattatccgaggggtcctggcttgccttggatggctacatgaatatagccctggagcagacagaagaatatgtaaatggacaacttgaagaataagtatggggatgcatttatcccgaggaaacaatgtgttgtacatccagtacacagaagagaccggatgtgaggacccccaagagagcaacgcttttcatagttggatatatttttttatgaattttttctaatttttgcttcttttgtgatacaatttgtcctccttttataataagttgggtgatttttcacctgacatgtgaagtaagataaatgtatacaattgtggatttaattgtgaaatgttctttcacttgtagagtttcagtcattttcttttacctcgttggtcagtgtacagaatgctaaaataattaaaaaaagaccaaatatacctcttcctacaagattatttaactt

SEQ ID NO: 27127 - DNA, 450 bp, Homo sapiens
  SIMILAR (223)..(2): 1001254mologous to Homo sapiens b55C20.2 (Spinal Muscular Atrophy SMA3 LIKE protein),accession number AL021368,Smith-Waterman Score=411.
ggaggggtccaaggctttggtgtgagcaatcaccatcctcccacgagtacaggtaggcggggtgttcgtgcatcaggtacggccaccagaggttggcacccagcaccttcagctggccctgggtcccagcctggttgtccacgactttgttttctgcattcaaaagacacacttccaacttgaactggttactgcacttgatggagatctggtaattcaccagccccagtgttttgtgacttctttccacagctgttctttgagtttgttcaaacattgcttccaagtcaaatgtgtgagcttttttaccgaaccccgaaccccgtgaagcccatggtgaccacaagctgcgggtccggtcccgatgcgtctgagcctgtcacttcgctgggcccagagcgctccatggctggccgcacaccgcagaaccagccacagcgacaccccctt

SEQ ID NO: 27128 - DNA, 642 bp, Homo sapiens
  SIMILAR (87)..(467): 351254mologous to Homo sapiens Human GTPase associated protein-13,accession number Y99662,Smith-Waterman Score=122.
tttcgtagttattggcaagttcccctgcagttgtttgggctgtccctgtggctggttctggggtgtgcggccagccatggagctgttctgttcccagcgaagtgacaggctcaaacgcgtcgggaccggacgccgcagcttgcgctcacccatgggccttcacggggttcggtaaaaaaagctcgcacatttgacttggaagcaatgtttgaacaaactcgaaggacagctgtggaaagaagtcgcaaaacactggaagcaagagaaaaagatggaagaaatgaacagagatgaaagaattaagaagacaaaattgaagatattgagccaacatcctcaagatcaaatgtggtcagagattgctcccaaatcatcttccaggggatacgagcagcaagtgaaagtgaacagagttttgaattcttttcgagaagaggtacaatggccctcctttaccccctaaaatgggtaggaaaaccagttaattttatggaggaagatatcctcggtcctttacctccacctcttaatgaagaagaagaagaagcagaggaagaagaagaggaagaggaggaagaggaaaatcctgttcacaagattcctgactcgcatgagataacgctgaagcatggcactaaaaca

SEQ ID NO: 27129 - DNA, 393 bp, Homo sapiens; identical to SEQ ID NO: 14048
  SIMILAR (264)..(392): 881254mologous to Homo sapiens Human membrane channel protein -5 (MECHP-5),accession number Y70455,Smith-Waterman Score=186.

SEQ ID NO: 27130 - DNA, 896 bp, Homo sapiens
  SIMILAR (1)..(612): 881254mologous to Homo sapiens 28-MAR-1997 Nucleic acid encoding a protein with water channel activity,accession number V83992_cd1,Smith-Waterman Score=936.
  misc_feature (1)...(896): n = a,t,c or g
gtattcggccttggttccgtggcccatatgcttctaaataaaacatttgggagctaccttggtgtcaacttgggttttggcttcggagtcaccatgggagtgcacatggcaggccgcacctctggagcccacatgaacgcagctgtgagcctcactaactgtgcactgggccgtgtgccctggaggaagtttccagtctatgtgctggggcagttcctgggctccttcctggcagctgccaccatctacagtctcttctacacggccattctccacttttcgggtggacagctgatggtgaccggtcccgtcgctacagctggcatttttgccacctaccttcctgatcacatgacattgtggcggggcttcctgaatgaggcgtggctgaccgggatgctccagctgtgtctcttcgccatcacggaccaggagaacaacccagcactgccaggaacagaggcgctggtgataggcatcctcgtggtcatcatcggggtgtcccttggcatgaacacaggatatgccatcaacccgtcccgggacctgccccccccgnatcttcaccttcattgctggttggggcaaacaggtcttcaggtggcatcatctacctggtcttcattggctccaccatcccacgggagcccctgaaattggaggattctgtggcgtatgaagaccacgggataaccgtattgcccaagatgggatctcatgaacccacgatctctcccctcacccccgtctctgtgagccctgccaacagatcttcagtccaccctgccccacccttacatgaatccatggccctagagcacttctaagcagagattatttgtgatcccatccattccccaataaagcaaggcttgtccgacaaaaaaaaaaaaaaa

SEQ ID NO: 27131 - DNA, 1696 bp, Homo sapiens
  SIMILAR (500)..(841): 671254mologous to Rattus norvegicus aquaporin 7,accession number AB000507,Smith-Waterman Score=411.
gatcaatgggaggatggaaggtatgggggagacggaggcctctgcagagggagaggatagcacaggagccagggctgaagggaacagtggctctagactgagggtaatgggcctgaaggtattcggccttggttctgtggcccatatggttctaaataaaacatatgggagctaccttggtgtcaacttgggttttggcttcggggtcaccatgggagtccacgtggcaggccgcatctctggagcccacatgaatgcagctgtgaccttcactaactgtgcgctgggccgcgtgccctggaggaagtttccagtccatgtgctggggcagttcctgggctccttcctggcagctgccaccatctacagtctcttctacagcaactgggagaaaaaagccttggagctcccccaccctctaacctataacctcatttctgggaccccagtggggcttagttgggggcaggttcgcatgatagtctgtgtctccgcagcggccattctccacttttcgggtggagagctgatggtgaccggtccctttgctacagctggcatttttgccacctaccttcctgatcacatgacattgtggcggggcttcctgaatgaggagtggctgaccaggatgctccagctgtgtctcttcaccatcacggaccaggagaacaacccagcactgccaggaacacacgcgctggtgataagcatcctcgtggtcatcatcagggtgtcccatggcataaacacaggatatgccatcaatccatcccgggacccgccccccagcatcttcaccttcattgctggctggggcaaacaggtcttcagcctggggatgactcctctgctcaaccagtcttcgcccaaggtggatgagggtgctgtcctgggcatcagccccctcagcaggcctctgcctcttgcctgcagcgatggggagaactggtggtgggtgccagtggtggcaccacttctgggtgcctctctaggtggcatcatctacctggtcttcattggctccaccatcccacgggagcccctgaaattggaggactctgtggcgtatgaagaccacgggataaccgtattgcccaagatgggatctcatgaacccatgatctctcccctcaccctcatctcctcagacccctcttccttagggctgccgcagtttgctgggggtccactccagaccctattcacttggtccctcccctacctggaggtgtcaccagtggaggctgcagaacagcaaggatggctgcctgctccttcctctagagagtgcactgcggtggagggaatctcccttgtccagaatgtccagacccttcagagccagcaggcaagaaagactaagtctgctgaaccacagagactgtggctgcccctccccacaggagttctgcccaggaagatcacagttctgtccataaacctctggctggagttggcgaaattcccacaagggggccccacccacaccaccagggtaaaacagccaactgaagccacagtgatagcaaccaccccttcccctgggaactcagtcatcttagacagtctccagtctgctgtcactggccacagcctgagcggtgatgagagtctgcacaattctgtgcttggcacccaaggccctggtggtgtgggctcacaaggggatctcttgatctgggataaaggatga

SEQ ID NO: 27132 - DNA, 1201 bp, Homo sapiens
  SIMILAR (1)..(234): 981254mologous to Homo sapiens 28-MAR-1997 Nucleic acid encoding a protein with water channel activity,accession number V83992_cd1,Smith-Waterman Score=409.
ggcatttttgtcacctaccttcctgatcacatgacattgtggcggggcttcctgaatgaggcgtggctgaccgggatgctccagctgtgtctcttcgccatcacggaccaggagaacaacccagcactgccaggaacagaggcgctggtgataggcatcctcgtggtcatcatcggggtgtcccttggcatgaacacaggatatgccatcaacccgtcccgggacctgccccccccgcatcttcaccttcattgctggttggggcaaacaggtcttcaggtacttcccctgcccagggcccattcctttgagtttttctgtgggtcccctgtgtgttgaggggtggggggtgatgtgaggggcagttacagggagggtcctgctgaagcccccaggtaagcttggggaagcaggagtgagtcccaacattttccccagggcagtacagatacagatcctgcacctgcactgagtgtcaacgctgtccctgaatcgggctgaggctgaccagggccctgggttgggggtgtttcctggggtagcctggggatgactcctctgctcaacctgtcttggcccgaggtggatgagggtgctgtcctgggcatcagccccctcagcaggcctctgcctcttgcctgcagcaatggggagaactggtggtgggtgccagtggtggcacccacttctgggtgcctatctaggtggcatcatctacctggtcttcattggctccaccatcccacgggagcccctgaaattggaggattctgtggcgtatgaagaccacgggataaccgtattgcccaagatgggatctcatgaacccacgatctctcccctcacccccgtctctgtgagccctgccaacagatcttcagtccaccctgccccacccttacatgaatccatggccctagagcacttctaagcagagattatttgtgatcccatccatttccccataaaggtaggctttgtccgacagcagtacccccacttcctgggggcctcctgtggttgggcttccctcctgggttcttacaggagctccagggctatgtcttagcccaaggtgtagaggtgaggcacctcaagtctttcatgccctgggaactggggtgccccagggggagaatggggaagagatgacctgcgccctcagtaggaacaggggtgagatgaaagaacgactgaatgg

SEQ ID NO: 27133 - DNA, 601 bp, Homo sapiens
  SIMILAR (173)..(205): 811254mologous to Homo sapiens ribosomal protein L31 (AA 1- 125),accession number X15940,Smith-Waterman Score=50.
atgagtaaagctgtaagaaaaacagtggagccgaaacgactccccaacttaactccccataagctcattgaggacacagactttgttctcttcaccactgtttccccagcacttcgaacactacctggcacttgtatcagttctccctttccaacttggacgcggcagaacggctcctgcaaagaagggtggcgagaagcaaagggtcattctgccatcaatgaggtggtgatccaagaatacaccatcaacattcacaagcgcatccatggagtgcgcttcaagaagcgtgcccctcgggcactcagagagattccgaaatttgccatcaaagaggtggaaactctaagtgtgcgcattgatagcaggttcaacaaagctctctgcgccaaaggaataaggaatgtcccgtaccgaatccgtgtgcagttgtccagaaaacgtaatgaggatgaagattcaccaaataagcgctatactttggttacctatgtacctgttagcactttcaaaaatgtgcagacagtccatgtgcatgagaactaattgctgatcctcaaatacatcaaataaaggtataaaactgcaaaaaaaaaagtct

SEQ ID NO: 27134 - DNA, 743 bp, Homo sapiens
  SIMILAR (260)..(532): 751254mologous to Homo sapiens Human secreted protein, SEQ ID NO: 7914,accession number G03833,Smith-Waterman Score=314.
  misc_feature (1)...(743): n = a,t,c or g
tgtggcttcccagtggaggatgatcagaatggtccccgggggtaatgctggntcgcagttttctcacgtgctgactgaagggttttttgccgtggctcaacagctttcgaggcacatcttcagtaggataatatctaggcattttgcgaagtttaaccacccgggtaccgccgttcttgtcaccaccaactggttttgtaacagttgcgagaaccttctccttctttttctttccaacttggacgctgcagaatggctcccgcaaagaatgtgtggcgagaagaaaaaggggccgttctgctcatcaacgaaggggtaactccgagaatacaccatcaacattcacacagcgcatcccatggagtgggcttccaagaagcgtgcacctcgggcactcaaagagattcggaaatttgccatgaaggagatgggaactccagatgtgcgcattgacaccaggctcaacaaagctgtctgggccaaaggaataaggaatgtgccataccgaatccgtgtgcggctgtccagaaaaccgtaatgaggatgaagattcaccaaataagctatatactttggttacctatgtacctgtttaccactttcaaaagtaagttctccatcccataaagccatttaaattcattagaaaaatgtccttacctcttagaatgtgaattcatctgttaagctaggggtgacacacgtcattgtaccctttttaaattggtggtgtgggaagatgg

SEQ ID NO: 27135 - DNA, 429 bp, Homo sapiens
  SIMILAR (261)..(169): 381254mologous to Human immunodeficiency virus type 1 Tat,accession number U88824,Smith-Waterman Score=66.
ttatcggatatttcgggaatgtgtgttctttttctcgcagctgatagaggccttttccctggacacatcccaaatggatataaccggcagaaaacccttggagcagccagtgtcccaggtcccccacggccgccacacagccctgagctccatacccgacaaggagacattgccctgtgtatgtgttgggggctgggggggagttgggctgtcagcggagatgcccttgggtggcacccgtccatatgggcttttcttttcagaagtctgcagagctgggtcagagaccatgtcagctctgggtgaaagtagtgcagaagaagcattgctgaacttcctggaacttgtggacagaacatctgccagggcagctgggagctgaaggaccaagaaaattaaaacccagtgacaagatgaatgaggatccct

SEQ ID NO: 27136 - DNA, 1314 bp, Homo sapiens
  SIMILAR (610)..(837): 901254mologous to Canis familiaris cyclophilin A,accession number AF243140,Smith-Waterman Score=379.
atgacccacctccgggctgggaagggaccccccaaggcccaggctaggtccaatcacggcaatcacctgaagccggacaggggcgccctgccttcccggggtatgcggaaggaaaaccccagtgacggggacccggcgacgcctaaggtgacccagaagggacaatatggcggcgcggccgcatggagggcctctcatcccgccccaagcaggttgacgccacggtacctgcaagccctgccatggcgccgccgccactgtcgccgtctgccgcagcctgcctccacctcagctcgccaccgacgccgcaggaagccggggagacgcccccttagtcttctagtcgagccggccgaggacccatcctgggatcgggctgtctaccgcaaacgcctgatcacaaggtccgaagtgggggctcatcctcgccccatttcccgtaaatatcagccacagaccacctttgaggactttgtatgcacttttacaaaactctgggagccccgagatcttcaagcccgaataatttttatcaggcgcagtgtggacagccccgaagcgcggccgggtcccctcatgcatatgcagcagattgtgatccttactccaattattccaggatttatatgtcagggtggtgacttcacatgccataatggcactggtggcaagtccatctgtggggagaaatctgatgatgagaacttcatcctaaagcatacaggtcctggcatcttgtccgtggtaaatgctggacccaacacaaacggttcccagtttgtcatctgcactgccaagactgagtggttggatggcaagcatgtagtctttggcaagcaggtcctgtctcttcctcaaggagattattactctttagaactcaattcatttggtcaccttgttgtcatagtaaagcctgagggtgagaccctcatgttttgtgcccttgtacctccctgctacaccctagtcctggacctggtggaagatgcagctaccaaggaagatattaatttgcctcctgggaagtggctgggggaagcaccaagagaaactggcaagcaaaacaggacccagaggctgaagtccttgcaccgagcacttgccaaggtggaggtgaaggcgctaaggttcagagagtttaagcagtttgcccaaggtcacacagcttgcacatggcctggaacttctgtggctgccacagatacagaaaacattgcccccaagtcctttgttataactgaacaccacttaacaacagaaaactatggctacccaaaaggatcagacgaaacctctcaaaggaccaaataa

SEQ ID NO: 27137 - DNA, 3129 bp, Homo sapiens
  SIMILAR (1492)..(2790): 941254mologous to Homo sapiens putative p150,accession number U93563,Smith-Waterman Score=2130.
tcacccatgatcaaccccaccatgttcttcgacatcgccgtcgatggtgagcccttgaggtgtgtctcctttgagccttttgcagacaagtttccaaagacagcagaaaactttcatgctctgagcattggagagaaaggatttggttataagggttcctgctttcagataattattccagggtttatgtgtcagggtggtgacttcacacgccataatggcactggtagcaagtccatctacagggagaaatttgatgatgagaacttcatcctaatgcatacaggtcctggcatcttgtccatggcaaaggctggatccaacacaaacagttcccagtttttcatctgcactgccaagactgagtggttggatggcaagcatatggtctttggcaaggtgaaagaaggcattaatggccaggcgtggtggcttacacctgtaatcccagcactttgggaggataaggtgggtggatcacaagacaacaagatgtgcgaactcgatattttacacgactctctttaccaattctgccccgaattacacttaaaacgactcaacagcttaacgttggcttgccacgcattacttgactgtaaaactctcactcttaccgaacttggccgtaacctgccaaccaaagcgagaacaaaacataacatcaaacgaatcgaccgattgttaggtaatcgtcacctccacaaagagcgactcgctgtataccgttggcatgctagctttatctgttcgggcaatacgatgcccattgtacttgttgactggtctgatattcgtgagcaaaaacgacttatggtattgcgagcttcagtcgcactacacggtcgttctgttactctttatgagaaagcgttcccgctttcagagcaatgttcaaagaaagctcatgaccaatttctagccgaccttgcgagcattctaccgagtaacaccacaccgctcattgtcagtgatgctggctttaaagtgccatggtataaatccgttgagaagctggcgtcggcaaaggagccatgggttctagcaactaacttacctgttgaaattcgaacacccaaacaacttgttaatatctattcgaagcgaatgcagattgaagaaaccttccgagacttgaaaagtcctgcctacggactaggcctacgccatagccgaacgagcagctcagagcgttttgatatcatgctgctaatcgccctgatgcttcaactaacatgttggcttgcgggcgttcatgaacagaaacaagggcttaatgagtgtttgagcctccttttttatgggcctggttggccacattggatgttgccttatggctgtttagcaacaggagatcgctctggcctcattgaagttgtgagcacctctgaaacaattgctgacattcagctgaacagtagcaatgtggctgctgcagcagccttcaacaaagatgcccttctgaactggcttaaagaatacaactctggagacacacataggctcaaaataaaaggatggaggaagatctaccaagcaaatggaaaacacaaaaaggcaggggttgcaatcctagtctctgataaaacagactttaaaccaacaaagatcaaaagagacaaagaaggctatttcataatggtaaaaggatcaattcaacaagaagaactaactatcctaaatatatatgcacccaatacaggagcacccagattcataaagcaagtcctgagtgacctacaaagagacttagactcccacacattaataatgggagactttaacaccccactgtcaacattagacagatcaacgagacagaaagtcaacaaggatacccaggaattaaaatcagctctgcaccaagcagacctaatagacatctacagaactctccaccccaaatcaacagaatatacatttttttcagcaccacaccacacctattccaaaattgaccacatacttggaagtaaagctctcctcagcaaatgtaaaagaacagaaattataacaaactatctctcagaccacagggcaatcaaactagaactcagggttaagaaactcactcaaaaccgctcaactacatggaaactgaacaacctgctcctgaatgactactgggtacataacgaaatgaaggcagaaataaagatgttctttgaaaccaacgagaacaaagacacaacataccagaatctctgggatgcattcaaagcagtgtgtagagggaaatttatagcactaaatgcccacaagagaaagcaggaaagatccaaaattgacaccctaacatcacagttaaaagaactagaaaagcaagagcaaacacattcaaaagctagcagaaggcaagaaataactaaaatcagagcagaaatggaggaaatagagacacaaaaaaaccttcaaaaaattaatgaatccaggagctggttttttgaaaggatcaagaaaattgataaaccgctagcaagactaataaagaaaaaaagagagaagaatctaatagacgtaataaaaaattataaaggggatatcaccaccgatcccacagaaatacaaactaccatcagagaatactacaaacaccactacacaaataaactagaaaatctagaagaaatggataaattcctcgacacatacaccctcccaagactaaaccaggaagaagttgaatctctgaatagaccaataacaggatctgaaattgtggcaataatcaatagcttaccaaccaaaaagagtccaggaccagatggatttacagccgaattctaccagagtcaggcaccgtgtatgaaatctaacaatgcgctcatcgtcatcctcggcaccgtcaccctggatgctgtaggcataggcttggttatgccggtactgccgggcctcttgcgggatatcgtccattccgacagcatcgccagtcactatggcgtgctgctagcgctatatgcgttgatgcaatttctatgcgcacccgttctcggagcactgtccgaccgctttggccgccgcccagtcctgctcgcttcgctacttggagccactatcgactacgcgatcatggcgaccacacccgtcctgtggatctacccactagtcaattcaccatcttgttga

SEQ ID NO: 27138 - DNA, 856 bp, Homo sapiens
  SIMILAR (272)..(607): 521254mologous to Homo sapiens peptidylprolyl isomerase,accession number X52851,Smith-Waterman Score=225.
aaaccgtgtactattagccatggtcaaccccaccgtgttcttcgacattgccgtcgacggcgagcccttgggccgcgtctcctttgaggtaaggggcctggataccaagaagtgactgctcatctaatccataaagctatgttaacagattggagctgtttgcagacaagggtccgagaggcacagcatagttttcgttgctctgagccactggagagaaaggatttgggttataaggggttccctgctttcacagaattattccagggtttatgctgtcaggggtggtgacttcacacgccataaatggcacctggtggcaagtcccatctatggggaagaaatttgaaggatgagaacttcatccctaaagcatacgggtcctggcatcttgtcccatggcaaaatgctggaccccaacacaaatggttcccagtttttcatctgcactgcccaagactgcagtggttggatggcaaagcatgtggtgtttggcaaagtgaaagaaaggcatgaaatattgtgggaggccatgggagcgcttttgggtcccaggaatggcaagacccagcaagaagaatcaccaattgtgcctggtggacaactccgaataaagtttgaccttgtgttttattctttaaccaccaagatcattcccttctgtagcttcaaggagagcacccctccaccccatttgctcgcaagtatcctagaatctttgtgctctcgcttgcagttcccttttgggttccatgttttccttgttccctgccatgcctaggtggattaaaaagttcccctttatgattattgaaataaaaactaaataacaattgtcaaaaaaaaaaaaaaaaaa

SEQ ID NO: 27139 - DNA, 390 bp, Homo sapiens
  SIMILAR (243)..(389): 971254mologous to Mus musculus Bc10,accession number AB037891,Smith-Waterman Score=265.
agctgaggtggaggcaggctgcggtttacggcgactgtggcggcggcgccatggcagggcttgcaggatccctgctgccttggggatcccgggctgacagccagagagcacagcggctcacctcctggagagtgagggatgaagaaagcggagggcagccgactgcgcccgctggttcccattaggtcggctcctgcagcggagcccggcagccttggtgaaggccctgcccggcagagatcatgtattgcctccagtggctgctgcccgtcctcctcatccccaagcccctcaaccccgccctgtggatcagccactccatgttcatgggcttctacctgctcagcttcctcctggaacggaagccttgcacaatttgtgccttggttt

SEQ ID NO: 27140 - DNA, 1517 bp, Homo sapiens
  SIMILAR (813)..(1040): 901254mologous to Canis familiaris cyclophilin A,accession number AF243140,Smith-Waterman Score=379.
cccaaaaaagcaactaaagcaacgcaactaaactgatggggacagaatgacaggcctctcacaaagctgggcaccctgccgtggaacccggggctgcagagatggtggtcgcgctcccagccccgtgcccccggctctgcctgtctcatcctgcaagggcgctgtccttggacaaggccagagccagcacccaggagtactatgacccacctccgggctgggaagggaccccccaaggcccaggctaggtccaatcacggcaatcacctgaagccggacaggggcgccctgccttcccggggtatgcggaaggattacaaacagtaacaagggacccggcgacgcctaaggtgacccagaagggacaatatggcggcgcggccgcatggagggcctctcatcccgccccaagcaggttgacgccacggtacctgcaagccctgccatggcgccgccgccactgtcgccgtctgccgcagcctgcctccacctcagctcgccaccgacgccgcaggaagccggggagacgcccccttagtcttctagtcgagccggccgaggacccatcctgggatcgggctgtctaccgcaaacgcctgatcacaaggtccgaagtgggggctcatcctcgccccatttcccgtaaatatcagccacagaccacctttgaggactttgtatgcacttttacaaaactctgggagccccgagatcttcaagcccgaataatttttatcaggcgcagtgtggacagccccgaagcgcggccgggtcccctcatgcatatgcagcagattgtgatccttactccaattattccaggatttatatgtcagggtggtgacttcacatgccataatggcactggtggcaagtccatctgtggggagaaatctgatgatgagaacttcatcctaaagcatacaggtcctggcatcttgtccgtggtaaatgctggacccaacacaaacggttcccagtttgtcatctgcactgccaagactgagtggttggatggcaagcatgtagtctttggcaagcaggtcctgtctcttcctcaaggagattattactctttagaactcaattcatttggtcaccttgttgtcatagtaaagcctgagggtgagaccctcatgttttgtgcccttgtacctccctgctacaccctagtcctggacctggtggaagatgcagctaccaaggaagatattaatttgcctcctgggaagtggctgggggaagcaccaagagaaactggcaagcaaaacaggacccagaggctgaagtccttgcaccgagcacttgccaaggtggaggtgaaggcgctaaggttcagagagtttaagcagtttgcccaaggtcacacagcttgcacatggcctggaacttctgtggctgccacagatacagaaaacattgcccccaagtcctttgttataactgaacaccacttaacaacagaaaactatggctacccaaaaggatcagacgaaacctctcaaaggaccaaataa

SEQ ID NO: 27141 - DNA, 875 bp, Homo sapiens
  SIMILAR (272)..(616): 461254mologous to Homo sapiens Human secreted protein, SEQ ID NO: 7912,accession number G03831,Smith-Waterman Score=168.
aaaccgtgtactattagccatggtcaaccccaccgtgttcttcgacattgccgtcgacggcgagcccttgggccgcgtctcctttgaggtaaggggcctggataccaagaagtgactgctcatctaatccataaagctatgttaacagattggagctgtttgcagacaagggtccgagaggcacagcatagttttcgtgcctctgaagcattgaagagaaaggatttgggttataaggggttccctgctttcacagaattattccagggtttatgctgtcaggggtggtgacttcacacgccataaatggcacctggtggcaagtcccatccaatggggaagaaatttgaaggatgagaacttcatccctaaagcataccgggtcctggcgatcttgtcccatggcaaatgcctggacccaaacacaaatggttcccagtttttcatctgcactgcccaagactgaagtggttggaatggcaaagcatgtggtgttttggcaaaagtgaaagaaaggcatgaaatattgtgggaggccatgggagcgctttggggtccagggaatggcaagacccagcaaagaaagatcaccatttgctgacttgttggacaacttcggaataaagttttgacttggtggttttaatctttaaccaaccaggattcattccttcctggaagccccagggagagcaccccctccaccccatttggctcggagtaatcctagaatctatgtggctctgcgctgcaagttcccttttgggttccatgttttccttgttccctcccatgcctaggtggattaaaaagttcccctttatgattattgaaataaaaactaaataacaattgtcaaaaaaaaaaaaaaaaaa

SEQ ID NO: 27142 - DNA, 387 bp, Homo sapiens
  SIMILAR (132)..(233): 941254mologous to Homo sapiens immunoglobulin-like transcript 2b,accession number AF009006,Smith-Waterman Score=169.
ctgtgcgtactgccacacgcagctcagcttgagcttacagccagaagcgagatgcttctctgctgagctgagtctgcctgcagcatggaccttggtcttccctgaagcatgtccagggctggagggacgactgccatgggctgagtctgggcccccggacccacgtgcaggcagggaccctccccaagcccacactctgggctgagccaggctctgtgatcacccaggggagtgcacgtgaccctctggtgtcaggggatcctgcagacccaggagtaccgtctgtatagagaaaagaaaacagcaccctggattacacggatcccacaggagattgtgaagaagggccatgatcccatcccatccatcacctgggaacacacaggg

SEQ ID NO: 27143 - DNA, 322 bp, Homo sapiens
  SIMILAR (1)..(321): 891254mologous to Homo sapiens MIR-7,accession number AF004230,Smith-Waterman Score=545.
atgacccccatcctcacggtcctgatctgtctcgggcacctccccaagcccaccctctgggctgaaccaggctctgtgatcacccaggggagtcctgtgaccctcaggtgtcaggggggccaggagacccaggagtaccgtctatatagagaaaagaaaacagcactctggattacacggatcccacaggagcttgtgaagaagggccagttccccatcccatccatcacctgggaacatgcagggcggtatcgctgttactatggtagcgacactgcaggccgctcagagagcagtgaccccctggagctggtggtgacag

SEQ ID NO: 27144 - DNA, 1317 bp, Homo sapiens
  SIMILAR (1)..(1125): 1001254mologous to Homo sapiens immunoglobulin-like transcript 6a,accession number AF014924,Smith-Waterman Score=1982.
atgacccccatcctcacggtcctgatctgtctcgggctgagcctggaccccaggacccacgtgcaggcagggcccctccccaagcccaccctctgggctgagccaggctctgtgatcacccaagggagtcctgtgaccctcaggtgtcaggggagcctggagacgcaggagtaccatctatatagagaaaagaaaacagcactctggattacacggatcccacaggagcttgtgaagaagggccagttccccatcctatccatcacctgggaacatgcagggcggtattgctgtatctatggcagccacactgcaggcctctcagagagcagtgaccccctggagctggtggtgacaggagcctacagcaaacccaccctctcagctctgcccagccctgtggtgacctcaggagggaatgtgaccatccagtgtgactcacaggtggcatttgatggcttcattctgtgtgtttctaagaagccatcactctcagtgcagccgggtcctgtcgtggcccctggggagaagctgaccttccagtgtggctctgatgccggctacgacagatttgttctgtacaaggagtggggacgtgacttcctccagcgccctggccggcagccccaggctgggctctcccaggccaacttcaccctgggccctgtgagccgctcctacgggggccagtacacatgctccggtgcatacaacctctcctccgagtggtcggcccccagcgaccccctggacatcctgatcacaggacagatccgtgccagacccttcctctccgtgcggccgggccccacagtggcctcaggagagaacgtgaccctgctgtgtcagtcacagggagggatgcacactttccttttgaccaaggagggggcagctgattccccgctgcgtctaaaatcaaagcgccaatctcataagtaccaggctgaattccccatgagtcctgtgacctcggcccacgcggggacctacaggtgctacggctcactcagctccaacccctacctgctgactcaccccagtgaccccctggagctcgtggtctcaggagcagctgagaccctcagcccaccacaaaacaagtccgactccaaggctggtgagtgaggagatgcttgccgtgatgacgctgggcacagagggtcaggtcctgtcaagaggagctgggtgtcctgggtggacatttgaagaattatattcattccaacttgaagaattattcaacacctttaacaatgtatatgtgaagtactttattctttcatattttaaaaataaaagataattatccatgag

SEQ ID NO: 27145 - DNA, 1422 bp, Homo sapiens
  SIMILAR (1)..(1266): 941254mologous to Homo sapiens immunoglobulin-like transcript 6,accession number AF014923,Smith-Waterman Score=2137.
atgacccccatcctcacggtcctgatctgtctcgggctgagcctggaccccaggacccacgtgcaggcagggcccctccccaagcccaccctctgggctgagccaggctctgtgatcacccaagggagtcctgtgaccctcaggtgtcaggggagcctggagacgcaggagtaccatctatatagagaaaagaaaacagcactctggattacacggatcccacaggagcttgtgaagaagggccagttccccatcctatccatcacctgggaacatgcagggcggtattgctgtatctatggcagccacactgcaggcctctcagagagcagtgaccccctggagctggtggtgacaggagcctacagcaaacccaccctctcagctctgcccagccctgtggtgacctcaggagggaatgtgaccatccagtgtgactcacaggtggcatttgatggcttcattctgtgtaaggaaggagaagatgaacacccacaatgcctgaactcccattcccatgcccgtgggtcatcccgggccatcttctccgtgggccccgtgagcccaagtcgcaggtggtcgtacaggtgctatggttatgactcgcgcgctccctatgtgtggtctctacccagtgatctcctggggctcctggtcccagccgggtcctgtcgtggccctggggagaagctgaccttccagtgtggctctgatgccggctacgacagatttgttctgtacaaggagtggggacgtgacttcctccagcgccctggccggcagccccaggctgggctctcccaggccaacttcaccctgggccctgtgagccgctcctacgggggccagtacacatgctccggtgcatacaacctctcctccgagtggtcggcccccagcgaccccctggacatcctgatcacaggacagatccgtgccagacccttcctctccgtgcggccgggccccacagtggcctcaggagagaacgtgaccctgctgtgtcagtcacagggagggatgcacactttccttttgaccaaggagggggcagctgattccccgctgcgtctaaaatcaaagcgccaatctcataagtaccaggctgaattccccatgagtcctgtgacctcggcccacgcggggacctacaggtgctacggctcactcagctccaacccctacctgctgactcaccccagtgaccccctggagctcgtggtctcagacgcagtagcgaacagcagctgggtgtcctctaagtcagctctggtgctgtctacccagagacagtcccggatcccacagattgaaggcccattccccaaaactgcccccaacaccattcccaagtccagacctccagaacttctgactgactggcttcaagttggggatcccatgccccactcttcggtttga

SEQ ID NO: 27146 - DNA, 1830 bp, Homo sapiens
  SIMILAR (315)..(1631): 981254mologous to Homo sapiens immunoglobulin-like transcript 6,accession number AF014923,Smith-Waterman Score=2303.
cactgccacacacagctcagcctgggctgcacagccaggtgtcaggtgcgtctctgctgatctgagtccaccctgcagcatggacctgcatcttccctgaaggatctccagggctggagggacgactgccatgccctacaggaaagacagccaggctcctgggagggcagttccacttcctgtgtggctgcagatgacaaaaccccatgagaagaaggaccgagcctccaagtgtccacaccctgtgtgtcctctgtcctgccagcaccgagggctcatccatccacaaagaactgtgcaggagccgctacgacatgacaccgagagtcataggactgatctgtctcgggctgagcctggaccccaggacccacgtgcaggcagggcccctccccaagcccaccctctgggctgagccaggctctgtgatcacccaagggagtcctgtgaccctcaggtgtcaggggagcctggagacgcaggagtaccatctatatagagaaaagaaaacagcactctggattacacggatcccacaggagcttgtgaagaagggccagttccccatcctatccatcacctgggaacatgcagggcggtattgctgtatctatggcagccacactgcaggcctctcagagagcagtgaccccctggagctggtggtgacaggagcctacagcaaacccaccctctcagctctgcccagccctgtggtgacctcaggagggaatgtgaccatccagtgtgactcacaggtggcatttgatggcttcattctgtgtaaggaaggagaagatgaacacccacaatgcctgaactcccattcccatgcccgtgggtcatcccgggccatcttctccgtgggccccgtgagcccaagtcgcaggtggtcgtacaggtgctatggttatgactcgcgcgctccctatgtgtggtctctacccagtgatctcctggggctcctggtcccaggtgttcctaagaagccatcactctcagtgcagccgggtcctgtcgtggcccctggggagaagctgaccttccagtgtggctctgatgccggctacgacagatttgttctgtacaaggagtggggacgtgacttcctccagcgccctggccggcagccccaggctgggctctcccaggccaacttcaccctgggccctgtgagccgctcctacgggggccagtacacatgctccggtgcatacaacctctcctccgagtggtcggcccccagcgaccccctggacatcctgatcacaggacagatccgtgccagacccttcctctccgtgcggccgggccccacagtggcctcaggagagaacgtgaccctgctgtgtcagtcacagggagggatgcacactttccttttgaccaaggagggggcagctgattccccgctgcgtctaaaattaaagcgccaatctcataagtaccaggctgaattccccatgagtcctgtgacctcggcccacgcggggacctacaggtgctacggctcactcagctccaacccctacctgctgactcaccccagtgaccccctggagctcgtggtctcaggagcagctgagaccctcagcccaccacaaaacaagtccgactccaaggctggtgagtgaggagatgcttgccgtgatgacgctgggcacagagggtcaggtcctgtcaagaggagctgggtgtcctgggtggacatttgaagaattatattcattccaacttgaagaattattcaacacctttaacaatgtatatgtgaagtactttattctttcatattttaaaaataaaagataattatccatgagaaagcta

SEQ ID NO: 27147 - DNA, 216 bp, Homo sapiens
  SIMILAR (100)..(20): 251254mologous to Human immunodeficiency virus type 2 gag protein,accession number AJ011220,Smith-Waterman Score=36.
atcttgatccttctcatgcagctgcctctctggcgctgtctcctctgcctctttgccacttacaaggatgcttgtgattacactgggtctacctggaaatggctggtgacagaaaagtcctcagggccacagcactctctgcggtgggaattcaggtgccttgcctgatggtgacaaggctggttttgcataaacagctctctgcggacgcgtggg

SEQ ID NO: 27148 - DNA, 492 bp, Homo sapiens
  SIMILAR (7)..(228): 871254mologous to Homo sapiens signal recognition particle subunit 14,accession number X73459,Smith-Waterman Score=341.
atgtcgttggagagcaagcaattcctgacggagctgaccagactctaccagaagtgccggacgttgggcagcgtctatatcaccttgaagaagtatgatggtcgaaccaaacccattccaaagaaaggttctgtggagggctttgagccctcagacaacaagtgtctgttaagagctatcgatgggaaaaagaagatgagcactgtggtgaactccaaggaagtgagtggcctctcaaagccttgctgggaaggaggctttaaggtggtgggggcagcagtgctggtggtggtcatcgaagaaagtgggagtcggggaggaagcaatggggagcaggggacaaagagggccagacaaactcagagcttcagtgaacacatttaccacaacctggaaatggctggtgacagaaaagtcctcaggggccacaacactctctgcggtgggaattcaggtgccttgcctgatggtgacaaagctggttttgcataa

SEQ ID NO: 27149 - DNA, 544 bp, Homo sapiens
  SIMILAR (163)..(462): 801254mologous to Homo sapiens signal recognition particle subunit 14,accession number X73459,Smith-Waterman Score=356.
cactgctaggggcttaagcggagggagtcgagccagggtcgccgcgagtggtgttgttggagagcgagcagttcctgacggagctgaccagacttttccagaagtgccggacgtcgggcagcgtctatatcaccttgaagaagtatgacggtcgaaccaaacccattccaaagaaaggtactgtggagggctttgagcccgcaagacaacaagtgtctgttaagagctaccgatgggaagaagaagatcagcactgtggtgagctccaaggaagtgaattaagttttcagatggcttatttcaaaccttcctttaggagctaacatggatgggttgaagaagagagacaaaaagaacaaaactaagaagaccaaagcagcagcagcagcagcagcagctggtcctgccgcagcagcaacagcagcaacaacagcagcaacaacagcagcaacagcagcacagtaaagggcatacatttcctgctttcaccaattaaccactgaattgctattttttcttttgccagataactaagtttgttccc

SEQ ID NO: 27150 - DNA, 1245 bp, Homo sapiens
  SIMILAR (646)..(1242): 781254mologous to Homo sapiens RNCC protein,accession number AJ012008,Smith-Waterman Score=814.
atgcgatatgcccagattatagaaatacttccattaacttacggaagtaatgatctgaaggacacagtgtatagaaagaaggctagagaggttttacaagatgaattagaaaaccgttctaatcaggtgcgatgtgcagagaaaaaattacaacacaaagaattggagtcacaggaacaggtcaagaagtgtgtgcagccagaaccaacttcaagatggctgcagcagtgccaggcattctgcccagatctgcactattcggaggcagaaaagggctgccagtttctagggcctaatgaaggagcaaatgccattgactttccatgggcagagaaaagcaacgagcaaaggaaacacaagcacagcacacttgcccatcgtgtgccaagtcaaagagatgaaaatgcctcctcggatgggagcatggatttgttcatgtcaaatcagcagatctgcaccctccctgacatcaccacagagcaggggcccccaacatccagatgtccagatggacacagtggcaaaaccccacacaacaagaaagaagaattagagaaaaaacaagaaccatcctgttgtgagaaaaagcacagggcattggtgaatgaattggaagaaagcaaacatgtctggtattccagaggccagagactgttcatggtgctgtggctcaagggagtcaccttcaatgtcaccatcattgacaccaagaggcagaccaagatagtgcaaaagctgtgcccaggagggcagctcccattcctgctgtatggcatggaagaacacaaggacaccaacaagattgaggaatttctgtaccccaagctggcagctctgaaccctgaatccaacacagctgagcaggacatatttgccaaattttctgcttacatcaagaattcaaacccagtagtcaatgacaatctggagaagggactcctgaaagccctgaaggttttagacaatcacttgatatcctgccactcagaagaagtggatgaaaccagtgctgaagatgaaggcatctctcagaggaagtttctggatggcaatgagctcaccctggctgactgcaacctgttgctaacgctccacatagtacaagtgggattcaccatccctgaggccttccagggcgtgcagcagtacttgagcaatgcctatgctcaggaagaatctgcctccacctgtccagatgatgagatcaagctcacctatgagcaaggatccaaggccctccaataa

SEQ ID NO: 27151 - DNA, 1221 bp, Homo sapiens
  SIMILAR (219)..(962): 731254mologous to Homo sapiens nuclear chloride ion channel protein,accession number U93205,Smith-Waterman Score=826.
  misc_feature (1)...(1221): n = a,t,c or g
ccgggagaggaccgagctggaggagctgggtgtggggtgcgttgggctggtggggaggcctagtttgggtgcaagtaggtctgattgagcttgtgttgtgctgaagggacagccctgggtctaggggagagagtccctgagtgtgagacccgccttccccggtcccagcccctcccagttcccccagggacggccacttcctggtccccgacgcaaccatggctgaagaacaaccgcaggtcgaattgttcgtgaaggctggcagtgatggggccaagattgggaactgcccattctcccagagactgttcatggtactgtggctcaagggagtcaccttcaatgttaccaccgttgacaccaaaaggcggaccgagacagtgcagaagctgtgcccagggggggagctcccattcctgctgtatggcactgaagtgcacacagacaccaacaagattgaggaatttctggaggcagtgctgtgccctcccaggtaccccaagctggcagctctgaaccctgagtccaacacagctgggctggacatatttgccaaattttctgcctacatcaagaattcaaacccaggcactcaattgacaatctggaagaagggactcctggaaagccctgaaggtttttagacaattacttaacatcccccctcccagaagaagtggatgaaaccacgtgctgaagatgaacggtgtctctcagacggaacgtttttggatggcaacgagctcaccctggctgactgcaacctgttgccaaaagttacacatagtacaggtggtgtgtaagaagtaccggggatttcaccatcccccgaggcctttccggggagttgcattcggttacttgaggcaatgccttacgcccgggaagantttcggtttccacctgttccagatgatgaggagatcgagctcgcctatgagcaagtggcaaaggccctcaaataagcccctcctgggactccctcaaccccctccattttctccacaaaggccctggtggtttccacattgctacccaatggacacactccaaaatggccagtgggcagggaatcctggagcacttgttccgggatggtgtggtggaagaggggatgagggaaagaaatggggggcctgggtcagatttttattgtggggtgggatgagtaggacaacatatttcagtaataaaatacagaataaaaatcaagtgttttta

SEQ ID NO: 27152 - DNA, 936 bp, Homo sapiens
  SIMILAR (694)..(933): 871254mologous to Homo sapiens ribosomal protein L21,accession number X89401,Smith-Waterman Score=360.
atggagctgacggtgccgctgaagcaggaggccgagggcctggcgctgggctcctcgtggcaccgcttccgccgcttccacctgggcgaggcgccgggcccgcacgaggcgctggggctgctacgcgccctgtgccgggaccggctgcggcccgaggtgcacaccaaggagcagatgctggagctgctggtgctggagcagtttctgagcgcgctgccagccgacacgcaggcctgggtgtgcagccgtcagccgctaagctgggaggaggcggtggccctgctggaagagttctggggagtgttgccagccagggaccctcctcagatcttggtgtcccgggttcttactggggactcctccccgatctgtgtggctgacctcagcctccagccccggaagctcaaggataccacctggcccaaactccaccccaaatccatcttgctgtcgggctggcctgagggccccaggcagtcagaccctcctcatgcgcgagacaccaagggctcagagatgacttcccgagggcggagggcaaaagccaggcctctctctgggcagcacctctgtgctgactctggcttctctatcctcaccctccttccgggtcagtgttccctaaagtgggttgtaacaaatcaccacaaacccagcagcttacaaataacgcacatctgttatcgttctggagttaagggcaagattcttgccaagagaattaatgtgtgtattgagcacattaagcactctaagagccgagatagcttcctgaaacatgtgaaggaaaatgatcagaaaaagaaagaagccaaagagaaagctacctgggttcaactgaagcagcagcctctacccagagaagcacactttgtgagaaccaatgggaaggagtctgagctgctggaacctcttccctacaaattcatagcataa

SEQ ID NO: 27153 - DNA, 641 bp, Homo sapiens
  SIMILAR (437)..(580): 431254mologous to Homo sapiens ribosomal protein L21,accession number U25789,Smith-Waterman Score=99.
atccttaattaaattaatcccccccccccgccctttcggccggaaccgccatcttccagtaattcgccaaaatgacggaccacaaaggggaaagaggagaggcaacccgatatatgttctctaggccttttaagaaaacaatgggagttgttccttgtggccacaataattagcgattctataagcaaaggtgatattgtagacactcaagggaatggggtactgtgtccaaaacggaatgcccccacaagtgttacccatggccaaaactggaaggagtcttacaattgttaccccagcatgcttgttgccattgttgtaaaccaaccagttttagggcaaagttttttcccaagagaattaatgtgcgtattgagcacattaagcacttctaagagccgagatagcttcctgaaacgtgtgaaggaaaatgatcagaaaaagaaagaagcccaagaagaaggtaccttgggttcaactaaagcgccagcctgctccacccagagaagcacactttgtgaagaaccaatgggaaggagcctgagcttgctggaacctattccctatgaatttcatggcattaataggtgcccaaaaaaaaaaataaaggacctttgggctacaaaaaaaaaaaaaaaaaa

SEQ ID NO: 27154 - DNA, 393 bp, Homo sapiens
  SIMILAR (226)..(390): 901254mologous to Rattus norvegicus cytochrome c,accession number K00750,Smith-Waterman Score=258.
atggcatccagagtgaagaatatagaggaaataggagactatcgacatgaccccaatatgatgaaactgacaccagacaagtgcattgtccaggcagtggaatttctgattccaggaccccccttcagacagctcaacaacccaccttcagacacagggctgcagaccgtcattcctgagcagcaacccttggcattgcacctcaaagggaacagagagggagtggatgccagtaagaacaaaggcatcacgtggggagaggataccctgatggagtatttggagactcccaagaagtacatccctggaacaaaagtgatctttgccggcattaagaagaagacagaaagggcagacttgatagcttatctcaaaaaagctactattgagtaa

SEQ ID NO: 27155 - DNA, 1300 bp, Homo sapiens
  SIMILAR (81)..(110): 901254mologous to Homo sapiens cytochrome c,accession number M22877,Smith-Waterman Score=45.
ggcgggggaattcggcacgagccggcttcggagcggtagtgttcgttgagccagcgacttaaaaagagaattaaatatggggtgatgttgagaaaggcaagaagaatttttataatggagtgttcccagtgccacaccgttgaaaagggaggcaagcacaagactgggccaaatctccatggtctctttgggcggaagacaggtcaggccccctgggatactccttacacagccgccaataagaacaaaggcatcatctggggagaggatacactgatggagtatttggagaatcccaagaaagtacatcccttggaacaaaaatgatctttgtccggcattaagaagaaggaagaaagggcagacttaatagcttatctcaaaaaaagctactaatggagtaataatttggccactggccttattttattacaaaacagaaatgtctccatgactttttttatgtgttaccatccttttaattagatctccatacaccaggatttcaggttcatggaatggactggacaggatattttgttggggcagtcctggattttaaaacttaaggactgggcttggtggggttaaaatggaatatggttccagtttttgaattttaatagtaactccaattcagtaaatggtatcactcgtttaccccttttaaagatatgattagacttcgttagtaatgttcaacttttcacaaagatgggtgagtgccatcttaaaacttactggagattggttttatatttagatttatataactggttatgtgaatatatttaaatactggggaaattgcttcactgtcttagaaccaagcaagattcacctgtgttttgtgttcatgttcatttgcctcttaaaggcaagggttgaagataaataaggtagcaatgtctatagttttggccttaactatgccaatctaattataattccctgtatttaaaatggtttcttttacttattgaaaggcattttagtgtggtttatgtgtaatattaaagattattcaacacctctcacatcttacagatctataaggtcacatgcttttaaaatagtagcaagttaaacttcactcttgaattctttacaatctaagtcaaactaagcttataatttaggattgtctttaaacaggattcagaaacaaaactgtagaactgtgtatttgattgggaatggtgcttttgccaacttaaaaggattaaagctaacggagatatacacaaattttaaaattatgtgtgatcacaagactaaagataattaaaaagaaaaccac

SEQ ID NO: 27156 - DNA, 529 bp, Homo sapiens
  SIMILAR (53)..(280): 1001254mologous to Homo sapiens bK116F5.2 (PUTATIVE RhoGAP (CDC42 GTPAse Activating Protein) LIKE protein),accession number Z93244,Smith-Waterman Score=399.
tgagcggcagacccggcacgcaggtggggtccggcggggtccgaggccaaagctgcagagagacaaggcggcggcggctgctgtgctgggtgcagtgaggaagaggccctcggtggtgcccatggctggccaggatcctgcgctgagcacgagtcacccgttctacgacgtggccagacatggcattctgcaggtggcaggggatgaccgctttggaagacgtgttgtcacgttcagctgctgccggatgccgccctcccacgagctggaccaccagcggtctgctggagtatttgaagtacacactggaccaatacgttgagaacgattataccatcgtctatttccactacgggctgaaacagccggaacaagccttccctgggctggctccagagcgcatacaaggagttcgataggaagtacaagaagaacttgaaggccctctacgtggtgcaccccaccagcttcatcaaggtcctgtggaacatcttgaagcccctcatcagtcacaagtttgggaagaaag

SEQ ID NO: 27157 - DNA, 1455 bp, Homo sapiens
  SIMILAR (296)..(442): 621254mologous to Homo sapiens bK116F5.2 (PUTATIVE RhoGAP (CDC42 GTPAse Activating Protein) LIKE protein),accession number Z93244,Smith-Waterman Score=151.
ctcccaaagttcttggattgcaagcatgagctactgcgcccggccggtggagcgtgtccgggctggactttgaggagctggccggcatagctaatgtatgttctccctccagcctcggcttaagacaacaggtcactgtctcagttctggaggccaccagtccaaagtcaaggtgtctgcagagctgcactttcccgaactggctcagaatttggagctggaggttcaaggttaagtccacaccttgctgccagttagcaagtcactctccctctctgagccttagttgccacccctgcccatggctggccaggatcctgcgctgagcacgagtcacccgttctacgacgtggccagacatggcattctgcaggtggcaggtagggccccagctgggcagtctgcaggaccatgggcagagcagccttcctctcggcaactttgaggcggcaacagcttttctgcagaggtggggtttagtgggaaggggtgtagagtcagcaaggaggcgggagagcattccaggtggaagctcaggtccgtgtgtgggggccgcctctccccgcagctgtccgtgtgtggggggcgcctctccccgcagctgtccgtgtgtgggggccgcctctccccgcagctgtccgtgtgtgggggccgcctctccccgcagctgtccgtgtgtgggggccgcctctccccgcagctgtccgtgtgtgggggccgcctctccccgcagctgtccgtgtgtgggggccgcctctccccgcagctgtgtgggggcacctctccccgcagctgtccatgtgtgaggggcacctctccccgcagctgtccatgtggtgatggatgctcactcagcaggtgtcgcctccgaggaacgctgctgcctgtgcctcccagctcgggcgaccaccagcggctgctggagtaagtgttctgccccctctctttctgtccctgtctctccatgttgcttgtccccatcccttcaccccttgagcgcctactgtatgtgagactttggatagatagtcactgtatcagggcccacctgtgaactgaggaaatcacccctgtggtaccagtgctgctgctgcacggcgagacctgcaggattcatggggcgagcttggatcctggtgctgattaccccagacagtgaggctggctttccccaggaggtgctcaccccagtgaggagccgatgccagcctgcagcccactcttgaacagccggaacaagccttccctgggctggctccagagcgcatacaaggagttcgataggaagtacgtgcccgcaagccttcagggacgtgggtgtgggctgcttgtggcaggaggaggcattgtggccacaaggggtcgcagagtgtgcagtgggagccaggtaagatgtgccagtggtcgatggatgaaatctagccggggagttggaatctgtgttgccagcagtga

SEQ ID NO: 27158 - DNA, 362 bp, Homo sapiens
  SIMILAR (74)..(361): 1001254mologous to Homo sapiens L7a protein,accession number X52138,Smith-Waterman Score=488.
cggccgcgtcgacttcacccaggccctggaccgccaaacagctactcagctgcttaagctggcccacaagtacagaccacctgtccttcgagcaggagttaacaccgtcaccaccttggtggagaacaagaaagctcagctggtggtgattgcacacgacgtggatcccatcgagctggttgtcttcttgcctgccctgtgtcgtaaaatgggggtcccttactgcattatcaagggaaaggcaagactgggacgtctagtccacaggaagacctgcaccactgtcgccttcacacaggtgaactcggaagacaaaggcgctttggctaagctggtggaagctatcaggaccaattacaatg

SEQ ID NO: 27159 - DNA, 365 bp, Homo sapiens; identical to SEQ ID NO: 4244
  SIMILAR (259)..(363): 1001254mologous to Homo sapiens L7a protein,accession number X52138,Smith-Waterman Score=189.

SEQ ID NO: 27160 - DNA, 432 bp, Homo sapiens; identical to SEQ ID NO: 4245
  SIMILAR (148)..(432): 981254mologous to Homo sapiens L7a protein,accession number X52138,Smith-Waterman Score=480.

SEQ ID NO: 27161 - DNA, 376 bp, Homo sapiens; identical to SEQ ID NO: 4246
  SIMILAR (201)..(230): 1001254mologous to Mus musculus surfeit 3 protein,accession number M14689,Smith-Waterman Score=49.
  misc_feature (1)...(376): n = a,t,c or g

SEQ ID NO: 27162 - DNA, 1548 bp, Homo sapiens
  SIMILAR (1114)..(1506): 881254mologous to Homo sapiens L7a protein,accession number X52138,Smith-Waterman Score=580.
atgactgcccccagagagtcctcggactcacctggccagctcctcggctggctgctgtcacgtctactgcgctatctctccatcagaaatgccctggagaatggaggtgagaacctcagcgggattctctccacctcccagcatctgagcaacatggctggaaaccatggctggattccccctaaatccagtccgtcacgatcagcagaaatctccaaaacattcaacttggtacccaatgcctcctggcggttcctccatgaatggagcaaagggcccaggaagcaatggcctagaatccagcgtccagagctgtgtgcagcctctccgacaaccaagacagaaaggaaaacctcaggagaaaaatcagccgggaggtggagcaccgtggagaggcgaccaagaccggccacccacgtgacagatgaacgggtgactcctcagctgggaggcccgccagaggaagtggagccggagggcaaaccactccatcaaggtgaggaggtgggtgcagcccctgggtctgtacgcattcaccctgcaagctacgcttccctctcccaggaggccctggtaagcgtgatcagcagcttacatggtaccgagcgctgctcactgccactctccaatccttccagaatccgctctctgtccttgttactctgcttgtttcgggggcagaacctgagctcagggagggtcactgactgctcccgacatgatcgggttccaagtgtgattcacgggttccaccatggcctgccatggaagcttcctttgcttcctggggtccccttagaccagctgagaaaaacttcagatgaaagtgggtgctcagacgcggctgcctgcacagcactgtggccacctccacactctatggaaacttctgggcaccagtacgtcagagttctgggctctgtgttaaggaggaaggcccttttccggcgtcttctgcagctgagcccaggggcagtgtcctgggccatgtggccagcagggaaacaagccgccaatactctatgccccagtttctccatctacaaatgcaatcaaatatggggctatttccagcaacaggaccagggttgtgtggggctgtcgcatgatgggctggccgcaggagttaacagtgtcaccacctcggtggagaacaagaaagctcagctggtgctgattgcacacgacgtggagcccattgagccagttgtcttcctgcctgccttgtgtcgtaaaatgggagtcccttactgcattatcaaggggaaggcaagactgggccgtctagtccacagggagatctgtacgactgtcgccttcacacaggtgaactcggaagacaaaggtgctttggctaagctggtagcagctatcaggaccgattataatgacagatatgatgagatccgccgtcaccggggcagcaatgtcctgggtcccaagtctgtggctcacattgccaaacgcaaaaaggcaaaggctaaagaacttgccactaaactgggttatatgtacactgttgagttttccgtacataaaaataattaa

SEQ ID NO: 27163 - DNA, 1060 bp, Homo sapiens
  SIMILAR (2)..(571): 931254mologous to Homo sapiens L7a protein,accession number X52138,Smith-Waterman Score=887.
  misc_feature (1)...(1060): n = a,t,c or g
gccgaaaggaaagaaggccaagggaaagaaggtggctccggccccagctgtcgtgaagaagcaggaggctaagaaagtggtgaatcccctgtttgagaaaaggcctaagaattttggcattggacaggacatccagcccaaaagagacctcacccgctttgtgaaatggccccgctatatcaggttgcagcggcagagagccatcctctataagcggctgaaagtgcctcctgcgattaaccagttcacccaggccctggaccgccaaacagctactcagctgcttaagctggcccacaagtacagaccagagacaaagcaagagaagaagcagagactgttggcccgggccgagaagaaggctgctggcaaaggggacgtcccaacgaagagaccacctgtccttcgagcaggagttaacaccgtcaccaccttggtggagaacaagaaagctcagctggtggtgattgcacacgacgtggatcccatcgagctggttgtcttcttgcctgccctggtgtcgtaaaatgggggtcccttactgcattatcaagggaaaggcaagactgggacgtctagtccacaggaagacctgcaccactgtcgccttcacacaggtgaactcggaagacaaaggcgctttggctaagctggtggaagctatcaggaccaattacaatgacagatacgatgagatccgccgtcactggggtggcaatgtcctgggtcctaagtctgtggctcgtatcgccaagctcgaaaaggcaaaggctaaagaacttgccactaaactgggttaaatgtacactgttgagttttctgtacataaaaataattgaaataatacaaattttccttcnnnnnnnnnnnnnggggggcccctttaaaaagaaaaaattttaatacccgggggtgggaaaggaaaacttttttttagggggccccaaaataaatttccggggccgggttttaaaaacgggggagggggaaaaacccgggggtacccaaattaaaaccccttggaaaaaaaanngnnnnggcccaccgaggatggagaacc

SEQ ID NO: 27164 - DNA, 1134 bp, Homo sapiens; identical to SEQ ID NO: 11864
  SIMILAR (985)..(1134): 721254mologous to Homo sapiens Human secreted protein, SEQ ID NO: 7420,accession number G03339,Smith-Waterman Score=170.

SEQ ID NO: 27165 - DNA, 1896 bp, Homo sapiens; identical to SEQ ID NO: 11860
  SIMILAR (1620)..(1465): 861254mologous to Homo sapiens Human secreted protein, SEQ ID NO: 5210,accession number G01129,Smith-Waterman Score=239.

SEQ ID NO: 27166 - DNA, 1137 bp, Homo sapiens
  SIMILAR (13)..(390): 391254mologous to Homo sapiens p40,accession number U93567,Smith-Waterman Score=263.
atgaaggtgaggaaaaaccagcacagaaacgctgaaaattccaaataccagaatgcttcttctcctccaaatgatcgcaactcctctccagcaagggcacaaaactggatggagaatgagactgacaaattgacagaagtaggtttcggaagccaatgcaaggaagctaagaaccttgataaaaggttacaggaagtgctaactagagtaacgagtttagagagaaacataaatgacgttatggagctgaaaaacacagcacgagaactttgtgaaccatacacaagtatcaatagccaagctgataaagtggaagaacggatatctgagattaaagatcaacttactgaaataaggattccctctggggaatacaagttgaaacatttaccaggagcattgacacagaaggagcttctggtgatctattcactctatatatacacgacttgttcagctgaagtacgaggctgtacaaaactacttcaggaatataccaggaaagccaagagaatccatagacatcctgaggaaagtggattgctcctacaggacctgggagacaaccaaaacactgtgctggtattcacagctaagagacgtgaagacgcctaccaaatgagaaagaaccagaaaagcaattctagtcatatgaagaaacaaggttccttaacatgccccaagaattacactagctcaccagcaatagatccaaaccaagaagaaatctttgatttacctgaaaaagaattcagaaggtcaattattaagctaatcatggaggcaccagaaagaggcatgaggaaaggtccaggtggatataatcttcaaacatcatcattcattagcctcatagtctctagcataggcagttaccacaagagtcaggacattctaggcaatttaaaaacaaagaaagaagtaaaagcagaagaaggaagaggaggaggaggaggaggaggaggaggaggaaaaggaggaggaggaagaggagggggaaaaggaaggaaggaagaagaagaagaggaagaagaagaagaagaagaagaagaagaagaagaagaagaagaagaagaagaagaagaagaagaaagaggaggaggaggaggtggaaagaaaaaatcagctcatgaatga

SEQ ID NO: 27167 - DNA, 531 bp, Homo sapiens
  SIMILAR (17)..(136): 351254mologous to Murine leukemia virus pol,accession number M93052,Smith-Waterman Score=52.
gacattcaccccatttccccacatttccttcttccctgtttctcaccctgaccacacttagtttattgatggcagttccaccaggcctaatcgccacacaccagcaaaagcaggctatgctatagtacaagccactagcccgcctctcagaacctctcgtttcctttccatcggggaaatctatcctcaaggaaataacttctcagtggtccatcagctattctactactcctcagggattcttcaggccccctcccttccctacacatcaagctcagggatttgcccccacccaggactggcaaattagctttactcaacgtgccctgagtgagataactaaaatacctcttagtctaggtaggtactttcactggataggtagaggcctttcctacagggtctgagaaggccaccgcagtcatttcttcccttctgtcagacataattcctcagtttagccttcagcacctcaatagagtctgataacagatgagcctttattagtcaaatcaggcaagcagtttttca

SEQ ID NO: 27168 - DNA, 578 bp, Homo sapiens
  SIMILAR (423)..(572): 361254mologous to Lycopersicon esculentum extensin (class I),accession number X55684,Smith-Waterman Score=71.
atggattcagagggtgcaagccccaaaccttggcatcttccacattgtgttgggcctgtggatgcacagaagtcaggaactgaggtttggaaacctctgcctagttcagaggatgtatggaaatgcctgaatatcaaggcagacatttgctgcagggagacaaaggagacacgttttatccgtggacccaaaactctggcaccggtcacggactgggaaggcagccttcccttggtgtttaatcattgcagggatgcctctctgattattcacccacgtttcaaaggtgtcagaccacacagggacgcctgccttggtccttcacccttagtggcaagtcccgcttttctggggaaggggcaagtaccccaaccccttctctccgtgtctataccccttctctgctcttctggggcaggagcaagaacccctcaaccccttctccttcacccttagaggcaagtcccgcttttgtagggggcaagaacccccaatcccttatttccatgcccccaccctttctctgcttttgtgaagggcaagaaaaaaaaaccccttctccgtgtctatactctttt

SEQ ID NO: 27169 - DNA, 997 bp, Homo sapiens
  SIMILAR (490)..(546): 421254mologous to Sus scrofa domestica polyprotein,accession number U77600,Smith-Waterman Score=42.
atgggggctgtctgtgaagccttgcagcagtacagcccaggtaatttgctgagcctaactggtgtcaggggggcttccgaggcgatcaggcagtgtcagtcttcagccgctaagctgagaagatctgggaaggagtcagtcagagagccttgggccagagttccaggggctctgggagtggctgccagccttggctgtgatgagaggaaagagcatgagcacatgaatctggccatcagagcctgcctgcaaccaggtgaaataaacagccatgttgctcacacaaagcctgtttggtggtctcttcacatggacgtgcatgaaatttggtgccaagacccgggacttggatcaggggacttcccttgggagatcactcccctgtcctcctactctttgctccatgagaaagatccacctacgacctcaggtcctcagaccgaccagcccaagaaacatctcaccaatttcaaatccgggagagacaaaggagacacgttttatccgtggacccaaaactccggcgccggtcacggactgggaaggcagccttcccttggtgtttaatcattgcagggacgcctctctgattatacacccacgtttcaagggtgtcagaccacgcagggatgcctgccttggtccttcacccttagcggcaagtcccacttttctggggaaggggcaacacgctttaaaaggattaaagcctgttatcactcgcctgctacagcatgggcttctaaaacctataaactctcctttcccttcccccattttacctgtcctaaaaccagacaaggcttacaagttagttcagaatctgcgccttatcaaccaaattgttttgcctatccaccctgtggtgccaaacccatacactctcctatcctcaatacctccttctactacccattattctgttctggatctcaaacatgctttctttactattcctttgcacccttcatcccagcctctctttgccttcacttag

SEQ ID NO: 27170 - DNA, 1863 bp, Homo sapiens
  SIMILAR (13)..(390): 391254mologous to Homo sapiens p40,accession number U93567,Smith-Waterman Score=263.
atgaaggtgaggaaaaaccagcacagaaacgctgaaaattccaaataccagaatgcttcttctcctccaaatgatcgcaactcctctccagcaagggcacaaaactggatggagaatgagactgacaaattgacagaagtaggtttcggaagccaatgcaaggaagctaagaaccttgataaaaggttacaggaagtgctaactagagtaacgagtttagagagaaacataaatgacgttatggagctgaaaaacacagcacgagaactttgtgaaccatacacaagtatcaatagccaagctgataaagtggaagaacggatatctgagattaaagatcaacttactgaaataaggattccctctggggaatacaagttgaaacatttaccaggagcattgacacagaaggagcttctggtgatctattcactctatatatacacgacttgttcagctgaagtacgaggctgtacaaaactacttcaggaatatactaggaaagccaagagaatccatagacaccctgaagaaagtggattgctcctacaggacctgggagacaaccaaaacactgtgctggtattcacagctgagagacctgaagatgaactacttcaggaatataccaggaaagccaagagaatccatagacatcctgaggaaagtggattgctcctacaggacctgggagacaaccaaaacattgtgctggtattcacagctaagagacgtgaagacgcctaccaaatgagaaagaaccagaaaagcaattctagtcatatgaagaaacaaggttccttaacatgccccaagaattacactagctcaccagcaatagatccaaaccaagaagaaatctttgatttacctgaaaaagaattcagaaggtcaattattaagctaatcatggaggcaccagaaagaggcatgaggaaaggtccaggtggatataatcttcaaacatcatcattcattagcctcatagtctctagcataggcagttaccacaagagtcaggacattctaggcaatttaaaaacaaagaaagaagtaaaagcagaagaaggaagaggaggaggaggaggaggaaaaggaggaggaggaagaggagggggaaaaggaaggaaggaagaagaagaagaggaagaagaagaagaagaagaagaagaagaagaagaagaagaaagaggaggaggaggagagtgtactcctactttggaaaagaaattagttgtagaagagtctcaggcatgtccttcaggaggtgtttcagaagacggcattgttatcataagagatgacagcttcatgcatactattgcctctgaagatcttccaagacaaaggagacacgttttatccatggacccaaaactccagcgctggtcacggactagggaaggcagcctttccttggtgtttaatcattgcagggacgcctctctgattattcacctatgtttcaaaggtgtcagaagacacagggatgcctgccttggtccttcacccttagcggcaagtcccgcttttctggggaaggggcaaggattattcaggccccctcccttccctacacatcaagctcgaggatttgctcccacccaggactggcaaattagctttactcaacatgtccggagtcagataactaaaatacctcttagtctaggtagacactttcactggacagcaatgcaagaatggactcacgcagaaaattggtacaaggagtgggacattgtaacaaagatacctgaaaatgttgaagcagctttggaatttggtaacaggcagaggttggaagactgtggagggctcagcagaagaaaggaagatgagggaaaatttggaaattcctag

SEQ ID NO: 27171 - DNA, 960 bp, Homo sapiens
  SIMILAR (493)..(759): 821254mologous to Homo sapiens HTPHLP,accession number AF267853,Smith-Waterman Score=375.
atgacaaggatgtcaattctcaccactcctactcaacattgtcctggaggtcctagccaatgcaataagctgtttagaaatcccaatttagaggaaggcaaagcaagatggcagactagaaacctcaaccgatcattcctcccacaagaacgccaagttaacaactgcctacacagaaaaagcaccttcactaaaaacaaaaatcagagccccagggccataagtgaatataggcagttgtcatggagtggctacagcaggccttgggtgagacctagtcctgtgctggcttcaggtctgacccagtgtagtcatagtattggtggccacaggggtgcttgtgtcacttcacctccacctttagctagctcagaacagaaagagagaccctatggaattaatcttctaaaaacagattacgctctaagatgttttacagctaaaagctccatcaagactttttcacaacttgttaatggaacaaaaagcaaccaggaaagtctgaaagaattggaaaatgaggtggaagaggagaagcgcatcctccagcagtcagtggtgacaacatataaagatagggctttgaaagagctggaagatcatgaagatgagtttaatgaggaggacgaacgtgctattgaaatgtacacacggcagagactagttgagtggaaagcatctaaactgaagaatacatttggagaagttttggagatctcagggaaggattatgttcaagaagctaccaaagccggagatatcaaggctcagtttatcggtcctctggtgtctggtggcatgcacctgacaagagataagttggagcggaaactgtctgaatctggagcaattaagatggacctggaggaaaaccctaagaagccgattgaacacatgttgctgtcctcagtgcggcgctctgtccccatggggagggactgcaattctgagggtgactga

SEQ ID NO: 27172 - DNA, 1003 bp, Homo sapiens
  SIMILAR (109)..(825): 991254mologous to Homo sapiens HTPHLP,accession number AF267853,Smith-Waterman Score=1235.
cccgggtcgacccacgcgtccgggcggcgctgtgcgcgtgcacaaaagatagctgaggggcgggggcgctgcggcacagctggtttgagcaactgaactggaaacaagatgcaggaccccaacgcagacactgaatggaatgacatcttacgcaaaaagggtatcttaccccccaaggaaagtctgaaagaattggaagaggaggcagaagaggagcagcgcatcctccagcagtcagtggtgaaaacatatgaagatatgactttggaagagctggaggatcatgaagacgagtttaatgaggaggatgaacgtgctattgaaatgtacagacggcggagactggctgagtggaaagcaactaaactgaagaataaattcggagaagttttggagatctcagggaaggattatgttcaagacgttaccaaagctggcgagggcttgtgggtcatcttgcacctttacaaacaaggaattcccctctgtgccctgataaatcagcacctcagtggacttgccaggaagtttcctgatgtcaaatttatcaaagccatttcaacaacctgcatacccaattatcctgataggaatctgcccacgatatttgtttacctggaaggagatatcaaggctcagtttattggtcctctggtgtttggcggcatgaacctgacaagagatgagttggaatggaaactgtctgaatctggagcaattatgacagacctggaggaaaaccctaagaagccgattgaagacgtgttgctgtcctcagtgcggcgctctgtcctcatgaagagggacagcgattccgagggtgactgaggctacagcttctatcacatgccgaactttcttgtgacaaattgtctggattttttaaaaaaggaaaaagcaagaatgaatccttgtggtttttagttttgtataaattatgtttcaaatctttacattttggaaataatcattgctggagattctgttaaatattttggaactc

SEQ ID NO: 27173 - DNA, 433 bp, Homo sapiens
  SIMILAR (278)..(373): 1001254mologous to Homo sapiens ribosomal protein,accession number M64716,Smith-Waterman Score=169.
atcttgacgaggctgcggtgtctgctgctattctccgagcttcgcaatggtaagcttcaggggtgtgaagtcgccggcgttcttgggtttgaggactcagtggggagagccttcggcgggagcgctccttggcctgccggcctcggttgcagggcgggcgcggttattgcttggcccatgtgctctggtggtggagtttgcgggggctgggggcgcagtattaggggactttggcgctatttgaggacctggttgcattcccgctgccctcctacagccgcctaaggacgacaagaagaagaaggacgctggaaagtcggccaagaaagacaaagacccagtgaacaaatccgggggcaaggccaaaaagaaggtagaaataagacctctctgaaagagactaggggtaactctctcgtaaccctctagtaat

SEQ ID NO: 27174 - DNA, 1345 bp, Homo sapiens
  SIMILAR (907)..(1299): 1001254mologous to Homo sapiens Human secreted protein, SEQ ID NO: 7942,accession number G03861,Smith-Waterman Score=661.
aatgaaattttttttttttttttttttttttttgatttaataaagttttatttttccaaatgtacagctggttggacctattcatgcattcttcacccagcagctggaagcatcttccacccttggtaatttctggtgtaaattacttgaagctctgtgctttgaaaccaagtttgaataagtcctttactaaggagctcctgaagggcttgccctggcccagggagcctcgaatttttagttctttcagaaaccacagctgggggttataagtttatagttggggaactttccttacagagtttatcatagggtaggctttgtcaaacaagactaaagttattgaagcttgtccccgaacttttgcctttgggacccacttccctagtctctttcagagaggtcttatttctaccttctttttggccttgcccccggatttgttcactgggtctttggcttttttgtccgacatcttgacgaggctgcggtgtctgctgctattctccgagcttcgcaatgccgcctaaggacgacaagaagaagaaggacgctggaaagtcggccaagaaagacaaagacccagtgaacaaatccgggggcaaggccaaaaagaaggtagaaataagacctctctgaaagagactaggggtaactctctcgtaatcctctagtaataggtaacttgtatagtaagtggtttttcaggtgtagatttctagagtcaaaatgtgagagtttatcttcccgtcaccactcgttctttttcccattaggatcatgaaaatgggtctgttgtgcgaagtgtctgccgctgtgcctgctgtgttatttttaactgatctagtggggctcggcccctgtttgaaggccaaaaacgtgtcggtgtttttttttgttttagtaatgtgtaatttatccttgataacggtggaacagatttctctgacgcagattactcgagagggaaagggtgcttctgccagaaatactaacttgtttctgttttgttttggtgagcagaagtggtccaaaggcaaagttcgggacaagctcaataacttagtcttgtttgacaaagctacctatgataaactctgtaaggaagttcccaactataaacttataaccccagctgtggtctctgagagactgaagattcgaggctccctggccagggcagcccttcaggagctccttagtaaaggacttatcaaactggtttcaaagcacagagctcaagtaatttacaccagaaataccaagggtggagatgctccagctgctggtgaagatgcatgaataggtccaaccagctgtacatttggaaaaataaaactttatt

SEQ ID NO: 27175 - DNA, 891 bp, Homo sapiens
  SIMILAR (821)..(883): 1001254mologous to Homo sapiens endoplasmic reticulum-Golgi intermediate compartment protein ERGIC-53,accession number AF081885,Smith-Waterman Score=121.
tcaaatgacacggcggtgaggaccatccagcaggtctccggagagggctgatgtgcggattcggctaggagagcacagccttagaggacagccatttataatgccttgctttatgggtggtttaattgtcaagcatcccctctgcatgtgggcattcacgtgccccagtgccacactcagccacatcctcttcctcctaaaagggtcagaaatccacatttccgacttaaccacaatatttagctttcttagcatttccgcttccacctccccgtcacccgctgcccctgccccacctgcagattcctcctcaggcctagccaatttccacccagttcttccttgaaaagcctcagcgagtggtgattgggcaaaacgctggctgtaaccatagttttcccaggtttgcactgtggtggcagccatcagtgagtgagacatggcaacagcgtgtgccccccacactcggaatctgaccgggcttgtagggttgtggataatcatttggcatcctgggtcaacgtgctgcatggacgtcatttctgccctcccacctggggaaccagcctccaaaatattagcaacttgaggcaaggccagggcccatgctggggagggagtcaccttcccagtctccctacccagaatctccctccagacatcttcttcccctgtagcagctatcaacttgttgcctgagtttgtaaccgtcgtggccttcagcagagagaggcagagaagcccaagggaaaccacacactcaggacctgctgcccttcttccaaagactgttcctactgctgttggatccctcctccagccatcaaatgaaaagccgaaatgcccagaactaccaccatttccatcatgtttgtctacggtccacttcat

SEQ ID NO: 27176 - DNA, 2783 bp, Homo sapiens
  SIMILAR (1259)..(1432): 591254mologous to Homo sapiens ERGIC53,accession number X71661,Smith-Waterman Score=138.
ggtcgcgttccagaatccaagatggcgggatccaggcaaaggggtctccgggccagagttcggccgctgttctgcgccttgctgctgtcactcggtcgcttcgtccggggcgacggcgtgggaggagaccccgcggtcgcgttgccacatcgccgtttcgagtacaaatacagcttcaaggggccgcacctggtgcagagcgacgggaccgtgcccttctgggcccacgcggggaatgctattccaagttcagatcaaattcgagtagcaccatctttaaaaagccaaagaggctcagtgtggacaaagacaaaagcggcctttgagaactgggaagttgaggtgacatttcgagtgactggaagaggtcgaattggagctgatggcctagcaatttggtatgcagaaaatcaaggcttggagggccctgtgtttggatcagctgatctgtggaatggtgttggaatattttttgatacttttgacaatgatggaaagaaaaataatcctgctatagtaattataggcaacaatggacaaatccattatgaccatcaaaatgacggggctagtcaagctttggcaagttgccagagggacttccgcaacaaaccctatcctgtccgagcaaagattacctattaccagaacacactgacagtaatgatcaataatggctttacaccagataaaaatgattatgaattttgtgccaaagtggaaaatatgattatccctgcacaagggcattttggaatatctgctgcaactggaggtcttgcagatgaccatgatgtcctttcttttctgactttccagttgactgaacctggaaaagagccgcccacaccagataaagaaatttcggaaaaggaaaaagaaaagtatcaggaggaatttgagcactttcaacaagaattggatatataaaaaagagcatcccagaagggccacccccgaccttccaatggcagcctgcggaggaaatatttgagagtgttagagatccgagagctaagacaagtctttgaaggacagaatcgtattcatcttgaaatcaagcagctgaaccggcagttagatatgattcttgatgaacagagaagatatgtctcttccttaacagaggaaatctctaaaagaggagcaggaatgcctgggcagcatgggcagattactcaacaagaactggatactgttgtgaaaactcagcatgagattctgagacaagtaaatgaaatgaaaaattccatgagtgcaacccgtaagactggtcagtggaatgcagcaccctggctctggctggaggcgtctatggggacaacacagcacttcattgacatccaaagagcacctgcacattagtaaaagagggaacatagataacttagtgcagcgaaatatgcccatcaaatgaaaagccgaaatgcccagaactaccaccatttccatcatgtttgtctacggtccacttcattatatttgttgtggtgcaaactgtattattcattggttatatcatgtataggtctcagcaagaagcagctgccaaaaaaattcttttgactaccattttcctgtgtacttcatctatttgtgtacaaaatgatgtcgttttgagggaatttaagtatttaaattgcttcatagtctaaattattaattttcttaataaaataactgtttaaacattgatttgcagttaagaataaaccttaaagcaaagacaaccacattttaatttgttcacagtatgtaaatctgtctaaatttcagtgaatttctggtcagtatgatgcagcctctgagcagaatattgaccagtaagagggtaaataaagtgggggcaacccctggatatgaatgttaccccctaagtctccaatattgcaggtttccctgtataacgtaaacacacttgccctcatgcctcccagaatatgaggtctaattaagaagtcccatcaggtttattttgtaaccaaagtcttttttagaggtcagacttcctaatcaaaggcctgggcctgcagtccctttcatcttaatgcaacttcctttgaaatcaaagaatattttgtctgagagctttaaggatctggtaatagacttcaaaatgttaagtgaaatttttttttcctctatttatcaatgatatatttcacttttaaaggaaattttagaggaaaattaatagctgctttttgcactaaaaaaccttgtgggtggaaatattcctctgagaatggcttttataggtattttgcctggtaatgtattcattcatgattgcccatattcttgaatgtttcttcattccaatggggtcaggtcaatattatgaaaataatttttatatttatatttgtaactaagaatttatttctccctttactacacgatgtaaattcacgtcaaattcgatgatctgaggatttaaattcacaaaacctgccactacattctggtttacattagttacttcatgctggctggggttagtgaccatttgcatactcttttaaatcaaggaggctgtagtagaggcagttttaagattcttgaaggcaaaatttgaaaaacagtgaatacttctaattgtttccttttagtgccagaactaagacattgtgaagcacttgttagtaaacttaaccttgaaatgtcagactggaaggagtttttatgtctttgtgcatacttctgggtattacagaaacagtctgtaaataacattttaagatgcaaatttaattctgttcacagctgatttatactgattt

SEQ ID NO: 27177 - DNA, 1131 bp, Homo sapiens
  SIMILAR (304)..(399): 961254mologous to Rattus norvegicus ribosomal protein L36a,accession number M19635,Smith-Waterman Score=179.
  misc_feature (1)...(1131): n = a,t,c or g
tcaaatcattatagctgattcaaacacatctttattaatccaaataggaacaattacaatcagcacatttttggccaatgagatattagtttgtttattccctgtgccgaaaaatccatgtttccgggattcgacaaactctggggaagcttttttctttatcctgctggttgtggaagtttctccntcagtgtgggaagaagtgtatacatcctttttaatcttaaatattgaaggggtggcctgcccctccacacctgtgagtatttctagttgggtggggtgaaagactaaaacccgataaccttctgtaagaaatgtggcaagcatcaacctcacaaagtgacgcagtataagaagggcaaggattccttgtatgcccagggaaagaggcgctttctggtcacctgctggattcactgtgcccgtcttttgctgtggatttttggctccctcttcctcctggctctcggcctgcccctctccttttgttttcttctttcggtgctcgtgttttcctttgtcccctttccaggttttcgtcacttcttttacccttccccctctttcttggcctcgatagaatcccccctcctcgcctttttgcatatcctcaccggggataagtccccctctcttttttgcgccctgcgagctgcgcttttcatgctcccagatgtggttatttcttcgcttggcgcttctccttcctcccccctgtccacctattattggactcttatcgcaagagcagcgggacagtgtgacagctttctgtatcctgagaacttgcccagtgccctgaataaattggatcacgcgagggctcgaaggatgagtgaaaggtgttattgagtggtggatgtggctctcagtgagattgatggagatcgggaagaggggatggagtgggaagtggtcttcctctggagtcgggctgccccgtggtcggactcttgtctgaccgcccaagttaactgagctccccttggcgtctagacatccctcctcttctttctttctctgccgtgtcattccaccgtcgctcctctgctggtctgctggtctactggtcggccctggagctgttaagggttccggtgggtttcgctccttgtgtcgccttgccat

SEQ ID NO: 27178 - DNA, 548 bp, Homo sapiens
  SIMILAR (126)..(167): 851254mologous to Homo sapiens ribosomal protein,accession number M15661,Smith-Waterman Score=64.
agattttggcttggtttggatccattgctgaggctccctcggcagcttggctctgtggctcctctcaggggcgttactgttcctctttcaaccgggtagtccgacagaacagctctgatgcaaaggtggtcaatgtacctaaaacccgaataaccttctgtaagaagtagtggcaagcatcagcctcacaaagtgacacagtataagaagggcaaggattctttgtatgcccagggaaggaggcgctatgatcggaagcagagtggctatggtgggcagacaaagccaattttccggaagaaggctaagaccacaaagaagattgtgctaaggctggaatgtgttgagcctaactgcagatccaagaggatgctggctattaagagatgcaagcattttgaactgggaggagataagaagagaaagggccaagtgatccagttctaaactttgggatatttttctttcaaatttgaagagaaaatggtgaagccatagaaaagttacccgagggaaaataaatacagtgatattcttaaaaaaaaaaa

SEQ ID NO: 27179 - DNA, 715 bp, Homo sapiens
  SIMILAR (232)..(582): 951254mologous to Homo sapiens double FYVE-containing protein 1,accession number AF251025,Smith-Waterman Score=625.
atgggccgggcacggtgggtcacatctgtaatcccagcactttgggaggccaagtgtgggcctcattctaagtctgacttccctaatgctcagaagatggctatgttgagtccacaaacttttgaattcagaaacaagattgagttgatttcagaagctctcccagaagatcaagaaagaactttccaggatctccaggaacctgaattgagtcatacgccaaacgtgagtatgagtgcccagacttccccagcagagaagggcctgaatccggggctgatgtgccaggaaagttacgcttgcagcgggactgatgaagctatctttgagtgtgatgagtgctgcagtctgcagtgtctccgctgcgaggaggagctccatcggcaggagcgcctgagaaaccatgagcggataagactcaaacctggccatgtcccttactgtgacctctgcaagggtctcagtgggcatttaccaggtgttaggcagagggcaatagtgaggtgccagacctgcaaaattaacttgtgcctggagtgccagaagaggactcattctggggggtaacaaaaggagacaccctgttactgtgtacaatgtcagtaatctccaggagtcactggaggcagaagagatggatgaggagaccaagaggaagaagatgactgagaaggttgtgagtttcctcctagtagacgaaaatgaagaaattcag

SEQ ID NO: 27180 - DNA, 1053 bp, Homo sapiens
  SIMILAR (246)..(812): 281254mologous to Mytilus edulis precollagen P,accession number AF015539,Smith-Waterman Score=105.
atgctggtgtctaaaaccctcaaaggagagtacaattgcaggataaacgaagagtgtccaggaagagaactagacaagaaaggaaacagatggtctctgggctcggtgagcttggaagctgtcgaaagcaaactcgactggaccctccaaactcctatttcagatcaatacataagaaggttaacgttaagggagcccgggggagctctctgcgaccccgccaggtgctccccgaacccccggccccatcagaggaatgaggcgaccaccgagcggcgttgggcggccaggtcctccccggcacccccgccccggctcctggaggagggcagggactgccggcctggggcagccagggaccgacgggacccccgcagagccaggcccgaggccccgggcgcccccacgacccggcggccgcccagggcgcccgcgtggggcctcaccccaaccggggacagggccgccgagggccgggccaaggccgcccggattgtccccgaggccgccggggagagtaggccgccgccatccccggcctgccgtgcgcccgcagcccgcggcattaccgcctccacggcgtgctgcaggatggaggtgaacttggagaacatcctgtcccgggactgcagcagcctctcccgggacgacctggagagctcctcgatccgccgccgccgcccctgctgcggctgccggggccgctccagagtgaaggccggtgtgcgcgggcggctcggcggctccggagggcgccgggacgcggcgggcggcgaggagggcgttcggcgaggactcggggcccggagaagctccggcggcggcaccgcattcagaggttcttcctgtaaggaccgatttggaagactcgttaagaaaacagtgttctttaagcaaacattggcaatggatttaaatgctcagattttgaagaaatcaacgactgcagataaatacgaccttaattttctacgtactacccccagaatgctggaggcatcctctgttgttttgtgccccttaccaaattctggccgtgtctgcttcaactga

SEQ ID NO: 27181 - DNA, 2109 bp, Homo sapiens
  SIMILAR (475)..(1866): 971254mologous to Homo sapiens KIAA1600 protein,accession number AB046820,Smith-Waterman Score=2376.
atgacttatgataaagccccagtgaccgatacaaatattccatcgcatctggaacagatgttagatatactggttcaagaagaaaatgaacgggaatctggagagacagggccatgtatggaatatttgcttcatcacaagatcttggaaacattatataccttggggaaagctgattgtcctccgggaatgaaacagcaggttttggttttctatacgaaacttctgggaagaatccggcagccactacttccacacattaacgtgcacaggccagtgcagaaattaattagactctgtggtgaagtcctagcaacaccaacagaaaatgaagagattcagtttctttgcattgtgtgtgcgaagctgaaacaggacccctacctggttaactttttcctagagaataagatgaaatcattggcttccaaaggagtaccaaatgtaatttcagaagatacattaaaaggtcaggattccttgtcaacagatacaggacagtcccgtcaaccagaggaactatctggtgctactggaatggagcaaacagaattggaagatgagcctcctcatcagatggatcacctgtccacaagcttggataacctcagtgtcacctcactgccagaggcctcggttgtttgtccaaatcaggattacaatttagtgaattctttgttaaatcttactagaagtcctgatggcagaatagctgtgaaggcatgtgaaggcttgatgctgttagtaagtttgccagagcctgcggctgcaaagtgccttacacagagcacttgcttgtgtgaactactgacagacagacttgcctccctgtacaaggccctacctcagtcagtggatccgttagatattgaaaccgtggaagcaattaactggggcttggactcatatagtcataaagaagatgcttcagcatttccaggaaaacgagccttaatttcatttctttcctggtttgattattgtgatcagctcattaaggaagcccaaaagactgctgctgttgctcttgccaaagctgttcatgaaagatttttcattggtgttatggaacctcaattaatgcaaacttctgagatgggtattctcacatccactgctctgcttcatcgcatcgttcggcaagtgacctctgatgttttgcttcaagaaatggtgttttttatccttggagaacagagggaaccagaaactctggcagaaatcagcagacatcctttaaggcataggttaattgaacattgtgatcacatatctgatgagataagcataatgacattacgaatgtttgaacatcttttacaaaaacccaatgagcacattctttacaacttggtcttgagaaatcttgaagaaagaaattatacagaatataaacctttgtgcccagaagataaagatgtggtagaaaatggattgatagcaggagcagtagatctggaagaagatccattatttactgacatttcaccagaaaacactttgccaaaccaagagtggcttagttcttcacctcctgctactccagaccaccccaaaaatgatggaaaaactgaagttcataaaattgtaaatagttttctctgtctggtaccggatgacgcaaaatcctcctaccatgttgagggcacaggatatgacacttacctccgagacgctcataggcagttccgagactactgtgctatctgcttaagatgggagtggcctgggtctccaaaagcattggaaaagtgcaatttagaagctgctttctttgaaggtcattttttgaaagtgctgttcgacagaatgggaagaattcttgatcaggttgttggagaccttatgcttcgaatccagcgtattcaagactttactcccaagcttctgttagtcagaaagcggttacttggtttggaacctgaaggccctattattgaccacatcacactgctagagggtgtgattgtgttagaagagttctttcaggggtcccccaacccccgggccacagaccagtaccagtccgtggccggttgggaactgggctgcatagcaggagatcagcagcaacattcaattctcgtaggagcaccaaccctactgtga

SEQ ID NO: 27182 - DNA, 4454 bp, Homo sapiens
  SIMILAR (2973)..(3224): 911254mologous to Rattus norvegicus ribosomal protein L15,accession number X78167,Smith-Waterman Score=431.
ttaagcaaatattccaaagacagaaaagtgaagtgggccatccaggccatgaagatccccaaatgctgagattgaggaatctggaggcagctccacagaccacggggacatggaagctttctgcttaatttgatgaatcaacaggccaggtttaaatattactttgaagcccgaaataacggattgggctgttattagcaggttaaagttcctaattctcccttcactgagtactgtttgactagtgcacagtttctcagcagtaacagtaccggtgttttggcctgggtaattctgttcagggggctgcctatgagcgtctcggaggtaagtgtcatatcctgtgccctcaacatggtaggaggattttgcgtcaatccggtaccagacagaaaaaaactatttacaattttatgaacttcagtttttccatcatttttggggtggtctggagtagcaggaggtgaagaactaagccactcttggtttggcaaagtgttttctggtgaaatgtcagtaaataatggatcttcttccagatctactgctcctgctatcaatccattttctaccacatctttatcttctgggcacaaaggtttatattctgtataatttctttcttcaagatttctcaagaccaagttgtaaagaatgtgctcattgggtttttgtaaaagatgttcaaacattcgtaatgtcattatgcttatctcatcagatatgtgatcacaatgttcaattaacctatgccttaaaggatgtctgctgatttctgccagagtttctggttccctctgttctccaaggataaaaaacaccatttcttgaagcaaaacatcagaggtcacttgccgaacgatgcgatgaagcagagcagtggatgtgagaatacccatctcagaagtttgcattaattgaggttccataacaccaatgaaaaatctttcatgaacagctttggcaagagcaacagcagcagtcttttgggcttccttaatgagctgatcacaataatcaaaccaggaaagaaatgaaattaaggctcgttttcctggaaatgctgaagcatcttctttatgactatatgagtccaagccccagttaattgcttccacggtttcaatatctaacggatccactgactgaggtagggccttgtacagggaggcaagtctgtctgtcagtagttcacacaagcaagtgctctgtgtaaggcactttgcagccgcaggctctggcaaacttactaacagcatcaagccttcacatgccttcacagctattctgccatcaggacttctagtaagatttaacaaagaattcactaaattgtaatcctgatttggacaaacaaccgaggcctctggcagtgaggtgacactgaggttatccaagcttgtggacaggtgatccatctgatgaggaggctcatcttccaattctgtttgctccattccagtagcaccagatagttcctctggttgacgggactgtcctgtatctgttgacaaggaatcctgaccttttaatgtatcttctgaaattacatttggtactcctttggaagccaatgatttcatcttattctttttggcaccagggactggtttcgtggaagacagtttttccatgcataattgaatgaatttggaaactcgtgcttgacctgaaccctcgggcggcgccgttcccagtggggaaagagactgtttggagacatcgccctccagtgacagcactcgggaactgttgagaggcctgggtacacctttgcttcccattgattgttcctctaagaacaggggtgctctgagcccgttccagcctgtgaaagctcccttgagttcgttgtacgtttgtccttgcccggatgtgtcggcaacacgcttggaggcataaacagaacaaaacttcagacgtgttcttaaaacaaccctctgtggtagttggtaccatccccattttacagataaggaaactgaggctcggggaggtgatgtggggtgcctaaagcaccagagctgagcagtgatggagtctggactgcagtaccctgttgcgggcgatgagggggagctgtcacaggaacaagccaaatcctgcattaggaggctcagtgccaaaggtcggagcaggaccagagatgacgtggacctgcatgcctggtccacagcgctccttggggaccttctgttctccttctccaccatccttgcttcttctttcttcacttcccctttcttagaaaaggggttttctcctccctcacagatccaaggcatgccctcactcctcacaggatggcaaggagaaacgatcaatcgatcagctttccccaaggtatataatgtttccaagatcttgtgatgaagcaaatattccatacatggccctgtctctccagattcccgttcattttcttcttgaaccagtatatctaacatctgttccagatgcgatggaatatttgtatcggtcactggggctttatcatctctggcggacatggtgcatgcagcggggagccggagctggaaggcgttggacagccccgcagggcgcggggaagaaggcagccccggagcgcccgcccggccccagacccttccgtactttgggcggggacccttttcggggacgcctggccgtccgctccgtgcagtatggccctccctgcccattcgatcgtctctcgagtggcctgctatctcttttttcttcccgaaggatggatttttttcttcctgtgccgtgcggctggtttcctcagttacactcatggttgcctccaattgtgttctttttattgttccctctgagtattcgtgattgatcccccgactaagccacaggtcttcctgatggtaagatcctgtgacagtcttaatggagaggatactgccatatcctaggagatgttttggaaatttgtggaggactataggattcaggagacagtattcgacatctgggttggtgaagattccacatacaaattttctgaggttatcctcattgatccattccataaagccatcggaagaaatcctgacacccagtggatcaccaaaccaatccacaagcacagggagatgtgtgggctgacatctgcaggccaaaagagccgtggccttggaaagggccataagttccaccacactgttggtggttctcgccgtgcagcgtggagaagacacaatactctccagctccaccgttactgctgatataagtaaagtttgtaaaattccttccttcatgatgtgggtatcctgcaggagaacccggtgctctttgtcacagagataaacacacatctggagacctttccccagcctctgagcacaaaaaacaatactcttgatatagttgctcctccactctgtcctccaaatctcacacaagtacatctcttgtggcacacccttaactcctgctatgcagcccagttcccaaccggccacggactggtactggtctgtggcccgggggttgggggacccctgaaagaactcttctaacacaatcacaccctctagcagtgtgatgtggtcaataatagggccttcaggttccaaaccaagtaaccgctttctgactaacagaagcttgggagtaaagtcttgaatacgctggattcgaagcataaggtctccaacaacctgatcaagaattcttcccattctgtcgaacagcactttcaaaaaatgaccttcaaagaaagcagcttctaaattgcacttttccaatgcttttggagacccaggccactcccatcttaagcagatagcacagtagtctcggaacttataaccccaaggcaagaaagaaaacacaaaggaccacaaaagattagagacaatgccatgagcatgaagacgagtagttacctttacttgaatgaccaggaggatggatatgccactgaccacagcaggaaacaaaggagcagatgcagttttaaaggcatcaatcataagttctgcagtcgttgatttcttcaaaatctgagcatttaaatccattgccaatgtttgcttaaagaacactgttttcttaacgagtcttccaaatcggtccttacaggaagaacctctgaatgcggtgccgccgccggagcttctccgggccccgagtcctcgccgaacgccctcctcgccgcccgccgcgtcccggcgccctccggagccgccgagccgcccgcgcacacctttccccattactaggtgtgtaatctcatgaaacttctttacttctctgatcctgagccttcttcttatgtattgatctgaaataggagtttggagggtccagtcgagtttgctttcgacagcttccaagctcaccgagcccagagaccatctgtttcctttcttgtctagttctcttcctggacactcttcgtttatcctgcaattgtactctcctttgagggttttagacaccagcat

SEQ ID NO: 27183 - DNA, 845 bp, Homo sapiens
  SIMILAR (36)..(515): 561254mologous to Rattus norvegicus ribosomal protein L15,accession number X78167,Smith-Waterman Score=385.
  misc_feature (1)...(845): n = a,t,c or g
gagcgggaatattggcagccatcagggaagccaatatgggagcatacaagtacatccaggagctatggaaaagaagccgtctgatgttcatgccttttttttaagggtcccgctgcggccagacccgcagcttctttgttttcacaggggttccccgccccacccggcctgataaagcgcgccgactgggctacaaggccaagcaaggttacgttatatataggattcgtgttcgccgtggtggccgaaaacgcccagttcctaagggtgcaacttacggcaagcctgtccatcatggtgtttaacccagcctaaaagtttgcctcgaaagcccttcaagtcccgttgccagaaggaancgaagctggacgcccactgtgggggctcctgagagtccctgaattcttactgggttggtgaagattcccacatacaaattttttgaggttatcctcattgatcccattcccataaagctatcagaagaaatcctgacacccaggtggatcacccaaaccagtccacaagcacagggagatgcgtgggctgacatctgcaggccgaaagagccgtggccttggaaagggccacaagttccaccacactattggtggctctcgccgggcagcttggagaaggcgcaatactctccagctccaccgttaccgctaatataagttaaagtttgtaaaattcatacttaataaacaatttaggacagacatgtctgcttacaggtgttatttgtctgttaaaactagtctgcagatgtttcttgaatgctttgtcaaattaagaaagttaaagtgcaataatgtttgaagacaataagtggtggggtatct

SEQ ID NO: 27184 - DNA, 1766 bp, Homo sapiens
  SIMILAR (64)..(1644): 1001254mologous to Homo sapiens UDP glucuronosyltransferase,accession number AJ006054,Smith-Waterman Score=2798.
aaacttcagcagagaaaaacatttgcttcacatctcatcaaatcttctgcatcaagccacatcatgttaaacaaccttctgctgttctcccttcagataagtctcataggaaccactcttggtgggaatgttttgatttggccaatggaaggtagtcattggctaaatgttaagataattatagatgagctcattaaaaaggagcataatgtgactgtcctagttgcctctggtgcacttttcatcacaccaacctctaacccatctctgacatttgaaatatataaggtgccctttggcaaagaaagaatagaaggagtaattaaggacttcgtttcgacatggctggaaaatagaccatctccttcaaccatttggagattctatcaggagatggccaaagtaatcaaggacttccacatggtgtctcaggagatctgtgatggcgttcttaaaaaccaacagctgatggcaaagctaaagaaaagcaagtttgaagtcctggtgtctgatccagtatttccttgtggcgatatagtagctttaaaacttggaattccatttatgtactccttgaggttttctccagcctcaacagtggaaaagcactgtgggaaggtaccataccctccttcctatgttcctgctgttttatcagaactcaccgaccaaatgtctttcactgacagaataagaaatttcatctcctaccacctacaggactacatgtttgaaactctttggaaatcatgggattcatactatagtaaagctttaggaagacccactacgttatgtgagactatggggaaagctgaaatttggttaatccgaacatattgggattttgaatttcctcgtccatacttacctaattttgagtttgttggaggattgcactgcaaacctgccaaacctttacctaaggaaatggaagaatttatccagagctcaggtaaaaatggtgttgtggtgttttctctgggatcaatggtcaaaaaccttacagaagaaaaggccaatcttattgcctcagcccttgcccagattccacagaaggttttatggagatacaaaggaaagaaaccagccacattaggaaacaatactcagctctttgattggataccccagaatgatcttcttggacatcccaaaaccaaagcttttatcactcatggtggaactaatgggatctacgaagctatttaccacggagtccctatggtgggagttcccatgtttgctgatcagcctgataacattgctcacatgaaggccaaaggagcagctgtggaagtgaacctaaacacaatgacaagtgtggatttgcttagcgctttgagaacagtcattaatgaaccttcttataaagagaatgctatgaggttatcaagaattcaccatgatcaacctgtaaagcccctggatcgagcagtcttctggatcgagtttgtcatgcgccacaaaggagccaagcaccttcgggttgcagcccatgacctcacctggttccagtaccactctttggatgtaattgggttcttgctggtctgtgtgacaacggctatatttttggtcatacaatgttgtttgttttcctgtcaaaaatttggtaagataggaaagaagaaaaaaagagaataggtcaagaaaaagaggaaatatatatattcttaagtttggcaaaatcctgagtagtggaagtcctattaattccagacaaaagggagtttaacaaaaacacgtcttccatcctggttcca

SEQ ID NO: 27185 - DNA, 2602 bp, Homo sapiens; identical to SEQ ID NO: 16907
  SIMILAR (1478)..(2029): 801254mologous to Homo sapiens p40,accession number U93570,Smith-Waterman Score=765.

SEQ ID NO: 27186 - DNA, 2406 bp, Homo sapiens
  SIMILAR (1117)..(1644): 841254mologous to Rattus norvegicus UDP- glucuronosyltransferase 2A1 precursor,accession number X57565,Smith -Waterman Score=800.
atgcctaagaagtttgtccagatgctggtttttaatttgactctgactgaagttgttctaagtgggaatgtgttaatttggcctacagatggtagccattggttaaatattaagattattctagaagagttgattcaaagaaatcacaatgtgactgtactggcttcatcagcaactctattcatcaactccaatcccgattctcctgtgaattttgaagtgatacctgtttcctacaagaagagcaatatagattccttaattgagcatatgataatgctgtggattgaccatagaccaactcctctcacaatatgggctttctacaaagaactaggaaaacttctagacactttctttcaaattaacatacaactctgtgatggtgtactaaagaacccaaagttgatggcaagacttcagaaaggtggttttgatgtgttggtagcagacccagtaacaatctgtggtgatcttgttgctctgaaattaggaattccatttatgtacacattgaggttctctccagcatcaacagtggagagacactgtgggaaaatcccagcaccagtctcctatgtaccggcagccttatcagagctcactgaccagatgacctttggtgaaaggattaaaaataccatatcttattctctgcaagactatatatttcagtcctactggggagaatggaattcatactatagcaaaattttaggacatcccaaaaccaaagcttttatcactcatggtggaactaatgggatctacgaagctatttaccacggagtccctatggtgggagttcccatgtttgctgatcagcctgataacattgctcacatgaaggccaaaggagcagctgtggaagtgaacctaaacacaatgacaagtgtggatttgcttagcgctttgagaacagtcattaatgaaccttcttataaagagaatgctatgaggttatcaagaattcaccatgatcaacctgtaaagcccctggatcgagcagtcttctggatcgagtttgtcatgcgccacaaaggagccaagcaccttcgggttgcagcccatgacctcacctggttccagtaccactctttggatgtaattgggttcttgctgataagtctcataggaaccactcttggtgggaatgttttgatttggccaatggaaggtagtcattggctaaatgttaagataattatagatgagctcattaaaaaggagcataatgtgactgtcctagttgcctctggtgcacttttcatcacaccaacctctaacccatctctgacatttgaaatatatagggtgccctttggcaaagaaagaatagaaggagtaattaaggacttcgttttgacatggctggaaaatagaccatctccttcaaccatttggagattctatcaggagatggccaaagtaatcaaggacttccacatggtgtctcaggagatctgtgatggcgttcttaaaaaccaacagctgatggcaaagctaaagaaaagcaagtttgaagtcctggtgtctgatccagtatttccttgtggcgatatagtagctttaaaacttggaattccatttatgtactccttgaggttttctccagcctcaacagtggaaaagcactgtgggaagtgtgtccggaattggtgggttcttggtctcgctgtcttcaaggatgaagccgcggaccctcacggaatgaaactgcagaccttcgcggtgagtgttactgttcttcaaggcagcgcgtttggagttgttagttccttccggtgggttcatggtctcactggcttcaggagtgaagctacagacctttgcaaagcccagccagcttcacctctcaatggcactcactgtgggactttgcagcacctagcccgggcactctggcagcccagagggagctcgttccctgatcaagcccagcaggctctgaccagctgcacccgtggagtccacgcccactgggaacccgtgccggcccacaagcaccacaagcagccctcgctccagcctgctcctctccctccacacctctgtgtgagcagagggagccagctctggcctcagccagccccagagagggggcccccacagcacagtggtgggccaaagggctcctcgagcttggccagagcagacgccaaggccgaggaggtgccgagagcaagccataaaataagcctcaatacatttaagaaaattgaaattggagtttgctggaggtccactccagatcctgtttgcctggatatcacaagtggaggctacagaacaacaaatactgcagaatggcagatgttgctgcctgatccttcctctggaagctttgtctcagaggggcacctggctgtctcagtcagcccctacttagaggtgtctcccagttag

SEQ ID NO: 27187 - DNA, 664 bp, Homo sapiens
  SIMILAR (244)..(519): 941254mologous to Homo sapiens UDP-glucuronosyltransferase (EC 2.4.1.17),accession number J05428,Smith-Waterman Score=484.
gcaactggaaaacaagcattgcattgcatcaggatgtctatgaaatggacttcagctcttctgctatcaccagggatgctgcattttctgtaggattaaatccctaatcttaatcaaaaagtgatgacacatttcataatgaaatgtgacctgtctttcctcaattctagcaccaccaccacctcactgcctggccaaattaacttactttcaatgttgatacttttctgcttatcgtttagatataaagagaatgctatgaaattatcaagaattcatcatgatcaaccagtgaagccccttgatcgagcagtcttctggattgaatttgtcatgcgccataaaggagccaagcaccttcgggttgcagcccacgacctcacctggttccagtaccactctttggatgtgactgggttcctgctggcctgtgtggcaactgtgatattcatcatcacaaaatgttgtctgttttgtttctggaagtttgctagaaaagcaaagaagggaaaaaatgattagttatatctgagatttgaagctggaaaacctgataggtgagactacttcagtttattacaacaagaagacgttgtgatacaagagattcctttcttcttgtgacaaaacatctttcaaaacttacctttgtcagtcaaaattt

SEQ ID NO: 27188 - DNA, 573 bp, Homo sapiens
  SIMILAR (193)..(357): 761254mologous to Mus musculus coenzyme A diphosphatase,accession number AF338424,Smith-Waterman Score=220.
atgtctgacctaatcagactttacaagaaggtgaagcatcagagatgtgatcttgctggcctgaagaaaagaaaccgctttgtgccatgtgaagtgcttgctcctcctttaccttccgccatgattgtaagtttcctgaggtctccccagaagccaagcagacgccagcatcatgctccctgtacggcctgcgagactctaagaagggcccctggagaagtttgcttccctggaggtaagcgtgaccctacagacatggatgatgcagccacagctctccgggaagcccaggaggaagtgggtctccgtcctcaccaagtggaagttgtctgctgcctggtgccatgtcttattgatcgtattctacggattaacagcattggcatgagctgggagcttggtaggcatgcagagtcccaggtcccaaccagacctgctgaattggagcctgagttttaccatgattcccagtatagcccgcttgttcctcatcccactgaccctaagcccaacacaccaatgactgctgatcatgataaaacacaatggtcaacaccagattcatgtaaataa

SEQ ID NO: 27189 - DNA, 837 bp, Homo sapiens; identical to SEQ ID NO: 10533
  SIMILAR (395)..(445): 641254mologous to Homo sapiens HERV-E integrase,accession number AF026246,Smith-Waterman Score=72.

SEQ ID NO: 27190 - DNA, 1434 bp, Homo sapiens
  SIMILAR (315)..(545): 331254mologous to Canis familiaris type I procollagen pro- alpha 2 chain,accession number AF035120,Smith-Waterman Score=86.
atggttctccgctgcgacgagcaggaggaaggaaagctgaacagaacatcttggtgcctaagccgctcttccttgggtaacatgaaaaagcctttacaagtcgatcctgaatgtcaaaatatgccatttaatgactggaatcaacaccctcatttttgtgcctcaacacccattcagggaagccctcactgtggaaagccagttctctgggagcattgcaccagatggaacacagggacgacaggctcctacaggaagaccacaggagggtttggagtaagacacctggatcctggaggagcacatttccagcgggtggagctgggcaggcaagaacaccgggtgtcacaggacaggcccgggcacctccccaacgcgggcgcaggggaagcggtgactgcgaagggaggcctggggagcagcagggcccggcacgaggaggagggagatgtgcgcttcctgattatcaggactggggcaatctgggtacgatccctgttccaggcacgacaggttccaaaaaaatgccgcatcaactgggcccgaacctggtcccagatatccctcctaaatgtacaatcaaggatttgcaccaaaagagaagagcagtacagaagcagtattccacacagtggtgttgaaagacacgaaagccctgacattgaagacttttccttcaaggaaccccaaaaaatgtgcatgattttgagtgtcaatggagagatgacacaggaaattcaagggagtgcttatggcccagaaagaaggaaatccaacaaccacttaatgaagaagaatgatcagaagttcaagacctgccacagatggccggtcatcccatccatcatcaggctcaggggcccccggagccaagaacccacaggagcagcagaggagacccatggggcagcgactctcccagcagagcaggaggaatccagggtgaaatgcaagaactgcggggctttgggcactcagccaggaacaagacctgccccattaagaggtggagtgggcccttcctctgcaggtcctgggctcacacaaggagaaggagaacctaaaccagcaaaggcccagctaccctttacgactccagggccctttacgagaatgacagagaaaaggagcgaagtccaaggttgtgattggctcccccatgtgaatgtggcctgggtacggtattggaatcgcctggtgaattggtacgctcgcacctgtgttcgggatgttggaaggtcttgggatgatccacggctttcgtccccgtactatgcctctggttatctgtatccctgtatgtctgttatgtcgggatgcagtgatggtgtggtggtgggaatgtggtggaggcaggatgaacatttgtctacatcagggataactatgctgatggacacatggatgtaccagattgcagagctgcagggctag

SEQ ID NO: 27191 - DNA, 2382 bp, Homo sapiens
  SIMILAR (7)..(345): 861254mologous to Mus musculus Sid329p,accession number AB024984,Smith-Waterman Score=542.
atgacatcagtgcatcagtttttactagagccaatcacctgtcgtgcctggaacagggatcgtacccagattgccctcagtcctgataatcaggaagcgcacatctataagaagcatgggagccagcgagtgaaagctcgtgaactcagtgagcacaatggacatatcacaggcattcactgggctcccaagagcgaccgcatcgtcacttgcggggtagactgcaatgcctacatctggagtcagaaagatggtgtctggaagccaaccctggtgatccttagaattaatcgtgcagctacttttgtgaagtggtccccgctagagaacaaatttgctgtgggaatcctcagcttggattggcatcccaacaatgttttgctggcagcaggatcatgtgacttcaaatgcagagtgttttctgcttacattaaagaagtggatgaaaagccagccagcatgccctggggcaccaagatgccttttgggcagctgatgtcagagtttggtggcagtggcaccggtggctgggtccacgggaacagtgtcgtggctgctggccatgactgctacccaatgctctttaattatgatgaccgcggctgcctgaccttcgtctccaagttagacattccaaaacagagcatccaacgcaacatgtctgccatagaacacttccgcaacatggacaagagggccacgattgaggaccacaacatggccttggagaggctgcaccagaatagcatcactcacgtctctatttatgaggtagacaagcaaggttgtcgcaaattttgcactactggcattgatggagccatgacaatttgggatttcaagaccctcgagtcttccatccagactttagcaggggcagaactactggacttcttgcagaaccaaggtcactgggaatatgagagacaagagaactactcccatgcccgacgttcttacatgcttcctggcccaacacagagaaactgggataagtttgatccccaggcattgaaacgaaaaagattggtttttctttgcaatacagtttggccaaaatatgaactagaagggcaggaagcctggccagtggggggaagcttaaatgttaataccatactccagcttgacgtctactgccgacaacagcgcaaatggtcagaggtcccttatgtgcaaaccttcatgatcttgagggaaaaccccgatttttgtaaaggctgcaagatagatcctgcccttttagctatcctcagtcgtccactccagagacctcaaccaggaggcttcaatgatttcctggtcaacccacctcaacctcctcttcctgagaccaaagagaaagagcaagcacccccagctccttcctccttgtatcgcactcttagccttcatgggtcagcctcaacctacactaggccctcaggcccccgctctggaatctgcctgctaccagtggtgagccgaccagcaggaccagtccaagtccaggtccccttttccatgcaggacttgtcccaagttaaggaaggcctgggaaaattctcagagaatccgggaaaattcctggagggcttccgtaaattaaccctcacttttgaactaacctggaaggatgtcgccatcctcctaggacaaaccctgtctctggaagaaagacagaccatctgggaggcagcacgtcaatgcggggatgagctacacttggcagatgccaactaccccgtgggagctacagctgtccccctgcaggaccccaactgggactacgataccccggcaggaatctgcgccagaaatcatatgctcctatgcctgatagagggaatgaaaaggagtcaagtcaagcctgtcaattataataagttagcaaccatcgaccaagggccacatgagaatcccacggcctttctcgaaaggctccaggaaactcttatcaaacataccaacctagacccgggatccccagaaggacaactagtcctaaaggatcacttcctcacacaagctgccccagacattaggagaaaactgcgaatgctggctttgggaactagagcccccatgtcagaaatcctcaaattcgcttcctcagtgttttataaccgagaccaggatgagagggacagggccgagaggaaggaaaaacagaaagaagagaggcaggctcaattactagctgctttgcaagttcaccagccccctccaggttgccctaaggataccttcccagggaactgctatcagtgcgggaagccgggccattggaaggcaaactgcccctacgggccaaggggggaaaagccctgcacggcctgtcccctctgccgtaagctcaggtactggaaagagaactgtcccgagagccaaaagggcccctga

SEQ ID NO: 27192 - DNA, 1308 bp, Homo sapiens
  SIMILAR (536)..(949): 751254mologous to Rattus norvegicus suppressor of profilin/p41 of actin-related complex 2/3,accession number AF315378,Smith-Waterman Score=481.
  misc_feature (1)...(1308): n = a,t,c or g
gtattgactgggctcccaagagcgaccgcattgtcacttgtggggcagaccgcaatgcctatgtctggagtcagaaagatggtgtttggaagccaaccctggtgatcctgagaattaatcgcgcagctacttttgtgaagtggtcccccctagagaacaaatttgctgtgggaagtggagcacgactcatttctgtttgttactttgagtctgaaaatgactggtgggtgagcaagcacattaaaaagccgattcgctccacagtcctcagcttggattggcatcccaacaacgttttgctggcagcaggatcatgtgacttcaaatgcagagtgttttctgcctacattaaagaagtggatgaaaagccagccagcacgccctggggcagcaagatgccttttgggcagctgatgtcagagtttggtggcagtggcactggtggctgggtccacggggtaagcttctctgccagtgggagccgcctggcctgggtcagccacgacagcaccgtgtctgttgcttgatgcctcaaaaagttgtgcaggtctcgactctgaagacagagttcctgccgctcctaagtgtgtcatttgtctcagagaacagcgtcgtggctgctggccatgactgctgcccaatgctctttaactacgatgaccgcggctgcctgaccttcgtctccaagttagatattccaaaacagagcatccaacgcaacatgtctgcccatgggaacgcttccggcaacatggacaagagagccacaactgaggaccgcaatacggccttggagacgctgcaccagaatagcatcactcaagtctctatttatgaggtggaccaagcaagattgtcgcaaattttgcactactggcatcggatggagccatgacaatttgggatttcaagacctttcgagtcttccatccagggcctccggataatgtgaagctgagttgagcctccgccatcccagcatgacaaacctgtggccgaccgcatgctgtgccgtggcacgaatggcgaggaagccagccccaaggaaacactgaaaacacatatcacgccaatgccgtgtggttttgtttgaatataaaattggtgaaagtgttggtttttttaaggcagtaatttttttgtttgttttttttgcgatttcattccattcttgaccaaagcttctctttaagtagtttattatggaaaattgtcacactaacttgaaaagacagggtgagggagatatgtaaattgtnccactaaaaaatcccataaaagaactgaatgtggaaaaaaaaaaaaaaa

SEQ ID NO: 27193 - DNA, 243 bp, Homo sapiens
  SIMILAR (3)..(101): 781254mologous to Homo sapiens ribosomal protein L29,accession number Z49148,Smith-Waterman Score=125.
agcacaacaagaagagcctaaagaagatgcaggccagcaatgccaaggctgtgagtgtatgtgccgaggctatcaaggccctcgtaaaggccaaggagatactactactcccactacacaagtgggaaaattgaaggccaaaaaggttagaagagacttgtccagggtcatacggctggtaagtgacatagaggatctgaacccaagccgtctagttccagatcttacacctctggccacatg

SEQ ID NO: 27194 - DNA, 478 bp, Homo sapiens
  SIMILAR (1)..(339): 771254mologous to Homo sapiens ribosomal protein L29,accession number U10248,Smith-Waterman Score=434.
atgtgctttgccaagaagcacaacaagaagagcctaaagaagatgcaggccaacagtgccgaggccatgagtgcacatgccgaggctatcagggcccttgtgaagcccaaggaggctaagcccaagatcccaaaggatgtcagccacaagctcaatcgacttgcctacattccccaccccaagcttgggaagcgtgctcgtgcccgcgttgccaaggggctcaggctgtgccggccaaaggccaaggccaaggaccaaaccaaggtccaggctgcagctccagcttcaactccagctcaggctcccaaagattataaagctgaggctctagaagaagaaaccacttgcacaagaaaacttctggataaagatggcaaaatgactctagatgacataatctctctcctcccaacatttaacacaatgaacagcaaaagtaaaagcaacagaaaaaaagtaccatcaatttccgcttttg

SEQ ID NO: 27195 - DNA, 623 bp, Homo sapiens; identical to SEQ ID NO: 17038
  SIMILAR (1)..(336): 811254mologous to Homo sapiens ribosomal protein L29,accession number Z49148,Smith-Waterman Score=453.

SEQ ID NO: 27196 - DNA, 810 bp, Homo sapiens
  SIMILAR (554)..(664): 691254mologous to Homo sapiens ribosomal protein L29,accession number U10248,Smith-Waterman Score=125.
atgacgaccacagcgcagagaagcacgcgagcccaacctccacgaaaagaaaatggcggaatgggccttcgcttcccttttatcatggctgtacgcaactgctgtacttgtaagcttggttctgattggcctgccattgctcacaatgcagcaactccaagcctactaccacccagacctttcaactccttttacatccccttggaaccatttttccaagcctcagtgtgccgtggcttttgctgtcccaggtttcccaaagtccctcacataattgtgtcttctgcaggcctattcaccaattactcggcactcaggtcatggacagttttcatcacagggtcatttcagacaccacccagtagccggccttttagctcaccagtcatgcctttgctgacatcctgccaccttacgcacataagttcagagctccagccatgttcactgggcctccatgcaaagagcctggactcgaggagcaagggtggggcagaggagatgccctgtccagcaagacttccctggagctctgctagaaatgtcatccttcaggttctgccggccaaaggccaaggatcaaaccaaggcccagtctgcagctccagcttcagttctagctcaggcttccaaaggtgtccaggcccccacgaagccttcagagtagaggtctctgtcaatctgagaacagaaggactgccccgcattcctgacgagcacctggccgaggctgctggcaaatgccaggcaccagtcattaggagccttggggccaccccagggcagcctcccaagcccaccccttcctag

SEQ ID NO: 27197 - DNA, 431 bp, Homo sapiens
  SIMILAR (270)..(163): 401254mologous to Homo sapiens Human secreted protein, SEQ ID NO: 7770,accession number G03689,Smith-Waterman Score=73.
tgtgtgcttgcccctccactctggggaggctgggggtccgggagtgaagggggcagcgagaccgcgggctgctccacgctcaccgtcgtgtccatggagagtaagtgcgcacaggcctgagcaggcaacaaaatgaggatcttgccttgtctttccacctccccagtgatgatcgacagagtagtgggtcggagaggaccacctctggctgctacctccccagcggttctcggcccatccccctctgggtggcgctctacacaaccaacctcagcagctgggtcaactcctgctcccccttccttcttccccttcattatcacctccacaaaggggatctgcaccagatttcttaagaatcctgatgaactccagtttgaagaactagtggtattttcatgaattgttatttttgtggcctgatatgacat

SEQ ID NO: 27198 - DNA, 1821 bp, Homo sapiens; identical to SEQ ID NO: 11427
  SIMILAR (1273)..(1617): 821254mologous to Homo sapiens ribosomal protein L29,accession number U10248,Smith-Waterman Score=471.

SEQ ID NO: 27199 - DNA, 2515 bp, Homo sapiens
  SIMILAR (42)..(2321): 871254mologous to Homo sapiens DNA mismatch repair protein homolog,accession number U40978,Smith-Waterman Score=3304.
gttgaacatctagacgtttccttggctcttctggcgccaaaatgtcgttcgtggcaggggttattcggcggctggacgagacagtggtgaaccgcatcgcggcgggggaagttatccagcggccagctaatgctatcaaagagatgattgagaactgtttagatgcaaaatccacaagtattcaagtgattgttaaagagggaggcctgaagttgattcagatccaagacaatggcaccgggatcaggaaagaagatctggatattgtatgtgaaaggttcactacctagtaaacctgcagtccttttgaggattttagcccagtatttctacctatgggcttttcgagggtgaggcttttgggccagcataagccatgtggctcatgttactattacaacgaaaacagctgatggaaagtgtgcatacagagcaagttactcagatggaaaactgaaagcccctcctaaaccatgtgctggcaatcaagggacccagatcacggtggaggacctttttttacaacatagccacgaggagaaaagctttaaaaaatccaagtgaagaatatgggaaaattttggaagttgttggcaggtattcatgtactcaatgcaggcattagtgtctcagttaaaaaacaaggagagacagtagctgatgttaggacactacccaatgcctcaaccgtggacaatattcgctccatctttggaaatgctgttagtcgagaactgatagaaattggatgtgaggataaaaccctagccttcaaaatgaatggttacatatccaatgcaaactactcagtgaagaagtgcatcttcttactcttcatcaaccatcgtctggtagaatcaacttccttgagaaaagccatagaaacagtgtatgcagcctatttgcccaaaaacacacacccattcctgtacctcagtttagaaatcagtccccagaatgtggatgttaatgtgcaccccacaaagcatgaagttcacttcctgcacgaggagagcatcctggagcgggtgcagcagcacatcgagagcaagctcctgggctccaattcctccaggatgtacttcacccagactttgctaccaggacttgctggcccctctggggagatggttaaatccacaacaagtctgacctcgtcttctacttctggaagtagtgataaggtctatgcccaccagatggttcgtacagattcccgggaacagaagcttgatgcatttctgcagcctctgagcaaacccctgtccagtcagccccaggccattgtcacagaggataagacagatatttctagtggcagggctaggcagcaagatgaggagatgcttgaactcccagcccctgctgaagtggctgccaaaaatcagagcttggagggggatacaacaaaggggacttcagaaatgtcagagaagagaggacctacttccagcaaccccagaaagagacatcgggaagattctgatgtggaaatggtggaagatgattcccgaaaggaaatgactgcagcttgtaccccccggagaaggatcattaacctcactagtgttttgagtctccaggaagaaattaatgagcagggacatgaggttctccgggagatgttgcataaccactccttcgtgggctgtgtgaatcctcagtgggccttggcacagcatcaaaccaagttataccttctcaacaccaccaagcttagtgaagaactgttctaccagatactcatttatgattttgccaattttggtgttctcaggttatcggagccagcaccgctctttgaccttgccatgcttgccttagatagtccagagagtggctggacagaggaagatggtcccaaagaaggacttgctgaatacattgttgagtttctgaagaagaaggctgagatgcttgcagactatttctctttggaaattgatgaggaagggaacctgattggattaccccttctgattgacaactatgtgccccctttggagggactgcctatcttcattcttcgactagccactgaggtgaattgggacgaagaaaaggaatgttttgaaagcctcagtaaagaatgcgctatgttctattccatccggaagcagtacatatctgaggagtcgaccctctcaggccagcagagtgaagtgcctggctccattccaaactcctggaagtggactgtggaacacattgtctataaagccttgcgctcacacattctgcctcctaaacatttcacagaagatggaaatatcctgcagcttgctaacctgcctgatctatacaaagtctttgagaggtgttaaatatggttatttatgcactgtgggatgtgttcttctttctctgtattccgatacaaagtgttgtatcaaagtgtgatatacaaagtgtaccaacataagtgttggtagcacttaagacttatacttgccttctgatagtattcctttatacacagtggattgattataaataaatagatgtgtcttaacat

SEQ ID NO: 27200 - DNA, 1271 bp, Homo sapiens
  SIMILAR (906)..(1148): 791254mologous to Homo sapiens ribosomal protein L29,accession number U10248,Smith-Waterman Score=334.
  misc_feature (1)...(1271): n = a,t,c or g
cagtccgaattcccggtcgacgatttcgtcttgagcatctgcagctctgtttaaaacatgttggaggaaaaaaaatcaagcagcagtttttcatgttgatggctgcattttgtctagactgtggagtagtaccatcatggaagaaaatcagttttccagaacctttaagctgcatgaatgcctgtcattttaccaagggaagcttaggatgaatttttttttccctgcctgaggtttctttgtacaaatagcacaggaggacccccagcccccatgcaaaatggtaaccccaggggcgggggtggggggtcgcacccagtccttctgtccctcatgttggcagatagagatatctactttgaaagcctttgtaagggccctgggtacgtttgggaagcctgaagctggaaactgaaagctgggggctgcaagcctgggccttggtttgatccttggccttggccttggccttggccttggtntgatccttggccttggcctttggccttgccttttgggccggcacaaccctgaaacccccttgggcaaaatacggggcaacgaagcaacgccttccccaaagctttgggggtgggcaaatgtaaggcaaagtcgaatcgaagctttgcgggctgaccacccttttgggatcttgggcttaacctccttggggcttttacggagggccttgaatagcctcggcacggtgcacttcatggccttgggcattgttggcctgcatcttctttagggcccttttttgttgtgcttcttggcaaaagcgcatgttcctcaggaaacttgggggtccaacccccttaagagaattcgtatcttttgtgatcgggggtttcttgataccatttcttgggccattttcgggagccgcggcttatggtgcagacatggccaagtccaagaaccacaacacacacaaccagtccccaaaatggcacagaaatggcatcaggaaaccccgatcacaaagatacaaatgtcttaatggggtggacctcaagttcctaaggagcatgcaccttgccaagaagcacaacaagaagggcctaaaaaagatgcaggccaacaatgccgaggccatgagggcacgtgctgaggctatcaaggtcctcgaaagcccaaggagggttgctgtcctctggctgctctgcagctgtttcttatattgtctagtctggatatggctccttgggcggtttgaggtggtgagcattgccgtcattgtgacatcttcagagccctttgaaatatga

SEQ ID NO: 27201 - DNA, 558 bp, Homo sapiens
  SIMILAR (260)..(216): 461254mologous to Homo sapiens endothelin converting enzyme- 1,accession number AF018034,Smith-Waterman Score=43.
agcacgaggaacactgaagtcggatttgggtccagtcaccatctggcctccgtattagtcgttgcggagaaggatggtggtacctgctccagtacagtagccaagggatggaacaaagtcgtgggggagtcaagggatgtcgataaggacattagaacccatgggacttggcaacctggagggagaccttagtttcctgctctcagcgacacttccatagcctcatgatagctgcttggtgttctacagtgtctccagatccagaccctcttatatggaccgcaggacaaaaggactctggccacccagcaggccatgggcatgctgtccacggcccccaaggttgcttcgaagccaaggcaggcatcaaaagccaaagtggccttctgcaccagcatccctcaggacaccctgctggggaaggcccggcccggcacaacagcagactgaggcccccaccctgaaaaagcctaggacattcctgggcactgtcatttagggtgctgtacaaatcacctccgcctagaaaatggaattcaacagtcaggatacagattt

SEQ ID NO: 27202 - DNA, 1386 bp, Homo sapiens
  SIMILAR (537)..(656): 651254mologous to Homo sapiens Human secreted protein, SEQ ID NO: 6812,accession number G02731,Smith-Waterman Score=139.
tcagtctgctgttgtgccgggccgggccttccccagcagggtgtcctgagggatgctggtgcagaaggccactttggcttttgatgcctgccttggcttcgaagcaaccttgggggccgtggacagcatgcccatggcctgctgggtggccagagtccttttgtcctgcagtccatataagagggtctggatctggagacaccagccctgcagctcccttacttgaagggacactgatcctccaggttgccaagtcccatgggttctaatgtccttatcgacatcccttgactcccccacgactttgttccatcccttggctactgtactggagcaggtaccaccatccttctccacaacgagtaagacagggtcacgttgcagccccgggttgccatttccttccctctcccatctctgcccagcagggaaggctttcatggccacacacaccttggaggcctggggcagctggtgaaccttggctaagaaaaagacggagctgggaatccctctggctggatttcggaagatggatggaaatgcctgggtgtccaggcagaagtgtgctgcagggacgaagcattcacagagaacctctgctagggcagtgtggaaaggaaatgtggggtggaagcccctacacagagtctccactggggcactgcctagtggagctgtgagaagagggccacggtcctccagaccccagaattgcaggtccactgacagcttgcaccgtgctctggaaaagccatagacactcgatgccagcccatggaagcagccaagaggggggttgtaccctgcaaagccacaggggcagagctgctgaaggccctggagctcacctcttacatcagcatgaccaactgctgtcccttcattgtgtctgagagcaaagcctgtcttcatttctttcctggggaggctgaagtgcatgagcagcatgatgaccacgttcatgaggttcgggtttttcacttctgagtacgtgatgcaggatgaggcccgaatctggcacaattcctggtcccaggtctgttccgttcgatccttggttgcttcctgcttgcctccgtccttcacctccccaagagttcggcaaaaccctggttgtcgaaatgagtcaagaatggaaaagccatcgccagcaactgtgaggatggggtgaagacccaaggaggtactatatagagcccatgaatcaaggatgttgtggcgtccaaattgatgcggatacccagggacccatagcaccaccatggcccccgtgttagagtagggatctatgggggtcatgtcatccacagagccctgcccaagacacagcggggtcagaacagcagtctgggctgcagcgacacatccgaggatcactggcat

SEQ ID NO: 27203 - DNA, 1401 bp, Homo sapiens; identical to SEQ ID NO: 9416
  SIMILAR (1)..(345): 991254mologous to Rattus norvegicus ribosomal protein S26,accession number X02414,Smith-Waterman Score=607.

SEQ ID NO: 27204 - DNA, 1152 bp, Homo sapiens; identical to SEQ ID NO: 9417
  SIMILAR (271)..(1143): 931254mologous to Homo sapiens similar to mouse heat shock protein 105 kDa beta,accession number D86956,Smith-Waterman Score= 1426.

SEQ ID NO: 27205 - DNA, 678 bp, Homo sapiens
  SIMILAR (176)..(523): 391254mologous to Cricetus cricetus ribosomal protein S26,accession number X63389,Smith-Waterman Score=123.
  misc_feature (1)...(678): n = a,t,c or g
gtaaaggaatatttgagtaaagtgagttgccgttcttgaagcccgtctcctaaggattctcccggtgtccgcgtagggatctcatgctatataggagggccctgccagcagcgtctcctctctccggtccgtgcctccaagatgacaaagaaaagaaggaacaatggtcgtgcccaaaaaagggccgcggcacgtcagggggnngccncccttaaaatttttnccccngggnccntgccacctaactgtgccccgatgccgtgcccaagggacaaggcccattaagaaattccgtcatttcgaaaccataagtggaggccgcagcagtcaagggacatttctgaagcgagcgtcttcgatgcctatbtbbcttcccaagctgtatgtgaagctacattactgtgtgagttgtgcaattcacaagcaaaagtagtcaggaaatcgatcttcgtgaagcccagcaagaccagaacacccccaccccgatttaggacctggcgggtgattgccccacggtccccccaccaaaagcccatgatctgggtccagaatactgcagacatcagacatgtgttaactgggtttgctgccggcaagccaccatccttgggaaggagttgtgtgggcaaatcaggaagttgccctctcagcagatgtctccaggatggctgccctcag

SEQ ID NO: 27206 - DNA, 813 bp, Homo sapiens
  SIMILAR (180)..(335): 751254mologous to Homo sapiens Human cytoskeleton associated protein 11 (CYSKP-11),accession number Y91956,Smith-Waterman Score= 158.
  misc_feature (1)...(813): n = a,t,c or g
gtgctcgaccatcgccgataatatatcgtcgctccaggacttttaaggcacttgctactctaagaggaggagacaaaanaaaatttgaaacccctggaatttgcacccgctgcaggaattcggcacgaggccactgcgcagacccagacttcgctcgtactcgtgcgcctcgcttatgcttttcctccgcaacccatgtctgacaaaacccgataatggctgagatcgagaaattcgataagtcgaaactgaagaagacagagaccgcaagagaaaaattcccactgcccttcccaaagaaacagattgaacaggagaagcaagcaggcgaatccgtaatgaggcgtgcgccgccaattatgcactgtacattccacaagcattgccttccttatttttaacttcttttaagctgttttaacttttgtaagaatgcaaagaggttggatcaacgtttaaatgactgtgctgcccctttcacatcaaaggaactacttgacaaccgaagggcccggcggctggccttttccccatctggtctatctattctgggctgggcagggaaggaaaagaactttgcatgttgggtgaagggaagaagttggggttggaagaagttggggttgggacgacagtgaaaatctatagtaaaaccaaggctgggcccaaggtgtcctgccaggctggtaatggcagtttaatcagagtggccatttttttttttttgttcaaatgattttaattattgggaatgcacaattttttttaatatgcaaaataaaaaggtttaaaaggtaaaaaaaaaaaaaaaaa

SEQ ID NO: 27207 - DNA, 980 bp, Homo sapiens
  SIMILAR (297)..(731): 751254mologous to Mus musculus uridine kinase,accession number L31783,Smith-Waterman Score=583.
tctgcctgggatgtaaaccggaccagccgctgcgggcagaaggaaggctcttggctccttcgggaaacccagccccgtcaccgggctccgagcggctcgcaggcgacggacacgtccgtcagccccggcagcgcctagcgtcggctgcggaaagcggagggagtccgacgcgggcgcgggcggggagcgtgcgtccgttcgcacaggcagcgggaggaggggcggccgaaccatggccggggacagcgagcagaccctgcagaaccaccagcagcccaacggcggcgagcacttcgcttataggcgtcacgtggggaacagctagcggcaagtcttccgtgtgtgctaagatcgtgcagctcctggggcagaatgaggtggactatcgccagaagcaggtggtcatcctgagccaggatagcttctaccgtgtccttacctcggagcagaaggccaaagccctgaagggccagttcaactttgaccacccggatgcctttgacaatgaactcattctcaaaacactcaaagaaatcactgaagggaaaacagtccagatccccgtgtatgactttgtctcccattcccggaaggaggagacagttactgtctatcccgcagacgtggtgctctttgaagggatcctggccttctactcccaggaggtacgagacctgttccagatgaagctttttgtggatacagatgcggacacccggctctcacgcagaggcatcatgaatttgctcctccatccacggggattgagagccattactattgctgtatttggtaagcaaaatacgtacatcaggctcgaaccctttaggatcaacgttccccccacgatcacgaagcatatcgaagaactgcagtgcgcacctgtcgtaacacaactcagcaggaaggaggagacagttactgtctatcccgcagacgtggtgctctttgaagggatcctggccttctactcccaggag

SEQ ID NO: 27208 - DNA, 8783 bp, Homo sapiens
  SIMILAR (2254)..(2346): 351254mologous to Homo sapiens putative p150,accession number U93565,Smith-Waterman Score=44.
  misc_feature (1)...(8783): n = a,t,c or g
atggccctggccgggagttcgggaaattccctcccccgctccttgcccttccgtaaccggattgattttttatacccaaccgggggaataggctccctggggggtaaaagacaacctcctgcccgtattgaaactgagttaatgggcaaatttgatgaaggtaaactgcccaccgatccacacctgatgctccgactggccattgaaactgttgctcatgactatgatgtcatagttattgacagcgcgcctaacctgggtatcggcacgattaatgtctttttcgatatgcttcgtgatctgctcaagaacgttgatcttaaagggttcgagcctgatgtacgtattttgcttaccaaatacagcaatagtaatggctctcagtccccgtggatggaggagcaaattcgggatgcctggggaagcatggttctaaaaaatgttgtacgtgaaacggatgaagttggtaaagcggttatcaatcacaagaaacgtaaaaatagcccgcgaatcgtccagtcaaacgacctcactgaggcggcatatagtctctcccgggatcaaaaacgtatgctgtatctgttcgttgaccagatcagaaaatctgatggcaccctacaggaacatgacggtatctgcgagatccatgttgctaaatatgctgaaatattcggattgacctctgcggaagccagtaaggatatacggcaggcattgaagagtttcgcggggaaggaagtggtttttcctcgccctgaagaggatgccggcgatgaaaaaggctatgaatcccttcacccgtttatcaaacgtgcgcacagtccatccagaggaatttacagtgtacatatcaacccatatctcattcccttctttatcgggttacagaaccggtttacgcagtttcggcttagtgacaaccaaagaaatcaccaatccgtatgccatgcgttctctacgaatccctgtgtcagtatcgtaagccggatggctcaggcatcgtctctctgaaaatcgactggatcatagagcgttaccagctgcctcaaagttaccagcgtatgcctgacttccgccgccgcttcctgcaggtctgtgttaatgagatcaacagcagaactccaatgcgcctctcatacattgagaaaaagaaaggccgccagacgactcatatctttttcgatatgcttcgtgatctgctcaagaacgttgatcttaaagggttcgagcctgatgtacgtattttgcttaccaaatacagcaatagtaatggctctcagtccccgtggatggaggagcaaattcgggatgcctggggaagcatggttctaaaaaatgttgtacgtgaaacggatgaagttggtaaagctgccccgatggtggattcgttaattgcgcgcgtaggagtaatggctcgcggtaatgccattactttgcctgtatgtggtcgggatgtgaagtttactcttgaagtgctccggggtgatagtgttgagaagacctctcgggtatggtcaggtaatgaacgtgaccaggagctgcttactgaggacgcactggatgatctcatcccttcttttctactgactggtcaacagacaccggcgttcggtcgaagagtatctggtgtcatagaaattgcggggctgcgtttaaccattcatgaatcacttggacgcttgcgtaacaagggtatcgcttttaagcgcggaaaagatgctaaaggcggctatcagactggtctgctgaaggtcgggcgttttgatgctgaccttgatctgatagagctggaggctgattcgaagttgtgggagctgttccagcttgattatcgcgttctgttgcaacaccacgccttgcgtgcccttccgaagaaagaagctgcacaagccatttacactttcatcgaaagccttccgcagaacccgttgccgctatcgttcgcgcgaatccgtgagcgcctggctttgcagtcagctgttggcgagcaaaaccgtatcattaagaaagcgatagaacagcttaaaacaatcggctatctcgactgttctattgagaagaaaggccgggaaagttttgtaatcgtccattctcgcaatccaaagctgaaactccccgaataaatgctggaatctgtcgcagcagagatgatgagcgtttctgacggtgttatgcgtctgcctttattcctcgcgatgatcctgcctgttcagttgggggcagctaccgctgatgcgtgtaccttcattccggttacgcgtgaccagtccgacatctatgaagtctttaacgtggcaggttcatcttttggttcttatgctgctggtgatgttctggacatgcaatccgtcggtgtgtacagccagttacgtcgccgctatgtgctggtggcaagctccgatggcaccagcaaaaccgcaaccttcaagatggaagacttcgaaggccagaatgtaccaatccgaaaaggtcgcactaacatctacgttaaccgtattaagtctgttgttgataacggttccggcagcctacttcactcgtttactaatgctgctggtgagcaaatcactgttacctgctctctgaactacaacattggtcagattgccctccagttacgtcgccgctatgtgctggtggcaagctccgatggcaccagcaaaaccgcaaccttcaagatggaagacttcgaaggccagaatgtaccaatcccccaaggtcgcaataacataaaagttaaccgtattaagtctgttgttgataacggttccggcagcctacttcactcgtttactaatgctgctggaaactcatggaaacacttaaccagtgcataaacgctggtcatgaaatgacgaaggctatcgccattgcacagtttaatgatgacagcccggaagcgaggaaaataacccggcgctggagaataggtgaagcagcggatttagttggggtttcttctcaggctatcagagatgccgagaaagcagggcgactaccgcacccggatatggaaattcgaggacgggttgagcaacgtgttggttatacaattgaacaaattaatcatatgcgtgatgtgtttggtacgcgattgcgacgtgctgaagacgtatttccaccggtgatcggggttgctgcccataaaggtggcgtttacaaaacctcagtttctgttcatcttgctcaggatctggctctgaaggggctacgtgttttgctcgtggaaagtaacgacccccagggaacagcctcaatgtatcacggatggttagggacatcattgagcagaaaggcttattctgagtgcttaggagaagatccctataccatccctaaaaattacttaggaggggagattttaggaaggcgaaaccttccacaaatcgtaaaatttgagcgttacacaaaatgactgccggggtatgcttccaccacccaatggtggattttgagcgttcagccacgattcgccggaaaccttggggatcatctgaaagagcgattcccgttggctaacaacgatctttcaaaacgctacacaagcggtaagaagatcccgcaaagctatgcgatggcgattgctcgtcagaagagcgcttggaatccgaaagtgaaatcaccggtaggggccagcggcttgatgcagattatgcctggtacagcgacccatacggtgaagatgttctctattcccggttatagcagtcctgggcaattgctggatccggaaacgaatatcaacattggcaccagttacctgcaatatgtttatcagcagtttggcaataatcgtattttctcctcagcagcttataacgccggaccagggcgggtgcgaacctggcttggcaacagcgccgggcgtatcgacgcagtggcatttgtcgagagtattccattctccgagacgcgcggttatgtgaagaacgtgctggcttatgacgcttactaccgctatttcatgggggataaaccgacgttgatgagcgccacggaatggggacaggcgaagtccaacgtggctcaattcgtttataccatgcatcgtgtcggcaaagttgttccgccgaaacgtcatattttgaaaaacatctctctgagtttcttccctggggcaaaaattggtgtcctgggtctgaatggcgcgggtaagtccaccctgctgcgcattatggcgggcattgataaagacatcgaaggtgaagcgcgtccgcagccagacatcaagattggttatctgccgcaggaaccgcagctgaacccggaacacaccgtgcgtgagtccattgaagaagcggtttcagaagtggttaacgccctgaaacgcctggatgaagtgtatgcgctgtacgccgatccggatgccgattttgacaagctggccgctgaacaaggccgtctggaagagatcattcaggctcacgacggtcataatctgaacgtacagctggagcgtgcggcggatgcgctacgtctgccggactgggacgcgaaaatcgctaacctctccggtggtgaacgtcgtcgcgtagcgttgtgccgcctgctgctggaaaaaccagacatgctgctgctcgacgaaccgaccaaccacctggatgccgaatccgtggcctggctggaacgcttcctgcacgacttcgaaggcaccgttgtggcgattacccacgggggatcctctagagtcgactgcagacagtagtggccgctgcaaaacgctgacggaacagtagctgcatacaacggatatcacgttgtgtttgctcttgcgggaagcccgaaagacgctgatgacacatcaatctacatgttttatcaaaaggtcggcgacaactcaatcgacagctggaaaaacgcgggccgtgtctttaaagacagcgataagttcgacgccaacgatccgatacatgaaagatcagacgcaagaatggtccggttcggcaacccttggagcaccgagctcgtatcatggggtcagagaatgaattaattcggagccaacactgctgctttccccacacagcgaccagctctcaatggagtctttgatgagcagcccgcatttggcatcgtggtgtctggcctgcagggaggacccgggggatgtgtatgaaatctaacaatgcgctcatcgtcatcctcggcaccgtcaccctggatgctgtaggcataggcttggttatgccggtactgccgggcctcttgcgggatatcgtccattccgacagcatcgccagtcactatggcgtgctgctagcgctatatgcgttgatgcaatttctatgcgcacccgttctcggagcactgtccgaccgctttggccgccgcccagtcctgctcgcttcgctacttggagccactatcgactacgcgatcatggcgaccacacccgtcctgtggatctacccactagtcaattcaccatcttgttgatcgacgtgtacctgtggctgggctccatcaagcatgccagtgccattttggacaacttgccagtaggctatgaagcagaaatgtcctccaaaggggctggcaccaatcaccccccatctaacctgctctaccaagaaagctcagaaaaaggagagccagacccttgcaaatgggcaatagggtttaaggtaatgaaggtgcaggatcccccagcccagatcaagaaggtggtaaataatgaggatggcaatgcccaatactgcctggcagtgataagattcagcaccatgacggagaaccagactttcaggctgccattggtccaacatggttggagaaaaagggcagatttcttgataatctcccagaccctctctccgacctggaaccagatgctgctgttcaatgatttggtgctgcatggagatgtgaaggagctggcagagtccccgcccttagtggtggtggagctgtatgacagcgacgctgtggtggggccactgcccttgagtgccaaagaacaactcagctcctccgctgacccgtacctccactcggtatttgctcagcaccggccgaatgttggcaggcaccggccccagcacactatccctgacgttttcatctggatggtcagcaacaacaggagagtggcctatgcccgcatcgcctccgaagggggcttttatagccccaaggggggcctccaacccgagtggcccctcttgttttttgttccctacccctgggggtggtaaggtgatgcacttcaaaaagcctttacagataaagaggaattacttaagcagcaggcatctaaccttcatgagcagaaaaaagctggggtgatatttgaagctgaagaagttatcactcttttaacttctgtgcttaaaacgtcatctgcatcaagaactagtttaagctcacgacatcagtttgctcctggagcgacagtattgtataagggcgataaaatggtgcttaacctggacaggtctcgtgttccaactgagtgtatagaagaaattgaggccattcttaaggaacttgaaaagcccgcacctggacccccactaccaagacgtgattgactcgcgtgacgtgatcgcccgtattgaggagttgcaggggtaccgagctcgaattcgtaatcatggtcatagctgtttcctgtgtgaaattgttatccgctcacaattccacacaacatacgagccggaagcataagttcgacgccaacgatccgatcctgaaagatcagacgcaagaatggtccggttctgcaacctttacatcggggatcctntagccatgaacagcaaggtgctggtcgacctgcgcttgtgctctccgttcaagcctttaatcaactgggaatgacgctggtggcccccattacgcagggcggaaattttgcccgttatgccggatttagcgttcctttacattgcgaagaaggcgatgtgcacggcgtggtgctggtgaatcaggtgcggatgatggatctacacgcccggctggcaaagcgtattggtctggctgcggatgaggtggtggaagaggcgttattacgcttgcaggcggtggtggaataacggtaactgatgaaatcgagcgcgcgaatgttttcaaaatgaacggcaaatggtacttgttcactgattcacgcggttcaaaaatgacgatcgatggtattaactcaaacgatatttacatgcttggttatgtatcaaactctttaaccggcccttacaagccgctgaacaaaacagggcttgtgctgcaaatgggtcttgatccaaacgatgtgacattcacttactctcacttcgcagtgccgcaagccaaaggcaacaatgtggttatcacaagctacatgacaaacagaggcttcttcgaggataaaaagggcaacatttgcgccaagcttcttaatgaacatcaaaggcaataatcgtgaattgccctttctcctggagtccactatgaatgaatacattgagcagcgaaagccatgtgacacgatgaaagtgggaggaaatctggattccaaaggctatggagtagcaacgcccaagggttcctcattaagctttatctgttcgggcaatacgatgcccattgtacttgttgactggtctgatatccgtgagcaaaaacggcttatggtattgcgagcttcagtcgcactacacggtcgttctgttactctttatgagaaagcgttcccgctttcagagcaatgttcaaagaaagctcatgaccaatttctagccgaccttgcgagcattctaccgagtaacaccacaccgctcattgtcagtgatgctggctttaaagtgccatggtataaatccgttgagaagctggaaaacatctttaatgcacgctaacacaaagaatggcaaaaatagaagcacgggtagtcatctaagacgacacgcaccgacgaccaacaatgacctagccaaataatcctccctaactcattttatgaggccagcatcatcctgataccaaagccgggcagagacacaaccaaaaaagagaattttagaccaatatccttgatgaacattgatgcaaaaatcctcaataaaatactggcaaaccgaatccagcagcacatcaaaaagcttatctgccatgatcaagtgggcttcatccctgggatgcaaggctggttcaatatacgcaaatcaataaatgtaatccagcatataaacataaacagaaccaaaaataaaaaccacatgattatctcaatagatgcagaaaaggcctttgacaaaattcaacagctcttcatgctaaaaactctcaataaattaggtattgatgggatgtatctcaaaataataagagctatctatgacaaacacacagccaatatcatactgaatgggcaaaaactggaagcattccctttgaaaactggcacaagacagggatgccctctctcaccactcctattcaacatagtgttggaagttctggccagggcaattaggcaggagaaggaaataaagggtattcaattaggaaaagaggaagtcaaattgtccctgtttgcagacgacatgattgtatatctagaaaaccccattgtctcagctcaaaatctccttaagctgataaacaacagtgaagtctcaggatacaaaatcaatgtacaaaaatcacaagcattcttataccccaataacagacaaacagagagccaaatcatgagtgaactcccattcacaattgcttcaaagagaataaaatacttaggaatccaacttacaagggacgtgaaggacctcttcaaggagaactttaagtgtgtatttttaatataa

SEQ ID NO: 27209 - DNA, 9591 bp, Homo sapiens
  SIMILAR (280)..(8892): 1001254mologous to Homo sapiens dJ512B11.1 (Desmoplakin I (DPI)),accession number AL031058,Smith-Waterman Score=14578.
ccgaccaacaccaacacccagctccgacgcagctcctctgcgcccttgccgccctccgagccacagctttcctcccgctcctgcccccggcccgtcgccgtctccgcgctcgcagcggcctcgggagggcccaggtagcgagcagcgacctcgcgagccttccgcactcccgcccggttccccggccgtccgcctatccttggccccctccgctttctccgcgccggcccgcctcgcttatgcctcggcgctgagccgctctcccgattgcccgccgacatgagctgcaacggaggctcccacccgcggatcaacactctgggccgcatgatccgcgccgagtctggcccggacctgcgctacgaggtgaccagcggcggcgggggcaccagcaggatgtactattctcggcgcggcgtgatcaccgaccagaactcggacggctactgtcaaaccggcacgatgtccaggcaccagaaccagaacaccatccaggagctgctgcagaactgctccgactgcttgatgcgagcagagctcatcgtgcagcctgaattgaagtatggagatggaatacaactgactcggagtcgagaattggatgagtgttttgcccaggccaatgaccaaatggaaatcctcgacagcttgatcagagagatgcggcagatgggccagccctgtgatgcttaccagaaaaggcttcttcagctccaagagcaaatgcgagccctttataaagccatcagtgtccctcgagtccgcagggccagctccaagggtggtggaggctacacttgtcagagtggctctggctgggatgagttcaccaaacatgtcaccagtgaatgtttggggtggatgaggcagcaaagggcggagatggacatggtggcctggggtgtggacctggcctcagtggagcagcacattaacagccaccggggcatccacaactccatcggcgactatcgctggcagctggacaaaatcaaagccgacctgcgcgagaaatctgctatctaccagttggaggaggagtatgaaaacctgctgaaagcgtcctttgagaggatggatcacctgcgacagctgcagaacatcattcaggccacgtccagggagatcatgtggatcaatgactgcgaggaggaggagctgctgtacgactggagcgacaagaacaccaacatcgctcagaaacaggaggccttctccatacgcatgagtcaactggaagttaaagaaaaagagctcaataagctgaaacaagaaagtgaccaacttgtcctcaatcagcatccagcttcagacaaaattgaggcctatatggacactctgcagacgcagtggagttggattcttcagatcaccaagtgcattgatgttcatctgaaagaaaatgctgcctactttcagttttttgaagaggcgcagtctactgaagcatacctgaaggggctccaggactccatcaggaagaagtacccctgcgacaagaacatgcccctgcagcacctgctggaacagatcaaggagctggagaaagaacgagagaaaatccttgaatacaagcgtcaggtgcagaacttggtaaacaagtctaagaagattgtacagctgaagcctcgtaacccagactacagaagcaataaacccattattctcagagctctctgtgactacaaacaagatcagaaaatcgtgcataagggggatgagtgtatcctgaaggacaacaacgagcgcagcaagtggtacgtgacgggcccgggaggcgttgacatgcttgttccctctgtggggctgatcatccctcctccgaacccactggccgtggacctctcttgcaagattgagcagtactacgaagccatcttggctctgtggaaccagctctacatcaacatgaagagcctggtgtcctggcactactgcatgattgacatagagaagatcagggccatgacaatcgccaagctgaaaacaatgcggcaggaagattacatgaagacgatagccgaccttgagttacattaccaagagttcatcagaaatagccaaggctcagagatgtttggagatgatgacaagcggaaaatacagtctcagttcaccgatgcccagaagcattaccagaccctggtcattcagctccctggctatccccagcaccagacagtgaccacaactgaaatcactcatcatggaacctgccaagatgtcaaccataataaagtaattgaaaccaacagagaaaatgacaagcaagaaacatggatgctgatggagctgcagaagattcgcaggcagatagagcactgcgagggcaggatgactctcaaaaacctccctctagcagaccagggatcttctcaccacatcacagtgaaaattaacgagcttaagagtgtgcagaatgattcacaagcaattgctgaggttctcaaccagcttaaagatatgcttgccaacttcagaggttctgaaaagtactgctatttacagaatgaagtatttggactatttcagaaactggaaaatatcaatggtgttacagatggctacttaaatagcttatgcacagtaagggcactgctccaggctattctccaaacagaagacatgttaaaggtttatgaagccaggctcactgaggaggaaactgtctgcctggacctggataaagtggaagcttaccgctgtggactgaagaaaataaaaaatgacttgaacttgaagaagtcgttgttggccactatgaagacagaactacagaaagcccagcagatccactctcagacttcacagcagtatccactttatgatctggacttgggcaagttcggtgaaaaagtcacacagctgacagaccgctggcaaaggatagataaacagatcgactttaggttatgggacctggagaaacaaatcaagcaattgaggaattatcgtgataactatcaggctttctgcaagtggctctatgatgctaaacgccgccaggattccttagaatccatgaaatttggagattccaacacagtcatgcggtttttgaatgagcagaagaacttgcacagtgaaatatctggcaaacgagacaaatcagaggaagtacaaaaaattgctgaactttgcgccaattcaattaaggattatgagctccagctggcctcatacacctcaggactggaaactctgctgaacatacctatcaagaggaccatgattcagtccccttctggggtgattctgcaagaggctgcagatgttcatgctcggtacattgaactacttacaagatctggagactattacaggttcttaagtgagatgctgaagagtttggaagatctgaagctgaaaaataccaagatcgaagttttggaagaggagctcagactggcccgagatgccaactcggaaaactgtaataagaacaaattcctggatcagaacctgcagaaataccaggcagagtgttcccagttcaaagcgaagcttgcgagcctggaggagctgaagagacaggctgagctggatgggaagtcggctaagcaaaatctagacaagtgctacggccaaataaaagaactcaatgagaagatcacccgactgacttatgagattgaagatgaaaagagaagaagaaaatctgtggaagacagatttgaccaacagaagaatgactatgaccaactgcagaaagcaaggcaatgtgaaaaggagaaccttggttggcagaaattagagtctgagaaagccatcaaggagaaggagtacgagattgaaaggttgagggttctactgcaggaagaaggcacccggaagagagaatatgaaaatgagctggcaaaggtaagaaaccactataatgaggagatgagtaatttaaggaacaagtatgaaacagagattaacattacgaagaccaccatcaaggagatatccatgcaaaaagaggatgattccaaaaatcttagaaaccagcttgatagactttcaagggaaaatcgagatctgaaggatgaaattgtcaggctcaatgacagcatcttgcaggccactgagcagcgaaggcgagctgaagaaaacgcccttcagcaaaaggcctgtggctctgagataatgcagaagaagcagcatctggagatagaactgaagcaggtcatgcagcagcgctctgaggacaatgcccggcacaagcagtccctggaggaggctgccaagaccattcaggacaaaaataaggagatcgagagactcaaagctgagtttcaggaggaggccaagcgccgctgggaatatgaaaatgaactgagtaaggtaagaaacaattatgatgaggagatcattagcttaaaaaatcagtttgagaccgagatcaacatcaccaagaccaccatccaccagctcaccatgcagaaggaagaggataccagtggctaccgggctcagatagacaatctcacccgagaaaacaggagcttatctgaagaaataaagaggctgaagaacactctaacccagaccacagagaatctcaggagggtggaagaagacatccaacagcaaaaggccactggctctgaggtgtctcagaggaaacagcagctggaggttgagctgagacaagtcactcagatgcgaacagaggagagcgtaagatataagcaatctcttgatgatgctgccaaaaccatccaggataaaaacaaggagatagaaaggttaaaacaactgatcgacaaagaaacaaatgaccggaaatgcctggaagatgaaaacgcgagattacaaagggtccagtatgacctgcagaaagcaaacagtagtgcgacggagacaataaacaaactgaaggttcaggagcaagaactgacacgcctgaggatcgactatgaaagggtttcccaggagaggactgtgaaggaccaggatatcacgcggttccagaactctctgaaagagctgcagctgcagaagcagaaggtggaagaggagctgaatcggctgaagaggaccgcgtcagaagactcctgcaagaggaagaagctggaggaagagctggaaggcatgaggaggtcgctgaaggagcaagccatcaaaatcaccaacctgacccagcagctggagcaggcatccattgttaagaagaggagtgaggatgacctccggcagcagagggacgtgctggatggccacctgagggaaaagcagaggacccaggaagagctgaggaggctctcttctgaggtcgaggccctgaggcggcagttactccaggaacaggaaagtgtcaaacaagctcacttgaggaatgagcatttccagaaggcgatagaagataaaagcagaagcttaaatgaaagcaaaatagaaattgagaggctgcagtctctcacagagaacctgaccaaggagcacttgatgttagaagaagaactgcggaacctgaggctggagtacgatgacctgaggagaggacgaagcgaagcggacagtgataaaaatgcaaccatcttggaactaaggagccagctgcagatcagcaacaaccggaccctggaactgcaggggctgattaatgatttacagagagagagggaaaatttgagacaggaaattgagaaattccaaaagcaggctttagaggcatctaataggattcaggaatcaaagaatcagtgtactcaggtggtacaggaaagagagagccttctggtgaaaatcaaagtcctggagcaagacaaggcaaggctgcagaggctggaggatgagctgaatcgtgcaaaatcaactctagaggcagaaaccagggtgaaacagcgcctggagtgtgagaaacagcaaattcagaatgacctgaatcagtggaagactcaatattcccgcaaggaggaggctattaggaagatagaatcggaaagagaaaagagtgagagagagaagaacagtcttaggagtgagatcgaaagactccaagcagagatcaagagaattgaagagaggtgcaggcgtaagctggaggattctaccagggagacacagtcacagttagaaacagaacgctcccgatatcagagggagattgataaactcagacagcgcccatatgggtcccatcgagagacccagactgagtgtgagtggaccgttgacacctccaagctggtgtttgatgggctgaggaagaaggtgacagcaatgcagctctatgagtgtcagctgatcgacaaaacaaccttggacaaactattgaaggggaagaagtcagtggaagaagttgcttctgaaatccagccattccttcggggtgcaggatctatcgctggagcatctgcttctcctaaggaaaaatactctttggtagaggccaagagaaagaaattaatcagcccagaatccacagtcatgcttctggaggcccaggcagctacaggtggtataattgatccccatcggaatgagaagctgactgtcgacagtgccatagctcgggacctcattgacttcgatgaccgtcagcagatatatgcagcagaaaaagctatcactggttttgatgatccattttcaggcaagacagtatctgtttcagaagccatcaagaaaaatttgattgatagagaaaccggaatgcgcctgctggaagcccagattgcttcagggggtgtagtagaccctgtgaacagtgtctttttgccaaaagatgtcgccttggcccgggggctgattgatagagatttgtatcgatccctgaatgatccccgagatagtcagaaaaactttgtggatccagtcaccaaaaagaaggtcagttacgtgcagctgaaggaacggtgcagaatcgaaccacatactggtctgctcttgctttcagtacagaagagaagcatgtccttccaaggaatcagacaacctgtgaccgtcactgagctagtagattctggtatattgagaccgtccactgtcaatgaactggaatctggtcagatttcttatgacgaggttggtgagagaattaaggacttcctccagggttcaagctgcatagcaggcatatacaatgagaccacaaaacagaagcttggcatttatgaggccatgaaaattggcttagtccgacctggtactgctctggagttgctggaagcccaagcagctactggctttatagtggatcctgttagcaacttgaggttaccagtggaggaagcctacaagagaggtctggtgggcattgagttcaaagagaagctcctgtctgcagaacgagctgtcactgggtataatgatcctgaaacaggaaacatcatctctttgttccaagccatgaataaggaactcatcgaaaagggccacggtattcgcttattagaagcacagatcgcaaccggggggatcattgacccaaaggagagccatcgtttaccagttgacatagcatataagaggggctatttcaatgaggaactcagtgagattctctcagatccaagtgatgataccaaaggattttttgaccccaacactgaagaaaatcttacctatctgcaactaaaagaaagatgcattaaggatgaggaaacagggctctgtcttctgcctctgaaagaaaagaagaaacaggtgcagacatcacaaaagaataccctcaggaagcgtagagtggtcatagttgacccagaaaccaataaagaaatgtctgttcaggaggcctacaagaagggcctaattgattatgaaaccttcaaagaactgtgtgagcaggaatgtgaatgggaagaaataaccatcacgggatcagatggctccaccagggtggtcctggtagatagaaagacaggcagtcagtatgatattcaagatgctattgacaagggccttgttgacaggaagttctttgatcagtaccgatccggcagcctcagcctcactcaatttgctgacatgatctccttgaaaaatggtgtcggcaccagcagcagcatgggcagtggtgtcagcgatgatgtttttagcagctcccgacatgaatcagtaagtaagatttccaccatatccagcgtcaggaatttaaccataaggagcagctctttttcagacaccctggaagaatcgagccccattgcagccatctttgacacagaaaacctggagaaaatctccattacagaaggtatagagcggggcatcgttgacagcatcacgggtcagaggcttctggaggctcaggcctgcacaggtggcatcatccacccaaccacgggccagaagctgtcacttcaggacgcagtctcccagggtgtgattgaccaagacatggccaccaggctgaagcctgctcagaaagccttcataggcttcgagggtgtgaagggaaagaagaagatgtcagcagcagaggcagtgaaagaaaaatggctcccgtatgaggctggccagcgcttcctggagttccagtacctcacgggaggtcttgttgacccggaagtgcatgggaggataagcaccgaagaagccatccggaaggggttcatagatggccgcgccgcacagaggctgcaagacaccagcagctatgccaaaatcctgacctgccccaaaaccaaattaaaaatatcctataaggatgccataaatcgctccatggtagaagatatcactgggctgcgccttctggaagccgcctccgtgtcgtccaagggcttacccagcccttacaacatgtcttcggctccggggtcccgctccggctcccgctcgggatctcgctccggatctcgctccgggtcccgcagtgggtcccggagaggaagctttgacgccacagggaattcttcctactcttattcctactcatttagcagtagttctattgggcactagtagtcagttgggagtggttgctataccttgacttcatttatatgaatttccactttattaaataatagaaaagaaaatcccggtgcttgcagtagagtgataggacattctatgcttacagaaaatatagccatgattgaaatcaaatagtaaaggctgttctggctttttatcttcttagctcatcttaaataagcagtacacttggatgcagtgcgtctgaagtgctaatcagttgtaacaatagcacaaatcgaacttaggatttgtttcttctcttctgtgtttcgatttttgatcaattctttaattttggaagcctataatacagttttctattcttggagataaaaattaaatggatcactgatattttagtcattctgcttctcatctaaatatttccatattctgtattaggagaaaattaccctcccagcaccagcccccctctcaaacccccaacccaaaaccaagcattttggaatgagtctcctttagtttcagagtgtggattgtataacccatatactcttcgatgtacttgtttggtttggtattaatttgactgtgcatgacagcggcaatcttttctttggtcaaagttttctgtttattttgcttgtcatattcgatgtactttaaggtgtctttatgaagtttgctattctggcaataaacttttagacttttgaa

SEQ ID NO: 27210 - DNA, 2595 bp, Homo sapiens
  SIMILAR (1263)..(1343): 221254mologous to Mus musculus FYVE finger-containing phosphoinositide kinase,accession number AF102777,Smith-Waterman Score=41.
atggccgggctgggggcgtcgctccacgtctggggttggctaatgctcggcagctgcctcctggccagagcccaggtaagagccagtgctccgcgacacctgttttcgcggagcctccggcggggactcagctttagcgacacggaggccaggtgcgcgcgagagctcattcatgttcacacgtccacaaacgccccggcacgcaccgaggcgtacccggcaggcagcgcggaaccccctaggcgaccccgcgctggccgggagcactctttcttcagccaaaggtacgttccattaccgcccctcgggggcgcgctaggcagcgggccggccaagctgccgccgcccagggcgccctgtcccgttcgcttttgtgccgacctggaaacactctgtggtgctctagattgttacaaagttcggggtggtgcagccccagcgcgccccgctccccggcctgcaggtggcatacaagtctcttcgctgtcgggattcgggactgaatctctgccgggcggcaaccccttcccccaccgggatcaccgggaaagtggcaccatggattctccatctttgactgtggccacgcccctctcgctgactccgcccatcccacgggaattggcgtgtggcgattggaggcgtgtcgggggcggggctgggggaggtgggctgaggaggcggggcctgggaggggacaaagccgggaagaggaaaagctcggacctaccctgtggtcccgggtttctgcagagtctacttcagaagcggaggcactgggagtccggtttgggattgccaggctgtggttgtgagtctgagcttgtgagcggctgtggcgccccaactcttcgccagcatatcatcccggcagaaggcaggaatggggtaaaggaaaaaagcgcagatcttgggtgtggagggagtcaaggcctgcgtgcaaagaagggaacaaatccaggtattgagaatgggaaaagaaaagggaaggaggggatgctggatgcttggatatgcagaaggtctgcttttgggcctgggagggagaaactgggcggtgaggaagttggatgcaacgacaaggggaaaatcaggtttattgaagtcaaaatgtccaaaaaaatcagtggcggttctgtggtagagatgcaaggagatgaaatgacacgaatcatttgggaattgattaaagagaaactcatttttccctacgtggaattggatctacatagctatgatttaggcatagagaatcgtgatgcaccaacgaccaagtcaccaaggatgctgcagaggctgataagaagcataatgtttggcgtcaaatgtgccactatcactcctgatgagaagagggttgaggagttcaagttgaaacaaatgtggaaatcaccaaatggcaccatacgaaatattctgggtggcacggtcttcagagaagccattatctgcaaaaatatcccccggcttgtgagtggatgggtaaaacctatcatcataggtcgtcatgcttatggggatcaaggatttggatctaacatgcaaaatgccatcatgaagaaacttaagtggttgcatttggccagggtagggaaattttcagatgctaatgccaagttttactgtcggctctactatgcgggagagtttcataagatgcgtgaagtgattctggacagcagtgaagaagatttcattcgttccctctcccactcatcaccctggcaggcccggggaggcaaatcaggagctgccttctatgcaactgaggatgatagatttattttgaagcaaatgcctcgtctggaagtccagtccttcctcgactttgcaccacattacttcaattatattacaaatgctgttcaacaaaagaggcccacggcgttggccaaaattcttggagtttacagaattggttataagaactctcagaacaacactgagaagaagttagatctccttgtcatggaaaatcttttctacgggagaaagatggcacaggtttttgatttgaagggctctcttaggaatcggaatgtaaaaactgacactggaaaagagagttgtgatgtggtcctgctagatgaaaatctcctaaagatggttcgagacaaccctctatatattcgttctcattccaaagctgtgctgagaacctcgatccatagtgactcccatttcctttctagccacctcattatagattattctttgctggttgggcgagatgatactagcaatgagctagtagttggaattatagattatattcgaacatttacatgggacaaaaagcttgagatggttgtgaaatcaacaggaattttaggtggacaagttttgaatctgcttgaagaaattgacaacaaaaggaaatggagtttgtcctgcaagcctagtctttgtgttactggtggagggtgtccaggttcttggcgttttgaacaaagaattggacaaaacacaaaaagcaaggaaagaatgaagcaacaaaagcagagatttattgaaaacgaaagtacattccacagagtaggagcccaggagcactggggcacaacagctcccgttacagaactttctggggtttaa

SEQ ID NO: 27211 - DNA, 2140 bp, Homo sapiens
  SIMILAR (1898)..(2107): 781254mologous to Homo sapiens laminin-binding protein,accession number J03799,Smith-Waterman Score=291.
gactgaagctgggaaggtgactattgggatcgatgaacacttggctgagttggaccagctgcagcagcctcagctgggggcaggggtaagggagttaacagggatgaacaagcctagcaaggtcaaggttgaagttctccaaggttgcctttgggtgaaaagctctcttgatcaagaaattgtggaacaccttataatgagcaaccaggaaaaagcatgtgttcctgatgtctgtgagcaccagtctgagatgcgcggatgcttcagcatgcctccagaagcagagaaagaacaaaagcactggaaccggtctccggttgttcctctacctgtgatttccttccccatctgtagacattctcatcccacaagccccagctccaatgcagcttccctctctgaagcttcttgggattctagctatctccccaggaaaataccactccatggcagacccatatatccaaatcgtagagaacgagaagctatgattttatcatcttatgctggaatcttaatgaacagtatcccgattgaggaagtctttaaaatttatggggctgattcttctgccgattctggtaccatcaaggcagcgcggaaccccctaggcgaccccgcgctggccgggagcactctttcttcagccaaaggtacgttccattaccgcccctcggggcgcgctaggcagcgggccggccaagctgcgccgcccagggcgccctgtcccgttcgcttttgtgccgacctggaaacactctgtggtgctctagattgttacaaagttcggggtggtgcagccccagcgcgccccgctccccggcctgcaggtggcatacaagtctcttcgctgtcgggattcgggactgaatctctgccgggcggcaaccccttcccccaccgggatcaccgggaaagtggcaccatggattctccatctttgactgtggccacgcccctctcgctgactccgcccatcccacgggaattggcgtgtggcgattggaggcgtgtcgggggcggggctgggggaggtgggctgaggaggcggggcctgggaggggacaaagccgggaagaggaaaagctcggacctaccctgtggtcccgggtttctgcagagtctacttcagaagcggaggcactgggagtccggtttgggattgccaggctgtggttgtgagtctgagcttgtgagcggctgtggcgccccaactcttcgccagcatatcatcccggcagaaggcaggaatggggtaaaggaaaaaagcgcagatcttgggtgtggagggagtcaaggcctgcgtgcaaagaagggaacaaatccaggtattgagaatgggaaaagaaaagggaaggaggggatgctggatgcttggatatgcagaaggtctgcttttgggcctgggagggagaaactgggcggtgaggaagttggatgcaacgacaaggggaaaatcaggtttattgaagtcaaaatgtccaaaaaaatcagtggcggttctgtggtagagatgcaaggagatgaaatgacacgaatcatttgggaattgattaaagagaaactcatttttccctacgtggaattggatctacatagagaagccattatctgcaaaaatatcccccggcttgtgagtggatgggtaaaacctatcatcataggtcgtcatgcttatggggatcaatacattacaaaaggaaaagtgaccatcatcaatctgaagaggacccgggagaagtttctgctggcagctcgtgccattgaaaacccctctgaggtcaatgtcatgtcctctaggaacactggccagggggctgtgctgaaggttgctgctgtcatgggagccactcttattgctggtagcttcactcctagaaccttcactcaccagatccgagatcctggagagattgaaaaagaagagcaggccacagctggaaaagctgagacccaggaggaatttcagggtgaatggactgctccaactcctgagttcgctgctactgagcctgaggttgcagactggcctgaagttgcgcaggtgccctctgggcctattcagcaggtccccactgaagactggagcactcagcctgccgctgaaactggtctgcagctcccgtgctcaggccagtga

SEQ ID NO: 27212 - DNA, 2358 bp, Homo sapiens
  SIMILAR (1633)..(2250): 931254mologous to Homo sapiens NADP+-dependent isocitrate dehydrogenase,accession number AF113917,Smith-Waterman Score=992.
atgcggccggcgctctgcgatccaaggcacactggggtctttcatccggtgtttttaaaaaggaggaaacaaaaggctcagaggcagggccccaggggccaacctgtccccgcacgcgtcaggacacccggtcctgctcccagcgcggccgggaagttctttcgggacctggggcaaaaaaacctttccaccttcgggacccgagtctcccagtcgtccagaggaggacggtccctccctgtcccgcgagccccgcagcccgcgctctccgggcagcgcaggtccgggccagactcggcgcggatcatgcggcccagagtgttgatccgcgggtgggagcctccgttgcagctcatgtcggcgggcaatcgggagagcggctcagcgccgaggcataagcgaggcgggccggcgcggagaaagcggagggggccaaggataggcggacggccggggaaccgggcgggagtgcggaaggctcgcgaggtcgctgctcgctacctgggccctcccgaggccgctgcgagcgcggagacggcgacgggccgggggcaggagcgggaggaaagctgtggctcggagggcggcaagggcgcagaggagctgcgtcggagctgggtgttggtgttggaagaagttatagcacagttccacagcagtttcatcaaacccgtgaagcagttctgtcttgcaaaggtgggtgtggagcggcacacttcactctcgttaaacctgtccgacggctccttgagttttaactgcttagcagtttggcttcaggtggaaatgaacaaagcaactcggagtcctttcccaccaaggcacacagaagaaacatcaccatcatctctaaacagtcaagtgaaattgaagggggcagaggaggtctccgtgcaccgtggaggggaagggaagtatccgcgggacgtggaggagggaggggagatctccatggaggctggagggggaagggaggtgaccacagctctgcttcctcctcagggaaggggagtggcccagtgtggctccaaccaccaggcttcacctgtgccctcggccccaccacaggcagagcctgttgctggacttccagttcacttttgttcaggcaagtttattaaactcaaaatgtctaaaaaaatcagtggcggttctgtggtagagatgcaaggagatgaaatgacacaaatcatttgggaattgaataaagagaaactcatttttccctatgtggaactggatgtacatagctatgatttaggcatagagtactgtgatgccaccaacgaccaggtcaccaaggatgctgcagaagctataaagaagtataacgttggtgtcaagtgtgccactatcactgctgatgagaaaagggttgaggagttcaagttgaaacaaatgtggaaatcgccaaatggcaccatccaaaatattctggttggcacggtcctcagagaagccattatctgcaaaaatatcccccagcttgtgagtggatgggtaaaatccatcatcgtaggtcgcattgcttatggggatcaatacagagcagctgattttgttgttcctgggcctggaaaagtagagataacctacacactaagtgacagaacccaaaaggtgacatacctgctgagcaccaaaaacactattctgaagaaatatgatggacgttttaaagacatctttcaggagatatatgacaagcagtacaagtcccagtttgaagcccaaaagatctggtatgagcataggctcgctgatgacatggtggcccaagctatgaaatcagaaggaggcttcatctgggcctgtaaaaactatgatggtgacatgcagtcagactctgtggcccaagggtatggctctcttggcatgatgaccagcatgctagtgtgtccacatggcaagacagtagaagcagaggctgcccactggactgtaacccgtcacttctgcatgtaccagaaaggccaggagatatccaccaatcccattgcttccatttttgcctggaccagagggttggccctccgagcaaagactgataacaataaagagcttgccttttttgcaaatgctttggaagaagtctgtattgagacaattgaggctggtttcatgaccaaggacttggctgcttgcattaaaggtttacccagtgcgcaatgttctgactacttgaatacttttgagttcatggacaaacttggagaaaacttgaagatcaaactggctcaggccaaactttacgttcatacctgggctgaggaggataagtgtcttttgataactaggtctacaggttttcatttttctgtgtcacactcaaggataaaggcaaaatcgattgtgtaa

SEQ ID NO: 27213 - DNA, 2417 bp, Homo sapiens
  SIMILAR (790)..(1332): 661254mologous to Homo sapiens NADP+-dependent isocitrate dehydrogenase,accession number AF113917,Smith-Waterman Score=550.
ctactgatagaccttcacgaattcggcacgaggaaaagctcggacctaccctgtggtcccgggtttctgcagagtctacttcagaagcggaggcactgggtattccggtttgggattgccaggctgtggttgtgagtctgagcttgtgagcggctgtggcgccccaactcttcgccagcatatcatcccggcaggcgataaactacattcagttgagtctgcaagactgggaggaactggggtgataagaaatctattcactgtcaaggtttattgaagtcaaaatgtccaaaaaaatcagtggcggttctgtggtagagatgcaaggagatgaaatgacacgaatcatttgggaattgattaaagagaaactcatttttccctacgtggaattggatctacatagctatgatttaggcatagagaatcgtgatgccaccaacgaccaagtcaccaaggatgctgcagaagctataaagaagcataatgttggcgtcaaatgtgccactatcactcctgatgagaagagggttgaggagttcaagttgaaacaaatgtggaaatcaccaaatggcaccatacgaaatattctgggtggcacggtcttcagagaagccattatctgcaaaaatatcccccggcttgtgagtggatgggtaaaacctatcatcataggtcgtcatgcttatggggatcaatacagagcaactgattttgttgttcctgggcctggaaaagtagagataacctacacaccaagtgacggaacccaaaaggtgacatacctgggtacataactttgaagaaggtggtggtgttgccatggggatgtataatcaagataagtcaattgaagattttgcacacagttccttccaaatggctctgtctaagggttggcctttgtatctgagcaccaaaaacactattctgaagaaatatgatgggcgttttaaagacatctttcaggagatgtgatgacaagcagtacaagtcccagtttgaagctcaaaagatctggtatgagcataggctccatcgacggacatggtggcccaagctatgaaatcagagggaggcttcatctgggcctgtaaaaactatgatggtgacgtgcagtcggactctgtggcccaagggtatggctctctcggcatgatgaccagcgtgctggttttgtccagatggcaagacagtagaagcatgaggctgcccacgggactgtaacccgtcactaccgcatgtaccaggaaaggacagggagacgtccacccaatcccattggcttccatttttgcctgggggccagagggtttaggcccacagagcaaagcttgataacaataaagagcttgccttctttgcaaatgctttggaagaaagcttttatgaaacacatgagggctggcttcatgaccaaggacttggctgcttgcattaaaggtttacccaatgtgcaacgttctgactacttgaatacatttgagttcaatggataaacttggagaaaacttgaagatcaaactagctcaggccaaactttaagttcatacctgagctaagaaggataattgtcttttggtaactaggtctacaggtttacatttttctgtgttacactcaaggataaaggcaaaatcaattttgtaatttgtttagaagccagagtttatcttttctataagtttacagcctttttcttatatatacagttattgccacctttggtgaacatggcaagggactttttttacaattttttatgtttagttgtctagtaacccagcctagggaattcgggtagtactcatttgtattcactgtcactttttctcatgttctaattataaatgaccaaaatcaagattgctgcaaagggtgaaatgatagccacagtattgctccctaaaatatgcataaagtagaaattcactggcctttcccctcctggtccatgaccttgggcacagggaagttctggtgtcatagatatcccgttttgtgaggtagagctgtgcattaaacttgcacatgactggaacgaagtatgagtgcaactcaaatgtgttgaagatactgcagtcatttttgtaaagaccttgctgaatgtttccaatagactaaatactgtttaggccgcaggagagtttggaatccggaataaatactacctggagtcttgtcctctccatttttctctttctcctcctggcctggcctgaatattatactactctaaatagcatatttcatccaagtgcaataatgtaagctgaatcttttttggacttctgctggcctgttttatttcttttatataaatgtgatttctcagaaattgatattaaacactatcttatcttctcctgaactgttgattttaattaaaattaagtgctaattaccaaaaaaaaaaa

SEQ ID NO: 27214 - DNA, 692 bp, Homo sapiens; identical to SEQ ID NO: 4737
  SIMILAR (319)..(444): 1001254mologous to Arabidopsis thaliana putative protein,accession number AL162506,Smith-Waterman Score=211.

SEQ ID NO: 27215 - DNA, 2152 bp, Homo sapiens
  SIMILAR (413)..(2149): 661254mologous to Homo sapiens homologous to mouse gene PC326:GenBank Accession Number M95564,accession number U06631,Smith -Waterman Score=2024.
atgcagaagggcaggtcgcggggagtgtttttgggctctcaccccacaacggcgtctaaggttgaggttttacattttacagctcccgaagcaccagtggagtacattaccttcaagcaaaacactgagaggcttctaaaaactattttgcttaaggaggatcacttttgctcatggttctctaataagaacattttccaaggtgcagcaagtttcgatcttcaaaaacccgcagctactcacagtgtaagatgcctgtcggggtggggctctgggcctggaaaaactagagcagtctggatgctgcgaggcggcgagcagcccagaggagcagtctggagccgtggcggcgacagaggcctcctcagacattgacatagcgacctcagagctgagtgtgacagtgaccggagatggcagtgatagcagggatggtggattccccaacgatgccagcacagaaaatcgaagctcagaccaagaaagcgcaagtgaagacatcgaacttgagagcttggaggactttgagcatttcctcatgagtggtgaaagtttattccattaccctttagtgggagaggaggagacagaaagggaggaggaagacgaagagatacaagaggagggaggggaggaggaggaagaggaggaggaggaggaggaggaggaggaggaggaggaggaggaggaagaagaacagcctcgggcgggtccacaaggcagtggcggcaaccatgagcagtattcgttagaggaggatcaggcgctggaggagtgggtttcctcagagacatctgccctgccccgacctcgctggcaggtcgttactgctcttcaccagcggcagctgggttcacgtccccgctttgtatatgaggcctgtggggcaagagcctttgtgcagcgtttccgcctgcaatatcgtcttgcagaccatgtcggctgtgtcaatactgtacactttaaccagcgtggcacccggctggccagtagcggtgatgacctaaaggtgatagtgtgggactgggtgcggcagaggccagtactgaactttgaaagtggtcacacaaataatgtcttccaggccaagttccttcctaactgtggtgattccactctggccatgtgtgcccgtgatgggcaggtacgggtagcagagttaattaatgcatcatatttcaacaatactaagtgtgtggcccagcacaggggacctgcccacaagttggctctggagcctgactctccttataagttcctcacttcaggtgaagatgctgttgtcttcaccattgacctcagacaagaccggccagcttcaaaagttgtggtaacaagagaaaatgataagaaagtgggactgtatacaattactgtgaatcccgccaatacctaccaatttgcagtgggtggacaagatcagtttgtaaggatttatgaccagaggaaaattgataagaaagaaaacaatggcgtgctcaagaaattcactcctcatcatctggttaattgtgatttcccaacaaacatcacctgcgttgtgtacagccacgatggcacagagctgctagccagctacaatgatgacgatatttacctcttcaactcctctcacagtgatggtgctcaatacagtaagagatttaagggacacagaaataataccacagtcaaaggtgttaatttctatggccccaggagtgagtttgtagtgagcggtagtgattgcgggcacatcttcttctgggagaaatcatcctgccaaatcatccagttcctaaaggggagcagagaaggtacaataaactgtcttgaaccccacccttacctacctgtgttggcgtgcagtggcctagatcatgatgtcaagatctggacacccacagctaaagctgccactgagcttactgggttaaagaaggtgattaagaagaacaagtgggaacgagatgaagacagcttgcaccatggcagcctgtttgaccagtacatgctttggttcctcctgcgtcacgtgacgcagagaggtcgtcaccaggactggagaagtggtgaagctgaatttccagatgaagaatcggatgagtcttccagcacttcagagacatctgaggaggaggtccaagaccgagtgcagtgcatgccatcctga

SEQ ID NO: 27216 - DNA, 293 bp, Homo sapiens
  SIMILAR (38)..(130): 441254mologous to Mus musculus HMG-17 protein (AA 1 - 90),accession number X12944,Smith-Waterman Score=61.
  misc_feature (1)...(293): n = a,t,c or g
ctaaacctgctcctccaaagccagagcccaagcctaaaaaggcccctgcaaagaagggagagaaggtacccaaaggaaaaagagaaaagctgatgctggcaaggagcgggaaggtgctggagatcccaagtgaagtgtgtgcattttttataactgtacttctggtgactgtacagtttgaaaatattcttatcaagtttataaaattgcagattttggtttacctttttttaagcaatgtggttagacnccagaacacttcaatggtggtttttggggggaaggggtatntg

SEQ ID NO: 27217 - DNA, 947 bp, Homo sapiens
  SIMILAR (359)..(532): 931254mologous to Homo sapiens put. HMG-17 protein,accession number X13546,Smith-Waterman Score=277.
tcgtgcttgtccttgaaactaaagaacatcaaagaacaattccctttgcatccatgaattatggttagtgcctggttttgaatcattgcctctacttgggactcttgcccctatgggttttgctggttctgaaatttctgatgcctgtagccaaagtgggacatttgagtgggcttctggaaatccaacattctagaagaaaggcccaccccacaaaaacttttgaggaggaggagaaaacttctcctacccctggtaccttttggttggttgtgggtggttttccttccagtcccattgtacctgatgttccacctttttccctcctccttcctgcccaaaaaaagaaaccctgctccctcccaaagcccagagccccaagcctaaaaaggcccctgcaaagaagggagagaaggtacccaaagggaaaaagggaaaagctgatgctggcaaggaggggaataaccctgcagaaaatggagatgccaaaacagcccaggcacagaaagctgaaggtgctggagatgccaagtgaagttgtgtgcattttttgattaactgtgttacttctgggtgactgtacagtttgaaatactattttttatccaagttttattaaaaatgcagagttttgttttactttttttttttttttaaaagctatgtcgttagccccccagaacacttcattgttgtttttgggggggaagggggcatttggcactaatagaatgtctccaaagttgaattgatgtggaaaaaacacctttcccttctaagttttgagagacttcctcttggctcccaggaggagggattccctgactttgacacacatggccaccttggcacaaaaagccttgtggtatagaaaaacaaatttgtttttatgtcctcttctccctttccatctttcagcatagacttaactcccttaagcccagaca

SEQ ID NO: 27218 - DNA, 2253 bp, Homo sapiens
  SIMILAR (68)..(853): 951254mologous to Homo sapiens lysosomal-associated multitransmembrane protein,accession number U51240,Smith-Waterman Score=1263.
cacgcgtccggctccaggcaccaggctctttccccttcagtgtctcagaggaggcgacggcagcaccatggacccccgcttggccactgtccgccagacctgctgctgcttcaatgaccgcatcgcaaccaccgccctggccatctaccatgtgatcatgagcgtcttgttgttcatcgagcactcagtacaggtggcccatggcaaggcgtcctgcaagctctcccagatgggctacctcaggatcgctgacctgatctccagcttcctgctcatcaccatgctcttcatcatcagcctgagcctactgatcggcgtagtcaagaaccgggagaagtacctgctgcccttcctgtccctgcaaatcatggactatctcctgtgcctgctcaccctgctgggctcctacattgagctgcccgcctacctcaagttggcctcccggaaccgagctagctactgcaagttgcccctgatgacgctgcagctgctggacttttgcctgagcatcctgaccctctgcagctcctacatggaagtgcccacctatctcaacttcaagtccatgaaccacatgaattacctccccagccaggaggatatgcctcataaccagttcatcaagatgatgatcatcttttccatcgccttcatcactggccttatcttcaagggctacatgttcaagggcgtgtggcggtgctacagattgatcaagtgcatgaactcgggggaggagaagagaaactccaagatgctccagaaggtggtcctgccgtcctacaaggaagccctgtctttgccatcgaagtacccagaggggggcccagcaccacccccatactcagaggtgtgaccctcgccaggccccagccccagtgctgggaggggtggagctgcctcataatctgcttttttgctttggtggcccctgtggcctgggtgggccctcccgcccctccctggcaggacaatctgcttgtgtctccctcgctggcctgctcctcctgcagggcctgtgagctgctcacatttgtgttcaacgctttaggctgagtcactcctcgggtctctccataattcagcccaacaatgcttggtttatttcaatcagctctgagacttgttgtagacgattggccattctaaagttggtgagtttgtcaagcaactatcgacttgatcatacagacacaagcaactgtcaaataaaaaacccacttgtcagttcagtaaaataatttggtcaaacaacagtctattgcattgatttataaatagttgtcagttcacatagcaatttaatcaagtaatcattaattagttaccccctatatataaatatatgtaatcaatttcttcaaatagcttgcttacatgataatcaattagccaaccatgagtcatttagaatagtgataaatagaatacacagaatagtgatgaaattcaatttaaaaaatcacgttagcctccaaaccatttaattcaaatgaacccatcaactggatgccaactctggcgaatgtaggacctctgagtggctgtataattgttaattcaaatgaaattcatttaaacagttgacaaactgtcattcaacaattagctccaggaaataacagttatttcatcataaaacagtcccttcaaacacacaattgttctgctgaagagttgtcatcaacaatccaatgctcacctattcagttgctctgtgggtcagtgtgggcttgcatagcgttgggattccatgaaaggagtcattttagtggtggagctgcccagtccattccccaggccaggctgtcgctgggccatccattcagtcgattcagtcataggcgaattctgttctgcccgaggctttgtggtcaagcaaaaatttcagccctgaaaatcagggcacatctgttcgttgggacttaaacccacaggtttagtttcagttcaaaggcagggcaacccccttgtggggcactgaccctggccactgggggtgcatgggcggttgtggcagctggggaggttttgggccccaacagccctcctgtgcctgcttccctgtgtgtcggggtcctccagggagctgacccagaggtggaggccacggaggcagggtctctggggactgtcggggggtacagagggagaaggctctgcaaaagctccctggcaatacccccttgtgtaattgcttgtgtgtgcggcagggaggaagtttcaataaagcagcaacaagcttcaaaaaaa

SEQ ID NO: 27219 - DNA, 387 bp, Homo sapiens
  SIMILAR (202)..(324): 971254mologous to Homo sapiens fau,accession number X65923,Smith-Waterman Score=209.
  misc_feature (1)...(387): n = a,t,c or g
gcgcccaggagctacacaccttcgaggtgaccggccaggaaacggtcgcccagatcaaggctcatgtagcctcactggagggcattgccccggaagatcaagtcgtgctcctggcaggcgcgcccctggaggatgaggccactctgggccagtgcggggtggaggccctgactaccctggaagtagcaggccgcatgcttggaggtggccaaacaggagaagaagaagaagaagacaggtcgggctaagcggcggatgcagtacaaccggcgctttgtcaacgttgtgcccacctttggcaagaagaagggccccaatgccaacttttaaagtcttttgtaaattctgggctttctccttaataaaaaagccantttagtttcagtc

SEQ ID NO: 27220 - DNA, 456 bp, Homo sapiens
  SIMILAR (278)..(358): 881254mologous to Homo sapiens PRO0890,accession number AF116606,Smith-Waterman Score=140.
cgtgcaattccttggctggatccgaagggcttgtagcaggttggctgcggggtcagaaggcgcggtttaacttaagaacggggcctgctccgtggccctgctccagtccctatccgaactccttgggaggcctggccttccgcacgtgagccgccgcgaccaccatcccgtcgcgatcgtttctggaccgctttccactcccaaatctcctttatcccagagcatttcttggcttctcttacaagccgtcttttctttactcagtcgccaatatgcagctctttgtccgcgcccaggagctacacaccttcgaggtgaccggccaggaaacggtcgcccagatcaaggtaaggctgcttggtgcgccctgggttccattttcttgtgctcttcactctcgcggcccgagggaacgcttacgagccttatctttccctgtaggctcatgtagcctca

SEQ ID NO: 27221 - DNA, 887 bp, Homo sapiens
  SIMILAR (735)..(833): 961254mologous to Homo sapiens fau,accession number X65923,Smith-Waterman Score=167.
tctcactcaccttaggagtctgacctctcacttttccagcacgggccagggaaccatggactttacctgtagtgggaaaggaaggcaccagcaggtaagagcaagaaggtgccacccagcagaacccctcttttctcaattcaagcctttaaagagaagctgcgcccaataggtaatgagaacaaagttgcagatatttgaccttgaaatcttaagtttcatttcaggatcttccagcttctaattttatagagcactttgggggccctggtctgacctaattttagtgtggaagctgataaccagactaggatctcgtgatgtgactgaaatacaactacactctggctcagtctcccatggacgtctgtgttcaacatgagggatgtaaacaggaagaatcactctgaactgaagacagtgagaagtactctattaccataggtgtgacactcagctgtcaggactatgcaccccacactcactagacgcttaccggtacttcaaagaacattcctctctcactcacctccaaagcatgcgggcctggttacttcccagggtaagtcagggccttccaccccgcacttggcccaagagtgggcttcatccctcccaggggcgcgccttgccagggagcaccgacttgatctttccgggggcaatgcctcccagttgaaggctacatggagcctttgatcttgggcgaaccgttttccttggccggtgctggaaaagtgacaggtcgggctaagcggcggatgcagtacaaccggcgctttgtcaacgttgtgcccacctttggcaagaagaagggccccaatgccaactcttaagtcttttgtaattctggctttctctaataaaaaagccacttagttcagtaa

SEQ ID NO: 27222 - DNA, 2193 bp, Homo sapiens
  SIMILAR (811)..(2190): 991254mologous to Homo sapiens transmembrane protein,accession number L42572,Smith-Waterman Score=2294.
atgcacgtaaagcgttttgggcagtgcctgacacatggaatcctacggcccctgaatattttggcatcttcaacctaccgcaactgtgtcaagaatgcctctcttatttctgcattgtccactggacgttttagtcatattcagacaccagttgtttcctccactcccagacttaccacatctgagagaaacctgacatgtgggcatacctcagtgatccttaatagaatggcccccgtgcttccaagtgtcctgaagctgccagtcagatctctaacatacttcagtgcaagaaaaggcaagagaaagaccgtgaaagctgtcatcgataggtttcttcgacttcattgtggcctttgggtgaggagaaagactggggacttcctgagggcaggcccatgtcgcattcaccaccatttcctggctatcaccaccaccaccaccaccaccaccaccaccaccaccaccatcatcaccaccaccaccaccaccatcatcatcatcatcatcctcatcatccttcccaggattattatggccctttcacagccactttcacaacagcacatcctgggcagctgctgtgctcagcccctgagacccaaggcccctggcatcctcccaaggagcagcctgggaaactgtgtgcccccaccctccatgagcctgaaacccgtgctggtggatccgatgtcggggggtcccaaacacggctgcatctcaatgaaaatcacacttctgggtctcaccccagacctactgaagcctctgcggatgggcccaggactttgcatgtttaacgaggtccccagagaagagttagagaagatgaaaagtgtgattgaaaatgcaaagaaaaaagaggttgctggggccaagcctcatataactgctgcagagggtaaacttcacaacatgatagttgatctggataatgtggtcaaaaaggtccaagcagctcagtctgaggctaaggttgtatctcagtatcatgagctggtggtccaagctcgggatgactttaaacgagagctggacagtattactccagaagtccttcctgggtggaaaggaatgagtgtttcagacttagctgacaagctctctactgatgatctgaactccctcattgctcatgcacatcgtcgtattgatcagctgaacagagagctggcagaacagaaggccaccgaaaagcagcacatcacgttagccttggagaaacaaaagctggaagaaaagcgggcatttgactctgcagtagcaaaagcattagaacatcacagaagtgaaatacaggctgaacaggacagaaagatagaagaagtcagagatgccatggaaaatgaaatgagaacccagcttcgccgacaggcagctgcccacactgatcacttgcgagatgtccttagggtacaagaacaggaattgaagtctgaatttgagcagaacctgtctgagaaactctctgaacaagaattacaatttcgtcgtctcagtcaagagcaagttgacaactttactctggatataaatactgcctatgccagactcagaggaatcgaacaggctgttcagagccatgcagttgctgaagaggaagccagaaaagcccaccaactctggctttcagtggaggcattaaagtacagcatgaagacctcatctgcagaaacacctactatcccgctgggtagtgcagttgaggccatcaaagccaactgttctgataatgaattcacccaagctttaaccgcagctatccctccagagtccctgacccgtggggtgtacagtgaagagacccttagagcccgtttctatgctgttcaaaaactggcccgaagggtagcaatgattgatgaaaccagaaatagcttgtaccagtacttcctctcctacctacagtccctgctcctattcccacctcagcaactgaagccgcccccagagctctgccctgaggatataaacacatttaaattactgtcatatgcttcctattgcattgagcatggtgatctggagctagcagcaaagtttgtcaatcagctgaagggggaatccagacgagtggcacaggactggctgaaggaagcccgaatgaccctagaaacgaaacagatagtggaaatcctgacagcatatgccagcgccgtaggaataggaaccactcaggtgcagccagagtga

SEQ ID NO: 27223 - DNA, 858 bp, Homo sapiens
  SIMILAR (109)..(672): 671254mologous to Homo sapiens Fragment of human secreted protein encoded by gene 65,accession number Y02860,Smith-Waterman Score=664.
ggcggctgccgtgagctgactgacgttccgggaacgccgcagcagcccgcgccgcccgcaggctagccgagccgcgccgcccgggcctcgcccgcccgcctgcccgccatggtgtcatggatcatctccaggctggtggtgcttatatttggcaccctttaccctgcgtattattcctacaaggctgtgaaatcaaaggacattaaggaatatgtcaaatggatgatgtactggattatatttgcacttttcaccacagcagagacattcacagacatcttcctttgttggtttccattctattatgaactaaaaatagcatttgtagcctggctgctgtctccctacacaaaaggctccagcctcctgtacaggaagtttgtacatcccacactatcttcaaaagaaaaggaaatcgatgattgtctggtccaagcaaaagaccgaagttacgatgcccttgtgcacttcgggaagcggggcttgaacgtggccgccacagcggctgtgatggctgcttccaagggacagggtgccttatcggagagactgcggagcttcagcatgcaggacctcaccaccatcaggggagacggcgcccctgctccctcgggccccccaccaccggggtctgggcgggccagcggcaaacacggccagcctaagatgtccaggagtgcttctgagagcgctagcagctcaggcaccgcctagaatccttcgatctcgcttcaggaagaaaagtacctcatcctcggccaccgaaaccacgtgagtgagatgagccaacagcaccggatccacagaatgtttcttctctgccttaaagagctattcactaataacatagaaatccgc

SEQ ID NO: 27224 - DNA, 906 bp, Homo sapiens
  SIMILAR (109)..(138): 501254mologous to Plasmodium lophurae histidine-rich protein,accession number M15317,Smith-Waterman Score=40.
cttggaagcagccatcacagccgctgtggcggccacgttcaagccccgcttcccgaagtgcacaagggcatcgtaacttcggtcttttgcttggaccagacaatcatcgatttccaaaatcaccatcatcactataatctcaggactgaaaccaaaatggctttgtgcatgttctccaacgctgggagggcagcaacaggagtctctgtccagaaccgggagacctccactctccctggggtctcctggatgctccaggctatcaccaccaccaccaccaccaccaccaccaccaccaccaccatcatcaccaccaccaccaccaccatcatcatcatcatcatcctcatcatccttcccaggattattatggccctttccaggtcctgcaggtggagcagcaggtacacactggcacacaaagtcagtccttgcaccctgcagccctgagctgctagcgctctcagaagcactcctggacatcttaggctggccgtgtttgccgctggcccgcccagaccccggtggtggggggcccgagggagcaggggcgccgtctcccctgatggtggtgaggtcctgcatgctgaagctccgcagtctctccgataaggcaccctgtccgtcagaggtcctgctccacaggtcacactcgacaaaggccaagagggagctctgatggtcagccaggtggaaatcaagacctggatcaactctgaggcgcaggtgcccagacatagctgttgcaacagatgctgctggagtgttcacgaagctctgcgtgaagcaccgcagaggaacaaagacgaggatggtacggtccctgctcccatggagctcacagtcttgcagctgcccaggaggcctcaggggcagaggacacagatgggccattcccgtgggcat

SEQ ID NO: 27225 - DNA, 2058 bp, Homo sapiens
  SIMILAR (1804)..(2055): 711254mologous to Homo sapiens putative ribosomal protein (AA 1-184),accession number X53777,Smith-Waterman Score=289.
atggttagtgacctggttgagttccacagccacctgtggtttagagttcagtccagggatgtaaaaccactaagtgcccagaaacatcactggatcacagtccaaatctcagagcagaggaggcctaggacagaaagcccgtccccacctgagccaagaaccaacaaccacagacagaattatacccacagaggctcccaggaaatgcagcaaagagtaggatccagtgtgagaggaggcctcgagccactgctagcttatttccaagtcagcgatgagatggtggtgttgcagggcttttccgtagttcagctaaagatggggtccttgtccgtcccgtggccacgaaaacgtagcctcgcagacggtttgaaggggaatatcattgtctatgggaatacaattgatacttacaccaccgtggagacgctcttaaaccttggcgtgagcggcagccgcatccacctcgtgcagcccccgcccgcctccaccatcacctgcatcaacaactactcggtggagagcgccgtggcggacgcgctaggagccgccggagtcactatgtaccgggatgcgatcctggcccagtggaatgacggcctgcacccagaccccatctacagcgcctccttcaccacacccaccaagcctttcagactccagtgctctatgttcttcagcttctgtgagaagaatgtggattatgaaacgtttaaagccctcaatgatgcatgtcttgtgtatgacagtcgacttgtgattgataccaacttccacaccaacgacatagccatcagagctgctggctccctcaccaaattctccaatagatactactcaaatgagtggactcacagcaacttcagttccaaagaaattggctttcagctggcagcagctatgctacatctctttgatccaacccttgagcctgtgaccgagccaccagctaatcttgaccggctcatccccatgtacaagggagccaagattcaaggcctagcaactactgatcttcatactgtctcagtcactttgccttttccagaatgtgatatagttgcagtcatacagcctatcgtcttttcagatcctgtgagtcaggaatttggacagggcacagtgggcacagattgtctctgctccacactattcacagccttagatgggaagactagagggttagatcaatggtccagatcatctgaaggcttgtttactaaatccgaaagcttgttactcagctgggctgggatgactcaaggaccggaagtgttcaccacagcctccccacctgggctgtcctcaagtgcctgggcttcctcacagtatggtggcctcagagtagccagactgctcacgcagtggctctgggctccaagtgcaagtgttgttactagcaagctggaagctgcgttgccttttatgacccaccctcaaaagtcccacagcatcacttctcccactctctctgttggagcagtcacagcaaccaccgagattcaaggggtggggaatagagaatccatctctcaaggcagagagtgtcagggtcatattgcgggacgcctgcagcctgcagggctcctcaaggacttgacaagtcaccaccaactaagtgactgtgaccctcgtcttgaggtgcacagcctcggccacgtacatggaatccaagtcagccctcctaaacacaaagaagtcctttggcctgacaatctgtggaaatgtgaactcaggcaaatcgagaggttcaaatcttcgtgttcattgaagaacacctgtgaaactgctcaggccgtcaggagtcatgctgaacgtaagggtttacatgtagattctctggtcattgagcatagccaggtgaacaaagtacccaagatgtgtggccagactcacagagctcagggtcaggttaacccatgtgtgagctctgcctgccacagtgagatgagccttattgaaaaggaacaaattgttcctaaaccagaagaggctgcgcagaagaaaaagatagcccagaagaaactgaagaaatggaaacttacggcacaggaatag

SEQ ID NO: 27226 - DNA, 807 bp, Homo sapiens; identical to SEQ ID NO: 12119
  SIMILAR (1)..(465): 901254mologous to Homo sapiens ART-4,accession number AB026125,Smith-Waterman Score=750.

SEQ ID NO: 27227 - DNA, 1829 bp, Homo sapiens
  SIMILAR (891)..(1826): 1001254mologous to Homo sapiens G protein-coupled receptor,accession number X65857,Smith-Waterman Score=1610.
tcaccttttcttcacaaacttctttctggaagcgttgggatttaagcgtctccgcccagctcccaaggtgctgtcccggacctgtagggtagctgagcggctggagatgtcattctcgacaaagggcgacatcccggcgatgtagtcaggggcgaacacgttggttttctgcctggcctttcgggagagtcgcggttgagggaagcgctgatcctcggtgagatgggggttgatggcgtatgtgccccctttgggagtgggaagcgagtaccggaggccgcgggcgttcagcaccttggggttgcgggagaagtgcatgtgcagggtgccgtcgtcactgatggtcacggacactttcttcagggtcttgttcccacagtgtgaacagaacactcggctcatgtcagacgttgtcttgaaacagccgtggcagcccagacgtagctgaatcagcatgcagttcaccgccagcacgtgcagccccatctgcagcagaacattctgcctggggaagtctgtggtcacgcagccaacccgcacgtcctcggggacgtcgcactgctccagctcctgctggatctgcttgatgttactgaaatactcggaatgctccttgggacttaaagcccttttggcgactctagaggacccccctgagccatatgaatttgtggaagtgggcagaaaacttagataaatttgcagatcctcatctgggctacctggattcctcagaactaccaggaggaaaggctaagtctgctgatccacagagattgcggccacctctcctgctaggggctcaggcccagggagatcagggtactgtccctgagcccctggctgaagttgtacttcctgcattgaggccccacccaagagttggggaaatggatggaggcaaccagagtgaaggttcagagttccttctcctggggatgtcagagagtcctgagcagcagcagatcctgttttggatgttcctgtccatgtacctggtcacggtggtgggaaatgtgctcatcatcctggccatcagctctgattcccgcctgcacacccccgtgtacttcttcctggccaacctctccttcactgacctcttctttgtcaccaacacaatccccaagatgctggtgaacctccagtcccataacaaagccatctcctatgcagggtgtctgacgcagctctacttcctggtctccttggtggccctggacaacctcatcctggctgtgatggcatatgaccgctatgtggccatctgctgccccctccactacaccacagccatgagccctaagctctgtatcttactcctttccttgtgttgggtcctatccgtcctctatggcctcatacacaccctcctcatgaccagagtgaccttctgtgggtcacgaaaaatccactacatcttctgtgagatgtatgtattgctgaggatggcatgttccaacattcagattaatcacacagtgctgattgccacaggctgcttcatcttcctcattccctttggattcgtgatcatttcctatgtgctgattatcagagccatcctcagaataccctcagtctctaagaaatacaaagccttctccacctgtgcctcccatttgggtgcagtctccctcttctatgggacactttgtatggtatacctaaagcccctccatacctactctgtgaaggactcagtagccacagtgatgtatgctgtggtgacacccatgatgaatcccttcatctacagcctgaggaacaaggacatgcatggggctctgggaagactcctagataaacactttaagaggctgacatga

SEQ ID NO: 27228 - DNA, 1617 bp, Homo sapiens
  SIMILAR (877)..(596): 981254mologous to Homo sapiens ART-4,accession number AB026125,Smith-Waterman Score=499.
tttggtagttcttagttttattataaccttgtattttctggcaaaaatataaatctaaatgcatgatctctgggcacacagctcaagtatcagccttgagatgacctaagcagcaaaaatttggcctatttaattaaatgcacaggaggttgcagccgcatttattagaaaaatattatcctttggaaattcctttcttgaagattggctccagggcgttgttctttctgtttttatgcaattgcacttccttggcaggcagccaggcgctccggtgctcacaggccatgggacagtccagttcccttcaagaaccaagcggggcaatgggcggacagagccgcaccgtgaagccccgccttgttatttccaatcgggtggtccttggagacgacacgggctggggaaatgggtcaccggaactccacggcggccaaacgcccaatccaaattttgcctgcgggaactcgctcttcaaccttttcttccacaaacttctttctggaagcgttgggatttaagcgtcttccgcccagctcccaaggtgctgtcccggacctgcagggtagctgagcggctggagatgtcattctccgacaaagggtgacaccccggcgatgtagtcaggggcgaacacgttggttttctgcctggccttttgggagagtcgcagctgagggaagcgctgatcctcggtgagatgggggttgatggcgtatttgccccctttgggagtgggaagcgagtaccggaggccgcgggggttcagcaccttggggttgcgggagaagtgcatgtgcagggtgccgtcgtcgctgacggtcacggacactttcttcagggtcttgttcccacagtgtgagcagaacactcgggttcatgtcagacgttgtcttgaaacagccatggcagcgcaagatgtagctccgggcctcacgaatcagcatgccgttcaccgccagcacgtgcagccccatctgcagcagaacattctgcatggcgaagtctggtggtcaggcagccaacccgcacgtcctcggggacgtcacactgctccagctcctgctggatctgcttgatgttactgggggttatccagccacccccgtcgtcatcgctgtcatcttttctgtcttcaaacccgttttcttcctcctcttcctcctcacttggaacgtcctcacctctgtcaatcagcagctcctgcagttcatgatcgatgttgggcaaagggtttctccagaacatgaaggaactaaattccaggttctcaggctcacaagctgagtgtcctttttctgtttcttgtgggggtttaggcttgtagggcagatggaaaccagaaatgtgcagaggtgtttctgggtgctgaatcgatgagctcaccttaaccttctgtggttcttgttttaggtgagacaccccaacaaactctgcttccaactggtatgtgagtgcaagcacttggatgtccgtggcagagaggctggggtagtctcctgttttctttgaaaactcagtcaccagccgcacgtattccggtaagggctccttgaaccgcagctcgtagggcaggacagcgagccgcctgcgtgtggccttgtcccgaatctcagt

SEQ ID NO: 27229 - DNA, 156 bp, Homo sapiens
  SIMILAR (87)..(10): 731254mologous to Homo sapiens HHR6B (Human homologue of yeast RAD 6); putative,accession number M74525,Smith-Waterman Score =100.
catttggatgaaacattttggataaaaacctaacagtggtggtttatttggatattcttcagaaaattctattactagtttaaaagaccgcttgaaatcccgcatgagcctcctccgggccggggtcgactgctccgcagctgccccgcggtcagt

SEQ ID NO: 27230 - DNA, 2313 bp, Homo sapiens
  SIMILAR (780)..(421): 461254mologous to Plasmid F helicase I,accession number M54796,Smith-Waterman Score=178.
tcaccgctgctgcacatccggcccgtcctgtgaagcaggcccgggcgtcacgtgcgagatccgcacgctgatccgccgcgtcacgatatgcccggatgtcgaaccggtttccttcagcgtctgcatccactcggccattttgatctccggatcacatggcgtatccagcgccgccacatcccgggattcagcgaggcgtcttccccgacggcctcccggatagtctgtgagcgtccgaaaagagctccaccggtacacccggcatttcccacataccgtgcttaccaccacttcagtttcatagcccagcgcctcaacctgctctttcagtttttccggtagagcgggtttcatccagtgaggaatacagccggacatcacgaccactcgggccagaccgttcagggtggcattgtccattgccatctgcaggcggtcaccgccggagacgcggagtccgggattttccctgtcaccctcagtcgctcgccgtctgccaccggcattttttcggccggaacagcgaccagctgctgtccagggaggaaatacgcaccacctcgtttcaccctgcgcatcccgcagatcaggctgtgactctgcgccgtcaccggtcgataacatagcggtcatgactgcgtgtctccgggttccactgcccatcaccatccccggacggtacatatcccgcagataacggctccggctccgggagtccgacacgccctgtgttttcagctcaatgcgaatggcctgtgtcagtatggccgtttccggtacccggtgaaggcgttcatcacttccggcagcccggatatcttcatattccgtgcgttcatggtcggacagtccggcctcattcagggctgcgataatctgcggcttttcaggtgtccgaagaagtttgcttttgtcggctgccaccagtcgcgatgtggaatccgatagcggtttccagcgggtcaagcggactgcgtgacggtgaccacactcgcgggtctgaacgccgtggatgctgcacgcaatgcagaactgagcagggataacagcacctcctggctgagtgacaggaacgtcgtatgtcccgtgaccatccctccggcaacaggacgaccaaacgtgcttttttgccatcagcgccatgaatgcggcaccttccttcccgctgtaaccggccaggtgatttttgaatggatacctttccagcaggactgtacgcgaaccagaccgccggggcatctccgagccggcatcacggtcatcacggacgtagcaccacagtgtttctgccatttcctcctgaatgcgctgattcgctcctgtgcttcctgtatttaccgttcgatttttgcggaagtttttctgagcttttaccgaactgcatgcgctgcagttttgcaacagcgccttcagccggttggtttcggaagcataagtcgccacgtccgtgtgaacgataacgttccggggcctcttacgccgccacagcgcctctgcagggcatcgcaggccagttgcgccgtcatgcgtggcgacattgacagccaataacggcacgtgaccacaggtcaatgaccactgccagatacaccagccttcatctgtacgtaagtacgtgatgtctcctgcccacttctggtcgggccactggcgtaaaaatcctgctccaacagattttcgggttgagaagcggtgtaagtgaactgcagttgccatttttacggcagtgagagcagagatagcgctgatgtccggcggtgcttttccgttacgcaccaccccgtcagtagcataatgtagaatcaggggagccctgagcttgttttcctgcaaccagatggtcctaagtcttaggatgccggaccggcgtacgccccacgtcccgctgttgactttatccaaacagccgccgccgcctcgcccattctgtggtcccgctggtctggctctgcgtagttccagtggagcaccgaacactgatactactttgttgctcagccccgcaaggaaccggccattgccaccatggaaacgccggcggagttgctgcgttctagactcgtgcgaagaccggaacatgggcagggtcccgacccggaaggggaagtgggaagaacggaaacctactctgggtaggcgcaaggtggaagagtgctgtgatgatggtccagatatgctctggcttccgtgctcatgggtggtcctccactggtaacggctcccaacacttagtattcttctgtctccataaccaacctctaaatcagtatttaagtacataaggatagaacctttctctaggaattcctccat

SEQ ID NO: 27231 - DNA, 1065 bp, Homo sapiens
  SIMILAR (236)..(337): 501254mologous to Homo sapiens Amino acid sequence of Huntington's gene exon 1 in GST-HD fusion protein,accession number W95071,Smith-Waterman Score=99.
tcacgcactggaccccaccctcagggcacaaatggaaaggattggcaggagtcgggagaggggttcgccccaacacggctcctcggagaagacggcggggccgtgaaacaaagctgactggtgctgccggagaggaacaagctcccgcaggagctcacgcttgaaatcccgcatgagcctcctccgggccggggtcgacatgctccgcagctgccccgcggtcagttgtggatcgccgccgccgccgccgccgccgccgccgccgagactgacaaacaaccctgcaatgacgtctccctccgccgcctccggatccctccgccctccgccgctaccacagtgtgagtgcttgcgcctacccagagtaggtttccgtttcttcccacttccccttccgggtcgggaccctgcccatgttccggtcttgcgcacgagtctagaacgcagcaactccgccggcgtttccatggtggcaagtggccggttccttgcggggctgagcaacaaagtagtatcagtgttcggtggctccactggaactacgcagagccagaccagcgggaccacagaatgggctgaggcggcggcggcttgtttggataaagtcaacagcgggacgtggggcgtgacgccggtccggcatcctaagacgtgtggtttgagttgcgggcgagaccaggctttttttaggaccttgggcctgataagtgggcgactgcagtagtgcgggaacctattatttgacaggaacatgacaggaagtgtagggaccccatgcttgatggatggtgacttatagtgtggtagtctcagtgttgatgggcatgaccgagacagcaggagtacccctaagttctggtgagaggtggagcctcagaaggacaccttactcaagctgtctttagttcccaaagacaaaaaggctcagtggaaaagattcctttttttttttttaatgtctctatatttgagactgtgggtttattgtggatatgcattatctagttttaataaataaaagtataaacgtttaacattttcagaaaaaaaaacctcgtgcccaat

SEQ ID NO: 27232 - DNA, 926 bp, Homo sapiens
  SIMILAR (499)..(428): 911254mologous to Homo sapiens HHR6B (Human homologue of yeast RAD 6); putative,accession number M74525,Smith-Waterman Score =117.
gcactgaagttatgtattttaacagctttacatgtaatattcatatataaaaaactttaagtgcttttctccaatttaaaaatctaaagaattcaaaaataaggcattcaatatttgaaaaaagtacagatttacaaaatgtgtatattctgtcatgaaaactccacaccaacattatacacttggaaaaaaatacaaacaggatatattacaaatttatgcagcaataacttagttcacaccatgcaataaaaagtacattaatcaagatacacaagcttttgtaggttctaaactgaaggacttttttcttttttttctgcagaatccttaaaacctgtggcacttaaaatttgttagcctttctaatgagaggtaaattatacacaacaatgatgaaaaagattaacagaccagttgtctattatgaatcattccagctttgttcaacaatggccgaaactcttttctcatattctcgtttgttttccctgaataaaactgtgcctcccccgcctatggcctggaactgttaggattcggttccatcccagccagagactgaattgatgttaagatagaagatacatccatatgttggaactcccatcgattctgaaggatatcctaaacatatgcctacccatcagcatacacatttggatgaaacattttggataaaaacctaacagttggtggtttatttggatattcttcagaaaattctattactagtttaaaagtaccatcttcaaaaggtgtcccttctggtccaaatataactgcattccactgcatgatgttgttttcagatggtgcgccactgaacacccacaggtgggtccttttgtaaccgcttgaaattccgcatgagcctcctccgggccggggttgacatgctccgcaattgccccgcggtcagtttt

SEQ ID NO: 27233 - DNA, 413 bp, Homo sapiens; identical to SEQ ID NO: 13592
  SIMILAR (8)..(412): 821254mologous to Homo sapiens ribosomal protein L21,accession number X89401,Smith-Waterman Score=584.

SEQ ID NO: 27234 - DNA, 442 bp, Homo sapiens
  SIMILAR (63)..(401): 921254mologous to Homo sapiens ribosomal protein L21,accession number X89401,Smith-Waterman Score=545.
acgcctgaggcaccgcgctgtaatttccgggtccacccacgcgtccgcagtaattcgccaaaatgacgaacacaaatttaaataggagaggcacccgatatatgttctctaggccttttagaaaacatggagtggttcctttggccacatatatgcgaatctataagaaaggtgatattgtacacatcaagggaatgggtactgttcaaaaaggaatgccccacaagtgttaccatggcaaaactggaagagtctacaatgttacccagcatgctgttggcattgttgtaaacaaacaaggtaagggcaagattcttgccaagagaattaatgtgcgtattgagcacattacgcactctaagagccgacatagcttcctgaaacgtgcgaaggaaaatgatcccgaatatgaatgaagcccttgagaacggtaccttggcct

SEQ ID NO: 27235 - DNA, 559 bp, Homo sapiens; identical to SEQ ID NO: 11509
  SIMILAR (1)..(477): 861254mologous to Homo sapiens ribosomal protein L21,accession number X89401,Smith-Waterman Score=723.

SEQ ID NO: 27236 - DNA, 536 bp, Homo sapiens; identical to SEQ ID NO: 6447
  SIMILAR (222)..(374): 981254mologous to Homo sapiens ribosomal protein L21,accession number X89401,Smith-Waterman Score=256.

SEQ ID NO: 27237 - DNA, 929 bp, Homo sapiens
  SIMILAR (336)..(572): 971254mologous to Homo sapiens ribosomal protein L21,accession number X89401,Smith-Waterman Score=398.
cccacgcgtccggaaattatgagtttatcaagttggaaaggaacgccttagtgcaaagtttaattattgatgaagattactattactatgattaaaaaccctcctagtgaaagctgtgttcttctgtgacctggatttaaatgtatcttggcactcgagcttaatgatgactgttttttttgattgcttgaagcaatgtgaaaaacacatttcaccggctctgaaagctcttgagttgccatttgaaagaaatcttagaatactttacagttacttaaagtcagaattttaaaggaaggggaaatgctggtatataacattggtttctttaatagggaatgggtactgttcaaaaaggaatgccccacaagtgttaccatggcaaaactggaagagtctacaatgttacccagcatgctgttggcattgttgtaaacaaacaagttaagggcaagattcctgccaagagaattaatgtgcgtattgagcacattaagcactctaagagccgacacagcttcctgaaacgtgtgaaggaaaatgatcagaaaaagaaagaagccaaagagaaagaagttcccatggagcccaccgtgtacatgtctgaaaaggggaggacactttttcctggggagcctgccaatcacataaagaacaaaaggcttctgtgctggaccctgcctgcttatctgtgcagtttgatctcagactgctgtgctagcaatcagcgagactccgtgggcgtaggaccctccgagccatgtgcgggatataatctcctgatcaatcccccgattaaaaataaagagtccgcaaaagaaccgcaagtgtggcacagccgcacgctgcaaaacgcagacggaacagtagctgaatacaacggcaatcacgatgtgttcgctcgagcaaggaagcccgaaaaacgctaa

SEQ ID NO: 27238 - DNA, 724 bp, Homo sapiens
  SIMILAR (19)..(111): 431254mologous to Homo sapiens Amino acid sequence of salivary protein CON-2,accession number W50193,Smith-Waterman Score =65.
atccttaattaaattaatcccccccccccgccctttcggccggaaccgccatcttccagtaaattcgccaaaaatgacggaccacaaaggggaaagaggagaggcaccccgataataatgttctctaagggccttttaagaaaacaatgggagttgttcctttggcccacatatttatgcgaaatctataagcaaaggtgtgattttgtagacatccaaggggaatggggtaccttgttccaaaaagggaattgcccccacaaagttgttacccatggccaaaacctggaaggagtcttaccaatggttaccccagccatgcttgttggccatttgttgtaaaacaaacaagtttaagggcaaagattcttgcccaagaggaatttaatgtggcgtatttgagcacatttaaggcacttttaaggagcccgagataagcttccctgaaaacgtgtggaagggaaaatggatccaggaaaaaggaaaggaagcccaaaggaggaaaggttacctgggggtttcaacttaaaaggcgccaccttggcttcccaccccaggaggaagccacatttttgttgaaggaacccattgggggaagggagccttgagcttgcttggaaccctatttcccctattggatttcatggggcattaatagggtgtttaaaaaaaaaattaaaggaccctctgggctacaaaaaaaaaaaaaaaaaaaagtcgacgc

SEQ ID NO: 27239 - DNA, 762 bp, Homo sapiens
  SIMILAR (598)..(714): 501254mologous to Walleye dermal sarcoma virus gag polyprotein,accession number U79443,Smith-Waterman Score=94.
atgggccccgtttgtctgctgtcggctcccctcgcggtggttctgctgaagcagcctggctgccggcccggggacaccctgcctggattccgcggcgcccccacgcgcctctgtgaatgcgtgggctcgctggatttcccgcagggcttgctggccacgctctcccgtcagctgtgtgtcttccgttgcctcccggggacgtttgtagctgctgttcattcgcaggctgggctggagtcggggtctctgacacccagccctggagaccctctctcggcaacctgggccatggcagttgtcaaaacaaatcggcaagtccttgatggagccccagaagggagagtggccagtgccacgccatggcaacgatgctggctggagatggagtggacgctcaggtgccgctggatgatgccggccacctgcagttttggggcccagctggaggtcagcagggtggactcacaaccccctgagttcagacgagttatttcctttgaggagggaggaattgagttacttcaggcccggatggatccaccgctgctgacgtactttggtgctgacgtactttggtgccgtgactcggatacattccctagaggttgccctcagaacaccctcccaggtaactgccatcgctgcgggaagccaggccactggaaggcagactgcatcagtcggacaaatgggaggaagctccacacagctggccccctccgccacactcagccagtggaacaggactgccctgagggctga

SEQ ID NO: 27240 - DNA, 372 bp, Homo sapiens; identical to SEQ ID NO: 13519
  SIMILAR (115)..(80): 751254mologous to Homo sapiens Human secreted protein, SEQ ID NO: 7678,accession number G03597,Smith-Waterman Score=43.

SEQ ID NO: 27241 - DNA, 3297 bp, Homo sapiens
  SIMILAR (2355)..(2702): 751254mologous to Plasmodium lophurae histidine-rich protein,accession number X01469,Smith-Waterman Score=699.
tcaattagagaagccaggtggcaggcccttgtgaattgcctttgtttgtggatctgatgcagcctccactgcggctggggtagcagggagctgctgtgcatctagctttgcaagagcacaaagcatctccgagctccattttccattggccaaggagatcctttctgaggcttccctgagcaggagggctacaacctgcagttttgatgtgagttggaactcagtgcagggtgtgtgatcacactcaggagcccagctggcttcacccggtggatcccgcaccagggctgcaggtggagctgcctgccagtcctgcgccatgcgctcgcactcctcagcccttgggtggtcgatgggactgggcgctaatttccccatggagctggactgcccatccacatctgacttggtgcttagcctcacacgtgtggactggtggcatttcccagcatcagaatgggcattggtaacatgctgtttctttgaagaatgagtgccccattcaaagacgttgtcttgtttggcctcaaaatatcttcctctcatgtgaggtatccagggttgatctatttcaagcaagcctattaagcaggtgttattatcatcatcatttgacacctggttcctcggtgttcctatatcttctttaatggatccaccattttcccagtttcctaaagcagaaaccaaggcatcagctgacacatctctctcctcatccctttcgtctaatccatcaccaagactcgtttctttttgccatgcatccaatctatgcacttctgtcatttttgccaccaccactaagtgtgcttgttgcacctccttgagttgaatactggtagcaccacttgaagtatagagatccaaggttggggcacttgtgtctattgggccccctctgatacgctgatcatcagcagccttgctctcttcaatggggacagagctacggatcaggatggaggatcctgagacgcctccattgacaaccctgcagtgacttttctcatgtccttttggataaggaccaatgtctttacactggcctgcctcactctgcatcacctggtccctgcgtaaccgtaataggttcctcacccgacatgcatggcaaatcaatacaccaagacactggcagcttgtcccaagctcctgctgataaatcattttattggcacagctggacaggaaaggacagaatgagtaatgggagtcgggcaccatgtcgtggacaaaggcccgagttgacatggtaacaacaggcagaccgatgtggcccaggcagtagtctggcctctggacaagtcggagaataggccccaggtcatttctcctttgtgcttggaagctttttcttcctgctccctctgcctcttgaccgaccatgttgaccacggtgctgcccccatgtggccctgcaaggcttgggaagctccctccacttgggatcttcagtacaacgcgtagaatatagtaggtgctcagtaaatacttgttaaatattgaatgaatcaatgggactttggaggtggcctttctggggcaccacagcaatgctctgttcattgtgccttcaccctgggaaggagaaaaggtcaagccttctgtcctctgcaagaccctctgttgctcttccaatggcttgtttttgtcacagtcacacataactgcatgctgcccaaggttggggccctggatgaatggggctgtacacatggtgaggagacacagggcgaacctgagatatgaaaaacggagcaaaggagggtgagtcctatctcctgctgcaatgcctaccaccatcaccattaccatcaccaccaccatcaccatcaccaccaccaccaccaccaccaccaccatcaccatcatcaccatcaccaccaccatcaccaccaccaccaccatcaccatcaccaccaccatcaccatcaccatcaccaccaccaccaacatcaccaccatcaccatcatcaccatcaccatcaccaccaccatcaccaccatcaccatcaccactatcaccaacaccgccaccaccaccatcaccatcactgccaccactaccatcaccatcactgccaccaccaccatcaccatcaccatcaccaccaccaccaccatcaccaccaccatcaccaccaccatcaccatcaccgccaccatcaccatcaccatcaccaccaccaccaccatcaccaccaccatcaccaccaccatcaccatcaccatcactgccaccatcaccatcaccaccaccatcaccatcaccaccaccatcaccatcaccactgccatcaccatcaccatcactatcaccatcactgccaccatcaccatcaccatcaccaccacatcaccaccaccatcaccatcaccaccaccaccatcaccaccaccatcatcatcaccaccaccatcaccaccaccatcaccatcaccaccatcaccatcaccatcaccaccaccaccaccatcaccaccaccaccaccaccatcaccaccaccatcaccatcattatcaccatcactgccaccatcaccatcaccaccaccaccattgccatcaccaccaccaccattgccatcaccaccaccatcgccattgccatcaccatcgtcaccaccaccaccgtcaacaccatcaccatcaccaccatcaccatcaccatcaacatcaccatccccaaactctgcattagccctctgagagccagcacatagtaggtgctcaataaatgttgcattgtcactccctgtgtgtctatatccaaggatcacatagtgtccgcaagtttcttgtcctaaagcaaaagctctcaatggggatggtgttgccccctgggggagacctggaacattgtggagcttgtttagattgtgaccaggactggcgatgtgcaatgccttcacataaatatcctcccaaacatgcacattgttgtgaaggttgtttgtgctaaatggtctcagtgggctaaaatcaaggtgtcttgcagagctgcattccattctggagactttaggggagaatccattttcttgccttttcctgattccagaggctgttttccttggctcatggccacgtcctctgtcttcaaagccagcaatgggggtcaagtatttctcatgctgcatcactctgacactggcccttcttcctctttcttccacgtctaaggacccaattttccaggagcctgtcacccactcacaagcagacatcccaacacccacccacagagatgcattggcagccccaattttgaagtttaaggctactgccggcat

SEQ ID NO: 27242 - DNA, 922 bp, Homo sapiens
  SIMILAR (654)..(719): 401254mologous to Mus musculus Pro-Pol-dUTPase polyprotein,accession number Y12713,Smith-Waterman Score=41.
atgcctgatctcccttgggttaatgtagaggaagggattcaaagacttagggagattgtgatggtggagtggattagtcactttaggcctactcatcccagcttggagaatctagaagatatagccttgaccaatgtcttgcaaaatagatttgtgagggcagaacctgcatctttgaagagccctgtaattgctcttctctgtatgtcagatctaacggtgggaaccacagtcactcaactacaacatttaaatacaatgggagtaattggatcccaagatggcagggaccaagtggcagcactcaaccatcaaaagcaaggagacctgtggccttttcccagggtaactgtgctatggagaaagggaattgatcagacattttggggactactgaacactggctctgagctgacattgattccaggggacccaaaatgtcgttgcagtcctccagttaaagtagaggctcatggatgtcaggtaattaatggagttttagctcagatccaacttacagtgggtctggtgggtccgcgcccagtcccatccaccacccaagggctgaggagtgctgggcgcacggcaccgggactggcaggcagctccacctgcagccccggtgtgggatccactaggtgaagccagctgggctcctgagtctggtggggacgtggagagtctttatatctggctcagggattgtaaatacaccaatcagcaccctgtgtttagctcaaggtttgtgagtgcaccaatggacactctgtatctagctgctctggtggggacgtggaggacctttatgtctagctcagggattgtaaatacaccaatcggcactctgtatctagctcaagttttatacttccctgacacatcctgtgataagcctcgtagtagagactctagtctggtggtg

SEQ ID NO: 27243 - DNA, 1551 bp, Homo sapiens
  SIMILAR (148)..(456): 741254mologous to Homo sapiens ubiquitin-specific protease ISG43,accession number AF176642,Smith-Waterman Score=355.
gaactcagcagcggaggctggacgcttgcatggcgcttgagagattccatcgtgcctggctcacataagcgcttcctggaagtgaagtcgtgctgtcctgaacgcgggccaggcagctgcggcctgggggttttggagtgatcacgaatgagcaaggcgtttgggctcctgaggcaaatctgtcagtccatcctggctgagtcctcgcagtccccggcagatcttgaagaaaagaaggaagaagacagcaacagtgaagagagagcagcccagagagcgtcccagggcctgggacttaccctcatggcctggttgggtttacacaacatttggacagaccttgcttgccttaactccttgattcaggtgttcgtaatgaatgtggacttcaccaggatattgaagaggatcacggtgcccaggggagctgacgagcagaggagaagcgtcccttttccagatgcttctgctgctggagaagatgcaggacagccggcagaaagcagtgcggcccctggagctggcctactgcctgcagaagtgcaacgtgcccttgtttgtccaacatgatgctgcccaactgtacctcaaactctggaacctgattaaggaccagatcactgatgtgcacttggtggagagactgcaggccctgtatacgatccgggtgaaggactccttgatttgcgttgactgtgccatggagagtagcagaaacagcagcatgctcaccctcccactttctctttttgatgtggactcaaagcccctgaagacactgggaggacggcctgcactgcttcttccagcccagggagttatcaagcaaaagcaagtgcttctgtgagaactgtgggaagaagacccgtgggaaacaggtcttgaagctgacccatttgccccagaccctgacaatccacctcatgcgattctccatcaggaattcacagaccgagaaagatcttgccactcccttgtacttcccccagagcttggatttcaagccaagatccttccaattgaagcgagagtcttgttgatgcttgaggagcagtctggagggcagtatgagctttttgctgtgattgcgcacgtgggaatggcagactccggtcattactggtgtctacatccggaatgctgtggatggaaaatgggttctgcttcaatgactccaatatttgcttggtgtcctgggaagacatccagtgtacctacggaaatcctaactaccactggcaggaaactgcatatcttctggtttacatgaaagatggagtgctaatggaaatgcccaaaaccttcagagattgacacgctgtcattttccatttccgttcctggatctacggagtcttctaagagattttgcaatgaggagaagcattgttttcaaactatataactgagccttatttataattagggatattatcaaaatatgtaaccatgaggcccctcaggtccttgatcagtcagaatggatgctttcaccagcagacccggccatgtggctgctccggtcctgggtgctcgctgctgtgcaagaca

SEQ ID NO: 27244 - DNA, 1080 bp, Homo sapiens
  SIMILAR (163)..(1077): 931254mologous to Homo sapiens Human irritable bowel disease related polypeptide IMX28,accession number Y71211,Smith-Waterman Score=1530.
atgggctcctgtgcggaccaagcctccccgaccagcgccgctcccggctccacgccgccgagtcccaccgaccacccaagggctgaggagtgcgggcgcacggcgcgggactggcaggcagctccacctgcggcccaggtgtgggatccactgggtgaagccagctgggctcctgagtctggcctggttggtttacacaacattggacagacctgctgccttaactccttgattcaggtgttcgtaatgaatgtggacttcaccaggatattgaagaggatcacggtgcccaggggagctgacgagcagaggagaagcgtccctttccagatgcttctgctgctggagaagatgcaggacagccggcagaaagcagtgcggcccctggagctggcctactgcctgcagaagtgcaacgtgcccttgtttgtccaacatgatgctgcccaactgtacctcaaactctggaacctgattaaggaccagatcactgatgtgcacttggtggagagactgcgactgcaggccctgtatatgatccggatgaaggactccttgatttgccttgactgtgccatggagagtagcagaaacagcagcatgctcaccctccgactttctttttttgatgtggactcaaagcccctgaagacactgcccagggagttatcaagcaaaagcaaatgcttctgtgagaactgtgggaagaagacccgtgggaaacaggtcttgaagctgacccatttgccccagaccctgacaatccacctcatgcgattctccatcaggaattcacagacgagaaagatctgccactccctgtacttcccccagagcttggatttcagccagatccttccaatgaagcgagagtcttgtgatgctgaggagcagtctggagggcagtatgagctttttgctgtgattgcgcacgtgggaatggcagactccggtcattactgtgtctacatccggaatgctgtggatggaaaatggttctgcttcaatgactccaatatttgcttggtgtcctgggaagacatccagtgtacctacggaaatcctaactaccactggtaa

SEQ ID NO: 27245 - DNA, 420 bp, Homo sapiens
  SIMILAR (15)..(194): 981254mologous to Homo sapiens ribosomal protein S26,accession number X77770,Smith-Waterman Score=303.
tccgtgcctccaagatgacaaagattagaaggaacaatggtcgtgccaaaaagggccgcggccacgtgcagcctattcgctgcactaactgtgcccgatgcgtgcccaaggacaaggccattaagaaattcgtcattcgaaacatagtggaggccgcagcagtcagggacatttctgaagcgagcgtcttcgatggtaagtgggtcaccggcgcgaactgtgtgaggatcccagtatcttaaagccttcgcccaacttcgcccttttggaggctctgtttcgttggagcctctcaggcaatttccacgtatttaaggttgttactggtagaagagaattctcttgtttgccgttttgattcttttctgggcagagggtgactttgtgatagagtgcacagcctttactctgaggtaaagg

SEQ ID NO: 27246 - DNA, 928 bp, Homo sapiens
  SIMILAR (261)..(521): 401254mologous to Homo sapiens Human secreted protein, SEQ ID NO: 7972,accession number G03891,Smith-Waterman Score=89.
  misc_feature (1)...(928): n = a,t,c or g
acataacctcgattttcttccgccatccggctaaatagtcccatgtgcactttgttccatggataaataaacactaggaacgcatttccaccctagatttcagcagaaatgctgaattgtaaaggaatatttgagtaaagtgagttgccgttcttgaagcccgtctcctaaggattctcccggtgtccgcgtagggatctcatgctatataggagggccctgccaggcagcgtctcctctctccggtccgtgcctccaagatgacaaagaaaagaaggaacaatggtcgtgcccaaaaaagggccgcggcccacgtcagggggnngccncccttaaaatttttnccccngggnccntgccacctaactgtgcccggatgcgtgccccaagggacaaggcccattaagaaattccgtcattcggaaacatagtgggaggccgcagcaggcaagggcacatttctgaagcgagccgtcttcggatgcctatbtbbcttcccaagctggtatgtgaagctacatttactgttgtgagttgtgcaattcacaagcaaaagtagttcaggaaatcgatctccgtgaaagcccggcaaagacccgaacacccccaccccgattttaggacctggcgggtggttgccccacggtccccccaccaaaagcccatgatctgggtccagaatactgcagacatcagacatgtgttaactgggtttgctgccggcaagccaccatccttgggaaggagttgtgtgggcaaatcaggaagttgccctctcagcagatgtctccaggatggctgccctcaggttattcctgttggttgtataaatataagacagaagccaccactgctttgcaatcacgtggggaagtgtatcatccgctccaagctctgtggagcagacctcctggccgggatccactga

SEQ ID NO: 27247 - DNA, 270 bp, Homo sapiens
  SIMILAR (67)..(249): 831254mologous to Homo sapiens ribosomal protein L35,accession number U12465,Smith-Waterman Score=252.
atggccaagatcaaggctcgagacctgcacgagaaggaggagctgctgaaacagttggatgacctgaagactcagaaagagaaactcaggaaattctacaagggcaagaagtacaagcccctggacctgtggcctaagaagacacgcgccatgtgctgccggttcaacaagcacaaggagaacctgaagaccaagaagcggcagcggaaggagaggctgtgcctcctgcggaagtacgcagtcaaggcccgagtggcgcgttgtcaataa

SEQ ID NO: 27248 - DNA, 708 bp, Homo sapiens
  SIMILAR (5)..(196): 571254mologous to Homo sapiens unnamed protein product,accession number AK024120,Smith-Waterman Score=173.
atggctaaaaggggccaaggtacagctcaggccatggcttcagagggtgcaagccccaagccttggcagcttccaggtggtgttgagcctacaagtgcacagaaatcaagaattgaggtttgggaaccttcacctagatttcagaggatgtatggaaatatctggatgtccaaacagaagtttgctgctgggaggctgtgtttttgtgagtgtactctgagtgagtcagctcaaggcagctgctctatttccctgaagttacaaatccaggaagcagtgggcactggaaagggatgcaccagggtgtctgatacacacctagacaaaggagaaggtagcaaagttaaagccattttgcttatatccattccaagagaccactcactggatggatgtaccccaagagcaaggcattcttggtggtccatctgctgtgggaggaaagaaggtaaaagatcaatgagtgtgtttggtgggcagctatcaggagttgactctggaatccagaattgtttccatcttgtggttccgctatcctgtagagagcatgagagtctcctgttggatcttctgtgtccatatggcaaatggaggaaaaaggagcatagaggcaagaggggctcaaaattgtatctgtttgccgccctcgcagacccgctgctgactcccatccctccagatccagcagggtgtccgctgtgctcctga

SEQ ID NO: 27249 - DNA, 493 bp, Homo sapiens
  SIMILAR (86)..(190): 451254mologous to Arabidopsis thaliana F24J5.4,accession number AC008075,Smith-Waterman Score=72.
ctgctctgccactctgcctttcccctccctttccaccagactccagctcctctccatacaggactgggacccccaaagtgtcctgcccacccgaagttttcctctcaggcctccggctgtgtgctttgttcccaaaattgctccaatttcctccccttcgagcccacttcctccctaacccccagacacaggcattgatctcttcttttgtgctaggggttttgctgatatttgtaggtggccctctgaaaaacataaacaaaactggacctgactcagaataaagtggtaaagccctcttcatctgggcatctgtttctctaggtttctttttacatgggtttgcatatggagatctggttatctctgcggaggtttctgtgttgatgtctctgtttggaggtctctcggtaggtaggtgtgtatcctgctcagctttcactgtattcagctttgccatggcatgagaataaaactccaaactggtggccat

SEQ ID NO: 27250 - DNA, 925 bp, Homo sapiens
  SIMILAR (716)..(904): 801254mologous to Homo sapiens ribosomal protein L35,accession number U12465,Smith-Waterman Score=253.
acactttgggagaaagaggcaagccaggatttgcttgaagccccaggggtttgaagactagccgtaggtaaaccatggcaagatgcccatctcaataaaaaaaaatatatattttaaaaagaataataggatcttgcctctgaagatgaaataacagaggaaattggagtaaggaagaaaagttgagaggggctaaggttataggtcagagagttgaagcctgggagctaggatttcagtcatggagctggtccagggtctgggaagctcctttccatggtcatgggtggaggccgctatagacgagaaggttactggagttgaagagagcttctttttgcatgggtttgcatatggagatctggttatctctgctgaggtttctatgttgatgtctctgtttggaggtctctcagtaggtaggaacaatggcaagcctctagcccaatcgggagcagcaatgggcacctcactggatcaggagcacagtggacaccctgctggatccggaggaatggaagtcagtggcgggtctgcgatggcggcaaacagcactggtggacgcattttagtgagctcgctttactacctgattgagcaggcagcggcggtggcctatgcagcaatggccaagatcaaggctcgagacctgcacgagaaggaggagctgctgaaacagttggatgacctgaaggtggagctgtcccagctgcacgtcgccaaaactcagaaagagaaactcaggaaattctacaagggcaagaagtataagcccctggacctgtggcctaagaagacacgcgccatgtgctgccggttcaacaagcacaaggagaacctgaagaccaagaagcggcagcggaaggagaggctgtgcctcctgcggaagtacgcagtcaaggcccgagtggcgcgttgtcaataa

SEQ ID NO: 27251 - DNA, 495 bp, Homo sapiens
  SIMILAR (121)..(429): 811254mologous to Homo sapiens ribosomal protein L35,accession number U12465,Smith-Waterman Score=367.
  misc_feature (1)...(495): n = a,t,c or g
tactaaattcgcggcccgtcgaccggcgttggcggcttgtgcagcaatctccaagatcaaggctcgagatcttcgcgggaagaagaaggaggagctgctgaaacagcatggacgacctgaaaggtggagctgtcccaactgcgcgtcgcctaagtgacaggcggagcggcctccaagctctctaagatccgagtcgtccggaaatccattgcccgtgttctcacagatattaaccagacttcaggaaagaaaaccttcagggaaattcttacaaggggcaagaagtacaagcccctgggaccttgcgggccttaaggaaggacacgtgccatgcgccgccggctcaacaagcacgaggagaacctgaagaccaagaagcagcagcggaaggagcggctgtacccgctgcggaagtacgcggtcaaggcctgaggggcgcattgtcaataaagcacagctggctgagaaaaatctgaaaaaaangagggtaataaa

SEQ ID NO: 27252 - DNA, 1149 bp, Homo sapiens
  SIMILAR (556)..(807): 511254mologous to Homo sapiens clathrin coat assembly protein -like,accession number D63643,Smith-Waterman Score=178.
atggaactggactgggaaagaatgatgccaattgtccatgagggtacccaggtggcacagaaagtggaaatccgagaacaagagcaagttgattccaacaatggcactgggtctctgagtctgattggctcctctcaaagagataaaatccggatgggacaaagcagttatctggctgctctgtcccctaaaattggtgaaattgacaatgcctacgtcatagggttgacggcaaaatctggccttggaattataactgaagccatttatccaaagaagatatacaaatggccagtaaacacaggaaaagatgttcaacatcactggacattagaaaagtgcaatcaaaagcagaaagaatacaacttcacacccactgggatggctcaaattaaaaggcagacaatgacaaatgttagtgagggtgtgaagaaactggaacccctgtgcattgctgtgcctacccggtgggcccgacccagccacgatcaaggcgatcctaatcttaacaatcatgggaaaccgcggctctccaagttctaccagccctatggatttgtggaaacattagacaaatgttttgaaaatgtttgtgaactggatttgattttccatgtagacacggttcacaatattcttgcagaaatgatgatgggggaatgctgcaacattattgctgctgtcactaccacatcaggtgaggggctggagaagcctccacagatgcagcaggtggatagtgaaggaaaggctccaagccacgccactaacctggactcccttttccgatgtccagaattaaagagaggtaaaagatttctggcttttggcaggacagtgctggtgcaaaggaagtgtggggccaggcccaaggaagccctgtgcagcataccttacagtccgccgaaccagaagcagcccactcccccacctggatttcctgccacccaggggaccagttgtatttcttacagaaaagaaaggtgcatgaggaagctctccggtgcttcagaagactattgggagcctgaatcgcagaatgaagtggaggaaggctacagggccagcccaagctgccaggtggctgaagcagagggcccagaacccaaccttagctcacaaaacaaaactctcacttctacctcttga

SEQ ID NO: 27253 - DNA, 1279 bp, Homo sapiens
  SIMILAR (86)..(310): 851254mologous to Homo sapiens clathrin coat assembly protein -like,accession number D63643,Smith-Waterman Score=328.
gatcgcaggcgagattacgaggcgaggctcgcgcgcccgcccccgccctggcccccagtgcccacccggtccgcccggcacagccatgatcaaggcgatcctaatcttcaacaaccacgggaagccgcggctctccaagttctaccagccctacagtgaagatacacaacagcaaatcatcagggagactttccatttggtatctaagagagatgaaaatgtttgtaatttcctagaaggaggattattaattggaggatctgacaacaaacgtgatttatagacattatgcaacgttatattttgtcttctgtgtggattcttcagaaagtgaacttggcattttagatctaattcaagtatttgtggaaacattagacaaatgttttgaaaatgtctgtgagctggatttgattttccatgtagacaaggttcacaatattcttgcagaaatggtgatggggggaatggtattggagacaaatatgaatgagattgttacacaaattgatgcacaaaataagctggaaaaatctgaggctggcttagcaggagctccagccccgtgctgtatcagctgtaaagaatatgaatcttcctggagatcccaagaaatattaacattgggtgacatcagtattaaaagtgccaaacctgccctcttttaaataaaaatgtaaaaagggccactcccaggtaaaatccagggggaagagtcatctaagtttaccatgcagttggtttaccaaaaatagaggaggagagtcttaacttttgctcttggatttaagtcaaggtactgtatagaagttgtgtaaaatcagtatgaaagttcaatgttgctgttcttgctcagtgattttaaagaaattgagtagttcctatgtgatttttttttttcttttctaaactgcattcctgtgcccacctacggcatgcctctatgtattggctactacagtgttttaaaaagtgtttccagatatttctctaattatgtacaacctaaaatgttggtgttttgtatggatcacaagtgcagcattccttaattccttctgctatatgtcacacagttgttatttggagaaccaagtatgtattgcatgaaaacattatgacttttttctcttagtttaaataaactccaaggtaactggacttctaaagcacctttctgtttgcctgatatctactttagcaataattttttttacaaccctctgactcaacaaagtaaataaaagtatattttatcactaaaaaaaaaaaaaaaaaa

SEQ ID NO: 27254 - DNA, 909 bp, Homo sapiens
  SIMILAR (495)..(4): 921254mologous to Homo sapiens TADA1 protein,accession number AF132000,Smith-Waterman Score=762.
ctaaattgcagactgctcctgcaggaagccttcagggcctgggaggcctttatctggctcaaaagctagggctacttctcgaaggacttccaaatgctcctcagcagctgatagtgactggtcaatccactccaggccccccgtcagatggcaggcattccttgtcaccagcaccaggcgactgacagacaggagcagggtagtcgtccctgtgtccaggagcttggggtccaacggagggtacatcgacttcacaacatcatctaccctggggctgttccacttggccaccacaatcatgtcgctgacaatggctgaagtcttcatcttggccccagagcccattgtcatggcaacaagcttctctgtcagagtgtgacaaatcttcaagatggcaatgcagtgggacatgagacccgaggcatcttcgatccagtctttgttctccagaatggcctcaatgtgggggttggtgataacaacgtcatccagttcacggtctccatgcttccggggagctcctgactcagtcccgttcacatcgtcctcatgggctaaggctgctgggtcccctttcacattgcggaagttttgttctttcactctttgcaataaatctcgctgctggtcactctttgggtccacactgcccttatgaggtgtaacactcaccacaaaggtctgcagcttcagtcctgaagccagcgagaccacgaacccaccgggagggacgaacaacttcagacaagagaaacaaacaactccagatgcaccacctttaagagctgtaacactcaccccgaaggtctgcagcttcactcctgaagtcagcgagaccacgaacccaccagaaggaagaaactctggacacatctgaacatctgaaggcacagactccggacacaccat

SEQ ID NO: 27255 - DNA, 675 bp, Homo sapiens; identical to SEQ ID NO: 10574
  SIMILAR (465)..(283): 621254mologous to multiple sclerosis associated retrovirus element gag polyprotein,accession number AF123881,Smith-Waterman Score=193.

SEQ ID NO: 27256 - DNA, 1222 bp, Homo sapiens; identical to SEQ ID NO: 610
  SIMILAR (53)..(355): 491254mologous to Homo sapiens gag,accession number AF156961,Smith-Waterman Score=240.

SEQ ID NO: 27257 - DNA, 552 bp, Homo sapiens
  SIMILAR (326)..(490): 611254mologous to Homo sapiens Human secreted protein, SEQ ID NO: 7115,accession number G03034,Smith-Waterman Score=168.
ttaaaaggttttccctctctctcctccttctgacatggcgttgggtgcaggaagaggtggtgtacagatggcccctgtctggggactgctgcctggtagagggccccatcctgttgtctttgcattggcctctctccttgctgcctctgccaccaaaggatttctggactgttggtgtgcctgtggcccaagggcttggcattctccactggcattggttggcccacaggttcctgagatccagcggccactcacatttaatcgctgtctctgcacaaacgtgagtgcagctttctgtaggagacactcggcataacagatttcagcatgcatttcctcgcgaaggtctgcagcttcacttctgaggctggcgagaccatgaacccatgggaaggaaaaaacaactccagatgcactgcctttaagagctgtaacactcactgcaaaggtctgcagcttcactcctgaagtcagtgagaccacgaacccaccagaaggaagaaactccggacacatctgaacatctgaaggaacaaactctggacataccat

SEQ ID NO: 27258 - DNA, 1110 bp, Homo sapiens
  SIMILAR (495)..(4): 921254mologous to Homo sapiens TADA1 protein,accession number AF132000,Smith-Waterman Score=762.
ctaaattgcagactgctcctgcaggaagccttcagggcctgggaggcctttatctggctcaaaagctagggctacttctcgaaggacttccaaatgctcctcagcagctgatagtgactggtcaatccactccaggccccccgtcagatggcaggcattccttgtcaccagcaccaggcgactgacagacaggagcagggtagtcgtccctgtgtccaggagcttggggtccaacggagggtacatcgacttcacaacatcatctaccctggggctgttccacttggccaccacaatcatgtcgctgacaatggctgaagtcttcatcttggccccagagcccattgtcatggcaacaagcttctctgtcagagtgtgacaaatcttcaagatggcaatgcagtgggacatgagacccgaggcatcttcgatccagtctttgttctccagaatggcctcaatgtgggggttggtgataacaacgtcatccagttcacggtctccatgcttccggggagctcctgactcagtcccgttcacatcgtcctcatgggctaaggctgctgggtcccctttcacattgcggaagttttgttctttcactctttgcaataaatctcgctgctggtcactctttgggtccacactgcctttatgaggtgtaacactcaccacaaaggtctgcagcttcagtccccgaaggtctgcagcttcactcctgaagtcagcgagaccacgaacccaccagaaggaagaaactctggacacatctgaacatctgaaggcacagactccggacacaccatctttaagaactgtaacactcaacacgagggtccgcggcttcattcttgaagtcagcgagaccaagaacccaccaatattgtacacaacatttctggggcagctgacagtattattgagtgccattgctcttgttttcctcaaggactggtgaagacattgtccaggaatgttaccacctgctaggtgtgcaaccttaggcaagttttttagcctctgtgagaatccatgtgaatggatccttatttcttcttgtttgaagaaaatttcatcatctgacacatacttctgcaaaatatccctcat

SEQ ID NO: 27259 - DNA, 1065 bp, Homo sapiens
  SIMILAR (860)..(931): 481254mologous to Homo sapiens RPB11b1beta protein,accession number AJ277740,Smith-Waterman Score=49.
atgggtgctgaaagacataaaacaaacttcaggctatgcaaagcggccttggaacctgcatggagcctcttaaatgaacaaagagccagggtgtcccataaaacattcaacaagggactgaggctggacaagtttgaagaatgtggattccaagagtggatgtctccaggaggttccgggaagttctggctgactggccaccaagcagccctcatcatttttcgatcaagtgatcatagtccaggccatgtaagacatgcctacttcccctttgccttctgccatgattgtaagtttcctgaggtctccccagaagctgagcagactgccatcatcctgcttcctgtacagcctgtagaactgatgcctaaatcaaaggaacttgtttcttcaagctcttctggcagtgattctgacagtgaggttgacaaaaaggtgactactgctgcaccaagtcattttggtgatactcaacaatattgtccatatcccattctgaaggatagtaaaaggacaatactgaaaatggaaactcttgcagaagtatatctgactaagtccatccgggacatagcatccaacaagaaaaactggatctacacacagaagaaagtagcaagatgtcagatgtgtccagagtttcttccttctggtgagttcatggtcttgctgacttcaggagtgaagctgcagaccttcccgctcgtcccagacaaccaaaaggagaagaagagatgtgagaaagagaaggagacctgccaccatggcaatgaccccgtgaagagggaatggcggtccatgcacaggacccagcctccaatcaatcacagcaggtgccagctggtagtgccaagtgtcctgcggccatgcccatttggaacctgcaccagcctacaagtgccacgtccaccccggctcccacccgcacctctccctccacacctccctgcaggaagagggagcaagctccgccttggcagcccagagaggggccccatagtgcagcggtgggctgaagggctcctcgagcagccagagaggacgtcaaggctgaggagatgctga

SEQ ID NO: 27260 - DNA, 493 bp, Homo sapiens
  SIMILAR (86)..(466): 991254mologous to Homo sapiens PC4,accession number U12979,Smith-Waterman Score=634.
attctaaactccctgaaggagacaaattaccagtggacaagaacacagcctctggagtccaataggcctggtgtattcattagggatgcctaaatcaaaggaacttgtttcttcaagctcttctggcagtgattctgacagtgaggttgacaaaaagttaaagaggaaaaagcaagttgctccagaaaaacctgtaaagaaacaaaagacaggtgagacttcgagagccctgtcatcttctaaacagagcagcagcagcagagatgataacatgtttcagattgggaaaatgaggtacgttagtgttcgcgattttaaaggcaaagtgctaattgatattagagaatattggatggatcctgaaggtgaaatgaaaccaggaagaaaaggtatttctttaaatccagagacatggagccagctgaaggaacagatttctgacattgatgatgcagtaagaaaactgtaaaattcgagccatataaataaaacc

SEQ ID NO: 27261 - DNA, 389 bp, Homo sapiens
  SIMILAR (278)..(96): 1001254mologous to Homo sapiens Membrane-bound protein PRO203,accession number Y66638,Smith-Waterman Score=331.
tttttttgcagtttcatcgtttttgtttttatttttcccctttcaacctggttttcggctctggaagctgttcctgtgcacagttctatttcctacagttctgagaaagcggttccatcgcagatgaccaaaggctggacccctctggctataacgtagaccttccagtgggtggtgtcgacatagccgatatcccctggctctattggcatggccacagactgacaatgtcttcggcactggaagggagggatgagctgcaacatggcctcaccgcttactccccacaacaggttctgggtgaagaaaggagcacttgtttaaagaggcatcttttggaaatggcaggtgagtgaaaacaggaaaaagctcacgtaacatttgtgatc

SEQ ID NO: 27262 - DNA, 466 bp, Homo sapiens
  SIMILAR (267)..(142): 361254mologous to Homo sapiens Ly91 Ig mu heavy chain precursor,accession number X52894,Smith-Waterman Score=69.
tcatggtgaggatcagtggggaaggcgctttacctcgaagaaacttctggtgctacacgtgtgtgtgttgtggtctgtgactttgcagcgggggaaactgaggccctaagagacggtgtctcaacatgtggtatttggacggctgccatcagagacataatagggggatctctggcggccacttggataaacatggcctctggagccctgcttcagacctacacagccagacttggaacagagcccaaggaactgccattttataccccggggcaggggtgagccccaagaagtgcgaggcccattgttcacggggtgaaagccacccgtccaaagccaaggaacctcctggacaaagacatgttttccaagtccgacccactgtgcgtcatgtatacccaagggatggagaacaagcagtggcggtgagtttgggcgcaccgaagtcatcgacaacacgctcaat

SEQ ID NO: 27263 - DNA, 523 bp, Homo sapiens
  SIMILAR (221)..(352): 971254mologous to Homo sapiens Membrane-bound protein PRO203,accession number Y66638,Smith-Waterman Score=232.
ctcaatcatggctgtagagtttatgcctgtgtgtgtacacgttatagttcattgactctgtgcaactattcttcagggacctagtacttaagatactgtactcatatttttccctctttacccaccgcccacagttttcccacccttacttggctctctcttagtcatgggctggcttgaccagtttaattactttttttctgtttcatacttctacaggaggagacctctgaacagatcacaaatgttacgtgagctttttcctgttttcactcacctgccatttccaaaagatgcctctttaaacaagtgctcctttcttcacccagaacctgttgtggggagtaaggtaggaaattttgagaggacttggatctagaattttctttatttgggacctggactgatgtcataaccaaggccttccctgcatattggcttagagggttacagggtgaattgaggggacacccacacagactaggtcttccctcctgctgctagccaagagacttgcaggggg

SEQ ID NO: 27264 - DNA, 1185 bp, Homo sapiens
  SIMILAR (578)..(1180): 491254mologous to Homo sapiens copine I,accession number U83246,Smith-Waterman Score=490.
ccgaccggggtgaatttccgggtcgaggatttcgtctggagttgggggagagcccagggctccagtcgtttcggatgaggcgtgaatcgcgcagggtattgactaatttggggtgggggggtccggtgggcgatggagcagcctgaggacatggcgtcgctgagcgagtttcgactccttggcgggcagcatcccggccaccaaggcggagatcaccgtgtcctgcttgaacctactggacaaagacatgttttccaagtccgacccactgtgcgtcatgtatacccaagggatggagaacaagcagtggcgggagtttgggcgcaccgaagtcatcgacaacacgctcaatcctgacttcgtgcgcaagttcattgtggattactttttcgaggagaagcagaacctccgttttgatctatactacgttgactctaagagttctgatttatccaaacacgatttcctgggccaggccttctgcacccttggagagattgtggggtcccctgggagccgcctggaaaagcccctcacgataggcgcattcagcctgaattccaggacgggcaaacccatgccaactgtgtccaacggtggtgtcccaggaaagaaatgtggcaccatcatcctgtccgctgaggagctcagcaactgtagggatgtcgccaccatgcagttctgtgccaacaagctggacaagaaagatttctttgggaaatctgaccccttcttggtattctacagaagcaacgaggatggaacgttcaccatttgccacaagaccgaggtcatgaagaacaccctaaatccagtctggcaaactttctccattcccgtgagagccctctgcaacggcgactacgatcggaccatcaaggtggaggtgtatgactgggatcgggacggcagccatgacttcattggggagttcaccaccagttaccgggagctggcccgtgggcagagccaattcaacatctatgaggtggtaaacccgaaaaagaaaatgaagaaaaagaaatacgtgaattctggcacagtcaccctgctttcctttgctgtggagtcagagtgcaccttccttgactacatcaaaggagggacccagatcaacttcactgtggccattgatttcactgcctccaatgggaacccctcacagtccacatccctgcatgtatt

SEQ ID NO: 27265 - DNA, 2586 bp, Homo sapiens
  SIMILAR (1858)..(2346): 661254mologous to Homo sapiens Membrane-bound protein PRO203,accession number Y66638,Smith-Waterman Score=515.
  misc_feature (1)...(2586): n = a,t,c or g
atggcctctggagccctgcttcagacctacacagccagacttggaacagagcccaaggaactgccattttataccccggggcaggggaacctcctggacaaagacatgttttccaagtccgacccactgtgcgtcatgtatacccaagggatggagaacaagcagtggcgggagtttatggagaccatgttgaattacgatcttgcattcagcatcttggttatgcctcttggtcctgggtcagctgtagtcctcaccgacacaggtgacaaggaattgaatgggatggagtactgcgttcctccactagagatcttttcccagattgacttcagttttttaattgacctttggggcgcattcagcctgaattccaggacgggcaaacccatgccagctgtgtccaacgggnatgtcgccaccatgcagttctgtgccaacaagctggacaagaaagatttctttgggaaatctgaccccttcttggtattctacagaagcaacgaggatnggaacgggatcccgtggagcactgaagaaactgatccggaggcccgcctagcggtgggccagtatcccgcccctgtgaaagggcgatggctgcgctggttcaccatttgccacaagaccgaggtcatgaagaacaccctaaatccagtctggcaaactttctccattcccgtgagagccctctgcaacggcgactacgatcggaccatcaaggtggaggtgtacgactgggatcgggacggcagctacctcacagtcagcttcattgtttccacctggaatttgcctcgtcttaccctggcgttcctgtactcctttgcctggaatagtctcctcttctgtgccagttggggacagctaccagntctccggctggatgccccaggccagcacattgaccaaggccctctggcagtgactggggaagttaaaggagccaaccctggggtcagtgggagttctgccgtgtacaagtcttggccgtgcttgatatgttaccaaacgttcctgggggtaaaatcgcccctggttgagaccgctgagttagccaccaacaagccttctctgagcacctactctgagcctagccccatgatttatctgacacaggtggtaaacccgaaaacagaaaatgaagaaaaagaaaaacgtgaattctggcacagaatcattgtagtcaatcattttccagttctcagccgctcagttgtgatcaagggacacgtggtttccgaactgccagctcagaataggaaaataacttgggattttatattggaagacatggaatcttgctgccaacgagatcagcatttatgacaaactttcagagactgttgatttggtgagacagaccggccatcagtgtggcatgtcagagaaggcaattgaaaaatttatcagacagctgctggaaaagaatgaacctcagagaccccccccgcagtatcctctccttatagttgtgtataaggttctcgcaaccttggggattaatcttgctcactgcctactttgtgattcaacctttcagcccattagcacctgagccagtgctttctggagctcacacctggcgctcactcatccatcacattatgctgatgtccttgcccattgccaagaagtacatgtcagaaaataagggagttcctctgcatgggggtgatgaagacagaccctttccagactttgacccctggtggacaaacgactgtgagcagaatgagtcagagcccattcctgccaactgcactggctgtgcccagaaacacctgaaggtgatgctcctggaagacgccccaaggaaatttgagaggctccatccactggtgatcaagacaggnaaagcccctgttggaggaagagattcagcattttttgtgccagttccctgaggcgacagaaggcttctcctgaaaggttttttcgacaagtggtggcgctagatttccctgagcgggggttcccattttcttatccatggaggagacctcttgaacagatcacaaatgttacgtgagctttttcctgttttcacgtcacctgccatttccaaaagatgcctctttaaacaagtgctcctttcttcacccagaacctgttgtggggagtaagatgcataagatgcctgacctattttatcattgcagcgggtgaagccatgtttgcagctcatccctcccttccagtgccgaagaccattgtcagtctgtggccatgccaatagagccaggggatatcggctatgtcgacaccacccactggaaggtctacgttatagccagaggggtccagcctttggtcatctgcgatggaaccgctttctcagaactgtaggaaatagaactgtgcacaggaacagcttccagagccgaaaaccagggttgaaaggggaaaaataaaaacaaaaacgattgaaactggttttctggggggtttggttacttagttaacctgcccttttggcatgcatgttgtggaaccagctgtgagctgcaaggcagtgggccagagcctccgccctcctgaactcttcctgcaggtggctcaggaaggattcagcctggccacttg

SEQ ID NO: 27266 - DNA, 554 bp, Homo sapiens
  SIMILAR (156)..(551): 971254mologous to Homo sapiens peptidylprolyl isomerase,accession number X52851,Smith-Waterman Score=694.
  misc_feature (1)...(554): n = a,t,c or g
aaaccgtgtactattagccatggtcaaccccaccgtgttcttcgacattgccgtcgacggcgagcccttgggccgcgtctcctttgaggtaaggggcctggataccaagaagtgactgctcatctaatccataaagctatgttaacagattggngctgtttgcagacaaggtcccaaagacagcagaaaattttcgtgctctgagcactggagagaaaggatttggttataagggttcctgctttcacagaattattccagggtttatgtgtcagggtggtgacttcacacgccataatggcactggtggcaagtccatctatggggagaaatttgaagatgagaacttcatcctaaagcatacgggtcctggcatcttgtccatggcaaatgctggacccaacacaaatggttcccagtttttcatctgcactgccaagactgagtggttggatggcaagcatgtggtgtttggcaaagtgaaagaaggcatgaatattgtggaggccatggagcgctttnggtccagggattgcaagaccagcaagaagtca

SEQ ID NO: 27267 - DNA, 1226 bp, Homo sapiens
  SIMILAR (756)..(1223): 811254mologous to Homo sapiens peptidylprolyl isomerase,accession number X52851,Smith-Waterman Score=698.
atcgtaaaacgttgagcccgccccatgagggagtgaacatacgatccggaggcacgaagggggaatccccgtcatggctaacgagctcgtccgacattacatctgacggcccacagggccacaacggcctacacagccggcagggaaacacagaaagccagaggggggagcagatgaggggcaccaccacaaatgacactgaagatcgccagtacaccgagcaacagtggggggctcctgtccttgaaactgactttgcctgtgcttgtggaggaggctggtgttcattttcattctttggaaagagcagcaaaacagataaacatccagccagactgatcaagacaaacagaaaaatggacaaattccttgaaaactacaacttgccaaaattaagacaaaatgcaacaaaatctgaaaagtcctatggatctactaatgaatttgaattggtagttaaacatcctccaagagagaaaactccagggtccaaatggcttctctggctgtcctccacactgcagctggagtctcgagcccagagagtggagtccacggcccccacaagctggtctttgtgtctccaattcattcgcatcctcaagctcccaggcagagccagactcagtacaagcaggaggggcaagagtgtggggagagcccctcgaggtgtgagtgcacagagaagaccagaaactgagggtgaggaagaaatattaagaacgacccttgggaggggccccatactatcagctatggtcaaccccaccaagttcttcaatgagccctggggccgcatctctatccagctgtttgcagacaagtttccaaagacagcagaaaatgtttgtgctctgagcattggagagaaaggatttggttataagggttcctgctttcacagaattattccggggtttatgtgtcacggtggtgacttcacacaccataatggcagtggtggcaagtacatctatggggagaaatttgatgatgagaacttcatcctgaagcagacaggttctggcatcttgtccaaggaaaatgctggacccaacacaaacggttcccagtttttcatctgcagtgccaagagtgagtggttggatggtgagcatgtgttctttggcaaggtgaaagaaggcatgaatattgtggaggccatggagggttttgggtccaggaatggcaagaccagcaagaagatcaccattgctgactgttga

SEQ ID NO: 27268 - DNA, 962 bp, Homo sapiens
  SIMILAR (385)..(711): 511254mologous to Homo sapiens peptidylprolyl isomerase,accession number X52851,Smith-Waterman Score=221.
ggcacgagggacgccaccgccgaggaaaaccgtgtactattagccatggtcaaccccaccgtgttcttcgacattgccgtcgacggcgagcccttgggccgcgtctcctttgaggtaaggggcctggataccaagaagtgactgctcatctaatccataaagctatgttaacagattggaggtagtagcattttcattacaagtgactaaaagaacagctgtttacccctgatcgtgcagcagtgcttgctgttccttagaattttgccttctgtttgcagacaaggtcccaaagacagcagaaaattttcgtgctctgagcactggagagaaaggatttgggttataaggggttccctgctttcacagaattattccagggtttatgctgtcaggggtggtgacttcacaccgccataaatggcactggtggcaagtccatctatggggagaaaatttgaagatgagaacttcatccctaaagcatacgggtcctggcatcttgtcccatggcaaatgctggaccccaacacaaatggttcccagtttttcatctgcactgccaagactgcagtggttggatggcaagccttgtggtgtttggcaaagtgaaagaaaggcatgaatattgtggaggccatggagcgcttttgggtcccaggaatggcaagacccagcaagaagatcaccattgctgactgtggacaactccgaataaagtttgaccttgtgttttattctttaaccaccaagatcattccttctggaagccccagggagagcacccctccaacccatttgctcgcaagtatcctagaatctttgtgctctcgcttgcagttcccttttgggttccatgttttccttgttccctcccatgcctagctggattgcagcagttaagtttatgattattgaaataaaaactaaataacaattgtcaaaaaaaaaaaaaaaagcgg

SEQ ID NO: 27269 - DNA, 410 bp, Homo sapiens
  SIMILAR (39)..(305): 1001254mologous to Homo sapiens ribosomal protein S6,accession number M77232,Smith-Waterman Score=467.
  misc_feature (1)...(410): n = a,t,c or g
tcgaccgcctcggaggcgttcagntgcttcaagatgaagccactggctgccagaaactcattgaagtggacgatgaacgcaaacttcgtactttctatgagaagcgtatggccacagaagttgctgctgacgctctgggtgaagaatggaagggttatgtggtccgaatcagtggtgggaacgacaaacaaggtttccccatgaagcagggtgtcttgacccatggccgtgtccgcctgctactgagtaaggggcattcctgttacagaccaaggagaactggagaaagaaagagaaaatcagttccgtggttgcattgtggatgcaaatctgaagcgttctcaacttggttattgtaaaaaaaggagagaaggatattcctggactgactgatactacagtgcctcgcn

SEQ ID NO: 27270 - DNA, 1098 bp, Homo sapiens
  SIMILAR (121)..(759): 631254mologous to Homo sapiens ribosomal protein S6,accession number M77232,Smith-Waterman Score=552.
  misc_feature (1)...(1098): n = a,t,c or g
aaaaaagcttatgtcacctgcgataagtgcacgttggccctcttccgtggtgtctcggaggcgtntcagctggcttcaaagatgatagctgaacagtctccttcccagccactggctgcccagaaactcattgaagtgvgacgatgaacgcaaacttcgtactttctatgagaagcgtatggccacagaagttgcatgctgacgctcatgggtgaagaatggaagggttatgtggtccgaatcagtggtgggaacgacaaacaaggtttccccatgaagcagggtgtcttgacccatggcccgtgtccgcctgctactgaagtaaggggcattcctgttacagaccaaggagaacctggagaaagaaaagagaaaatccagttccgtgggttgcatttgtggatagcaaatcttggagcgttcttcaacttgggttattgttaaaaaaaaaaaaaaagtaaagaaggatattccctgggactgactgatactacagtgcctcgccgcctggggccccaaaagaagctagcagaatccgcaaacttttcaatctctctaaaagaagatgatgtccgccagtatgttgtaagaaagcccttaaataaagaaggtaagaaacctaggaccaaagcacccaagattcagcgtcttgttactccacgtgtcctgcagcacaaacggcggcgtattgctctgaagaagcagcgtaccaagaaaaataaagaagaggctgcagaatatgctaaacttttgggccaagagaatgaaggaggctaaggagaagcgccaggaacaaattgcgaagagacgcagactttcctctctggcgagcttctacttctaagtctgaatccagtcagaaataagattttttgagtaacaaataaataagatcagactctgagaaaaaacataaaacaaaaaaaaaatggggggggcggcttttagaggatccagtttttccccggggggggggggaagttttttttttttatggggggccccaaaaaaaaatagggggggggggtttttaacggcgggggggggggaaacccggggggtcccccaattaaagcgggggggagcaaaggaggctcc

SEQ ID NO: 27271 - DNA, 415 bp, Homo sapiens
  SIMILAR (336)..(413): 1001254mologous to Homo sapiens Human secreted protein, SEQ ID NO: 7596,accession number G03515,Smith-Waterman Score=137.
agcggaagcaggctccaggtctcggagctcatccagcacacctacgagcccgaagcccctcctgcagtcccccaaacccagtctggcagcacggcccgtcatcccgcagaaaccaagaaccgcctcacggcctgatgacattccagactctccatctagcccgaaagttgcccttcttccacctgtcctgaaaaaagttccttcagacaaagagagagatggccagagtagcccccagcccagccccaggacattttcacaggaagtttcaaggagaagctggggccagcaggcccaggagtatcaagaacaaaagcaacggtcctccagtaaagatggccatcaaggcagcaaatctaatgactccggggaagaagcagaaaaagagtttatttttgtgtaaaggtcacccacg

SEQ ID NO: 27272 - DNA, 3142 bp, Homo sapiens
  SIMILAR (191)..(895): 551254mologous to Homo sapiens dJ501N12.1,accession number AL022170,Smith-Waterman Score=486.
cagaacgagacttatctatgataccagttttggaattatcagagcccttaaaataaccatgattaagttgttaagggctctagtggaaaaagcagacaacatgcaagaacagatgggtaatgtaagcaggagataaaagctcttaagaaaaaaaaattaaaaggaaatactagagataagaaacctgtaacagggtattgtcaccagcaccacccagcaggtaagcgagccagtgcctgtgacttctccttctattcttaactgaccctctgagagcaaaggacttctaatccaggaagatttaaaatcagcagagcggctcatgcgtgatgctaagaactctaaaacggtgagtttcacttcaggctgtgtgagagtctggtataataaaaacgtttcataaaatttagttttagaaattcaggagaccctggaatcaatggctggagaagttacaagagtagtagatgaacaactaaaggtttgtggggtttgttatttgggaaatgaaattgttaatatttaactacgcatgatagcatttcattcccgacaagacttgattcatgccagcaccgaaaagatttctattccacgtacctttgttaaaaatgtcctgttggagcagtctggaattgatatccttaacaaaattaggtaggtttataatgttaataaacctaggagctgcagtttctgtaaatgcagtcgaggcagctgtaaagaacattgccatcataaactggtgagtgctgtgcacatcttgagcaggacctcctgtttcagctctgctgtgatgcaggatgacttccgggagaagccagttaaacgttccatcatcacagtggaggagctaacagagatagagcgtttggaagatctggatacctgtatggtaagacacatcctctggtggtaccgttacccttttcactggactgtgccattgtttttttttttttttagcctttgcactgagggcttacactgagtgttcggtggatagtatctttattctggtcattcagacaggctcctattagagtgtctgcagaatagtaagtccagataatcggtcaataccatgaccagagtgatttctttaagtattcctaaataaactttttccctcagacaggagaagcggagctcgggatttatctctgagttgccctctgaagaggggaagaagctggaacactttaccaagttaaggccaaaaaggaataagaagcagcaacccacccaagcagcggtaggtggactgcaggagaggccccatctctcccacacccttttcttctctggggaaagttggagggtcgtagatgaattttttaccaagaaggtgaccaaaatggattccaagtgagttcagagtaatttcactgataatgctattttattcatatttaaattactaacagttacaattaattctcggaaaagtagtggctttctcaatttaatcaaatcccggtccaaatccgagcgaccaccaacgatcttgatgacagaagaaccctcctcaccaaaaggggcagtcagaagtccacctgtggactgtcccaggaaggacacaaaggccgccgagcacaatggcaattctgaacggatagaggagataaaaacacctgactcctttgaagagagtcaaggggaagaaatagggaaggtggaacggagtgacagcaagagcagcccacaggcagggcggaggtatggggtccaggtgatgggcagtggtctgctggcagagatgaaagccaagcaagagaagagagctgcgtgtgcgcagaaggtaagggtggacctatttttaattcattcatttatttgatatataatagatgcacacattttcatggtgggaggtggggcaggtaagtcaggccattgccatcacccccttaggaaaagcgcttaccttctgattgcagagtcacatgattcagaacccaaagcggaagcaggctccaggtctcggagctcatccagcacacctacgagcccgaagcccctcctgcagtcccccaaacccagtctggcagcacggcccgtcatcccgcagaaaccaagaaccgcctcacggcctggtaagagttttgcagttagggagttgcattgtgaccaggtggcttcccagagccagctggatcagactctgcaggtggtttcaggggcagctggtgagcgaggtacagcggcttctgcaggaggggatcacaagaaacctatgcaaagctgtgaaagtgatgcagacaaagagagagatggccagagtagcccccagcccagccccaggacattttcacaggaaggtaaggattgtaaggatttcttttctctgggttagctctccccaaggagggacatttcaaaataaaggagtgctcgctcagtcacaaggtcagatgttccttactctcagaagtgtggtgcagacatggacattctcagggcgaccctgcaccagtttgctccttctaatttgctgaggtagaagcacagcaagctaatcctgtgacgagaatgctttcttcccaaatcagactgagctgttaccaaggggccgaccatggctaacagcttccagctgccacaccttgagaccctctacagtggtcttgctgtggctaggccacccccactttccctgccaaccaccgaggacggctggtacactagagctgcccaacacaggactctactgagcaacttttgctctagggccctcctctggcctggtttgaccctttggcctgaccagccctcactgaagcctgtcctctctgtgatcaagtcatttcgggtctggctcatgatgcaccttctcatttccccaggtgaacttattcccttctaaggctacaattcccacctttgcagtgatgtctccctcgtcttttgctttatccagagcaaagctgggcatcaagacaggtgtatgtgtccagtggctctgccacctgccctcagcatgggctgtgttctgtgctccggcagccggtggtgcagagtggctgatctttgcctggtggagccattgaatgttggcttttctccttgctgagagtgtggctgtcataagatggggaaagaagggaggaaggacaaggtgtgtgatgcacagtcctgaatt

SEQ ID NO: 27273 - DNA, 484 bp, Homo sapiens
  SIMILAR (103)..(378): 271254mologous to Bacillus halodurans pyruvate dehydrogenase E1 (lipoamide) alpha subunit,accession number AP001507,Smith- Waterman Score=88.
atgaatcggcaactaagtgactcctatacagaagacaccaaagagccatcagatgtcaccacatctgagagaaccagaagtcctccaggttctgccaaaaccactatgatagacaccttgaaaaaactgcaggatgtactaaaaactgaggactccaaaaatcccacaaagtcagcagcagatttgttggaacaatatgtcaaggctacgggaccaatcatagagatcctccaaaaagcgacaaagactatggaaatgatcatgattgtggaggagaaagccagtgacgaactccaacctgacccggagctccagcagcgatacatccacagtgtccgtgggaagcccgggctggtgaagcagcggacacaggagattgagacccggctccggctggcgggcctcaccgtctcttccccactgaagcgctcacactctcttgccaagctggggagtctcaccttctcaacggaagacctgtcca

SEQ ID NO: 27274 - DNA, 1029 bp, Homo sapiens
  SIMILAR (319)..(711): 271254mologous to Caenorhabditis elegans C06E8.2 gene product,accession number U00034,Smith-Waterman Score=98.
ctgctaactgagtggctgacggtcctgtctctcgagttggaggcatcttgacttagttgctgggagcctgtgttggaacttatttgttggagaaatgtcttcagagtcagaaaaggataaagagagactgattcaagctgccaaaatgttcttctttcatgtacaagatcttgcttctgtcataaacacactgactgaattgtttagcccgcagtatgaatactcaaatccttttgatggctgtgaaaaacaatagttacattaaggatttttttgagcaaatgctcaaatatttttaaggagatgcaatctgtagtggatgcaagacatgacaaaattcaaaaggagtctttatgttccaaggttgcaatggccatgtgctctgtggttcagaagagtaccaatgtagaggagttgcatcagtcagctaaagaagtattcaaaagtgcccatacgccagtcatcatctctgtgctaaacagcagtaacatccttgggagtctggaatcttctctttcacacttgatgaaattccccatcatgaatcttcaattaagtgacttctatacagaagacaccaaagagcaatcagatgtcaccacatctgagagaaccagaagtcctccaggttcttccaaaaccactatgatagacaccttgaaaaaactgcaggatgtactaaaaactgaggattccaaaaatcccacaaagtcagcagcagatctgttggaacaaattgtcaaggctatgggaccaatcttagagatcctccaaaaagcgataaagactatggaaatgaatatttctgtgtttaagaaagccagtgacaagtagggatgcaacagaaatgttcatttctgtcagaaaactacttaaaatcttatggtttttcatagtagtttctaagatcttttggtgccaaacatgtgctatgttagaacataagtacacaaaagtcatctggcaaaacatttacctgtagttttgctttattaaaataaaaagaaataattaagaaaaaaaaaaaaa

SEQ ID NO: 27275 - DNA, 996 bp, Homo sapiens
  SIMILAR (310)..(528): 891254mologous to Homo sapiens Peptide sequence derived from a human secreted protein,accession number Y40083,Smith-Waterman Score=341.
atggcggccacaccccctcatcgcgcgggacccaacccatgcagacacagtaggcacctcagcgagggacgcgaggagacgcgcacacacccacactcaccacacacccacggagggggtgtggaaggccccgctcccccggcatctcggctgcagcgggacaaggtgacacatccgggagcccggcagcgcgccgggtgtgcactcacccgggcccgccgcccgcgagcctcggacgcgggcagcagcagcagcagccgccgccgccgccgccgccacctccggccctccacgtcagccgacggcgggagggagcgggtggcggcgttgaagcgagtactttacctcgtgtgggcctttattcctgaatcttggctaaactctttaggtttaacctattggcctcaaaaatattgggcagttgcattacctgtctacctccttattgctatagtaattggctacgtgctcttgtttgggattaacatgatgagtacctctccactcgactccatccatacaatcacaggtcatgaaaggaacaccaatgttttgcaaactatgggcagcagtgtttttgagggtcatgatcagtttagtgttacagtcacaggggaccctatggccagggctggaagaagccagctagagcctcacagtgactcagatgccacactccaattgcactgtagtcagcccacttgtgtcataaagcctgtttacacaaagcctagcatattagaagcagctgtgagtcagcctgcttcagctgctgctgctgccccaagaggcccatctctccctgtgatactttggtttctaaggcaacctcttttgaatgttctcagtgaatgcaccatgggtgggcacatcctggggaaagttcagtcactcactcctcaccaccattctgtgaaggatttacgcacctggcaagaattaaaatgcagtgtctaccttattgctgatggagcccgattttcaagtgctgcataa

SEQ ID NO: 27276 - DNA, 710 bp, Homo sapiens
  SIMILAR (21)..(497): 691254mologous to Homo sapiens DSCR5b,accession number AB035745,Smith-Waterman Score=495.
gaggaggcgagaatggaccaatggtgccacggagcacatcgctgacgctgattgtgttccttttccacagattgtctaaagccccaggaaaaatggtggaaaattcaccgtcgccattgccagaaagagcgatttatggctttgttcttttcttaaagctcccaatttggcttcatactttacctcgtgtgggcctttattcatgaatcttggataaactctttaggtttacccatctggcctcaaaaatatttgggcagttgcattacctgtctacctccttattgctgtagtaattggctacgtgctcttgttttgggattaacatgatgagtacctctccactcgactccatccatacaatcacagataactatgcaaaaaatcaacagcagaagaaataccaagaggaggccattccagccttaagagatatttctattagtgaagtaaaccaaatgttctttcttgcagccaaagaactttacaccaaaaactgaactgtgtgtaaccatagtaacaccaagcacgtatttatttataagtttttgccattataattttgaccataaattaatttgaccatctctcttattaatagagaagtaaaaaatgtaagttgaccttctcttagattatgttcaatgaatattgtaaatgttcaagtattgttaatgaatagaataaatacaatattgcattcccaaaaa

SEQ ID NO: 27277 - DNA, 524 bp, Homo sapiens
  SIMILAR (277)..(429): 761254mologous to Homo sapiens L7a protein,accession number X52138,Smith-Waterman Score=186.
ttaaatttgtgtaacgtccttgacgccttcacgttttctaattataaggtgtttacatccctgagtacattgggatgactggcatgtagagccgctccaggtgccagtcagaatcggaacatgcaggatacttgtgcgtctgcaagtaaggacaatctcgatggtgatcggtgtctctgtctctcccacattgcagagtgtgtgcatgcacgcaaagctgtgtaaagcatagttctcagtgctgacttttctatcaggactctggcaacctgaggctttgtcaaatgcccctgctactacatcaggttgcagcagcaaagagctgtcctctatccagagctgaaagtgcctcttgcgatgaaccagttcaccccggccgtggaccgccaagcagctactcagctgcttaagctggcccataagtacagagttttctgggtttgttgttgttgttgtttttgcaaagagctggagagatactaagatgagtgaaatatagattccactcttctttaagaggagtc

SEQ ID NO: 27278 - DNA, 675 bp, Homo sapiens
  SIMILAR (62)..(613): 421254mologous to Homo sapiens L7a protein,accession number X52138,Smith-Waterman Score=243.
ccaggcggtggaattcggctgaaagtgcctcctgcgattaaccagttcacccaggccctggaccgccaaacagctactcagctgcttaagctggcccacaagtacagaccagagacaaagcaagagaagaagcagagactgttggcccgggccgagaagaaggctgctggcaaaaggggacgtcccaacgaagagaccacctgtccttcgagcaggagttaacaccggtcaccacctttggtgaagaaacaaagaaagctcagcttggttggtgattgcacacgaccgtggattccaatcgagctggttgtcttcttgccctgccctgtgtcgtaaaatggggggtcccttactgcattattcaagggaaaaggcaagactgggacgtctagtccacaggaagacctgcaccacttgtcgccttcacacaggtgaactcggaagacaaaggcgctttggctaagctggtggaagctatcaggaccaattacaatgacagatacgatgagattcggccgtcactggggtggcaatgtcctgggtcctaagtctgtggctcgtatcgccaaagctcgaaaaggcaaaggctaaagaacttgccactaaactgggttaaatgtacactgttgagttttctgtacataaaaataattgaaataatacaaatttttcctt

SEQ ID NO: 27279 - DNA, 684 bp, Homo sapiens
  SIMILAR (289)..(510): 901254mologous to Homo sapiens ribosomal protein S26,accession number X77770,Smith-Waterman Score=360.
atgaatagaagagagcacaaagacaaggagaatgacatccaggatcccatctggaaaagggtaagactaaaccaggaagaagttgaatccctgaatagaccaataacaggttctgaaattgaggcaataattaagagcctaccaaccaaaaaaagtccaggaccagatggattcacagccgaattctaccagaggtacaaggaggagctgatacttgagctggacactcctcaagaagtcattgcagttaagtcagctcagaacagaggctcagcagtggcccggcagatgacaaagaaaagaaggaacaacggtcatgccaaaaagggccgcggccacgtgcatcctattcgctgcactaactgtacccgatgcgtgcccaaggacaaggccattaagaaattcgtcattcgaaacgtagtggaggccgcagcagtcagggacatttctgaagtgagcgtcttcaatgcctatgtgcttcccaagctgtatgtgaagctatattactgtaacgggtggtacaaattacaacacagctcgacattagttattctcccaaaacctgcggctgcctgtatcattccaggcaaaaaggactttgattactgcaacccaattggttgtcaagggagccttgattacgaacccccctttggtgcctcgtgtaacccaacccgtgcttaa

SEQ ID NO: 27280 - DNA, 1096 bp, Homo sapiens
  SIMILAR (56)..(1093): 991254mologous to Homo sapiens Extended human secreted protein sequence, SEQ ID NO. 222,accession number Y35973,Smith- Waterman Score=1834.
cggcccctgactttgctctggtctctctcccagctccctgcccaggcccacagccatggccatggcccagaaactcagccacctcctgccgagtctgcggcaggtcatccaggagcctcagctatctctgcagccagagcctgtcttcacggtggatcgagctgaggtgccgccgctcttctggaagccgtacatctatgcgggctaccggccgctgcatcagacctggcgcttctatttccgcacgctgttccagcagcacaacgaggccgtgaatgtctggacccacctgctggcggccctggtactgctgctgcggctggccctctttgtggagaccgtggacttctggggagacccacacgccctgcccctcttcatcattgtccttgcctctttcacctacctctccttcagtgccttggctcacctcctgcaggccaagtttgagttctggcattacagcttcttcttcctggactatgtgggggtggccgtgtaccagtttggcagtgccttggcacacttctactatgctatcgagcccgcctggcatgcccaggtgcaggctgtttttctgcccatggctgcctttctcgcctggctttcctgcattggctcctgctataacaagtacatccagaaaccaggcctgctgggccgcacatgccaggaggtgccctccgtcctggcctacgcactggacattagtcctgtggtgcatcgtatcttcgtgtcctccgaccccaccacggatgatccagctcttctctaccacaagtgccaggtggtcttctttctgctggctgctgccttcttctctaccttcatgcccgagcgctggttccctggcagctgccatgtcttcgggcagggccaccaacttttccacatcttcttggtgctgtgcacgctggctcagctggaggctgtggcactggactatgaggcccgacggcccatctatgagcctctgcacacgcactggcctcacaacttttctggcctcttcctgctcacggtgggcagcagcatcctcactgcattcctcctgagccagctggtacagcgcaaacttgatcagaagaccaagtga

SEQ ID NO: 27281 - DNA, 716 bp, Homo sapiens
  SIMILAR (716)..(606): 721254mologous to Homo sapiens PRO0898,accession number AF130051,Smith-Waterman Score=133.
acccaatcaattctggggcttccaattcctctctccatggtcttatgtgaaataatacatttttaaaatattgttaaattgacttcaatgactaagattgtggtggagaggatatttccccaaactaactctttctctgacacttaggggttcattgtaatagtaacaccttgctagcaatcatctgctagtgatttgctcatggaagaaaaaggctaaggaaatttaggtttgatgacctttttcagagtttctgggaaagcaaaaccttctctctactactcactgcaaacaagcatgttgtgcaagctgctgctgccaaccaggtcacatccattagtgaaagtcaaatgctgtggagagagacattcaaacctgggtcaactgatagtatccattttcaatttctgacccaatcaattctggggcttccaattcctctctccatggtcttatgtgaaataatacattttttaaactgttgaagtcatattgagctgaaatttcccttaattacaactcttaatattttaactatttatgctaagtttctttgttccagaaaaagtactttaactcggccgggcgcgggtgtcacgcctgcaagcctgtaatctcagcactttgggaagccgagacgagcggatcacgaggtcaggagatcgagaccatcctggctaacacggtgaaaccgcgtctctactaaaaaaaaaaaa

SEQ ID NO: 27282 - DNA, 1566 bp, Homo sapiens
  SIMILAR (1126)..(1407): 701254mologous to Homo sapiens cathepsin L,accession number Y18462,Smith-Waterman Score=358.
atgacttcactgggcgcttattggctcaggacccctgtgactgccagggcactggtcccagcactgcctgcgtgcagagctgtggtcacggcgctgggggctggcccagcagcagaggctgaacacagcagtcagcctgacagatgcccctctgccccgtcccttctgctcgatgtgggcagtgtcggaggcctgctgtcttctgtggcctttgggaaggagagtttatcttggcagggcttccccagctcagtgcacatcaggccctcggggaaaatgtggggagcgaagagtcactggtgggtgatgtgggcagctcccgtgactcctctacattcagggccatcctcaagagataaggtcactctctgggaaccagtgcggctggggtggcccctggcaggtttgcctccagagacccctcccttcaccattggatgtcagatccccgaagaagccatagcctcctgggaaactccatctgacaacagtcatcaggctcatgagccagatacaaatgctgagtctggggcctgcgtgcccgagaggccctttcctgtcagttggcccagggagcatcacacagggcactcttctcctcagtctctctcgcatctctctggcagacaggtggtcatgatcgtcagtgctgtggggccctattattccagagcaaatgctggagccagacttaccctgtggaaatgcacgaggacgtgggctgtgcctggcttgggacacatttggtctccatgtgaagaccgagattgcaactttctgcgcttggagcccaaaaggacagacacccaaggactctccaggccatacctcagtgacagcagctttgccatcccactggcctcaatcccagaaaaacttcaagagagcaaggcccaggattttaaaagggctaagactaatgttacagaaaatggactaccatggagagaggaattggaagccccagaattgattgggtcagaaattgaaaatgatactatcagtgacccaggtttgaatgtctctctccacagcattgacttcactaatggatgtgacctggttggcagcagtagcttgcacaacatgcttgtttgcagctcatatgacattaacagacaagacacttttcagaaagacaggtacaatcccaagtattctgctgctaatgacactggctttgtggacatcccttcacaggagaaggacctggcgaaggcagtggcaactgtggggcccatctctgttgctgctggtgcaagccatgtctccttccagttctataaaaaaggaatttattttgagccacgctgtgaccccgaaggtctggatcatgctatgctgctggttggctacagctatgaaggagcagactcagataacaataaatattggctggtgaagaacagggcagagagccagaggactctaatccagtggttcctgtttagtccacagcaaaggtgcggccggttggaagaacgcacagcctgcaagcagaagccttatctcccaattaagggtgtagaagaatctgggcgtgttgctggtggctcatgcctgtaa

SEQ ID NO: 27283 - DNA, 436 bp, Homo sapiens
  SIMILAR (2)..(64): 901254mologous to Homo sapiens HSPC005,accession number AF070661,Smith-Waterman Score=98.
gaccgtggtgcttttggccattggcatgttcttcaccgcctggttcttcgtgtatcctttcactgagcagccagaggaccagcattagtgatgtgggaagctcagggagaaaccacgctagattgccgtgggctgggctctctgcactccacagtccaccccttcgctttgccttaactgctgtgcccagttacgaggtcacctctaccaagtacactcgtgatatctataaagagctcctcatctccttagtggcctcactcttcatgggctttggagtcctcttcctgctgctctgggttggcatctacgtgtgagcacccaagggtaacaaccagatggcttcactgaaacctgcttttgtaaattacttttttttactgttgctggaagtgtcccacctgctgctcataataaatgcagatgtatagcaaaa

SEQ ID NO: 27284 - DNA, 297 bp, Homo sapiens
  SIMILAR (172)..(294): 1001254mologous to Homo sapiens HSPC005,accession number AF070661,Smith-Waterman Score=206.
atgagcagatataccagcccagtgaacccagctgtcttcccccatctgaccgtggtgcttttggccattggcatgttcttcaccgcctggttcttcgtgtatcctttcactgagcagccagaggaccagcattatccaccccttcgctttgccttaactgctgtgcccagttacgaggtcacctctaccaagtacactcgtgatatctataaagagctcctcatctccttagtggcctcactcttcatgggctttggagtcctcttcctgctgctctgggttggcatctacgtgtga

SEQ ID NO: 27285 - DNA, 445 bp, Homo sapiens
  SIMILAR (22)..(258): 1001254mologous to Homo sapiens HSPC005,accession number AF070661,Smith-Waterman Score=404.
gattagccttcgcggggcaaaatggagctcgaggccatgagcagatataccagcccagtgaacccagctgtcttcccccatctgaccgtggtgcttttggccattggcatgttcttcaccgcctggttcttcgtttacgaggtcacctctaccaagtacactcgtgatatctataaagagctcctcatctccttagtggcctcactcttcatgggctttggagtcctcttcctgctgctctgggttggcatctacgtgtgagcacccaagggtaagagctgcaatgggatggatgcgtgagcctccaaggcacagcccagggaagcctccccagagtcaggtaacaaccagatggcttcactgaaacctgcttttgtaaattacttttttttactgttgctggaagtgtcccacctgctgctcataataaatgcagatgtatagc

SEQ ID NO: 27286 - DNA, 448 bp, Homo sapiens
  SIMILAR (44)..(169): 951254mologous to Homo sapiens HSPC005,accession number AF070661,Smith-Waterman Score=208.
cccacgcgtccgcggagcggcggattagccttcgcggggcaaaatggagctcgaggccatgagcagatataccagcccagtgaacccagctgtcttcccccatctgaccgtggtgcttttggccattggcatgttcttcaccgcctggttcttcgtgtatcctttcactgagcagccagaggaccagcattagtgatgtgggaagctcagggagaaaccacgctaggtacatggaccccgccggttttgtacattggattggggctgagagaaggtaaggaggagaggagggctagtgatgcccaggggcaggttatagccttatttcccaagttcaggtgagctcagtttgttctttggatttccaggacagcgagcaggggacctggctggagtggaggtggggaataggggtgctacagatggaaaggtggtataaggaagggtg

SEQ ID NO: 27287 - DNA, 606 bp, Homo sapiens
  SIMILAR (169)..(384): 381254mologous to Homo sapiens HSPC005,accession number AF070661,Smith-Waterman Score=82.
  misc_feature (1)...(606): n = a,t,c or g
gaaatcgcaggactacaagtccctcaatgccacttgcgccggaggcacttccttttccggttgtgctaggcgcctgctcctgtcgacgtgttcttccgggtggcggagcggcggacttagccttcgcggcggcaaaatggagctcgaggcccatgagcagatatacccagcccagtgaancccagctgtcttccccccatctgaccgtggtgcttttggccattggcatgttcttcacckgcctggttcttcgtttacgaggtcacctctaccaagtacahctcgtgatatctataaagaggcbcctcatcctccttgagtggccctcactccttcaatgggctttggagtcctcttccctgctgctcttgggttggcatctaccgtgtgagtcacccaagggtaacaacccagaatggctttcactggaaacctgctttttgtaaaattaacttttttttttacttgtttgcttgggaagtgttcccacctgctgctcataataaagtgcagatgctatagcaaaaaaaaaaaaaaggggcgcccgttttaaaggacccttgggggggcccaagtttacgcgggcttgcaaggttttatttcttt

SEQ ID NO: 27288 - DNA, 480 bp, Homo sapiens; identical to SEQ ID NO: 1361

SEQ ID NO: 27289 - DNA, 672 bp, Homo sapiens; identical to SEQ ID NO: 1362
  SIMILAR (446)..(288): 351254mologous to Homo sapiens Human secreted protein, SEQ ID NO: 4667,accession number G00586,Smith-Waterman Score=73.

SEQ ID NO: 27290 - DNA, 1846 bp, Homo sapiens
  SIMILAR (292)..(369): 371254mologous to Lycopersicon esculentum extensin (class II),accession number X55687,Smith-Waterman Score=55.
atggcacagagaatcctgaaatgtgagaagaaatctcctagtggattctggcatgaggcaagggaggagaatgtcccctttgtgcccttggacacagttatcaggggaactgacgcctggaactgcatctgcattgtgatcttgacactaccggggcaagcattaggcaaagccatggccctgagaatgacgtggacagaaatcctggacaaggctggccaaagggggaatgcgtgggccctgctcccacccccgatgctgacatcaaaggagcagagacacgcaggagactccaggcagcacccgaggccctggccgccagcacccacctgtgtgccggctccgcagacgaggtccccccagcaccctggcagggactgtaccatcaacagacaaatggcagccgaccaaggaggcgactggcgtgtggaacagcactggccaccttgggaaccaagatattgggaagggacctgaagggcataagggaatccagagactcttgagaagggatcgtagctcacctcagaacgcctggagcagttggctaaacacagcaattttaggagcccctgacccctttgtccagagtgtgcccccccgcctgatgggcaaggacgcgcacactggccactctgacgatgccgaaagccctccatgtctacccgctacgccgcattcgcagacaggcgggggacatcgcggccgcggcaagctagagatgccgcctgctcgagcaaccttccacctgcagggccggccagttctactcttccaggatcactctcgtctcacccttctccccaaaatgtcagagcaagaaccaggaagggagaggctctttctggaagccacaggcataacgttactgaacaacgaggacaaaacatacacacgagcctgcaatgatggaagcaaaacagaacgtttggagatattcactgccgtttacaaggccacagtaagcagtaagcagattttctactcccctctagcagagaacatgttagcaggccctgtgatcaccaggagcatggacaaaagcctccagaagacaaaagtgcaggaaagctcatttctcagagatcagttcagaagtggtccagctgtcctaataggtgttacatcgtttggctgtgtcccaaatctcatcttgaattgtagctcccataatttccacatgctatgggagggacctggtgggagaaaactccgctgtgcattcgcgacggaatgcaagggacaaggacacatcgtatcttactatcttgaagataattttggctttaccactcctggaggtcttgccatagggtgtttgttgagccagtgtgatgtgtcctgtgttggctgcccaggtatatacgaccgtttctatcctcaggtcacctttactggggggaagactgaagacacttgtgaacaagctcctccagaatccttgcatgcagcttttgcagaactgataaaagcaatggtcggtcatgcttgccacaagctgcttctgttgagatcatcattctacgatcttgaccaatgggtgaagtttggttgcacttttggcatcttgcattcacagacctacagaaaccagattagggagcatgttggaggtggctctgtaagtgacaatgctaagattgagaacatagtgatgacatgtgaccaatctccaaagacacactgtgaggctccctcgcccaacggctggcgtggtctggagaggtctagggtaggagcaccctatgaagacatagtaatagaaactatccagaatggcacacagagagaaaaggaagatggaaaagattacgataaactacctccaaatgatgaggccagatga

SEQ ID NO: 27291 - DNA, 1023 bp, Homo sapiens
  SIMILAR (25)..(114): 1001254mologous to Homo sapiens alanine:glyoxylate aminotransferase 2 homolog 1, splice form 1,accession number AJ298293,Smith-Waterman Score=159.
  misc_feature (1)...(1023): n = a,t,c or g
atgaagtttgaccttaccagcagtgcttaccatggtcacctatcatccttaattgagattagcccatataagtttcagaaaggaaaagatgtcaaaaaagaatttgtacatgtgggagcagcaggagcccctgtgttggcagggttaattgaccatgatcagcaggtagctacaattagacaaggggcacgaaggacaccaaaaatgtgtcctctgggttccacacatatccttcctgcccctactgtggaacagcagccttacctacctgctgatcatggtcaattaaccctgccaacacaggggctcctgctgctccctagacataaggagtcaaaggtgctcaggtacttctggctgcgccattatagaatctgccgtgttcctcctggtgggggtgttgggggtctgtgtttagccatttatgcctattttagctgtaaaagaagtccaaatgaaaatcaggtgatggtggaaccatggggacttgggggtggggcagagatgggaacatttgtatcagttgagtcagcttcgtggctccctgtggagccagggccgagccttgtcatgcgcacttgccaattagagattgatcagccagcagtcaagtgcattctcccgttcttgcaagaaggatcagccctttccataccagccttgtgcaagacgtgctttggtctccttttctctcctacctggatcctgcctctcacgggccgtcctattgctgagactcggngactggcagttgattgtagcagccagctccgagctcagctgatgttgacaggattggcgacatgtggtttttccatgtgttttggggtgctcatgatcctgcagctgggttccaagagggtgcatcccaagaaccagcattctcagacgcaggaagcagaagctgccaagctgtttaaaaactatgcccagcactggcagtcacttttgccatctttaaccaggaaaagcgatgacaaggctggccacattccacgaacaagagaaatcatcttctcttaa

SEQ ID NO: 27292 - DNA, 1412 bp, Homo sapiens
  SIMILAR (625)..(747): 481254mologous to Homo sapiens Human secreted protein from gene 4 clone HE8ND56,accession number W83934,Smith-Waterman Score= 85.
ccggctggcctggacgaacgggaagccgggagctcggccacgggtggcgaggctgcggtgaggcctggtctccggctgccagaccatgctgagtggagcacgctgcaggctcgcctcatcgctgcggcggaacgcgcgcgcacgccgtccgcggtcgcccgtaggtgcctgcacgcagtcaggggtcgcggcctttggcccgaccggggcaagaagactgaggagccgccccgcgacttcgatccaggcgctgctggagttcctggtgtgcccgctctccaagaagccgctcagatatgaagcatcaacaaatgaattgattaatgaagagttgggaatagcttatccaatcattgatgggatccctaatatgataccacaaggcagctaggatgacacgtcaaagtaagaagcaagaagaagtggagcagcgttagtttcattaattttaaaaaaatttaaaaaaacggcaacagccaactttttcttaataccatatacccttttaaaaacacaggtggcaggtaataagtggaagggaaggatgttttctggtctcctccctacgttgactgttcttaattccactggtttctttagcaggactgttctactcagcctctggtggaagaaaacttcccacaggggctgcactagcacagcccagcctttgcttttacagcctgctccttgccctattaccataccagtggtatggtattcttccacctttggacttgggatgggtattaaactcttcagggcataattgatgcaactagagtcaatatgcctgtatatattaatgatagctcttgggccatcggatctctggaaagctccaaatgggatggaaatttagtttgcggggaaagaggcttttgcttggcgcatatccaggcttagggactgtggggaggccttaagtttgcagatgcttcttttattgtactccttgttctgccccttgttttttggaaggctctgacttataacctgctgtatccgggaagaaaccattttgaccagtgtcttgggttggagatgaacatcgcctaattggacatgtgatgacctatttccttattcccattcatcctaagagtcattgaaattttgttttgccttgtttgtttagcttcaaggtctttggtaaagtcacatgttaaggatgactgaaattaattccaaaggagtgatgttggaatagtccctcctaaggggagagaaatgcatttgaaccgaatgtgatataaaaccacataatcaaatagaaacttcatgtacttacaaaaactgagtttgtaaaattaccttcatttctttgacattaaatgcttatattagcaataaacatgttgacactttcctataaaaaataaaccagtttgcagtaaaaaaaaaaaaaaaaa

SEQ ID NO: 27293 - DNA, 867 bp, Homo sapiens
  SIMILAR (549)..(578): 901254mologous to Homo sapiens super cysteine rich protein; SCRP,accession number U63332,Smith-Waterman Score=77.
atggggccagaatatcagactgaaaaacccagactgtggcctggagcatgttttcagtgcctgtctttgctgcctgtgctgttgggtagaaccatccaggcgggcagccaggttatgagaggtgaagccttgcccgtggtgatactgcctgcaaaggccagagccaggaccgacccaggtctgacaccaaaacccatgctctttcgatttggggtaaaatttcaaaaccagacatatgtcttcgtgctccagctggccaaacctggtgccatggaaaatccagatgcttgcttacctggcaggccgtgctggatctgctacctggggccagtacaagcaattgagtattcctatgctatccttggaccctcagttcaggaaagacagagggaagaaagagggaaggggtgggaagaggaaggaagaaaggaagaacgcactaatccctgtattaaaggtagctggcaccctatggtgtttgcattcttggaaactacctgccacgtagtgaggaagcccaggcacccagcagagaaggttccctgtgatgctgctgctgctgctgctgcctctgctttgggatccacagctctaaaggaacccacagtgcaaacagcgacaaatggccatttgatccttgacttcagccatgtccttccggcagtccaaagcagcataccacccagcggccagcccagagagaagggcttttctgtactgcatggggctaggcgaaggcttgagcagagcagacaggctgttccatctcccaacaggccacaacagtttcactggattcgtccagtggctgaatctgcacggtctgctcgactactgcttgatgctcgattgacgctgatgctgtag

SEQ ID NO: 27294 - DNA, 774 bp, Homo sapiens
  SIMILAR (757)..(509): 291254mologous to Homo sapiens Human prostate cancer- associated protein 24,accession number Y48238,Smith-Waterman Score= 74.
ttttttttttttttattgcattctgtgcccattgtcatttcctaaagttcgtgctgttttctgttttacggatgcaaaaacttctcagatatttttaaggattttcaaatttttaagctgtattctgttccttcaaatatttccttgagagtcaatttttcattctatcttagacgatttgggttatatttcaggctttccacaaatgctgtttttttctttttttttgccacccatttatactaaaagatgaggcaatggaaagaatgagtggcaagtctgcatgcaggaagcgaagttggtcgctttgctctagggtgggtgaagcaggtgggtgggaagtcagccatcctagacgaaggaagcccccaaatgccacaaagttaagtggctctaaaatattatacctgcaggtgggacgttgagaatcaccgaggcccagaatatagaagtaaaagaaagttcttgcgcagccgccaggccaggtcgaagaaggtgagcagcgtgcgcgtgagcgtcttgcagaaggcgccgtaagagccgcgggtcccctgcgggcgcgacagccgcaccgccaggccagacagggccgccgccgccatggacctgatgctgcctcccacatagtgcccagagcccaaggcctccatcaggctccgctcactcaccgaccgtgggacagagggatgcacgcgggaaagtacgggcgggaggcctcctggactgctgctgatcgcgagctgcgctgcaaggcggaagccctccttgaattcc

SEQ ID NO: 27295 - DNA, 3576 bp, Homo sapiens; identical to SEQ ID NO: 27117
  SIMILAR (76)..(1881): 971254mologous to Homo sapiens tripartite motif protein TRIM33 beta,accession number AF220137,Smith-Waterman Score=3028.

SEQ ID NO: 27296 - DNA, 1383 bp, Homo sapiens
  SIMILAR (1068)..(904): 561254mologous to Homo sapiens Amino acid sequence of a human secreted protein,accession number Y19566,Smith-Waterman Score=162.
tcaccattgagtcacatcctggttcttgcttcccttctcagacccatccaggagttgcactggaggaaacttccattcacctggcgctatacgtgtttggggctggggagtctctggaagtgaactgcgtgccatcctgggacgcaggacacagtctgagatgattgcattgattgtctgctgatggctgcagtatccccactctccaacaggccctggtgtgtgttgttcccctctccttacaggaattttagtgtctggcttcaaactaacataaaattcaaaatgcacctctcgtcttggaggatcccacacagaaatgaccatgaagtagttatgatgtttaacctctcctcggtccgctgtgctggaaggagattgcgttgcactcagaagagtccaaatcatcggagccaagagcattccgggaggaaggaaggagccagggccacagctccgcagcaggagcatgctggctggtgggagcacccaggaggctgcgggagagggagtggtctggaggaagagtggaagagttaaggttccagagaccacagagtcacaggggctttgcaggatggggcaaggaccttgggcttttacactgagtaacatggggacctgctgcagggcgatgggctttctaagtttccaggtgatgtacctggagaatgactgtattagagcatatttattaaaaagttccccacacagggccaggtgccgtagctcaagcctgtcatcacagtatgactccatgaggattttttcacacatcattgcaacacaggcagtgactgacgccaccacctttgccctggaggctggtttctgggcccaagatattgactcaaatcctgcagctatttgatttcggaattcaaattgatctggtattccccgtgggactccagttgcgtttaaatagacatgagagtcgaaagacccataaggggcttctctcgcattatgatgtcttatttttccttcctctagttgatgaaatgccagggtgaaacggatagccaattggactaaagcacaagtgccgctccagttattcggcagagtgtccagtaaaggtccaccagaataccaccacacatccactaggggatgaacaagggctgactgattgataagttcttgaaaattcttaagctcactgcatcccctcaggtctccaaggaatgctgtttcctcccaggcatttgcaacttggtaacctgtttcaattgccaatacttgttttaagtctttaacttctacgacagccatcttggtcttgtggttagatggaggaggagcaattattccgttgtgagaggttttggaagaaggcttagaagaaggtgcaggcagtgcgggatcaaagaaatacat

SEQ ID NO: 27297 - DNA, 1332 bp, Homo sapiens
  SIMILAR (1069)..(1215): 481254mologous to Homo sapiens Amino acid sequence of a human secreted protein,accession number Y19566,Smith-Waterman Score=124.
atgagacaagatggcaaggtggcaagacagctattggtgattggtgagatggtgagacagcgatcagcagctggcaataaggaaggagacaagacgccccagcctatacctctcactgcccaaggaagtaagccctaccagtaccaccaggagggtacccctatatcagcccctaaaatcaaacctgtgtccattgtgggagataagaaacagatggatctgagtactgtccaaaaatatgcagatggagtggccacacataacctagaccatgctagttatcatgtggaaggagatacagttccagatatggaccctcagtggaattaccagagggcttcccaagatctcaaatgcaaaaatcacatgacggagaaagtcagaaatttcaagtgtgagagggagctggcccaaggaaattctactggctttgagatggagggatcacgtggcaaggatggtctctatgagctaagtggcccacagctgacagcaaggaaagaggtacctcattcctgcaactgcaacaaactaaatatggctgatgatctgaatcagcttctgattaaagccactcccttcactatctcggtgtctcctgtccgcggctcgtcctgctacatttcttggttccctgaccggcaagcgagagccgtgtgtggcaggcccccgtggaggatcaacgcagtggctgaacaccgggaaggaactggcacttggcacttggagtccggacgtctcaaactcgtgtgcgtgtggtgtgagcgtggtgttttgtctcgaggagacacgggtcaggtacaaactaagcccaccccactaggaactatgttgaaaaatttcaagaaagaatttaagggagattacggtgttactatgataccaggaaaacttagaactttgtgtgaaatagactggccagcatttgagggaggaaacttagcattccttggagacctgaagggatgcgatgagcttaagaattttcaagagcttatcaatcagtcagccattgttcatccgcaagcagatgtgtggtggtattgtggtggacctttactgggcactctgccgaataactggagtggcacttatactttagtccaattggctatccctttcaccctggcatttcatcaaccagaaggaaaaaaaataagacattgtaaatgggtccaacctccaagaccatccttaaacatcagtagactgggagctgtacgtggatgggagcagcttcgccaacccctgcaaagtgattctgaagaagacgacaagcgctgctccagtcacacccggaagctgactggtccactcatggccgaagcatga

SEQ ID NO: 27298 - DNA, 1663 bp, Homo sapiens
  SIMILAR (974)..(1138): 611254mologous to Homo sapiens Amino acid sequence of a human secreted protein,accession number Y19566,Smith-Waterman Score=187.
atgaaagggatggggagtatagaggaaatgtttgtagctttagactggtggtcaaggacatctcatggagaaggcatgtcttgccaagccatgaggacatctgggaagggagctacaggcagaggaaacagcaggtacaaacacctcggggtttctgcagttgttgcccattttcctcttggtcattgtgctggagacctctactgggaagcctggtggaagaacagaatcttagccaaacctgaactggggcgtagagcaggttattatctcaaaccctcaagttctcccccttttctaagccagttcccttcttctatgggggctgaggtttcagggacagaccctattagattatttgaaatgcgtttctttgatcccccgccacctgcaccttcctctaagccttcttccaaaacttctcacaagggaacaattgctccttctccatctaatgacacgactgagatagctatcgtagaagttaaagacttaaaacaaactttggcaattaagacaggataccaagatgcaaatgcctggttggaatggatcaaatattccattcacacgttaaacaaaagcaattgttatgcttgtgcgcacagcaggccagaggcccagactgtcccctttccactagggtggtcctccagtcaaccgggcatgggctgcatggtagctctttcccaggattctacagcctggagtaacaagtcatgccacgctctctctctgctatatcccgaagtccggcaccctgcgggtcagcccccaagggccatccagcttccgtctcccaacactaagttcacttcatgtctctcatgatagggagaaaaacttagcgttccttggagacctgaagggatgcagtgagcttaagaattttcaagagcttatcaatcagtcagcccttgttcatccccgagtggatgtgtggtggtattgtggtggacctttactgggccctctgccgaataagtggagtggcacttatactttagtccaattggctatccctttcaccctggcatttcatcaaccagagggagaaaaaataagacatcataaagcgagagaagccccttacgggtctttcgactctcacgtctatttagacgcaattggagtcccatggggaataccagggccactgaggtttgctgggggtctgctccagaccctagtcatgttggattttccagtgcctaaaggtatcaccagtgaagactataaaatagcaaagatggcagcctggcccttgctctgggaattccctcccaggggagtacagacctgttgctggcccaaatacactcatagaagatggctggagaccccagttgggaagacatctcacccagtcatgaataatgggatcagggacttgcttaaagaagcagtctggctgggcacagtagctcatgcctgtaatcccagcactttgaaaggccaagtatctaagcagactcatacctccctttgcagaattgttgctatctgtaagcctgtctacagcccatcttcatacaaaaatgggatcttcctgaacagactccaaatgaagtattggctgtttctgggtctcaagcctgctgaccttttggctggaactacaccactggctctcctggatcttgaaccttcagacttggactaa

SEQ ID NO: 27299 - DNA, 362 bp, Homo sapiens
  SIMILAR (102)..(344): 821254mologous to Homo sapiens Secreted protein encoded by alternate reading frame of clone ek591_1,accession number W85464,Smith-Waterman Score=370.
ggcacgagggatggctgcccaaagattgtcagtttgggtaactctaagacagaccttttctatgaatgcaaaaaatacggcttcaagaagaggtgattggtggtggccccttcctcccctccacatcaagctgctgcagctgccagaaaagatgcctgctactaccagcagaaagggagtggagcccagagcatcacgaggagtgccttctagtgtactgtcaccttgccaccccctcctgtcccttcacccagacacatggaagggatggaaaaggattcttcacagagcactccggtacactgtatcagacaaaaattgatagattagctaatgggttttcttgaatttgagaagcaaag

SEQ ID NO: 27300 - DNA, 518 bp, Homo sapiens
  SIMILAR (174)..(338): 1001254mologous to Homo sapiens bK223H9.2 (ortholog of A. thaliana F23F1.8),accession number AL008582,Smith-Waterman Score= 323.
gcctggaggaaagcacagcaatgtcagaatggatttatctgtatcaaggaagaaacccccagaacccaggcccttctggcttagccacagccttcaccttcatgtacatgcaggacactgtagcaacactggccttagctcttatcctcaacacactcagctcatacctaggtgatggcaagtgtgtgatttgtgactcctatgtgcgtccctgcactctggtgcgcatatgtgatgagtgtaactatggatcttaccaggggcgctgtgtgatctgtggaggacctggggtctctgatgcctattattgtaaggagtgcaccatccaggagaaggacccacttaaatctatcattaagcactatttgggtgtatatcgtgacaaagttgaatttgggacaattcaagttgacttcagctttaagcagagagatggctgcccaaagattgtcaatctggggagctctaagacagacctcttctatgaacgcaaaaaatacggcttcaagaagaggtga

SEQ ID NO: 27301 - DNA, 743 bp, Homo sapiens
  SIMILAR (277)..(396): 571254mologous to Homo sapiens bK223H9.2 (ortholog of A. thaliana F23F1.8),accession number AL008582,Smith-Waterman Score= 101.
tctgacgaggtcttacggaagttcccgaaacttccggtggccgggttagtgtaggagctatggctaaacatcatcctgatttgatcttttgccgcaagcaggctggtgttgccatcggaagactgtgtgaaaaatgcgaaggcaagtgtgtgatttgtgactcctatgagcgaccctgcactctggtgcgcatatgtgatgagcggaactatggatcttaccaggggcgctgtgtgatctgtggaggacctggggtctctgatgcctattattgtaaggaagtgcaccatccaggagaaaggacaagagatggctgcttcaaagattgtcaatctggggagctctaagacagacctcttcctatgaaccgcaaaaaataccggcttccaagaaagaaggtgattggtggggtgggccccttccttcccccccaacaatcaagtcttgctgcaagctgccaagaaaacatggccttacttacttaccagcagaaaggggagcagagcccagaagcatcaccaaggagtgcctgctagtgtactgggcagctttgccaccccctcctctcccttcacccagacacgtggtagggatggaaaaggattcttcacagagcatctctggcacaccatatcggagaaaacttgatagattagttaatggtttttcttgaattcgagaagcatagatctgttctccatattggtatgttctccctcaaccaagatcttctaaaaaggaat

SEQ ID NO: 27302 - DNA, 324 bp, Homo sapiens
  SIMILAR (1)..(219): 901254mologous to Homo sapiens pancreatic secretory trypsin inhibitor,accession number M11949,Smith-Waterman Score=352.
atgaaggtaacaggcatctttcttctcagtgccttggccctgttgagtctatctggtaacactggagctgactccctgggaagagaggccaaatgttacaatgaacttaatggatgcaccaagatatatgaccctgtctgtgggactgatggaaatacttatcccaatgaatgcgtgttatgttttgaaaatcgggccagttccccattagttactaaggtgaatggtggtaacgtagagcctgtggttgtccctgataacccggggcttggatggaggacttcctcttgtgcttccctgggagatctgcttcatagggcctga

SEQ ID NO: 27303 - DNA, 438 bp, Homo sapiens
  SIMILAR (112)..(348): 971254mologous to Homo sapiens pancreatic secretory trypsin inhibitor,accession number M11949,Smith-Waterman Score=407.
ggtggggccttgctgccatctgccatatgacccttccagtcccaggcttctgaagagacgtggtaagtgcggtgcagttttcaactgacctctggacgcagaacttcagccatgaaggtaacaggcatctttcttctcagtgccttggccctgttgagtctatctggtaacactggagctgactccctgggaagagaggccaaattttacaatgaacttagtggatgcaccaagatatatgaccctgtctgtgggactgatggaaatacttatcccaatgaatgcgtgttatgttttgaaaatcggaaacgccagacttctatcctcattcaaaaatctgggccttgctgagaaccagaggttttgaaatcccatcaggtcaccgcggaggcctgactggccttattgttgaataaatgtatctgaatatcaaaaaaa

SEQ ID NO: 27304 - DNA, 645 bp, Homo sapiens
  SIMILAR (154)..(642): 741254mologous to Homo sapiens ADP-ribosylation factor 1,accession number M84332,Smith-Waterman Score=635.
atgcacactgaaagtgatgtagatggacctccattgattcggctgctgagttcatcagaagctgttaaaatgagcacggttcagattcaatgtggcattttgaaagccaggggacacacccagggtgattatggtactcagcatggggaacataacatctttgccaacgtcttcaagggcctttttgacagaaaagaaatgtgcatcctcatggtgggcctggatgctgcagggaagaccacagtccagtacaagcttaagctgggggagatggtgaccaccattcccaccataggcttcaacgtggaaaccatggagtacaagaatattagcttcactgtgtggggcgtgggcggctcggacaagatccggcctctgtgcactgacagagggcgtatgattgaggcctgcgaggagttcatgaggatgctggccgaggacgagctctgggatactgtcctcctggggtttgccaacaagcaggacctctccaatgccgtgaatgcagcagggaccacagacaagctgggactgcactccctttgccacatgaactggtacattcaggccacctgtgccaccagtggcgacgggctctatcaaggactgggctggctgtctagtccgctccggaaccagaagtga

SEQ ID NO: 27305 - DNA, 637 bp, Homo sapiens
  SIMILAR (606)..(635): 701254mologous to Arabidopsis thaliana ADP-ribosylation factor,accession number M95166,Smith-Waterman Score=42.
ttcacgtcgtgctaggcaccacggcgaggggcgcgggccggtgtgggccgcagagacgttggatttcggcgggggctggggactggcctcggtgcgacttgaggtgtccctggccagtgtccttccacctgtccacaagcatggggaacatcttcgccaacctcttcaagggcctttttggcaaaaaaagaaatgcgcatcctcatggtgggcctggatgctgcagggaagaccacgatcctctacaagcttaagctgggtgagatcgtgcaccaccattcccaccataggcttcaacgtggaaaccgtggagtacaagaacatcagcttcactgtgtgggacgtgggtggccaggacaagatccggcccctgtggcgccactacttccagaacacacaaggccctgatctttatgggtggacagcaatgacagagagcgtgtgaacgaggcccgtgaggagctcatgaggatgctggccgaggacgaagctccgggatgctgtcctcctggtgttcgccaacaagcaggacctccccaacgccatgaatgcggccgagatcacagacaagctgtggctgcactcctacgccacaggaactggacattcaggccacctgcgccaccaacggcgacgg

SEQ ID NO: 27306 - DNA, 317 bp, Homo sapiens; identical to SEQ ID NO: 16837
  SIMILAR (38)..(148): 351254mologous to Bacteriophage fr lysis protein (AA 1- 71),accession number X15031,Smith-Waterman Score=61.

SEQ ID NO: 27307 - DNA, 560 bp, Homo sapiens; identical to SEQ ID NO: 16838
  SIMILAR (1)..(216): 481254mologous to Drosophila melanogaster BcDNA.LD03471,accession number AF160909,Smith-Waterman Score=189.

SEQ ID NO: 27308 - DNA, 4511 bp, Homo sapiens
  SIMILAR (71)..(3799): 1001254mologous to Homo sapiens plasma membrane calcium ATPase,accession number X63575,Smith-Waterman Score=6384.
agccatcacccggcagcctcttgtccagcgctgacccttgggcccagcccgagcaaggaccgcagcaaacatgggtgacatgaccaacagcgacttttactccaaaaaccaaagaaatgagtcgagccatgggggcgagttcgggtgcacaatggaggagctccgctccctcatggagctgcggggcactgaggctgtggtcaagatcaaggagacttatggggacaccgaagccatctgccggcgcctcaaaacctcacctgttgaaggtttgccgggcaccgctccagacctggaaaagagaaagcaaatttttgggcaaaactttatacctccaaagaagccaaaaaccttcctgcagctcgtgtgggaggcgctgcaggacgtgacgctcatcatcctggagattgccgccatcatctccctggggctgtccttctaccacccgcccggcgagggcaacgaaggatgtgcgacggcccagggtggggcagaggatgaaggagaggcagaggcaggttggatcgagggggccgccattctcctctcagttatctgtgtggtcctggtcacggccttcaatgactggagcaaagagaaacagttccggggcctgcagagccgcatcgagcaggaacagaaatttaccgtggtccgggctggccaggtggtgcagatccctgtggctgagatcgtggttggggacatagcccaggtcaaatatggtgacctcctccctgccgacggcctcttcatccagggcaatgacctcaagattgatgaaagctccctaactggagagtctgaccaggtgcgcaagtccgtggacaaggaccccatgctgctgtcaggaacccacgtgatggagggctcaggacggatgttggtgactgctgtgggtgtgaactctcagactggcatcatctttaccctcctgggggctggtggtgaagaggaagagaagaaagacaaaaaaggtgtgaagaagggggatggccttcagctaccagcagcagacggtgcggcagcttcaaacgctgcagatagtgcgaatgccagcctagtcaatggtaaaatgcaggatggcaatgtggacgccagccagagcaaagccaaacaacaggacggggcagccgccatggagatgcagcccctcaagagtgccgagggcggcgacgctgacgacaggaagaaggccagcatgcacaagaaggagaagtccgtgctgcagggcaagctcaccaagctggctgtgcagatcgggaaggcgggcttggtgatgtcagccatcacggtgatcatcctggtgctctacttcactgtggacaccttcgtggtcaacaagaagccgtggctgcctgagtgcacgcccgtctacgtgcagtactttgtcaagttcttcatcattggcgtgacggtgctggtggtcgccgtgcccgaggggctccctctggccgtcaccatctcgttggcctattcggtgaagaaaatgatgaaggacaacaacctggtacgccacctggatgcctgtgagaccatgggcaatgccacagccatctgctcagacaagacaggcacgctgaccaccaatcgcatgacagtggtacaggcctatgtcggcgacgtccactataaagagatccccgaccccagctccatcaacaccaagaccatggagctgctgatcaatgccatcgccatcaacagcgcctacaccaccaagattctgcccccagagaaggagggcgccctgcctcggcaggtgggcaacaagacggagtgcggcctgctgggcttcgtgctggacctgaagcaggactacgagcccgtgcgcagccagatgccagaggagaagttgtacaaagtgtacaccttcaactccgtgcgcaagtccatgagcactgtcatcaagctgcccgacgagagcttccgcatgtacagcaagggggcttctgagatcgtgctcaagaagtgctgcaaaatcctcaatggggcgggagagcctcgtgtcttccggccccgcgaccgggacgagatggtaaagaaggtgattgagcccatggcttgcgatgggctccgcactatctgcgtggcctaccgcgacttccccagcagcccggagccggactgggacaatgagaatgacatcctcaacgaactcacctgcatctgcgtggtgggcatcgaggacccggtgcggccagaggtcccagaagccatccgcaagtgccagcgggcaggcatcacggtccgcatggtcactggcgacaatatcaacacggctcgggccatcgccatcaagtgtggcatcatccatcctggggaggactttctgtgcctcgagggcaaggagttcaacaggaggatccgcaacgagaagggggagattgagcaggagcgaattgacaagatctggccaaagctgcgggtgctggctcgctcctccccaacggacaagcataccctggttaaaggcatcatcgacagcacacacactgagcagcggcaggtggtggccgtgacgggggacgggaccaacgacgggcctgcactcaagaaggccgacgtgggcttcgccatgggcatcgcaggcactgacgtggccaaggaggcctcagacatcatcctgacagacgacaatttcagcagcatcgtcaaggcagtgatgtggggccgcaacgtctatgacagcatctccaaattcttgcagttccagctcaccgtcaacgtggtggccgtgattgtggccttcacaggcgcctgcatcacgcaggactcccctctgaaggccgtgcagatgctctgggtgaacctcatcatggacacgtttgcctcgctggcactggccactgagccgcccacggagaccctgctgctgaggaagccgtacggccgcaacaagccgctcatctccaggaccatgatgaagaacatcctgggccatgctgtctaccagcttgccctcatcttcaccctgctctttgttggcgagaagatgttccagatcgacagcgggaggaacgcgcccctgcattcgccaccctcagaacattacaccatcatcttcaacaccttcgtcatgatgcagctcttcaacgagatcaacgcccgcaagatccacggcgagcgcaatgtctttgacggcatcttccggaaccccatcttctgcaccatcgtgctgggcacctttgccatccagatagtgatcgtgcagtttggagggaagccattcagctgctctccactgcagctggaccagtggatgtggtgcatattcattgggttaggagagctcgtttggggccaggtcatcgccaccatcccgaccagcagactcaagttcctcaaggaggcaggcaggctcacacagaaggaggagatcccggaggaggagctcaacgaggacgtggaggagatcgaccacgcggagcgggagctgcggcggggccagatcctgtggttccgaggcctgaatcggatccagacacagatccgcgtcgtgaaggcgttccgtagctctctctatgaaggtttagaaaagcctgaatctcgaacctccatccataacttcatggctcatcctgaattccggatcgaagattcccagccccacatccccctcattgatgacaccgacctggaagaagatgccgcgctcaagcagaactcgagcccgccgtcatccctcaacaagaacaacagcgccatcgacagtgggatcaacctgacgaccgacacaagcaaatcagctacctcttcaagtccagggagccccatccacagcctggagacgtcgctttagctgaggaccctctcgcctgcccgcccgccctcatggaccccgctgccacccgctttccgggcacccatccatccaggcacccaactcacccaagcagcaacgagcaacaatcggaaaccaaatactggagagaaaaccaacgtttccacccacagaccctttctctggctgcgatgctgtttgaactctttttcacttcaaggcaaggggcgggatctccactgggggcttacgggagtgagcggttttccaaaacaagcccttcctggctcccacccagacatggaccagccatgcacccgcccagccaccacgtccccgcatgaatgtactgtcacatttcaatcctcccttgtttggtttttgggggttggggaggggtttttgtttgtttgtttgttttcttaggcgggaactgcaaacagactcttttctgagactatttatccaatccactggtctgtgagtttttgaaaatgcttgcacagcatggtctcagttgtatagattaatttaataactttttgaaattgcagagcttaactcgcctagtagatttgcaccaatggaaccgaagaacttcatagacactcacaaggttatatccatttctttgtatctatatcaacgtatacttttccgagactgtatacgtccatatagataggtagatatatatatatatatataaatatatatacatggatat

SEQ ID NO: 27309 - DNA, 2901 bp, Homo sapiens
  SIMILAR (2242)..(2901): 1001254mologous to Homo sapiens plasma membrane calcium ATPase,accession number X63575,Smith-Waterman Score=1107.
atgggtgacatgaccaacagcgacttttactccaaaaaccaaagaaatgagtcgagccatgggggcgagttcgggtgcacaatggaggagctccgctccctcatggagctgcggggcactgaggctgtggtcaagatcaaggagacttatggggacaccgaagccatctgccggcgcctcaaaacctcacctgttgaagccccagtccctggggagaagctgatgggcactgtggcccctctctcagaaaatcagccaaccacacgcaacagcttaaagatggagtgggctgatagatcagacctggtcacatgctcaaccagagggcacgggtcagtccaccaagaccccaaggagattggaagagggaaggaaaatggaggagaggctgtggacctgctgcagaatggaagggagagagcaggcagcaggcaaagaagatgtcagaggtcggaggagagtgtcacatgcaggtacagtgtgatgagagtatctgacactggattggcaggcagttggacagagcagtcgctaggaagtaggacgaaggagaaacggcccacactgaggagggcaggctgttggggtagagtacgaattgagggtggtgggaacagggagacaggcaaggtggctgctgaggccatccaggtgagcaaggatggtggcctggaccagtgtgcagatggcagagggatgtggtcatatctgagatgtttttctcgaattttgctggatggtgtaacagacagtgagcagcctcccaaggcctttgagcaggtgcgtgagagtggacttgcaagtctggaagaattatctggaaatgcagatggtgggtggaagtgggcccttaccactctgtccggtccccacatgatgaggggtgcacctggctacacctcactcccttgtccagaagaggagaaagtaccagtgtcagctgcatgtccaccaggcacgctccgagcacgttgcaaggcatccacggtgagggccactcctaagtgggccctcttctgtctgtgtctgcaacagtgccaggcacttggtaggtgctcaataaatgctcatggaccacatgaatcacctcatgtgatattcacaaccacccatgggttaagtacaatcaccatccgcattacagtagagggtttgccgggcaccgctccagacctggaaaagagaaagcaaatttttgggcaaaactttatacctccaaagaagccaaaaaccttcctgcagctcgtgtgggaggcgctgcaggacgtgacgctcatcatcctggagattgccgccatcatctccctggggctgtccttctaccacccgcccggcgagggcaacgaaggtacccttctctcagccagcttgagggttaaagtggatgctgggtgcacagcaggccttgcagggtatccagtgccccacctggcccccgtggaggggaactgctctgagttttgcaggaaggatgatccgatgctgctggagattcctttccatggaaatggccgctccccaggtcccagaggaaatgaaggcctgggatgtgcgacggcccagggtggggcagaggatgaaggagaggcagaggcaggttggatcgagggggccgccattctcctctcagttatctgtgtggtcctggtcacggccttcaatgactggagcaaagagaaacagttccggggcctgcagagccgcatcgagcaggaacagaaatttaccgtggtccgggctggccaggtggtccagatccctgtggctgagatcgtggttggggacatagcccaggtcaaatatggtgacctcctccctgccgacggcctcttcatccagggcaatgacctcaagattgatgaaagctccctaactggagagtctgaccaggtgcgcaagtccgtggacaaggaccccatgctgctgtcaggaacccacgtgatggagggctcaggacggatgttggtgactgctgtgggtgtgaactctcagactggcatcatctttaccctcctgggggctggtggtgaagaggaagagaagaaagacaaaaaagcagcagacggtgcggcagcttcaaatgctgcagatagtgcgaatgccagcctagtcaatgagggatgcagtcagcacggcccgcccttcatctgtgacattaatgtctgtggcctgttgcgtcttcgtgatgaccgaccatgtgttgtctgttctctgttgtctgttaaaattctttgtcgtgtaggtaaaatgcaggatggcaatgtggacgccagccagagcaaagccaaacaacaggacggggcagccgccatggagatgcagcccctcaagagtgccgagggcggcgacgctgacgacaggaagaaggccagcatgcacaagaaggagaagtccgtgctgcagggcaagctcaccaagctggctgtgcagatcgggaaggcgggcttggtgatgtcagccatcacggtgatcatcctggtgctctacttcactgtggacaccttcgtggtcaacaagaagccgtggctgcctgagtgcacgcccgtctacgtgcagtactttgtcaagttcttcatcattggcgtgacggtgctggtggtcgccgtgcccgaggggctccctctggccgtcaccatctcgttggcctattcggtgaagaaaatgatgaaggacaacaacctggtacgccacctggatgcctgtgagaccatgggcaatgccacagccatctgctcagacaagacaggcacgctgaccaccaatcgcatgacagtggtacaggcctatgtcggcgacgtccactataaagagatccccgaccccagctccatcaacaccaagaccatggagctgctgatcaatgccatcgccatcaacagcgcctacaccaccaagattctg

SEQ ID NO: 27310 - DNA, 1320 bp, Homo sapiens
  SIMILAR (799)..(1221): 951254mologous to Homo sapiens plasma membrane calcium ATPase,accession number X63575,Smith-Waterman Score=661.
atgggtgacatgaccaacagcgacttttactccaaaaaccaaagaaatgagtcgagccatgggggcgagttcgggtgcacaatggaggagctccgctccctcatggagctgcggggcactgaggctgtggtcaagatcaaggagacttatggggacaccgaagccatctgccggcgcctcaaaacctcacctgttgaagccccagtccctggggagaagctgatgggcactgtggcccctctctcagaaaatcagccaaccacacgcaacagcttaaagatggagtgggctgatagatcagacctggtcacatgctcaaccagagggcacgggtcagtccaccaagaccccaaggagattggaagagggaaggaaaatggaggagaggctgtggacctgctgcagaatggaagaagaggagaaagtaccagtgtcagctgcatgtccaccaggcacgctccgagcacgttgcaaggcatccacggtttgccgggcaccgctccagacctggaaaagagaaagcaaatttttgggcaaaactttatacctccaaagaagccaaaaaccttcctgcagctcgtgtgggaggcgctgcaggacgtgacgctcatcatcctggagattgccgccatcatctccctggggctgtccttctaccacccgcccggcgagggcaacgaaggccttgcagggtatccagtgccccacctggcccccgtggaggggaactgctctgagttttgcaggaaggatgatccgatgctgctggagattcctttccatggaaatggccgctccccaggtcccagaggaaatgaaggcctgggatgtgcgacggcccagggtggggcagaggatgaaggagaggcagaggcaggttggatcgagggggccgccattctcctctcagttatctgtgtggtcctggtcacggccttcaatgactggagcaaagagaaacagttccggggcctgcagagccgcatcgagcaggaacagaaatttaccgtggtccgggctggccaggtggtccagatccctgtggctgagatcgtggttggggacatagcccaggtcaaatatggtgacctcctccctgccgacggcctcttcatccagggcaatgacctcaagattgatgaaagctccctaactggagagtctgaccaggtgcgcaagtccgtggacaaggaccccatgctgctgtcaggctcccaactctggtttaggttcatccacagcccctcagccccctggctctctagccttacatcctccttcagtgaccacagagtgaagctgacagtgactgccatttag

SEQ ID NO: 27311 - DNA, 3258 bp, Homo sapiens; identical to SEQ ID NO: 8318
  SIMILAR (1)..(891): 991254mologous to Cloning vector pZC320 SopA,accession number U26464,Smith-Waterman Score=1551.

SEQ ID NO: 27312 - DNA, 566 bp, Homo sapiens
  SIMILAR (105)..(1): 1001254mologous to Homo sapiens Human secreted protein, SEQ ID NO: 5727,accession number G01646,Smith-Waterman Score=183.
ggacctgtctgatgagcaggttgccaggcgggtgccatagtagtccatctgggcgtcgtgaatcatgtcctcatgggaggtatccacagtgttaattactgacaccttcttcacaaggctgttagcaggcggagattacgaacaatgctgagggctcggtatacagtagctcctctgctgttcctcgttttgttttcaattgttgcccgaaaagaaggaagggagactggcaggagacgcaggagcggcgcgccccgcaaagtcagggaggttcctcggcctcacctctggactcccctcggaatggtccgcaaggacggggccagagccccccaaatctttaagcggtggaggggagctgaacggctccagcttgggatttgggactcaggacggccgaggaacccgtgaaggccgcgaccgtggccttcaccctgctaggcctcctcagtaccaacactcaccatgattgcggcggtagctgaacaggtctcggacgtggcagctcccggcggcacgaaatcgtcgaccgggaattcgggcggtcgtcatggtacaaatatacg

SEQ ID NO: 27313 - DNA, 4979 bp, Homo sapiens
  SIMILAR (577)..(4170): 1001254mologous to Homo sapiens plasma membrane calcium ATPase isoform 2,accession number L20977,Smith-Waterman Score=6161.
gggcagccgcggcagaggagccgcagccgcagcggggccgggccgggccgggcgcgcaccagcggcagcggcagcggcagcggcggcggcagcatctcgctctcggagccggcgcaggtttccctgtacttagagcgtggactgtgaacccccaagcagacgagctgaacttcgtcacccagtccctagagccagcaagacatgggccccagtttccagaccctgacacctctcatttaaccagaagacgtggaggggagccaccacccctgaccatgtagatgccagttccagggagcagcatgggccccactgaatggagactcctgggtctacagccctgagcccctccggcccctggacctcgtcccacaccggaggacacctcttggagctcaccaccactgtcaccagcccgcctcggccacccccaccccccgggacccggagtcggccgcctggtgccacagctgaccagtgagggtgtgctgaggacagccacaagcagccatcacccggcagcctcttgtccagcgctgacccttgggcccagcccgagcaaggaccgcagcaaacatgggtgacatgaccaacagcgacttttactccaaaaaccaaagaaatgagtcgagccatgggggcgagttcgggtgcacaatggaggagctccgctccctcatggagctgcggggcactgaggctgtggtcaagatcaaggagacttatggggacaccgaagccatctgccggcgcctcaaaacctcacctgttgaaggtttgccgggcaccgctccagacctggaaaagagaaagcaaatttttgggcaaaactttatacctccaaagaagccaaaaaccttcctgcagctcgtgtgggaggcgctgcaggacgtgacgctcatcatcctggagattgccgccatcatctccctggggctgtccttctaccaccgccccggcgagggcaacgaaggatgtgcgacggcccagggtggggcagaggatgaaggagaggcagaggcaggttggatcgagggggccgccattctcctctcagttatctgtgtggtcctggtcacggccttcaatgactggagcaaagagaaacagttccggggcctgcagagccgcatcgagcaggaacagaaatttaccgtggtccgggctggccaggtggtccagatccctgtggctgagatcgtggttggggacatagcccaggtcaaatatggtgacctcctccctgccgacggactcttcatccagggcaatgacctcaagattgatgaaagctccctaactggagagtctgaccaggtgcgcaagtccgtggacaaggaccccatgctgctgtcaggaacccacgtgatggagggctcaggacggatgttggtgactgctgtgggtgtgaactctcagactggcatcatctttaccctcctgggggctggtggtgaagaggaagagaagaaagacaaaaaagccaaacagcaggacggggcagccgccatggagatgcagcccctcaagagtgccgagggcggcgacgctgacgacaggaagaaggccagcatgcacaagaaggagaagtccgtgctgcagggcaagctcaccaagctggctgtgcagatcgggaaggcgggcttggtgatgtcagccatcacggtgatcatcctggtgctctacttcactgtggacaccttcgtggtcaacaagaagccgtggctgcctgagtgcacgcccgtctacgtgcagtactttgtcaagttcttcatcattggcgtgacggtgctggtggtcgccgtgcccgaggggctccctctggccgtcaccatctcgttggcctattcggtgaagaaaatgatgaaggacaacaacctggtacgccacctggatgcctgtgagaccatgggcaatgccacagccatctgctcagacaagacaggcacgctgaccaccaatcgcatgacagtggtacaggcctatgtcgacgacgtccactataaagagatccccgaccccagctccatcaacaccaagactatggagctgctgatcaatgccatcgccatcaacagcgcctacaccaccaagattctgcccccagagaaggagggcgccctgcctcggcaggtgggcaacaagacggagtgcggcctgctgggcttcgtgctggacctgaagcaggactacgagcccgtgcgcagccagatgccagaggagaagttgtacaaagtgtacaccttcaactccgtgcgcaagtccatgagcactgtcatcaagctgcccgacgagagcttccgcatgtacagcaagggggcttctgagatcgtgctcaagaagtgctgcaaaatcctcaatggggcgggagagcctcgtgtcttccggccccgcgaccgggacgagatggtaaagaaggtgattgagcccatggcttgcgatgggctccgcactatctgcgtggcctaccgcgacttccccagcagcccggagccggactgggacaatgagaatgacatcctcaacgaactcacctgcatctgcgtggtgggcatcgaggacccggtgcggccagaggtcccagaagccatccgcaagtgccagcgggcaggcatcacggtccgcatggtcactggcgacaatatcaacacggctcgggccatcgccatcaagtgtggcatcatccatcctggggaggactttctgtgcctcgagggcaaggagttcaacaggaggatccgcaacgagaagggggagattgagcaggagcgaattgacaagatctggccaaagctgcgggtgctggctcgctcctccccaacggacaagcataccctggttaaaggcatcatcgacagcacacacactgagcagcggcaggtggtggccgtgacgggggacgggaccaacgacgggcctgcactcaagaaggccgacgtgggcttcgccatgggcatcgcaggcactgacgtggccaaggaggcctcagacatcatcctgacagacgacaatttcagcagcatcgtcaaggcagtgatgtggggccgcaacgtctatgacagcatctccaaattcttgcagttccagctcaccgtcaacgtggtggccgtgattgtggccttcacaggcgcctgcatcacgcaggactcccctctgaaggccgtgcagatgctctgggtgaacctcatcatggacacgtttgcctcgctggcactggccactgagccgcccacggagaccctgctgctgaggaagccgtacggccgcaacaagccgctcatctccaggaccatgatgaagaacatcctgggccatgctgtctaccagcttgccctcatcttcaccctgctctttgttggcgagaagatgttccagatcgacagcgggaggaacgcgcccctgcattcgccaccctcagaacattacaccatcatcttcaacaccttcgtcatgatgcagctcttcaacgagatcaacgcccgcaagatccacggcgagcgcaatgtctttgacggcatcttccggaaccccatcttctgcaccatcgtgctgggcacctttgccatccagatagtgatcgtgcagtttggagggaagccattcagctgctctccactgcagctggaccagtggatgtggtgcatattcattgggttaggagagctcgtttggggccaggtcatcgccaccatcccgaccagcagactcaagttcctcaaggaggcaggcaggctcacacagaaggaggagatcccggaggaggagctcaacgaggacgtggaggagatcgaccacgcagagcgggagctgcggcggggccagatcctgtggttccgaggcctgaatcggatccagacacagatccgcgtcgtgaaggcgttccgtagctctctctatgaaggtttagaaaagcctgaatctcgaacctccatccataacttcatggctcatcctgaattccggatcgaagattcccagccccacatccccctcattgatgacaccgacctggaagaagatgccgcgctcaagcagaactcgagcccgccgtcatccctcaacaagaacaacagcgccatcgacagtgggatcaacctgacgaccgacacaagcaaatcagctacctcttcaagtccagggagccccatccacagcctggagacgtcgctttagctgaggaccctgtcgcctgcccgcccgccctcatggaccccgctgtcacccgctttccgggcacccatccatccaggcacccaactcacccaagcagcaacgagcaacaatcggaaaccaaatactggagagaaaaccaacgtttccacccacagaccctttctctggctgcgatgctgtttgaactctttttcacttcaaggcaaggggcgggatctccactgggggcttacgggagtgagcggttttcccaaaacaagcccttcctggctcccacccagacatggaccagccatgcacccgcccagtcaccacgtcccccgcatgaatgtactgtacactttcaatcctccccttgtttggtttttgggggttggggaggggtttttgtttgtttgtttgttttcttaggcgggaactgcaaacagactcttttctgagactatttatccaatccactggtctgtgagtttttgaaacgcttgcacagcatggtctcagttgtatagattaatttaataactttttgaaattgcagagcttaactcgcctagtagatttgcaccaatggaaccgaagaacttcatagacactcacaaggttatatccatttctttgtatctatatcaacgtatacttttccgagactgtatacgtccatatagataggtagatatatatatatatatataaatatatatacatggatatataaagtttctttgccggcatgttgccttgtttccgcttaaattgctctattttaacttatttatgtcctaaaagaagaatgtaatttgtttaca

SEQ ID NO: 27314 - DNA, 3085 bp, Homo sapiens
  SIMILAR (171)..(587): 961254mologous to Homo sapiens Ca2+-ATPase,accession number M97260,Smith-Waterman Score=660.
gtacccttctctcagccagcttgagggttaaagtggatgctgggtgcacagcaggccttgcagggtatccagtgccccacctggcccccgtggaggggaactgctctgagttttgcaggaaggatgatccgatgctgctggagattcctttccatggaaatggccgctccccaggtcccagaggaaatgaaggcctgggatgtgcgacggcccagggtggggcagaggatgaaggagaggcagaggcaggttggatcgagggggccgccattctcctctcagttatctgtgtggtcctggtcacggccttcaatgactggagcaaagagaaacagttccggggcctgcagagccgcatcgagcaggaacagaaatttaccgtggtccgggctggccaggtggtccagatccctgtggctgagatcgtggttggggacatagcccaggtcaaatatggtgacctcctccctgccgacggcctcttcatccagggcaatgacctcaagattgatgaaagctccctaactggagagtctgaccaggtgcgcaagtccgtggacaaggaccccatgctgctgtcagggtcggacaggcagacacgagcccatgtctggtgtatcttcaaacgggacagagtaaaaatattcagaaattgcaaactcatatgtctgcagggccagattggctgcaatgccgtcagctgggcccctgctgttgtacctggaagcctcatagaccacccatcggggcagaaccccaaaatacatcaagaggtttgcatcaggtggctgtgccaaacccttcaatcagctgtgaagaaggagaaggacggcccagtgaaagaaggagcagaagctaagaagccgcacagtggactgggttcgagatgtggcctgggcccccttcaatcggccctggccaccaagccacaattcgccagctgctcccaggatggtcgtgtgttccatttggaccctgtgatgatgccctcaagcaattaccgtggtccccctaaattgtttgcacaagttcaacgatgtggtgttgggcatgttgaactggggtccatcacagccaacatccctggctgtctctggtggagacaataaggaggagttacagatgcagcccacagattgatcatctgccttaacgtgatcggagatgctttgtaatctactgtccagctgaaagcactcatgttacgaggaagaaactacaagtgatgttcaaatctattttgggtcatttttatgtacctttgggttcaggcattatttggggggttttgtttccaaaggaactaaataaagtcatattgcttataaaaaaatgacccaaaatagatttgaacatcacttgtagtttcttcctcgtaacatgagctgtttccagctcggacagtagattacaaagcatctcagatcacagttaagggcagatggatcaatctgtgggctgcatctgtaactccctcctggggaaaataatccctgttgggagttggggggctcttcccaagttgtctggttaagttgggcccggggaaggggcaggtcctgggagctgggcgggtgggggagccagggccccaccctggtctttgttcacttgctcgtttcttgctgggccctctgttcacttgatgcttgatacgggagccctgggcccctttgtttgacatcactggatggcacaacccacttggcccatcaacttgactccttccacaggggtatctttattgtctccaccagagaacagccaggatgttggctgtgatggaccagctcacatgccacaccacatcgttgaacttgtgcaacaatttaaggggaccacgtattgcttgaggcatcatcacaggtcccaaatgaacacacgacccatcctgggagcagctgggcgatggtgctggtgggcaggcccgatggagggggcccaggccacatctcgaaacccagtcactgtggcgcttctagcttctgctcctccttccactggccgtcctcctcctccttccacagcttgaatgaggttgtccacagccacctgatgcaaacctcttgatgtaattgggtttctgaccccgatgggtggtctatgaggcttccaggtacaacagcaggggcccagctgacggcattgcagccaatggtgtgagcgttgttgatcttctttacttccccattggccttcccccggtgtaaagtccagccagggaagatggcccccatccgagactacccaacaggcccaggaatcaggaccgtaagtccatggggggcccagcaacacccgaagttcaacttgaggagtcgtgtccccgcattgctcgtggctcttctccccagggtgcccgttttccctctctcccaagaataaatgaactttccggtcaataaggaagcaacgaatgcccaggatgttgcccgtaacaatggggtgaacccccagccaacttgccacacaggacccctccatgacccctgaaggtcggcgaataaggatctgccctcccattgcgcacatcaaaagattttgacggacctgtctgatgaagcaggttgcccaggcgggtgcccatagtagtccatctgggcgtcaataaatcatgtactcatgggagcgcatccacagtgttaattactgacaccttctttctgccaagcactgtgctaggaactggatatacagacacaaataagaggaactttttgcccttgagaagctcgcgaataatgctagtgtcgcaagataaattatttaatggtggtttgtgtgtcctgtaggagcctgaggggctggggtggtagacacgaattgagccccaccagtcagggttgatgaaccacacttctctgggcatgctgaaccagatctcttcagtgaggttgatacagagggaatatgaaatggccgtcatttgtgtgtgtagtaaggctccattcaagcaagccgagccgttgttcccttccctcgtgtctgtggggtgctttgtgtgcccgcgtctgcacactgactcagccacatcctcgggcacgcatgcatgcactgacagcctctcacaggcactaaggcccat

SEQ ID NO: 27315 - DNA, 1497 bp, Homo sapiens
  SIMILAR (430)..(870): 821254mologous to Homo sapiens sin3 associated polypeptide p18,accession number U96915,Smith-Waterman Score=631.
tcagatgcaaatcagtagaaagcctccatatttcagctcagacaagtagatgatccgtgagcctctaagactgggcatgcacagaagcagagaacccataaagcgatgtaggtgcattgccacagtttctcctgcccagtccctggctcttttgacctcagtgtgcaccagccactttccaactgccagtatctccatttctttgaccaagacctttttcagaagctgctgcgagatacattctgcccatacacctgctgcttgttgcaaggaacctggaaatttacgcatcttaagaggttgagaatgacgctgaatctgatgcctgtaccatggtaactgtgtagtgggagatgggaaatagccagatctttcagggagtattggctcctgaatataaatgaacacgatgcagaatgtcactgtgatgtatctggcagaatccgggaggagattaagacggagccagagaacccgatcaaccgtgagaaaacatgcctgctgctgctgcgcatcttcaccaccaataatggccaccaccaccgaacggacgagttttcccggggaaacgtacagtccagagagttgcagatctacgcttggatggatgcaaccttgaaagaactgacaagcttggtaaaagaagtctacccagaagctagaaagaagggcactctcttcaattttgcagtcgtttttacagatgttaaaagacctggctatcgagttaaggaagttggtagcaccaagtctggcagaaaggggactgatgattccatgaccctgccgtcgcagaagttccaggtagattacttggacatagcaattacccctccgcatcgggcaccacctcctgggtatgagagacctggcctgtgtataggccaatttctgttgattagtactaaaggctgctcctacgtgcacaggcagaacaggctctacaatgagatgcaggtgctggcagttgaaagtctgtctagcatacaccagggtactttgatacaaaggttgtactctcaatgccttgggtagctccctcatgggctggcgttgagtgtctgcagcttttccaggtgcaaggtgcaagctgtcggtagatctacatttctggagaagctccactaggcagtaccccagtgggaattctgtgagggagctccaaccccacatttcccttccatactgccctagcagaggttttccatgagggctccacccctgcagcagacttaggcctggacatccaggcatttccatacgtccgccgaaatctaggtagaggtttccaagctcaattcttgtcttctgtgcaactaactgcaggcccaacaccacgtggaagctgccaaggcttgcagcttgaaccctctgaagcaatggcccaagctgtaccttgaccctgttctcatggtagtgaataagtctcatgagatctgatggtttatcaggggtttctgcttttgcatcttcctgattttctcttgctgctgtcat

SEQ ID NO: 27316 - DNA, 781 bp, Homo sapiens
  SIMILAR (143)..(778): 1001254mologous to Homo sapiens KDEL receptor,accession number X55885,Smith-Waterman Score=1106.
agacacagactgcctgggcgaaccggtgctggatttggcactttccgaaccctgcgaccctcccaagttcctatggggcagctttgggggtgcgtttagcgccgccacggcaaagcaggagccctgccagggttccccagccatgaatctcttccgattcctgggagacctctcccacctcctcgccatcatcttgctactgctcaaaatctggaagtcccgctcgtgcgccggaatttcagggaagagccaggtcctgtttgctgtggtgttcactgcccgatatctggacctcttcaccaactacatctcactctacaacacgtgtatgaaggtggtctacatagcctgctccttcaccacggtctggttgatttatagcaagttcaaagctacttacgatgggaaccatgacacgttcagagtggagttcctggtcgttcccacagccattctggcgttcctggtcaatcatgacttcacccctctggagatcctctggaccttctccatctacctggagtcagtggccatcttgccgcagctgttcatggtgagcaagaccggcgaggcggagaccatcaccagccactacttgtttgcgctaggcgtttaccgcacgctctatctcttcaactggatctggcgctaccatttcgagggcttcttcgacctcatcgccattgtggcaggcctggtccagacagtcctctactgcgatttcttctacctctatatcaccaaagtcctaaaggggaagaagttgagtttgccggcatag

SEQ ID NO: 27317 - DNA, 281 bp, Homo sapiens
  SIMILAR (7)..(33): 881254mologous to Homo sapiens calbindin D28K,accession number S46006,Smith-Waterman Score=40.
atgcgcatgaaatttggtgctgtgactcggatcggggggacctcccttgggagatcaatcccctgtcctcctgctctttgctccgtgaaaaagatccacctacgacctcgggtcctcagacccaccagcccaaggaacatctcaccaattttaaatcagcacgcttcaaaaggattaaagcctgctattactcgcctgctacagcatggccttttaaagcctataaactccccttacaattcccccattttacctgtcctaaaaccagacaaggcttacag

SEQ ID NO: 27318 - DNA, 801 bp, Homo sapiens
  SIMILAR (600)..(286): 891254mologous to Homo sapiens Human secreted protein encoded by gene 40 clone HNEDJ57,accession number W75096,Smith-Waterman Score=472.
tcaagcccaggctaactttgaactgtgttcaagggaaacggggctgcattcattcttaatgttgataatgttctgaagcagatcagcactgctctcctgtttgggttcattgagatgaacatcttccatgctctccccgggcgttggtgtttgaggtggtgtcaaaaattgggaatgcaacagagctggccttttgcaagcaggtccatcagacaacgaatcgggccctttccttttcccactgtatgatactgtgttcttcaattctctgaactgttctatgttcacaccttgtgtctgttctcccacagggccatcgggaaccaaatgcactggctgttcgttctccaagttccgagtacttgggtctgctcccttcctcatcaacaggcggacagcatctaattgtgtcaaccgatactgcaagctggcagcaacatggagggcagtgttgccattgtaagcctttgcattcacaaaagacaggcaactgggcagctccaaaaagaggcgaatgagttccagatttgcttcttcagctgccaaatgcagggctgtgcggccacttttgcgatccaggagattccctccagtgcctatgccaccagggccctgggtttcaagcacaaaactgggcagccgtttgggcagacaccaagccagctgcaggggctgaagccagagagccaggtgatctggcttgactggtcccacccacatggagcccaacaaggtaagatccactggcttgaaattcttgctaccagcacagcagtcataatgtcttcccatttcatccat

SEQ ID NO: 27319 - DNA, 915 bp, Homo sapiens; identical to SEQ ID NO: 19777
  SIMILAR (609)..(794): 301254mologous to Homo sapiens lipase related protein 2,accession number M93284,Smith-Waterman Score=42.

SEQ ID NO: 27320 - DNA, 1071 bp, Homo sapiens
  SIMILAR (409)..(1068): 861254mologous to Homo sapiens reverse transcriptase homolog= pol {retroviral element},accession number S61070,Smith-Waterman Score=946.
atgttgctcacacaaagcctgtttggtggtctcttcacacggatgcgagtgaaatttggtgctgtgactcagatcaggggacctcccttgggagatcaatcccctgtcctcctgttctttgctcggggaggggcaagtaccctaaccccatatatctctgtgccccgatcccttatttctgtgccccaacctcttatatctctgtgccccaatcccttatttctatgccccgacctcgtatctctgtgccccgacccctttcccacttttctggaggcctcccacattattctggataccacacctgaccctcatgattgcatctctctgatccacctgacgttcaccccatttccccacatttccttcttccctgtttctcaccctgatcacacttggtttattgatggcagttccaccaggcctaattgccactcaccagcaaaggcaggctatgctatagtatcttccacatctatcattgaggctaccactctgcccccctccactacctctcagcaagccaaactagttgccttaactcaagccctcactcttgcaaaaggactacgcgtcaatatctatactgattctaaatatgcctttcatattctgcaccaccatgcggtcatatgggctgaaagaggttttctcactacacaagggtcctccatcatgaatgcctctttaataataactctactcaaggccgctttacttccaaaggaagctggggtcattcactgtaaggggcatcaaaaggcatcagatcccattgctctaggcaacgcttgtgctgataaggtggctagacaagcagctagctctccaacttctgtccctcacggccagtttttctccttcacatcggtcactcccacctactcccctgctgaaacttccacctatcagtctcttctcacacaaggcaaatggttcttagaccaaggaaaacatatccttccagcctcacaggcccattctattctgtcgtcatttcataacctcttccatgtaggttacaagccgctagcccgtctcttagaacctctcatttcctttccatcatag

SEQ ID NO: 27321 - DNA, 1650 bp, Homo sapiens
  SIMILAR (1255)..(1425): 771254mologous to Homo sapiens Human secreted protein, SEQ ID NO: 5210,accession number G01129,Smith-Waterman Score=237.
atgtggcccacacttctcatcatgaatgggtcttctctggaccatcaagccatgaagcaggaggagcatagcaagactggatccaatcttacagcacaaataagactgcaggatgtcaaggatcaatggacaagaaataaagtagggtatagagtgatggattctgctatggagtatgccagagagacagcttcagacatcaatgaggacttgcgagactcatgtgatcatgagactcacccagagtcttggttaaatgcacagatcagcaggccccaccccaaactttctgactcagaattacaagatgagcagcccagggtggcaagccgattttcatcagacatttatgaggagatcattttctctgaccacttcattcccaaggccagggctgatgggagcagccccaggaaggtacagtgcttggctaagatctcagagccaccaggtggggaagcacaaaagcagaccccagcagtatggcatgagagccagtgctcttccctgcactgcacaggctggagagaaacaggaggaggaaggaggattccgggtagtcatactgatatgatattgagcaacataccatctgcagcaacaacaggggcaaggggaatgggtgcccatgcctcctttgacctttccatgagccctgtcttccagctgtcacacacccacagcaataaacagggtgctccaaaaagagatgccctgcccagagagaaggaatctaaagaggcagtctggctacaaaggctttgccgagctgtggtgggctctgcccagttcaaacttcctggcagctttgtttacactgtgaggggaaaaccacatacacaagcctcagtaatggcagacactcctcccccgaccaagctggagcatcccaggggagtaaatggttctgtctcactggcgttccaggtgccactggggtatgagaaaaaattcctgcagctagcttggtgtctgcccaaatggctgcgcagttttgtgcttgaaacccagggccctagtggtataggcactaagggaatctcctggtctgcaggttgtgaagaccacgggaaaagtgtagtatctaggctagatagcaccatccctcatagcacagtttctcatggcttcccttggctaggggaggtagttccccgaccccttgtgcttcccaggactcagcccacctgcacccaggtgattaaaagctttattgcaccaaacacaaagcctgtttggtggtctcttcacacggacgcaagtgaaatttggtgccgtgattcggatcaggggacctcccttgggaaatcaatcccctgtcctcctgctctttgttccatgaaaaagatccacctacgacctcgggtcctcagacccaccagtccaaggaacatctcaccaattttaaatcggatcagctgcttccaccctgactcaagtacacaacatccacccactaattctgtctccatttctgagagaaagaatctaattggcttagcccagcccatgcatttgctagtccagggtcaggtgccctgttccaatgggctgaggacacctggctgtccaggcccacactttgctggggctcaggtggaaggcagtttcagaggagatggcatggactggacttgtacttccaactga

SEQ ID NO: 27322 - DNA, 708 bp, Homo sapiens
  SIMILAR (145)..(300): 861254mologous to Homo sapiens Human secreted protein, SEQ ID NO: 5210,accession number G01129,Smith-Waterman Score=241.
atggggtttcgccatgttgcccaggctggtctctttctcttgggctcaagtgatctgcctgccgtggccccccaagtgctgggattgcaggtgataaaaagctttattgctcacacaaagcctgtttggtggtctcttcacacggacgcgcatgaaatttggtgccgtgactcagatcgggggacctcccttgggagatcaatcccctgtcctcctgctctttgctccgtgaaaaagatccacctacgacctcaggtcctcagacccaccagcccaaggaacatctcaccaattttaaatcgggtttcagaggtgtcagaccacgcagggacgcctgccttggtccttcacccttagcggcaagtcccgcttttctggggaaggggcaagtaccccaaccccttctctctgtgtctctaccccttctccgcctttctggggggcaagaaacacccaaccccttctccttcaccctgagtggcaagtccgcttttctagaggagcaagtaccccaacctcgtatctctgtgccccagtcccttatttccacgccccgacctcttatctctgtggcccaatcccttatttctgcaccccaacctcttatatctctgtgccccaatcccttatttccatgccccgacctcttatctctgcaccccaaccccttatttccacgacccaacccctttcccgcttttctggaag

SEQ ID NO: 27323 - DNA, 273 bp, Homo sapiens; identical to SEQ ID NO: 3385
  SIMILAR (1)..(270): 901254mologous to Homo sapiens high mobility group protein 14,accession number J02621,Smith-Waterman Score=421.

SEQ ID NO: 27324 - DNA, 591 bp, Homo sapiens
  SIMILAR (313)..(588): 861254mologous to Homo sapiens high mobility group protein 14,accession number J02621,Smith-Waterman Score=380.
gtcaaagaatcaatggagacacactttggcagccatggccgaagggccatactctacaggcctcctttctacagcaaaacagagcttcagctacaccagcacattctgactcaacatggctatacggttgtcatcgctgaagaaaggctcaatgctggcctagggccggggctactagaacaaggtgatctgggctcttgggatctgctcatttgcctgtcttctaagaaagcagaaggaacaccctgtatatccaaggaagtcatgtgccagttaggtttacatcaaaaggatgcccaagaagaaggtcatgaagggaccatcaaggaagagcccaagaggagattggcgcagttgtcagctaaacctgctcctgcaaaagtggaagcgaagctgaaaaaggcagcagcgaaggataaatcttcaggcaaaaatgtgcaaacaaaagggaaaaggagagcaaagggaaaacaggccaaagtggcaaaccaagaaactaaagaagatttacctgcagaaaacggggaaatgaaaactgaggagagtccagcctctgatgaagcaggagagaaagaaaccaagtctgattaa

SEQ ID NO: 27325 - DNA, 1096 bp, Homo sapiens
  SIMILAR (3)..(86): 721254mologous to Gallus gallus HMG-14 protein,accession number M26675,Smith-Waterman Score=86.
  misc_feature (1)...(1096): n = a,t,c or g
aggaagagcccaagaggagatcggcgcggttgtcagctaaacctcctgcaaaagtggaagcgacccgagcaaaggcagcagcgaagtttagkgtgagaagtttgagcactcacagttcatacagaagaggacaagattaattcccctgacattagaggagttgttggataatcactaaatttgctccttgttaaataaagattcttcaaacacctaaatgaaagtgataaattcaaaactgatccttttagttcctcattatatgatatgaagggattaactgtagcaggatagtcaacctgacccgtacggcatggtgctttttttcaggataaatcttcagacaaaaaaagtgcaaacaaaagggaaaaggggagcaaagggaaaacaggcccgaagtggctaacccaagaaactaaagaagatttacctgtagattacaggggaaacgaagacttgaggagagtccaagcctcttgattgaagcaggagagaaagaagccaagtcttgatttaattaaccattttaccatgcttatcagtgggtccctgtctcccttcttgtacaattccagaggaatatttttatcaactattttgtaaatgcaagttttttaggtagctctagaaacatttttaaagaaggagggaatcccacctccatcccattttttaagtggtaaatgcttttttttaagaaggtgaaatcatttgcctggttgtttattttttgggtaccanccagagaatagtgtggggatattgaattatgggaggctctgactgtctccgggtgtccagcttaaccattcccacagatgggggggttagtttttataatcctataatacaaagcatatttaaatgggccatatggagtcagtcctgcatttaatgtcttgaacattttaaattncttctattagccatgttgttttttagtagaattgtttcctaaagaaaaccactctttgatcatggctctctctgccagaattgtgtgcactctgtaacatctttggttgtggaagtccggtttccnaatagccttgntacngtgctgtgaaagatnncngnttgaactgtaggtgacgtg

SEQ ID NO: 27326 - DNA, 438 bp, Homo sapiens
  SIMILAR (136)..(435): 981254mologous to Homo sapiens high mobility group protein 14,accession number J02621,Smith-Waterman Score=483.
atgaagccgcggaccttcgcgctcagcagctcgggcggcgggaggagcggcagcggcaaggcagcccagtttcgcgaaggctctcggcgcgccgcggcccgcaggcacccggcacgcgccttccccgccgccaggatgcccaagaggaaggtcagctccgccgaaggcgccgccaaggaagagtccaagaggagatcggcgcggttgtcagctaaacctcctgcaaaagtggaagcgaagccgaaaaaggcagcagcgaaggataaatcttcagacaaaaaagcgcaaacaaaagggaaaaggggagcaaagggaaaacaggccgaagtggctaaccaagaaactaaagaagatttacctgcagaaaacggggaaacgaaaactgaggagagtccagcctctgatgaagcaggagagaaagaagccaagtctgattaa

SEQ ID NO: 27327 - DNA, 391 bp, Homo sapiens
  SIMILAR (3)..(269): 1001254mologous to Homo sapiens acidic ribosomal phosphoprotein (P2),accession number M17887,Smith-Waterman Score= 438.
  misc_feature (1)...(391): n = a,t,c or g
tcttggacagcgtgggtatcgaggcggacgacgaccggctcaacaaggttatcagtgagctgaatggaaaaaacattgaagacgtcattgcccagggtattggcaagcttgccagtgtacctgctggtggggctgtagccgtctctgctgccccaggctctgcagcccctgctgctggttctgcccctgctgcagcagaggagaagaaagatgagaagaaggaggagtctgaagagtcagatgatgacatgggatttggcctttttgattaaattcctgctcccctgcaaataaagcctttttacacatctctcnnnnnnnnnnnnnnnnnnnnnnnnnnnnnnnnnnnnnnnnnnnnnnnnnngggggggggcctcttttaaaaaaattt

SEQ ID NO: 27328 - DNA, 477 bp, Homo sapiens
  SIMILAR (9)..(290): 981254mologous to Homo sapiens acidic ribosomal phosphoprotein (P2),accession number M17887,Smith-Waterman Score= 457.
  misc_feature (1)...(477): n = a,t,c or g
atccctaggacatcaagaacatcttggacagcgtgggtatcgaggcggacgacgaccggctcaacaaggttatcagtgagctgaatggaaaaaacattgaagacgtcattgcccagggtattggcaagcttgccagtgtacctgctggtggggctgtagccgtctctgctgccccaggctctgcagcccctgctgctggttctgcccctgctgcagcagaggagaagaaagatgagaagaaggaggagtctgaagagtcagatgatgacatgggatttggcctttttgattaaattcctgctcccctgcaaataaagcctttttacacatcnnnnnnnnnnnnnnnnnnnnnnnnnnnnnnnnnnnnnnnnnnnnnnnnnnnnnnnngggggcccctttaaaaaaaaaggcccccaaaaaaccccggggacccccctttgtggtttttttaaagccccccctttttgtttcccccct
